United States Patent Application Publication US 2005/0244851 A1 - sequence listing, part 115

SEQ ID NO: 4485870 - DNA, 25 bp, Homo sapien
caggagcctctggtgcagtattagg

SEQ ID NO: 4485871 - DNA, 25 bp, Homo sapien
gagcctctggtgcagtattaggcac

SEQ ID NO: 4485872 - DNA, 25 bp, Homo sapien
cccacctcggtgacactcgggaagg

SEQ ID NO: 4485873 - DNA, 25 bp, Homo sapien
ctccagtccatgccgactgcctgct

SEQ ID NO: 4485874 - DNA, 25 bp, Homo sapien
tctccagtccatgccgactgcctgc

SEQ ID NO: 4485875 - DNA, 25 bp, Homo sapien
ttctccagtccatgccgactgcctg

SEQ ID NO: 4485876 - DNA, 25 bp, Homo sapien
gcatgagttaggtccagggctgcac

SEQ ID NO: 4485877 - DNA, 25 bp, Homo sapien
taagatcatgggcagtacacgcatg

SEQ ID NO: 4485878 - DNA, 25 bp, Homo sapien
ccgctgatgggcgttgtaagatcat

SEQ ID NO: 4485879 - DNA, 25 bp, Homo sapien
gccagacaccctggagaaccggctt

SEQ ID NO: 4485880 - DNA, 25 bp, Homo sapien
tgcatagtggaaatgaaacgcagag

SEQ ID NO: 4485881 - DNA, 25 bp, Homo sapien
cgcagagtatgattaaatgcttcaa

SEQ ID NO: 4485882 - DNA, 25 bp, Homo sapien
caatggagaacgatatagcgaagag

SEQ ID NO: 4485883 - DNA, 25 bp, Homo sapien
aaccacaatggagaacgatatagcg

SEQ ID NO: 4485884 - DNA, 25 bp, Homo sapien
cttgttccgtctgcgcctttcgatt

SEQ ID NO: 4485885 - DNA, 25 bp, Homo sapien
tgttccgtctgcgcctttcgatttc

SEQ ID NO: 4485886 - DNA, 25 bp, Homo sapien
gttccgtctgcgcctttcgatttca

SEQ ID NO: 4485887 - DNA, 25 bp, Homo sapien
ttgttccgtctgcgcctttcgattt

SEQ ID NO: 4485888 - DNA, 25 bp, Homo sapien
ttccgagccagtgcgctgcatgtgg

SEQ ID NO: 4485889 - DNA, 25 bp, Homo sapien
ttcatgtgcgagacggccatgcgga

SEQ ID NO: 4485890 - DNA, 25 bp, Homo sapien
gagagctccgtgatgtactgagtca

SEQ ID NO: 4485891 - DNA, 25 bp, Homo sapien
gaaggaaggcttgtacgcgccatcg

SEQ ID NO: 4485892 - DNA, 25 bp, Homo sapien
tggtgacgctgggattccccccgct

SEQ ID NO: 4485893 - DNA, 25 bp, Homo sapien
ttccccccgctttccaatggtgatg

SEQ ID NO: 4485894 - DNA, 25 bp, Homo sapien
ccccgctttccaatggtgatgtgat

SEQ ID NO: 4485895 - DNA, 25 bp, Homo sapien
gtagtttatttcgtcttggtgacgc

SEQ ID NO: 4485896 - DNA, 25 bp, Homo sapien
gctcacattgattcattggggtcat

SEQ ID NO: 4485897 - DNA, 25 bp, Homo sapien
cttcagctcacattgattcattggg

SEQ ID NO: 4485898 - DNA, 25 bp, Homo sapien
tcacattgattcattggggtcatga

SEQ ID NO: 4485899 - DNA, 25 bp, Homo sapien
cagctcacattgattcattggggtc

SEQ ID NO: 4485900 - DNA, 25 bp, Homo sapien
agcttctccacgtcatcaggatgca

SEQ ID NO: 4485901 - DNA, 25 bp, Homo sapien
tcatacagtgtgctcccaaaccact

SEQ ID NO: 4485902 - DNA, 25 bp, Homo sapien
gtcagacacataaatcactcgccct

SEQ ID NO: 4485903 - DNA, 25 bp, Homo sapien
tcaggatgcacctgttcatacagtg

SEQ ID NO: 4485904 - DNA, 25 bp, Homo sapien
cagcctcataaagggagctccactg

SEQ ID NO: 4485905 - DNA, 25 bp, Homo sapien
caaacagcctcataaagggagctcc

SEQ ID NO: 4485906 - DNA, 25 bp, Homo sapien
tcaaacagcctcataaagggagctc

SEQ ID NO: 4485907 - DNA, 25 bp, Homo sapien
aacagcctcataaagggagctccac

SEQ ID NO: 4485908 - DNA, 25 bp, Homo sapien
catgcccagccaagaatgttttcta

SEQ ID NO: 4485909 - DNA, 25 bp, Homo sapien
tgcccagccaagaatgttttctaga

SEQ ID NO: 4485910 - DNA, 25 bp, Homo sapien
atgcccagccaagaatgttttctag

SEQ ID NO: 4485911 - DNA, 25 bp, Homo sapien
cagtccagtgtccactccgaggaca

SEQ ID NO: 4485912 - DNA, 25 bp, Homo sapien
ctccactgtactggttctggctgcc

SEQ ID NO: 4485913 - DNA, 25 bp, Homo sapien
acagtccagtgtccactccgaggac

SEQ ID NO: 4485914 - DNA, 25 bp, Homo sapien
cactgtactggttctggctgccttg

SEQ ID NO: 4485915 - DNA, 25 bp, Homo sapien
ggatgccgcctgctgaacctgcaaa

SEQ ID NO: 4485916 - DNA, 25 bp, Homo sapien
caggatgagcatgctaccagctcct

SEQ ID NO: 4485917 - DNA, 25 bp, Homo sapien
tcctgttccacagtggaggatgccg

SEQ ID NO: 4485918 - DNA, 25 bp, Homo sapien
gctgaacctgcaaacttggtgcgga

SEQ ID NO: 4485919 - DNA, 25 bp, Homo sapien
ggaggtgcacgctgactcttgcagc

SEQ ID NO: 4485920 - DNA, 25 bp, Homo sapien
ggtgcacgctgactcttgcagcatc

SEQ ID NO: 4485921 - DNA, 25 bp, Homo sapien
aggtgcacgctgactcttgcagcat

SEQ ID NO: 4485922 - DNA, 25 bp, Homo sapien
gaggtgcacgctgactcttgcagca

SEQ ID NO: 4485923 - DNA, 25 bp, Homo sapien
tcttccggtcttgcaatgcccaggt

SEQ ID NO: 4485924 - DNA, 25 bp, Homo sapien
tggaaaatccagtcattcagtgaca

SEQ ID NO: 4485925 - DNA, 25 bp, Homo sapien
tccctaagaagttgttgccatgaac

SEQ ID NO: 4485926 - DNA, 25 bp, Homo sapien
agtgacattactgggcaagcctcct

SEQ ID NO: 4485927 - DNA, 25 bp, Homo sapien
cactatggtacagtcgagttcacag

SEQ ID NO: 4485928 - DNA, 25 bp, Homo sapien
gaatcatcagggtagcttttgaaag

SEQ ID NO: 4485929 - DNA, 25 bp, Homo sapien
ttcacagaaatggagtggagtcctg

SEQ ID NO: 4485930 - DNA, 25 bp, Homo sapien
gttggtccacactggaatcatcagg

SEQ ID NO: 4485931 - DNA, 25 bp, Homo sapien
ggcaaatggtttcagctgtgaagca

SEQ ID NO: 4485932 - DNA, 25 bp, Homo sapien
tatcatctaccaaatggcaaatggt

SEQ ID NO: 4485933 - DNA, 25 bp, Homo sapien
tgtgctctgaaaataaatcccagct

SEQ ID NO: 4485934 - DNA, 25 bp, Homo sapien
gcgtagcacatgagcagtggaacat

SEQ ID NO: 4485935 - DNA, 25 bp, Homo sapien
ctcatcctgcagatgaaagaccgcc

SEQ ID NO: 4485936 - DNA, 25 bp, Homo sapien
catcctcatggatgactgctgccct

SEQ ID NO: 4485937 - DNA, 25 bp, Homo sapien
gcgagcccatgcacatcctcatgga

SEQ ID NO: 4485938 - DNA, 25 bp, Homo sapien
tgcagatgaaagaccgccgcgagcc

SEQ ID NO: 4485939 - DNA, 25 bp, Homo sapien
ctgatggcctgctgctcccccaaaa

SEQ ID NO: 4485940 - DNA, 25 bp, Homo sapien
atggcctgctgctcccccaaaacag

SEQ ID NO: 4485941 - DNA, 25 bp, Homo sapien
ggcctgctgctcccccaaaacagac

SEQ ID NO: 4485942 - DNA, 25 bp, Homo sapien
tgatggcctgctgctcccccaaaac

SEQ ID NO: 4485943 - DNA, 25 bp, Homo sapien
gacagctgccagcactagtgtggtc

SEQ ID NO: 4485944 - DNA, 25 bp, Homo sapien
gacaaacatgccgtgactgactaca

SEQ ID NO: 4485945 - DNA, 25 bp, Homo sapien
caatgtctactaagctaggataggc

SEQ ID NO: 4485946 - DNA, 25 bp, Homo sapien
taaacacaggcagtatggacctggc

SEQ ID NO: 4485947 - DNA, 25 bp, Homo sapien
tctcaggctttagcatcacagctgt

SEQ ID NO: 4485948 - DNA, 25 bp, Homo sapien
tgaacagtaacatcttctcaggctt

SEQ ID NO: 4485949 - DNA, 25 bp, Homo sapien
gctggagacctacagaaagactcta

SEQ ID NO: 4485950 - DNA, 25 bp, Homo sapien
gaaaggagagtgtgacccacattac

SEQ ID NO: 4485951 - DNA, 25 bp, Homo sapien
gaaggtggtccaaaggagcatttcc

SEQ ID NO: 4485952 - DNA, 25 bp, Homo sapien
gtggtccaaaggagcatttccacac

SEQ ID NO: 4485953 - DNA, 25 bp, Homo sapien
aaggtggtccaaaggagcatttcca

SEQ ID NO: 4485954 - DNA, 25 bp, Homo sapien
ggtggtccaaaggagcatttccaca

SEQ ID NO: 4485955 - DNA, 25 bp, Homo sapien
gtatcctgtacagtggaccacagca

SEQ ID NO: 4485956 - DNA, 25 bp, Homo sapien
tgtacagtggaccacagcatattgg

SEQ ID NO: 4485957 - DNA, 25 bp, Homo sapien
tatcctgtacagtggaccacagcat

SEQ ID NO: 4485958 - DNA, 25 bp, Homo sapien
tcctgtacagtggaccacagcatat

SEQ ID NO: 4485959 - DNA, 25 bp, Homo sapien
tgtatggagatggtgttgttttcca

SEQ ID NO: 4485960 - DNA, 25 bp, Homo sapien
tcctgtaggcatgctattatcatca

SEQ ID NO: 4485961 - DNA, 25 bp, Homo sapien
aaggtggcatagctaggtatcctgt

SEQ ID NO: 4485962 - DNA, 25 bp, Homo sapien
catcatgtatggagatggtgttgtt

SEQ ID NO: 4485963 - DNA, 25 bp, Homo sapien
aagcaatgatgttttggtacttaaa

SEQ ID NO: 4485964 - DNA, 25 bp, Homo sapien
gaaggtaagcaatgatgttttggta

SEQ ID NO: 4485965 - DNA, 25 bp, Homo sapien
ctttcaagtttcactaatgaacatg

SEQ ID NO: 4485966 - DNA, 25 bp, Homo sapien
tcaagtttcactaatgaacatgcac

SEQ ID NO: 4485967 - DNA, 25 bp, Homo sapien
tgaaactatcaacagggtaggcaga

SEQ ID NO: 4485968 - DNA, 25 bp, Homo sapien
gacatacaagtagccaacagacaca

SEQ ID NO: 4485969 - DNA, 25 bp, Homo sapien
ttctggatatcagccttgggaaaga

SEQ ID NO: 4485970 - DNA, 25 bp, Homo sapien
taggcagacagcctacagaatgaga

SEQ ID NO: 4485971 - DNA, 25 bp, Homo sapien
ttgaaagaaatcctcctttatgagt

SEQ ID NO: 4485972 - DNA, 25 bp, Homo sapien
ctggagtctcccaattgccacgagg

SEQ ID NO: 4485973 - DNA, 25 bp, Homo sapien
tctcccaattgccacgaggcaatat

SEQ ID NO: 4485974 - DNA, 25 bp, Homo sapien
gagtctcccaattgccacgaggcaa

SEQ ID NO: 4485975 - DNA, 25 bp, Homo sapien
atatttactgccttgtcccacatca

SEQ ID NO: 4485976 - DNA, 25 bp, Homo sapien
gttatgccgggataagaactctgtg

SEQ ID NO: 4485977 - DNA, 25 bp, Homo sapien
aactctgtgggcaccgacatcccat

SEQ ID NO: 4485978 - DNA, 25 bp, Homo sapien
cactgatacatcttggatccacaaa

SEQ ID NO: 4485979 - DNA, 25 bp, Homo sapien
tgatgattccatcggagttatgccg

SEQ ID NO: 4485980 - DNA, 25 bp, Homo sapien
tgctggaagctctcacgcagatggc

SEQ ID NO: 4485981 - DNA, 25 bp, Homo sapien
gaagctctcacgcagatggctttga

SEQ ID NO: 4485982 - DNA, 25 bp, Homo sapien
tggctttgatcctcagggtggcaga

SEQ ID NO: 4485983 - DNA, 25 bp, Homo sapien
tctcacgcagatggctttgatcctc

SEQ ID NO: 4485984 - DNA, 25 bp, Homo sapien
tcagagcacacttcccgcagggact

SEQ ID NO: 4485985 - DNA, 25 bp, Homo sapien
agagcacacttcccgcagggactca

SEQ ID NO: 4485986 - DNA, 25 bp, Homo sapien
cacacttcccgcagggactcaatgg

SEQ ID NO: 4485987 - DNA, 25 bp, Homo sapien
agcacacttcccgcagggactcaat

SEQ ID NO: 4485988 - DNA, 25 bp, Homo sapien
catggggacagggacatcttggtca

SEQ ID NO: 4485989 - DNA, 25 bp, Homo sapien
tgtcgtcttggccagactgcatgca

SEQ ID NO: 4485990 - DNA, 25 bp, Homo sapien
gccacacttgtggtctattcttcgg

SEQ ID NO: 4485991 - DNA, 25 bp, Homo sapien
tattcttcggtggtgtctgtcgtct

SEQ ID NO: 4485992 - DNA, 25 bp, Homo sapien
ggacttggcctttcagcttaaccac

SEQ ID NO: 4485993 - DNA, 25 bp, Homo sapien
gaaatcgatacatgaccgacaggac

SEQ ID NO: 4485994 - DNA, 25 bp, Homo sapien
cccggttcttggtgcgaaatcgata

SEQ ID NO: 4485995 - DNA, 25 bp, Homo sapien
tgaagctgctggtgcggatcaacat

SEQ ID NO: 4485996 - DNA, 25 bp, Homo sapien
ttgcatgctacagtcctcccgacac

SEQ ID NO: 4485997 - DNA, 25 bp, Homo sapien
tccaaatgtctttgtgttggttcct

SEQ ID NO: 4485998 - DNA, 25 bp, Homo sapien
cacatgcttgcgtttgcttggacat

SEQ ID NO: 4485999 - DNA, 25 bp, Homo sapien
acacactggccatggcttccacatg

SEQ ID NO: 4486000 - DNA, 25 bp, Homo sapien
gagacacagattgaggcttctggtg

SEQ ID NO: 4486001 - DNA, 25 bp, Homo sapien
gggcatcctgatccgtgtaacctca

SEQ ID NO: 4486002 - DNA, 25 bp, Homo sapien
taggacctttcagttcagagacaca

SEQ ID NO: 4486003 - DNA, 25 bp, Homo sapien
cttctggtgtaactgtgccctgagg

SEQ ID NO: 4486004 - DNA, 25 bp, Homo sapien
ctgggataagtcatacgatgacaat

SEQ ID NO: 4486005 - DNA, 25 bp, Homo sapien
gggataagtcatacgatgacaatcc

SEQ ID NO: 4486006 - DNA, 25 bp, Homo sapien
taagtcatacgatgacaatccatct

SEQ ID NO: 4486007 - DNA, 25 bp, Homo sapien
gataagtcatacgatgacaatccat

SEQ ID NO: 4486008 - DNA, 25 bp, Homo sapien
cctttgtgttgaggggctcaagctc

SEQ ID NO: 4486009 - DNA, 25 bp, Homo sapien
ccccaggggacctgtaggtctgctc

SEQ ID NO: 4486010 - DNA, 25 bp, Homo sapien
agctcagggctgaattgagtcccaa

SEQ ID NO: 4486011 - DNA, 25 bp, Homo sapien
tcttcatggctcagttctataggga

SEQ ID NO: 4486012 - DNA, 25 bp, Homo sapien
ggacttcccggcctcatgaacaccg

SEQ ID NO: 4486013 - DNA, 25 bp, Homo sapien
ttcccggcctcatgaacaccggctg

SEQ ID NO: 4486014 - DNA, 25 bp, Homo sapien
tcctgggagaagattgcatccgcct

SEQ ID NO: 4486015 - DNA, 25 bp, Homo sapien
gattgcatccgccttttccacggac

SEQ ID NO: 4486016 - DNA, 25 bp, Homo sapien
gcttccttgggagtagatctgctgg

SEQ ID NO: 4486017 - DNA, 25 bp, Homo sapien
atgggcttccttgggagtagatctg

SEQ ID NO: 4486018 - DNA, 25 bp, Homo sapien
aaatgggcttccttgggagtagatc

SEQ ID NO: 4486019 - DNA, 25 bp, Homo sapien
ggaaatgggcttccttgggagtaga

SEQ ID NO: 4486020 - DNA, 25 bp, Homo sapien
ggagcatcttcccacgccattgtcc

SEQ ID NO: 4486021 - DNA, 25 bp, Homo sapien
agggagcatcttcccacgccattgt

SEQ ID NO: 4486022 - DNA, 25 bp, Homo sapien
gggagcatcttcccacgccattgtc

SEQ ID NO: 4486023 - DNA, 25 bp, Homo sapien
cagctcagggcagacagtccagtgt

SEQ ID NO: 4486024 - DNA, 25 bp, Homo sapien
ctcagggcagacagtccagtgtgag

SEQ ID NO: 4486025 - DNA, 25 bp, Homo sapien
agctcagggcagacagtccagtgtg

SEQ ID NO: 4486026 - DNA, 25 bp, Homo sapien
cacagctcagggcagacagtccagt

SEQ ID NO: 4486027 - DNA, 25 bp, Homo sapien
tcacgctggactgtctgccctgagc

SEQ ID NO: 4486028 - DNA, 25 bp, Homo sapien
ctcctcagcatggtccccacggctg

SEQ ID NO: 4486029 - DNA, 25 bp, Homo sapien
ccaaaggtcatcagtgatggtgtcc

SEQ ID NO: 4486030 - DNA, 25 bp, Homo sapien
tgcagcttcactcttctcccaaagg

SEQ ID NO: 4486031 - DNA, 25 bp, Homo sapien
ttctggcccgtggaagaagaggact

SEQ ID NO: 4486032 - DNA, 25 bp, Homo sapien
tccaggcacatgaaccactgaagag

SEQ ID NO: 4486033 - DNA, 25 bp, Homo sapien
tgccgggagatttgggacatgttct

SEQ ID NO: 4486034 - DNA, 25 bp, Homo sapien
tgactctggtttagctgccgggaga

SEQ ID NO: 4486035 - DNA, 25 bp, Homo sapien
gaaagggcggacgactccctgtcca

SEQ ID NO: 4486036 - DNA, 25 bp, Homo sapien
aagggcggacgactccctgtccatg

SEQ ID NO: 4486037 - DNA, 25 bp, Homo sapien
aaagggcggacgactccctgtccat

SEQ ID NO: 4486038 - DNA, 25 bp, Homo sapien
actatgagggtctggggatgtcaca

SEQ ID NO: 4486039 - DNA, 25 bp, Homo sapien
tagtgaggggctcattcttgatgag

SEQ ID NO: 4486040 - DNA, 25 bp, Homo sapien
gaggtgtctcaacctgcccaacctt

SEQ ID NO: 4486041 - DNA, 25 bp, Homo sapien
gatgtcacaagggttggtggtttca

SEQ ID NO: 4486042 - DNA, 25 bp, Homo sapien
tctgccgggtaggtgtggctcgttc

SEQ ID NO: 4486043 - DNA, 25 bp, Homo sapien
taggtgtggctcgttccaatcccaa

SEQ ID NO: 4486044 - DNA, 25 bp, Homo sapien
tcgttccaatcccaaagggagatga

SEQ ID NO: 4486045 - DNA, 25 bp, Homo sapien
tgtggctcgttccaatcccaaaggg

SEQ ID NO: 4486046 - DNA, 25 bp, Homo sapien
aaccctggagtcctgttggcaagac

SEQ ID NO: 4486047 - DNA, 25 bp, Homo sapien
gcaagactggagtaggcattcccac

SEQ ID NO: 4486048 - DNA, 25 bp, Homo sapien
gcattcccacttggcgaggaggtag

SEQ ID NO: 4486049 - DNA, 25 bp, Homo sapien
ctggagtcctgttggcaagactgga

SEQ ID NO: 4486050 - DNA, 25 bp, Homo sapien
aggaccacgggtctcttatgagctt

SEQ ID NO: 4486051 - DNA, 25 bp, Homo sapien
caggaccacgggtctcttatgagct

SEQ ID NO: 4486052 - DNA, 25 bp, Homo sapien
caagcagttctaatggaagctttta

SEQ ID NO: 4486053 - DNA, 25 bp, Homo sapien
cacagaattgttcataaggctgaca

SEQ ID NO: 4486054 - DNA, 25 bp, Homo sapien
cgcgccctgcctgcacagaattgtt

SEQ ID NO: 4486055 - DNA, 25 bp, Homo sapien
cataaggctgacagacaagcagttc

SEQ ID NO: 4486056 - DNA, 25 bp, Homo sapien
gccacagtgggatgctccaagacct

SEQ ID NO: 4486057 - DNA, 25 bp, Homo sapien
tgcgtgttagctctgctccgaagcc

SEQ ID NO: 4486058 - DNA, 25 bp, Homo sapien
catcagacataacgactgtcctggc

SEQ ID NO: 4486059 - DNA, 25 bp, Homo sapien
ccaagaccttgccacggttgcgtgt

SEQ ID NO: 4486060 - DNA, 25 bp, Homo sapien
tcaccctaaactgagacgcatgtgg

SEQ ID NO: 4486061 - DNA, 25 bp, Homo sapien
tgaaacctggtctgctacagcacct

SEQ ID NO: 4486062 - DNA, 25 bp, Homo sapien
gacatgctgttgcttgccaagacaa

SEQ ID NO: 4486063 - DNA, 25 bp, Homo sapien
taaaagacattcatccccagagttg

SEQ ID NO: 4486064 - DNA, 25 bp, Homo sapien
cctgtcccattctggaagcctgcag

SEQ ID NO: 4486065 - DNA, 25 bp, Homo sapien
tccatgttgcttggcagaagggtgg

SEQ ID NO: 4486066 - DNA, 25 bp, Homo sapien
gcagaggctgagcacaagatggggc

SEQ ID NO: 4486067 - DNA, 25 bp, Homo sapien
ggccttcagtgggtccatgttgctt

SEQ ID NO: 4486068 - DNA, 25 bp, Homo sapien
ttccaacgatcatgctggccacggg

SEQ ID NO: 4486069 - DNA, 25 bp, Homo sapien
tataatgcctgagacataaagggct

SEQ ID NO: 4486070 - DNA, 25 bp, Homo sapien
gcactgcgttaatgtgaggccaggt

SEQ ID NO: 4486071 - DNA, 25 bp, Homo sapien
tctctgtcaagctctgggtggcaag

SEQ ID NO: 4486072 - DNA, 25 bp, Homo sapien
gaactgcccgctactttgtccactt

SEQ ID NO: 4486073 - DNA, 25 bp, Homo sapien
ttccgagggccgcccttggaactgc

SEQ ID NO: 4486074 - DNA, 25 bp, Homo sapien
tgcgaccagacttccgagggccgcc

SEQ ID NO: 4486075 - DNA, 25 bp, Homo sapien
gcccttggaactgcccgctactttg

SEQ ID NO: 4486076 - DNA, 25 bp, Homo sapien
acttcagtctgaccgggctgctggt

SEQ ID NO: 4486077 - DNA, 25 bp, Homo sapien
tcagtctgaccgggctgctggtggg

SEQ ID NO: 4486078 - DNA, 25 bp, Homo sapien
cagtctgaccgggctgctggtggga

SEQ ID NO: 4486079 - DNA, 25 bp, Homo sapien
aacacttcagtctgaccgggctgct

SEQ ID NO: 4486080 - DNA, 25 bp, Homo sapien
gagaaggcggtgctcgctcgattta

SEQ ID NO: 4486081 - DNA, 25 bp, Homo sapien
agaaggcggtgctcgctcgatttac

SEQ ID NO: 4486082 - DNA, 25 bp, Homo sapien
actcagaaaacggtggaaacatgcc

SEQ ID NO: 4486083 - DNA, 25 bp, Homo sapien
gtcttcgatgttatagttgccagtc

SEQ ID NO: 4486084 - DNA, 25 bp, Homo sapien
gaaacatgcccaggtcggcaaagtc

SEQ ID NO: 4486085 - DNA, 25 bp, Homo sapien
tgcccaggtcggcaaagtcttcgat

SEQ ID NO: 4486086 - DNA, 25 bp, Homo sapien
tctacatctgtaaagaagggccagg

SEQ ID NO: 4486087 - DNA, 25 bp, Homo sapien
gaagagtaaagctccccagtgtaag

SEQ ID NO: 4486088 - DNA, 25 bp, Homo sapien
tctgggagggacacaagggctttcc

SEQ ID NO: 4486089 - DNA, 25 bp, Homo sapien
cggatacagggcaggttcacagtca

SEQ ID NO: 4486090 - DNA, 25 bp, Homo sapien
ggggagaccaccattcattccctgg

SEQ ID NO: 4486091 - DNA, 25 bp, Homo sapien
tagcttatgggctgcctaaagtgct

SEQ ID NO: 4486092 - DNA, 25 bp, Homo sapien
tgcctaaagtgctgccgggagtggg

SEQ ID NO: 4486093 - DNA, 25 bp, Homo sapien
tcacattctcgcatagcttatgggc

SEQ ID NO: 4486094 - DNA, 25 bp, Homo sapien
tacgcttggaaatgtgcctgcacca

SEQ ID NO: 4486095 - DNA, 25 bp, Homo sapien
ttaggagacagcgacttaggccaag

SEQ ID NO: 4486096 - DNA, 25 bp, Homo sapien
tgttagatgaagcaagccgtcctgc

SEQ ID NO: 4486097 - DNA, 25 bp, Homo sapien
tcctagagctgttccggtcactggc

SEQ ID NO: 4486098 - DNA, 25 bp, Homo sapien
tcttctatcagtgagctttgcctta

SEQ ID NO: 4486099 - DNA, 25 bp, Homo sapien
caacattcttatttcgctaagacag

SEQ ID NO: 4486100 - DNA, 25 bp, Homo sapien
taggtattctccaatgtattcatcc

SEQ ID NO: 4486101 - DNA, 25 bp, Homo sapien
tcacacatgaacctaactaatgtgc

SEQ ID NO: 4486102 - DNA, 25 bp, Homo sapien
cacaagacgcagtgagaacctgcat

SEQ ID NO: 4486103 - DNA, 25 bp, Homo sapien
caggtcccttggatcctggatctgt

SEQ ID NO: 4486104 - DNA, 25 bp, Homo sapien
tggatcctggatctgtggcatctac

SEQ ID NO: 4486105 - DNA, 25 bp, Homo sapien
tacagaatccttgggcacaagacgc

SEQ ID NO: 4486106 - DNA, 25 bp, Homo sapien
cctagttttcctgggactgaagcat

SEQ ID NO: 4486107 - DNA, 25 bp, Homo sapien
tctctagtccttgaaaaaattgatc

SEQ ID NO: 4486108 - DNA, 25 bp, Homo sapien
agggatgggttgctctctctagtcc

SEQ ID NO: 4486109 - DNA, 25 bp, Homo sapien
tgccaaaactgggaaagtctaagta

SEQ ID NO: 4486110 - DNA, 25 bp, Homo sapien
tgtgagtctgatttctggccgtgct

SEQ ID NO: 4486111 - DNA, 25 bp, Homo sapien
ggaatttgatagagagggctcctca

SEQ ID NO: 4486112 - DNA, 25 bp, Homo sapien
ggtcagcgtggaagggtcattcacc

SEQ ID NO: 4486113 - DNA, 25 bp, Homo sapien
gtacatgcacttgacttggccaggc

SEQ ID NO: 4486114 - DNA, 25 bp, Homo sapien
gtcacaagggcccatgttccctggg

SEQ ID NO: 4486115 - DNA, 25 bp, Homo sapien
caagggcccatgttccctgggtcat

SEQ ID NO: 4486116 - DNA, 25 bp, Homo sapien
tggtcacaagggcccatgttccctg

SEQ ID NO: 4486117 - DNA, 25 bp, Homo sapien
ctttggtcacaagggcccatgttcc

SEQ ID NO: 4486118 - DNA, 25 bp, Homo sapien
ttggcactgatgtctacggtcccca

SEQ ID NO: 4486119 - DNA, 25 bp, Homo sapien
acatgcctggaattggacaccggga

SEQ ID NO: 4486120 - DNA, 25 bp, Homo sapien
tgtcctcgccagcacctgtggcgct

SEQ ID NO: 4486121 - DNA, 25 bp, Homo sapien
attggacaccgggagctgctcttgg

SEQ ID NO: 4486122 - DNA, 25 bp, Homo sapien
ccacgagattttctcaaaggctgga

SEQ ID NO: 4486123 - DNA, 25 bp, Homo sapien
tcgtgaccacgagattttctcaaag

SEQ ID NO: 4486124 - DNA, 25 bp, Homo sapien
ttggtggtcaaattcgtgaccacga

SEQ ID NO: 4486125 - DNA, 25 bp, Homo sapien
ctccgaggggctgcatcctttgctt

SEQ ID NO: 4486126 - DNA, 25 bp, Homo sapien
tgttttgctgacctccagaaatagc

SEQ ID NO: 4486127 - DNA, 25 bp, Homo sapien
ttttgctgacctccagaaatagctg

SEQ ID NO: 4486128 - DNA, 25 bp, Homo sapien
ttgctgacctccagaaatagctgtg

SEQ ID NO: 4486129 - DNA, 25 bp, Homo sapien
tctgttttgctgacctccagaaata

SEQ ID NO: 4486130 - DNA, 25 bp, Homo sapien
ttgcagccagcaggcatgactctgg

SEQ ID NO: 4486131 - DNA, 25 bp, Homo sapien
tgcagccagcaggcatgactctggt

SEQ ID NO: 4486132 - DNA, 25 bp, Homo sapien
gttcctccagaacacgtgtgcttcc

SEQ ID NO: 4486133 - DNA, 25 bp, Homo sapien
ttgttcctccagaacacgtgtgctt

SEQ ID NO: 4486134 - DNA, 25 bp, Homo sapien
aatcagtgtttatcattctcacata

SEQ ID NO: 4486135 - DNA, 25 bp, Homo sapien
tacccttatcattaatagatgcatg

SEQ ID NO: 4486136 - DNA, 25 bp, Homo sapien
tataaatgggatcttactagatgaa

SEQ ID NO: 4486137 - DNA, 25 bp, Homo sapien
aataacaccctaacaaacaatccat

SEQ ID NO: 4486138 - DNA, 25 bp, Homo sapien
gccaaatgttaccaaaagaaataga

SEQ ID NO: 4486139 - DNA, 25 bp, Homo sapien
tatagaataaggtgggatgtgctta

SEQ ID NO: 4486140 - DNA, 25 bp, Homo sapien
gtgtatagaataaggtgggatgtgc

SEQ ID NO: 4486141 - DNA, 25 bp, Homo sapien
aaaaggagagtgtatagaataaggt

SEQ ID NO: 4486142 - DNA, 25 bp, Homo sapien
tgaaagtagtaactcgtgaccccat

SEQ ID NO: 4486143 - DNA, 25 bp, Homo sapien
tcactctggcctgccaaggtaccag

SEQ ID NO: 4486144 - DNA, 25 bp, Homo sapien
ggcagaatcactttgactaagggtc

SEQ ID NO: 4486145 - DNA, 25 bp, Homo sapien
tggaccatcattgtctcaggcagaa

SEQ ID NO: 4486146 - DNA, 25 bp, Homo sapien
tctgtccttattgggtgctagaaac

SEQ ID NO: 4486147 - DNA, 25 bp, Homo sapien
ggttgccaaatcttggactaagcca

SEQ ID NO: 4486148 - DNA, 25 bp, Homo sapien
gaggaggtaggtggatacttatacc

SEQ ID NO: 4486149 - DNA, 25 bp, Homo sapien
catttttgtccttacattcccgagt

SEQ ID NO: 4486150 - DNA, 25 bp, Homo sapien
cacagtccccaccatgaggctctct

SEQ ID NO: 4486151 - DNA, 25 bp, Homo sapien
gtccccaccatgaggctctctttgg

SEQ ID NO: 4486152 - DNA, 25 bp, Homo sapien
aggctctctttggaactgccaagtt

SEQ ID NO: 4486153 - DNA, 25 bp, Homo sapien
tctctttggaactgccaagttcctc

SEQ ID NO: 4486154 - DNA, 25 bp, Homo sapien
cttgtatgaggtggtgcggacttca

SEQ ID NO: 4486155 - DNA, 25 bp, Homo sapien
aaagttgtgatgtcttgtatgaggt

SEQ ID NO: 4486156 - DNA, 25 bp, Homo sapien
gagacttctgacctggtgtagcgaa

SEQ ID NO: 4486157 - DNA, 25 bp, Homo sapien
taggagacttctgacctggtgtagc

SEQ ID NO: 4486158 - DNA, 25 bp, Homo sapien
tgtgtatcatactcatgcagggtcc

SEQ ID NO: 4486159 - DNA, 25 bp, Homo sapien
aatttgtgtatcatactcatgcagg

SEQ ID NO: 4486160 - DNA, 25 bp, Homo sapien
tatcatactcatgcagggtccatgc

SEQ ID NO: 4486161 - DNA, 25 bp, Homo sapien
aaatttgtgtatcatactcatgcag

SEQ ID NO: 4486162 - DNA, 25 bp, Homo sapien
tgagactgtaactcccaggtgccat

SEQ ID NO: 4486163 - DNA, 25 bp, Homo sapien
tgcccaagtaacttgagactgtaac

SEQ ID NO: 4486164 - DNA, 25 bp, Homo sapien
catcatcggacaactgattcatgcc

SEQ ID NO: 4486165 - DNA, 25 bp, Homo sapien
ccaggtgccatcatcggacaactga

SEQ ID NO: 4486166 - DNA, 25 bp, Homo sapien
tttagtatgaatgctcaaccacccc

SEQ ID NO: 4486167 - DNA, 25 bp, Homo sapien
tagtatgaatgctcaaccacccctg

SEQ ID NO: 4486168 - DNA, 25 bp, Homo sapien
ttctttagtatgaatgctcaaccac

SEQ ID NO: 4486169 - DNA, 25 bp, Homo sapien
gtatgaatgctcaaccacccctgac

SEQ ID NO: 4486170 - DNA, 25 bp, Homo sapien
cagataaagaacctgacctcacagt

SEQ ID NO: 4486171 - DNA, 25 bp, Homo sapien
gataaagaacctgacctcacagttc

SEQ ID NO: 4486172 - DNA, 25 bp, Homo sapien
gcccagataaagaacctgacctcac

SEQ ID NO: 4486173 - DNA, 25 bp, Homo sapien
gacctcacagttctgtattgcctca

SEQ ID NO: 4486174 - DNA, 25 bp, Homo sapien
tcttctccataatgatgacagcagt

SEQ ID NO: 4486175 - DNA, 25 bp, Homo sapien
tctccataatgatgacagcagtagt

SEQ ID NO: 4486176 - DNA, 25 bp, Homo sapien
cttcttctccataatgatgacagca

SEQ ID NO: 4486177 - DNA, 25 bp, Homo sapien
tccataatgatgacagcagtagtca

SEQ ID NO: 4486178 - DNA, 25 bp, Homo sapien
taggatcggtgtccacctgtttttc

SEQ ID NO: 4486179 - DNA, 25 bp, Homo sapien
ttccctgtgtaatcggcaccaaaca

SEQ ID NO: 4486180 - DNA, 25 bp, Homo sapien
tgtaatcggcaccaaacatcatatc

SEQ ID NO: 4486181 - DNA, 25 bp, Homo sapien
gacagaatttcgagttggtacagta

SEQ ID NO: 4486182 - DNA, 25 bp, Homo sapien
cgcgcgcggcacacaaagccggcgg

SEQ ID NO: 4486183 - DNA, 25 bp, Homo sapien
cgcggcacacaaagccggcggcggc

SEQ ID NO: 4486184 - DNA, 25 bp, Homo sapien
gcgcggcacacaaagccggcggcgg

SEQ ID NO: 4486185 - DNA, 25 bp, Homo sapien
ggacggcctggtgcccgccgccggc

SEQ ID NO: 4486186 - DNA, 25 bp, Homo sapien
agggagctggcaggcgagcgcggag

SEQ ID NO: 4486187 - DNA, 25 bp, Homo sapien
cgggacggcctggtgcccgccgccg

SEQ ID NO: 4486188 - DNA, 25 bp, Homo sapien
ggaggacggaggacggacgcgcggc

SEQ ID NO: 4486189 - DNA, 25 bp, Homo sapien
cagcttggcggcgatgcggctcggg

SEQ ID NO: 4486190 - DNA, 25 bp, Homo sapien
cagaagagccagcacagctcaccca

SEQ ID NO: 4486191 - DNA, 25 bp, Homo sapien
ggctcgggcggcaggaaggccagct

SEQ ID NO: 4486192 - DNA, 25 bp, Homo sapien
gctcacccagcgagaagccgttcat

SEQ ID NO: 4486193 - DNA, 25 bp, Homo sapien
cggggcggacgcgccggcgccgcgc

SEQ ID NO: 4486194 - DNA, 25 bp, Homo sapien
gcgccgcgctgctccggcgccagca

SEQ ID NO: 4486195 - DNA, 25 bp, Homo sapien
gggcggacgcgccggcgccgcgctg

SEQ ID NO: 4486196 - DNA, 25 bp, Homo sapien
cggcgccgcgctgctccggcgccag

SEQ ID NO: 4486197 - DNA, 25 bp, Homo sapien
ccgcgccctcctcgggctgctgcgg

SEQ ID NO: 4486198 - DNA, 25 bp, Homo sapien
cgcccgcgccctcctcgggctgctg

SEQ ID NO: 4486199 - DNA, 25 bp, Homo sapien
ccctcctcgggctgctgcggtgccg

SEQ ID NO: 4486200 - DNA, 25 bp, Homo sapien
gcacgcaccgggccccgcgcccgcg

SEQ ID NO: 4486201 - DNA, 25 bp, Homo sapien
gtcggcgcgctcgctgaggtgcagg

SEQ ID NO: 4486202 - DNA, 25 bp, Homo sapien
cagtcggcgcgctcgctgaggtgca

SEQ ID NO: 4486203 - DNA, 25 bp, Homo sapien
ctgccagtcggcgcgctcgctgagg

SEQ ID NO: 4486204 - DNA, 25 bp, Homo sapien
ccagtcggcgcgctcgctgaggtgc

SEQ ID NO: 4486205 - DNA, 25 bp, Homo sapien
ttctcggagggcttgcccgagctga

SEQ ID NO: 4486206 - DNA, 25 bp, Homo sapien
gaacatgcagccgagccggttgtcc

SEQ ID NO: 4486207 - DNA, 25 bp, Homo sapien
gcgagaagaagacctcgacggcgtc

SEQ ID NO: 4486208 - DNA, 25 bp, Homo sapien
gagctgacgccgtatcccgagtagt

SEQ ID NO: 4486209 - DNA, 25 bp, Homo sapien
ggttccttcaaattctaagcttcgc

SEQ ID NO: 4486210 - DNA, 25 bp, Homo sapien
gcttcaggtatgtggatacagacgt

SEQ ID NO: 4486211 - DNA, 25 bp, Homo sapien
gggcaatctttagacataccatcag

SEQ ID NO: 4486212 - DNA, 25 bp, Homo sapien
taagcttcgcatgcagccttcaaat

SEQ ID NO: 4486213 - DNA, 25 bp, Homo sapien
tatagtttcaacacgagcctaagca

SEQ ID NO: 4486214 - DNA, 25 bp, Homo sapien
tgcctgtgccctctcaaactgatgt

SEQ ID NO: 4486215 - DNA, 25 bp, Homo sapien
gaagcagagcagtcatcatcggaca

SEQ ID NO: 4486216 - DNA, 25 bp, Homo sapien
gaagacacctcagaagccatacagt

SEQ ID NO: 4486217 - DNA, 25 bp, Homo sapien
ccactgtaccagaatgaatccaccg

SEQ ID NO: 4486218 - DNA, 25 bp, Homo sapien
catttctaggctagtgtgtctcaac

SEQ ID NO: 4486219 - DNA, 25 bp, Homo sapien
aaagtacagctaaggtggagatcca

SEQ ID NO: 4486220 - DNA, 25 bp, Homo sapien
gaatccaccgtatttcccagtgtag

SEQ ID NO: 4486221 - DNA, 25 bp, Homo sapien
atgggaacttagcatgaaggagccc

SEQ ID NO: 4486222 - DNA, 25 bp, Homo sapien
tgtagaaagagcaatgggacaggca

SEQ ID NO: 4486223 - DNA, 25 bp, Homo sapien
caaccaggtgaagcaaggatgggaa

SEQ ID NO: 4486224 - DNA, 25 bp, Homo sapien
tacatatgttacacacgcgccatgc

SEQ ID NO: 4486225 - DNA, 25 bp, Homo sapien
tggaatcttccctataacaagtcta

SEQ ID NO: 4486226 - DNA, 25 bp, Homo sapien
tgttcaattgtaaaggaaaacaaga

SEQ ID NO: 4486227 - DNA, 25 bp, Homo sapien
ctggctgatagagtgtatgttcaat

SEQ ID NO: 4486228 - DNA, 25 bp, Homo sapien
gaaaacaagaacatgtaaagcacat

SEQ ID NO: 4486229 - DNA, 25 bp, Homo sapien
ctatcccatgtctgcaacagcccat

SEQ ID NO: 4486230 - DNA, 25 bp, Homo sapien
caacagcccatcactctgagaatgc

SEQ ID NO: 4486231 - DNA, 25 bp, Homo sapien
tgcaacagcccatcactctgagaat

SEQ ID NO: 4486232 - DNA, 25 bp, Homo sapien
catgtctgcaacagcccatcactct

SEQ ID NO: 4486233 - DNA, 25 bp, Homo sapien
gctgtacaagcatgggaccagtact

SEQ ID NO: 4486234 - DNA, 25 bp, Homo sapien
tgaaagagagctcacaggtaggctg

SEQ ID NO: 4486235 - DNA, 25 bp, Homo sapien
tctctacctttgaagggatgaggtg

SEQ ID NO: 4486236 - DNA, 25 bp, Homo sapien
caacatgtagggcagtagctaaggc

SEQ ID NO: 4486237 - DNA, 25 bp, Homo sapien
cacattaagaacgatgccttccttc

SEQ ID NO: 4486238 - DNA, 25 bp, Homo sapien
gcagttcacattaagaacgatgcct

SEQ ID NO: 4486239 - DNA, 25 bp, Homo sapien
tggcagttcacattaagaacgatgc

SEQ ID NO: 4486240 - DNA, 25 bp, Homo sapien
ccttggcagttcacattaagaacga

SEQ ID NO: 4486241 - DNA, 25 bp, Homo sapien
ggaatggagaattaccgctgcgcat

SEQ ID NO: 4486242 - DNA, 25 bp, Homo sapien
ggataatgttctcgggactcacgcc

SEQ ID NO: 4486243 - DNA, 25 bp, Homo sapien
tgcgcattcatacctcgaggccaag

SEQ ID NO: 4486244 - DNA, 25 bp, Homo sapien
tcctggtatccggaaaagccacacg

SEQ ID NO: 4486245 - DNA, 25 bp, Homo sapien
cagcagtacctttgatgaacctaca

SEQ ID NO: 4486246 - DNA, 25 bp, Homo sapien
gaacctacattaacatatcataaca

SEQ ID NO: 4486247 - DNA, 25 bp, Homo sapien
cagtctccccaattatcaatatccc

SEQ ID NO: 4486248 - DNA, 25 bp, Homo sapien
taacatatcataacagtttggcttt

SEQ ID NO: 4486249 - DNA, 25 bp, Homo sapien
aaagaggactccattagttatgctc

SEQ ID NO: 4486250 - DNA, 25 bp, Homo sapien
tccattagttatgctcacagataat

SEQ ID NO: 4486251 - DNA, 25 bp, Homo sapien
ttagttatgctcacagataatacac

SEQ ID NO: 4486252 - DNA, 25 bp, Homo sapien
gaggactccattagttatgctcaca

SEQ ID NO: 4486253 - DNA, 25 bp, Homo sapien
ccatgaatgaccaacacaggagagg

SEQ ID NO: 4486254 - DNA, 25 bp, Homo sapien
tttctaggtattgtgcataaagctc

SEQ ID NO: 4486255 - DNA, 25 bp, Homo sapien
gccatgggagaaatcgatgacctca

SEQ ID NO: 4486256 - DNA, 25 bp, Homo sapien
gctcgtacatcgctaggccatggga

SEQ ID NO: 4486257 - DNA, 25 bp, Homo sapien
tttgtccgggaaagatcagcatgtt

SEQ ID NO: 4486258 - DNA, 25 bp, Homo sapien
tgaacccatgtatccagtggcagaa

SEQ ID NO: 4486259 - DNA, 25 bp, Homo sapien
gcatgtgcaaaacagaggactcttc

SEQ ID NO: 4486260 - DNA, 25 bp, Homo sapien
cattggtggcaacagggcaagtcct

SEQ ID NO: 4486261 - DNA, 25 bp, Homo sapien
acataaattcttcaaagcataaact

SEQ ID NO: 4486262 - DNA, 25 bp, Homo sapien
tacataaattcttcaaagcataaac

SEQ ID NO: 4486263 - DNA, 25 bp, Homo sapien
ttacataaattcttcaaagcataaa

SEQ ID NO: 4486264 - DNA, 25 bp, Homo sapien
ggcaatcaaccgcagtccagttgta

SEQ ID NO: 4486265 - DNA, 25 bp, Homo sapien
cagttgtacaacgatctgaggctta

SEQ ID NO: 4486266 - DNA, 25 bp, Homo sapien
gcttatttggcgcaacttccagtgt

SEQ ID NO: 4486267 - DNA, 25 bp, Homo sapien
tattccattaccaaccactgtgccg

SEQ ID NO: 4486268 - DNA, 25 bp, Homo sapien
cagttttggcaaagcacgagctgct

SEQ ID NO: 4486269 - DNA, 25 bp, Homo sapien
tctgagccaggtcacaatgaggtca

SEQ ID NO: 4486270 - DNA, 25 bp, Homo sapien
ggctgaaaactatggaacacacctg

SEQ ID NO: 4486271 - DNA, 25 bp, Homo sapien
gttgaaaactagcatccctcagctg

SEQ ID NO: 4486272 - DNA, 25 bp, Homo sapien
acaggggtcgcccttagacactggg

SEQ ID NO: 4486273 - DNA, 25 bp, Homo sapien
caggggtcgcccttagacactgggc

SEQ ID NO: 4486274 - DNA, 25 bp, Homo sapien
aacaggggtcgcccttagacactgg

SEQ ID NO: 4486275 - DNA, 25 bp, Homo sapien
caacaggggtcgcccttagacactg

SEQ ID NO: 4486276 - DNA, 25 bp, Homo sapien
tagaaacattccctgtgggtaggag

SEQ ID NO: 4486277 - DNA, 25 bp, Homo sapien
gacaggccaaagttctgaagggtca

SEQ ID NO: 4486278 - DNA, 25 bp, Homo sapien
tgcttgggtgttcactgaaaggcac

SEQ ID NO: 4486279 - DNA, 25 bp, Homo sapien
tattggcctagcagttaatccgaga

SEQ ID NO: 4486280 - DNA, 25 bp, Homo sapien
ctctgtccgatagcaccgcgctggg

SEQ ID NO: 4486281 - DNA, 25 bp, Homo sapien
acgtctggtcgctgaccgccaggcg

SEQ ID NO: 4486282 - DNA, 25 bp, Homo sapien
tctgggaaatctgggttcagaccct

SEQ ID NO: 4486283 - DNA, 25 bp, Homo sapien
ggtctgtagccgagacagtgtcacg

SEQ ID NO: 4486284 - DNA, 25 bp, Homo sapien
gagtggaggaagtggctgggagctg

SEQ ID NO: 4486285 - DNA, 25 bp, Homo sapien
ccgagtggaggaagtggctgggagc

SEQ ID NO: 4486286 - DNA, 25 bp, Homo sapien
tggaggaagtggctgggagctgtcc

SEQ ID NO: 4486287 - DNA, 25 bp, Homo sapien
gaggaagtggctgggagctgtccat

SEQ ID NO: 4486288 - DNA, 25 bp, Homo sapien
tgcatgggagtccacagaagacagc

SEQ ID NO: 4486289 - DNA, 25 bp, Homo sapien
ctgctctgttcatgtcaccagcagt

SEQ ID NO: 4486290 - DNA, 25 bp, Homo sapien
cttcagctccaatccttttagacgg

SEQ ID NO: 4486291 - DNA, 25 bp, Homo sapien
gccatgggtatgctggaaactggaa

SEQ ID NO: 4486292 - DNA, 25 bp, Homo sapien
tgctaagagatcagcgcaaccaagg

SEQ ID NO: 4486293 - DNA, 25 bp, Homo sapien
ctagcagggttcttccagaggtgaa

SEQ ID NO: 4486294 - DNA, 25 bp, Homo sapien
gtatggccagtagaaggagccccag

SEQ ID NO: 4486295 - DNA, 25 bp, Homo sapien
ttagaaaccggcatctgtggctacc

SEQ ID NO: 4486296 - DNA, 25 bp, Homo sapien
actttgcacaccgacaggggcctgg

SEQ ID NO: 4486297 - DNA, 25 bp, Homo sapien
tctatgcactccttttggggctcat

SEQ ID NO: 4486298 - DNA, 25 bp, Homo sapien
gcatgactttgcacaccgacagggg

SEQ ID NO: 4486299 - DNA, 25 bp, Homo sapien
ggctcattcctactgttctttacaa

SEQ ID NO: 4486300 - DNA, 25 bp, Homo sapien
ttcgaatacatcttgggtttcaagt

SEQ ID NO: 4486301 - DNA, 25 bp, Homo sapien
tttcgaatacatcttgggtttcaag

SEQ ID NO: 4486302 - DNA, 25 bp, Homo sapien
ctttcgaatacatcttgggtttcaa

SEQ ID NO: 4486303 - DNA, 25 bp, Homo sapien
gaccatccattagagctggcgctgg

SEQ ID NO: 4486304 - DNA, 25 bp, Homo sapien
tattttaaaagcgatgagaccatcc

SEQ ID NO: 4486305 - DNA, 25 bp, Homo sapien
tatgaccccatgagtacttccaagt

SEQ ID NO: 4486306 - DNA, 25 bp, Homo sapien
gctgcattgctgacactgtgggtaa

SEQ ID NO: 4486307 - DNA, 25 bp, Homo sapien
tggtcacccatgatgtaaagtctgg

SEQ ID NO: 4486308 - DNA, 25 bp, Homo sapien
acaactctgcgggagtggtcaccca

SEQ ID NO: 4486309 - DNA, 25 bp, Homo sapien
tggccccaagggaggttctgtacaa

SEQ ID NO: 4486310 - DNA, 25 bp, Homo sapien
taatccagtgcctagaactttgggt

SEQ ID NO: 4486311 - DNA, 25 bp, Homo sapien
ggaaccgcctggctcagtaggcaat

SEQ ID NO: 4486312 - DNA, 25 bp, Homo sapien
ttgtaaatattgtcccgggcgggca

SEQ ID NO: 4486313 - DNA, 25 bp, Homo sapien
taacttagtgctgggcaagcacccc

SEQ ID NO: 4486314 - DNA, 25 bp, Homo sapien
taattcaacagtagacatccttggg

SEQ ID NO: 4486315 - DNA, 25 bp, Homo sapien
ttccatttacagctgtgagggtctc

SEQ ID NO: 4486316 - DNA, 25 bp, Homo sapien
cttccatttacagctgtgagggtct

SEQ ID NO: 4486317 - DNA, 25 bp, Homo sapien
cataggtcagctctatgggtgctgc

SEQ ID NO: 4486318 - DNA, 25 bp, Homo sapien
tgggtgctgctagaaccctgcctgc

SEQ ID NO: 4486319 - DNA, 25 bp, Homo sapien
tgtggtacaggtagatgctctgaat

SEQ ID NO: 4486320 - DNA, 25 bp, Homo sapien
gatgctctgaatctcataggtcagc

SEQ ID NO: 4486321 - DNA, 25 bp, Homo sapien
ctggtttgtgctcattactgggctt

SEQ ID NO: 4486322 - DNA, 25 bp, Homo sapien
tggtttgtgctcattactgggcttg

SEQ ID NO: 4486323 - DNA, 25 bp, Homo sapien
ggtttgtgctcattactgggcttgg

SEQ ID NO: 4486324 - DNA, 25 bp, Homo sapien
tttgtgctcattactgggcttggag

SEQ ID NO: 4486325 - DNA, 25 bp, Homo sapien
taagcaagtcatagatctcactgaa

SEQ ID NO: 4486326 - DNA, 25 bp, Homo sapien
tgaccaacacctattgccaaaatgg

SEQ ID NO: 4486327 - DNA, 25 bp, Homo sapien
cctcctaaattgcagttctcgctca

SEQ ID NO: 4486328 - DNA, 25 bp, Homo sapien
caagaagtggtgcatttaagcaagt

SEQ ID NO: 4486329 - DNA, 25 bp, Homo sapien
gattctagactccaccacccatcat

SEQ ID NO: 4486330 - DNA, 25 bp, Homo sapien
tctcgttcattccatttgcatatcc

SEQ ID NO: 4486331 - DNA, 25 bp, Homo sapien
aatctggtatgacatcactctcccc

SEQ ID NO: 4486332 - DNA, 25 bp, Homo sapien
tgtctatcaagcatggaatctggta

SEQ ID NO: 4486333 - DNA, 25 bp, Homo sapien
agcctgagtcccgctgcctctattt

SEQ ID NO: 4486334 - DNA, 25 bp, Homo sapien
tatttcctgttacctcagagggctc

SEQ ID NO: 4486335 - DNA, 25 bp, Homo sapien
tgctaccccgaacacctcaacccca

SEQ ID NO: 4486336 - DNA, 25 bp, Homo sapien
tcctctcctgctaccccgaacacct

SEQ ID NO: 4486337 - DNA, 25 bp, Homo sapien
ttctgtcactgacaatcccagagcc

SEQ ID NO: 4486338 - DNA, 25 bp, Homo sapien
gcttggagctgggtttctgtcactg

SEQ ID NO: 4486339 - DNA, 25 bp, Homo sapien
cttcaccttctctgttggcttggag

SEQ ID NO: 4486340 - DNA, 25 bp, Homo sapien
cttggattctctgcaccttcacctt

SEQ ID NO: 4486341 - DNA, 25 bp, Homo sapien
tgacgtcaaagacaagttgacccga

SEQ ID NO: 4486342 - DNA, 25 bp, Homo sapien
aagttgacccgagtcccaactctgg

SEQ ID NO: 4486343 - DNA, 25 bp, Homo sapien
ggctctcgttcaggcagggaaagtc

SEQ ID NO: 4486344 - DNA, 25 bp, Homo sapien
ccagctggctctcgttcaggcaggg

SEQ ID NO: 4486345 - DNA, 25 bp, Homo sapien
cacgaataaattggtagaactgcat

SEQ ID NO: 4486346 - DNA, 25 bp, Homo sapien
ttcacgaataaattggtagaactgc

SEQ ID NO: 4486347 - DNA, 25 bp, Homo sapien
tcacgaataaattggtagaactgca

SEQ ID NO: 4486348 - DNA, 25 bp, Homo sapien
tttcacgaataaattggtagaactg

SEQ ID NO: 4486349 - DNA, 25 bp, Homo sapien
agccgcaccggagtccagggcttgt

SEQ ID NO: 4486350 - DNA, 25 bp, Homo sapien
cgcaccggagtccagggcttgtcac

SEQ ID NO: 4486351 - DNA, 25 bp, Homo sapien
cagccgcaccggagtccagggcttg

SEQ ID NO: 4486352 - DNA, 25 bp, Homo sapien
aggcccagccgcaccggagtccagg

SEQ ID NO: 4486353 - DNA, 25 bp, Homo sapien
ggagactggttgaccgctgtcctca

SEQ ID NO: 4486354 - DNA, 25 bp, Homo sapien
tgcctgtcctttcaagagtgcagca

SEQ ID NO: 4486355 - DNA, 25 bp, Homo sapien
aggaagctgttagctggagactggt

SEQ ID NO: 4486356 - DNA, 25 bp, Homo sapien
ctcagagatcgagccatgaggacct

SEQ ID NO: 4486357 - DNA, 25 bp, Homo sapien
tagctggcaagatagtcctgaaaca

SEQ ID NO: 4486358 - DNA, 25 bp, Homo sapien
acagtttccagctgttgaaggcctc

SEQ ID NO: 4486359 - DNA, 25 bp, Homo sapien
aaacagtttccagctgttgaaggcc

SEQ ID NO: 4486360 - DNA, 25 bp, Homo sapien
ttagctggcaagatagtcctgaaac

SEQ ID NO: 4486361 - DNA, 25 bp, Homo sapien
aaagaggctaatcccacattgctga

SEQ ID NO: 4486362 - DNA, 25 bp, Homo sapien
ccttcttgtccgtgagtggcttcca

SEQ ID NO: 4486363 - DNA, 25 bp, Homo sapien
gcttcctggcaacaagaactgggat

SEQ ID NO: 4486364 - DNA, 25 bp, Homo sapien
tctccattggccattaaaagcttcc

SEQ ID NO: 4486365 - DNA, 25 bp, Homo sapien
gtcagagtgagccagctgatggtca

SEQ ID NO: 4486366 - DNA, 25 bp, Homo sapien
agctgtcacctagagaaccaaagag

SEQ ID NO: 4486367 - DNA, 25 bp, Homo sapien
caggaccattcccatggaagagagg

SEQ ID NO: 4486368 - DNA, 25 bp, Homo sapien
ccaggaccattcccatggaagagag

SEQ ID NO: 4486369 - DNA, 25 bp, Homo sapien
cttgccctggccgatatgcacatgg

SEQ ID NO: 4486370 - DNA, 25 bp, Homo sapien
gccagggttccagggttgcaactca

SEQ ID NO: 4486371 - DNA, 25 bp, Homo sapien
cacatggtggtcttggtcatggcca

SEQ ID NO: 4486372 - DNA, 25 bp, Homo sapien
gatgtggatggaatagaccgtggca

SEQ ID NO: 4486373 - DNA, 25 bp, Homo sapien
tcggctcgtcgtggtctttaatgac

SEQ ID NO: 4486374 - DNA, 25 bp, Homo sapien
gggttcgcaaaacaatcggctcgtc

SEQ ID NO: 4486375 - DNA, 25 bp, Homo sapien
cagctctcctccgttgtcaatcagg

SEQ ID NO: 4486376 - DNA, 25 bp, Homo sapien
caatcaggatgtgccgggttcgcaa

SEQ ID NO: 4486377 - DNA, 25 bp, Homo sapien
caaaaaaatagcctccttctgccat

SEQ ID NO: 4486378 - DNA, 25 bp, Homo sapien
cctgatttggggtcgatgacatgaa

SEQ ID NO: 4486379 - DNA, 25 bp, Homo sapien
cacctgggtgaagggtcttgttcag

SEQ ID NO: 4486380 - DNA, 25 bp, Homo sapien
catagtaaggatccggctgaatacc

SEQ ID NO: 4486381 - DNA, 25 bp, Homo sapien
tcattcgctgagtaaaatgccaaag

SEQ ID NO: 4486382 - DNA, 25 bp, Homo sapien
caggatgttgagtgggtcacatact

SEQ ID NO: 4486383 - DNA, 25 bp, Homo sapien
gaagggttttgacttgaccataatg

SEQ ID NO: 4486384 - DNA, 25 bp, Homo sapien
gcagcagtgaagacttcaagctcca

SEQ ID NO: 4486385 - DNA, 25 bp, Homo sapien
cgggcaccgcgttcaaatactggac

SEQ ID NO: 4486386 - DNA, 25 bp, Homo sapien
tgtcatccagatttcgagaaccttc

SEQ ID NO: 4486387 - DNA, 25 bp, Homo sapien
tcactgcaacagaaaggatcctgcc

SEQ ID NO: 4486388 - DNA, 25 bp, Homo sapien
caatttggtcatcgccttcctggcc

SEQ ID NO: 4486389 - DNA, 25 bp, Homo sapien
agagcccagtggaagccgaagtgag

SEQ ID NO: 4486390 - DNA, 25 bp, Homo sapien
agcccagtggaagccgaagtgaggg

SEQ ID NO: 4486391 - DNA, 25 bp, Homo sapien
gaaaggtaaattctcagtgggatag

SEQ ID NO: 4486392 - DNA, 25 bp, Homo sapien
taaattctcagtgggatagagtggc

SEQ ID NO: 4486393 - DNA, 25 bp, Homo sapien
tcattcacttgctgggcttctcttc

SEQ ID NO: 4486394 - DNA, 25 bp, Homo sapien
agcgtcaggtgaaggagggtccctc

SEQ ID NO: 4486395 - DNA, 25 bp, Homo sapien
aaagttctgcacgagtctgtacctg

SEQ ID NO: 4486396 - DNA, 25 bp, Homo sapien
cagagttgaagcagcgtcaggtgaa

SEQ ID NO: 4486397 - DNA, 25 bp, Homo sapien
tggtcttccactgaagatgatggat

SEQ ID NO: 4486398 - DNA, 25 bp, Homo sapien
catgatattcaatatggtcttccac

SEQ ID NO: 4486399 - DNA, 25 bp, Homo sapien
gatattcaatatggtcttccactga

SEQ ID NO: 4486400 - DNA, 25 bp, Homo sapien
tcaatatggtcttccactgaagatg

SEQ ID NO: 4486401 - DNA, 25 bp, Homo sapien
tcagagagacactggagggaatcag

SEQ ID NO: 4486402 - DNA, 25 bp, Homo sapien
aagcggctgctcactcatctagaca

SEQ ID NO: 4486403 - DNA, 25 bp, Homo sapien
cacttccatgtaaggtggccagtta

SEQ ID NO: 4486404 - DNA, 25 bp, Homo sapien
gattaagtcagtgaagatttccatg

SEQ ID NO: 4486405 - DNA, 25 bp, Homo sapien
gctctagcatgtctcacggtctgaa

SEQ ID NO: 4486406 - DNA, 25 bp, Homo sapien
cagagaaacgagaccctttaggagc

SEQ ID NO: 4486407 - DNA, 25 bp, Homo sapien
ctgaaggcccatctaaagtgtcgct

SEQ ID NO: 4486408 - DNA, 25 bp, Homo sapien
tcacttgggaagagatgatcatcca

SEQ ID NO: 4486409 - DNA, 25 bp, Homo sapien
aagaaacattgaaatattcgccatg

SEQ ID NO: 4486410 - DNA, 25 bp, Homo sapien
tattcgccatgctctgtctggaaca

SEQ ID NO: 4486411 - DNA, 25 bp, Homo sapien
cattgaaatattcgccatgctctgt

SEQ ID NO: 4486412 - DNA, 25 bp, Homo sapien
acaatttgaatacccgggcagcagc

SEQ ID NO: 4486413 - DNA, 25 bp, Homo sapien
tgtcaccaaattgtctgaaactcct

SEQ ID NO: 4486414 - DNA, 25 bp, Homo sapien
aaatcctagttctgcaaagacagtg

SEQ ID NO: 4486415 - DNA, 25 bp, Homo sapien
tatcccactgttaggtgtcaccaaa

SEQ ID NO: 4486416 - DNA, 25 bp, Homo sapien
taaagtggtcctactggtataagag

SEQ ID NO: 4486417 - DNA, 25 bp, Homo sapien
tccccacctttagtctgagatactt

SEQ ID NO: 4486418 - DNA, 25 bp, Homo sapien
ttatcatgatcgaaccactccgtcc

SEQ ID NO: 4486419 - DNA, 25 bp, Homo sapien
ctgtatatcaatgggacgattgcat

SEQ ID NO: 4486420 - DNA, 25 bp, Homo sapien
gattgcatatttttcctgggtgagc

SEQ ID NO: 4486421 - DNA, 25 bp, Homo sapien
tctactgcttatggctgggtgaaca

SEQ ID NO: 4486422 - DNA, 25 bp, Homo sapien
ggcccgagatgattatcccaatgat

SEQ ID NO: 4486423 - DNA, 25 bp, Homo sapien
caacactatttacaacggcccgaga

SEQ ID NO: 4486424 - DNA, 25 bp, Homo sapien
agcggccaacagtccaaacatggtt

SEQ ID NO: 4486425 - DNA, 25 bp, Homo sapien
tcccacagaggaaccgtacacggta

SEQ ID NO: 4486426 - DNA, 25 bp, Homo sapien
ggttaactccatccattgtagtggc

SEQ ID NO: 4486427 - DNA, 25 bp, Homo sapien
gtagcaagcaaacctataatcctgg

SEQ ID NO: 4486428 - DNA, 25 bp, Homo sapien
ttttgtagacaacctcggtgctgag

SEQ ID NO: 4486429 - DNA, 25 bp, Homo sapien
tcaatggtgactgtgagtttgggcc

SEQ ID NO: 4486430 - DNA, 25 bp, Homo sapien
atggtgactgtgagtttgggcctca

SEQ ID NO: 4486431 - DNA, 25 bp, Homo sapien
tcacattggtgtcaatggtgactgt

SEQ ID NO: 4486432 - DNA, 25 bp, Homo sapien
ctgttcacattggtgtcaatggtga

SEQ ID NO: 4486433 - DNA, 25 bp, Homo sapien
attatcctccaagttcagaatggtg

SEQ ID NO: 4486434 - DNA, 25 bp, Homo sapien
ccatgactgtacattatcctccaag

SEQ ID NO: 4486435 - DNA, 25 bp, Homo sapien
tacatggagtaatcagtactggcaa

SEQ ID NO: 4486436 - DNA, 25 bp, Homo sapien
gcaatgaccagggtatctccaggtt

SEQ ID NO: 4486437 - DNA, 25 bp, Homo sapien
ctagagaagctgatccctagacaac

SEQ ID NO: 4486438 - DNA, 25 bp, Homo sapien
ggctcagtctagagaagctgatccc

SEQ ID NO: 4486439 - DNA, 25 bp, Homo sapien
cagtctagagaagctgatccctaga

SEQ ID NO: 4486440 - DNA, 25 bp, Homo sapien
tcagtctagagaagctgatccctag

SEQ ID NO: 4486441 - DNA, 25 bp, Homo sapien
ccaattttcctttgcggaacagcca

SEQ ID NO: 4486442 - DNA, 25 bp, Homo sapien
tttcctagccaaagggtgagcacac

SEQ ID NO: 4486443 - DNA, 25 bp, Homo sapien
catattctaatactcctccaggtgg

SEQ ID NO: 4486444 - DNA, 25 bp, Homo sapien
gacttttgagcactatgtcccatgg

SEQ ID NO: 4486445 - DNA, 25 bp, Homo sapien
caaattaccatctccctccaaaaca

SEQ ID NO: 4486446 - DNA, 25 bp, Homo sapien
atctccctccaaaacacgtaagcct

SEQ ID NO: 4486447 - DNA, 25 bp, Homo sapien
accatctccctccaaaacacgtaag

SEQ ID NO: 4486448 - DNA, 25 bp, Homo sapien
taccatctccctccaaaacacgtaa

SEQ ID NO: 4486449 - DNA, 25 bp, Homo sapien
acagctcctcggcagggcaaaggag

SEQ ID NO: 4486450 - DNA, 25 bp, Homo sapien
ctgctgttttcatgggggcctcaca

SEQ ID NO: 4486451 - DNA, 25 bp, Homo sapien
tctggtgctgttcaccaggggctgc

SEQ ID NO: 4486452 - DNA, 25 bp, Homo sapien
gaggtggctgctccgagccgaatgt

SEQ ID NO: 4486453 - DNA, 25 bp, Homo sapien
tccatatccttaaggccctggactc

SEQ ID NO: 4486454 - DNA, 25 bp, Homo sapien
cctttccatatccttaaggccctgg

SEQ ID NO: 4486455 - DNA, 25 bp, Homo sapien
ggactccctccactagtgatttcat

SEQ ID NO: 4486456 - DNA, 25 bp, Homo sapien
cctggactccctccactagtgattt

SEQ ID NO: 4486457 - DNA, 25 bp, Homo sapien
aaaggtatcgaagtcaaagaaattg

SEQ ID NO: 4486458 - DNA, 25 bp, Homo sapien
ctccccgatgtgcaggtacattggt

SEQ ID NO: 4486459 - DNA, 25 bp, Homo sapien
gtggcccccaaaggtatcgaagtca

SEQ ID NO: 4486460 - DNA, 25 bp, Homo sapien
catcactatgatgttccggctcaga

SEQ ID NO: 4486461 - DNA, 25 bp, Homo sapien
gtgacgcagcgagagaatgtatgat

SEQ ID NO: 4486462 - DNA, 25 bp, Homo sapien
ttggagccatggactgtgacgcagc

SEQ ID NO: 4486463 - DNA, 25 bp, Homo sapien
gaagtgaatcgggtactgacccacc

SEQ ID NO: 4486464 - DNA, 25 bp, Homo sapien
tttcgtctacatcaccggccaggtg

SEQ ID NO: 4486465 - DNA, 25 bp, Homo sapien
taagtcaatcaatatcaaggtcagc

SEQ ID NO: 4486466 - DNA, 25 bp, Homo sapien
catatgtacaaggtcaaggcagaaa

SEQ ID NO: 4486467 - DNA, 25 bp, Homo sapien
tgcagctgtgatcaaactcaggcct

SEQ ID NO: 4486468 - DNA, 25 bp, Homo sapien
tgtgtccactcactccatatgggag

SEQ ID NO: 4486469 - DNA, 25 bp, Homo sapien
acatcttgctgtcacggtccgaggg

SEQ ID NO: 4486470 - DNA, 25 bp, Homo sapien
gtcaaaagtgttgcgttcctccggc

SEQ ID NO: 4486471 - DNA, 25 bp, Homo sapien
taccccgggtaggagtcctctgtga

SEQ ID NO: 4486472 - DNA, 25 bp, Homo sapien
ggcccatcttccgtgaagaagcagt

SEQ ID NO: 4486473 - DNA, 25 bp, Homo sapien
ggttgttgttgggattggccatcca

SEQ ID NO: 4486474 - DNA, 25 bp, Homo sapien
tgttgttgggattggccatccagaa

SEQ ID NO: 4486475 - DNA, 25 bp, Homo sapien
gttgttgggattggccatccagaag

SEQ ID NO: 4486476 - DNA, 25 bp, Homo sapien
ttgttgttgggattggccatccaga

SEQ ID NO: 4486477 - DNA, 25 bp, Homo sapien
gtagttggaatgtgctcggttgtta

SEQ ID NO: 4486478 - DNA, 25 bp, Homo sapien
acctggggagtacattcccacggag

SEQ ID NO: 4486479 - DNA, 25 bp, Homo sapien
tttcccagtggaatgtgctctgaat

SEQ ID NO: 4486480 - DNA, 25 bp, Homo sapien
gttgttatagaattttcccagtgga

SEQ ID NO: 4486481 - DNA, 25 bp, Homo sapien
aggaacggccgcttgtccttggcag

SEQ ID NO: 4486482 - DNA, 25 bp, Homo sapien
ctcggtggttttgactccgttgtct

SEQ ID NO: 4486483 - DNA, 25 bp, Homo sapien
ggtggttttgactccgttgtctatg

SEQ ID NO: 4486484 - DNA, 25 bp, Homo sapien
ctggcagagatgattgagaggaacg

SEQ ID NO: 4486485 - DNA, 25 bp, Homo sapien
cgggtcggcgtcctggtgagggctg

SEQ ID NO: 4486486 - DNA, 25 bp, Homo sapien
gaagtgtctgatgatggccggctcc

SEQ ID NO: 4486487 - DNA, 25 bp, Homo sapien
cttgtaggcaatgaagtgtctgatg

SEQ ID NO: 4486488 - DNA, 25 bp, Homo sapien
taggcaatgaagtgtctgatgatgg

SEQ ID NO: 4486489 - DNA, 25 bp, Homo sapien
ctggccagggtcaggccaatgccat

SEQ ID NO: 4486490 - DNA, 25 bp, Homo sapien
gggtcaggccaatgccattgtcagc

SEQ ID NO: 4486491 - DNA, 25 bp, Homo sapien
tggccagggtcaggccaatgccatt

SEQ ID NO: 4486492 - DNA, 25 bp, Homo sapien
ccagggtcaggccaatgccattgtc

SEQ ID NO: 4486493 - DNA, 25 bp, Homo sapien
gtcgtcatacgggaaggttccacca

SEQ ID NO: 4486494 - DNA, 25 bp, Homo sapien
gggccccagatcctattgtccatca

SEQ ID NO: 4486495 - DNA, 25 bp, Homo sapien
tggcctatagggagggtccttccgc

SEQ ID NO: 4486496 - DNA, 25 bp, Homo sapien
ctcttgcttggagccgtcgtcatac

SEQ ID NO: 4486497 - DNA, 25 bp, Homo sapien
caggcattattcaggcggaaggcca

SEQ ID NO: 4486498 - DNA, 25 bp, Homo sapien
tcctcaaaggcaatgccggtcacgt

SEQ ID NO: 4486499 - DNA, 25 bp, Homo sapien
aggccagggcgctggtgtgccggcc

SEQ ID NO: 4486500 - DNA, 25 bp, Homo sapien
gggccatcatataactgaattcctc

SEQ ID NO: 4486501 - DNA, 25 bp, Homo sapien
cattcttcgtgaggtaggagccagg

SEQ ID NO: 4486502 - DNA, 25 bp, Homo sapien
acacggagccgtcgacgtcatggaa

SEQ ID NO: 4486503 - DNA, 25 bp, Homo sapien
aggagccagggtactcggacacgga

SEQ ID NO: 4486504 - DNA, 25 bp, Homo sapien
ggaacacagatgtcttatccccatc

SEQ ID NO: 4486505 - DNA, 25 bp, Homo sapien
ctgtgcatagcacccactgcaaatg

SEQ ID NO: 4486506 - DNA, 25 bp, Homo sapien
atgcagtctgggtgccggaccagcc

SEQ ID NO: 4486507 - DNA, 25 bp, Homo sapien
ctccagtcgggaacattgatgcagt

SEQ ID NO: 4486508 - DNA, 25 bp, Homo sapien
gtgcatagcacccactgcaaatggc

SEQ ID NO: 4486509 - DNA, 25 bp, Homo sapien
tctggtcccagtggatggtgtagcc

SEQ ID NO: 4486510 - DNA, 25 bp, Homo sapien
cccctccaggtaaagagggtggctg

SEQ ID NO: 4486511 - DNA, 25 bp, Homo sapien
tattgctggtaatgggtgctcctgg

SEQ ID NO: 4486512 - DNA, 25 bp, Homo sapien
caggttactggtcttgtaggcttga

SEQ ID NO: 4486513 - DNA, 25 bp, Homo sapien
gagtcctcgtcccagtagtagtggc

SEQ ID NO: 4486514 - DNA, 25 bp, Homo sapien
tagtagtggctcctgccagggtagc

SEQ ID NO: 4486515 - DNA, 25 bp, Homo sapien
ccgtcttggacgtttgcttcagcag

SEQ ID NO: 4486516 - DNA, 25 bp, Homo sapien
tcagcaggcgattgtgaacatccga

SEQ ID NO: 4486517 - DNA, 25 bp, Homo sapien
ccttagagtcaaaatgcctagaaag

SEQ ID NO: 4486518 - DNA, 25 bp, Homo sapien
taaaaatgtcgttaatgtatgggac

SEQ ID NO: 4486519 - DNA, 25 bp, Homo sapien
ctggattctaagatttactgccttc

SEQ ID NO: 4486520 - DNA, 25 bp, Homo sapien
ttggcattaactacatggctgttct

SEQ ID NO: 4486521 - DNA, 25 bp, Homo sapien
tatatctctattgaatagaacctag

SEQ ID NO: 4486522 - DNA, 25 bp, Homo sapien
gctgggtcagctttatgctatgatc

SEQ ID NO: 4486523 - DNA, 25 bp, Homo sapien
cctagtgcaggttagcaaaagggtg

SEQ ID NO: 4486524 - DNA, 25 bp, Homo sapien
gtcagctttatgctatgatctcagg

SEQ ID NO: 4486525 - DNA, 25 bp, Homo sapien
tacgacagccctctcggtgaacttg

SEQ ID NO: 4486526 - DNA, 25 bp, Homo sapien
ttgggcatcggcacgtctacgacag

SEQ ID NO: 4486527 - DNA, 25 bp, Homo sapien
tgtggctgtgcagtcactgacgcct

SEQ ID NO: 4486528 - DNA, 25 bp, Homo sapien
gctgagaaccaaagagcttcttggg

SEQ ID NO: 4486529 - DNA, 25 bp, Homo sapien
aagcgaagtcgttccagaggtggaa

SEQ ID NO: 4486530 - DNA, 25 bp, Homo sapien
ttcaatgtaagcgaagtcgttccag

SEQ ID NO: 4486531 - DNA, 25 bp, Homo sapien
cgaagtcgttccagaggtggaagaa

SEQ ID NO: 4486532 - DNA, 25 bp, Homo sapien
tgtaagcgaagtcgttccagaggtg

SEQ ID NO: 4486533 - DNA, 25 bp, Homo sapien
gctgccatggtatgccttgcagaat

SEQ ID NO: 4486534 - DNA, 25 bp, Homo sapien
gagttcctgaagctcgtgtggctca

SEQ ID NO: 4486535 - DNA, 25 bp, Homo sapien
gccacatagttgaaaagctgccatg

SEQ ID NO: 4486536 - DNA, 25 bp, Homo sapien
cctggatgccatcctccgaactggg

SEQ ID NO: 4486537 - DNA, 25 bp, Homo sapien
ggacgctcttgtccaacacccatga

SEQ ID NO: 4486538 - DNA, 25 bp, Homo sapien
tccagactgatctgtgatgagggcc

SEQ ID NO: 4486539 - DNA, 25 bp, Homo sapien
tgatttgtgggcaggctgtggagac

SEQ ID NO: 4486540 - DNA, 25 bp, Homo sapien
caggcaaggacgctcttgtccaaca

SEQ ID NO: 4486541 - DNA, 25 bp, Homo sapien
tcgatatgtatctcttcccttgaat

SEQ ID NO: 4486542 - DNA, 25 bp, Homo sapien
gagaggatgtaagcagagcgtacca

SEQ ID NO: 4486543 - DNA, 25 bp, Homo sapien
gtaagcagagcgtaccatgccaggg

SEQ ID NO: 4486544 - DNA, 25 bp, Homo sapien
cacacagtaggacttcgatatgtat

SEQ ID NO: 4486545 - DNA, 25 bp, Homo sapien
ttttccagcactctggtccatgggc

SEQ ID NO: 4486546 - DNA, 25 bp, Homo sapien
ctctggagacgtatcttccctttga

SEQ ID NO: 4486547 - DNA, 25 bp, Homo sapien
tgggcctctggagacgtatcttccc

SEQ ID NO: 4486548 - DNA, 25 bp, Homo sapien
ccctttgatgccataagcactatgg

SEQ ID NO: 4486549 - DNA, 25 bp, Homo sapien
gcctttgaagccaacgaatgccatt

SEQ ID NO: 4486550 - DNA, 25 bp, Homo sapien
cagatgggccggaagctgcctttga

SEQ ID NO: 4486551 - DNA, 25 bp, Homo sapien
acccagatgggccggaagctgcctt

SEQ ID NO: 4486552 - DNA, 25 bp, Homo sapien
ctttgaagccaacgaatgccatttg

SEQ ID NO: 4486553 - DNA, 25 bp, Homo sapien
acagggatgggcacaacttggaaga

SEQ ID NO: 4486554 - DNA, 25 bp, Homo sapien
gatgggcacaacttggaagattttg

SEQ ID NO: 4486555 - DNA, 25 bp, Homo sapien
cacaacttggaagattttggctttg

SEQ ID NO: 4486556 - DNA, 25 bp, Homo sapien
tgggcacaacttggaagattttggc

SEQ ID NO: 4486557 - DNA, 25 bp, Homo sapien
gcattgcagtgcacatggacctgac

SEQ ID NO: 4486558 - DNA, 25 bp, Homo sapien
tgaggttggctcttgcttacaggag

SEQ ID NO: 4486559 - DNA, 25 bp, Homo sapien
ctcctgaaaggtggacacggccaga

SEQ ID NO: 4486560 - DNA, 25 bp, Homo sapien
cgtcatagtctaccacgaggtggca

SEQ ID NO: 4486561 - DNA, 25 bp, Homo sapien
tacgagcacatctagggtctcctgg

SEQ ID NO: 4486562 - DNA, 25 bp, Homo sapien
tttaaaagcagagccctatggtcac

SEQ ID NO: 4486563 - DNA, 25 bp, Homo sapien
aaaggaccagctatttcggcaacag

SEQ ID NO: 4486564 - DNA, 25 bp, Homo sapien
aatgtagttcatcacaagacccagg

SEQ ID NO: 4486565 - DNA, 25 bp, Homo sapien
agcaatgcaaaggacatctccaatc

SEQ ID NO: 4486566 - DNA, 25 bp, Homo sapien
tccaagcaatgcaaaggacatctcc

SEQ ID NO: 4486567 - DNA, 25 bp, Homo sapien
tggctctaggtacaccccttccaag

SEQ ID NO: 4486568 - DNA, 25 bp, Homo sapien
tccttggctctaggtacaccccttc

SEQ ID NO: 4486569 - DNA, 25 bp, Homo sapien
aatggggacatgagctattcttctc

SEQ ID NO: 4486570 - DNA, 25 bp, Homo sapien
gagataatggggacatgagctattc

SEQ ID NO: 4486571 - DNA, 25 bp, Homo sapien
ttccaggagataatggggacatgag

SEQ ID NO: 4486572 - DNA, 25 bp, Homo sapien
ccaggagataatggggacatgagct

SEQ ID NO: 4486573 - DNA, 25 bp, Homo sapien
agctccaagttggacgacattgagt

SEQ ID NO: 4486574 - DNA, 25 bp, Homo sapien
ccaagttggacgacattgagtgcca

SEQ ID NO: 4486575 - DNA, 25 bp, Homo sapien
caagttggacgacattgagtgccat

SEQ ID NO: 4486576 - DNA, 25 bp, Homo sapien
ctcagctccaagttggacgacattg

SEQ ID NO: 4486577 - DNA, 25 bp, Homo sapien
gaaagttccgaagaataggagtggc

SEQ ID NO: 4486578 - DNA, 25 bp, Homo sapien
tatgcactgcatgtgagcctcacac

SEQ ID NO: 4486579 - DNA, 25 bp, Homo sapien
gagttagctacggagttcatttggg

SEQ ID NO: 4486580 - DNA, 25 bp, Homo sapien
tgatgtcagaaagtacaacacttcc

SEQ ID NO: 4486581 - DNA, 25 bp, Homo sapien
tcatgcttattaggcagacacagct

SEQ ID NO: 4486582 - DNA, 25 bp, Homo sapien
gtgtgctacattcttttattgctgc

SEQ ID NO: 4486583 - DNA, 25 bp, Homo sapien
gtgtcacaggtgaattctcgctggc

SEQ ID NO: 4486584 - DNA, 25 bp, Homo sapien
tcctagacctcagcctgtacaagtg

SEQ ID NO: 4486585 - DNA, 25 bp, Homo sapien
gctcactgaagtctctacctaccgg

SEQ ID NO: 4486586 - DNA, 25 bp, Homo sapien
gaaacctgtatcagatatacacatc

SEQ ID NO: 4486587 - DNA, 25 bp, Homo sapien
gatggtgatactgtggcttttgtac

SEQ ID NO: 4486588 - DNA, 25 bp, Homo sapien
taaattaaaccaacttagtatgcat

SEQ ID NO: 4486589 - DNA, 25 bp, Homo sapien
tgtgacagacgactcaataacctca

SEQ ID NO: 4486590 - DNA, 25 bp, Homo sapien
catgatgtgctactgttgatgtctg

SEQ ID NO: 4486591 - DNA, 25 bp, Homo sapien
ctttgataaagtgcctaaatctgtg

SEQ ID NO: 4486592 - DNA, 25 bp, Homo sapien
tttcgtatagagtaacatgatgtgc

SEQ ID NO: 4486593 - DNA, 25 bp, Homo sapien
tagtattaaccccagagcactgaag

SEQ ID NO: 4486594 - DNA, 25 bp, Homo sapien
tgttatccagtacacctcggcttag

SEQ ID NO: 4486595 - DNA, 25 bp, Homo sapien
gattcttgccttgccgctgcactag

SEQ ID NO: 4486596 - DNA, 25 bp, Homo sapien
ggatgagctcaggttaagacactaa

SEQ ID NO: 4486597 - DNA, 25 bp, Homo sapien
gccgcccaacgcggacgctgccggc

SEQ ID NO: 4486598 - DNA, 25 bp, Homo sapien
ccaacgcggacgctgccggcgtggg

SEQ ID NO: 4486599 - DNA, 25 bp, Homo sapien
acgccgccgcccaacgcggacgctg

SEQ ID NO: 4486600 - DNA, 25 bp, Homo sapien
tcccccgtggtcctgggccgagaga

SEQ ID NO: 4486601 - DNA, 25 bp, Homo sapien
tcccggatgcttgcgcgatgcgctg

SEQ ID NO: 4486602 - DNA, 25 bp, Homo sapien
gatgcttgcgcgatgcgctgctcct

SEQ ID NO: 4486603 - DNA, 25 bp, Homo sapien
cgctcccggatgcttgcgcgatgcg

SEQ ID NO: 4486604 - DNA, 25 bp, Homo sapien
gccgctcccggatgcttgcgcgatg

SEQ ID NO: 4486605 - DNA, 25 bp, Homo sapien
ttcacctcggagcgcggccgtggct

SEQ ID NO: 4486606 - DNA, 25 bp, Homo sapien
ctgcacgagtctccctgccaccggg

SEQ ID NO: 4486607 - DNA, 25 bp, Homo sapien
tgccatttttgtcaaccgccaactt

SEQ ID NO: 4486608 - DNA, 25 bp, Homo sapien
acttccgagcgagcgggcagaaact

SEQ ID NO: 4486609 - DNA, 25 bp, Homo sapien
ctgtcgcctcgtctggggcccgcag

SEQ ID NO: 4486610 - DNA, 25 bp, Homo sapien
cggcccggcgctggctgtctacgca

SEQ ID NO: 4486611 - DNA, 25 bp, Homo sapien
gcgccgcggcggcacgccctcccag

SEQ ID NO: 4486612 - DNA, 25 bp, Homo sapien
gcggcacgccctcccagaccgcgcg

SEQ ID NO: 4486613 - DNA, 25 bp, Homo sapien
cccggcgctggctgtctacgcaagt

SEQ ID NO: 4486614 - DNA, 25 bp, Homo sapien
ctccagctcttgggaagcggcgccg

SEQ ID NO: 4486615 - DNA, 25 bp, Homo sapien
gtgtggccggcactgtcgcggccgc

SEQ ID NO: 4486616 - DNA, 25 bp, Homo sapien
gcgggagcctgcactgattgcgcac

SEQ ID NO: 4486617 - DNA, 25 bp, Homo sapien
ggccgcgccgagtcagagtcgggcg

SEQ ID NO: 4486618 - DNA, 25 bp, Homo sapien
gtgggcttcaggcgccgtgacccca

SEQ ID NO: 4486619 - DNA, 25 bp, Homo sapien
ctggctctctgggacgcgcggccgc

SEQ ID NO: 4486620 - DNA, 25 bp, Homo sapien
gccgtgaccccaccaggcggcactt

SEQ ID NO: 4486621 - DNA, 25 bp, Homo sapien
caggcggcacttccccgcgacggcg

SEQ ID NO: 4486622 - DNA, 25 bp, Homo sapien
gcagctttcggcctcctagagggct

SEQ ID NO: 4486623 - DNA, 25 bp, Homo sapien
catgaaccggggcagagcaaactca

SEQ ID NO: 4486624 - DNA, 25 bp, Homo sapien
tcaggcgggctgtgctgtcagccgc

SEQ ID NO: 4486625 - DNA, 25 bp, Homo sapien
gagagaacgcggaaggctcttcggg

SEQ ID NO: 4486626 - DNA, 25 bp, Homo sapien
ggccgcggtgccttccccgcaccat

SEQ ID NO: 4486627 - DNA, 25 bp, Homo sapien
cggccgtcgcgactcagctggccaa

SEQ ID NO: 4486628 - DNA, 25 bp, Homo sapien
cagctggccaaggccgcggtgcctt

SEQ ID NO: 4486629 - DNA, 25 bp, Homo sapien
tggggagcccgctaccaccgccgct

SEQ ID NO: 4486630 - DNA, 25 bp, Homo sapien
tcaggaacttgaggttgcgcgacag

SEQ ID NO: 4486631 - DNA, 25 bp, Homo sapien
cgaagcggcccatgttgagctggct

SEQ ID NO: 4486632 - DNA, 25 bp, Homo sapien
tggtcgcagacggataccagcctct

SEQ ID NO: 4486633 - DNA, 25 bp, Homo sapien
gcatcttgcccttgcagtggtcgca

SEQ ID NO: 4486634 - DNA, 25 bp, Homo sapien
ccttaaagcctgagatagcagggtg

SEQ ID NO: 4486635 - DNA, 25 bp, Homo sapien
ttcactggcggtaaagtcctgggcg

SEQ ID NO: 4486636 - DNA, 25 bp, Homo sapien
aactgcggctcggtggcgaagccta

SEQ ID NO: 4486637 - DNA, 25 bp, Homo sapien
tccctgtggtccgacatcttggcgc

SEQ ID NO: 4486638 - DNA, 25 bp, Homo sapien
ttcctctcgagcatttaacgttggg

SEQ ID NO: 4486639 - DNA, 25 bp, Homo sapien
cctccaagtgcgtgtgcaggttgcg

SEQ ID NO: 4486640 - DNA, 25 bp, Homo sapien
ggtgggagtgataacacaaccagca

SEQ ID NO: 4486641 - DNA, 25 bp, Homo sapien
ggccctgccttgtggaagattcctc

SEQ ID NO: 4486642 - DNA, 25 bp, Homo sapien
catgttacatgaccaaacgtagagc

SEQ ID NO: 4486643 - DNA, 25 bp, Homo sapien
tatgcatgcaggattgtcactggca

SEQ ID NO: 4486644 - DNA, 25 bp, Homo sapien
ttcagggtggtgaaacagtcctacc

SEQ ID NO: 4486645 - DNA, 25 bp, Homo sapien
tgtcctgaaaatcgcttctgcaagg

SEQ ID NO: 4486646 - DNA, 25 bp, Homo sapien
caacatgtgaaagcatagaaagctg

SEQ ID NO: 4486647 - DNA, 25 bp, Homo sapien
cttgggcaaccaaagagctaaaggg

SEQ ID NO: 4486648 - DNA, 25 bp, Homo sapien
ccgttttccaggacaagcgtcaaca

SEQ ID NO: 4486649 - DNA, 25 bp, Homo sapien
tagcttgtctgctattccgttttcc

SEQ ID NO: 4486650 - DNA, 25 bp, Homo sapien
ttccaagtaggtgaagagcaaaggc

SEQ ID NO: 4486651 - DNA, 25 bp, Homo sapien
tgctagaaatgcctcagtgaggagt

SEQ ID NO: 4486652 - DNA, 25 bp, Homo sapien
tatcctaaagtccacgggagaacca

SEQ ID NO: 4486653 - DNA, 25 bp, Homo sapien
gaaccatggaagtgttccaagtagg

SEQ ID NO: 4486654 - DNA, 25 bp, Homo sapien
cccagcttaagtacactgttataac

SEQ ID NO: 4486655 - DNA, 25 bp, Homo sapien
ccagcttaagtacactgttataact

SEQ ID NO: 4486656 - DNA, 25 bp, Homo sapien
gcagagattgctagtgggcactgct

SEQ ID NO: 4486657 - DNA, 25 bp, Homo sapien
gagattgctagtgggcactgctcac

SEQ ID NO: 4486658 - DNA, 25 bp, Homo sapien
gagggtccccctgcattccctgatg

SEQ ID NO: 4486659 - DNA, 25 bp, Homo sapien
ccaaacgcccaaatgccagtttgct

SEQ ID NO: 4486660 - DNA, 25 bp, Homo sapien
ttaatttgcccaaacgcccaaatgc

SEQ ID NO: 4486661 - DNA, 25 bp, Homo sapien
tgcccaaacgcccaaatgccagttt

SEQ ID NO: 4486662 - DNA, 25 bp, Homo sapien
aatttgcccaaacgcccaaatgcca

SEQ ID NO: 4486663 - DNA, 25 bp, Homo sapien
caaatgggtagttgcacattggaaa

SEQ ID NO: 4486664 - DNA, 25 bp, Homo sapien
ggaaatgattcaaatgggtagttgc

SEQ ID NO: 4486665 - DNA, 25 bp, Homo sapien
aatgattcaaatgggtagttgcaca

SEQ ID NO: 4486666 - DNA, 25 bp, Homo sapien
ttcaaatgggtagttgcacattgga

SEQ ID NO: 4486667 - DNA, 25 bp, Homo sapien
taatgagactgtcctcctcgtcctc

SEQ ID NO: 4486668 - DNA, 25 bp, Homo sapien
tgagactgtcctcctcgtcctccat

SEQ ID NO: 4486669 - DNA, 25 bp, Homo sapien
aatgagactgtcctcctcgtcctcc

SEQ ID NO: 4486670 - DNA, 25 bp, Homo sapien
cttaatgagactgtcctcctcgtcc

SEQ ID NO: 4486671 - DNA, 25 bp, Homo sapien
tgtaatcgccgttcctctgactgtg

SEQ ID NO: 4486672 - DNA, 25 bp, Homo sapien
agcatgcaacttatcggctactttg

SEQ ID NO: 4486673 - DNA, 25 bp, Homo sapien
caaaaaagatatcggagtgggcacc

SEQ ID NO: 4486674 - DNA, 25 bp, Homo sapien
gtgggcaccagatgtaataaaaatc

SEQ ID NO: 4486675 - DNA, 25 bp, Homo sapien
caaatttcatgatggggtttgttct

SEQ ID NO: 4486676 - DNA, 25 bp, Homo sapien
gaagttgcagaatatatgcaatact

SEQ ID NO: 4486677 - DNA, 25 bp, Homo sapien
aaagagaagttgcagaatatatgca

SEQ ID NO: 4486678 - DNA, 25 bp, Homo sapien
catgatggggtttgttctaaggaga

SEQ ID NO: 4486679 - DNA, 25 bp, Homo sapien
gatgcgcttgtatcggcagcaccaa

SEQ ID NO: 4486680 - DNA, 25 bp, Homo sapien
gaggctttcggtcactttcccagag

SEQ ID NO: 4486681 - DNA, 25 bp, Homo sapien
taaacggcacaaccttggcggatgc

SEQ ID NO: 4486682 - DNA, 25 bp, Homo sapien
gacagctagtgtggaaatacccgag

SEQ ID NO: 4486683 - DNA, 25 bp, Homo sapien
tctgcccatggtcgaggacagtact

SEQ ID NO: 4486684 - DNA, 25 bp, Homo sapien
gggattctgcccatggtcgaggaca

SEQ ID NO: 4486685 - DNA, 25 bp, Homo sapien
gattctgcccatggtcgaggacagt

SEQ ID NO: 4486686 - DNA, 25 bp, Homo sapien
gcccatggtcgaggacagtactgga

SEQ ID NO: 4486687 - DNA, 25 bp, Homo sapien
tttggactattcatggatttggtag

SEQ ID NO: 4486688 - DNA, 25 bp, Homo sapien
caaagatgaagtcagcgaggaggaa

SEQ ID NO: 4486689 - DNA, 25 bp, Homo sapien
aactgttcagtattgtttggactat

SEQ ID NO: 4486690 - DNA, 25 bp, Homo sapien
gactattcatggatttggtagctgt

SEQ ID NO: 4486691 - DNA, 25 bp, Homo sapien
atactatttgggatctgatttagat

SEQ ID NO: 4486692 - DNA, 25 bp, Homo sapien
tactatttgggatctgatttagata

SEQ ID NO: 4486693 - DNA, 25 bp, Homo sapien
actatttgggatctgatttagataa

SEQ ID NO: 4486694 - DNA, 25 bp, Homo sapien
ttcagtcctttgagctctgcttcca

SEQ ID NO: 4486695 - DNA, 25 bp, Homo sapien
acagcatacgctcacttcacgtctc

SEQ ID NO: 4486696 - DNA, 25 bp, Homo sapien
gatgttgccattgtagttgtttggg

SEQ ID NO: 4486697 - DNA, 25 bp, Homo sapien
ggcatataagatagcaaatccaatc

SEQ ID NO: 4486698 - DNA, 25 bp, Homo sapien
atgaaccatgggcatataagatagc

SEQ ID NO: 4486699 - DNA, 25 bp, Homo sapien
ctccctgctgttcagcaagtgggcc

SEQ ID NO: 4486700 - DNA, 25 bp, Homo sapien
gctccctgctgttcagcaagtgggc

SEQ ID NO: 4486701 - DNA, 25 bp, Homo sapien
tccctgctgttcagcaagtgggcct

SEQ ID NO: 4486702 - DNA, 25 bp, Homo sapien
cgctccctgctgttcagcaagtggg

SEQ ID NO: 4486703 - DNA, 25 bp, Homo sapien
ggactcccggaccatacacgttctg

SEQ ID NO: 4486704 - DNA, 25 bp, Homo sapien
ctcattccagttgcctatccggact

SEQ ID NO: 4486705 - DNA, 25 bp, Homo sapien
gacatcctcattccagttgcctatc

SEQ ID NO: 4486706 - DNA, 25 bp, Homo sapien
caggtagacatcctcattccagttg

SEQ ID NO: 4486707 - DNA, 25 bp, Homo sapien
cttctctgtatgagaagtttcccct

SEQ ID NO: 4486708 - DNA, 25 bp, Homo sapien
tttagtcttctacttctctgtatga

SEQ ID NO: 4486709 - DNA, 25 bp, Homo sapien
agagattctgttttagtcttctact

SEQ ID NO: 4486710 - DNA, 25 bp, Homo sapien
tatgagaagtttccccttgtctctc

SEQ ID NO: 4486711 - DNA, 25 bp, Homo sapien
gccatcttcagttacggaaagttgc

SEQ ID NO: 4486712 - DNA, 25 bp, Homo sapien
catcttcagttacggaaagttgcat

SEQ ID NO: 4486713 - DNA, 25 bp, Homo sapien
tatagccatcttcagttacggaaag

SEQ ID NO: 4486714 - DNA, 25 bp, Homo sapien
gaatatagccatcttcagttacgga

SEQ ID NO: 4486715 - DNA, 25 bp, Homo sapien
tcaggatcatcaggattcacaagca

SEQ ID NO: 4486716 - DNA, 25 bp, Homo sapien
tgtcaggatcatcaggattcacaag

SEQ ID NO: 4486717 - DNA, 25 bp, Homo sapien
gatcatcaggattcacaagcatcac

SEQ ID NO: 4486718 - DNA, 25 bp, Homo sapien
caggatcatcaggattcacaagcat

SEQ ID NO: 4486719 - DNA, 25 bp, Homo sapien
aggtccccacgcagaaacacatcag

SEQ ID NO: 4486720 - DNA, 25 bp, Homo sapien
tcatctggagtcatacacaggctca

SEQ ID NO: 4486721 - DNA, 25 bp, Homo sapien
gatgggactgaatttcatctggagt

SEQ ID NO: 4486722 - DNA, 25 bp, Homo sapien
aattcgtctttcagatgggactgaa

SEQ ID NO: 4486723 - DNA, 25 bp, Homo sapien
gggtcttggcttgaactgcgctcag

SEQ ID NO: 4486724 - DNA, 25 bp, Homo sapien
ttggggtcttggcttgaactgcgct

SEQ ID NO: 4486725 - DNA, 25 bp, Homo sapien
cttgaactgcgctcaggccacaggg

SEQ ID NO: 4486726 - DNA, 25 bp, Homo sapien
ttggcttgaactgcgctcaggccac

SEQ ID NO: 4486727 - DNA, 25 bp, Homo sapien
aaggacttgaccagtggcatctctg

SEQ ID NO: 4486728 - DNA, 25 bp, Homo sapien
gtcctgcccatatctaaggacttga

SEQ ID NO: 4486729 - DNA, 25 bp, Homo sapien
tgcccatatctaaggacttgaccag

SEQ ID NO: 4486730 - DNA, 25 bp, Homo sapien
catatctaaggacttgaccagtggc

SEQ ID NO: 4486731 - DNA, 25 bp, Homo sapien
gccaagacctcttagacgatttcag

SEQ ID NO: 4486732 - DNA, 25 bp, Homo sapien
cagttcacatgggagacctcatctg

SEQ ID NO: 4486733 - DNA, 25 bp, Homo sapien
cctcttagacgatttcaggagggtc

SEQ ID NO: 4486734 - DNA, 25 bp, Homo sapien
tgttaggtacacttcctggagccaa

SEQ ID NO: 4486735 - DNA, 25 bp, Homo sapien
caggcgtaactgggggtcagggaag

SEQ ID NO: 4486736 - DNA, 25 bp, Homo sapien
agatgcgtccaccaaaaagaacaca

SEQ ID NO: 4486737 - DNA, 25 bp, Homo sapien
ccaaggtcaaagatgcgtccaccaa

SEQ ID NO: 4486738 - DNA, 25 bp, Homo sapien
tccatgctttttcccgaagagggtc

SEQ ID NO: 4486739 - DNA, 25 bp, Homo sapien
ccaacaggaaaaatcggtggtccat

SEQ ID NO: 4486740 - DNA, 25 bp, Homo sapien
gggctgccagtccccgatttgtgtg

SEQ ID NO: 4486741 - DNA, 25 bp, Homo sapien
ctgccagtccccgatttgtgtgaca

SEQ ID NO: 4486742 - DNA, 25 bp, Homo sapien
cagtccccgatttgtgtgacagtga

SEQ ID NO: 4486743 - DNA, 25 bp, Homo sapien
tgattgatgagaattttagcatttg

SEQ ID NO: 4486744 - DNA, 25 bp, Homo sapien
tctcgaaagcaccttaagaagcgga

SEQ ID NO: 4486745 - DNA, 25 bp, Homo sapien
gaagcggattgctagataaagccct

SEQ ID NO: 4486746 - DNA, 25 bp, Homo sapien
tggcggtatttcatcagcaaaggac

SEQ ID NO: 4486747 - DNA, 25 bp, Homo sapien
gacatgtttgcagggaggttacacc

SEQ ID NO: 4486748 - DNA, 25 bp, Homo sapien
tgggcagatccaacatggaggacga

SEQ ID NO: 4486749 - DNA, 25 bp, Homo sapien
ctgctccatggctcgagtgtcctct

SEQ ID NO: 4486750 - DNA, 25 bp, Homo sapien
gaggacgaggcatccctgggattcc

SEQ ID NO: 4486751 - DNA, 25 bp, Homo sapien
gctccatggctcgagtgtcctctgt

SEQ ID NO: 4486752 - DNA, 25 bp, Homo sapien
ggaactatctaatcacatgggtgcc

SEQ ID NO: 4486753 - DNA, 25 bp, Homo sapien
gggaaaacatgcacgtgcctggcgt

SEQ ID NO: 4486754 - DNA, 25 bp, Homo sapien
ctacatttgatgagagcgggaccag

SEQ ID NO: 4486755 - DNA, 25 bp, Homo sapien
tcaagagggaaactgtggtaccaaa

SEQ ID NO: 4486756 - DNA, 25 bp, Homo sapien
aaactcattgcacagggtttgaggg

SEQ ID NO: 4486757 - DNA, 25 bp, Homo sapien
cgttctgccttctcgggaagactct

SEQ ID NO: 4486758 - DNA, 25 bp, Homo sapien
agagagagctgtgaaaagttcctcc

SEQ ID NO: 4486759 - DNA, 25 bp, Homo sapien
tccatgggaggatcgatggcagctt

SEQ ID NO: 4486760 - DNA, 25 bp, Homo sapien
tcagctccatctcgcccgcagtgct

SEQ ID NO: 4486761 - DNA, 25 bp, Homo sapien
ctcagctccatctcgcccgcagtgc

SEQ ID NO: 4486762 - DNA, 25 bp, Homo sapien
tcgcccgcagtgctccacacaccct

SEQ ID NO: 4486763 - DNA, 25 bp, Homo sapien
ccatctcgcccgcagtgctccacac

SEQ ID NO: 4486764 - DNA, 25 bp, Homo sapien
gattgcagcaccacttattcccgga

SEQ ID NO: 4486765 - DNA, 25 bp, Homo sapien
aaatggacgctcagttctcagacgg

SEQ ID NO: 4486766 - DNA, 25 bp, Homo sapien
tcccaggctccgatagttgagatgc

SEQ ID NO: 4486767 - DNA, 25 bp, Homo sapien
gaggccggcctttgagtcagatccc

SEQ ID NO: 4486768 - DNA, 25 bp, Homo sapien
ctggtgcccacctacctccctatgc

SEQ ID NO: 4486769 - DNA, 25 bp, Homo sapien
tgcccacctacctccctatgcacag

SEQ ID NO: 4486770 - DNA, 25 bp, Homo sapien
ggtgcccacctacctccctatgcac

SEQ ID NO: 4486771 - DNA, 25 bp, Homo sapien
cccacctacctccctatgcacagtc

SEQ ID NO: 4486772 - DNA, 25 bp, Homo sapien
gggaggtgccttctactgtgctcgt

SEQ ID NO: 4486773 - DNA, 25 bp, Homo sapien
ctactgtgctcgtaaatgttgacca

SEQ ID NO: 4486774 - DNA, 25 bp, Homo sapien
ctgacggctcatgcccacgtcatat

SEQ ID NO: 4486775 - DNA, 25 bp, Homo sapien
atgcccacgtcatatctgcagcagg

SEQ ID NO: 4486776 - DNA, 25 bp, Homo sapien
tatgccgatgccagactgcagaaag

SEQ ID NO: 4486777 - DNA, 25 bp, Homo sapien
agactgcagaaagggcttagatttc

SEQ ID NO: 4486778 - DNA, 25 bp, Homo sapien
gaaagggcttagatttcctgtggct

SEQ ID NO: 4486779 - DNA, 25 bp, Homo sapien
tcatatgccgatgccagactgcaga

SEQ ID NO: 4486780 - DNA, 25 bp, Homo sapien
ctgagctcacggagtcaaggctgca

SEQ ID NO: 4486781 - DNA, 25 bp, Homo sapien
agtgagccgggattgcactgctgaa

SEQ ID NO: 4486782 - DNA, 25 bp, Homo sapien
gagccgggattgcactgctgaactc

SEQ ID NO: 4486783 - DNA, 25 bp, Homo sapien
gagctcacggagtcaaggctgcagt

SEQ ID NO: 4486784 - DNA, 25 bp, Homo sapien
gaatatcctgctttcaacagccacc

SEQ ID NO: 4486785 - DNA, 25 bp, Homo sapien
tgtctgccctcctcggtgtacccat

SEQ ID NO: 4486786 - DNA, 25 bp, Homo sapien
atccagactggtttcctggaatatc

SEQ ID NO: 4486787 - DNA, 25 bp, Homo sapien
ctggaatatcctgctttcaacagcc

SEQ ID NO: 4486788 - DNA, 25 bp, Homo sapien
ggcccttggctgacgggtggccact

SEQ ID NO: 4486789 - DNA, 25 bp, Homo sapien
cttggctgacgggtggccactggac

SEQ ID NO: 4486790 - DNA, 25 bp, Homo sapien
gcccttggctgacgggtggccactg

SEQ ID NO: 4486791 - DNA, 25 bp, Homo sapien
ctggcccttggctgacgggtggcca

SEQ ID NO: 4486792 - DNA, 25 bp, Homo sapien
gggctagagccatcatcactggtct

SEQ ID NO: 4486793 - DNA, 25 bp, Homo sapien
cctggagatggaccgaaattttgca

SEQ ID NO: 4486794 - DNA, 25 bp, Homo sapien
gcacagatgagtggaaaattccctc

SEQ ID NO: 4486795 - DNA, 25 bp, Homo sapien
caggatatttctcatcagggctaga

SEQ ID NO: 4486796 - DNA, 25 bp, Homo sapien
tgtccgccacccatgtatactgagc

SEQ ID NO: 4486797 - DNA, 25 bp, Homo sapien
ctttgtccgccacccatgtatactg

SEQ ID NO: 4486798 - DNA, 25 bp, Homo sapien
ttgtccgccacccatgtatactgag

SEQ ID NO: 4486799 - DNA, 25 bp, Homo sapien
gtccgccacccatgtatactgagcc

SEQ ID NO: 4486800 - DNA, 25 bp, Homo sapien
ggggcactggcaagtggtccagttc

SEQ ID NO: 4486801 - DNA, 25 bp, Homo sapien
gggcactggcaagtggtccagttca

SEQ ID NO: 4486802 - DNA, 25 bp, Homo sapien
cactggggcactggcaagtggtcca

SEQ ID NO: 4486803 - DNA, 25 bp, Homo sapien
ggcactggcaagtggtccagttcat

SEQ ID NO: 4486804 - DNA, 25 bp, Homo sapien
cttctcaaccttccccagcacaccc

SEQ ID NO: 4486805 - DNA, 25 bp, Homo sapien
ttctcaaccttccccagcacaccca

SEQ ID NO: 4486806 - DNA, 25 bp, Homo sapien
tctcaaccttccccagcacacccat

SEQ ID NO: 4486807 - DNA, 25 bp, Homo sapien
ttttctctttgaactcagatgccat

SEQ ID NO: 4486808 - DNA, 25 bp, Homo sapien
cattttctctttgaactcagatgcc

SEQ ID NO: 4486809 - DNA, 25 bp, Homo sapien
attttctctttgaactcagatgcca

SEQ ID NO: 4486810 - DNA, 25 bp, Homo sapien
agcagtctctccatctgccagtccc

SEQ ID NO: 4486811 - DNA, 25 bp, Homo sapien
ctgggtagcagtctctccatctgcc

SEQ ID NO: 4486812 - DNA, 25 bp, Homo sapien
agtctctccatctgccagtccccat

SEQ ID NO: 4486813 - DNA, 25 bp, Homo sapien
tgggtagcagtctctccatctgcca

SEQ ID NO: 4486814 - DNA, 25 bp, Homo sapien
atttctccctatttgtatattcctt

SEQ ID NO: 4486815 - DNA, 25 bp, Homo sapien
ccctatttgtatattccttttgaat

SEQ ID NO: 4486816 - DNA, 25 bp, Homo sapien
tctccctatttgtatattccttttg

SEQ ID NO: 4486817 - DNA, 25 bp, Homo sapien
catttctccctatttgtatattcct

SEQ ID NO: 4486818 - DNA, 25 bp, Homo sapien
ctgcactttgtcgtgcagaaagttc

SEQ ID NO: 4486819 - DNA, 25 bp, Homo sapien
gttctcatgagttccagaatgtgtt

SEQ ID NO: 4486820 - DNA, 25 bp, Homo sapien
tgtcgtgcagaaagttctcatgagt

SEQ ID NO: 4486821 - DNA, 25 bp, Homo sapien
tgtgttggcccctttccatggtttc

SEQ ID NO: 4486822 - DNA, 25 bp, Homo sapien
tcagcaagttagaatagaaaacttg

SEQ ID NO: 4486823 - DNA, 25 bp, Homo sapien
tattcagcaagttagaatagaaaac

SEQ ID NO: 4486824 - DNA, 25 bp, Homo sapien
aacaattgccgtctttttattcagc

SEQ ID NO: 4486825 - DNA, 25 bp, Homo sapien
ctttttattcagcaagttagaatag

SEQ ID NO: 4486826 - DNA, 25 bp, Homo sapien
ttgagttgctgcgtgccctttggtg

SEQ ID NO: 4486827 - DNA, 25 bp, Homo sapien
cgtgccctttggtggcaggctttag

SEQ ID NO: 4486828 - DNA, 25 bp, Homo sapien
tggttgagttgctgcgtgccctttg

SEQ ID NO: 4486829 - DNA, 25 bp, Homo sapien
ctgcgtgccctttggtggcaggctt

SEQ ID NO: 4486830 - DNA, 25 bp, Homo sapien
cactaaggatggtgcatcatacagc

SEQ ID NO: 4486831 - DNA, 25 bp, Homo sapien
aagtgccttagctcccaaatgtgag

SEQ ID NO: 4486832 - DNA, 25 bp, Homo sapien
tcactagttctggaagcgggaccca

SEQ ID NO: 4486833 - DNA, 25 bp, Homo sapien
gcgggacccagatccaagtgcctta

SEQ ID NO: 4486834 - DNA, 25 bp, Homo sapien
gacttcctgttactgcagagagagt

SEQ ID NO: 4486835 - DNA, 25 bp, Homo sapien
gagagagtaaggctgcctgtccgtg

SEQ ID NO: 4486836 - DNA, 25 bp, Homo sapien
tctcttgtgcaatagggattaacac

SEQ ID NO: 4486837 - DNA, 25 bp, Homo sapien
tgtccgtgggcgctgcagatttctt

SEQ ID NO: 4486838 - DNA, 25 bp, Homo sapien
gagctgtgctcagggaccgtgttgg

SEQ ID NO: 4486839 - DNA, 25 bp, Homo sapien
ctggcccttcatcagcacgatgttg

SEQ ID NO: 4486840 - DNA, 25 bp, Homo sapien
cctggcccttcatcagcacgatgtt

SEQ ID NO: 4486841 - DNA, 25 bp, Homo sapien
cagggaccgtgttggtctcgaagtt

SEQ ID NO: 4486842 - DNA, 25 bp, Homo sapien
atcttcttgacactgtagggagtca

SEQ ID NO: 4486843 - DNA, 25 bp, Homo sapien
acagagacaacacgctgtcctccat

SEQ ID NO: 4486844 - DNA, 25 bp, Homo sapien
tcttgacactgtagggagtcagtgg

SEQ ID NO: 4486845 - DNA, 25 bp, Homo sapien
gcaggacaaatggtgtccgggagta

SEQ ID NO: 4486846 - DNA, 25 bp, Homo sapien
tcttttcccccaacgatgctgaagc

SEQ ID NO: 4486847 - DNA, 25 bp, Homo sapien
tgtcttttcccccaacgatgctgaa

SEQ ID NO: 4486848 - DNA, 25 bp, Homo sapien
aatggttttgacgtaaatcccaatg

SEQ ID NO: 4486849 - DNA, 25 bp, Homo sapien
cccaatggggccataaatgctgtct

SEQ ID NO: 4486850 - DNA, 25 bp, Homo sapien
cattgattcaccattgagctccaga

SEQ ID NO: 4486851 - DNA, 25 bp, Homo sapien
gattcaccattgagctccagaattt

SEQ ID NO: 4486852 - DNA, 25 bp, Homo sapien
tgcaaagcatcctgatgtgttagtc

SEQ ID NO: 4486853 - DNA, 25 bp, Homo sapien
cctgatgtgttagtccagccattga

SEQ ID NO: 4486854 - DNA, 25 bp, Homo sapien
tcaggcgggttctcacggtgagggt

SEQ ID NO: 4486855 - DNA, 25 bp, Homo sapien
ggagctcagggagcggcacagtggg

SEQ ID NO: 4486856 - DNA, 25 bp, Homo sapien
ggctttccaaggcgaaggagctgct

SEQ ID NO: 4486857 - DNA, 25 bp, Homo sapien
tccttggtgatacaagtgctggagc

SEQ ID NO: 4486858 - DNA, 25 bp, Homo sapien
ggagctttcaacctagcaggagagt

SEQ ID NO: 4486859 - DNA, 25 bp, Homo sapien
tgttgggaccatgccagcacagact

SEQ ID NO: 4486860 - DNA, 25 bp, Homo sapien
catcaggcaaagctgtatgcaagga

SEQ ID NO: 4486861 - DNA, 25 bp, Homo sapien
gcttgcaggcatacagaggcatctg

SEQ ID NO: 4486862 - DNA, 25 bp, Homo sapien
aggtgcgccacggatcctggtgaca

SEQ ID NO: 4486863 - DNA, 25 bp, Homo sapien
gaaaatgccagagatgcattggaag

SEQ ID NO: 4486864 - DNA, 25 bp, Homo sapien
cggagacgtccgtccaggtgcgcca

SEQ ID NO: 4486865 - DNA, 25 bp, Homo sapien
tgacagcgtgtggacgaaaatgcca

SEQ ID NO: 4486866 - DNA, 25 bp, Homo sapien
actggaccgggatcacagtgactca

SEQ ID NO: 4486867 - DNA, 25 bp, Homo sapien
caggatcgtgtagacttcattgagc

SEQ ID NO: 4486868 - DNA, 25 bp, Homo sapien
tcattgagcgtcaggcagtgcacag

SEQ ID NO: 4486869 - DNA, 25 bp, Homo sapien
tctggatgtcggctaacaatgatgg

SEQ ID NO: 4486870 - DNA, 25 bp, Homo sapien
tacttaacctcctgagcctccattt

SEQ ID NO: 4486871 - DNA, 25 bp, Homo sapien
cctcctgagcctccatttcttcctt

SEQ ID NO: 4486872 - DNA, 25 bp, Homo sapien
taacctcctgagcctccatttcttc

SEQ ID NO: 4486873 - DNA, 25 bp, Homo sapien
ttacttaacctcctgagcctccatt

SEQ ID NO: 4486874 - DNA, 25 bp, Homo sapien
tagtcccggttcctctactgtctag

SEQ ID NO: 4486875 - DNA, 25 bp, Homo sapien
cactttggagtaatagttaagagta

SEQ ID NO: 4486876 - DNA, 25 bp, Homo sapien
caaaaaggcttgtgttctagtcccg

SEQ ID NO: 4486877 - DNA, 25 bp, Homo sapien
taagagtatgagtcctagagtcaaa

SEQ ID NO: 4486878 - DNA, 25 bp, Homo sapien
actccactgatgcctctcctttcca

SEQ ID NO: 4486879 - DNA, 25 bp, Homo sapien
ccactgatgcctctcctttccaaac

SEQ ID NO: 4486880 - DNA, 25 bp, Homo sapien
ctccactgatgcctctcctttccaa

SEQ ID NO: 4486881 - DNA, 25 bp, Homo sapien
tccactgatgcctctcctttccaaa

SEQ ID NO: 4486882 - DNA, 25 bp, Homo sapien
tcttggtgttggtccctggcgagct

SEQ ID NO: 4486883 - DNA, 25 bp, Homo sapien
tgtatatggagatatgccacccaga

SEQ ID NO: 4486884 - DNA, 25 bp, Homo sapien
gatcacccatcgaggaagggcttgg

SEQ ID NO: 4486885 - DNA, 25 bp, Homo sapien
gttacagaggcccagctatgttggc

SEQ ID NO: 4486886 - DNA, 25 bp, Homo sapien
tgtcactgctggagcggatcatgac

SEQ ID NO: 4486887 - DNA, 25 bp, Homo sapien
gggtgctgagttcttctctcgttcc

SEQ ID NO: 4486888 - DNA, 25 bp, Homo sapien
gatcatgaccttctgagccctgcga

SEQ ID NO: 4486889 - DNA, 25 bp, Homo sapien
ggacccagacatgtagctgctgtca

SEQ ID NO: 4486890 - DNA, 25 bp, Homo sapien
tgctatagaaagcaccactggctcc

SEQ ID NO: 4486891 - DNA, 25 bp, Homo sapien
tggctcccgtgccagaggcaagctg

SEQ ID NO: 4486892 - DNA, 25 bp, Homo sapien
gatgtccacgtcagaggacggcttc

SEQ ID NO: 4486893 - DNA, 25 bp, Homo sapien
cacgtcagaggacggcttctcagca

SEQ ID NO: 4486894 - DNA, 25 bp, Homo sapien
aaaatctcaaaggatttcttcagtc

SEQ ID NO: 4486895 - DNA, 25 bp, Homo sapien
tttcttcagtctcagcggcgggtgg

SEQ ID NO: 4486896 - DNA, 25 bp, Homo sapien
gatttcttcagtctcagcggcgggt

SEQ ID NO: 4486897 - DNA, 25 bp, Homo sapien
atttcttcagtctcagcggcgggtg

SEQ ID NO: 4486898 - DNA, 25 bp, Homo sapien
cagaagagcatgaggagttctctct

SEQ ID NO: 4486899 - DNA, 25 bp, Homo sapien
cttctgagggtcactgtcactttta

SEQ ID NO: 4486900 - DNA, 25 bp, Homo sapien
gtgcccagaagagcatgaggagttc

SEQ ID NO: 4486901 - DNA, 25 bp, Homo sapien
cttgggcttggaggacataggcttt

SEQ ID NO: 4486902 - DNA, 25 bp, Homo sapien
tgaagcttgccaaccctcactgtag

SEQ ID NO: 4486903 - DNA, 25 bp, Homo sapien
caatgtgaacttgagcgagtttctc

SEQ ID NO: 4486904 - DNA, 25 bp, Homo sapien
gtaactgtgacccactagcaatgtg

SEQ ID NO: 4486905 - DNA, 25 bp, Homo sapien
gatgggaaactcagcattgcatagt

SEQ ID NO: 4486906 - DNA, 25 bp, Homo sapien
aggattcttcgaaaatcctgttgtg

SEQ ID NO: 4486907 - DNA, 25 bp, Homo sapien
aagaaaggattcttcgaaaatcctg

SEQ ID NO: 4486908 - DNA, 25 bp, Homo sapien
gattcttcgaaaatcctgttgtgtt

SEQ ID NO: 4486909 - DNA, 25 bp, Homo sapien
aaaggattcttcgaaaatcctgttg

SEQ ID NO: 4486910 - DNA, 25 bp, Homo sapien
gtttcctggaaccatgcttggtgga

SEQ ID NO: 4486911 - DNA, 25 bp, Homo sapien
tcctggaaccatgcttggtggatga

SEQ ID NO: 4486912 - DNA, 25 bp, Homo sapien
ttcctggaaccatgcttggtggatg

SEQ ID NO: 4486913 - DNA, 25 bp, Homo sapien
tgtttcctggaaccatgcttggtgg

SEQ ID NO: 4486914 - DNA, 25 bp, Homo sapien
gcagtcaatgcagctttacaactta

SEQ ID NO: 4486915 - DNA, 25 bp, Homo sapien
aggcagccacatgtgataccaactg

SEQ ID NO: 4486916 - DNA, 25 bp, Homo sapien
tacaacttagaacagcacaaatgtg

SEQ ID NO: 4486917 - DNA, 25 bp, Homo sapien
tgttagctcttttacaggcagccac

SEQ ID NO: 4486918 - DNA, 25 bp, Homo sapien
gagaccatgtcaaaacggtagcctc

SEQ ID NO: 4486919 - DNA, 25 bp, Homo sapien
cgagaccatgtcaaaacggtagcct

SEQ ID NO: 4486920 - DNA, 25 bp, Homo sapien
accatgtcaaaacggtagcctcaag

SEQ ID NO: 4486921 - DNA, 25 bp, Homo sapien
gaccatgtcaaaacggtagcctcaa

SEQ ID NO: 4486922 - DNA, 25 bp, Homo sapien
ggacttggtctgtgggccgatacca

SEQ ID NO: 4486923 - DNA, 25 bp, Homo sapien
tctgtgggccgataccaggtcctgg

SEQ ID NO: 4486924 - DNA, 25 bp, Homo sapien
tggtctgtgggccgataccaggtcc

SEQ ID NO: 4486925 - DNA, 25 bp, Homo sapien
gacttggtctgtgggccgataccag

SEQ ID NO: 4486926 - DNA, 25 bp, Homo sapien
gaagtgaatcatggagcattacacc

SEQ ID NO: 4486927 - DNA, 25 bp, Homo sapien
ctgcacaatctaagagactggcctt

SEQ ID NO: 4486928 - DNA, 25 bp, Homo sapien
caatctaagagactggccttgggca

SEQ ID NO: 4486929 - DNA, 25 bp, Homo sapien
ggagcattacaccttgatgatatca

SEQ ID NO: 4486930 - DNA, 25 bp, Homo sapien
tgtttgtgctttgacctacccgtgt

SEQ ID NO: 4486931 - DNA, 25 bp, Homo sapien
gcccacccctaggtactgactgaag

SEQ ID NO: 4486932 - DNA, 25 bp, Homo sapien
gatcagcttgctctcggcaaaggag

SEQ ID NO: 4486933 - DNA, 25 bp, Homo sapien
gctcagagaatatctgggccgacct

SEQ ID NO: 4486934 - DNA, 25 bp, Homo sapien
gtgcattacatcatacagtgacttt

SEQ ID NO: 4486935 - DNA, 25 bp, Homo sapien
gcattacatcatacagtgacttttc

SEQ ID NO: 4486936 - DNA, 25 bp, Homo sapien
ctgtgcattacatcatacagtgact

SEQ ID NO: 4486937 - DNA, 25 bp, Homo sapien
tgtgcattacatcatacagtgactt

SEQ ID NO: 4486938 - DNA, 25 bp, Homo sapien
ctacagtgcagaaacaaggccaaag

SEQ ID NO: 4486939 - DNA, 25 bp, Homo sapien
gcagtgggtgttttatcggggatgt

SEQ ID NO: 4486940 - DNA, 25 bp, Homo sapien
cagtgggtgttttatcggggatgtt

SEQ ID NO: 4486941 - DNA, 25 bp, Homo sapien
gcctgcctcttaagcagtgggtgtt

SEQ ID NO: 4486942 - DNA, 25 bp, Homo sapien
ctgcctcttaagcagtgggtgtttt

SEQ ID NO: 4486943 - DNA, 25 bp, Homo sapien
cctaacccaagggtcttcggctgtg

SEQ ID NO: 4486944 - DNA, 25 bp, Homo sapien
catggttctcactcatgatggggct

SEQ ID NO: 4486945 - DNA, 25 bp, Homo sapien
aaactttgggagtgccattggcggt

SEQ ID NO: 4486946 - DNA, 25 bp, Homo sapien
cattgggctgtagaggcatgtggcc

SEQ ID NO: 4486947 - DNA, 25 bp, Homo sapien
ttcaagctttggcgaaaccaggctg

SEQ ID NO: 4486948 - DNA, 25 bp, Homo sapien
tcaagctttggcgaaaccaggctgg

SEQ ID NO: 4486949 - DNA, 25 bp, Homo sapien
agctttggcgaaaccaggctggctt

SEQ ID NO: 4486950 - DNA, 25 bp, Homo sapien
caagctttggcgaaaccaggctggc

SEQ ID NO: 4486951 - DNA, 25 bp, Homo sapien
gatgtgtgatcctaggtgctccctg

SEQ ID NO: 4486952 - DNA, 25 bp, Homo sapien
ggaggcccggatgtgtgatcctagg

SEQ ID NO: 4486953 - DNA, 25 bp, Homo sapien
gcccggatgtgtgatcctaggtgct

SEQ ID NO: 4486954 - DNA, 25 bp, Homo sapien
tgatcctaggtgctccctggaagca

SEQ ID NO: 4486955 - DNA, 25 bp, Homo sapien
ccgaggacagtacttgctcaggctg

SEQ ID NO: 4486956 - DNA, 25 bp, Homo sapien
gagtccagaaaaccgtccttcctca

SEQ ID NO: 4486957 - DNA, 25 bp, Homo sapien
caggggaccccgaggacagtacttg

SEQ ID NO: 4486958 - DNA, 25 bp, Homo sapien
tcccaagaggttttgctgcctcccc

SEQ ID NO: 4486959 - DNA, 25 bp, Homo sapien
ggggactcagacacacctgggtctc

SEQ ID NO: 4486960 - DNA, 25 bp, Homo sapien
ggggaggggactcagacacacctgg

SEQ ID NO: 4486961 - DNA, 25 bp, Homo sapien
gactcagacacacctgggtctctgg

SEQ ID NO: 4486962 - DNA, 25 bp, Homo sapien
tgggggaggggactcagacacacct

SEQ ID NO: 4486963 - DNA, 25 bp, Homo sapien
gggagagttttctgattgggctgcc

SEQ ID NO: 4486964 - DNA, 25 bp, Homo sapien
gttgacagcagccttaggagcgggt

SEQ ID NO: 4486965 - DNA, 25 bp, Homo sapien
caggggggagagttttctgattggg

SEQ ID NO: 4486966 - DNA, 25 bp, Homo sapien
tgacagcagccttaggagcgggtcc

SEQ ID NO: 4486967 - DNA, 25 bp, Homo sapien
agtagcttcgtctcacaggactggg

SEQ ID NO: 4486968 - DNA, 25 bp, Homo sapien
catttgcagctgagtcttcgttgga

SEQ ID NO: 4486969 - DNA, 25 bp, Homo sapien
tgagcgagaaccctgtgtccaaggc

SEQ ID NO: 4486970 - DNA, 25 bp, Homo sapien
ttcatgacagccgatgacacttggc

SEQ ID NO: 4486971 - DNA, 25 bp, Homo sapien
gactgaccagactgaagggaactgt

SEQ ID NO: 4486972 - DNA, 25 bp, Homo sapien
agctcagcagggagataacggactg

SEQ ID NO: 4486973 - DNA, 25 bp, Homo sapien
gataacggactgaccagactgaagg

SEQ ID NO: 4486974 - DNA, 25 bp, Homo sapien
cagactgaagggaactgtggtcccc

SEQ ID NO: 4486975 - DNA, 25 bp, Homo sapien
tgccaagctgaacccaagaccagca

SEQ ID NO: 4486976 - DNA, 25 bp, Homo sapien
ctccttgtgtaagatggtgacatgg

SEQ ID NO: 4486977 - DNA, 25 bp, Homo sapien
tgttttctagatctgctcctcctgc

SEQ ID NO: 4486978 - DNA, 25 bp, Homo sapien
aagatggtgacatggatgccgtcta

SEQ ID NO: 4486979 - DNA, 25 bp, Homo sapien
gaaattctcggtctcatttggcaga

SEQ ID NO: 4486980 - DNA, 25 bp, Homo sapien
gagtgatagcatgcatggaaaccac

SEQ ID NO: 4486981 - DNA, 25 bp, Homo sapien
tgcatggcagcagatttctaagcaa

SEQ ID NO: 4486982 - DNA, 25 bp, Homo sapien
gaaacactctcctaggcagtctaga

SEQ ID NO: 4486983 - DNA, 25 bp, Homo sapien
gaaatcacacaagtccagtccacat

SEQ ID NO: 4486984 - DNA, 25 bp, Homo sapien
gaggaggattgaaccggttagtcaa

SEQ ID NO: 4486985 - DNA, 25 bp, Homo sapien
taggccaacaaagattaaagataat

SEQ ID NO: 4486986 - DNA, 25 bp, Homo sapien
tagtcaatgctagaggatttttagg

SEQ ID NO: 4486987 - DNA, 25 bp, Homo sapien
acttgccgttgatggaaagaacctc

SEQ ID NO: 4486988 - DNA, 25 bp, Homo sapien
gcgtggtccccttgagagacttgcc

SEQ ID NO: 4486989 - DNA, 25 bp, Homo sapien
ccttctgaatagtcccttcctggga

SEQ ID NO: 4486990 - DNA, 25 bp, Homo sapien
ccttgagagacttgccgttgatgga

SEQ ID NO: 4486991 - DNA, 25 bp, Homo sapien
gctctcgagcttggcggaggatggc

SEQ ID NO: 4486992 - DNA, 25 bp, Homo sapien
cctctggagtcagcttccttgtgac

SEQ ID NO: 4486993 - DNA, 25 bp, Homo sapien
cctgggctctcgagcttggcggagg

SEQ ID NO: 4486994 - DNA, 25 bp, Homo sapien
tcacagcttgcctgggctctcgagc

SEQ ID NO: 4486995 - DNA, 25 bp, Homo sapien
tagattctacagaaacatcactggc

SEQ ID NO: 4486996 - DNA, 25 bp, Homo sapien
ttctacagaaacatcactggctgca

SEQ ID NO: 4486997 - DNA, 25 bp, Homo sapien
ctgcagagtcagtggaggagttgag

SEQ ID NO: 4486998 - DNA, 25 bp, Homo sapien
gattctacagaaacatcactggctg

SEQ ID NO: 4486999 - DNA, 25 bp, Homo sapien
aaacacaaggtctctgttagggatc

SEQ ID NO: 4487000 - DNA, 25 bp, Homo sapien
cagccctgccgacatcttctccagt

SEQ ID NO: 4487001 - DNA, 25 bp, Homo sapien
ttgtctccgtgtagggagcccttcc

SEQ ID NO: 4487002 - DNA, 25 bp, Homo sapien
gtgtcaccgtgcagactgtggcctc

SEQ ID NO: 4487003 - DNA, 25 bp, Homo sapien
tgagaggcttgtctccgtgtaggga

SEQ ID NO: 4487004 - DNA, 25 bp, Homo sapien
aataaaggcaggagctgacgtgtcc

SEQ ID NO: 4487005 - DNA, 25 bp, Homo sapien
tgagttactgagtgttttggcaccc

SEQ ID NO: 4487006 - DNA, 25 bp, Homo sapien
ccaagtgtgcagtacaaagtcagac

SEQ ID NO: 4487007 - DNA, 25 bp, Homo sapien
ggtttgtactccaatccctgatgaa

SEQ ID NO: 4487008 - DNA, 25 bp, Homo sapien
gacagagctaagagtccctttgggt

SEQ ID NO: 4487009 - DNA, 25 bp, Homo sapien
gggaatgccatgtaagcctcactct

SEQ ID NO: 4487010 - DNA, 25 bp, Homo sapien
ggaagggtcactcagcacattacag

SEQ ID NO: 4487011 - DNA, 25 bp, Homo sapien
ttcatagctgctagtggtgggccct

SEQ ID NO: 4487012 - DNA, 25 bp, Homo sapien
tacagggatcttgcctctggcacga

SEQ ID NO: 4487013 - DNA, 25 bp, Homo sapien
cagggatcttgcctctggcacgaag

SEQ ID NO: 4487014 - DNA, 25 bp, Homo sapien
gatcttgcctctggcacgaagtcct

SEQ ID NO: 4487015 - DNA, 25 bp, Homo sapien
atttacagggatcttgcctctggca

SEQ ID NO: 4487016 - DNA, 25 bp, Homo sapien
gaccctgctttggacactgacccaa

SEQ ID NO: 4487017 - DNA, 25 bp, Homo sapien
ggagcaccgtccatagttcatagag

SEQ ID NO: 4487018 - DNA, 25 bp, Homo sapien
gatagcttggtagagaacagggcac

SEQ ID NO: 4487019 - DNA, 25 bp, Homo sapien
gactcagaggttagggcaccaggct

SEQ ID NO: 4487020 - DNA, 25 bp, Homo sapien
ggctggactgtctcactttgttctg

SEQ ID NO: 4487021 - DNA, 25 bp, Homo sapien
tcgtgacaggtccatcaggcagtgc

SEQ ID NO: 4487022 - DNA, 25 bp, Homo sapien
cttcaaaccgtgtgaggccctgcat

SEQ ID NO: 4487023 - DNA, 25 bp, Homo sapien
tttctcctgatgacaatcgtgacag

SEQ ID NO: 4487024 - DNA, 25 bp, Homo sapien
gtctgcaatttgtatcagctgcccc

SEQ ID NO: 4487025 - DNA, 25 bp, Homo sapien
gaacaaccttttgctgggtggcgtc

SEQ ID NO: 4487026 - DNA, 25 bp, Homo sapien
cccgtgtgactctgcccttatttta

SEQ ID NO: 4487027 - DNA, 25 bp, Homo sapien
gaccctgagaatcagcggttatggg

SEQ ID NO: 4487028 - DNA, 25 bp, Homo sapien
gaaggccagccaaccaagaatgcat

SEQ ID NO: 4487029 - DNA, 25 bp, Homo sapien
tgtgatcactaaaggcaatgcccgt

SEQ ID NO: 4487030 - DNA, 25 bp, Homo sapien
tacccaggttactattgtgcgcgca

SEQ ID NO: 4487031 - DNA, 25 bp, Homo sapien
tctacatggctcttgcgatcctggg

SEQ ID NO: 4487032 - DNA, 25 bp, Homo sapien
gcaccaaggctttatgtgcccatca

SEQ ID NO: 4487033 - DNA, 25 bp, Homo sapien
tagagaatcatcatcgccactgaaa

SEQ ID NO: 4487034 - DNA, 25 bp, Homo sapien
atgcgatgcactctggcaccaaggc

SEQ ID NO: 4487035 - DNA, 25 bp, Homo sapien
ttttaagcatgtaccgctccctcag

SEQ ID NO: 4487036 - DNA, 25 bp, Homo sapien
gaaactcatacctgcttgtgcgtgt

SEQ ID NO: 4487037 - DNA, 25 bp, Homo sapien
cagcaagggatgagacgcgatcact

SEQ ID NO: 4487038 - DNA, 25 bp, Homo sapien
gaaaaccccactgtatgcatgtgag

SEQ ID NO: 4487039 - DNA, 25 bp, Homo sapien
tcatggccatttccactgggctggg

SEQ ID NO: 4487040 - DNA, 25 bp, Homo sapien
tgctgtgtgcagttattctcatgag

SEQ ID NO: 4487041 - DNA, 25 bp, Homo sapien
cgcgcctggcccgattgcatggatt

SEQ ID NO: 4487042 - DNA, 25 bp, Homo sapien
acatcacgtgttctctgtaaagctt

SEQ ID NO: 4487043 - DNA, 25 bp, Homo sapien
tcatgaggctgtggatctgaaatct

SEQ ID NO: 4487044 - DNA, 25 bp, Homo sapien
tgtcccgcaggctgaaagcctcggt

SEQ ID NO: 4487045 - DNA, 25 bp, Homo sapien
caacgggtcagaccgtcattggcca

SEQ ID NO: 4487046 - DNA, 25 bp, Homo sapien
taatgcaaatcgcaccactgtcccg

SEQ ID NO: 4487047 - DNA, 25 bp, Homo sapien
aagcctcggtgcactcaggacaaga

SEQ ID NO: 4487048 - DNA, 25 bp, Homo sapien
gagagatccagtgcactgtttgacc

SEQ ID NO: 4487049 - DNA, 25 bp, Homo sapien
tgagagatccagtgcactgtttgac

SEQ ID NO: 4487050 - DNA, 25 bp, Homo sapien
gatctggatgacttgatttgttcag

SEQ ID NO: 4487051 - DNA, 25 bp, Homo sapien
gagctgaccgtggatctggatgact

SEQ ID NO: 4487052 - DNA, 25 bp, Homo sapien
gatgtctaggcttcctccagtgtcc

SEQ ID NO: 4487053 - DNA, 25 bp, Homo sapien
tccagtgtcccgttcctagaggtca

SEQ ID NO: 4487054 - DNA, 25 bp, Homo sapien
gcttgagaagtcagacagctgctta

SEQ ID NO: 4487055 - DNA, 25 bp, Homo sapien
gaccttcacaggaacagatcgcgca

SEQ ID NO: 4487056 - DNA, 25 bp, Homo sapien
attaaccagttggaaccagcctcag

SEQ ID NO: 4487057 - DNA, 25 bp, Homo sapien
gtcttacaggtatctgcacggtctg

SEQ ID NO: 4487058 - DNA, 25 bp, Homo sapien
gaaaagcagcacattcacgtggatg

SEQ ID NO: 4487059 - DNA, 25 bp, Homo sapien
tggcacagcctacatgaatgagaat

SEQ ID NO: 4487060 - DNA, 25 bp, Homo sapien
gtttctcaggaccactaacagagtg

SEQ ID NO: 4487061 - DNA, 25 bp, Homo sapien
agctagaaggctcactgggcaccat

SEQ ID NO: 4487062 - DNA, 25 bp, Homo sapien
cagtgacttgtcttatctttagaag

SEQ ID NO: 4487063 - DNA, 25 bp, Homo sapien
cccaaagtgtcagaaccatgttcct

SEQ ID NO: 4487064 - DNA, 25 bp, Homo sapien
ggagggttgtggtctcgggacttca

SEQ ID NO: 4487065 - DNA, 25 bp, Homo sapien
cctgcatggggcttccatagtcctg

SEQ ID NO: 4487066 - DNA, 25 bp, Homo sapien
aggagtacagccatcccctagactg

SEQ ID NO: 4487067 - DNA, 25 bp, Homo sapien
ccagtagaatacactcttagggagg

SEQ ID NO: 4487068 - DNA, 25 bp, Homo sapien
taagctactattggtcgcagccgaa

SEQ ID NO: 4487069 - DNA, 25 bp, Homo sapien
gaagtagggaagtctgttcacccat

SEQ ID NO: 4487070 - DNA, 25 bp, Homo sapien
ccatgataaagtggtggccgccttt

SEQ ID NO: 4487071 - DNA, 25 bp, Homo sapien
ttttccatggaggatccaaggaccc

SEQ ID NO: 4487072 - DNA, 25 bp, Homo sapien
cctggcctagtgaatcccaaatggg

SEQ ID NO: 4487073 - DNA, 25 bp, Homo sapien
gccactgatccaatattagggaaag

SEQ ID NO: 4487074 - DNA, 25 bp, Homo sapien
tgtgcataccacaagactccaattt

SEQ ID NO: 4487075 - DNA, 25 bp, Homo sapien
ctacaatgtcctaggccataggaat

SEQ ID NO: 4487076 - DNA, 25 bp, Homo sapien
atgtgagtgcaatgcatcatgctac

SEQ ID NO: 4487077 - DNA, 25 bp, Homo sapien
gattcattatatgggatgacaggca

SEQ ID NO: 4487078 - DNA, 25 bp, Homo sapien
tgagattgatgcttggccacactct

SEQ ID NO: 4487079 - DNA, 25 bp, Homo sapien
gcccaagacctggacaccgtctggt

SEQ ID NO: 4487080 - DNA, 25 bp, Homo sapien
caaggagcaggtttcgtctgcccaa

SEQ ID NO: 4487081 - DNA, 25 bp, Homo sapien
gacctggacaccgtctggtctctgg

SEQ ID NO: 4487082 - DNA, 25 bp, Homo sapien
aatgcaaaccccgaaaggatcaagt

SEQ ID NO: 4487083 - DNA, 25 bp, Homo sapien
cagatataatgcaaaccccgaaagg

SEQ ID NO: 4487084 - DNA, 25 bp, Homo sapien
tccacattccgctgcggctctgctg

SEQ ID NO: 4487085 - DNA, 25 bp, Homo sapien
tccttcagtcagatataatgcaaac

SEQ ID NO: 4487086 - DNA, 25 bp, Homo sapien
tatacagggttcaaccccatcaggg

SEQ ID NO: 4487087 - DNA, 25 bp, Homo sapien
gggaagctcacctcaacaacgaagc

SEQ ID NO: 4487088 - DNA, 25 bp, Homo sapien
caaaggctgccagaggtatcaatag

SEQ ID NO: 4487089 - DNA, 25 bp, Homo sapien
ccccaggagatatgaagactgtttg

SEQ ID NO: 4487090 - DNA, 25 bp, Homo sapien
gagatcatttgaagtccatcccata

SEQ ID NO: 4487091 - DNA, 25 bp, Homo sapien
gtcaggcacaaaccagacagccagt

SEQ ID NO: 4487092 - DNA, 25 bp, Homo sapien
taggccaagttcgagaattctacct

SEQ ID NO: 4487093 - DNA, 25 bp, Homo sapien
tgggaatattcacacaagctctctg

SEQ ID NO: 4487094 - DNA, 25 bp, Homo sapien
tggctcagtatgtagctgtttaaga

SEQ ID NO: 4487095 - DNA, 25 bp, Homo sapien
cctggctcagtatgtagctgtttaa

SEQ ID NO: 4487096 - DNA, 25 bp, Homo sapien
ctggctcagtatgtagctgtttaag

SEQ ID NO: 4487097 - DNA, 25 bp, Homo sapien
ggtggtgactcagaaatccaacgta

SEQ ID NO: 4487098 - DNA, 25 bp, Homo sapien
tgtcattagaactagtcatggccca

SEQ ID NO: 4487099 - DNA, 25 bp, Homo sapien
cagatataaatagcacacagcaggt

SEQ ID NO: 4487100 - DNA, 25 bp, Homo sapien
ggttcaagtcaacacgatcaagatg

SEQ ID NO: 4487101 - DNA, 25 bp, Homo sapien
gatttggaagggctagaactctgct

SEQ ID NO: 4487102 - DNA, 25 bp, Homo sapien
tctatggtctgaagggactgatgca

SEQ ID NO: 4487103 - DNA, 25 bp, Homo sapien
tgtaaccagctctttcaataggcct

SEQ ID NO: 4487104 - DNA, 25 bp, Homo sapien
taggcctggttatgactctatggtc

SEQ ID NO: 4487105 - DNA, 25 bp, Homo sapien
taatttaagagatcacttacggagt

SEQ ID NO: 4487106 - DNA, 25 bp, Homo sapien
gataactgggataggtcattgtatg

SEQ ID NO: 4487107 - DNA, 25 bp, Homo sapien
gcaagagtgacagaagatcaagaat

SEQ ID NO: 4487108 - DNA, 25 bp, Homo sapien
cttacggagttcagtttgaacagga

SEQ ID NO: 4487109 - DNA, 25 bp, Homo sapien
tgagatgggagtattctggatcacc

SEQ ID NO: 4487110 - DNA, 25 bp, Homo sapien
gagcttttgccagttggagcccctg

SEQ ID NO: 4487111 - DNA, 25 bp, Homo sapien
cctaatctctggaaactgcggatgt

SEQ ID NO: 4487112 - DNA, 25 bp, Homo sapien
gctgctaccaacgatctcaccaatg

SEQ ID NO: 4487113 - DNA, 25 bp, Homo sapien
tcctcttggccttgaaagtctctga

SEQ ID NO: 4487114 - DNA, 25 bp, Homo sapien
atatgcagcccacacgtaaggaatg

SEQ ID NO: 4487115 - DNA, 25 bp, Homo sapien
gctgaggtagtttgccagtcttctc

SEQ ID NO: 4487116 - DNA, 25 bp, Homo sapien
ggaggatcacaggtacagtgccatt

SEQ ID NO: 4487117 - DNA, 25 bp, Homo sapien
cggacagctcctgcctatcctgcat

SEQ ID NO: 4487118 - DNA, 25 bp, Homo sapien
tgtgagatacggagagcaggaggct

SEQ ID NO: 4487119 - DNA, 25 bp, Homo sapien
agagcaggaggctcccggacagctc

SEQ ID NO: 4487120 - DNA, 25 bp, Homo sapien
gccatgtgagatacggagagcagga

SEQ ID NO: 4487121 - DNA, 25 bp, Homo sapien
gagacttgagtgtaatctatgttct

SEQ ID NO: 4487122 - DNA, 25 bp, Homo sapien
cttgagtgtaatctatgttctctta

SEQ ID NO: 4487123 - DNA, 25 bp, Homo sapien
tgttctcttatgtccgccttccctt

SEQ ID NO: 4487124 - DNA, 25 bp, Homo sapien
gacttgagtgtaatctatgttctct

SEQ ID NO: 4487125 - DNA, 25 bp, Homo sapien
ttgcaagtctgtaacagcaaccggc

SEQ ID NO: 4487126 - DNA, 25 bp, Homo sapien
caaagcctgcctgtttacatcacag

SEQ ID NO: 4487127 - DNA, 25 bp, Homo sapien
cacagagttgcacaattgcaagtct

SEQ ID NO: 4487128 - DNA, 25 bp, Homo sapien
tctccaggggcactgcaaaaataca

SEQ ID NO: 4487129 - DNA, 25 bp, Homo sapien
tccaagattaattgcactgtggaaa

SEQ ID NO: 4487130 - DNA, 25 bp, Homo sapien
ccaagattaattgcactgtggaaac

SEQ ID NO: 4487131 - DNA, 25 bp, Homo sapien
tgcttccaagattaattgcactgtg

SEQ ID NO: 4487132 - DNA, 25 bp, Homo sapien
cttccaagattaattgcactgtgga

SEQ ID NO: 4487133 - DNA, 25 bp, Homo sapien
tggataggacatccaccacctcatt

SEQ ID NO: 4487134 - DNA, 25 bp, Homo sapien
ctggataggacatccaccacctcat

SEQ ID NO: 4487135 - DNA, 25 bp, Homo sapien
tcatgttaacctaggttttctcctg

SEQ ID NO: 4487136 - DNA, 25 bp, Homo sapien
tgttcaaagtctatctattgtttat

SEQ ID NO: 4487137 - DNA, 25 bp, Homo sapien
gtaaggtctatgtcttaagattcat

SEQ ID NO: 4487138 - DNA, 25 bp, Homo sapien
ggtctatgtcttaagattcatgttt

SEQ ID NO: 4487139 - DNA, 25 bp, Homo sapien
aaaagatacctatgcttttatgttt

SEQ ID NO: 4487140 - DNA, 25 bp, Homo sapien
atcaaaaagatacctatgcttttat

SEQ ID NO: 4487141 - DNA, 25 bp, Homo sapien
ggtgggaatgtacaacctttatgga

SEQ ID NO: 4487142 - DNA, 25 bp, Homo sapien
gtgggaatgtacaacctttatggaa

SEQ ID NO: 4487143 - DNA, 25 bp, Homo sapien
gaaacaatattaacagctgggtgcg

SEQ ID NO: 4487144 - DNA, 25 bp, Homo sapien
aaacaatattaacagctgggtgcgg

SEQ ID NO: 4487145 - DNA, 25 bp, Homo sapien
agaaacaatattaacagctgggtgc

SEQ ID NO: 4487146 - DNA, 25 bp, Homo sapien
caccttctgggtccaagggatgctc

SEQ ID NO: 4487147 - DNA, 25 bp, Homo sapien
tccaccttctgggtccaagggatgc

SEQ ID NO: 4487148 - DNA, 25 bp, Homo sapien
accttctgggtccaagggatgctcc

SEQ ID NO: 4487149 - DNA, 25 bp, Homo sapien
tctccaccttctgggtccaagggat

SEQ ID NO: 4487150 - DNA, 25 bp, Homo sapien
caggcttagaaggtaggccttccct

SEQ ID NO: 4487151 - DNA, 25 bp, Homo sapien
gactaatccatcgttgcccctatca

SEQ ID NO: 4487152 - DNA, 25 bp, Homo sapien
ccttatgcaattgtcctgatgttac

SEQ ID NO: 4487153 - DNA, 25 bp, Homo sapien
taaacacacatacaggtgctagtct

SEQ ID NO: 4487154 - DNA, 25 bp, Homo sapien
tcagggtagaaaccatgagagtgga

SEQ ID NO: 4487155 - DNA, 25 bp, Homo sapien
tgacaggtcttctgctagggaaccc

SEQ ID NO: 4487156 - DNA, 25 bp, Homo sapien
ggaggtccaattctcttaccatctg

SEQ ID NO: 4487157 - DNA, 25 bp, Homo sapien
gcaagtttgcttctatgcccaccat

SEQ ID NO: 4487158 - DNA, 25 bp, Homo sapien
tttggtgagctaacgttttcctgga

SEQ ID NO: 4487159 - DNA, 25 bp, Homo sapien
gctattaaaggaatactgcactctt

SEQ ID NO: 4487160 - DNA, 25 bp, Homo sapien
taccaggcagagaccgtagttcttt

SEQ ID NO: 4487161 - DNA, 25 bp, Homo sapien
ggccctaagcccaatagaactgtgg

SEQ ID NO: 4487162 - DNA, 25 bp, Homo sapien
tgtctggcccagactctgtgagcac

SEQ ID NO: 4487163 - DNA, 25 bp, Homo sapien
aatgcactggcctaatagtcagaag

SEQ ID NO: 4487164 - DNA, 25 bp, Homo sapien
tacgcaggttggtatcaccagctgt

SEQ ID NO: 4487165 - DNA, 25 bp, Homo sapien
ttgatttcccctgattaccagtgag

SEQ ID NO: 4487166 - DNA, 25 bp, Homo sapien
gacttgcttcgtgggcgtgtttaga

SEQ ID NO: 4487167 - DNA, 25 bp, Homo sapien
ccttgagcatggaatggatgtgagc

SEQ ID NO: 4487168 - DNA, 25 bp, Homo sapien
aatgaatagaattgtctgatcaccc

SEQ ID NO: 4487169 - DNA, 25 bp, Homo sapien
gtgatgtgacttatcagtaaaggga

SEQ ID NO: 4487170 - DNA, 25 bp, Homo sapien
tccctcattttaagtagtggtacag

SEQ ID NO: 4487171 - DNA, 25 bp, Homo sapien
tgatgaccattgcatacgaatgaca

SEQ ID NO: 4487172 - DNA, 25 bp, Homo sapien
ctccattgatactgtacgtggtcat

SEQ ID NO: 4487173 - DNA, 25 bp, Homo sapien
ggtcccataggcagtatcccaaact

SEQ ID NO: 4487174 - DNA, 25 bp, Homo sapien
agcaaacacatttgagtaccgtgtc

SEQ ID NO: 4487175 - DNA, 25 bp, Homo sapien
tagcaaacacatttgagtaccgtgt

SEQ ID NO: 4487176 - DNA, 25 bp, Homo sapien
gcaaacacatttgagtaccgtgtct

SEQ ID NO: 4487177 - DNA, 25 bp, Homo sapien
tccagtagagcagtgcacctgaggc

SEQ ID NO: 4487178 - DNA, 25 bp, Homo sapien
gctgcttggaggtgccacaatccag

SEQ ID NO: 4487179 - DNA, 25 bp, Homo sapien
cttggaggtgccacaatccagtaga

SEQ ID NO: 4487180 - DNA, 25 bp, Homo sapien
aatccagtagagcagtgcacctgag

SEQ ID NO: 4487181 - DNA, 25 bp, Homo sapien
gacactgatactttgaagcagagca

SEQ ID NO: 4487182 - DNA, 25 bp, Homo sapien
gaagcagagcaggattcttcaggga

SEQ ID NO: 4487183 - DNA, 25 bp, Homo sapien
caggattcttcagggaagcttgtac

SEQ ID NO: 4487184 - DNA, 25 bp, Homo sapien
tgtagacactgatactttgaagcag

SEQ ID NO: 4487185 - DNA, 25 bp, Homo sapien
aaagcattcctgtttttgttcgctg

SEQ ID NO: 4487186 - DNA, 25 bp, Homo sapien
gcatggtgccaaaagcattcctgtt

SEQ ID NO: 4487187 - DNA, 25 bp, Homo sapien
agcattcctgtttttgttcgctgac

SEQ ID NO: 4487188 - DNA, 25 bp, Homo sapien
ttgcatggtgccaaaagcattcctg

SEQ ID NO: 4487189 - DNA, 25 bp, Homo sapien
tattggctgttgaggagctctgctg

SEQ ID NO: 4487190 - DNA, 25 bp, Homo sapien
aatgaaggatacagagtggaaggac

SEQ ID NO: 4487191 - DNA, 25 bp, Homo sapien
tcatagaatgaaggatacagagtgg

SEQ ID NO: 4487192 - DNA, 25 bp, Homo sapien
gtattggctgttgaggagctctgct

SEQ ID NO: 4487193 - DNA, 25 bp, Homo sapien
ggaagctaccaaatgctaaggagat

SEQ ID NO: 4487194 - DNA, 25 bp, Homo sapien
gacctttcggtcattagacagaatc

SEQ ID NO: 4487195 - DNA, 25 bp, Homo sapien
cgggccaagacagcaagaagacctt

SEQ ID NO: 4487196 - DNA, 25 bp, Homo sapien
tatgagagtgcaaagagcacgggcc

SEQ ID NO: 4487197 - DNA, 25 bp, Homo sapien
gtctgagatcacattgcaacttgca

SEQ ID NO: 4487198 - DNA, 25 bp, Homo sapien
taatcatatgaaacaggtctgagat

SEQ ID NO: 4487199 - DNA, 25 bp, Homo sapien
cttcatatgaaactttaaatcaaag

SEQ ID NO: 4487200 - DNA, 25 bp, Homo sapien
caatgatgttactttcacatagaaa

SEQ ID NO: 4487201 - DNA, 25 bp, Homo sapien
gaggcagcaacgcatatggctaata

SEQ ID NO: 4487202 - DNA, 25 bp, Homo sapien
cactaatgggattttggatttcctc

SEQ ID NO: 4487203 - DNA, 25 bp, Homo sapien
tcttctctgcattgcctgtacattg

SEQ ID NO: 4487204 - DNA, 25 bp, Homo sapien
cctgtacattgcctggaggcagcaa

SEQ ID NO: 4487205 - DNA, 25 bp, Homo sapien
tccagagcatacacgctttaccgct

SEQ ID NO: 4487206 - DNA, 25 bp, Homo sapien
gcatacacgctttaccgctttacat

SEQ ID NO: 4487207 - DNA, 25 bp, Homo sapien
taccgctttacattccgctatgctg

SEQ ID NO: 4487208 - DNA, 25 bp, Homo sapien
tacattccgctatgctgctttctcc

SEQ ID NO: 4487209 - DNA, 25 bp, Homo sapien
aatcaattcaattcttagagccaac

SEQ ID NO: 4487210 - DNA, 25 bp, Homo sapien
tactcgtgagatataattaatttcc

SEQ ID NO: 4487211 - DNA, 25 bp, Homo sapien
ttttgaggaataaatccaagccaaa

SEQ ID NO: 4487212 - DNA, 25 bp, Homo sapien
tacatttaatctagatggcttttct

SEQ ID NO: 4487213 - DNA, 25 bp, Homo sapien
tctatcatttcatgcaagagcttgt

SEQ ID NO: 4487214 - DNA, 25 bp, Homo sapien
ccataagtgcaagcagcctgaggtc

SEQ ID NO: 4487215 - DNA, 25 bp, Homo sapien
cctctcctcctaatgagtgagttct

SEQ ID NO: 4487216 - DNA, 25 bp, Homo sapien
gggacttctaacatagtttggctat

SEQ ID NO: 4487217 - DNA, 25 bp, Homo sapien
ctgaccctgtgcatttgggtagatt

SEQ ID NO: 4487218 - DNA, 25 bp, Homo sapien
gatttgaatgtagtggactttccta

SEQ ID NO: 4487219 - DNA, 25 bp, Homo sapien
catcagtccttaactgaccctgtgc

SEQ ID NO: 4487220 - DNA, 25 bp, Homo sapien
ttgggtagatttgaatgtagtggac

SEQ ID NO: 4487221 - DNA, 25 bp, Homo sapien
tcagaaagatgttctcctaggtcca

SEQ ID NO: 4487222 - DNA, 25 bp, Homo sapien
ttcagaaagatgttctcctaggtcc

SEQ ID NO: 4487223 - DNA, 25 bp, Homo sapien
ctcggccggctctttcggacctcgg

SEQ ID NO: 4487224 - DNA, 25 bp, Homo sapien
ctgacgcagggagccgttgctaaga

SEQ ID NO: 4487225 - DNA, 25 bp, Homo sapien
gctctttcggacctcggcgtttcta

SEQ ID NO: 4487226 - DNA, 25 bp, Homo sapien
tcggcgtttctagctgacgcaggga

SEQ ID NO: 4487227 - DNA, 25 bp, Homo sapien
tctctctgcactggcgcaggctgcg

SEQ ID NO: 4487228 - DNA, 25 bp, Homo sapien
ggtaggacgcccgtttctctctctg

SEQ ID NO: 4487229 - DNA, 25 bp, Homo sapien
agttcccggcagctggtaggacgcc

SEQ ID NO: 4487230 - DNA, 25 bp, Homo sapien
gaccgagataaaggccatttggagc

SEQ ID NO: 4487231 - DNA, 25 bp, Homo sapien
tctgcccatttattgacagccttgt

SEQ ID NO: 4487232 - DNA, 25 bp, Homo sapien
tgctgttggcaaatcgctgcatgct

SEQ ID NO: 4487233 - DNA, 25 bp, Homo sapien
aacagatgttgtgcctcatgcctgg

SEQ ID NO: 4487234 - DNA, 25 bp, Homo sapien
taatgtcccgcactgggttaactga

SEQ ID NO: 4487235 - DNA, 25 bp, Homo sapien
gaggctttcactgcgtaagttgagc

SEQ ID NO: 4487236 - DNA, 25 bp, Homo sapien
tgctacagctgcagtaacagtaaca

SEQ ID NO: 4487237 - DNA, 25 bp, Homo sapien
gcagcgggtggaagatgaccatcaa

SEQ ID NO: 4487238 - DNA, 25 bp, Homo sapien
gcttgaattcctatctacctgatgg

SEQ ID NO: 4487239 - DNA, 25 bp, Homo sapien
ctgtaggtccatcctgactttgtcc

SEQ ID NO: 4487240 - DNA, 25 bp, Homo sapien
agttttaagtagagttctacagcca

SEQ ID NO: 4487241 - DNA, 25 bp, Homo sapien
catttgtaaagaggagtaagagttt

SEQ ID NO: 4487242 - DNA, 25 bp, Homo sapien
taagagttttaagtagagttctaca

SEQ ID NO: 4487243 - DNA, 25 bp, Homo sapien
atcctggaagaactcccatggcttt

SEQ ID NO: 4487244 - DNA, 25 bp, Homo sapien
tcctggaagaactcccatggctttc

SEQ ID NO: 4487245 - DNA, 25 bp, Homo sapien
ctggaagaactcccatggctttctt

SEQ ID NO: 4487246 - DNA, 25 bp, Homo sapien
cctggaagaactcccatggctttct

SEQ ID NO: 4487247 - DNA, 25 bp, Homo sapien
ctctctgagtgtttgaagtgtccct

SEQ ID NO: 4487248 - DNA, 25 bp, Homo sapien
gcacctcacgctgagtggttactgc

SEQ ID NO: 4487249 - DNA, 25 bp, Homo sapien
atcagcacctcacgctgagtggtta

SEQ ID NO: 4487250 - DNA, 25 bp, Homo sapien
ttgttttcgttttactctctctgag

SEQ ID NO: 4487251 - DNA, 25 bp, Homo sapien
catacatccatccttatccaagcac

SEQ ID NO: 4487252 - DNA, 25 bp, Homo sapien
acatccatccttatccaagcacact

SEQ ID NO: 4487253 - DNA, 25 bp, Homo sapien
atacatccatccttatccaagcaca

SEQ ID NO: 4487254 - DNA, 25 bp, Homo sapien
atccatccttatccaagcacactcc

SEQ ID NO: 4487255 - DNA, 25 bp, Homo sapien
ttaaatggctgcccaaatggccaag

SEQ ID NO: 4487256 - DNA, 25 bp, Homo sapien
caagttaaaccgtccgacattatag

SEQ ID NO: 4487257 - DNA, 25 bp, Homo sapien
cattatagagatagagcatagagga

SEQ ID NO: 4487258 - DNA, 25 bp, Homo sapien
ggctgcccaaatggccaagttaaac

SEQ ID NO: 4487259 - DNA, 25 bp, Homo sapien
gagttgcccatgacattgctaagag

SEQ ID NO: 4487260 - DNA, 25 bp, Homo sapien
gctgtatagatactagagttgccca

SEQ ID NO: 4487261 - DNA, 25 bp, Homo sapien
gactccacggtggtaagttctgtgc

SEQ ID NO: 4487262 - DNA, 25 bp, Homo sapien
gagaaccaagcaggacaaaaagtca

SEQ ID NO: 4487263 - DNA, 25 bp, Homo sapien
tatcagaagcaaggtacagattctc

SEQ ID NO: 4487264 - DNA, 25 bp, Homo sapien
tgtaaagggtgtgacccaagggtca

SEQ ID NO: 4487265 - DNA, 25 bp, Homo sapien
tatggactgcctctgtttgttcagg

SEQ ID NO: 4487266 - DNA, 25 bp, Homo sapien
tccatgtggttccttaggtgacgac

SEQ ID NO: 4487267 - DNA, 25 bp, Homo sapien
gcctgacttgccatagtggttggaa

SEQ ID NO: 4487268 - DNA, 25 bp, Homo sapien
tgtggagcacttagtgagttcccac

SEQ ID NO: 4487269 - DNA, 25 bp, Homo sapien
gttcccacaaatgagctccccatgg

SEQ ID NO: 4487270 - DNA, 25 bp, Homo sapien
gctggaagcctggacgtactgctcg

SEQ ID NO: 4487271 - DNA, 25 bp, Homo sapien
gctctacatggcttttcagcgagcc

SEQ ID NO: 4487272 - DNA, 25 bp, Homo sapien
ttttccaacacaggttggcagggtc

SEQ ID NO: 4487273 - DNA, 25 bp, Homo sapien
tgatgcttttccaacacaggttggc

SEQ ID NO: 4487274 - DNA, 25 bp, Homo sapien
caggctagcagagactccactgtct

SEQ ID NO: 4487275 - DNA, 25 bp, Homo sapien
gatatgacctgtcctgatcatgtgg

SEQ ID NO: 4487276 - DNA, 25 bp, Homo sapien
gttgatatgacctgtcctgatcatg

SEQ ID NO: 4487277 - DNA, 25 bp, Homo sapien
attcttgttgatatgacctgtcctg

SEQ ID NO: 4487278 - DNA, 25 bp, Homo sapien
tgacctgtcctgatcatgtgggcca

SEQ ID NO: 4487279 - DNA, 25 bp, Homo sapien
tcatgctcgttcttgagcttcccat

SEQ ID NO: 4487280 - DNA, 25 bp, Homo sapien
ccgagcctcgggctcacccagggcc

SEQ ID NO: 4487281 - DNA, 25 bp, Homo sapien
ctgatcatgctcgttcttgagcttc

SEQ ID NO: 4487282 - DNA, 25 bp, Homo sapien
gcttcccatgccgagcctcgggctc

SEQ ID NO: 4487283 - DNA, 25 bp, Homo sapien
tcatgcgggtcttgccagggatggg

SEQ ID NO: 4487284 - DNA, 25 bp, Homo sapien
tggtctggtctctttaacacactgg

SEQ ID NO: 4487285 - DNA, 25 bp, Homo sapien
tggtctctttaacacactggcaaaa

SEQ ID NO: 4487286 - DNA, 25 bp, Homo sapien
actggcaaaatctcaggtaaggtac

SEQ ID NO: 4487287 - DNA, 25 bp, Homo sapien
cagccccagatccttgttccactgt

SEQ ID NO: 4487288 - DNA, 25 bp, Homo sapien
gcagagagcgttttttcaggaaaca

SEQ ID NO: 4487289 - DNA, 25 bp, Homo sapien
cttggcagagagcgttttttcagga

SEQ ID NO: 4487290 - DNA, 25 bp, Homo sapien
tggcagagagcgttttttcaggaaa

SEQ ID NO: 4487291 - DNA, 25 bp, Homo sapien
cagagtggagctgatcctggggcac

SEQ ID NO: 4487292 - DNA, 25 bp, Homo sapien
gattggctagggttgagcttccaca

SEQ ID NO: 4487293 - DNA, 25 bp, Homo sapien
ggattggctagggttgagcttccac

SEQ ID NO: 4487294 - DNA, 25 bp, Homo sapien
caggattggctagggttgagcttcc

SEQ ID NO: 4487295 - DNA, 25 bp, Homo sapien
tcaggattggctagggttgagcttc

SEQ ID NO: 4487296 - DNA, 25 bp, Homo sapien
tatagctcaggtcagcaatctcctc

SEQ ID NO: 4487297 - DNA, 25 bp, Homo sapien
atagctcaggtcagcaatctcctct

SEQ ID NO: 4487298 - DNA, 25 bp, Homo sapien
tccacctataagaagaagaactagt

SEQ ID NO: 4487299 - DNA, 25 bp, Homo sapien
tagtcaatcgtttcatgccaatttc

SEQ ID NO: 4487300 - DNA, 25 bp, Homo sapien
gtgtctatactcctcgaattctcaa

SEQ ID NO: 4487301 - DNA, 25 bp, Homo sapien
tgtgttgttgggaggatgccgtgca

SEQ ID NO: 4487302 - DNA, 25 bp, Homo sapien
gacctgggccaatgaacttctcacc

SEQ ID NO: 4487303 - DNA, 25 bp, Homo sapien
acagtcgtcgcgcagatggctgctg

SEQ ID NO: 4487304 - DNA, 25 bp, Homo sapien
gcagggacagtaggattcctagacc

SEQ ID NO: 4487305 - DNA, 25 bp, Homo sapien
gagatagagtgttatgtccacagtc

SEQ ID NO: 4487306 - DNA, 25 bp, Homo sapien
ttagacagcctggatctgagcttgg

SEQ ID NO: 4487307 - DNA, 25 bp, Homo sapien
tacagacggatggaaactcgggctt

SEQ ID NO: 4487308 - DNA, 25 bp, Homo sapien
caagattgctgaaaaatgatccacc

SEQ ID NO: 4487309 - DNA, 25 bp, Homo sapien
ggcttggcagttgcgggtcactctc

SEQ ID NO: 4487310 - DNA, 25 bp, Homo sapien
agcagtaagcattaagagtcaattc

SEQ ID NO: 4487311 - DNA, 25 bp, Homo sapien
ttaaggctagcagtaagcattaaga

SEQ ID NO: 4487312 - DNA, 25 bp, Homo sapien
aggctagcagtaagcattaagagtc

SEQ ID NO: 4487313 - DNA, 25 bp, Homo sapien
ctagcagtaagcattaagagtcaat

SEQ ID NO: 4487314 - DNA, 25 bp, Homo sapien
gaaacattcaccctcgttactctca

SEQ ID NO: 4487315 - DNA, 25 bp, Homo sapien
cctggacgctgctaccttcttttgg

SEQ ID NO: 4487316 - DNA, 25 bp, Homo sapien
cagttcttacggaaacattcaccct

SEQ ID NO: 4487317 - DNA, 25 bp, Homo sapien
ctctcacataagctgaactcctgga

SEQ ID NO: 4487318 - DNA, 25 bp, Homo sapien
tggatgtgttccagggatagtcagt

SEQ ID NO: 4487319 - DNA, 25 bp, Homo sapien
tgttccagggatagtcagtagagag

SEQ ID NO: 4487320 - DNA, 25 bp, Homo sapien
gtgttccagggatagtcagtagaga

SEQ ID NO: 4487321 - DNA, 25 bp, Homo sapien
atgtgttccagggatagtcagtaga

SEQ ID NO: 4487322 - DNA, 25 bp, Homo sapien
gagagagggcccttcttcatacgtt

SEQ ID NO: 4487323 - DNA, 25 bp, Homo sapien
ggagagagggcccttcttcatacgt

SEQ ID NO: 4487324 - DNA, 25 bp, Homo sapien
gacattggggccttgagcagatatg

SEQ ID NO: 4487325 - DNA, 25 bp, Homo sapien
tatgagcatgcagaggatattgagg

SEQ ID NO: 4487326 - DNA, 25 bp, Homo sapien
ccccagggcttgtcagcagcaagcc

SEQ ID NO: 4487327 - DNA, 25 bp, Homo sapien
cagggcttgtcagcagcaagcccat

SEQ ID NO: 4487328 - DNA, 25 bp, Homo sapien
cgaagccccagggcttgtcagcagc

SEQ ID NO: 4487329 - DNA, 25 bp, Homo sapien
ccgaagccccagggcttgtcagcag

SEQ ID NO: 4487330 - DNA, 25 bp, Homo sapien
tctgtgaaacagcttgggccatgct

SEQ ID NO: 4487331 - DNA, 25 bp, Homo sapien
gcggtctgtgaaacagcttgggcca

SEQ ID NO: 4487332 - DNA, 25 bp, Homo sapien
tgtgaaacagcttgggccatgctca

SEQ ID NO: 4487333 - DNA, 25 bp, Homo sapien
ctgggcccctggcggtctgtgaaac

SEQ ID NO: 4487334 - DNA, 25 bp, Homo sapien
ttcatggcccaatgacaggactagg

SEQ ID NO: 4487335 - DNA, 25 bp, Homo sapien
gctggccgaagcttcatggcccaat

SEQ ID NO: 4487336 - DNA, 25 bp, Homo sapien
tatttctggccgtcccagcctctgg

SEQ ID NO: 4487337 - DNA, 25 bp, Homo sapien
ggccattaggaagctggccgaagct

SEQ ID NO: 4487338 - DNA, 25 bp, Homo sapien
gtttcgagtctttgcaacttctgcc

SEQ ID NO: 4487339 - DNA, 25 bp, Homo sapien
gggatattatccacaagactgaaga

SEQ ID NO: 4487340 - DNA, 25 bp, Homo sapien
cacccggcctgtttcaagtcttaat

SEQ ID NO: 4487341 - DNA, 25 bp, Homo sapien
gacaattttcatatcactgcagaag

SEQ ID NO: 4487342 - DNA, 25 bp, Homo sapien
gaaatgatcagaggagcattctgca

SEQ ID NO: 4487343 - DNA, 25 bp, Homo sapien
gtttgccattgggttaggtgtgaac

SEQ ID NO: 4487344 - DNA, 25 bp, Homo sapien
cattgggttaggtgtgaacagcagc

SEQ ID NO: 4487345 - DNA, 25 bp, Homo sapien
tggtgtttgccattgggttaggtgt

SEQ ID NO: 4487346 - DNA, 25 bp, Homo sapien
taatgtggggttaagagctctatca

SEQ ID NO: 4487347 - DNA, 25 bp, Homo sapien
catggcataatgtggggttaagagc

SEQ ID NO: 4487348 - DNA, 25 bp, Homo sapien
cagggactttctttatcatggcata

SEQ ID NO: 4487349 - DNA, 25 bp, Homo sapien
tctcaccccagggactttctttatc

SEQ ID NO: 4487350 - DNA, 25 bp, Homo sapien
tcactggattccaagcagtaaaatt

SEQ ID NO: 4487351 - DNA, 25 bp, Homo sapien
ctggattccaagcagtaaaattttc

SEQ ID NO: 4487352 - DNA, 25 bp, Homo sapien
gattccaagcagtaaaattttcacc

SEQ ID NO: 4487353 - DNA, 25 bp, Homo sapien
ttcaccaagaatgtcacaatacctc

SEQ ID NO: 4487354 - DNA, 25 bp, Homo sapien
ggaggctgacattgttctgtaaagt

SEQ ID NO: 4487355 - DNA, 25 bp, Homo sapien
gcttggtggtagaactcatcgcctg

SEQ ID NO: 4487356 - DNA, 25 bp, Homo sapien
ctgcctgcttggtggtagaactcat

SEQ ID NO: 4487357 - DNA, 25 bp, Homo sapien
ggtagaactcatcgcctgagaattg

SEQ ID NO: 4487358 - DNA, 25 bp, Homo sapien
tacggttctcacagtaccctagggc

SEQ ID NO: 4487359 - DNA, 25 bp, Homo sapien
tatttgggttctactagttcagaag

SEQ ID NO: 4487360 - DNA, 25 bp, Homo sapien
tcacagtaccctagggcctccttaa

SEQ ID NO: 4487361 - DNA, 25 bp, Homo sapien
tactagttcagaagaggtacggttc

SEQ ID NO: 4487362 - DNA, 25 bp, Homo sapien
tcaggagtagagctaggagttgctc

SEQ ID NO: 4487363 - DNA, 25 bp, Homo sapien
aatgcagattcacaaggtggaggtg

SEQ ID NO: 4487364 - DNA, 25 bp, Homo sapien
taagaaaagcttgatgctgccttct

SEQ ID NO: 4487365 - DNA, 25 bp, Homo sapien
tcttttccctgtacaccagtgggtc

SEQ ID NO: 4487366 - DNA, 25 bp, Homo sapien
aaagggtaagctttggaaatgatgg

SEQ ID NO: 4487367 - DNA, 25 bp, Homo sapien
gaaagggtaagctttggaaatgatg

SEQ ID NO: 4487368 - DNA, 25 bp, Homo sapien
agggtaagctttggaaatgatgggc

SEQ ID NO: 4487369 - DNA, 25 bp, Homo sapien
ggtaagctttggaaatgatgggcat

SEQ ID NO: 4487370 - DNA, 25 bp, Homo sapien
cctttgtgcatcccgtggggcagct

SEQ ID NO: 4487371 - DNA, 25 bp, Homo sapien
gcctttgtgcatcccgtggggcagc

SEQ ID NO: 4487372 - DNA, 25 bp, Homo sapien
caggggcctttgtgcatcccgtggg

SEQ ID NO: 4487373 - DNA, 25 bp, Homo sapien
gggcctttgtgcatcccgtggggca

SEQ ID NO: 4487374 - DNA, 25 bp, Homo sapien
ttataaaaaccgtgaatgatgcccc

SEQ ID NO: 4487375 - DNA, 25 bp, Homo sapien
gatacagggagagccacgtgaagag

SEQ ID NO: 4487376 - DNA, 25 bp, Homo sapien
taaggtggagcggaattcattttat

SEQ ID NO: 4487377 - DNA, 25 bp, Homo sapien
gatgccccctcccatgagggataca

SEQ ID NO: 4487378 - DNA, 25 bp, Homo sapien
aggtgcatctgacagggccttgctg

SEQ ID NO: 4487379 - DNA, 25 bp, Homo sapien
gaggtgcatctgacagggccttgct

SEQ ID NO: 4487380 - DNA, 25 bp, Homo sapien
ttgccatcatctgaaaggcaagttt

SEQ ID NO: 4487381 - DNA, 25 bp, Homo sapien
actccccgcaatactttgagattca

SEQ ID NO: 4487382 - DNA, 25 bp, Homo sapien
catcatctgaaaggcaagtttgttt

SEQ ID NO: 4487383 - DNA, 25 bp, Homo sapien
cttcactccccgcaatactttgaga

SEQ ID NO: 4487384 - DNA, 25 bp, Homo sapien
atgtcataagcagctggtgttgcct

SEQ ID NO: 4487385 - DNA, 25 bp, Homo sapien
tgtcataagcagctggtgttgcctt

SEQ ID NO: 4487386 - DNA, 25 bp, Homo sapien
gtcataagcagctggtgttgccttg

SEQ ID NO: 4487387 - DNA, 25 bp, Homo sapien
aaacacatcggccatcactggtgat

SEQ ID NO: 4487388 - DNA, 25 bp, Homo sapien
acacatcggccatcactggtgatgg

SEQ ID NO: 4487389 - DNA, 25 bp, Homo sapien
cctaaacacatcggccatcactggt

SEQ ID NO: 4487390 - DNA, 25 bp, Homo sapien
acatcggccatcactggtgatggtc

SEQ ID NO: 4487391 - DNA, 25 bp, Homo sapien
tagttatggaagcttggtggacccc

SEQ ID NO: 4487392 - DNA, 25 bp, Homo sapien
gccagattctgaggcctttgtccac

SEQ ID NO: 4487393 - DNA, 25 bp, Homo sapien
ggtggaccccacttggtactgggca

SEQ ID NO: 4487394 - DNA, 25 bp, Homo sapien
cccacactccgggaagccagattct

SEQ ID NO: 4487395 - DNA, 25 bp, Homo sapien
ctctgcactatggacgtcctccttg

SEQ ID NO: 4487396 - DNA, 25 bp, Homo sapien
ccttgtgatgatgtggacttgcttc

SEQ ID NO: 4487397 - DNA, 25 bp, Homo sapien
cactatggacgtcctccttgtgatg

SEQ ID NO: 4487398 - DNA, 25 bp, Homo sapien
gcttctggttttcccaacaaagcat

SEQ ID NO: 4487399 - DNA, 25 bp, Homo sapien
ggtcagttctaatggaacctctgaa

SEQ ID NO: 4487400 - DNA, 25 bp, Homo sapien
gaatctgaaatagcagagcttgttc

SEQ ID NO: 4487401 - DNA, 25 bp, Homo sapien
cagaagacccctggtcagttctaat

SEQ ID NO: 4487402 - DNA, 25 bp, Homo sapien
ttctccaacaggcaacactaacaga

SEQ ID NO: 4487403 - DNA, 25 bp, Homo sapien
ggggtctccctcaaagccaacaagc

SEQ ID NO: 4487404 - DNA, 25 bp, Homo sapien
ctccctcaaagccaacaagctgtac

SEQ ID NO: 4487405 - DNA, 25 bp, Homo sapien
gtctccctcaaagccaacaagctgt

SEQ ID NO: 4487406 - DNA, 25 bp, Homo sapien
gggtctccctcaaagccaacaagct

SEQ ID NO: 4487407 - DNA, 25 bp, Homo sapien
cttactagccctttgatgactcaga

SEQ ID NO: 4487408 - DNA, 25 bp, Homo sapien
tagccctttgatgactcagaaggca

SEQ ID NO: 4487409 - DNA, 25 bp, Homo sapien
ccctttgatgactcagaaggcactt

SEQ ID NO: 4487410 - DNA, 25 bp, Homo sapien
tcagaaggcacttcagggtcctcat

SEQ ID NO: 4487411 - DNA, 25 bp, Homo sapien
cgtgctgtcacttaacctgaactca

SEQ ID NO: 4487412 - DNA, 25 bp, Homo sapien
gccacgtgctgtcacttaacctgaa

SEQ ID NO: 4487413 - DNA, 25 bp, Homo sapien
ggagccacgtgctgtcacttaacct

SEQ ID NO: 4487414 - DNA, 25 bp, Homo sapien
tgctgtcacttaacctgaactcagt

SEQ ID NO: 4487415 - DNA, 25 bp, Homo sapien
gtttgcttttggcaggctccacctg

SEQ ID NO: 4487416 - DNA, 25 bp, Homo sapien
ttgcttttggcaggctccacctgct

SEQ ID NO: 4487417 - DNA, 25 bp, Homo sapien
ttgtttgcttttggcaggctccacc

SEQ ID NO: 4487418 - DNA, 25 bp, Homo sapien
ttttgtttgcttttggcaggctcca

SEQ ID NO: 4487419 - DNA, 25 bp, Homo sapien
gcagactaattggtgttgacaggct

SEQ ID NO: 4487420 - DNA, 25 bp, Homo sapien
tctgttgcgagtttccactgaaggt

SEQ ID NO: 4487421 - DNA, 25 bp, Homo sapien
ggcttctgcttgtagggcagactaa

SEQ ID NO: 4487422 - DNA, 25 bp, Homo sapien
caggctgccggtgtcaagtgtttgt

SEQ ID NO: 4487423 - DNA, 25 bp, Homo sapien
gcaccgaggaagaagcaacggagcc

SEQ ID NO: 4487424 - DNA, 25 bp, Homo sapien
cctccggagtcgtctggctgcagag

SEQ ID NO: 4487425 - DNA, 25 bp, Homo sapien
ttttcgctcggcattgcggccagcc

SEQ ID NO: 4487426 - DNA, 25 bp, Homo sapien
taaagaaacgcttctgtcgctcgcc

SEQ ID NO: 4487427 - DNA, 25 bp, Homo sapien
tatttggagccactaacgggacttc

SEQ ID NO: 4487428 - DNA, 25 bp, Homo sapien
cagaggaagctttggctccacggat

SEQ ID NO: 4487429 - DNA, 25 bp, Homo sapien
gataggtacatccaagtgtcccgag

SEQ ID NO: 4487430 - DNA, 25 bp, Homo sapien
tcttttctcagtcaggcgagggagg

SEQ ID NO: 4487431 - DNA, 25 bp, Homo sapien
gagttgactgagcatgtgtttgttt

SEQ ID NO: 4487432 - DNA, 25 bp, Homo sapien
cacaggaagatttccgtttcttttg

SEQ ID NO: 4487433 - DNA, 25 bp, Homo sapien
taaatgagttgactgagcatgtgtt

SEQ ID NO: 4487434 - DNA, 25 bp, Homo sapien
gatttccgtttcttttgcaagctat

SEQ ID NO: 4487435 - DNA, 25 bp, Homo sapien
tatctgggcacttatctctctgtgt

SEQ ID NO: 4487436 - DNA, 25 bp, Homo sapien
cagttcagtataatcgatacttctc

SEQ ID NO: 4487437 - DNA, 25 bp, Homo sapien
ctctgtgtgactgggtttggacatc

SEQ ID NO: 4487438 - DNA, 25 bp, Homo sapien
ttctaggaccctaagccgactcact

SEQ ID NO: 4487439 - DNA, 25 bp, Homo sapien
aagatgctctggagacaagacagtg

SEQ ID NO: 4487440 - DNA, 25 bp, Homo sapien
cggctctgattctggtgtttgatgt

SEQ ID NO: 4487441 - DNA, 25 bp, Homo sapien
aaggcgtaggctgtttggataaaag

SEQ ID NO: 4487442 - DNA, 25 bp, Homo sapien
ctttctcggctctgattctggtgtt

SEQ ID NO: 4487443 - DNA, 25 bp, Homo sapien
cttggccggcttagattccttgatc

SEQ ID NO: 4487444 - DNA, 25 bp, Homo sapien
tcctcttgcctaccatcgacagggt

SEQ ID NO: 4487445 - DNA, 25 bp, Homo sapien
tcgacagggtacttgctgcaaacat

SEQ ID NO: 4487446 - DNA, 25 bp, Homo sapien
catgttgggaggtaattgagacgta

SEQ ID NO: 4487447 - DNA, 25 bp, Homo sapien
tgtcccactctgtcgcaattctggt

SEQ ID NO: 4487448 - DNA, 25 bp, Homo sapien
tgcttgtcttaagaggagttctacg

SEQ ID NO: 4487449 - DNA, 25 bp, Homo sapien
gtttcctttcctcgattcatgctta

SEQ ID NO: 4487450 - DNA, 25 bp, Homo sapien
aggagttctacggtgactgtgttga

SEQ ID NO: 4487451 - DNA, 25 bp, Homo sapien
tcctctaaggagttacttgtcagca

SEQ ID NO: 4487452 - DNA, 25 bp, Homo sapien
caggctttgtctcaccagctgtgta

SEQ ID NO: 4487453 - DNA, 25 bp, Homo sapien
gcttgggacccagtacaggctttgt

SEQ ID NO: 4487454 - DNA, 25 bp, Homo sapien
ctagttccaaaaagagtcacaccag

SEQ ID NO: 4487455 - DNA, 25 bp, Homo sapien
gaatcagagagtgggctctcaccag

SEQ ID NO: 4487456 - DNA, 25 bp, Homo sapien
tgaatcagagagtgggctctcacca

SEQ ID NO: 4487457 - DNA, 25 bp, Homo sapien
gtgaatcagagagtgggctctcacc

SEQ ID NO: 4487458 - DNA, 25 bp, Homo sapien
tgtgaatcagagagtgggctctcac

SEQ ID NO: 4487459 - DNA, 25 bp, Homo sapien
gatgattcacatcccgggcaggatg

SEQ ID NO: 4487460 - DNA, 25 bp, Homo sapien
tggagctgggtggcgcgagatttca

SEQ ID NO: 4487461 - DNA, 25 bp, Homo sapien
agcaggaatacgatggacaaaagga

SEQ ID NO: 4487462 - DNA, 25 bp, Homo sapien
caggaatacgatggacaaaaggatg

SEQ ID NO: 4487463 - DNA, 25 bp, Homo sapien
tggcatgtcggaatcaccagcgtcg

SEQ ID NO: 4487464 - DNA, 25 bp, Homo sapien
ctgtgccgctatgacagtcaatctg

SEQ ID NO: 4487465 - DNA, 25 bp, Homo sapien
accagcgtcgctactcttgcacttt

SEQ ID NO: 4487466 - DNA, 25 bp, Homo sapien
agacggctgctaagtgatgggtggg

SEQ ID NO: 4487467 - DNA, 25 bp, Homo sapien
tgcctggatgtaggccagcattatc

SEQ ID NO: 4487468 - DNA, 25 bp, Homo sapien
cctctgcctggatgtaggccagcat

SEQ ID NO: 4487469 - DNA, 25 bp, Homo sapien
tgcctctgcctggatgtaggccagc

SEQ ID NO: 4487470 - DNA, 25 bp, Homo sapien
tctgcctggatgtaggccagcatta

SEQ ID NO: 4487471 - DNA, 25 bp, Homo sapien
gggtgtagacatgaaactgccttta

SEQ ID NO: 4487472 - DNA, 25 bp, Homo sapien
tgggtgaggaacatatgagagctcc

SEQ ID NO: 4487473 - DNA, 25 bp, Homo sapien
tcattggacagtctgaactcagtgg

SEQ ID NO: 4487474 - DNA, 25 bp, Homo sapien
tatctttcggtggtaggatcacact

SEQ ID NO: 4487475 - DNA, 25 bp, Homo sapien
ttgagctgaaatcttcactctagcc

SEQ ID NO: 4487476 - DNA, 25 bp, Homo sapien
tataattagtaaacacggtgtgcat

SEQ ID NO: 4487477 - DNA, 25 bp, Homo sapien
ccataggagttataattagtaaaca

SEQ ID NO: 4487478 - DNA, 25 bp, Homo sapien
taaaatgtttctacagcctgagtaa

SEQ ID NO: 4487479 - DNA, 25 bp, Homo sapien
tctttgtacacgtcctgccgataag

SEQ ID NO: 4487480 - DNA, 25 bp, Homo sapien
tgtacacgtcctgccgataagtctc

SEQ ID NO: 4487481 - DNA, 25 bp, Homo sapien
tctgtcctctttgtacacgtcctgc

SEQ ID NO: 4487482 - DNA, 25 bp, Homo sapien
cctgccgataagtctctctgaatgt

SEQ ID NO: 4487483 - DNA, 25 bp, Homo sapien
tcttgcgtggagataggaagcacca

SEQ ID NO: 4487484 - DNA, 25 bp, Homo sapien
gaagtaagcatcctttcactccagg

SEQ ID NO: 4487485 - DNA, 25 bp, Homo sapien
aaatgattgactaggaaagcccaga

SEQ ID NO: 4487486 - DNA, 25 bp, Homo sapien
tactttggcagcctagtagaactgg

SEQ ID NO: 4487487 - DNA, 25 bp, Homo sapien
tctttatctgaaaaagtaaatgctg

SEQ ID NO: 4487488 - DNA, 25 bp, Homo sapien
ttatctgaaaaagtaaatgctgccc

SEQ ID NO: 4487489 - DNA, 25 bp, Homo sapien
tcaaagaccctggaaatcctgtttc

SEQ ID NO: 4487490 - DNA, 25 bp, Homo sapien
tctgaaaaagtaaatgctgccctaa

SEQ ID NO: 4487491 - DNA, 25 bp, Homo sapien
gggctcctgcaggtatttaatatgt

SEQ ID NO: 4487492 - DNA, 25 bp, Homo sapien
ggctcctgcaggtatttaatatgtt

SEQ ID NO: 4487493 - DNA, 25 bp, Homo sapien
cgcaggtgcaactcatggctattct

SEQ ID NO: 4487494 - DNA, 25 bp, Homo sapien
caggtgcaactcatggctattctag

SEQ ID NO: 4487495 - DNA, 25 bp, Homo sapien
gggcccgcaggtgcaactcatggct

SEQ ID NO: 4487496 - DNA, 25 bp, Homo sapien
cccgcaggtgcaactcatggctatt

SEQ ID NO: 4487497 - DNA, 25 bp, Homo sapien
taggctctccgtccttggctgcatc

SEQ ID NO: 4487498 - DNA, 25 bp, Homo sapien
ctcctccagcgggttgatcagaaga

SEQ ID NO: 4487499 - DNA, 25 bp, Homo sapien
catctggaacccctaatgcagcctg

SEQ ID NO: 4487500 - DNA, 25 bp, Homo sapien
tcagacccacgtccttttattctca

SEQ ID NO: 4487501 - DNA, 25 bp, Homo sapien
ggcccaaccttccatgaactcgttg

SEQ ID NO: 4487502 - DNA, 25 bp, Homo sapien
ccaaccttccatgaactcgttgcag

SEQ ID NO: 4487503 - DNA, 25 bp, Homo sapien
cctggcccaaccttccatgaactcg

SEQ ID NO: 4487504 - DNA, 25 bp, Homo sapien
caaccttccatgaactcgttgcagg

SEQ ID NO: 4487505 - DNA, 25 bp, Homo sapien
ctgcaagaatgagggtaattaaggt

SEQ ID NO: 4487506 - DNA, 25 bp, Homo sapien
aatgagggtaattaaggtgacttgc

SEQ ID NO: 4487507 - DNA, 25 bp, Homo sapien
agaatgagggtaattaaggtgactt

SEQ ID NO: 4487508 - DNA, 25 bp, Homo sapien
caagaatgagggtaattaaggtgac

SEQ ID NO: 4487509 - DNA, 25 bp, Homo sapien
tgactcctcaccaagctctctgcat

SEQ ID NO: 4487510 - DNA, 25 bp, Homo sapien
ttagttggctgctgactcctcacca

SEQ ID NO: 4487511 - DNA, 25 bp, Homo sapien
ttggctgctgactcctcaccaagct

SEQ ID NO: 4487512 - DNA, 25 bp, Homo sapien
ctgactcctcaccaagctctctgca

SEQ ID NO: 4487513 - DNA, 25 bp, Homo sapien
agggggtgtgtgcaccagcatctgc

SEQ ID NO: 4487514 - DNA, 25 bp, Homo sapien
ctaggaaggtgacagtgggcttcaa

SEQ ID NO: 4487515 - DNA, 25 bp, Homo sapien
aggaaggtgacagtgggcttcaagg

SEQ ID NO: 4487516 - DNA, 25 bp, Homo sapien
taggaaggtgacagtgggcttcaag

SEQ ID NO: 4487517 - DNA, 25 bp, Homo sapien
aggaggaacctgatgagcagcaccc

SEQ ID NO: 4487518 - DNA, 25 bp, Homo sapien
tgcccagtgaattgagcccagcagg

SEQ ID NO: 4487519 - DNA, 25 bp, Homo sapien
tatgtgtgggtgctgtagtcattca

SEQ ID NO: 4487520 - DNA, 25 bp, Homo sapien
gaagcagttcatagaaaggtagtat

SEQ ID NO: 4487521 - DNA, 25 bp, Homo sapien
gttaggatcagagaagttatcagta

SEQ ID NO: 4487522 - DNA, 25 bp, Homo sapien
cagagaagttatcagtagatgctga

SEQ ID NO: 4487523 - DNA, 25 bp, Homo sapien
atgattattgcctgatacatgttag

SEQ ID NO: 4487524 - DNA, 25 bp, Homo sapien
tgattattgcctgatacatgttagg

SEQ ID NO: 4487525 - DNA, 25 bp, Homo sapien
cccaaggccatacagttaggaagca

SEQ ID NO: 4487526 - DNA, 25 bp, Homo sapien
gtagtcatacatcaccttgggcggt

SEQ ID NO: 4487527 - DNA, 25 bp, Homo sapien
taattgaaccttgctgtatgccaca

SEQ ID NO: 4487528 - DNA, 25 bp, Homo sapien
tcagcatcgtgtctctcaagtagtg

SEQ ID NO: 4487529 - DNA, 25 bp, Homo sapien
tggcaaccatagcttattcgtagat

SEQ ID NO: 4487530 - DNA, 25 bp, Homo sapien
gtggctcagtcacaatcacgattca

SEQ ID NO: 4487531 - DNA, 25 bp, Homo sapien
ccctgtctaccgtgttcaatcctaa

SEQ ID NO: 4487532 - DNA, 25 bp, Homo sapien
cttacttagtttattgcatttgcac

SEQ ID NO: 4487533 - DNA, 25 bp, Homo sapien
tgacagcaatcaaatggtatccagg

SEQ ID NO: 4487534 - DNA, 25 bp, Homo sapien
gaacatgccatggttacaggtacct

SEQ ID NO: 4487535 - DNA, 25 bp, Homo sapien
cgtgaactaaagtgcccggccaaat

SEQ ID NO: 4487536 - DNA, 25 bp, Homo sapien
cctggcataggattgtagcttagca

SEQ ID NO: 4487537 - DNA, 25 bp, Homo sapien
tgcttccatatctccctgaaggctt

SEQ ID NO: 4487538 - DNA, 25 bp, Homo sapien
tggagacctgactgcttccatatct

SEQ ID NO: 4487539 - DNA, 25 bp, Homo sapien
gggtctggagacctgactgcttcca

SEQ ID NO: 4487540 - DNA, 25 bp, Homo sapien
ctgggtctggagacctgactgcttc

SEQ ID NO: 4487541 - DNA, 25 bp, Homo sapien
gctgactgttctgacttcataccac

SEQ ID NO: 4487542 - DNA, 25 bp, Homo sapien
gattgttcgtacgctggtgccttca

SEQ ID NO: 4487543 - DNA, 25 bp, Homo sapien
ttgttcgtacgctggtgccttcact

SEQ ID NO: 4487544 - DNA, 25 bp, Homo sapien
gactgttctgacttcataccacatt

SEQ ID NO: 4487545 - DNA, 25 bp, Homo sapien
aggtgggctgtcacctcccagttcc

SEQ ID NO: 4487546 - DNA, 25 bp, Homo sapien
tcagcaaacctcggtatcaggtggg

SEQ ID NO: 4487547 - DNA, 25 bp, Homo sapien
caaacctcggtatcaggtgggctgt

SEQ ID NO: 4487548 - DNA, 25 bp, Homo sapien
tcaggtgggctgtcacctcccagtt

SEQ ID NO: 4487549 - DNA, 25 bp, Homo sapien
agttgggtgggagagcccaaatgca

SEQ ID NO: 4487550 - DNA, 25 bp, Homo sapien
ttgggtgggagagcccaaatgcaac

SEQ ID NO: 4487551 - DNA, 25 bp, Homo sapien
aatgaggagagtgaaggcggcgagt

SEQ ID NO: 4487552 - DNA, 25 bp, Homo sapien
tgaaggcggcgagttgggtgggaga

SEQ ID NO: 4487553 - DNA, 25 bp, Homo sapien
gaagcattggcactttctcgtttac

SEQ ID NO: 4487554 - DNA, 25 bp, Homo sapien
actttctcgtttacactggccttga

SEQ ID NO: 4487555 - DNA, 25 bp, Homo sapien
ctttcttggacttgaacgagctcag

SEQ ID NO: 4487556 - DNA, 25 bp, Homo sapien
ctcgggagaggtccagaatggcttt

SEQ ID NO: 4487557 - DNA, 25 bp, Homo sapien
ggccatttgacatagaggaattcca

SEQ ID NO: 4487558 - DNA, 25 bp, Homo sapien
tagttacgttgctgttttcagtacc

SEQ ID NO: 4487559 - DNA, 25 bp, Homo sapien
ttcagtaccctctgtgccctcttct

SEQ ID NO: 4487560 - DNA, 25 bp, Homo sapien
tcctgtatttcttagttacgttgct

SEQ ID NO: 4487561 - DNA, 25 bp, Homo sapien
ttttggataagaccttttcctgcat

SEQ ID NO: 4487562 - DNA, 25 bp, Homo sapien
tactgtccgtaagttgttcttgacc

SEQ ID NO: 4487563 - DNA, 25 bp, Homo sapien
gaaagaattccctcaaatgctactg

SEQ ID NO: 4487564 - DNA, 25 bp, Homo sapien
tcagtactgatgcactgcaaggcct

SEQ ID NO: 4487565 - DNA, 25 bp, Homo sapien
cacggctgatatttggatgagcaac

SEQ ID NO: 4487566 - DNA, 25 bp, Homo sapien
agcgcccgccgtagtcaaggcaaca

SEQ ID NO: 4487567 - DNA, 25 bp, Homo sapien
cctccaccgcgcctcagcacttgca

SEQ ID NO: 4487568 - DNA, 25 bp, Homo sapien
ccacagcgcccgccgtagtcaaggc

SEQ ID NO: 4487569 - DNA, 25 bp, Homo sapien
tttcctccaccgcgcctcagcactt

SEQ ID NO: 4487570 - DNA, 25 bp, Homo sapien
ccgcagctacaaatctgacacagac

SEQ ID NO: 4487571 - DNA, 25 bp, Homo sapien
gcagctacaaatctgacacagacac

SEQ ID NO: 4487572 - DNA, 25 bp, Homo sapien
cgcagctacaaatctgacacagaca

SEQ ID NO: 4487573 - DNA, 25 bp, Homo sapien
ccccgggtagcaggcgggtgaggag

SEQ ID NO: 4487574 - DNA, 25 bp, Homo sapien
cgagtattcgcggagcgggataagt

SEQ ID NO: 4487575 - DNA, 25 bp, Homo sapien
ataagtggggatgtcgctgcgccct

SEQ ID NO: 4487576 - DNA, 25 bp, Homo sapien
tgtcgctgcgccctcgtcccttcat

SEQ ID NO: 4487577 - DNA, 25 bp, Homo sapien
gcatccttgattgggagtctcaggg

SEQ ID NO: 4487578 - DNA, 25 bp, Homo sapien
cattttactttgcatccttgattgg

SEQ ID NO: 4487579 - DNA, 25 bp, Homo sapien
ctggcccgggtggcattttactttg

SEQ ID NO: 4487580 - DNA, 25 bp, Homo sapien
tactttgcatccttgattgggagtc

SEQ ID NO: 4487581 - DNA, 25 bp, Homo sapien
gaactgctgcctggacgggaatggg

SEQ ID NO: 4487582 - DNA, 25 bp, Homo sapien
ctgcctggacgggaatgggaatatg

SEQ ID NO: 4487583 - DNA, 25 bp, Homo sapien
gacttttcagtcaggcggatcccaa

SEQ ID NO: 4487584 - DNA, 25 bp, Homo sapien
gggaatatggtctggctgggaggac

SEQ ID NO: 4487585 - DNA, 25 bp, Homo sapien
ttcctttttgcctagactaaccaga

SEQ ID NO: 4487586 - DNA, 25 bp, Homo sapien
attcctttttgcctagactaaccag

SEQ ID NO: 4487587 - DNA, 25 bp, Homo sapien
tgaccttggaagagacgagtgattc

SEQ ID NO: 4487588 - DNA, 25 bp, Homo sapien
cgagtgattctggagtctacagctc

SEQ ID NO: 4487589 - DNA, 25 bp, Homo sapien
caagctggtttcctaacttggcagc

SEQ ID NO: 4487590 - DNA, 25 bp, Homo sapien
gctagaagttgttaggcggcatctt

SEQ ID NO: 4487591 - DNA, 25 bp, Homo sapien
ggcaaaacaccccagaattttcata

SEQ ID NO: 4487592 - DNA, 25 bp, Homo sapien
cataaatccttgtggttccacgtgg

SEQ ID NO: 4487593 - DNA, 25 bp, Homo sapien
ttttcataaatccttgtggttccac

SEQ ID NO: 4487594 - DNA, 25 bp, Homo sapien
tccaaatattcagttgtagggcaaa

SEQ ID NO: 4487595 - DNA, 25 bp, Homo sapien
tgtgacttaactagtctcttgacta

SEQ ID NO: 4487596 - DNA, 25 bp, Homo sapien
ttcaagttgtgacttaactagtctc

SEQ ID NO: 4487597 - DNA, 25 bp, Homo sapien
aaagattagacaccctactctaggt

SEQ ID NO: 4487598 - DNA, 25 bp, Homo sapien
caccctactctaggtggtggtgaca

SEQ ID NO: 4487599 - DNA, 25 bp, Homo sapien
gtctccagcaaactattttggcata

SEQ ID NO: 4487600 - DNA, 25 bp, Homo sapien
tctccagcaaactattttggcatac

SEQ ID NO: 4487601 - DNA, 25 bp, Homo sapien
gcaaactattttggcatactttctt

SEQ ID NO: 4487602 - DNA, 25 bp, Homo sapien
ccagcaaactattttggcatacttt

SEQ ID NO: 4487603 - DNA, 25 bp, Homo sapien
taggtagtaccaagatcaatcttcc

SEQ ID NO: 4487604 - DNA, 25 bp, Homo sapien
ggcacatggcgaggctgtttaacta

SEQ ID NO: 4487605 - DNA, 25 bp, Homo sapien
gcactttatacgaattcaaatcccg

SEQ ID NO: 4487606 - DNA, 25 bp, Homo sapien
tccaaaggccggactattgccacag

SEQ ID NO: 4487607 - DNA, 25 bp, Homo sapien
tggatgggattgtgggtcttttacc

SEQ ID NO: 4487608 - DNA, 25 bp, Homo sapien
tacaatactattttgccaaagagag

SEQ ID NO: 4487609 - DNA, 25 bp, Homo sapien
tttaccactcaatcagacaaatggc

SEQ ID NO: 4487610 - DNA, 25 bp, Homo sapien
gaggctaagtttggcagcacaccaa

SEQ ID NO: 4487611 - DNA, 25 bp, Homo sapien
ttctctactttgtcctttatcagtg

SEQ ID NO: 4487612 - DNA, 25 bp, Homo sapien
ttgcagtttcaccaatgagaccctg

SEQ ID NO: 4487613 - DNA, 25 bp, Homo sapien
tcaccaatgagaccctgaaagtcac

SEQ ID NO: 4487614 - DNA, 25 bp, Homo sapien
ctgttgggatcaattcatgtggcac

SEQ ID NO: 4487615 - DNA, 25 bp, Homo sapien
cctgaaagtcacaccggtgagttgt

SEQ ID NO: 4487616 - DNA, 25 bp, Homo sapien
cactgcaggaataatcttgcggaag

SEQ ID NO: 4487617 - DNA, 25 bp, Homo sapien
ctgcaggaataatcttgcggaagaa

SEQ ID NO: 4487618 - DNA, 25 bp, Homo sapien
gcaggaataatcttgcggaagaatt

SEQ ID NO: 4487619 - DNA, 25 bp, Homo sapien
tcactgcaggaataatcttgcggaa

SEQ ID NO: 4487620 - DNA, 25 bp, Homo sapien
acttggcctggcaattaggtgcaaa

SEQ ID NO: 4487621 - DNA, 25 bp, Homo sapien
gccaaggtgggattcaatagcagcc

SEQ ID NO: 4487622 - DNA, 25 bp, Homo sapien
gatgctatgtagatgccgtgaagtc

SEQ ID NO: 4487623 - DNA, 25 bp, Homo sapien
cttgaacatggtgaggagcagtgca

SEQ ID NO: 4487624 - DNA, 25 bp, Homo sapien
tatactgagtgttagattatgggga

SEQ ID NO: 4487625 - DNA, 25 bp, Homo sapien
tactgagtgttagattatggggaaa

SEQ ID NO: 4487626 - DNA, 25 bp, Homo sapien
agtgttagattatggggaaacgcca

SEQ ID NO: 4487627 - DNA, 25 bp, Homo sapien
tgagtgttagattatggggaaacgc

SEQ ID NO: 4487628 - DNA, 25 bp, Homo sapien
ttctctgtttcaatctctattttca

SEQ ID NO: 4487629 - DNA, 25 bp, Homo sapien
tctgtttcaatctctattttcacac

SEQ ID NO: 4487630 - DNA, 25 bp, Homo sapien
ttgttctctgtttcaatctctattt

SEQ ID NO: 4487631 - DNA, 25 bp, Homo sapien
attgttctctgtttcaatctctatt

SEQ ID NO: 4487632 - DNA, 25 bp, Homo sapien
cctttcttcattagatttatccaag

SEQ ID NO: 4487633 - DNA, 25 bp, Homo sapien
cattagatttatccaagtttagcat

SEQ ID NO: 4487634 - DNA, 25 bp, Homo sapien
ctcctttcttcattagatttatcca

SEQ ID NO: 4487635 - DNA, 25 bp, Homo sapien
cttcattagatttatccaagtttag

SEQ ID NO: 4487636 - DNA, 25 bp, Homo sapien
tccaggacagtggataagacaccat

SEQ ID NO: 4487637 - DNA, 25 bp, Homo sapien
ccaaagtccaggacagtggataaga

SEQ ID NO: 4487638 - DNA, 25 bp, Homo sapien
gcactaggtgctccaaagtccagga

SEQ ID NO: 4487639 - DNA, 25 bp, Homo sapien
gggcactaggtgctccaaagtccag

SEQ ID NO: 4487640 - DNA, 25 bp, Homo sapien
gaatgcctgagtgccctgctgacat

SEQ ID NO: 4487641 - DNA, 25 bp, Homo sapien
cctgctgacatcccaccaggattcc

SEQ ID NO: 4487642 - DNA, 25 bp, Homo sapien
atgaatgcctgagtgccctgctgac

SEQ ID NO: 4487643 - DNA, 25 bp, Homo sapien
tgctgacatcccaccaggattcctt

SEQ ID NO: 4487644 - DNA, 25 bp, Homo sapien
ctggtgcacgatatccggtgccgcc

SEQ ID NO: 4487645 - DNA, 25 bp, Homo sapien
tggtgcacgatatccggtgccgccc

SEQ ID NO: 4487646 - DNA, 25 bp, Homo sapien
agctcgcgcctgcggtattgcagcg

SEQ ID NO: 4487647 - DNA, 25 bp, Homo sapien
ggggccgcagctcacaggacaggaa

SEQ ID NO: 4487648 - DNA, 25 bp, Homo sapien
caggacaggaaggaccccccagcgt

SEQ ID NO: 4487649 - DNA, 25 bp, Homo sapien
tattgcagcgggtagaaggcgggcg

SEQ ID NO: 4487650 - DNA, 25 bp, Homo sapien
gagcactggaatcaccccgctgtgc

SEQ ID NO: 4487651 - DNA, 25 bp, Homo sapien
cttggagcactggaatcaccccgct

SEQ ID NO: 4487652 - DNA, 25 bp, Homo sapien
tggagcactggaatcaccccgctgt

SEQ ID NO: 4487653 - DNA, 25 bp, Homo sapien
gaatcaccccgctgtgccagcctct

SEQ ID NO: 4487654 - DNA, 25 bp, Homo sapien
acactggagggagaatggctggcag

SEQ ID NO: 4487655 - DNA, 25 bp, Homo sapien
tctggacactggagggagaatggct

SEQ ID NO: 4487656 - DNA, 25 bp, Homo sapien
ggacactggagggagaatggctggc

SEQ ID NO: 4487657 - DNA, 25 bp, Homo sapien
ctggtctggacactggagggagaat

SEQ ID NO: 4487658 - DNA, 25 bp, Homo sapien
tggggtcgtgaaacaggccagccac

SEQ ID NO: 4487659 - DNA, 25 bp, Homo sapien
caggagcacaatggtcatgtggatg

SEQ ID NO: 4487660 - DNA, 25 bp, Homo sapien
catgtggatggggttcccaatgctg

SEQ ID NO: 4487661 - DNA, 25 bp, Homo sapien
agaaggaccaggagcacaatggtca

SEQ ID NO: 4487662 - DNA, 25 bp, Homo sapien
ttcagggtgttgtctgcatggtgca

SEQ ID NO: 4487663 - DNA, 25 bp, Homo sapien
ttctgccacttgcagaagctcttca

SEQ ID NO: 4487664 - DNA, 25 bp, Homo sapien
agcaggatggcagtgtcatgctgca

SEQ ID NO: 4487665 - DNA, 25 bp, Homo sapien
gggtgggcgtctcccttcatgttga

SEQ ID NO: 4487666 - DNA, 25 bp, Homo sapien
catgtcctccttgatgttgcagcta

SEQ ID NO: 4487667 - DNA, 25 bp, Homo sapien
tgatgttgcagctacggtgcagctg

SEQ ID NO: 4487668 - DNA, 25 bp, Homo sapien
ttgcagctacggtgcagctggcaca

SEQ ID NO: 4487669 - DNA, 25 bp, Homo sapien
ccatgtcctccttgatgttgcagct

SEQ ID NO: 4487670 - DNA, 25 bp, Homo sapien
gctcaagactgttcttgaggccagt

SEQ ID NO: 4487671 - DNA, 25 bp, Homo sapien
gtgctcaagactgttcttgaggcca

SEQ ID NO: 4487672 - DNA, 25 bp, Homo sapien
ctcaagactgttcttgaggccagtg

SEQ ID NO: 4487673 - DNA, 25 bp, Homo sapien
tgctcaagactgttcttgaggccag

SEQ ID NO: 4487674 - DNA, 25 bp, Homo sapien
ctcgactctcagtgtagcaataggg

SEQ ID NO: 4487675 - DNA, 25 bp, Homo sapien
gaatctcgactctcagtgtagcaat

SEQ ID NO: 4487676 - DNA, 25 bp, Homo sapien
gagggtgaatctcgactctcagtgt

SEQ ID NO: 4487677 - DNA, 25 bp, Homo sapien
gctgggagggtgaatctcgactctc

SEQ ID NO: 4487678 - DNA, 25 bp, Homo sapien
ggtaagccggcgggaggcttctagc

SEQ ID NO: 4487679 - DNA, 25 bp, Homo sapien
aggctgtttccaatgggttcacagt

SEQ ID NO: 4487680 - DNA, 25 bp, Homo sapien
gctgtttccaatgggttcacagtca

SEQ ID NO: 4487681 - DNA, 25 bp, Homo sapien
aaggctgtttccaatgggttcacag

SEQ ID NO: 4487682 - DNA, 25 bp, Homo sapien
ggctgtttccaatgggttcacagtc

SEQ ID NO: 4487683 - DNA, 25 bp, Homo sapien
tggtgatgtactggcagctgcagca

SEQ ID NO: 4487684 - DNA, 25 bp, Homo sapien
tgaggggagcggcgtcgtacgggag

SEQ ID NO: 4487685 - DNA, 25 bp, Homo sapien
tcaaggaacctggtgatgtactggc

SEQ ID NO: 4487686 - DNA, 25 bp, Homo sapien
caggaccaggtgaggggagcggcgt

SEQ ID NO: 4487687 - DNA, 25 bp, Homo sapien
ggctgcagccgagcccttttgtttc

SEQ ID NO: 4487688 - DNA, 25 bp, Homo sapien
agctgaagccgcaacaacctctcag

SEQ ID NO: 4487689 - DNA, 25 bp, Homo sapien
cccagtgctgactcgctgcacatgt

SEQ ID NO: 4487690 - DNA, 25 bp, Homo sapien
gactcgctgcacatgtggctcctgc

SEQ ID NO: 4487691 - DNA, 25 bp, Homo sapien
aggggctgaggggtccaatgcgcct

SEQ ID NO: 4487692 - DNA, 25 bp, Homo sapien
gggctgaggggtccaatgcgcctca

SEQ ID NO: 4487693 - DNA, 25 bp, Homo sapien
ggggctgaggggtccaatgcgcctc

SEQ ID NO: 4487694 - DNA, 25 bp, Homo sapien
ggctgaggggtccaatgcgcctcat

SEQ ID NO: 4487695 - DNA, 25 bp, Homo sapien
tgctggaccttaggcggccactaca

SEQ ID NO: 4487696 - DNA, 25 bp, Homo sapien
taggcggccactacaacggcttagc

SEQ ID NO: 4487697 - DNA, 25 bp, Homo sapien
cactacaacggcttagcagcaggag

SEQ ID NO: 4487698 - DNA, 25 bp, Homo sapien
gcttagcagcaggagtgccctggca

SEQ ID NO: 4487699 - DNA, 25 bp, Homo sapien
tagaggaccccaggcagcactgatg

SEQ ID NO: 4487700 - DNA, 25 bp, Homo sapien
acatcatagaggaccccaggcagca

SEQ ID NO: 4487701 - DNA, 25 bp, Homo sapien
catagaggaccccaggcagcactga

SEQ ID NO: 4487702 - DNA, 25 bp, Homo sapien
gctcacatcatagaggaccccaggc

SEQ ID NO: 4487703 - DNA, 25 bp, Homo sapien
gtgacaggtggtccccacagagcac

SEQ ID NO: 4487704 - DNA, 25 bp, Homo sapien
tggagtgacaggtggtccccacaga

SEQ ID NO: 4487705 - DNA, 25 bp, Homo sapien
agcttggagtgacaggtggtcccca

SEQ ID NO: 4487706 - DNA, 25 bp, Homo sapien
ttggctctctgtatgcccacgccac

SEQ ID NO: 4487707 - DNA, 25 bp, Homo sapien
tgcttggctctctgtatgcccacgc

SEQ ID NO: 4487708 - DNA, 25 bp, Homo sapien
tctctgtatgcccacgccacagctc

SEQ ID NO: 4487709 - DNA, 25 bp, Homo sapien
ataggctgcatgcactgctgcttgg

SEQ ID NO: 4487710 - DNA, 25 bp, Homo sapien
tcaaagtggctgcactggacgtggc

SEQ ID NO: 4487711 - DNA, 25 bp, Homo sapien
gagcatagcgtcaaagtggctgcac

SEQ ID NO: 4487712 - DNA, 25 bp, Homo sapien
tagcgtcaaagtggctgcactggac

SEQ ID NO: 4487713 - DNA, 25 bp, Homo sapien
gtagagcatagcgtcaaagtggctg

SEQ ID NO: 4487714 - DNA, 25 bp, Homo sapien
cctccgtgacacacatccatggcag

SEQ ID NO: 4487715 - DNA, 25 bp, Homo sapien
agtagaagagtcatcagcaacagct

SEQ ID NO: 4487716 - DNA, 25 bp, Homo sapien
gcgggagtatggaggccaccaggaa

SEQ ID NO: 4487717 - DNA, 25 bp, Homo sapien
gggcccaagtagaagagtcatcagc

SEQ ID NO: 4487718 - DNA, 25 bp, Homo sapien
ttgatgcagaggtcccggctggctc

SEQ ID NO: 4487719 - DNA, 25 bp, Homo sapien
aaagtactcattcgcgggccggcag

SEQ ID NO: 4487720 - DNA, 25 bp, Homo sapien
ctggctcggacctggtagcaggggg

SEQ ID NO: 4487721 - DNA, 25 bp, Homo sapien
ggcaaagtactcattcgcgggccgg

SEQ ID NO: 4487722 - DNA, 25 bp, Homo sapien
ctgggagagcctcttcctaaccagg

SEQ ID NO: 4487723 - DNA, 25 bp, Homo sapien
ggagagcctcttcctaaccaggcac

SEQ ID NO: 4487724 - DNA, 25 bp, Homo sapien
gcagtgctgggagagcctcttccta

SEQ ID NO: 4487725 - DNA, 25 bp, Homo sapien
agtgctgggagagcctcttcctaac

SEQ ID NO: 4487726 - DNA, 25 bp, Homo sapien
ctgcaacacacgaggaggggaggcc

SEQ ID NO: 4487727 - DNA, 25 bp, Homo sapien
gcccctggtgctggcggccagccct

SEQ ID NO: 4487728 - DNA, 25 bp, Homo sapien
tgcaacacacgaggaggggaggccc

SEQ ID NO: 4487729 - DNA, 25 bp, Homo sapien
gaggcccctggtgctggcggccagc

SEQ ID NO: 4487730 - DNA, 25 bp, Homo sapien
gtggcaggtggagccgttgccgtgg

SEQ ID NO: 4487731 - DNA, 25 bp, Homo sapien
ggcaggtggagccgttgccgtggca

SEQ ID NO: 4487732 - DNA, 25 bp, Homo sapien
tgtggcaggtggagccgttgccgtg

SEQ ID NO: 4487733 - DNA, 25 bp, Homo sapien
caggtggagccgttgccgtggcaca

SEQ ID NO: 4487734 - DNA, 25 bp, Homo sapien
ctggatgcggacctcacgtgtgctg

SEQ ID NO: 4487735 - DNA, 25 bp, Homo sapien
cctggatgcggacctcacgtgtgct

SEQ ID NO: 4487736 - DNA, 25 bp, Homo sapien
ggtccagccaccattgaggaagtac

SEQ ID NO: 4487737 - DNA, 25 bp, Homo sapien
tggtccagccaccattgaggaagta

SEQ ID NO: 4487738 - DNA, 25 bp, Homo sapien
gatggtccagccaccattgaggaag

SEQ ID NO: 4487739 - DNA, 25 bp, Homo sapien
tggatggtccagccaccattgagga

SEQ ID NO: 4487740 - DNA, 25 bp, Homo sapien
ctgcgtgcgtatgtgacggtggtcc

SEQ ID NO: 4487741 - DNA, 25 bp, Homo sapien
ggacgtgaggttctcccagttgccc

SEQ ID NO: 4487742 - DNA, 25 bp, Homo sapien
ctggatccagacaggctccttggtg

SEQ ID NO: 4487743 - DNA, 25 bp, Homo sapien
cggggacgtgaggttctcccagttg

SEQ ID NO: 4487744 - DNA, 25 bp, Homo sapien
agacaggctccttggtgggacccgg

SEQ ID NO: 4487745 - DNA, 25 bp, Homo sapien
ttaaaggagctgaccccagccacct

SEQ ID NO: 4487746 - DNA, 25 bp, Homo sapien
aggagctgaccccagccacctctgt

SEQ ID NO: 4487747 - DNA, 25 bp, Homo sapien
cttaaaggagctgaccccagccacc

SEQ ID NO: 4487748 - DNA, 25 bp, Homo sapien
agctgaccccagccacctctgtgaa

SEQ ID NO: 4487749 - DNA, 25 bp, Homo sapien
gtgagcacgaggtgtcttctccatc

SEQ ID NO: 4487750 - DNA, 25 bp, Homo sapien
ccgtgagcacgaggtgtcttctcca

SEQ ID NO: 4487751 - DNA, 25 bp, Homo sapien
gcccgtgagcacgaggtgtcttctc

SEQ ID NO: 4487752 - DNA, 25 bp, Homo sapien
gagcacgaggtgtcttctccatcca

SEQ ID NO: 4487753 - DNA, 25 bp, Homo sapien
tgtactcgtagtgcaccccagggtt

SEQ ID NO: 4487754 - DNA, 25 bp, Homo sapien
gtgtactcgtagtgcaccccagggt

SEQ ID NO: 4487755 - DNA, 25 bp, Homo sapien
ggtgtactcgtagtgcaccccaggg

SEQ ID NO: 4487756 - DNA, 25 bp, Homo sapien
atggtgtactcgtagtgcaccccag

SEQ ID NO: 4487757 - DNA, 25 bp, Homo sapien
agtaagttgtccctcccctgagctg

SEQ ID NO: 4487758 - DNA, 25 bp, Homo sapien
ccgagagtaagttgtccctcccctg

SEQ ID NO: 4487759 - DNA, 25 bp, Homo sapien
tggtcccgagagtaagttgtccctc

SEQ ID NO: 4487760 - DNA, 25 bp, Homo sapien
ctgccccgtggtcccgagagtaagt

SEQ ID NO: 4487761 - DNA, 25 bp, Homo sapien
cccctctcctatgtagcttcccctc

SEQ ID NO: 4487762 - DNA, 25 bp, Homo sapien
tctggcagtcatcgggccggcccag

SEQ ID NO: 4487763 - DNA, 25 bp, Homo sapien
gagcagtacacactctgcctctgca

SEQ ID NO: 4487764 - DNA, 25 bp, Homo sapien
cacgggccctgcctgccgctccgag

SEQ ID NO: 4487765 - DNA, 25 bp, Homo sapien
tgcacttcctctggcagtcatcggg

SEQ ID NO: 4487766 - DNA, 25 bp, Homo sapien
tggagcacagctgccactcacctgc

SEQ ID NO: 4487767 - DNA, 25 bp, Homo sapien
ggagctggagcacagctgccactca

SEQ ID NO: 4487768 - DNA, 25 bp, Homo sapien
cgcaggagctggagcacagctgcca

SEQ ID NO: 4487769 - DNA, 25 bp, Homo sapien
gctgcggatgcagagcacagcctgg

SEQ ID NO: 4487770 - DNA, 25 bp, Homo sapien
aaggtgttcacaggcgggtggcttc

SEQ ID NO: 4487771 - DNA, 25 bp, Homo sapien
tggtggttgcaaggggtttcagtag

SEQ ID NO: 4487772 - DNA, 25 bp, Homo sapien
cttcagggcgctctgctcatccagc

SEQ ID NO: 4487773 - DNA, 25 bp, Homo sapien
gcgggtggcttcagggcgctctgct

SEQ ID NO: 4487774 - DNA, 25 bp, Homo sapien
gacatttcggtgctgagtcccttcc

SEQ ID NO: 4487775 - DNA, 25 bp, Homo sapien
ggacatttcggtgctgagtcccttc

SEQ ID NO: 4487776 - DNA, 25 bp, Homo sapien
catttcggtgctgagtcccttcctc

SEQ ID NO: 4487777 - DNA, 25 bp, Homo sapien
gaggacatttcggtgctgagtccct

SEQ ID NO: 4487778 - DNA, 25 bp, Homo sapien
cgtagtagaagtcgtccacaaacac

SEQ ID NO: 4487779 - DNA, 25 bp, Homo sapien
agatcctcgtggaagctgatgaaat

SEQ ID NO: 4487780 - DNA, 25 bp, Homo sapien
gtggaagctgatgaaattgtagtcg

SEQ ID NO: 4487781 - DNA, 25 bp, Homo sapien
attgtagtcgtagtagaagtcgtcc

SEQ ID NO: 4487782 - DNA, 25 bp, Homo sapien
gagcccaagatctggggcccctatg

SEQ ID NO: 4487783 - DNA, 25 bp, Homo sapien
agcccaagatctggggcccctatgg

SEQ ID NO: 4487784 - DNA, 25 bp, Homo sapien
tgcggggcacagacccgtgaaagcc

SEQ ID NO: 4487785 - DNA, 25 bp, Homo sapien
ctgcggggcacagacccgtgaaagc

SEQ ID NO: 4487786 - DNA, 25 bp, Homo sapien
cacagacccgtgaaagccaggcaga

SEQ ID NO: 4487787 - DNA, 25 bp, Homo sapien
gggcacagacccgtgaaagccaggc

SEQ ID NO: 4487788 - DNA, 25 bp, Homo sapien
tccagttgcctgagtgccaggtggc

SEQ ID NO: 4487789 - DNA, 25 bp, Homo sapien
ccagttgcctgagtgccaggtggca

SEQ ID NO: 4487790 - DNA, 25 bp, Homo sapien
agttgcctgagtgccaggtggcaca

SEQ ID NO: 4487791 - DNA, 25 bp, Homo sapien
cagttgcctgagtgccaggtggcac

SEQ ID NO: 4487792 - DNA, 25 bp, Homo sapien
ccatgtgtccacatgctgcatgtcc

SEQ ID NO: 4487793 - DNA, 25 bp, Homo sapien
catgtgtccacatgctgcatgtccc

SEQ ID NO: 4487794 - DNA, 25 bp, Homo sapien
atgtgtccacatgctgcatgtccca

SEQ ID NO: 4487795 - DNA, 25 bp, Homo sapien
tgcctcctcgcagaggtctggctct

SEQ ID NO: 4487796 - DNA, 25 bp, Homo sapien
ggcagtgagcccctcacacgggaca

SEQ ID NO: 4487797 - DNA, 25 bp, Homo sapien
cagtgagcccctcacacgggacatg

SEQ ID NO: 4487798 - DNA, 25 bp, Homo sapien
catgggacagcccttggggcggcag

SEQ ID NO: 4487799 - DNA, 25 bp, Homo sapien
tgggacagcccttggggcggcaggg

SEQ ID NO: 4487800 - DNA, 25 bp, Homo sapien
acttggtgctggaaccccactctca

SEQ ID NO: 4487801 - DNA, 25 bp, Homo sapien
ccagtgtgtgaccactggatgccac

SEQ ID NO: 4487802 - DNA, 25 bp, Homo sapien
ctgggccctgcttactccagcagac

SEQ ID NO: 4487803 - DNA, 25 bp, Homo sapien
tgccgcctgggccctgcttactcca

SEQ ID NO: 4487804 - DNA, 25 bp, Homo sapien
ctgccgcctgggccctgcttactcc

SEQ ID NO: 4487805 - DNA, 25 bp, Homo sapien
gccctgcttactccagcagacctcc

SEQ ID NO: 4487806 - DNA, 25 bp, Homo sapien
tgggcggagagcacgagcggcagca

SEQ ID NO: 4487807 - DNA, 25 bp, Homo sapien
cggtcggtctgtgcatcctggcacc

SEQ ID NO: 4487808 - DNA, 25 bp, Homo sapien
cattagggcgtagggggcgggagct

SEQ ID NO: 4487809 - DNA, 25 bp, Homo sapien
cactgaggtctgtcggtcggtctgt

SEQ ID NO: 4487810 - DNA, 25 bp, Homo sapien
cccagcctgccgctgggtagtgaga

SEQ ID NO: 4487811 - DNA, 25 bp, Homo sapien
caagtgcagagtatggatgcgctgc

SEQ ID NO: 4487812 - DNA, 25 bp, Homo sapien
tggggctccccggatgggatggact

SEQ ID NO: 4487813 - DNA, 25 bp, Homo sapien
aacgggttagagaaaagccagagct

SEQ ID NO: 4487814 - DNA, 25 bp, Homo sapien
ctccccggatgggatggacttgcct

SEQ ID NO: 4487815 - DNA, 25 bp, Homo sapien
tggcgcctctggagtatagtccggc

SEQ ID NO: 4487816 - DNA, 25 bp, Homo sapien
tgatacctggtggatttcacgagga

SEQ ID NO: 4487817 - DNA, 25 bp, Homo sapien
atagtccggccctgagagccaacag

SEQ ID NO: 4487818 - DNA, 25 bp, Homo sapien
tggtgatacctggtggatttcacga

SEQ ID NO: 4487819 - DNA, 25 bp, Homo sapien
ggcacggcggtctcggccgagccga

SEQ ID NO: 4487820 - DNA, 25 bp, Homo sapien
gcacggcggtctcggccgagccgag

SEQ ID NO: 4487821 - DNA, 25 bp, Homo sapien
gggcacggcggtctcggccgagccg

SEQ ID NO: 4487822 - DNA, 25 bp, Homo sapien
tgggcacggcggtctcggccgagcc

SEQ ID NO: 4487823 - DNA, 25 bp, Homo sapien
aactccgccaactaagttgcgctct

SEQ ID NO: 4487824 - DNA, 25 bp, Homo sapien
ccaactccgccaactaagttgcgct

SEQ ID NO: 4487825 - DNA, 25 bp, Homo sapien
ccccaactccgccaactaagttgcg

SEQ ID NO: 4487826 - DNA, 25 bp, Homo sapien
tcctcaaatcacaaaacttccccca

SEQ ID NO: 4487827 - DNA, 25 bp, Homo sapien
tctataattgacctctgaaacaagg

SEQ ID NO: 4487828 - DNA, 25 bp, Homo sapien
gcttctcagggcgattaggcaagaa

SEQ ID NO: 4487829 - DNA, 25 bp, Homo sapien
agggaacgtcctcatctaacaaaag

SEQ ID NO: 4487830 - DNA, 25 bp, Homo sapien
tgcattctgtggctcataggctcct

SEQ ID NO: 4487831 - DNA, 25 bp, Homo sapien
gatgacacttaagacctacttgtga

SEQ ID NO: 4487832 - DNA, 25 bp, Homo sapien
gacacttaagacctacttgtgatat

SEQ ID NO: 4487833 - DNA, 25 bp, Homo sapien
acttaagacctacttgtgatattta

SEQ ID NO: 4487834 - DNA, 25 bp, Homo sapien
tgacacttaagacctacttgtgata

SEQ ID NO: 4487835 - DNA, 25 bp, Homo sapien
tacagaacatgatcaagggtgttac

SEQ ID NO: 4487836 - DNA, 25 bp, Homo sapien
gtacagaacatgatcaagggtgtta

SEQ ID NO: 4487837 - DNA, 25 bp, Homo sapien
cacagttatcgtgaagggccccaga

SEQ ID NO: 4487838 - DNA, 25 bp, Homo sapien
cacatcaatgtagaactcagccttc

SEQ ID NO: 4487839 - DNA, 25 bp, Homo sapien
tcaatgtagaactcagccttcttgg

SEQ ID NO: 4487840 - DNA, 25 bp, Homo sapien
tactctgaagggacgcacagttatc

SEQ ID NO: 4487841 - DNA, 25 bp, Homo sapien
ggaccctggcttcatcactctggct

SEQ ID NO: 4487842 - DNA, 25 bp, Homo sapien
ttatcaaatactgccctttaccagg

SEQ ID NO: 4487843 - DNA, 25 bp, Homo sapien
cactgttacaaaggatctggagaaa

SEQ ID NO: 4487844 - DNA, 25 bp, Homo sapien
ccagtcatgctttacatttggcagt

SEQ ID NO: 4487845 - DNA, 25 bp, Homo sapien
cacctaagctgcagaaacccactgg

SEQ ID NO: 4487846 - DNA, 25 bp, Homo sapien
gatgaggatttgaaacacctaagct

SEQ ID NO: 4487847 - DNA, 25 bp, Homo sapien
ggtttcctaggttctgagttggcat

SEQ ID NO: 4487848 - DNA, 25 bp, Homo sapien
cagaaacccactggatggtttccta

SEQ ID NO: 4487849 - DNA, 25 bp, Homo sapien
aagacagacagcaattacagctact

SEQ ID NO: 4487850 - DNA, 25 bp, Homo sapien
acagcaattacagctactgagaaca

SEQ ID NO: 4487851 - DNA, 25 bp, Homo sapien
acagacagcaattacagctactgag

SEQ ID NO: 4487852 - DNA, 25 bp, Homo sapien
cagacagcaattacagctactgaga

SEQ ID NO: 4487853 - DNA, 25 bp, Homo sapien
aaactgcctgctagaaggttcagtt

SEQ ID NO: 4487854 - DNA, 25 bp, Homo sapien
aaatccactgagaccagtgtgtggc

SEQ ID NO: 4487855 - DNA, 25 bp, Homo sapien
cagctatcttcagggatttcataat

SEQ ID NO: 4487856 - DNA, 25 bp, Homo sapien
gctggttatgggacgcgttaccttc

SEQ ID NO: 4487857 - DNA, 25 bp, Homo sapien
tgtcatgtccttgataaaagccctg

SEQ ID NO: 4487858 - DNA, 25 bp, Homo sapien
gctaattgtcatctacccacttcag

SEQ ID NO: 4487859 - DNA, 25 bp, Homo sapien
cctcggcctcagaagtagttggaac

SEQ ID NO: 4487860 - DNA, 25 bp, Homo sapien
ttcaggaacatagaatgcaaatctt

SEQ ID NO: 4487861 - DNA, 25 bp, Homo sapien
gaccgtgaccagttgtgaccacaaa

SEQ ID NO: 4487862 - DNA, 25 bp, Homo sapien
ggaaaatctggagaccaatacgcag

SEQ ID NO: 4487863 - DNA, 25 bp, Homo sapien
gacaattctttgtgagggttctcct

SEQ ID NO: 4487864 - DNA, 25 bp, Homo sapien
ttccaaatgtcccatgggaggcaaa

SEQ ID NO: 4487865 - DNA, 25 bp, Homo sapien
ataatctcgctgaaaggtcacaggc

SEQ ID NO: 4487866 - DNA, 25 bp, Homo sapien
gaaatgctggcacaaggataccatg

SEQ ID NO: 4487867 - DNA, 25 bp, Homo sapien
taaggcaagatgagcgtacagaggc

SEQ ID NO: 4487868 - DNA, 25 bp, Homo sapien
aactcctaagtatgtgccccagaga

SEQ ID NO: 4487869 - DNA, 25 bp, Homo sapien
gcgggagtatcatttgaacctgaga

SEQ ID NO: 4487870 - DNA, 25 bp, Homo sapien
tacacagaaaatcatactaactatc

SEQ ID NO: 4487871 - DNA, 25 bp, Homo sapien
ctatcagaaagaactaagaatcaga

SEQ ID NO: 4487872 - DNA, 25 bp, Homo sapien
ctaagaatcagataggcatcagact

SEQ ID NO: 4487873 - DNA, 25 bp, Homo sapien
ctcttcgtcttcttttgaagtcact

SEQ ID NO: 4487874 - DNA, 25 bp, Homo sapien
gaagtcacttcttctgttgtcccat

SEQ ID NO: 4487875 - DNA, 25 bp, Homo sapien
aagtcacttcttctgttgtcccatt

SEQ ID NO: 4487876 - DNA, 25 bp, Homo sapien
ttcctcttcgtcttcttttgaagtc

SEQ ID NO: 4487877 - DNA, 25 bp, Homo sapien
acatttaaatggccttgcctttcag

SEQ ID NO: 4487878 - DNA, 25 bp, Homo sapien
ccaacttcttctcactaataggctc

SEQ ID NO: 4487879 - DNA, 25 bp, Homo sapien
aacttcttctcactaataggctctt

SEQ ID NO: 4487880 - DNA, 25 bp, Homo sapien
ctccaacttcttctcactaataggc

SEQ ID NO: 4487881 - DNA, 25 bp, Homo sapien
ctgtcttataactctgtgatctgta

SEQ ID NO: 4487882 - DNA, 25 bp, Homo sapien
gtcttataactctgtgatctgtata

SEQ ID NO: 4487883 - DNA, 25 bp, Homo sapien
cttataactctgtgatctgtatatg

SEQ ID NO: 4487884 - DNA, 25 bp, Homo sapien
ataactctgtgatctgtatatgtcc

SEQ ID NO: 4487885 - DNA, 25 bp, Homo sapien
ctttttaagatctaaagatcactgt

SEQ ID NO: 4487886 - DNA, 25 bp, Homo sapien
tgtctcctatcgcttctttttaaga

SEQ ID NO: 4487887 - DNA, 25 bp, Homo sapien
gatcactgtgcaaaggactatcagg

SEQ ID NO: 4487888 - DNA, 25 bp, Homo sapien
gataagcaaaatgtctcctatcgct

SEQ ID NO: 4487889 - DNA, 25 bp, Homo sapien
cgtaatagtatattcgtgatcaact

SEQ ID NO: 4487890 - DNA, 25 bp, Homo sapien
cagcatttcccagagagtaagccag

SEQ ID NO: 4487891 - DNA, 25 bp, Homo sapien
taacaagctgtcaaagggagacctc

SEQ ID NO: 4487892 - DNA, 25 bp, Homo sapien
gaactccggatttccaacagagcag

SEQ ID NO: 4487893 - DNA, 25 bp, Homo sapien
aaaacactttactaggaatcagaag

SEQ ID NO: 4487894 - DNA, 25 bp, Homo sapien
attcatccaaataatgaggaccata

SEQ ID NO: 4487895 - DNA, 25 bp, Homo sapien
tcttacatagctggcatttcgtata

SEQ ID NO: 4487896 - DNA, 25 bp, Homo sapien
tatttggctaagtcacaagctgact

SEQ ID NO: 4487897 - DNA, 25 bp, Homo sapien
catatgataatcaatgcagtactta

SEQ ID NO: 4487898 - DNA, 25 bp, Homo sapien
gcctggcccatggttagcatatgat

SEQ ID NO: 4487899 - DNA, 25 bp, Homo sapien
ggttagcatatgataatcaatgcag

SEQ ID NO: 4487900 - DNA, 25 bp, Homo sapien
cccatggttagcatatgataatcaa

SEQ ID NO: 4487901 - DNA, 25 bp, Homo sapien
gattgcgcttactcttcacctatgt

SEQ ID NO: 4487902 - DNA, 25 bp, Homo sapien
ctaccctccttgtgttatagctcaa

SEQ ID NO: 4487903 - DNA, 25 bp, Homo sapien
caaattggtttcgtatactctgaac

SEQ ID NO: 4487904 - DNA, 25 bp, Homo sapien
tctttcctagatacctgattgcgct

SEQ ID NO: 4487905 - DNA, 25 bp, Homo sapien
gagacagttcaagaatactagggaa

SEQ ID NO: 4487906 - DNA, 25 bp, Homo sapien
agctgtacagcaaacactatcctaa

SEQ ID NO: 4487907 - DNA, 25 bp, Homo sapien
gacgagtatacagagtgactgctaa

SEQ ID NO: 4487908 - DNA, 25 bp, Homo sapien
cggtcatctaaggataatatgccac

SEQ ID NO: 4487909 - DNA, 25 bp, Homo sapien
tcttatccattctgttgtgagaatc

SEQ ID NO: 4487910 - DNA, 25 bp, Homo sapien
tgagaatcgaatggttcacaccatg

SEQ ID NO: 4487911 - DNA, 25 bp, Homo sapien
ctcctcaagtcctttctaggtctga

SEQ ID NO: 4487912 - DNA, 25 bp, Homo sapien
ctcaagtcctttctaggtctgaaga

SEQ ID NO: 4487913 - DNA, 25 bp, Homo sapien
ggcatttgagtgttctttacaatgg

SEQ ID NO: 4487914 - DNA, 25 bp, Homo sapien
ggttccatacataatgctcctccac

SEQ ID NO: 4487915 - DNA, 25 bp, Homo sapien
gaggttccatacataatgctcctcc

SEQ ID NO: 4487916 - DNA, 25 bp, Homo sapien
taatgctcctccacccaatacatac

SEQ ID NO: 4487917 - DNA, 25 bp, Homo sapien
cagaggttccatacataatgctcct

SEQ ID NO: 4487918 - DNA, 25 bp, Homo sapien
cactgttaacgcctatcctagcata

SEQ ID NO: 4487919 - DNA, 25 bp, Homo sapien
gcctatcctagcataaattcagcac

SEQ ID NO: 4487920 - DNA, 25 bp, Homo sapien
aggtcactgttaacgcctatcctag

SEQ ID NO: 4487921 - DNA, 25 bp, Homo sapien
aacgcctatcctagcataaattcag

SEQ ID NO: 4487922 - DNA, 25 bp, Homo sapien
ttaatgagtccatctttcttttata

SEQ ID NO: 4487923 - DNA, 25 bp, Homo sapien
tttatattaggtttgacatgtaact

SEQ ID NO: 4487924 - DNA, 25 bp, Homo sapien
ttatattaggtttgacatgtaacta

SEQ ID NO: 4487925 - DNA, 25 bp, Homo sapien
tttctgttgctcaatttaatgagtc

SEQ ID NO: 4487926 - DNA, 25 bp, Homo sapien
gaagggattaccatgaaatgccatc

SEQ ID NO: 4487927 - DNA, 25 bp, Homo sapien
tccatagggcaggacttaatctcta

SEQ ID NO: 4487928 - DNA, 25 bp, Homo sapien
catcacaaattaaagcagagtctgg

SEQ ID NO: 4487929 - DNA, 25 bp, Homo sapien
tccaagttatatgggcaagtggcct

SEQ ID NO: 4487930 - DNA, 25 bp, Homo sapien
taaataataccgtctctgagaagcc

SEQ ID NO: 4487931 - DNA, 25 bp, Homo sapien
tagggccagagacaatatcgctgtt

SEQ ID NO: 4487932 - DNA, 25 bp, Homo sapien
tcatggtctagtatggaaaacagcc

SEQ ID NO: 4487933 - DNA, 25 bp, Homo sapien
taacattcggccctcatcatcaaag

SEQ ID NO: 4487934 - DNA, 25 bp, Homo sapien
tcccatgtaggctagaatccctgcc

SEQ ID NO: 4487935 - DNA, 25 bp, Homo sapien
ttcactgggtactaaaaagatgggc

SEQ ID NO: 4487936 - DNA, 25 bp, Homo sapien
catttttgggaagtgcgctacagaa

SEQ ID NO: 4487937 - DNA, 25 bp, Homo sapien
tgggcagccccttagatcatttgtt

SEQ ID NO: 4487938 - DNA, 25 bp, Homo sapien
tggctgcggccaatttcccctgttg

SEQ ID NO: 4487939 - DNA, 25 bp, Homo sapien
ggggccacatcagcgaaataccagt

SEQ ID NO: 4487940 - DNA, 25 bp, Homo sapien
tttttctgacatcgcggggtgggga

SEQ ID NO: 4487941 - DNA, 25 bp, Homo sapien
gtgttttttctgacatcgcggggtg

SEQ ID NO: 4487942 - DNA, 25 bp, Homo sapien
cctgggagacgcaagcccaaagagc

SEQ ID NO: 4487943 - DNA, 25 bp, Homo sapien
ggctgattatggagcagggagcccc

SEQ ID NO: 4487944 - DNA, 25 bp, Homo sapien
ggtcctgggagacgcaagcccaaag

SEQ ID NO: 4487945 - DNA, 25 bp, Homo sapien
aggtgagggctgattatggagcagg

SEQ ID NO: 4487946 - DNA, 25 bp, Homo sapien
agggctactgccattgactttcttt

SEQ ID NO: 4487947 - DNA, 25 bp, Homo sapien
ggctcttcctctgccaatatgcttt

SEQ ID NO: 4487948 - DNA, 25 bp, Homo sapien
ctgtgtcagggctactgccattgac

SEQ ID NO: 4487949 - DNA, 25 bp, Homo sapien
tgttagctcctgctggaatgccagg

SEQ ID NO: 4487950 - DNA, 25 bp, Homo sapien
aggagcctggcccgccgagactcac

SEQ ID NO: 4487951 - DNA, 25 bp, Homo sapien
ccccaggagcctggcccgccgagac

SEQ ID NO: 4487952 - DNA, 25 bp, Homo sapien
ctctactgccccttgggccccctgt

SEQ ID NO: 4487953 - DNA, 25 bp, Homo sapien
ccaggagcctggcccgccgagactc

SEQ ID NO: 4487954 - DNA, 25 bp, Homo sapien
aatcaatccctaatcaattcttagc

SEQ ID NO: 4487955 - DNA, 25 bp, Homo sapien
tatgctaatcaatccctaatcaatt

SEQ ID NO: 4487956 - DNA, 25 bp, Homo sapien
atcatatgctaatcaatccctaatc

SEQ ID NO: 4487957 - DNA, 25 bp, Homo sapien
gctaatcaatccctaatcaattctt

SEQ ID NO: 4487958 - DNA, 25 bp, Homo sapien
ctgattattgcggagcttgaatcca

SEQ ID NO: 4487959 - DNA, 25 bp, Homo sapien
gaattgatgttttcagtgagttgac

SEQ ID NO: 4487960 - DNA, 25 bp, Homo sapien
ttgcggagcttgaatccagggctac

SEQ ID NO: 4487961 - DNA, 25 bp, Homo sapien
attgatgttttcagtgagttgactg

SEQ ID NO: 4487962 - DNA, 25 bp, Homo sapien
tcttctcctccttagatgtgcgaac

SEQ ID NO: 4487963 - DNA, 25 bp, Homo sapien
cagatgtatctcatgcttcttctcc

SEQ ID NO: 4487964 - DNA, 25 bp, Homo sapien
gcttcttctcctccttagatgtgcg

SEQ ID NO: 4487965 - DNA, 25 bp, Homo sapien
tgcttcttctcctccttagatgtgc

SEQ ID NO: 4487966 - DNA, 25 bp, Homo sapien
tttgagtttgaacaagctcctccca

SEQ ID NO: 4487967 - DNA, 25 bp, Homo sapien
gagtttgaacaagctcctcccaagc

SEQ ID NO: 4487968 - DNA, 25 bp, Homo sapien
tgaacaagctcctcccaagcttctg

SEQ ID NO: 4487969 - DNA, 25 bp, Homo sapien
gaacaagctcctcccaagcttctgt

SEQ ID NO: 4487970 - DNA, 25 bp, Homo sapien
cctcctgttcacgtagcctctcctc

SEQ ID NO: 4487971 - DNA, 25 bp, Homo sapien
ctctccagctcccgcagagtctcct

SEQ ID NO: 4487972 - DNA, 25 bp, Homo sapien
tctccagctcccgcagagtctcctg

SEQ ID NO: 4487973 - DNA, 25 bp, Homo sapien
cctctccagctcccgcagagtctcc

SEQ ID NO: 4487974 - DNA, 25 bp, Homo sapien
gcccgctgctcgtacagggcttccc

SEQ ID NO: 4487975 - DNA, 25 bp, Homo sapien
ctcggcccgctgctcgtacagggct

SEQ ID NO: 4487976 - DNA, 25 bp, Homo sapien
cgctgctcgtacagggcttcccacc

SEQ ID NO: 4487977 - DNA, 25 bp, Homo sapien
tcggcccgctgctcgtacagggctt

SEQ ID NO: 4487978 - DNA, 25 bp, Homo sapien
ccgacttctccagctcctttacttg

SEQ ID NO: 4487979 - DNA, 25 bp, Homo sapien
aactgcagtgtgctcttgttctcgt

SEQ ID NO: 4487980 - DNA, 25 bp, Homo sapien
ctgcagtgtgctcttgttctcgttg

SEQ ID NO: 4487981 - DNA, 25 bp, Homo sapien
gcagtgtgctcttgttctcgttgtt

SEQ ID NO: 4487982 - DNA, 25 bp, Homo sapien
ggtgcccgcctcccacatcttcttg

SEQ ID NO: 4487983 - DNA, 25 bp, Homo sapien
catcttcttggatgggtcggaggtt

SEQ ID NO: 4487984 - DNA, 25 bp, Homo sapien
ctcccacatcttcttggatgggtcg

SEQ ID NO: 4487985 - DNA, 25 bp, Homo sapien
cacatcttcttggatgggtcggagg

SEQ ID NO: 4487986 - DNA, 25 bp, Homo sapien
tccccaggctgcagctgcctgtggc

SEQ ID NO: 4487987 - DNA, 25 bp, Homo sapien
gctgcagctgcctgtggcctggcac

SEQ ID NO: 4487988 - DNA, 25 bp, Homo sapien
tgtccccaggctgcagctgcctgtg

SEQ ID NO: 4487989 - DNA, 25 bp, Homo sapien
cccaggctgcagctgcctgtggcct

SEQ ID NO: 4487990 - DNA, 25 bp, Homo sapien
ttgtccgcacatccaagctccttgt

SEQ ID NO: 4487991 - DNA, 25 bp, Homo sapien
tgtcagatggttgaagactagctat

SEQ ID NO: 4487992 - DNA, 25 bp, Homo sapien
attcctatgtcagatggttgaagac

SEQ ID NO: 4487993 - DNA, 25 bp, Homo sapien
gatggttgaagactagctattagcc

SEQ ID NO: 4487994 - DNA, 25 bp, Homo sapien
ctatgtcagatggttgaagactagc

SEQ ID NO: 4487995 - DNA, 25 bp, Homo sapien
ttgtcataggatttccattctcttt

SEQ ID NO: 4487996 - DNA, 25 bp, Homo sapien
gtcataggatttccattctctttag

SEQ ID NO: 4487997 - DNA, 25 bp, Homo sapien
tattgtcataggatttccattctct

SEQ ID NO: 4487998 - DNA, 25 bp, Homo sapien
cataggatttccattctctttagct

SEQ ID NO: 4487999 - DNA, 25 bp, Homo sapien
tcctgtaactttttcatcccacaac

SEQ ID NO: 4488000 - DNA, 25 bp, Homo sapien
tatcctgtaactttttcatcccaca

SEQ ID NO: 4488001 - DNA, 25 bp, Homo sapien
tttatcctgtaactttttcatccca

SEQ ID NO: 4488002 - DNA, 25 bp, Homo sapien
ttatcctgtaactttttcatcccac

SEQ ID NO: 4488003 - DNA, 25 bp, Homo sapien
cagctctggcttttctctaacccgt

SEQ ID NO: 4488004 - DNA, 25 bp, Homo sapien
aggcaagtccatcccatcctgagag

SEQ ID NO: 4488005 - DNA, 25 bp, Homo sapien
agctctggcttttctctaacccgtt

SEQ ID NO: 4488006 - DNA, 25 bp, Homo sapien
cagctgatcgggtcaggcaagtcca

SEQ ID NO: 4488007 - DNA, 25 bp, Homo sapien
ggcttcaatgcagtccggggcatga

SEQ ID NO: 4488008 - DNA, 25 bp, Homo sapien
gcttcaatgcagtccggggcatgac

SEQ ID NO: 4488009 - DNA, 25 bp, Homo sapien
ctggcttcaatgcagtccggggcat

SEQ ID NO: 4488010 - DNA, 25 bp, Homo sapien
tggcttcaatgcagtccggggcatg

SEQ ID NO: 4488011 - DNA, 25 bp, Homo sapien
ctcctcgccttgacccagcactgct

SEQ ID NO: 4488012 - DNA, 25 bp, Homo sapien
caggagtccagagcatgcgcgcgct

SEQ ID NO: 4488013 - DNA, 25 bp, Homo sapien
agtccagagcatgcgcgcgcttccg

SEQ ID NO: 4488014 - DNA, 25 bp, Homo sapien
ccgttttggcggctgcaggagtcca

SEQ ID NO: 4488015 - DNA, 25 bp, Homo sapien
gaaggtgagcccgtcgggagccgct

SEQ ID NO: 4488016 - DNA, 25 bp, Homo sapien
caaccacccgcgggacctctcggcg

SEQ ID NO: 4488017 - DNA, 25 bp, Homo sapien
ggagccgctgtcacggccgcaacca

SEQ ID NO: 4488018 - DNA, 25 bp, Homo sapien
gtcacggccgcaaccacccgcggga

SEQ ID NO: 4488019 - DNA, 25 bp, Homo sapien
cagtggagcgtgagctgtggcgggg

SEQ ID NO: 4488020 - DNA, 25 bp, Homo sapien
aagatagaggccaacaacctcagct

SEQ ID NO: 4488021 - DNA, 25 bp, Homo sapien
agcgtgagctgtggcgggggctcct

SEQ ID NO: 4488022 - DNA, 25 bp, Homo sapien
ggaagatagaggccaacaacctcag

SEQ ID NO: 4488023 - DNA, 25 bp, Homo sapien
cggtccaggggagcaggctagctga

SEQ ID NO: 4488024 - DNA, 25 bp, Homo sapien
agcaggctagctgactgagggcgat

SEQ ID NO: 4488025 - DNA, 25 bp, Homo sapien
tccaggggagcaggctagctgactg

SEQ ID NO: 4488026 - DNA, 25 bp, Homo sapien
aggctagctgactgagggcgatcat

SEQ ID NO: 4488027 - DNA, 25 bp, Homo sapien
cacgattggctgaacatgcgggaac

SEQ ID NO: 4488028 - DNA, 25 bp, Homo sapien
aacacgattggctgaacatgcggga

SEQ ID NO: 4488029 - DNA, 25 bp, Homo sapien
aaacacgattggctgaacatgcggg

SEQ ID NO: 4488030 - DNA, 25 bp, Homo sapien
gattggctgaacatgcgggaacaag

SEQ ID NO: 4488031 - DNA, 25 bp, Homo sapien
catccagggtacaatgcgcctttcc

SEQ ID NO: 4488032 - DNA, 25 bp, Homo sapien
gcatccagggtacaatgcgcctttc

SEQ ID NO: 4488033 - DNA, 25 bp, Homo sapien
gtattcaaagacagcaattgtagct

SEQ ID NO: 4488034 - DNA, 25 bp, Homo sapien
tattcaaagacagcaattgtagcta

SEQ ID NO: 4488035 - DNA, 25 bp, Homo sapien
tgggacacattactttcataatttg

SEQ ID NO: 4488036 - DNA, 25 bp, Homo sapien
tcttctgaaggctgcttatgggaca

SEQ ID NO: 4488037 - DNA, 25 bp, Homo sapien
gctgcttatgggacacattactttc

SEQ ID NO: 4488038 - DNA, 25 bp, Homo sapien
gaaggctgcttatgggacacattac

SEQ ID NO: 4488039 - DNA, 25 bp, Homo sapien
taccacaaaggttactataagcaga

SEQ ID NO: 4488040 - DNA, 25 bp, Homo sapien
ttccactgagaccaatgtgtgcctc

SEQ ID NO: 4488041 - DNA, 25 bp, Homo sapien
cataaaactgtctcaatcaagggca

SEQ ID NO: 4488042 - DNA, 25 bp, Homo sapien
tatctttccaaatgtagggcacagc

SEQ ID NO: 4488043 - DNA, 25 bp, Homo sapien
cagacgttcccgctgttactttgta

SEQ ID NO: 4488044 - DNA, 25 bp, Homo sapien
ggaggacatcattaacagcatatct

SEQ ID NO: 4488045 - DNA, 25 bp, Homo sapien
caattttgcacaaacaactttaggc

SEQ ID NO: 4488046 - DNA, 25 bp, Homo sapien
gaataactaggttcaagtcacagaa

SEQ ID NO: 4488047 - DNA, 25 bp, Homo sapien
ttggctcatcagagtccacagacca

SEQ ID NO: 4488048 - DNA, 25 bp, Homo sapien
gatgttccagaactgatgtcagatt

SEQ ID NO: 4488049 - DNA, 25 bp, Homo sapien
tgaactgttctccttagtatcttct

SEQ ID NO: 4488050 - DNA, 25 bp, Homo sapien
cagaccatatcggtgaagaagatga

SEQ ID NO: 4488051 - DNA, 25 bp, Homo sapien
tccctcccactagttctggtgtcat

SEQ ID NO: 4488052 - DNA, 25 bp, Homo sapien
ccactagttctggtgtcattctccc

SEQ ID NO: 4488053 - DNA, 25 bp, Homo sapien
tcccactagttctggtgtcattctc

SEQ ID NO: 4488054 - DNA, 25 bp, Homo sapien
ccctcccactagttctggtgtcatt

SEQ ID NO: 4488055 - DNA, 25 bp, Homo sapien
aagaggggctttgaatggagagggt

SEQ ID NO: 4488056 - DNA, 25 bp, Homo sapien
atggccacagtcacctccgggtggt

SEQ ID NO: 4488057 - DNA, 25 bp, Homo sapien
tgcagctgcaggtctatgtcagtca

SEQ ID NO: 4488058 - DNA, 25 bp, Homo sapien
cagctgcaggtctatgtcagtcaga

SEQ ID NO: 4488059 - DNA, 25 bp, Homo sapien
gagccatggccacagtcacctccgg

SEQ ID NO: 4488060 - DNA, 25 bp, Homo sapien
gagggcttcgggttgggacatggag

SEQ ID NO: 4488061 - DNA, 25 bp, Homo sapien
gggcttcgggttgggacatggagaa

SEQ ID NO: 4488062 - DNA, 25 bp, Homo sapien
ccaggagaaggagggcttcgggttg

SEQ ID NO: 4488063 - DNA, 25 bp, Homo sapien
aaggagggcttcgggttgggacatg

SEQ ID NO: 4488064 - DNA, 25 bp, Homo sapien
ctgcaggtgtccagagtagagctgc

SEQ ID NO: 4488065 - DNA, 25 bp, Homo sapien
gcagcaggaggtggtcagctgggcc

SEQ ID NO: 4488066 - DNA, 25 bp, Homo sapien
agcaggaggtggtcagctgggcctg

SEQ ID NO: 4488067 - DNA, 25 bp, Homo sapien
caggtgtccagagtagagctgcagc

SEQ ID NO: 4488068 - DNA, 25 bp, Homo sapien
gggtaagactcaagtaggagccaca

SEQ ID NO: 4488069 - DNA, 25 bp, Homo sapien
actcaagtaggagccacaagactcc

SEQ ID NO: 4488070 - DNA, 25 bp, Homo sapien
caggagggggtctcgccgaggagga

SEQ ID NO: 4488071 - DNA, 25 bp, Homo sapien
ctggtatggggtaagactcaagtag

SEQ ID NO: 4488072 - DNA, 25 bp, Homo sapien
gctgtgcgtcagtcacaggcacact

SEQ ID NO: 4488073 - DNA, 25 bp, Homo sapien
ctggaggagtctgcggccattgaga

SEQ ID NO: 4488074 - DNA, 25 bp, Homo sapien
tggggctgtgcgtcagtcacaggca

SEQ ID NO: 4488075 - DNA, 25 bp, Homo sapien
gggctgtgcgtcagtcacaggcaca

SEQ ID NO: 4488076 - DNA, 25 bp, Homo sapien
ctcctcagttcgtgtggggtactgg

SEQ ID NO: 4488077 - DNA, 25 bp, Homo sapien
gactcctcagttcgtgtggggtact

SEQ ID NO: 4488078 - DNA, 25 bp, Homo sapien
ctgaggactcctcagttcgtgtggg

SEQ ID NO: 4488079 - DNA, 25 bp, Homo sapien
agctgaggactcctcagttcgtgtg

SEQ ID NO: 4488080 - DNA, 25 bp, Homo sapien
cagctccccaagaaggagactgtca

SEQ ID NO: 4488081 - DNA, 25 bp, Homo sapien
agctccccaagaaggagactgtcac

SEQ ID NO: 4488082 - DNA, 25 bp, Homo sapien
agccaccatgttgtgcgtcagcaag

SEQ ID NO: 4488083 - DNA, 25 bp, Homo sapien
tgtgccaccctcggtcaccaccact

SEQ ID NO: 4488084 - DNA, 25 bp, Homo sapien
gtgccaccctcggtcaccaccactg

SEQ ID NO: 4488085 - DNA, 25 bp, Homo sapien
ctgtgccaccctcggtcaccaccac

SEQ ID NO: 4488086 - DNA, 25 bp, Homo sapien
gcagttcaccacgtccaggagggtg

SEQ ID NO: 4488087 - DNA, 25 bp, Homo sapien
cttgcagttcaccacgtccaggagg

SEQ ID NO: 4488088 - DNA, 25 bp, Homo sapien
ttcaccacgtccaggagggtgaaca

SEQ ID NO: 4488089 - DNA, 25 bp, Homo sapien
tcaccacgtccaggagggtgaacat

SEQ ID NO: 4488090 - DNA, 25 bp, Homo sapien
gtggatttgtatggccagctggaca

SEQ ID NO: 4488091 - DNA, 25 bp, Homo sapien
ggaatgtcaagtcctgtgtagggcc

SEQ ID NO: 4488092 - DNA, 25 bp, Homo sapien
ccggaatgtcaagtcctgtgtaggg

SEQ ID NO: 4488093 - DNA, 25 bp, Homo sapien
tcctcggtgtagtgctgtgggtcag

SEQ ID NO: 4488094 - DNA, 25 bp, Homo sapien
ctgagtgtgcagtggctccagctgc

SEQ ID NO: 4488095 - DNA, 25 bp, Homo sapien
tgttctgagtgtgcagtggctccag

SEQ ID NO: 4488096 - DNA, 25 bp, Homo sapien
aaccacctcacagtggaaggttggg

SEQ ID NO: 4488097 - DNA, 25 bp, Homo sapien
ctgaaccacctcacagtggaaggtt

SEQ ID NO: 4488098 - DNA, 25 bp, Homo sapien
aacagaaggtgtcctccactgccac

SEQ ID NO: 4488099 - DNA, 25 bp, Homo sapien
agaaggtgtcctccactgccactga

SEQ ID NO: 4488100 - DNA, 25 bp, Homo sapien
tgttgagactcttgatgaagagctg

SEQ ID NO: 4488101 - DNA, 25 bp, Homo sapien
gcactgttgagactcttgatgaaga

SEQ ID NO: 4488102 - DNA, 25 bp, Homo sapien
tggtcagcagagaggacacacccac

SEQ ID NO: 4488103 - DNA, 25 bp, Homo sapien
ctggcactgttgagactcttgatga

SEQ ID NO: 4488104 - DNA, 25 bp, Homo sapien
aagtcaacctcccatggcggggctg

SEQ ID NO: 4488105 - DNA, 25 bp, Homo sapien
ccaagtcaacctcccatggcggggc

SEQ ID NO: 4488106 - DNA, 25 bp, Homo sapien
tcccatggcggggctgctccatgac

SEQ ID NO: 4488107 - DNA, 25 bp, Homo sapien
cctcccatggcggggctgctccatg

SEQ ID NO: 4488108 - DNA, 25 bp, Homo sapien
agctggccatgcatcaggtctccat

SEQ ID NO: 4488109 - DNA, 25 bp, Homo sapien
catgcatcaggtctccattggtgaa

SEQ ID NO: 4488110 - DNA, 25 bp, Homo sapien
tgcatcaggtctccattggtgaagg

SEQ ID NO: 4488111 - DNA, 25 bp, Homo sapien
tggccatgcatcaggtctccattgg

SEQ ID NO: 4488112 - DNA, 25 bp, Homo sapien
ggccacgtggaagacgcagctgatg

SEQ ID NO: 4488113 - DNA, 25 bp, Homo sapien
taccccaggccacgtggaagacgca

SEQ ID NO: 4488114 - DNA, 25 bp, Homo sapien
ccacgtggaagacgcagctgatggt

SEQ ID NO: 4488115 - DNA, 25 bp, Homo sapien
caggccacgtggaagacgcagctga

SEQ ID NO: 4488116 - DNA, 25 bp, Homo sapien
gctgggcctcagcaaagcccgaatc

SEQ ID NO: 4488117 - DNA, 25 bp, Homo sapien
attgctgaaggccatgttgtctgta

SEQ ID NO: 4488118 - DNA, 25 bp, Homo sapien
agcaaagcccgaatcagcattgctg

SEQ ID NO: 4488119 - DNA, 25 bp, Homo sapien
tgttgtctgtagtcagcagccgcca

SEQ ID NO: 4488120 - DNA, 25 bp, Homo sapien
tgggctcatccgtggccatgatact

SEQ ID NO: 4488121 - DNA, 25 bp, Homo sapien
ggctgcatgggctcatccgtggcca

SEQ ID NO: 4488122 - DNA, 25 bp, Homo sapien
gcatgggctcatccgtggccatgat

SEQ ID NO: 4488123 - DNA, 25 bp, Homo sapien
catccgtggccatgatactgccaga

SEQ ID NO: 4488124 - DNA, 25 bp, Homo sapien
ggactcgcctcttcctgaggcccct

SEQ ID NO: 4488125 - DNA, 25 bp, Homo sapien
aggactcgcctcttcctgaggcccc

SEQ ID NO: 4488126 - DNA, 25 bp, Homo sapien
gactcgcctcttcctgaggcccctc

SEQ ID NO: 4488127 - DNA, 25 bp, Homo sapien
ctgcagcgggatccagccgtggtca

SEQ ID NO: 4488128 - DNA, 25 bp, Homo sapien
cctccttgaggaaccatgaggccgg

SEQ ID NO: 4488129 - DNA, 25 bp, Homo sapien
ggtagtgggcctcatccctactgca

SEQ ID NO: 4488130 - DNA, 25 bp, Homo sapien
gtagtgggcctcatccctactgcag

SEQ ID NO: 4488131 - DNA, 25 bp, Homo sapien
ggcctccttgaggaaccatgaggcc

SEQ ID NO: 4488132 - DNA, 25 bp, Homo sapien
cctctagggcaatggtcacttgtag

SEQ ID NO: 4488133 - DNA, 25 bp, Homo sapien
gccctctagggcaatggtcacttgt

SEQ ID NO: 4488134 - DNA, 25 bp, Homo sapien
ggccctctagggcaatggtcacttg

SEQ ID NO: 4488135 - DNA, 25 bp, Homo sapien
tgggccctctagggcaatggtcact

SEQ ID NO: 4488136 - DNA, 25 bp, Homo sapien
gggtgagcagaagcccttgacagac

SEQ ID NO: 4488137 - DNA, 25 bp, Homo sapien
ctgggtgagcagaagcccttgacag

SEQ ID NO: 4488138 - DNA, 25 bp, Homo sapien
tgggtgagcagaagcccttgacaga

SEQ ID NO: 4488139 - DNA, 25 bp, Homo sapien
tgtggggttcctgggtgagcagaag

SEQ ID NO: 4488140 - DNA, 25 bp, Homo sapien
agatgcagaccagaagggtctccga

SEQ ID NO: 4488141 - DNA, 25 bp, Homo sapien
gatgcagaccagaagggtctccgaa

SEQ ID NO: 4488142 - DNA, 25 bp, Homo sapien
tgcagaccagaagggtctccgaaat

SEQ ID NO: 4488143 - DNA, 25 bp, Homo sapien
cagatgcagaccagaagggtctccg

SEQ ID NO: 4488144 - DNA, 25 bp, Homo sapien
tgagaaaacgatgtctgctggcggc

SEQ ID NO: 4488145 - DNA, 25 bp, Homo sapien
cactgagaaaacgatgtctgctggc

SEQ ID NO: 4488146 - DNA, 25 bp, Homo sapien
gagaaaacgatgtctgctggcggca

SEQ ID NO: 4488147 - DNA, 25 bp, Homo sapien
cttcactgagaaaacgatgtctgct

SEQ ID NO: 4488148 - DNA, 25 bp, Homo sapien
gcgagaaggcatgcctcagggcggg

SEQ ID NO: 4488149 - DNA, 25 bp, Homo sapien
cagcgagaaggcatgcctcagggcg

SEQ ID NO: 4488150 - DNA, 25 bp, Homo sapien
agcgagaaggcatgcctcagggcgg

SEQ ID NO: 4488151 - DNA, 25 bp, Homo sapien
ctccagctccacgtgacgtcctcaa

SEQ ID NO: 4488152 - DNA, 25 bp, Homo sapien
gcagctgcgactgtgccccctctac

SEQ ID NO: 4488153 - DNA, 25 bp, Homo sapien
cagctgcgactgtgccccctctact

SEQ ID NO: 4488154 - DNA, 25 bp, Homo sapien
agctgcgactgtgccccctctactg

SEQ ID NO: 4488155 - DNA, 25 bp, Homo sapien
gggtgcagctgcgactgtgccccct

SEQ ID NO: 4488156 - DNA, 25 bp, Homo sapien
tgcaggccaaggcccgggagagtgg

SEQ ID NO: 4488157 - DNA, 25 bp, Homo sapien
aaggcccgggagagtggggaagcag

SEQ ID NO: 4488158 - DNA, 25 bp, Homo sapien
ctgcaggccaaggcccgggagagtg

SEQ ID NO: 4488159 - DNA, 25 bp, Homo sapien
gcccgggagagtggggaagcaggac

SEQ ID NO: 4488160 - DNA, 25 bp, Homo sapien
ctctctccagcagaaggtgctgagg

SEQ ID NO: 4488161 - DNA, 25 bp, Homo sapien
ctgagggtcctggcttgaggcccat

SEQ ID NO: 4488162 - DNA, 25 bp, Homo sapien
ggtcctggcttgaggcccatcctcc

SEQ ID NO: 4488163 - DNA, 25 bp, Homo sapien
tgcagggccccatgccggggtggct

SEQ ID NO: 4488164 - DNA, 25 bp, Homo sapien
caggacaaaaccgtcagtgtcttgc

SEQ ID NO: 4488165 - DNA, 25 bp, Homo sapien
gtgtcttgctcccatcgtgcaggta

SEQ ID NO: 4488166 - DNA, 25 bp, Homo sapien
aaccgtcagtgtcttgctcccatcg

SEQ ID NO: 4488167 - DNA, 25 bp, Homo sapien
caggcctgagtttgtatgaggtcgg

SEQ ID NO: 4488168 - DNA, 25 bp, Homo sapien
tgggcacggtggccccctcccacat

SEQ ID NO: 4488169 - DNA, 25 bp, Homo sapien
ctgtagggatgggcacggtggcccc

SEQ ID NO: 4488170 - DNA, 25 bp, Homo sapien
tagggatgggcacggtggccccctc

SEQ ID NO: 4488171 - DNA, 25 bp, Homo sapien
gatgggcacggtggccccctcccac

SEQ ID NO: 4488172 - DNA, 25 bp, Homo sapien
ctgggctgcttaatggtgtacacca

SEQ ID NO: 4488173 - DNA, 25 bp, Homo sapien
gctgggctgcttaatggtgtacacc

SEQ ID NO: 4488174 - DNA, 25 bp, Homo sapien
tgggctgcttaatggtgtacaccag

SEQ ID NO: 4488175 - DNA, 25 bp, Homo sapien
ggctgcttaatggtgtacaccaggt

SEQ ID NO: 4488176 - DNA, 25 bp, Homo sapien
ctgtgtgagaacagcacgagcccac

SEQ ID NO: 4488177 - DNA, 25 bp, Homo sapien
cagctgggtctgcttgaagctgcgc

SEQ ID NO: 4488178 - DNA, 25 bp, Homo sapien
gcacgagcccaccatccagctgggt

SEQ ID NO: 4488179 - DNA, 25 bp, Homo sapien
catccagctgggtctgcttgaagct

SEQ ID NO: 4488180 - DNA, 25 bp, Homo sapien
tctgggccgtcactcagaagctaag

SEQ ID NO: 4488181 - DNA, 25 bp, Homo sapien
tctggaggaagtatgttcaccgtca

SEQ ID NO: 4488182 - DNA, 25 bp, Homo sapien
ttcaccgtcagagaggccaaagtgg

SEQ ID NO: 4488183 - DNA, 25 bp, Homo sapien
tgccctccagcgagtgaagcacttg

SEQ ID NO: 4488184 - DNA, 25 bp, Homo sapien
cagcctttgtgatccaggccgaggc

SEQ ID NO: 4488185 - DNA, 25 bp, Homo sapien
ggccatcagcctttgtgatccaggc

SEQ ID NO: 4488186 - DNA, 25 bp, Homo sapien
catcagcctttgtgatccaggccga

SEQ ID NO: 4488187 - DNA, 25 bp, Homo sapien
cagaggcaaaaggggccatcagcct

SEQ ID NO: 4488188 - DNA, 25 bp, Homo sapien
tggctgctgagtggctggacggact

SEQ ID NO: 4488189 - DNA, 25 bp, Homo sapien
tctgaggctctggctgctgagtggc

SEQ ID NO: 4488190 - DNA, 25 bp, Homo sapien
ctctggctgctgagtggctggacgg

SEQ ID NO: 4488191 - DNA, 25 bp, Homo sapien
gctctgaggctctggctgctgagtg

SEQ ID NO: 4488192 - DNA, 25 bp, Homo sapien
gtcctcccctgtgctgtcatgctgg

SEQ ID NO: 4488193 - DNA, 25 bp, Homo sapien
cgcaccacatggtagagcaggagct

SEQ ID NO: 4488194 - DNA, 25 bp, Homo sapien
tctgcctgagtgaagttcaccaggt

SEQ ID NO: 4488195 - DNA, 25 bp, Homo sapien
aagagccggcctagctggaggcccc

SEQ ID NO: 4488196 - DNA, 25 bp, Homo sapien
tataccgcttcgactggaagatcca

SEQ ID NO: 4488197 - DNA, 25 bp, Homo sapien
ctgggcccttctgggactgtgcgct

SEQ ID NO: 4488198 - DNA, 25 bp, Homo sapien
tggacttggagccccttggagtatg

SEQ ID NO: 4488199 - DNA, 25 bp, Homo sapien
ttttcacacgggcttctataccgct

SEQ ID NO: 4488200 - DNA, 25 bp, Homo sapien
gcatggtgacagtggtcctgttgat

SEQ ID NO: 4488201 - DNA, 25 bp, Homo sapien
gacagtggtcctgttgatgtcaccg

SEQ ID NO: 4488202 - DNA, 25 bp, Homo sapien
tgcatgtgcagcatctcgtcatgct

SEQ ID NO: 4488203 - DNA, 25 bp, Homo sapien
agcatctcgtcatgctgctgtgcct

SEQ ID NO: 4488204 - DNA, 25 bp, Homo sapien
ctgtgttcgtcagggatgctctgac

SEQ ID NO: 4488205 - DNA, 25 bp, Homo sapien
gtgttcgtcagggatgctctgacaa

SEQ ID NO: 4488206 - DNA, 25 bp, Homo sapien
tgtgttcgtcagggatgctctgaca

SEQ ID NO: 4488207 - DNA, 25 bp, Homo sapien
ctcagacctgaagtaggcgcccccg

SEQ ID NO: 4488208 - DNA, 25 bp, Homo sapien
cagacctgaagtaggcgcccccggg

SEQ ID NO: 4488209 - DNA, 25 bp, Homo sapien
tcagacctgaagtaggcgcccccgg

SEQ ID NO: 4488210 - DNA, 25 bp, Homo sapien
agtgctcctacagccgcatctgcgg

SEQ ID NO: 4488211 - DNA, 25 bp, Homo sapien
tacagccgcatctgcggttaacata

SEQ ID NO: 4488212 - DNA, 25 bp, Homo sapien
ctcctacagccgcatctgcggttaa

SEQ ID NO: 4488213 - DNA, 25 bp, Homo sapien
cgcatctgcggttaacatagcatcc

SEQ ID NO: 4488214 - DNA, 25 bp, Homo sapien
ctcgtgcctggcgtgctcagaggac

SEQ ID NO: 4488215 - DNA, 25 bp, Homo sapien
tcgtgcctggcgtgctcagaggacc

SEQ ID NO: 4488216 - DNA, 25 bp, Homo sapien
gtgcctggcgtgctcagaggaccac

SEQ ID NO: 4488217 - DNA, 25 bp, Homo sapien
tgcctggcgtgctcagaggaccacc

SEQ ID NO: 4488218 - DNA, 25 bp, Homo sapien
cctcaggggccactgatagtgattc

SEQ ID NO: 4488219 - DNA, 25 bp, Homo sapien
tgatgctcctcaggggccactgata

SEQ ID NO: 4488220 - DNA, 25 bp, Homo sapien
catggctgatgctcctcaggggcca

SEQ ID NO: 4488221 - DNA, 25 bp, Homo sapien
ctcctcaggggccactgatagtgat

SEQ ID NO: 4488222 - DNA, 25 bp, Homo sapien
cgtgggaccgtgactatcaccccta

SEQ ID NO: 4488223 - DNA, 25 bp, Homo sapien
gaccgtgactatcacccctaatctg

SEQ ID NO: 4488224 - DNA, 25 bp, Homo sapien
gaggacgtgggaccgtgactatcac

SEQ ID NO: 4488225 - DNA, 25 bp, Homo sapien
tgacagatagaggacgtgggaccgt

SEQ ID NO: 4488226 - DNA, 25 bp, Homo sapien
tcactgatagcgtggaggctgcacc

SEQ ID NO: 4488227 - DNA, 25 bp, Homo sapien
gcttcctgtaatgcaggactcccca

SEQ ID NO: 4488228 - DNA, 25 bp, Homo sapien
tgctgatgagcccactctaggagcc

SEQ ID NO: 4488229 - DNA, 25 bp, Homo sapien
caccatcatctgagagccgggaagg

SEQ ID NO: 4488230 - DNA, 25 bp, Homo sapien
tcaggttttgtgtcaagagagggat

SEQ ID NO: 4488231 - DNA, 25 bp, Homo sapien
gagggcccaaggagcttttgtgtat

SEQ ID NO: 4488232 - DNA, 25 bp, Homo sapien
catagaatggcaaaggaatgtttct

SEQ ID NO: 4488233 - DNA, 25 bp, Homo sapien
gcaaaactggcctcaatggaactgt

SEQ ID NO: 4488234 - DNA, 25 bp, Homo sapien
tagaaagcagtctggcattctagaa

SEQ ID NO: 4488235 - DNA, 25 bp, Homo sapien
ccagcttttatttatcagattggta

SEQ ID NO: 4488236 - DNA, 25 bp, Homo sapien
ttagaaagcgtgcaatgaaatgggc

SEQ ID NO: 4488237 - DNA, 25 bp, Homo sapien
cattctagaaacttgcctaacctct

SEQ ID NO: 4488238 - DNA, 25 bp, Homo sapien
aaaagtagtcagcttgtacaaagga

SEQ ID NO: 4488239 - DNA, 25 bp, Homo sapien
caggagcctaggactttttctttgg

SEQ ID NO: 4488240 - DNA, 25 bp, Homo sapien
gaaacaagccttgactcaggagcct

SEQ ID NO: 4488241 - DNA, 25 bp, Homo sapien
aatgtcatattaagcacctcagtgg

SEQ ID NO: 4488242 - DNA, 25 bp, Homo sapien
tccaacataaaatgttcatgtaact

SEQ ID NO: 4488243 - DNA, 25 bp, Homo sapien
ctttccaacataaaatgttcatgta

SEQ ID NO: 4488244 - DNA, 25 bp, Homo sapien
cataaaatgttcatgtaacttctgc

SEQ ID NO: 4488245 - DNA, 25 bp, Homo sapien
taaaatgttcatgtaacttctgcat

SEQ ID NO: 4488246 - DNA, 25 bp, Homo sapien
caagcttggttttcagtgtggattt

SEQ ID NO: 4488247 - DNA, 25 bp, Homo sapien
ctatttgaatctgatgggcttgata

SEQ ID NO: 4488248 - DNA, 25 bp, Homo sapien
gaatctgatgggcttgatattgacc

SEQ ID NO: 4488249 - DNA, 25 bp, Homo sapien
gtaaaaatgttggttattgctgcct

SEQ ID NO: 4488250 - DNA, 25 bp, Homo sapien
tctggagccttctggggtcattact

SEQ ID NO: 4488251 - DNA, 25 bp, Homo sapien
tggtgggccttgtgttataaaacca

SEQ ID NO: 4488252 - DNA, 25 bp, Homo sapien
tggagaagcgttcctgggcttttct

SEQ ID NO: 4488253 - DNA, 25 bp, Homo sapien
gagtgatttctcgtgctaagtgagt

SEQ ID NO: 4488254 - DNA, 25 bp, Homo sapien
tgatttctcgtgctaagtgagtcct

SEQ ID NO: 4488255 - DNA, 25 bp, Homo sapien
gggaggactcgcagacgttactgcc

SEQ ID NO: 4488256 - DNA, 25 bp, Homo sapien
ttgtagccggtgcgcggggtggctg

SEQ ID NO: 4488257 - DNA, 25 bp, Homo sapien
tgtagccggtgcgcggggtggctgg

SEQ ID NO: 4488258 - DNA, 25 bp, Homo sapien
gcagctctgccgtgcaatcccagct

SEQ ID NO: 4488259 - DNA, 25 bp, Homo sapien
tctgccgtgcaatcccagctcgcag

SEQ ID NO: 4488260 - DNA, 25 bp, Homo sapien
cgtgcaatcccagctcgcagccctt

SEQ ID NO: 4488261 - DNA, 25 bp, Homo sapien
tggagcgggatgggcagctctgccg

SEQ ID NO: 4488262 - DNA, 25 bp, Homo sapien
gctacagctcaggtaaccacgagca

SEQ ID NO: 4488263 - DNA, 25 bp, Homo sapien
atgctacagctcaggtaaccacgag

SEQ ID NO: 4488264 - DNA, 25 bp, Homo sapien
aatgctacagctcaggtaaccacga

SEQ ID NO: 4488265 - DNA, 25 bp, Homo sapien
tacagctcaggtaaccacgagcaca

SEQ ID NO: 4488266 - DNA, 25 bp, Homo sapien
actcaggcacactaggagttctata

SEQ ID NO: 4488267 - DNA, 25 bp, Homo sapien
aatgtaagactcaggcacactagga

SEQ ID NO: 4488268 - DNA, 25 bp, Homo sapien
gatcttcacaatgtaagactcaggc

SEQ ID NO: 4488269 - DNA, 25 bp, Homo sapien
ttagagaaggatcttcacaatgtaa

SEQ ID NO: 4488270 - DNA, 25 bp, Homo sapien
gagcacactgctcaatgcctccagt

SEQ ID NO: 4488271 - DNA, 25 bp, Homo sapien
ataccagtgagcacactgctcaatg

SEQ ID NO: 4488272 - DNA, 25 bp, Homo sapien
cagtgagcacactgctcaatgcctc

SEQ ID NO: 4488273 - DNA, 25 bp, Homo sapien
cagcgaaataccagtgagcacactg

SEQ ID NO: 4488274 - DNA, 25 bp, Homo sapien
tggctgcggccaatttcccctgttg

SEQ ID NO: 4488275 - DNA, 25 bp, Homo sapien
gctgcggccaatttcccctgttgtg

SEQ ID NO: 4488276 - DNA, 25 bp, Homo sapien
cttggctgcggccaatttcccctgt

SEQ ID NO: 4488277 - DNA, 25 bp, Homo sapien
tgcggccaatttcccctgttgtgtt

SEQ ID NO: 4488278 - DNA, 25 bp, Homo sapien
gttagctcctgctggaatgccaggg

SEQ ID NO: 4488279 - DNA, 25 bp, Homo sapien
ggctcttcctctgccaatatgcttt

SEQ ID NO: 4488280 - DNA, 25 bp, Homo sapien
ctgtgtcagggctactgccattgat

SEQ ID NO: 4488281 - DNA, 25 bp, Homo sapien
cctgttagctcctgctggaatgcca

SEQ ID NO: 4488282 - DNA, 25 bp, Homo sapien
ggtagtagaggatgcacggccttct

SEQ ID NO: 4488283 - DNA, 25 bp, Homo sapien
gtagaggatgcacggccttctccgt

SEQ ID NO: 4488284 - DNA, 25 bp, Homo sapien
ggatgcacggccttctccgtagata

SEQ ID NO: 4488285 - DNA, 25 bp, Homo sapien
cagggtagtagaggatgcacggcct

SEQ ID NO: 4488286 - DNA, 25 bp, Homo sapien
gcggagcttgaatccagggccactg

SEQ ID NO: 4488287 - DNA, 25 bp, Homo sapien
tattgcggagcttgaatccagggcc

SEQ ID NO: 4488288 - DNA, 25 bp, Homo sapien
gaattgatgttttcagtgagttgac

SEQ ID NO: 4488289 - DNA, 25 bp, Homo sapien
attgatgttttcagtgagttgactg

SEQ ID NO: 4488290 - DNA, 25 bp, Homo sapien
tcctcccaagcttctgtaccagatg

SEQ ID NO: 4488291 - DNA, 25 bp, Homo sapien
cctcctgttcacgtagcctctcctc

SEQ ID NO: 4488292 - DNA, 25 bp, Homo sapien
cctcctgttcacgtagcctctcctc

SEQ ID NO: 4488293 - DNA, 25 bp, Homo sapien
cctcctgttcacgtagcctctcctc

SEQ ID NO: 4488294 - DNA, 25 bp, Homo sapien
cctcctgttcacgtagcctctcctc

SEQ ID NO: 4488295 - DNA, 25 bp, Homo sapien
gcctctcctgttctaacagcttctc

SEQ ID NO: 4488296 - DNA, 25 bp, Homo sapien
tcctcctgccgcctctcctgttcta

SEQ ID NO: 4488297 - DNA, 25 bp, Homo sapien
cgcctctcctgttctaacagcttct

SEQ ID NO: 4488298 - DNA, 25 bp, Homo sapien
tcctgccgcctctcctgttctaaca

SEQ ID NO: 4488299 - DNA, 25 bp, Homo sapien
gagctcctccacctcgtccaggagc

SEQ ID NO: 4488300 - DNA, 25 bp, Homo sapien
gctcctccacctcgtccaggagctc

SEQ ID NO: 4488301 - DNA, 25 bp, Homo sapien
tcctccacctcgtccaggagctcct

SEQ ID NO: 4488302 - DNA, 25 bp, Homo sapien
ctccacctcgtccaggagctcctcc

SEQ ID NO: 4488303 - DNA, 25 bp, Homo sapien
ctgctcgtacagggcttcccacccc

SEQ ID NO: 4488304 - DNA, 25 bp, Homo sapien
cgtacagggcttcccaccccagctc

SEQ ID NO: 4488305 - DNA, 25 bp, Homo sapien
gctcgtacagggcttcccaccccag

SEQ ID NO: 4488306 - DNA, 25 bp, Homo sapien
tcgtacagggcttcccaccccagct

SEQ ID NO: 4488307 - DNA, 25 bp, Homo sapien
agctcctcgaagccgctgcgtggct

SEQ ID NO: 4488308 - DNA, 25 bp, Homo sapien
aactgcagtgtgctcttgttctcgt

SEQ ID NO: 4488309 - DNA, 25 bp, Homo sapien
ccgacttctccagctcctttacttg

SEQ ID NO: 4488310 - DNA, 25 bp, Homo sapien
gcagtgtgctcttgttctcgttgtt

SEQ ID NO: 4488311 - DNA, 25 bp, Homo sapien
ctgcagtgtgctcttgttctcgttg

SEQ ID NO: 4488312 - DNA, 25 bp, Homo sapien
ggtgcccgcctcccacatcttcttg

SEQ ID NO: 4488313 - DNA, 25 bp, Homo sapien
ctcccacatcttcttggatgggtcg

SEQ ID NO: 4488314 - DNA, 25 bp, Homo sapien
catcttcttggatgggtcggaggtt

SEQ ID NO: 4488315 - DNA, 25 bp, Homo sapien
cacatcttcttggatgggtcggagg

SEQ ID NO: 4488316 - DNA, 25 bp, Homo sapien
tccccaggctgcagctgcctgtggc

SEQ ID NO: 4488317 - DNA, 25 bp, Homo sapien
gctgcagctgcctgtggcctggcac

SEQ ID NO: 4488318 - DNA, 25 bp, Homo sapien
tgtccccaggctgcagctgcctgtg

SEQ ID NO: 4488319 - DNA, 25 bp, Homo sapien
cccaggctgcagctgcctgtggcct

SEQ ID NO: 4488320 - DNA, 25 bp, Homo sapien
ttgtccgcacatccaagctccttgt

SEQ ID NO: 4488321 - DNA, 25 bp, Homo sapien
aagaatggcatgcagcctctcctgc

SEQ ID NO: 4488322 - DNA, 25 bp, Homo sapien
cctgtaccaacagcttctccaccca

SEQ ID NO: 4488323 - DNA, 25 bp, Homo sapien
tctcggcagcccgaaaagaatggca

SEQ ID NO: 4488324 - DNA, 25 bp, Homo sapien
gctccctgttctcggcagcccgaaa

SEQ ID NO: 4488325 - DNA, 25 bp, Homo sapien
tgattgttccccaagcatcctccag

SEQ ID NO: 4488326 - DNA, 25 bp, Homo sapien
cctccagttatgatataggcaacat

SEQ ID NO: 4488327 - DNA, 25 bp, Homo sapien
agttttagctgttgattgttcccca

SEQ ID NO: 4488328 - DNA, 25 bp, Homo sapien
aataattcattgatcatgcacatta

SEQ ID NO: 4488329 - DNA, 25 bp, Homo sapien
atttcatattttacgctcgagggtt

SEQ ID NO: 4488330 - DNA, 25 bp, Homo sapien
gcagttgccatacagtgcctttcca

SEQ ID NO: 4488331 - DNA, 25 bp, Homo sapien
tgatgcgcaggtctcattggtttca

SEQ ID NO: 4488332 - DNA, 25 bp, Homo sapien
tacattccttgcaatactgatggtg

SEQ ID NO: 4488333 - DNA, 25 bp, Homo sapien
ggtattgacacggatgcctacacct

SEQ ID NO: 4488334 - DNA, 25 bp, Homo sapien
tggcactggcggcacagcatggagg

SEQ ID NO: 4488335 - DNA, 25 bp, Homo sapien
cccctgatgcggaaccagaagaacc

SEQ ID NO: 4488336 - DNA, 25 bp, Homo sapien
gagattccagctagaggagctggcc

SEQ ID NO: 4488337 - DNA, 25 bp, Homo sapien
gaaccagaagaaccgagattccagc

SEQ ID NO: 4488338 - DNA, 25 bp, Homo sapien
tctgctgctgcccagcccaaagctc

SEQ ID NO: 4488339 - DNA, 25 bp, Homo sapien
aggattccttctgctgctgcccagc

SEQ ID NO: 4488340 - DNA, 25 bp, Homo sapien
gctgctgcccagcccaaagctccat

SEQ ID NO: 4488341 - DNA, 25 bp, Homo sapien
caggattccttctgctgctgcccag

SEQ ID NO: 4488342 - DNA, 25 bp, Homo sapien
agctcgcgcctgcggtattgcagcg

SEQ ID NO: 4488343 - DNA, 25 bp, Homo sapien
caggacaggaaggaccccccagcgt

SEQ ID NO: 4488344 - DNA, 25 bp, Homo sapien
tattgcagcgggtagaaggcgggcg

SEQ ID NO: 4488345 - DNA, 25 bp, Homo sapien
tggtgcacgatatccggtgccgccc

SEQ ID NO: 4488346 - DNA, 25 bp, Homo sapien
cttggagcactggaatcaccccgct

SEQ ID NO: 4488347 - DNA, 25 bp, Homo sapien
gagcactggaatcaccccgctgtgc

SEQ ID NO: 4488348 - DNA, 25 bp, Homo sapien
tggagcactggaatcaccccgctgt

SEQ ID NO: 4488349 - DNA, 25 bp, Homo sapien
gaatcaccccgctgtgccagcctct

SEQ ID NO: 4488350 - DNA, 25 bp, Homo sapien
ggacactggagggagaatggctggc

SEQ ID NO: 4488351 - DNA, 25 bp, Homo sapien
tctggacactggagggagaatggct

SEQ ID NO: 4488352 - DNA, 25 bp, Homo sapien
ctggtctggacactggagggagaat

SEQ ID NO: 4488353 - DNA, 25 bp, Homo sapien
acactggagggagaatggctggcag

SEQ ID NO: 4488354 - DNA, 25 bp, Homo sapien
tggggtcgtgaaacaggccagccac

SEQ ID NO: 4488355 - DNA, 25 bp, Homo sapien
caggagcacaatggtcatgtggatg

SEQ ID NO: 4488356 - DNA, 25 bp, Homo sapien
catgtggatggggttcccaatgctg

SEQ ID NO: 4488357 - DNA, 25 bp, Homo sapien
agaaggaccaggagcacaatggtca

SEQ ID NO: 4488358 - DNA, 25 bp, Homo sapien
ttctgccacttgcagaagctcttca

SEQ ID NO: 4488359 - DNA, 25 bp, Homo sapien
ttcagggtgttgtctgcatggtgca

SEQ ID NO: 4488360 - DNA, 25 bp, Homo sapien
gggtgggcgtctcccttcatgttga

SEQ ID NO: 4488361 - DNA, 25 bp, Homo sapien
agcaggatggcagtgtcatgctgca

SEQ ID NO: 4488362 - DNA, 25 bp, Homo sapien
gtgctcaagactgttcttgaggcca

SEQ ID NO: 4488363 - DNA, 25 bp, Homo sapien
ttgcagctacggtgcagctggcaca

SEQ ID NO: 4488364 - DNA, 25 bp, Homo sapien
ccatgtcctccttgatgttgcagct

SEQ ID NO: 4488365 - DNA, 25 bp, Homo sapien
ctcaagactgttcttgaggccagtg

SEQ ID NO: 4488366 - DNA, 25 bp, Homo sapien
ctcgactctcagtgtagcaataggg

SEQ ID NO: 4488367 - DNA, 25 bp, Homo sapien
gaatctcgactctcagtgtagcaat

SEQ ID NO: 4488368 - DNA, 25 bp, Homo sapien
gagggtgaatctcgactctcagtgt

SEQ ID NO: 4488369 - DNA, 25 bp, Homo sapien
gctgggagggtgaatctcgactctc

SEQ ID NO: 4488370 - DNA, 25 bp, Homo sapien
ggtaagccggcgggaggcttctagc

SEQ ID NO: 4488371 - DNA, 25 bp, Homo sapien
gtaagccggcgggaggcttctagcc

SEQ ID NO: 4488372 - DNA, 25 bp, Homo sapien
gctgtttccaatgggttcacagtca

SEQ ID NO: 4488373 - DNA, 25 bp, Homo sapien
aaggctgtttccaatgggttcacag

SEQ ID NO: 4488374 - DNA, 25 bp, Homo sapien
ggctgtttccaatgggttcacagtc

SEQ ID NO: 4488375 - DNA, 25 bp, Homo sapien
aggctgtttccaatgggttcacagt

SEQ ID NO: 4488376 - DNA, 25 bp, Homo sapien
tgaggggagcggcgtcgtacgggag

SEQ ID NO: 4488377 - DNA, 25 bp, Homo sapien
tcaaggaacctggtgatgtactggc

SEQ ID NO: 4488378 - DNA, 25 bp, Homo sapien
caggaccaggtgaggggagcggcgt

SEQ ID NO: 4488379 - DNA, 25 bp, Homo sapien
tggtgatgtactggcagctgcagca

SEQ ID NO: 4488380 - DNA, 25 bp, Homo sapien
ggctgcagccgagcccttttgtttc

SEQ ID NO: 4488381 - DNA, 25 bp, Homo sapien
agctgaagccgcaacaacctctcag

SEQ ID NO: 4488382 - DNA, 25 bp, Homo sapien
cccagtgctgactcgctgcacatgt

SEQ ID NO: 4488383 - DNA, 25 bp, Homo sapien
gactcgctgcacatgtggctcctgc

SEQ ID NO: 4488384 - DNA, 25 bp, Homo sapien
ggctgaggggtccaatgcgcctcat

SEQ ID NO: 4488385 - DNA, 25 bp, Homo sapien
aggggctgaggggtccaatgcgcct

SEQ ID NO: 4488386 - DNA, 25 bp, Homo sapien
gggctgaggggtccaatgcgcctca

SEQ ID NO: 4488387 - DNA, 25 bp, Homo sapien
ggggctgaggggtccaatgcgcctc

SEQ ID NO: 4488388 - DNA, 25 bp, Homo sapien
taggcggccactacaacggcttagc

SEQ ID NO: 4488389 - DNA, 25 bp, Homo sapien
gcttagcagcaggagtgccctggca

SEQ ID NO: 4488390 - DNA, 25 bp, Homo sapien
cactacaacggcttagcagcaggag

SEQ ID NO: 4488391 - DNA, 25 bp, Homo sapien
tgctggaccttaggcggccactaca

SEQ ID NO: 4488392 - DNA, 25 bp, Homo sapien
catagaggaccccaggcagcactga

SEQ ID NO: 4488393 - DNA, 25 bp, Homo sapien
acatcatagaggaccccaggcagca

SEQ ID NO: 4488394 - DNA, 25 bp, Homo sapien
gctcacatcatagaggaccccaggc

SEQ ID NO: 4488395 - DNA, 25 bp, Homo sapien
tagaggaccccaggcagcactgatg

SEQ ID NO: 4488396 - DNA, 25 bp, Homo sapien
tggagtgacaggtggtccccacaga

SEQ ID NO: 4488397 - DNA, 25 bp, Homo sapien
gtgacaggtggtccccacagagcac

SEQ ID NO: 4488398 - DNA, 25 bp, Homo sapien
agcttggagtgacaggtggtcccca

SEQ ID NO: 4488399 - DNA, 25 bp, Homo sapien
ataggctgcatgcactgctgcttgg

SEQ ID NO: 4488400 - DNA, 25 bp, Homo sapien
tgcttggctctctgtatgcccacgc

SEQ ID NO: 4488401 - DNA, 25 bp, Homo sapien
tctctgtatgcccacgccacagctc

SEQ ID NO: 4488402 - DNA, 25 bp, Homo sapien
ttggctctctgtatgcccacgccac

SEQ ID NO: 4488403 - DNA, 25 bp, Homo sapien
tcaaagtggctgcactggacgtggc

SEQ ID NO: 4488404 - DNA, 25 bp, Homo sapien
gagcatagcgtcaaagtggctgcac

SEQ ID NO: 4488405 - DNA, 25 bp, Homo sapien
tagcgtcaaagtggctgcactggac

SEQ ID NO: 4488406 - DNA, 25 bp, Homo sapien
gtagagcatagcgtcaaagtggctg

SEQ ID NO: 4488407 - DNA, 25 bp, Homo sapien
cctccgtgacacacatccatggcag

SEQ ID NO: 4488408 - DNA, 25 bp, Homo sapien
gcgggagtatggaggccaccaggaa

SEQ ID NO: 4488409 - DNA, 25 bp, Homo sapien
gggcccaagtagaagagtcatcagc

SEQ ID NO: 4488410 - DNA, 25 bp, Homo sapien
agtagaagagtcatcagcaacagct

SEQ ID NO: 4488411 - DNA, 25 bp, Homo sapien
ttgatgcagaggtcccggctggctc

SEQ ID NO: 4488412 - DNA, 25 bp, Homo sapien
ctggctcggacctggtagcaggggg

SEQ ID NO: 4488413 - DNA, 25 bp, Homo sapien
ggcaaagtactcattcgcgggccgg

SEQ ID NO: 4488414 - DNA, 25 bp, Homo sapien
aaagtactcattcgcgggccggcag

SEQ ID NO: 4488415 - DNA, 25 bp, Homo sapien
gggagagcctcttcctaaccaggca

SEQ ID NO: 4488416 - DNA, 25 bp, Homo sapien
agtgctgggagagcctcttcctaac

SEQ ID NO: 4488417 - DNA, 25 bp, Homo sapien
gcagtgctgggagagcctcttccta

SEQ ID NO: 4488418 - DNA, 25 bp, Homo sapien
gagagcctcttcctaaccaggcaca

SEQ ID NO: 4488419 - DNA, 25 bp, Homo sapien
ctgcaacacacgaggaggggaggcc

SEQ ID NO: 4488420 - DNA, 25 bp, Homo sapien
gcccctggtgctggcggccagccct

SEQ ID NO: 4488421 - DNA, 25 bp, Homo sapien
tgcaacacacgaggaggggaggccc

SEQ ID NO: 4488422 - DNA, 25 bp, Homo sapien
gaggcccctggtgctggcggccagc

SEQ ID NO: 4488423 - DNA, 25 bp, Homo sapien
ggcaggtggagccgttgccgtggca

SEQ ID NO: 4488424 - DNA, 25 bp, Homo sapien
gtggcaggtggagccgttgccgtgg

SEQ ID NO: 4488425 - DNA, 25 bp, Homo sapien
tgtggcaggtggagccgttgccgtg

SEQ ID NO: 4488426 - DNA, 25 bp, Homo sapien
caggtggagccgttgccgtggcaca

SEQ ID NO: 4488427 - DNA, 25 bp, Homo sapien
cctggatgcggacctcacgtgtgct

SEQ ID NO: 4488428 - DNA, 25 bp, Homo sapien
ctggatgcggacctcacgtgtgctg

SEQ ID NO: 4488429 - DNA, 25 bp, Homo sapien
ctgcgtgcgtatgtgacggtggtcc

SEQ ID NO: 4488430 - DNA, 25 bp, Homo sapien
agacaggctccttggtgggacccgg

SEQ ID NO: 4488431 - DNA, 25 bp, Homo sapien
cggggacgtgaggttctcccagttg

SEQ ID NO: 4488432 - DNA, 25 bp, Homo sapien
ggacgtgaggttctcccagttgccc

SEQ ID NO: 4488433 - DNA, 25 bp, Homo sapien
ctggatccagacaggctccttggtg

SEQ ID NO: 4488434 - DNA, 25 bp, Homo sapien
ccgtgagcacgaggtgtcttctcca

SEQ ID NO: 4488435 - DNA, 25 bp, Homo sapien
gcccgtgagcacgaggtgtcttctc

SEQ ID NO: 4488436 - DNA, 25 bp, Homo sapien
gagcacgaggtgtcttctccatcca

SEQ ID NO: 4488437 - DNA, 25 bp, Homo sapien
gtgagcacgaggtgtcttctccatc

SEQ ID NO: 4488438 - DNA, 25 bp, Homo sapien
tgtactcgtagtgcaccccagggtt

SEQ ID NO: 4488439 - DNA, 25 bp, Homo sapien
ggtgtactcgtagtgcaccccaggg

SEQ ID NO: 4488440 - DNA, 25 bp, Homo sapien
gtgtactcgtagtgcaccccagggt

SEQ ID NO: 4488441 - DNA, 25 bp, Homo sapien
atggtgtactcgtagtgcaccccag

SEQ ID NO: 4488442 - DNA, 25 bp, Homo sapien
cacgggccctgcctgccgctccgag

SEQ ID NO: 4488443 - DNA, 25 bp, Homo sapien
tctggcagtcatcgggccggcccag

SEQ ID NO: 4488444 - DNA, 25 bp, Homo sapien
gagcagtacacactctgcctctgca

SEQ ID NO: 4488445 - DNA, 25 bp, Homo sapien
tgcacttcctctggcagtcatcggg

SEQ ID NO: 4488446 - DNA, 25 bp, Homo sapien
ggagctggagcacagctgccactca

SEQ ID NO: 4488447 - DNA, 25 bp, Homo sapien
cgcaggagctggagcacagctgcca

SEQ ID NO: 4488448 - DNA, 25 bp, Homo sapien
tggagcacagctgccactcacctgc

SEQ ID NO: 4488449 - DNA, 25 bp, Homo sapien
gctgcggatgcagagcacagcctgg

SEQ ID NO: 4488450 - DNA, 25 bp, Homo sapien
tggtggttgcaaggggtttcagtag

SEQ ID NO: 4488451 - DNA, 25 bp, Homo sapien
aaggtgttcacaggcgggtggcttc

SEQ ID NO: 4488452 - DNA, 25 bp, Homo sapien
cttcagggcgctctgctcatccagc

SEQ ID NO: 4488453 - DNA, 25 bp, Homo sapien
gcgggtggcttcagggcgctctgct

SEQ ID NO: 4488454 - DNA, 25 bp, Homo sapien
gacatttcggtgctgagtcccttcc

SEQ ID NO: 4488455 - DNA, 25 bp, Homo sapien
ggacatttcggtgctgagtcccttc

SEQ ID NO: 4488456 - DNA, 25 bp, Homo sapien
catttcggtgctgagtcccttcctc

SEQ ID NO: 4488457 - DNA, 25 bp, Homo sapien
gaggacatttcggtgctgagtccct

SEQ ID NO: 4488458 - DNA, 25 bp, Homo sapien
gtggaagctgatgaaattgtagtcg

SEQ ID NO: 4488459 - DNA, 25 bp, Homo sapien
cgtagtagaagtcgtccacaaacac

SEQ ID NO: 4488460 - DNA, 25 bp, Homo sapien
agatcctcgtggaagctgatgaaat

SEQ ID NO: 4488461 - DNA, 25 bp, Homo sapien
attgtagtcgtagtagaagtcgtcc

SEQ ID NO: 4488462 - DNA, 25 bp, Homo sapien
gagcccaagatctggggcccctatg

SEQ ID NO: 4488463 - DNA, 25 bp, Homo sapien
agcccaagatctggggcccctatgg

SEQ ID NO: 4488464 - DNA, 25 bp, Homo sapien
agagctgactcccaggctactgtcc

SEQ ID NO: 4488465 - DNA, 25 bp, Homo sapien
gggcacagacccgtgaaagccaggc

SEQ ID NO: 4488466 - DNA, 25 bp, Homo sapien
cacagacccgtgaaagccaggcaga

SEQ ID NO: 4488467 - DNA, 25 bp, Homo sapien
tgcggggcacagacccgtgaaagcc

SEQ ID NO: 4488468 - DNA, 25 bp, Homo sapien
ctgcggggcacagacccgtgaaagc

SEQ ID NO: 4488469 - DNA, 25 bp, Homo sapien
tccagttgcctgagtgccaggtggc

SEQ ID NO: 4488470 - DNA, 25 bp, Homo sapien
ccagttgcctgagtgccaggtggca

SEQ ID NO: 4488471 - DNA, 25 bp, Homo sapien
cagttgcctgagtgccaggtggcac

SEQ ID NO: 4488472 - DNA, 25 bp, Homo sapien
agttgcctgagtgccaggtggcaca

SEQ ID NO: 4488473 - DNA, 25 bp, Homo sapien
catgtgtccacatgctgcatgtccc

SEQ ID NO: 4488474 - DNA, 25 bp, Homo sapien
ccatgtgtccacatgctgcatgtcc

SEQ ID NO: 4488475 - DNA, 25 bp, Homo sapien
atgtgtccacatgctgcatgtccca

SEQ ID NO: 4488476 - DNA, 25 bp, Homo sapien
ctccctccaggaagacatgtaccag

SEQ ID NO: 4488477 - DNA, 25 bp, Homo sapien
tgcctcctcgcagaggtctggctct

SEQ ID NO: 4488478 - DNA, 25 bp, Homo sapien
cagtgagcccctcacacgggacatg

SEQ ID NO: 4488479 - DNA, 25 bp, Homo sapien
ggcagtgagcccctcacacgggaca

SEQ ID NO: 4488480 - DNA, 25 bp, Homo sapien
catgggacagcccttggggcggcag

SEQ ID NO: 4488481 - DNA, 25 bp, Homo sapien
tgggacagcccttggggcggcaggg

SEQ ID NO: 4488482 - DNA, 25 bp, Homo sapien
acttggtgctggaaccccactctca

SEQ ID NO: 4488483 - DNA, 25 bp, Homo sapien
ccagtgtgtgaccactggatgccac

SEQ ID NO: 4488484 - DNA, 25 bp, Homo sapien
gggctcacaatcctcggtgccacac

SEQ ID NO: 4488485 - DNA, 25 bp, Homo sapien
tgccgcctgggccctgcttactcca

SEQ ID NO: 4488486 - DNA, 25 bp, Homo sapien
ctgccgcctgggccctgcttactcc

SEQ ID NO: 4488487 - DNA, 25 bp, Homo sapien
ctgggccctgcttactccagcagac

SEQ ID NO: 4488488 - DNA, 25 bp, Homo sapien
gccctgcttactccagcagacctcc

SEQ ID NO: 4488489 - DNA, 25 bp, Homo sapien
agtggcgggtgacccgctgatggcc

SEQ ID NO: 4488490 - DNA, 25 bp, Homo sapien
cagtggcgggtgacccgctgatggc

SEQ ID NO: 4488491 - DNA, 25 bp, Homo sapien
cggtcggtctgtgcatcctggcacc

SEQ ID NO: 4488492 - DNA, 25 bp, Homo sapien
cattagggcgtagggggcgggagct

SEQ ID NO: 4488493 - DNA, 25 bp, Homo sapien
cactgaggtctgtcggtcggtctgt

SEQ ID NO: 4488494 - DNA, 25 bp, Homo sapien
cccagcctgccgctgggtagtgaga

SEQ ID NO: 4488495 - DNA, 25 bp, Homo sapien
gcgcaccggctacaagccgcccggg

SEQ ID NO: 4488496 - DNA, 25 bp, Homo sapien
agccaccccgcgcaccggctacaag

SEQ ID NO: 4488497 - DNA, 25 bp, Homo sapien
tgcacgtagccccagccaccccgcg

SEQ ID NO: 4488498 - DNA, 25 bp, Homo sapien
cccgcgcaccggctacaagccgccc

SEQ ID NO: 4488499 - DNA, 25 bp, Homo sapien
tgggcacggcggtctcggccgagcc

SEQ ID NO: 4488500 - DNA, 25 bp, Homo sapien
ggcacggcggtctcggccgagccga

SEQ ID NO: 4488501 - DNA, 25 bp, Homo sapien
gggcacggcggtctcggccgagccg

SEQ ID NO: 4488502 - DNA, 25 bp, Homo sapien
gcacggcggtctcggccgagccgag

SEQ ID NO: 4488503 - DNA, 25 bp, Homo sapien
gcgggccgagccgagacagctcctc

SEQ ID NO: 4488504 - DNA, 25 bp, Homo sapien
ccccgcgggccgagccgagacagct

SEQ ID NO: 4488505 - DNA, 25 bp, Homo sapien
gggccgagccgagacagctcctcac

SEQ ID NO: 4488506 - DNA, 25 bp, Homo sapien
ccgcgggccgagccgagacagctcc

SEQ ID NO: 4488507 - DNA, 25 bp, Homo sapien
tcccgagagccaaaacctataaaga

SEQ ID NO: 4488508 - DNA, 25 bp, Homo sapien
ggaccatcccacgaacgagcttctt

SEQ ID NO: 4488509 - DNA, 25 bp, Homo sapien
tgctggcctagatttagaagatcct

SEQ ID NO: 4488510 - DNA, 25 bp, Homo sapien
ttatgttatccaccttccaacaggg

SEQ ID NO: 4488511 - DNA, 25 bp, Homo sapien
gaggccagttttgctacctctctcc

SEQ ID NO: 4488512 - DNA, 25 bp, Homo sapien
ggccagttttgctacctctctccca

SEQ ID NO: 4488513 - DNA, 25 bp, Homo sapien
tgaggccagttttgctacctctctc

SEQ ID NO: 4488514 - DNA, 25 bp, Homo sapien
cagttttgctacctctctcccatct

SEQ ID NO: 4488515 - DNA, 25 bp, Homo sapien
taggcaagccgatgacctgttccca

SEQ ID NO: 4488516 - DNA, 25 bp, Homo sapien
ccatccttaggcaagccgatgacct

SEQ ID NO: 4488517 - DNA, 25 bp, Homo sapien
aagccgatgacctgttcccaggagg

SEQ ID NO: 4488518 - DNA, 25 bp, Homo sapien
cttaggcaagccgatgacctgttcc

SEQ ID NO: 4488519 - DNA, 25 bp, Homo sapien
gctcactgtccagatgtcctcctcc

SEQ ID NO: 4488520 - DNA, 25 bp, Homo sapien
ctgctcactgtccagatgtcctcct

SEQ ID NO: 4488521 - DNA, 25 bp, Homo sapien
gggccgaagcgcctcctgctcactg

SEQ ID NO: 4488522 - DNA, 25 bp, Homo sapien
actgtccagatgtcctcctccatct

SEQ ID NO: 4488523 - DNA, 25 bp, Homo sapien
atggcctcccggctctccaggtccc

SEQ ID NO: 4488524 - DNA, 25 bp, Homo sapien
catggcctcccggctctccaggtcc

SEQ ID NO: 4488525 - DNA, 25 bp, Homo sapien
tattcttgtaggggtatacacataa

SEQ ID NO: 4488526 - DNA, 25 bp, Homo sapien
agtattcttgtaggggtatacacat

SEQ ID NO: 4488527 - DNA, 25 bp, Homo sapien
gagtattcttgtaggggtatacaca

SEQ ID NO: 4488528 - DNA, 25 bp, Homo sapien
ttcttgtaggggtatacacataaca

SEQ ID NO: 4488529 - DNA, 25 bp, Homo sapien
gctttttctgggacgaggccactgg

SEQ ID NO: 4488530 - DNA, 25 bp, Homo sapien
cctttgttcctcctgggcattggct

SEQ ID NO: 4488531 - DNA, 25 bp, Homo sapien
cacaccctttgttcctcctgggcat

SEQ ID NO: 4488532 - DNA, 25 bp, Homo sapien
caccctttgttcctcctgggcattg

SEQ ID NO: 4488533 - DNA, 25 bp, Homo sapien
tgggtctccccaaacacagactcac

SEQ ID NO: 4488534 - DNA, 25 bp, Homo sapien
ctgcagggcccggtgggtctcccca

SEQ ID NO: 4488535 - DNA, 25 bp, Homo sapien
tgcagggcccggtgggtctccccaa

SEQ ID NO: 4488536 - DNA, 25 bp, Homo sapien
cggtgggtctccccaaacacagact

SEQ ID NO: 4488537 - DNA, 25 bp, Homo sapien
catgtcaggagtcacctgccttgtc

SEQ ID NO: 4488538 - DNA, 25 bp, Homo sapien
gaagctctagtttctctacccgctc

SEQ ID NO: 4488539 - DNA, 25 bp, Homo sapien
gtctgtcctgagaggtggatgaatt

SEQ ID NO: 4488540 - DNA, 25 bp, Homo sapien
gatgaattgaagctctagtttctct

SEQ ID NO: 4488541 - DNA, 25 bp, Homo sapien
cctgagaggtggatgaattgaagct

SEQ ID NO: 4488542 - DNA, 25 bp, Homo sapien
ccccagcggtgccctagcctctcac

SEQ ID NO: 4488543 - DNA, 25 bp, Homo sapien
gggcccctcagacggcctggcagct

SEQ ID NO: 4488544 - DNA, 25 bp, Homo sapien
atgctggggcccctcagacggcctg

SEQ ID NO: 4488545 - DNA, 25 bp, Homo sapien
ctggcagctccccccagcggtgccc

SEQ ID NO: 4488546 - DNA, 25 bp, Homo sapien
agcctgacgatgtcctcctctccca

SEQ ID NO: 4488547 - DNA, 25 bp, Homo sapien
catgcccctccttgtggtctcccac

SEQ ID NO: 4488548 - DNA, 25 bp, Homo sapien
tttgccatgcccctccttgtggtct

SEQ ID NO: 4488549 - DNA, 25 bp, Homo sapien
cttgtggtctcccacaagctgcaac

SEQ ID NO: 4488550 - DNA, 25 bp, Homo sapien
ctccttgtggtctcccacaagctgc

SEQ ID NO: 4488551 - DNA, 25 bp, Homo sapien
ccctgctcgtcagcacacccaagct

SEQ ID NO: 4488552 - DNA, 25 bp, Homo sapien
accctgctcgtcagcacacccaagc

SEQ ID NO: 4488553 - DNA, 25 bp, Homo sapien
caccctgctcgtcagcacacccaag

SEQ ID NO: 4488554 - DNA, 25 bp, Homo sapien
ggtgcagcctccacgctatcagtga

SEQ ID NO: 4488555 - DNA, 25 bp, Homo sapien
gcagcctccacgctatcagtgaggc

SEQ ID NO: 4488556 - DNA, 25 bp, Homo sapien
attacaggaagcagctgctggatct

SEQ ID NO: 4488557 - DNA, 25 bp, Homo sapien
ctggtgcagcctccacgctatcagt

SEQ ID NO: 4488558 - DNA, 25 bp, Homo sapien
tccactgcagattaggggtgatagt

SEQ ID NO: 4488559 - DNA, 25 bp, Homo sapien
caaatccactgcagattaggggtga

SEQ ID NO: 4488560 - DNA, 25 bp, Homo sapien
gccaaatccactgcagattaggggt

SEQ ID NO: 4488561 - DNA, 25 bp, Homo sapien
cactgcagattaggggtgatagtca

SEQ ID NO: 4488562 - DNA, 25 bp, Homo sapien
gggagggtggggcacagggtggaga

SEQ ID NO: 4488563 - DNA, 25 bp, Homo sapien
tggggagggtggggcacagggtgga

SEQ ID NO: 4488564 - DNA, 25 bp, Homo sapien
ggcttcaatgcagtccggggcatga

SEQ ID NO: 4488565 - DNA, 25 bp, Homo sapien
gcttcaatgcagtccggggcatgac

SEQ ID NO: 4488566 - DNA, 25 bp, Homo sapien
ctggcttcaatgcagtccggggcat

SEQ ID NO: 4488567 - DNA, 25 bp, Homo sapien
tggcttcaatgcagtccggggcatg

SEQ ID NO: 4488568 - DNA, 25 bp, Homo sapien
aacctttggcaaatcatgaccctgc

SEQ ID NO: 4488569 - DNA, 25 bp, Homo sapien
tggcaaatcatgaccctgccttggg

SEQ ID NO: 4488570 - DNA, 25 bp, Homo sapien
cacgaaacctttggcaaatcatgac

SEQ ID NO: 4488571 - DNA, 25 bp, Homo sapien
acacacgaaacctttggcaaatcat

SEQ ID NO: 4488572 - DNA, 25 bp, Homo sapien
ggaccagcgcccatatataaaaatg

SEQ ID NO: 4488573 - DNA, 25 bp, Homo sapien
atgtgctgttgaccaagttagaggg

SEQ ID NO: 4488574 - DNA, 25 bp, Homo sapien
ggcaagcagcaaagtattgggcaag

SEQ ID NO: 4488575 - DNA, 25 bp, Homo sapien
tattgggcaagatcactggactggg

SEQ ID NO: 4488576 - DNA, 25 bp, Homo sapien
cgtgagcgagcacacgagtgtaaag

SEQ ID NO: 4488577 - DNA, 25 bp, Homo sapien
agcacacgagtgtaaagaatggcac

SEQ ID NO: 4488578 - DNA, 25 bp, Homo sapien
gagcgagcacacgagtgtaaagaat

SEQ ID NO: 4488579 - DNA, 25 bp, Homo sapien
gatttccagtgtgccgtctccactg

SEQ ID NO: 4488580 - DNA, 25 bp, Homo sapien
accacaggagcagaggcgagtctgt

SEQ ID NO: 4488581 - DNA, 25 bp, Homo sapien
cacaggagcagaggcgagtctgtga

SEQ ID NO: 4488582 - DNA, 25 bp, Homo sapien
ggaccacaggagcagaggcgagtct

SEQ ID NO: 4488583 - DNA, 25 bp, Homo sapien
ctggaccacaggagcagaggcgagt

SEQ ID NO: 4488584 - DNA, 25 bp, Homo sapien
gcaggcacagcagcatgacgagatg

SEQ ID NO: 4488585 - DNA, 25 bp, Homo sapien
gataagtcttaagtcccctcccaga

SEQ ID NO: 4488586 - DNA, 25 bp, Homo sapien
ccagtcgaagcggtatagaagccca

SEQ ID NO: 4488587 - DNA, 25 bp, Homo sapien
catgtgaaaagccatactccaaggg

SEQ ID NO: 4488588 - DNA, 25 bp, Homo sapien
gacagggagtcacatttcagaaaga

SEQ ID NO: 4488589 - DNA, 25 bp, Homo sapien
gaggcatgccttctcgctggatgtg

SEQ ID NO: 4488590 - DNA, 25 bp, Homo sapien
tcagaaagacctatgctttagatgc

SEQ ID NO: 4488591 - DNA, 25 bp, Homo sapien
aggatgggcctcaagccaggaccct

SEQ ID NO: 4488592 - DNA, 25 bp, Homo sapien
caagctcaggttggcaggattcatc

SEQ ID NO: 4488593 - DNA, 25 bp, Homo sapien
tacaataccttgtcacgtgggcctc

SEQ ID NO: 4488594 - DNA, 25 bp, Homo sapien
gtagcctcacctcagaagcgatgtt

SEQ ID NO: 4488595 - DNA, 25 bp, Homo sapien
gaggctgcctaccagtgttgaagaa

SEQ ID NO: 4488596 - DNA, 25 bp, Homo sapien
ggaataaatggatttagccatactg

SEQ ID NO: 4488597 - DNA, 25 bp, Homo sapien
taaatggatttagccatactgctcg

SEQ ID NO: 4488598 - DNA, 25 bp, Homo sapien
ataaatggatttagccatactgctc

SEQ ID NO: 4488599 - DNA, 25 bp, Homo sapien
gaataaatggatttagccatactgc

SEQ ID NO: 4488600 - DNA, 25 bp, Homo sapien
ccttcccccgtgtacatactgtagc

SEQ ID NO: 4488601 - DNA, 25 bp, Homo sapien
cgggacagtggagttaactgtagac

SEQ ID NO: 4488602 - DNA, 25 bp, Homo sapien
cagctgaggcgggacagtggagtta

SEQ ID NO: 4488603 - DNA, 25 bp, Homo sapien
ggttgcagctggcatatgaggaaga

SEQ ID NO: 4488604 - DNA, 25 bp, Homo sapien
cagagctgcccatcccgctccacga

SEQ ID NO: 4488605 - DNA, 25 bp, Homo sapien
gcccatcccgctccacgagaccaat

SEQ ID NO: 4488606 - DNA, 25 bp, Homo sapien
cccgctccacgagaccaatagtaag

SEQ ID NO: 4488607 - DNA, 25 bp, Homo sapien
catcccgctccacgagaccaatagt

SEQ ID NO: 4488608 - DNA, 25 bp, Homo sapien
tgggcacggcggtctcggccgagcc

SEQ ID NO: 4488609 - DNA, 25 bp, Homo sapien
gcacggcggtctcggccgagccgag

SEQ ID NO: 4488610 - DNA, 25 bp, Homo sapien
ggcacggcggtctcggccgagccga

SEQ ID NO: 4488611 - DNA, 25 bp, Homo sapien
gggcacggcggtctcggccgagccg

SEQ ID NO: 4488612 - DNA, 25 bp, Homo sapien
tcctcaaatcacaaaacttccccca

SEQ ID NO: 4488613 - DNA, 25 bp, Homo sapien
ccaactccgccaactaagttgcgct

SEQ ID NO: 4488614 - DNA, 25 bp, Homo sapien
ccccaactccgccaactaagttgcg

SEQ ID NO: 4488615 - DNA, 25 bp, Homo sapien
aactccgccaactaagttgcgctct

SEQ ID NO: 4488616 - DNA, 25 bp, Homo sapien
gcttctcagggcgattaggcaagaa

SEQ ID NO: 4488617 - DNA, 25 bp, Homo sapien
tctataattgacctctgaaacaagg

SEQ ID NO: 4488618 - DNA, 25 bp, Homo sapien
agggaacgtcctcatctaacaaaag

SEQ ID NO: 4488619 - DNA, 25 bp, Homo sapien
tgcattctgtggctcataggctcct

SEQ ID NO: 4488620 - DNA, 25 bp, Homo sapien
gatgacacttaagacctacttgtga

SEQ ID NO: 4488621 - DNA, 25 bp, Homo sapien
gacacttaagacctacttgtgatat

SEQ ID NO: 4488622 - DNA, 25 bp, Homo sapien
acttaagacctacttgtgatattta

SEQ ID NO: 4488623 - DNA, 25 bp, Homo sapien
tgacacttaagacctacttgtgata

SEQ ID NO: 4488624 - DNA, 25 bp, Homo sapien
tacagaacatgatcaagggtgttac

SEQ ID NO: 4488625 - DNA, 25 bp, Homo sapien
gtacagaacatgatcaagggtgtta

SEQ ID NO: 4488626 - DNA, 25 bp, Homo sapien
tactctgaagggacgcacagttatc

SEQ ID NO: 4488627 - DNA, 25 bp, Homo sapien
cacagttatcgtgaagggccccaga

SEQ ID NO: 4488628 - DNA, 25 bp, Homo sapien
cacatcaatgtagaactcagccttc

SEQ ID NO: 4488629 - DNA, 25 bp, Homo sapien
tcaatgtagaactcagccttcttgg

SEQ ID NO: 4488630 - DNA, 25 bp, Homo sapien
ttatcaaatactgccctttaccagg

SEQ ID NO: 4488631 - DNA, 25 bp, Homo sapien
cactgttacaaaggatctggagaaa

SEQ ID NO: 4488632 - DNA, 25 bp, Homo sapien
ccagtcatgctttacatttggcagt

SEQ ID NO: 4488633 - DNA, 25 bp, Homo sapien
ggaccctggcttcatcactctggct

SEQ ID NO: 4488634 - DNA, 25 bp, Homo sapien
cacctaagctgcagaaacccactgg

SEQ ID NO: 4488635 - DNA, 25 bp, Homo sapien
gatgaggatttgaaacacctaagct

SEQ ID NO: 4488636 - DNA, 25 bp, Homo sapien
ggtttcctaggttctgagttggcat

SEQ ID NO: 4488637 - DNA, 25 bp, Homo sapien
cagaaacccactggatggtttccta

SEQ ID NO: 4488638 - DNA, 25 bp, Homo sapien
acagacagcaattacagctactgag

SEQ ID NO: 4488639 - DNA, 25 bp, Homo sapien
aagacagacagcaattacagctact

SEQ ID NO: 4488640 - DNA, 25 bp, Homo sapien
acagcaattacagctactgagaaca

SEQ ID NO: 4488641 - DNA, 25 bp, Homo sapien
cagacagcaattacagctactgaga

SEQ ID NO: 4488642 - DNA, 25 bp, Homo sapien
aaactgcctgctagaaggttcagtt

SEQ ID NO: 4488643 - DNA, 25 bp, Homo sapien
aaatccactgagaccagtgtgtggc

SEQ ID NO: 4488644 - DNA, 25 bp, Homo sapien
cagctatcttcagggatttcataat

SEQ ID NO: 4488645 - DNA, 25 bp, Homo sapien
gctggttatgggacgcgttaccttc

SEQ ID NO: 4488646 - DNA, 25 bp, Homo sapien
ttctatttgaatacctatggcaaaa

SEQ ID NO: 4488647 - DNA, 25 bp, Homo sapien
gctaattgtcatctacccacttcag

SEQ ID NO: 4488648 - DNA, 25 bp, Homo sapien
cctcggcctcagaagtagttggaac

SEQ ID NO: 4488649 - DNA, 25 bp, Homo sapien
catgtccttgataaaagccctgcac

SEQ ID NO: 4488650 - DNA, 25 bp, Homo sapien
ttcaggaacatagaatgcaaatctt

SEQ ID NO: 4488651 - DNA, 25 bp, Homo sapien
tttccaggccctgaaacacactgct

SEQ ID NO: 4488652 - DNA, 25 bp, Homo sapien
ggccctgaaacacactgctctcctc

SEQ ID NO: 4488653 - DNA, 25 bp, Homo sapien
caggccctgaaacacactgctctcc

SEQ ID NO: 4488654 - DNA, 25 bp, Homo sapien
cttttccaggccctgaaacacactg

SEQ ID NO: 4488655 - DNA, 25 bp, Homo sapien
ggaaaatctggagaccaatacgcag

SEQ ID NO: 4488656 - DNA, 25 bp, Homo sapien
gacaattctttgtgagggttctcct

SEQ ID NO: 4488657 - DNA, 25 bp, Homo sapien
gaccgtgaccagttgtgaccacaaa

SEQ ID NO: 4488658 - DNA, 25 bp, Homo sapien
ttccaaatgtcccatgggaggcaaa

SEQ ID NO: 4488659 - DNA, 25 bp, Homo sapien
taaggcaagatgagcgtacagaggc

SEQ ID NO: 4488660 - DNA, 25 bp, Homo sapien
ataatctcgctgaaaggtcacaggc

SEQ ID NO: 4488661 - DNA, 25 bp, Homo sapien
aactcctaagtatgtgccccagaga

SEQ ID NO: 4488662 - DNA, 25 bp, Homo sapien
gaaatgctggcacaaggataccatg

SEQ ID NO: 4488663 - DNA, 25 bp, Homo sapien
ctaagaatcagataggcatcagact

SEQ ID NO: 4488664 - DNA, 25 bp, Homo sapien
gcgggagtatcatttgaacctgaga

SEQ ID NO: 4488665 - DNA, 25 bp, Homo sapien
tacacagaaaatcatactaactatc

SEQ ID NO: 4488666 - DNA, 25 bp, Homo sapien
ctatcagaaagaactaagaatcaga

SEQ ID NO: 4488667 - DNA, 25 bp, Homo sapien
aagtcacttcttctgttgtcccatt

SEQ ID NO: 4488668 - DNA, 25 bp, Homo sapien
ttcctcttcgtcttcttttgaagtc

SEQ ID NO: 4488669 - DNA, 25 bp, Homo sapien
gaagtcacttcttctgttgtcccat

SEQ ID NO: 4488670 - DNA, 25 bp, Homo sapien
ctcttcgtcttcttttgaagtcact

SEQ ID NO: 4488671 - DNA, 25 bp, Homo sapien
acatttaaatggccttgcctttcag

SEQ ID NO: 4488672 - DNA, 25 bp, Homo sapien
ccaacttcttctcactaataggctc

SEQ ID NO: 4488673 - DNA, 25 bp, Homo sapien
aacttcttctcactaataggctctt

SEQ ID NO: 4488674 - DNA, 25 bp, Homo sapien
ctccaacttcttctcactaataggc

SEQ ID NO: 4488675 - DNA, 25 bp, Homo sapien
ctgtcttataactctgtgatctgta

SEQ ID NO: 4488676 - DNA, 25 bp, Homo sapien
gtcttataactctgtgatctgtata

SEQ ID NO: 4488677 - DNA, 25 bp, Homo sapien
cttataactctgtgatctgtatatg

SEQ ID NO: 4488678 - DNA, 25 bp, Homo sapien
ataactctgtgatctgtatatgtcc

SEQ ID NO: 4488679 - DNA, 25 bp, Homo sapien
tgtctcctatcgcttctttttaaga

SEQ ID NO: 4488680 - DNA, 25 bp, Homo sapien
gatcactgtgcaaaggactatcagg

SEQ ID NO: 4488681 - DNA, 25 bp, Homo sapien
gataagcaaaatgtctcctatcgct

SEQ ID NO: 4488682 - DNA, 25 bp, Homo sapien
ctttttaagatctaaagatcactgt

SEQ ID NO: 4488683 - DNA, 25 bp, Homo sapien
gaactccggatttccaacagagcag

SEQ ID NO: 4488684 - DNA, 25 bp, Homo sapien
cagcatttcccagagagtaagccag

SEQ ID NO: 4488685 - DNA, 25 bp, Homo sapien
cgtaatagtatattcgtgatcaact

SEQ ID NO: 4488686 - DNA, 25 bp, Homo sapien
taacaagctgtcaaagggagacctc

SEQ ID NO: 4488687 - DNA, 25 bp, Homo sapien
aaaacactttactaggaatcagaag

SEQ ID NO: 4488688 - DNA, 25 bp, Homo sapien
tcttacatagctggcatttcgtata

SEQ ID NO: 4488689 - DNA, 25 bp, Homo sapien
tatttggctaagtcacaagctgact

SEQ ID NO: 4488690 - DNA, 25 bp, Homo sapien
attcatccaaataatgaggaccata

SEQ ID NO: 4488691 - DNA, 25 bp, Homo sapien
ggttagcatatgataatcaatgcag

SEQ ID NO: 4488692 - DNA, 25 bp, Homo sapien
catatgataatcaatgcagtactta

SEQ ID NO: 4488693 - DNA, 25 bp, Homo sapien
gcctggcccatggttagcatatgat

SEQ ID NO: 4488694 - DNA, 25 bp, Homo sapien
cccatggttagcatatgataatcaa

SEQ ID NO: 4488695 - DNA, 25 bp, Homo sapien
gattgcgcttactcttcacctatgt

SEQ ID NO: 4488696 - DNA, 25 bp, Homo sapien
ctaccctccttgtgttatagctcaa

SEQ ID NO: 4488697 - DNA, 25 bp, Homo sapien
caaattggtttcgtatactctgaac

SEQ ID NO: 4488698 - DNA, 25 bp, Homo sapien
tctttcctagatacctgattgcgct

SEQ ID NO: 4488699 - DNA, 25 bp, Homo sapien
agctgtacagcaaacactatcctaa

SEQ ID NO: 4488700 - DNA, 25 bp, Homo sapien
gacgagtatacagagtgactgctaa

SEQ ID NO: 4488701 - DNA, 25 bp, Homo sapien
cggtcatctaaggataatatgccac

SEQ ID NO: 4488702 - DNA, 25 bp, Homo sapien
gagacagttcaagaatactagggaa

SEQ ID NO: 4488703 - DNA, 25 bp, Homo sapien
tcttatccattctgttgtgagaatc

SEQ ID NO: 4488704 - DNA, 25 bp, Homo sapien
ctcctcaagtcctttctaggtctga

SEQ ID NO: 4488705 - DNA, 25 bp, Homo sapien
ctcaagtcctttctaggtctgaaga

SEQ ID NO: 4488706 - DNA, 25 bp, Homo sapien
tgagaatcgaatggttcacaccatg

SEQ ID NO: 4488707 - DNA, 25 bp, Homo sapien
ggcatttgagtgttctttacaatgg

SEQ ID NO: 4488708 - DNA, 25 bp, Homo sapien
ggttccatacataatgctcctccac

SEQ ID NO: 4488709 - DNA, 25 bp, Homo sapien
gaggttccatacataatgctcctcc

SEQ ID NO: 4488710 - DNA, 25 bp, Homo sapien
taatgctcctccacccaatacatac

SEQ ID NO: 4488711 - DNA, 25 bp, Homo sapien
cagaggttccatacataatgctcct

SEQ ID NO: 4488712 - DNA, 25 bp, Homo sapien
cactgttaacgcctatcctagcata

SEQ ID NO: 4488713 - DNA, 25 bp, Homo sapien
gcctatcctagcataaattcagcac

SEQ ID NO: 4488714 - DNA, 25 bp, Homo sapien
aggtcactgttaacgcctatcctag

SEQ ID NO: 4488715 - DNA, 25 bp, Homo sapien
aacgcctatcctagcataaattcag

SEQ ID NO: 4488716 - DNA, 25 bp, Homo sapien
ttatattaggtttgacatgtaacta

SEQ ID NO: 4488717 - DNA, 25 bp, Homo sapien
tttctgttgctcaatttaatgagtc

SEQ ID NO: 4488718 - DNA, 25 bp, Homo sapien
tttatattaggtttgacatgtaact

SEQ ID NO: 4488719 - DNA, 25 bp, Homo sapien
ttaatgagtccatctttcttttata

SEQ ID NO: 4488720 - DNA, 25 bp, Homo sapien
taaataataccgtctctgagaagcc

SEQ ID NO: 4488721 - DNA, 25 bp, Homo sapien
tagggccagagacaatatcgctgtt

SEQ ID NO: 4488722 - DNA, 25 bp, Homo sapien
tcatggtctagtatggaaaacagcc

SEQ ID NO: 4488723 - DNA, 25 bp, Homo sapien
tccaagttatatgggcaagtggcct

SEQ ID NO: 4488724 - DNA, 25 bp, Homo sapien
tcccatgtaggctagaatccctgcc

SEQ ID NO: 4488725 - DNA, 25 bp, Homo sapien
tgggcagccccttagatcatttgtt

SEQ ID NO: 4488726 - DNA, 25 bp, Homo sapien
catttttgggaagtgcgctacagaa

SEQ ID NO: 4488727 - DNA, 25 bp, Homo sapien
ttcactgggtactaaaaagatgggc

SEQ ID NO: 4488728 - DNA, 25 bp, Homo sapien
tggggccacatcagcgaaataccag

SEQ ID NO: 4488729 - DNA, 25 bp, Homo sapien
ggggccacatcagcgaaataccagt

SEQ ID NO: 4488730 - DNA, 25 bp, Homo sapien
tggctgcggccaatttcccctgttg

SEQ ID NO: 4488731 - DNA, 25 bp, Homo sapien
cttggctgcggccaatttcccctgt

SEQ ID NO: 4488732 - DNA, 25 bp, Homo sapien
gctgcggccaatttcccctgttgtg

SEQ ID NO: 4488733 - DNA, 25 bp, Homo sapien
tgcggccaatttcccctgttgtgtt

SEQ ID NO: 4488734 - DNA, 25 bp, Homo sapien
cctgggagacgcaagcccaaagagc

SEQ ID NO: 4488735 - DNA, 25 bp, Homo sapien
ggctgattatggagcagggagcccc

SEQ ID NO: 4488736 - DNA, 25 bp, Homo sapien
ggtcctgggagacgcaagcccaaag

SEQ ID NO: 4488737 - DNA, 25 bp, Homo sapien
aggtgagggctgattatggagcagg

SEQ ID NO: 4488738 - DNA, 25 bp, Homo sapien
agggctactgccattgactttcttt

SEQ ID NO: 4488739 - DNA, 25 bp, Homo sapien
ggctcttcctctgccaatatgcttt

SEQ ID NO: 4488740 - DNA, 25 bp, Homo sapien
tgttagctcctgctggaatgccagg

SEQ ID NO: 4488741 - DNA, 25 bp, Homo sapien
ctgtgtcagggctactgccattgac

SEQ ID NO: 4488742 - DNA, 25 bp, Homo sapien
aggagcctggcccgccgagactcac

SEQ ID NO: 4488743 - DNA, 25 bp, Homo sapien
ctctactgccccttgggccccctgt

SEQ ID NO: 4488744 - DNA, 25 bp, Homo sapien
ccccaggagcctggcccgccgagac

SEQ ID NO: 4488745 - DNA, 25 bp, Homo sapien
ccaggagcctggcccgccgagactc

SEQ ID NO: 4488746 - DNA, 25 bp, Homo sapien
aatcaatccctaatcaattcttagc

SEQ ID NO: 4488747 - DNA, 25 bp, Homo sapien
tatgctaatcaatccctaatcaatt

SEQ ID NO: 4488748 - DNA, 25 bp, Homo sapien
gctaatcaatccctaatcaattctt

SEQ ID NO: 4488749 - DNA, 25 bp, Homo sapien
atcatatgctaatcaatccctaatc

SEQ ID NO: 4488750 - DNA, 25 bp, Homo sapien
ctgattattgcggagcttgaatcca

SEQ ID NO: 4488751 - DNA, 25 bp, Homo sapien
gaattgatgttttcagtgagttgac

SEQ ID NO: 4488752 - DNA, 25 bp, Homo sapien
ttgcggagcttgaatccagggctac

SEQ ID NO: 4488753 - DNA, 25 bp, Homo sapien
attgatgttttcagtgagttgactg

SEQ ID NO: 4488754 - DNA, 25 bp, Homo sapien
tcctcccaagcttctgtaccagatg

SEQ ID NO: 4488755 - DNA, 25 bp, Homo sapien
caggagactcaacatctgattgttt

SEQ ID NO: 4488756 - DNA, 25 bp, Homo sapien
cctcctgttcacgtagcctctcctc

SEQ ID NO: 4488757 - DNA, 25 bp, Homo sapien
acagcctctcatcctgttgccgaag

SEQ ID NO: 4488758 - DNA, 25 bp, Homo sapien
gcctctcatcctgttgccgaagcct

SEQ ID NO: 4488759 - DNA, 25 bp, Homo sapien
tctcatcctgttgccgaagcctctc

SEQ ID NO: 4488760 - DNA, 25 bp, Homo sapien
ctctcatcctgttgccgaagcctct

SEQ ID NO: 4488761 - DNA, 25 bp, Homo sapien
cgctgctcgtacagggcttcccacc

SEQ ID NO: 4488762 - DNA, 25 bp, Homo sapien
gcccgctgctcgtacagggcttccc

SEQ ID NO: 4488763 - DNA, 25 bp, Homo sapien
ctcggcccgctgctcgtacagggct

SEQ ID NO: 4488764 - DNA, 25 bp, Homo sapien
tcggcccgctgctcgtacagggctt

SEQ ID NO: 4488765 - DNA, 25 bp, Homo sapien
aactgcagtgtgctcttgttctcgt

SEQ ID NO: 4488766 - DNA, 25 bp, Homo sapien
ccgacttctccagctcctttacttg

SEQ ID NO: 4488767 - DNA, 25 bp, Homo sapien
gcagtgtgctcttgttctcgttgtt

SEQ ID NO: 4488768 - DNA, 25 bp, Homo sapien
ctgcagtgtgctcttgttctcgttg

SEQ ID NO: 4488769 - DNA, 25 bp, Homo sapien
ggtgcccgcctcccacatcttcttg

SEQ ID NO: 4488770 - DNA, 25 bp, Homo sapien
catcttcttggatgggtcggaggtt

SEQ ID NO: 4488771 - DNA, 25 bp, Homo sapien
ctcccacatcttcttggatgggtcg

SEQ ID NO: 4488772 - DNA, 25 bp, Homo sapien
cacatcttcttggatgggtcggagg

SEQ ID NO: 4488773 - DNA, 25 bp, Homo sapien
tccccaggctgcagctgcctgtggc

SEQ ID NO: 4488774 - DNA, 25 bp, Homo sapien
gctgcagctgcctgtggcctggcac

SEQ ID NO: 4488775 - DNA, 25 bp, Homo sapien
tgtccccaggctgcagctgcctgtg

SEQ ID NO: 4488776 - DNA, 25 bp, Homo sapien
cccaggctgcagctgcctgtggcct

SEQ ID NO: 4488777 - DNA, 25 bp, Homo sapien
ttgtccgcacatccaagctccttgt

SEQ ID NO: 4488778 - DNA, 25 bp, Homo sapien
tgtcagatggttgaagactagctat

SEQ ID NO: 4488779 - DNA, 25 bp, Homo sapien
attcctatgtcagatggttgaagac

SEQ ID NO: 4488780 - DNA, 25 bp, Homo sapien
gatggttgaagactagctattagcc

SEQ ID NO: 4488781 - DNA, 25 bp, Homo sapien
ctatgtcagatggttgaagactagc

SEQ ID NO: 4488782 - DNA, 25 bp, Homo sapien
ttgtcataggatttccattctcttt

SEQ ID NO: 4488783 - DNA, 25 bp, Homo sapien
gtcataggatttccattctctttag

SEQ ID NO: 4488784 - DNA, 25 bp, Homo sapien
tattgtcataggatttccattctct

SEQ ID NO: 4488785 - DNA, 25 bp, Homo sapien
cataggatttccattctctttagct

SEQ ID NO: 4488786 - DNA, 25 bp, Homo sapien
tcctgtaactttttcatcccacaac

SEQ ID NO: 4488787 - DNA, 25 bp, Homo sapien
tatcctgtaactttttcatcccaca

SEQ ID NO: 4488788 - DNA, 25 bp, Homo sapien
tttatcctgtaactttttcatccca

SEQ ID NO: 4488789 - DNA, 25 bp, Homo sapien
ttatcctgtaactttttcatcccac

SEQ ID NO: 4488790 - DNA, 25 bp, Homo sapien
ctttccaagcctgcctgggcgggtg

SEQ ID NO: 4488791 - DNA, 25 bp, Homo sapien
tgggcgggtgtcctgtgacttgaca

SEQ ID NO: 4488792 - DNA, 25 bp, Homo sapien
taaacagatccctcttctcagagac

SEQ ID NO: 4488793 - DNA, 25 bp, Homo sapien
tgacttagtctgttgtagcggtgag

SEQ ID NO: 4488794 - DNA, 25 bp, Homo sapien
ggcttcaatgcagtccggggcatga

SEQ ID NO: 4488795 - DNA, 25 bp, Homo sapien
gcttcaatgcagtccggggcatgac

SEQ ID NO: 4488796 - DNA, 25 bp, Homo sapien
tggcttcaatgcagtccggggcatg

SEQ ID NO: 4488797 - DNA, 25 bp, Homo sapien
ctggcttcaatgcagtccggggcat

SEQ ID NO: 4488798 - DNA, 25 bp, Homo sapien
ccgttttggcggctgcaggagtcca

SEQ ID NO: 4488799 - DNA, 25 bp, Homo sapien
ctcctcgccttgacccagcactgct

SEQ ID NO: 4488800 - DNA, 25 bp, Homo sapien
caggagtccagagcatgcgcgcgct

SEQ ID NO: 4488801 - DNA, 25 bp, Homo sapien
agtccagagcatgcgcgcgcttccg

SEQ ID NO: 4488802 - DNA, 25 bp, Homo sapien
gaaggtgagcccgtcgggagccgct

SEQ ID NO: 4488803 - DNA, 25 bp, Homo sapien
caaccacccgcgggacctctcggcg

SEQ ID NO: 4488804 - DNA, 25 bp, Homo sapien
ggagccgctgtcacggccgcaacca

SEQ ID NO: 4488805 - DNA, 25 bp, Homo sapien
gtcacggccgcaaccacccgcggga

SEQ ID NO: 4488806 - DNA, 25 bp, Homo sapien
cagtggagcgtgagctgtggcgggg

SEQ ID NO: 4488807 - DNA, 25 bp, Homo sapien
aagatagaggccaacaacctcagct

SEQ ID NO: 4488808 - DNA, 25 bp, Homo sapien
agcgtgagctgtggcgggggctcct

SEQ ID NO: 4488809 - DNA, 25 bp, Homo sapien
ggaagatagaggccaacaacctcag

SEQ ID NO: 4488810 - DNA, 25 bp, Homo sapien
cggtccaggggagcaggctagctga

SEQ ID NO: 4488811 - DNA, 25 bp, Homo sapien
agcaggctagctgactgagggcgat

SEQ ID NO: 4488812 - DNA, 25 bp, Homo sapien
aggctagctgactgagggcgatcat

SEQ ID NO: 4488813 - DNA, 25 bp, Homo sapien
tccaggggagcaggctagctgactg

SEQ ID NO: 4488814 - DNA, 25 bp, Homo sapien
cacgattggctgaacatgcgggaac

SEQ ID NO: 4488815 - DNA, 25 bp, Homo sapien
aacacgattggctgaacatgcggga

SEQ ID NO: 4488816 - DNA, 25 bp, Homo sapien
aaacacgattggctgaacatgcggg

SEQ ID NO: 4488817 - DNA, 25 bp, Homo sapien
gattggctgaacatgcgggaacaag

SEQ ID NO: 4488818 - DNA, 25 bp, Homo sapien
gcatccagggtacaatgcgcctttc

SEQ ID NO: 4488819 - DNA, 25 bp, Homo sapien
catccagggtacaatgcgcctttcc

SEQ ID NO: 4488820 - DNA, 25 bp, Homo sapien
tgggacacattactttcataatttg

SEQ ID NO: 4488821 - DNA, 25 bp, Homo sapien
gctgcttatgggacacattactttc

SEQ ID NO: 4488822 - DNA, 25 bp, Homo sapien
tcttctgaaggctgcttatgggaca

SEQ ID NO: 4488823 - DNA, 25 bp, Homo sapien
gaaggctgcttatgggacacattac

SEQ ID NO: 4488824 - DNA, 25 bp, Homo sapien
taccacaaaggttactataagcaga

SEQ ID NO: 4488825 - DNA, 25 bp, Homo sapien
ttccactgagaccaatgtgtgcctc

SEQ ID NO: 4488826 - DNA, 25 bp, Homo sapien
cataaaactgtctcaatcaagggca

SEQ ID NO: 4488827 - DNA, 25 bp, Homo sapien
tatctttccaaatgtagggcacagc

SEQ ID NO: 4488828 - DNA, 25 bp, Homo sapien
cagacgttcccgctgttactttgta

SEQ ID NO: 4488829 - DNA, 25 bp, Homo sapien
ggaggacatcattaacagcatatct

SEQ ID NO: 4488830 - DNA, 25 bp, Homo sapien
caattttgcacaaacaactttaggc

SEQ ID NO: 4488831 - DNA, 25 bp, Homo sapien
gaataactaggttcaagtcacagaa

SEQ ID NO: 4488832 - DNA, 25 bp, Homo sapien
ctcctgatctcctttttctgcccct

SEQ ID NO: 4488833 - DNA, 25 bp, Homo sapien
cccagaatctctgtcttggaggtag

SEQ ID NO: 4488834 - DNA, 25 bp, Homo sapien
ttgcaagaacccagaatctctgtct

SEQ ID NO: 4488835 - DNA, 25 bp, Homo sapien
tctgaggggctgcagttgcaagaac

SEQ ID NO: 4488836 - DNA, 25 bp, Homo sapien
gctgcaggtctatgtcagtcagagc

SEQ ID NO: 4488837 - DNA, 25 bp, Homo sapien
cagctgcaggtctatgtcagtcaga

SEQ ID NO: 4488838 - DNA, 25 bp, Homo sapien
ctgcagctgcaggtctatgtcagtc

SEQ ID NO: 4488839 - DNA, 25 bp, Homo sapien
ctgcaggtctatgtcagtcagagcc

SEQ ID NO: 4488840 - DNA, 25 bp, Homo sapien
ccaggagaaggagggcttcgggttg

SEQ ID NO: 4488841 - DNA, 25 bp, Homo sapien
gggcttcgggttgggacatggagaa

SEQ ID NO: 4488842 - DNA, 25 bp, Homo sapien
gagggcttcgggttgggacatggag

SEQ ID NO: 4488843 - DNA, 25 bp, Homo sapien
aaggagggcttcgggttgggacatg

SEQ ID NO: 4488844 - DNA, 25 bp, Homo sapien
caggtgtccagagtagagctgcagc

SEQ ID NO: 4488845 - DNA, 25 bp, Homo sapien
ctgcaggtgtccagagtagagctgc

SEQ ID NO: 4488846 - DNA, 25 bp, Homo sapien
gcagcaggaggtggtcagctgggcc

SEQ ID NO: 4488847 - DNA, 25 bp, Homo sapien
agcaggaggtggtcagctgggcctg

SEQ ID NO: 4488848 - DNA, 25 bp, Homo sapien
ctggtatggggtaagactcaagtag

SEQ ID NO: 4488849 - DNA, 25 bp, Homo sapien
gggtaagactcaagtaggagccaca

SEQ ID NO: 4488850 - DNA, 25 bp, Homo sapien
actcaagtaggagccacaagactcc

SEQ ID NO: 4488851 - DNA, 25 bp, Homo sapien
caggagggggtctcgccgaggagga

SEQ ID NO: 4488852 - DNA, 25 bp, Homo sapien
ctggaggagtctgcggccattgaga

SEQ ID NO: 4488853 - DNA, 25 bp, Homo sapien
gctgtgcgtcagtcacaggcacact

SEQ ID NO: 4488854 - DNA, 25 bp, Homo sapien
tggggctgtgcgtcagtcacaggca

SEQ ID NO: 4488855 - DNA, 25 bp, Homo sapien
gggctgtgcgtcagtcacaggcaca

SEQ ID NO: 4488856 - DNA, 25 bp, Homo sapien
agctgaggactcctcagttcgtgtg

SEQ ID NO: 4488857 - DNA, 25 bp, Homo sapien
ctcctcagttcgtgtggggtactgg

SEQ ID NO: 4488858 - DNA, 25 bp, Homo sapien
gactcctcagttcgtgtggggtact

SEQ ID NO: 4488859 - DNA, 25 bp, Homo sapien
ctgaggactcctcagttcgtgtggg

SEQ ID NO: 4488860 - DNA, 25 bp, Homo sapien
cagctccccaagaaggagactgtca

SEQ ID NO: 4488861 - DNA, 25 bp, Homo sapien
agctccccaagaaggagactgtcac

SEQ ID NO: 4488862 - DNA, 25 bp, Homo sapien
agccaccatgttgtgcgtcagcaag

SEQ ID NO: 4488863 - DNA, 25 bp, Homo sapien
tgtgccaccctcggtcaccaccact

SEQ ID NO: 4488864 - DNA, 25 bp, Homo sapien
gtgccaccctcggtcaccaccactg

SEQ ID NO: 4488865 - DNA, 25 bp, Homo sapien
ctgtgccaccctcggtcaccaccac

SEQ ID NO: 4488866 - DNA, 25 bp, Homo sapien
ttcaccacgtccaggagggtgaaca

SEQ ID NO: 4488867 - DNA, 25 bp, Homo sapien
gcagttcaccacgtccaggagggtg

SEQ ID NO: 4488868 - DNA, 25 bp, Homo sapien
tcaccacgtccaggagggtgaacat

SEQ ID NO: 4488869 - DNA, 25 bp, Homo sapien
cttgcagttcaccacgtccaggagg

SEQ ID NO: 4488870 - DNA, 25 bp, Homo sapien
gtggatttgtatggccagctggaca

SEQ ID NO: 4488871 - DNA, 25 bp, Homo sapien
ggaatgtcaagtcctgtgtagggcc

SEQ ID NO: 4488872 - DNA, 25 bp, Homo sapien
tcctcggtgtagtgctgtgggtcag

SEQ ID NO: 4488873 - DNA, 25 bp, Homo sapien
ccggaatgtcaagtcctgtgtaggg

SEQ ID NO: 4488874 - DNA, 25 bp, Homo sapien
ctgagtgtgcagtggctccagctgc

SEQ ID NO: 4488875 - DNA, 25 bp, Homo sapien
tgttctgagtgtgcagtggctccag

SEQ ID NO: 4488876 - DNA, 25 bp, Homo sapien
aaccacctcacagtggaaggttggg

SEQ ID NO: 4488877 - DNA, 25 bp, Homo sapien
ctgaaccacctcacagtggaaggtt

SEQ ID NO: 4488878 - DNA, 25 bp, Homo sapien
aacagaaggtgtcctccactgccac

SEQ ID NO: 4488879 - DNA, 25 bp, Homo sapien
agaaggtgtcctccactgccactga

SEQ ID NO: 4488880 - DNA, 25 bp, Homo sapien
gcactgttgagactcttgatgaaga

SEQ ID NO: 4488881 - DNA, 25 bp, Homo sapien
tggtcagcagagaggacacacccac

SEQ ID NO: 4488882 - DNA, 25 bp, Homo sapien
ctggcactgttgagactcttgatga

SEQ ID NO: 4488883 - DNA, 25 bp, Homo sapien
tgttgagactcttgatgaagagctg

SEQ ID NO: 4488884 - DNA, 25 bp, Homo sapien
aagtcaacctcccatggcggggctg

SEQ ID NO: 4488885 - DNA, 25 bp, Homo sapien
ccaagtcaacctcccatggcggggc

SEQ ID NO: 4488886 - DNA, 25 bp, Homo sapien
tcccatggcggggctgctccatgac

SEQ ID NO: 4488887 - DNA, 25 bp, Homo sapien
cctcccatggcggggctgctccatg

SEQ ID NO: 4488888 - DNA, 25 bp, Homo sapien
catgcatcaggtctccattggtgaa

SEQ ID NO: 4488889 - DNA, 25 bp, Homo sapien
agctggccatgcatcaggtctccat

SEQ ID NO: 4488890 - DNA, 25 bp, Homo sapien
tgcatcaggtctccattggtgaagg

SEQ ID NO: 4488891 - DNA, 25 bp, Homo sapien
tggccatgcatcaggtctccattgg

SEQ ID NO: 4488892 - DNA, 25 bp, Homo sapien
cgtggtcattcacaggctggatggc

SEQ ID NO: 4488893 - DNA, 25 bp, Homo sapien
ctgcataggggcgtggtcattcaca

SEQ ID NO: 4488894 - DNA, 25 bp, Homo sapien
gtggtcattcacaggctggatggcc

SEQ ID NO: 4488895 - DNA, 25 bp, Homo sapien
ataggggcgtggtcattcacaggct

SEQ ID NO: 4488896 - DNA, 25 bp, Homo sapien
taccccaggccacgtggaagacgca

SEQ ID NO: 4488897 - DNA, 25 bp, Homo sapien
ccacgtggaagacgcagctgatggt

SEQ ID NO: 4488898 - DNA, 25 bp, Homo sapien
ggccacgtggaagacgcagctgatg

SEQ ID NO: 4488899 - DNA, 25 bp, Homo sapien
caggccacgtggaagacgcagctga

SEQ ID NO: 4488900 - DNA, 25 bp, Homo sapien
tgttgtctgtagtcagcagccgcca

SEQ ID NO: 4488901 - DNA, 25 bp, Homo sapien
gctgggcctcagcaaagcccgaatc

SEQ ID NO: 4488902 - DNA, 25 bp, Homo sapien
attgctgaaggccatgttgtctgta

SEQ ID NO: 4488903 - DNA, 25 bp, Homo sapien
agcaaagcccgaatcagcattgctg

SEQ ID NO: 4488904 - DNA, 25 bp, Homo sapien
ggctgcatgggctcatccgtggcca

SEQ ID NO: 4488905 - DNA, 25 bp, Homo sapien
tgggctcatccgtggccatgatact

SEQ ID NO: 4488906 - DNA, 25 bp, Homo sapien
gcatgggctcatccgtggccatgat

SEQ ID NO: 4488907 - DNA, 25 bp, Homo sapien
catccgtggccatgatactgccaga

SEQ ID NO: 4488908 - DNA, 25 bp, Homo sapien
ggactcgcctcttcctgaggcccct

SEQ ID NO: 4488909 - DNA, 25 bp, Homo sapien
gactcgcctcttcctgaggcccctc

SEQ ID NO: 4488910 - DNA, 25 bp, Homo sapien
aggactcgcctcttcctgaggcccc

SEQ ID NO: 4488911 - DNA, 25 bp, Homo sapien
ctgcagcgggatccagccgtggtca

SEQ ID NO: 4488912 - DNA, 25 bp, Homo sapien
gtagtgggcctcatccctactgcag

SEQ ID NO: 4488913 - DNA, 25 bp, Homo sapien
ggtagtgggcctcatccctactgca

SEQ ID NO: 4488914 - DNA, 25 bp, Homo sapien
ggcctccttgaggaaccatgaggcc

SEQ ID NO: 4488915 - DNA, 25 bp, Homo sapien
cctccttgaggaaccatgaggccgg

SEQ ID NO: 4488916 - DNA, 25 bp, Homo sapien
cctctagggcaatggtcacttgtag

SEQ ID NO: 4488917 - DNA, 25 bp, Homo sapien
gccctctagggcaatggtcacttgt

SEQ ID NO: 4488918 - DNA, 25 bp, Homo sapien
ggccctctagggcaatggtcacttg

SEQ ID NO: 4488919 - DNA, 25 bp, Homo sapien
tgggccctctagggcaatggtcact

SEQ ID NO: 4488920 - DNA, 25 bp, Homo sapien
gggtgagcagaagcccttgacagac

SEQ ID NO: 4488921 - DNA, 25 bp, Homo sapien
ctgggtgagcagaagcccttgacag

SEQ ID NO: 4488922 - DNA, 25 bp, Homo sapien
tgggtgagcagaagcccttgacaga

SEQ ID NO: 4488923 - DNA, 25 bp, Homo sapien
tgtggggttcctgggtgagcagaag

SEQ ID NO: 4488924 - DNA, 25 bp, Homo sapien
agatgcagaccagaagggtctccga

SEQ ID NO: 4488925 - DNA, 25 bp, Homo sapien
gatgcagaccagaagggtctccgaa

SEQ ID NO: 4488926 - DNA, 25 bp, Homo sapien
tgcagaccagaagggtctccgaaat

SEQ ID NO: 4488927 - DNA, 25 bp, Homo sapien
cagatgcagaccagaagggtctccg

SEQ ID NO: 4488928 - DNA, 25 bp, Homo sapien
tgagaaaacgatgtctgctggcggc

SEQ ID NO: 4488929 - DNA, 25 bp, Homo sapien
cactgagaaaacgatgtctgctggc

SEQ ID NO: 4488930 - DNA, 25 bp, Homo sapien
gagaaaacgatgtctgctggcggca

SEQ ID NO: 4488931 - DNA, 25 bp, Homo sapien
cttcactgagaaaacgatgtctgct

SEQ ID NO: 4488932 - DNA, 25 bp, Homo sapien
agcgagaaggcatgcctcagggcgg

SEQ ID NO: 4488933 - DNA, 25 bp, Homo sapien
cagcgagaaggcatgcctcagggcg

SEQ ID NO: 4488934 - DNA, 25 bp, Homo sapien
gcgagaaggcatgcctcagggcggg

SEQ ID NO: 4488935 - DNA, 25 bp, Homo sapien
ctccagctccacgtgacgtcctcaa

SEQ ID NO: 4488936 - DNA, 25 bp, Homo sapien
gcagctgcgactgtgccccctctac

SEQ ID NO: 4488937 - DNA, 25 bp, Homo sapien
agctgcgactgtgccccctctactg

SEQ ID NO: 4488938 - DNA, 25 bp, Homo sapien
cagctgcgactgtgccccctctact

SEQ ID NO: 4488939 - DNA, 25 bp, Homo sapien
gggtgcagctgcgactgtgccccct

SEQ ID NO: 4488940 - DNA, 25 bp, Homo sapien
tgcaggccaaggcccgggagagtgg

SEQ ID NO: 4488941 - DNA, 25 bp, Homo sapien
aaggcccgggagagtggggaagcag

SEQ ID NO: 4488942 - DNA, 25 bp, Homo sapien
ctgcaggccaaggcccgggagagtg

SEQ ID NO: 4488943 - DNA, 25 bp, Homo sapien
gcccgggagagtggggaagcaggac

SEQ ID NO: 4488944 - DNA, 25 bp, Homo sapien
ctgagggtcctggcttgaggcccat

SEQ ID NO: 4488945 - DNA, 25 bp, Homo sapien
ctctctccagcagaaggtgctgagg

SEQ ID NO: 4488946 - DNA, 25 bp, Homo sapien
ggtcctggcttgaggcccatcctcc

SEQ ID NO: 4488947 - DNA, 25 bp, Homo sapien
tgcagggccccatgccggggtggct

SEQ ID NO: 4488948 - DNA, 25 bp, Homo sapien
caggcctgagtttgtatgaggtcgg

SEQ ID NO: 4488949 - DNA, 25 bp, Homo sapien
caggacaaaaccgtcagtgtcttgc

SEQ ID NO: 4488950 - DNA, 25 bp, Homo sapien
gtgtcttgctcccatcgtgcaggta

SEQ ID NO: 4488951 - DNA, 25 bp, Homo sapien
aaccgtcagtgtcttgctcccatcg

SEQ ID NO: 4488952 - DNA, 25 bp, Homo sapien
tgggcacggtggccccctcccacat

SEQ ID NO: 4488953 - DNA, 25 bp, Homo sapien
tagggatgggcacggtggccccctc

SEQ ID NO: 4488954 - DNA, 25 bp, Homo sapien
ctgtagggatgggcacggtggcccc

SEQ ID NO: 4488955 - DNA, 25 bp, Homo sapien
gatgggcacggtggccccctcccac

SEQ ID NO: 4488956 - DNA, 25 bp, Homo sapien
ctgggctgcttaatggtgtacacca

SEQ ID NO: 4488957 - DNA, 25 bp, Homo sapien
tgggctgcttaatggtgtacaccag

SEQ ID NO: 4488958 - DNA, 25 bp, Homo sapien
gctgggctgcttaatggtgtacacc

SEQ ID NO: 4488959 - DNA, 25 bp, Homo sapien
ggctgcttaatggtgtacaccaggt

SEQ ID NO: 4488960 - DNA, 25 bp, Homo sapien
ctgtgtgagaacagcacgagcccac

SEQ ID NO: 4488961 - DNA, 25 bp, Homo sapien
cagctgggtctgcttgaagctgcgc

SEQ ID NO: 4488962 - DNA, 25 bp, Homo sapien
gcacgagcccaccatccagctgggt

SEQ ID NO: 4488963 - DNA, 25 bp, Homo sapien
catccagctgggtctgcttgaagct

SEQ ID NO: 4488964 - DNA, 25 bp, Homo sapien
tctggaggaagtatgttcaccgtca

SEQ ID NO: 4488965 - DNA, 25 bp, Homo sapien
ttcaccgtcagagaggccaaagtgg

SEQ ID NO: 4488966 - DNA, 25 bp, Homo sapien
tctgggccgtcactcagaagctaag

SEQ ID NO: 4488967 - DNA, 25 bp, Homo sapien
tgccctccagcgagtgaagcacttg

SEQ ID NO: 4488968 - DNA, 25 bp, Homo sapien
catcagcctttgtgatccaggccga

SEQ ID NO: 4488969 - DNA, 25 bp, Homo sapien
cagcctttgtgatccaggccgaggc

SEQ ID NO: 4488970 - DNA, 25 bp, Homo sapien
ggccatcagcctttgtgatccaggc

SEQ ID NO: 4488971 - DNA, 25 bp, Homo sapien
cagaggcaaaaggggccatcagcct

SEQ ID NO: 4488972 - DNA, 25 bp, Homo sapien
tctgaggctctggctgctgagtggc

SEQ ID NO: 4488973 - DNA, 25 bp, Homo sapien
gctctgaggctctggctgctgagtg

SEQ ID NO: 4488974 - DNA, 25 bp, Homo sapien
ctctggctgctgagtggctggacgg

SEQ ID NO: 4488975 - DNA, 25 bp, Homo sapien
tggctgctgagtggctggacggact

SEQ ID NO: 4488976 - DNA, 25 bp, Homo sapien
tctgcctgagtgaagttcaccaggt

SEQ ID NO: 4488977 - DNA, 25 bp, Homo sapien
cgcaccacatggtagagcaggagct

SEQ ID NO: 4488978 - DNA, 25 bp, Homo sapien
gtcctcccctgtgctgtcatgctgg

SEQ ID NO: 4488979 - DNA, 25 bp, Homo sapien
aagagccggcctagctggaggcccc

SEQ ID NO: 4488980 - DNA, 25 bp, Homo sapien
tataccgcttcgactggaagatcca

SEQ ID NO: 4488981 - DNA, 25 bp, Homo sapien
ctgggcccttctgggactgtgcgct

SEQ ID NO: 4488982 - DNA, 25 bp, Homo sapien
tggacttggagccccttggagtatg

SEQ ID NO: 4488983 - DNA, 25 bp, Homo sapien
ttttcacacgggcttctataccgct

SEQ ID NO: 4488984 - DNA, 25 bp, Homo sapien
gcatggtgacagtggtcctgttgat

SEQ ID NO: 4488985 - DNA, 25 bp, Homo sapien
gacagtggtcctgttgatgtcaccg

SEQ ID NO: 4488986 - DNA, 25 bp, Homo sapien
tgcatgtgcagcatctcgtcatgct

SEQ ID NO: 4488987 - DNA, 25 bp, Homo sapien
agcatctcgtcatgctgctgtgcct

SEQ ID NO: 4488988 - DNA, 25 bp, Homo sapien
ctgtgttcgtcagggatgctctgac

SEQ ID NO: 4488989 - DNA, 25 bp, Homo sapien
gtgttcgtcagggatgctctgacaa

SEQ ID NO: 4488990 - DNA, 25 bp, Homo sapien
tgtgttcgtcagggatgctctgaca

SEQ ID NO: 4488991 - DNA, 25 bp, Homo sapien
ctcagacctgaagtaggcgcccccg

SEQ ID NO: 4488992 - DNA, 25 bp, Homo sapien
cagacctgaagtaggcgcccccggg

SEQ ID NO: 4488993 - DNA, 25 bp, Homo sapien
tcagacctgaagtaggcgcccccgg

SEQ ID NO: 4488994 - DNA, 25 bp, Homo sapien
agtgctcctacagccgcatctgcgg

SEQ ID NO: 4488995 - DNA, 25 bp, Homo sapien
tacagccgcatctgcggttaacata

SEQ ID NO: 4488996 - DNA, 25 bp, Homo sapien
ctcctacagccgcatctgcggttaa

SEQ ID NO: 4488997 - DNA, 25 bp, Homo sapien
cgcatctgcggttaacatagcatcc

SEQ ID NO: 4488998 - DNA, 25 bp, Homo sapien
ctcgtgcctggcgtgctcagaggac

SEQ ID NO: 4488999 - DNA, 25 bp, Homo sapien
tcgtgcctggcgtgctcagaggacc

SEQ ID NO: 4489000 - DNA, 25 bp, Homo sapien
gtgcctggcgtgctcagaggaccac

SEQ ID NO: 4489001 - DNA, 25 bp, Homo sapien
tgcctggcgtgctcagaggaccacc

SEQ ID NO: 4489002 - DNA, 25 bp, Homo sapien
cctcaggggccactgatagtgattc

SEQ ID NO: 4489003 - DNA, 25 bp, Homo sapien
tgatgctcctcaggggccactgata

SEQ ID NO: 4489004 - DNA, 25 bp, Homo sapien
catggctgatgctcctcaggggcca

SEQ ID NO: 4489005 - DNA, 25 bp, Homo sapien
ctcctcaggggccactgatagtgat

SEQ ID NO: 4489006 - DNA, 25 bp, Homo sapien
gaccgtgactatcacccctaatctg

SEQ ID NO: 4489007 - DNA, 25 bp, Homo sapien
cgtgggaccgtgactatcaccccta

SEQ ID NO: 4489008 - DNA, 25 bp, Homo sapien
gaggacgtgggaccgtgactatcac

SEQ ID NO: 4489009 - DNA, 25 bp, Homo sapien
tgacagatagaggacgtgggaccgt

SEQ ID NO: 4489010 - DNA, 25 bp, Homo sapien
gcttcctgtaatgcaggactcccca

SEQ ID NO: 4489011 - DNA, 25 bp, Homo sapien
tcactgatagcgtggaggctgcacc

SEQ ID NO: 4489012 - DNA, 25 bp, Homo sapien
caccatcatctgagagccgggaagg

SEQ ID NO: 4489013 - DNA, 25 bp, Homo sapien
tgctgatgagcccactctaggagcc

SEQ ID NO: 4489014 - DNA, 25 bp, Homo sapien
tcaggttttgtgtcaagagagggat

SEQ ID NO: 4489015 - DNA, 25 bp, Homo sapien
gcaaaactggcctcaatggaactgt

SEQ ID NO: 4489016 - DNA, 25 bp, Homo sapien
gagggcccaaggagcttttgtgtat

SEQ ID NO: 4489017 - DNA, 25 bp, Homo sapien
catagaatggcaaaggaatgtttct

SEQ ID NO: 4489018 - DNA, 25 bp, Homo sapien
tagaaagcagtctggcattctagaa

SEQ ID NO: 4489019 - DNA, 25 bp, Homo sapien
ccagcttttatttatcagattggta

SEQ ID NO: 4489020 - DNA, 25 bp, Homo sapien
cattctagaaacttgcctaacctct

SEQ ID NO: 4489021 - DNA, 25 bp, Homo sapien
ttagaaagcgtgcaatgaaatgggc

SEQ ID NO: 4489022 - DNA, 25 bp, Homo sapien
aaaagtagtcagcttgtacaaagga

SEQ ID NO: 4489023 - DNA, 25 bp, Homo sapien
caggagcctaggactttttctttgg

SEQ ID NO: 4489024 - DNA, 25 bp, Homo sapien
aatgtcatattaagcacctcagtgg

SEQ ID NO: 4489025 - DNA, 25 bp, Homo sapien
gaaacaagccttgactcaggagcct

SEQ ID NO: 4489026 - DNA, 25 bp, Homo sapien
ccctaatgggcgtgaagtgatacct

SEQ ID NO: 4489027 - DNA, 25 bp, Homo sapien
gtgtttccatgtgcttgccaacaca

SEQ ID NO: 4489028 - DNA, 25 bp, Homo sapien
agttctggtgaagacatatgttttc

SEQ ID NO: 4489029 - DNA, 25 bp, Homo sapien
tgcttattggccgtttttccgtatc

SEQ ID NO: 4489030 - DNA, 25 bp, Homo sapien
taaaatgttcatgtaacttctgcat

SEQ ID NO: 4489031 - DNA, 25 bp, Homo sapien
tccaacataaaatgttcatgtaact

SEQ ID NO: 4489032 - DNA, 25 bp, Homo sapien
ctttccaacataaaatgttcatgta

SEQ ID NO: 4489033 - DNA, 25 bp, Homo sapien
cataaaatgttcatgtaacttctgc

SEQ ID NO: 4489034 - DNA, 25 bp, Homo sapien
aagctgatatatcatctccctgaag

SEQ ID NO: 4489035 - DNA, 25 bp, Homo sapien
agctgatatatcatctccctgaagt

SEQ ID NO: 4489036 - DNA, 25 bp, Homo sapien
ttatttttcaatcggaagatctttc

SEQ ID NO: 4489037 - DNA, 25 bp, Homo sapien
tgttgaaacttctgtgacggtgaag

SEQ ID NO: 4489038 - DNA, 25 bp, Homo sapien
gcctttatttttcaatcggaagatc

SEQ ID NO: 4489039 - DNA, 25 bp, Homo sapien
tcaatcggaagatctttcttcccca

SEQ ID NO: 4489040 - DNA, 25 bp, Homo sapien
caagcttggttttcagtgtggattt

SEQ ID NO: 4489041 - DNA, 25 bp, Homo sapien
taaaaatgttggttattgctgcctt

SEQ ID NO: 4489042 - DNA, 25 bp, Homo sapien
tcaagcttggttttcagtgtggatt

SEQ ID NO: 4489043 - DNA, 25 bp, Homo sapien
gtaaaaatgttggttattgctgcct

SEQ ID NO: 4489044 - DNA, 25 bp, Homo sapien
tttgaatctgatgggcttgatattg

SEQ ID NO: 4489045 - DNA, 25 bp, Homo sapien
ctatttgaatctgatgggcttgata

SEQ ID NO: 4489046 - DNA, 25 bp, Homo sapien
tatttgaatctgatgggcttgatat

SEQ ID NO: 4489047 - DNA, 25 bp, Homo sapien
tgaatctgatgggcttgatattgac

SEQ ID NO: 4489048 - DNA, 25 bp, Homo sapien
tctggagccttctggggtcattact

SEQ ID NO: 4489049 - DNA, 25 bp, Homo sapien
tggagaagcgttcctgggcttttct

SEQ ID NO: 4489050 - DNA, 25 bp, Homo sapien
tggtgggccttgtgttataaaacca

SEQ ID NO: 4489051 - DNA, 25 bp, Homo sapien
gagtgatttctcgtgctaagtgagt

SEQ ID NO: 4489052 - DNA, 25 bp, Homo sapien
tgatttctcgtgctaagtgagtcct

SEQ ID NO: 4489053 - DNA, 25 bp, Homo sapien
taatgatcctactgtgaattcaaga

SEQ ID NO: 4489054 - DNA, 25 bp, Homo sapien
tctccgctgtttctcgcgggcgcgg

SEQ ID NO: 4489055 - DNA, 25 bp, Homo sapien
tgcaaaggcaaaccggtatgtgaag

SEQ ID NO: 4489056 - DNA, 25 bp, Homo sapien
ctgaaactgcgaccgtcggaggcga

SEQ ID NO: 4489057 - DNA, 25 bp, Homo sapien
tgtagccggtgcgcggggtggctgg

SEQ ID NO: 4489058 - DNA, 25 bp, Homo sapien
gggaggactcgcagacgttactgcc

SEQ ID NO: 4489059 - DNA, 25 bp, Homo sapien
ttgtagccggtgcgcggggtggctg

SEQ ID NO: 4489060 - DNA, 25 bp, Homo sapien
gcagctctgccgtgcaatcccagct

SEQ ID NO: 4489061 - DNA, 25 bp, Homo sapien
tctgccgtgcaatcccagctcgcag

SEQ ID NO: 4489062 - DNA, 25 bp, Homo sapien
cgtgcaatcccagctcgcagccctt

SEQ ID NO: 4489063 - DNA, 25 bp, Homo sapien
tggagcgggatgggcagctctgccg

SEQ ID NO: 4489064 - DNA, 25 bp, Homo sapien
actcaggcacactaggagttctata

SEQ ID NO: 4489065 - DNA, 25 bp, Homo sapien
aatgtaagactcaggcacactagga

SEQ ID NO: 4489066 - DNA, 25 bp, Homo sapien
gatcttcacaatgtaagactcaggc

SEQ ID NO: 4489067 - DNA, 25 bp, Homo sapien
ttagagaaggatcttcacaatgtaa

SEQ ID NO: 4489068 - DNA, 25 bp, Homo sapien
tggctgcggccaatttcccctgttg

SEQ ID NO: 4489069 - DNA, 25 bp, Homo sapien
gctgcggccaatttcccctgttgtg

SEQ ID NO: 4489070 - DNA, 25 bp, Homo sapien
tgcggccaatttcccctgttgtgtt

SEQ ID NO: 4489071 - DNA, 25 bp, Homo sapien
cttggctgcggccaatttcccctgt

SEQ ID NO: 4489072 - DNA, 25 bp, Homo sapien
ggctcttcctctgccaatatgcttt

SEQ ID NO: 4489073 - DNA, 25 bp, Homo sapien
gttagctcctgctggaatgccaggg

SEQ ID NO: 4489074 - DNA, 25 bp, Homo sapien
ctgtgtcagggctactgccattgat

SEQ ID NO: 4489075 - DNA, 25 bp, Homo sapien
cctgttagctcctgctggaatgcca

SEQ ID NO: 4489076 - DNA, 25 bp, Homo sapien
ggtagtagaggatgcacggccttct

SEQ ID NO: 4489077 - DNA, 25 bp, Homo sapien
cagggtagtagaggatgcacggcct

SEQ ID NO: 4489078 - DNA, 25 bp, Homo sapien
ggatgcacggccttctccgtagata

SEQ ID NO: 4489079 - DNA, 25 bp, Homo sapien
gtagaggatgcacggccttctccgt

SEQ ID NO: 4489080 - DNA, 25 bp, Homo sapien
gcggagcttgaatccagggccactg

SEQ ID NO: 4489081 - DNA, 25 bp, Homo sapien
tattgcggagcttgaatccagggcc

SEQ ID NO: 4489082 - DNA, 25 bp, Homo sapien
gaattgatgttttcagtgagttgac

SEQ ID NO: 4489083 - DNA, 25 bp, Homo sapien
attgatgttttcagtgagttgactg

SEQ ID NO: 4489084 - DNA, 25 bp, Homo sapien
tcctcccaagcttctgtaccagatg

SEQ ID NO: 4489085 - DNA, 25 bp, Homo sapien
taggtggttggtctcatcttgtagc

SEQ ID NO: 4489086 - DNA, 25 bp, Homo sapien
cagcctggagctgtcttcccacact

SEQ ID NO: 4489087 - DNA, 25 bp, Homo sapien
gcctggagctgtcttcccacactct

SEQ ID NO: 4489088 - DNA, 25 bp, Homo sapien
cttccttaggtggttggtctcatct

SEQ ID NO: 4489089 - DNA, 25 bp, Homo sapien
cctcctgttcacgtagcctctcctc

SEQ ID NO: 4489090 - DNA, 25 bp, Homo sapien
tgccctggcagcttctcctgttcac

SEQ ID NO: 4489091 - DNA, 25 bp, Homo sapien
cctggcagcttctcctgttcacaca

SEQ ID NO: 4489092 - DNA, 25 bp, Homo sapien
cagcttctcctgttcacacagcctc

SEQ ID NO: 4489093 - DNA, 25 bp, Homo sapien
ggcagcttctcctgttcacacagcc

SEQ ID NO: 4489094 - DNA, 25 bp, Homo sapien
ttaccgaagcctctcctgctccagg

SEQ ID NO: 4489095 - DNA, 25 bp, Homo sapien
gagctcctccacctcgtccaggagc

SEQ ID NO: 4489096 - DNA, 25 bp, Homo sapien
gcctctcctgttctaacagcttctc

SEQ ID NO: 4489097 - DNA, 25 bp, Homo sapien
ctccacctcgtccaggagctcctcc

SEQ ID NO: 4489098 - DNA, 25 bp, Homo sapien
ctgctcgtacagggcttcccacccc

SEQ ID NO: 4489099 - DNA, 25 bp, Homo sapien
agcctctccagtcccgcagagtctc

SEQ ID NO: 4489100 - DNA, 25 bp, Homo sapien
ccgcagcctctccagtcccgcagag

SEQ ID NO: 4489101 - DNA, 25 bp, Homo sapien
tcgtacagggcttcccaccccagct

SEQ ID NO: 4489102 - DNA, 25 bp, Homo sapien
agctcctcgaagccgctgcgtggct

SEQ ID NO: 4489103 - DNA, 25 bp, Homo sapien
ccgacttctccagctcctttacttg

SEQ ID NO: 4489104 - DNA, 25 bp, Homo sapien
aactgcagtgtgctcttgttctcgt

SEQ ID NO: 4489105 - DNA, 25 bp, Homo sapien
ctgcagtgtgctcttgttctcgttg

SEQ ID NO: 4489106 - DNA, 25 bp, Homo sapien
gcagtgtgctcttgttctcgttgtt

SEQ ID NO: 4489107 - DNA, 25 bp, Homo sapien
ggtgcccgcctcccacatcttcttg

SEQ ID NO: 4489108 - DNA, 25 bp, Homo sapien
ctcccacatcttcttggatgggtcg

SEQ ID NO: 4489109 - DNA, 25 bp, Homo sapien
catcttcttggatgggtcggaggtt

SEQ ID NO: 4489110 - DNA, 25 bp, Homo sapien
cacatcttcttggatgggtcggagg

SEQ ID NO: 4489111 - DNA, 25 bp, Homo sapien
tccccaggctgcagctgcctgtggc

SEQ ID NO: 4489112 - DNA, 25 bp, Homo sapien
gctgcagctgcctgtggcctggcac

SEQ ID NO: 4489113 - DNA, 25 bp, Homo sapien
tgtccccaggctgcagctgcctgtg

SEQ ID NO: 4489114 - DNA, 25 bp, Homo sapien
cccaggctgcagctgcctgtggcct

SEQ ID NO: 4489115 - DNA, 25 bp, Homo sapien
ttgtccgcacatccaagctccttgt

SEQ ID NO: 4489116 - DNA, 25 bp, Homo sapien
aagaatggcatgcagcctctcctgc

SEQ ID NO: 4489117 - DNA, 25 bp, Homo sapien
cctgtaccaacagcttctccaccca

SEQ ID NO: 4489118 - DNA, 25 bp, Homo sapien
tttaattccttgacccgctcttaga

SEQ ID NO: 4489119 - DNA, 25 bp, Homo sapien
tccttgacccgctcttagatgatgg

SEQ ID NO: 4489120 - DNA, 25 bp, Homo sapien
ctgtcagggccgtactgtgctccat

SEQ ID NO: 4489121 - DNA, 25 bp, Homo sapien
tgctccataggtgctatggcagtcc

SEQ ID NO: 4489122 - DNA, 25 bp, Homo sapien
tgtcagggccgtactgtgctccata

SEQ ID NO: 4489123 - DNA, 25 bp, Homo sapien
catgcaccatatgctgacagaggtg

SEQ ID NO: 4489124 - DNA, 25 bp, Homo sapien
tcaacatgatcaccatcagcatgcc

SEQ ID NO: 4489125 - DNA, 25 bp, Homo sapien
ggagtcttggaacgggctccatgcc

SEQ ID NO: 4489126 - DNA, 25 bp, Homo sapien
agcagcatcagcgacatcaacatga

SEQ ID NO: 4489127 - DNA, 25 bp, Homo sapien
cgacatttgagcaaaggcccggaag

SEQ ID NO: 4489128 - DNA, 25 bp, Homo sapien
aatgagatacgtctcgcccagtcgc

SEQ ID NO: 4489129 - DNA, 25 bp, Homo sapien
gccctctgataaggcgacatttgag

SEQ ID NO: 4489130 - DNA, 25 bp, Homo sapien
caaaggcccggaagaaatgagatac

SEQ ID NO: 4489131 - DNA, 25 bp, Homo sapien
gcagttgccatacagtgcctttcca

SEQ ID NO: 4489132 - DNA, 25 bp, Homo sapien
attgacacggatgcctacacctagg

SEQ ID NO: 4489133 - DNA, 25 bp, Homo sapien
tacattccttgcaatactgatggtg

SEQ ID NO: 4489134 - DNA, 25 bp, Homo sapien
tgatgcgcaggtctcattggtttca

SEQ ID NO: 4489135 - DNA, 25 bp, Homo sapien
gtgcagcagattgagaacagggact

SEQ ID NO: 4489136 - DNA, 25 bp, Homo sapien
cttccagctctcttaataggtctcc

SEQ ID NO: 4489137 - DNA, 25 bp, Homo sapien
aataggtctccagagtgcctaaggg

SEQ ID NO: 4489138 - DNA, 25 bp, Homo sapien
tactgtgcagcagattgagaacagg

SEQ ID NO: 4489139 - DNA, 25 bp, Homo sapien
gagttcctgtagtggcaaggcccta

SEQ ID NO: 4489140 - DNA, 25 bp, Homo sapien
taaagcagggacttctggtagggaa

SEQ ID NO: 4489141 - DNA, 25 bp, Homo sapien
aaatactctaggtcctaaagcaggg

SEQ ID NO: 4489142 - DNA, 25 bp, Homo sapien
tggtcttacaggattcagacaaagg

SEQ ID NO: 4489143 - DNA, 25 bp, Homo sapien
gaaatctacagttgtgaaaagggcc

SEQ ID NO: 4489144 - DNA, 25 bp, Homo sapien
gaacttgaggctgacgtgaggctca

SEQ ID NO: 4489145 - DNA, 25 bp, Homo sapien
gaaaagggccttgtgtgtcactgga

SEQ ID NO: 4489146 - DNA, 25 bp, Homo sapien
tcacagtttgcagagggtaccaatc

SEQ ID NO: 4489147 - DNA, 25 bp, Homo sapien
cttggggtgtcccacccggcgtcat

SEQ ID NO: 4489148 - DNA, 25 bp, Homo sapien
gcttcccaatcctgggcaggtcacg

SEQ ID NO: 4489149 - DNA, 25 bp, Homo sapien
taaggtggagggctcaagcccctcg

SEQ ID NO: 4489150 - DNA, 25 bp, Homo sapien
tcctcagtgccggacgaggccaggt

SEQ ID NO: 4489151 - DNA, 25 bp, Homo sapien
acgtggcttcacaccttcgcttggc

SEQ ID NO: 4489152 - DNA, 25 bp, Homo sapien
ggcgtagaccccgtgctctgtggag

SEQ ID NO: 4489153 - DNA, 25 bp, Homo sapien
tggagagccccacgacggcggcggt

SEQ ID NO: 4489154 - DNA, 25 bp, Homo sapien
tgctctgtggagagccccacgacgg

SEQ ID NO: 4489155 - DNA, 25 bp, Homo sapien
cgtagaccccgtgctctgtggagag

SEQ ID NO: 4489156 - DNA, 25 bp, Homo sapien
tcgccctggagagatcactggaaga

SEQ ID NO: 4489157 - DNA, 25 bp, Homo sapien
tacagttccgaccaaggatgccagg

SEQ ID NO: 4489158 - DNA, 25 bp, Homo sapien
gtcacttaggtgatggcgcgctcag

SEQ ID NO: 4489159 - DNA, 25 bp, Homo sapien
aaaatagtgcccacgtgcgtgcgcg

SEQ ID NO: 4489160 - DNA, 25 bp, Homo sapien
tctccggagaactccggtccaaaga

SEQ ID NO: 4489161 - DNA, 25 bp, Homo sapien
aaagaggaccagtgatgtctttgga

SEQ ID NO: 4489162 - DNA, 25 bp, Homo sapien
gtccaaagaggaccagtgatgtctt

SEQ ID NO: 4489163 - DNA, 25 bp, Homo sapien
tcaggagcgccggaagcggtttctc

SEQ ID NO: 4489164 - DNA, 25 bp, Homo sapien
catctccgactctgcgtttgcctgg

SEQ ID NO: 4489165 - DNA, 25 bp, Homo sapien
ttccctccggcggtatcaggtcgca

SEQ ID NO: 4489166 - DNA, 25 bp, Homo sapien
tgcgccaggtgccctaggacgcctg

SEQ ID NO: 4489167 - DNA, 25 bp, Homo sapien
tttgcttgatcttccgcctggaatg

SEQ ID NO: 4489168 - DNA, 25 bp, Homo sapien
ccttgggcactattctgggtttcag

SEQ ID NO: 4489169 - DNA, 25 bp, Homo sapien
tggttgacagttttgaaatatgaca

SEQ ID NO: 4489170 - DNA, 25 bp, Homo sapien
gagagagattttaggcagcagaagt

SEQ ID NO: 4489171 - DNA, 25 bp, Homo sapien
gcagaagtttctgttccaagtctct

SEQ ID NO: 4489172 - DNA, 25 bp, Homo sapien
ctctgaaaccagaagactgccttgg

SEQ ID NO: 4489173 - DNA, 25 bp, Homo sapien
tttgctctcacacttttagctggga

SEQ ID NO: 4489174 - DNA, 25 bp, Homo sapien
ttggtttgagtctttgctctcacac

SEQ ID NO: 4489175 - DNA, 25 bp, Homo sapien
agctgggagtcttttggcaagttac

SEQ ID NO: 4489176 - DNA, 25 bp, Homo sapien
tacaaaattcatccacgggctgagg

SEQ ID NO: 4489177 - DNA, 25 bp, Homo sapien
gagattctatgcctccatgcgggtg

SEQ ID NO: 4489178 - DNA, 25 bp, Homo sapien
cagtttacgccctcactagcagtga

SEQ ID NO: 4489179 - DNA, 25 bp, Homo sapien
taagatttgtgtactgtggccgggc

SEQ ID NO: 4489180 - DNA, 25 bp, Homo sapien
aagtgggcgtcatcgccaaggcgct

SEQ ID NO: 4489181 - DNA, 25 bp, Homo sapien
caaggcgctggtgcgcctgctgcgc

SEQ ID NO: 4489182 - DNA, 25 bp, Homo sapien
tgctgcgcaacaccaaacccctgct

SEQ ID NO: 4489183 - DNA, 25 bp, Homo sapien
cctggcgcccaaggcggaagtgggc

SEQ ID NO: 4489184 - DNA, 25 bp, Homo sapien
agttctgtaggttgctgggtagaca

SEQ ID NO: 4489185 - DNA, 25 bp, Homo sapien
tagttcaaatttctgtgagagagat

SEQ ID NO: 4489186 - DNA, 25 bp, Homo sapien
tacagggatgagctaatactcctag

SEQ ID NO: 4489187 - DNA, 25 bp, Homo sapien
cctagcctggatacttttagttcaa

SEQ ID NO: 4489188 - DNA, 25 bp, Homo sapien
cttggaaacatactggaggcagggc

SEQ ID NO: 4489189 - DNA, 25 bp, Homo sapien
tttctacaagtacggccggatccgc

SEQ ID NO: 4489190 - DNA, 25 bp, Homo sapien
tgagccttccaacgtgcgcgagaag

SEQ ID NO: 4489191 - DNA, 25 bp, Homo sapien
ccatctatggagtctctgggaccct

SEQ ID NO: 4489192 - DNA, 25 bp, Homo sapien
caagtattccatgtggatcagcagc

SEQ ID NO: 4489193 - DNA, 25 bp, Homo sapien
tgcaaggacctgtacaccaatgtgg

SEQ ID NO: 4489194 - DNA, 25 bp, Homo sapien
tgcatccaggagaccatcttgacct

SEQ ID NO: 4489195 - DNA, 25 bp, Homo sapien
gcagcattgccatgcacccaagtat

SEQ ID NO: 4489196 - DNA, 25 bp, Homo sapien
ggctgggacataactctcaaaggga

SEQ ID NO: 4489197 - DNA, 25 bp, Homo sapien
gctctgtgacaacttactgattata

SEQ ID NO: 4489198 - DNA, 25 bp, Homo sapien
gacccagttccctcagctatataat

SEQ ID NO: 4489199 - DNA, 25 bp, Homo sapien
taatgaggactaagtcaacctctgc

SEQ ID NO: 4489200 - DNA, 25 bp, Homo sapien
taaaggagtcgccctagagtttgca

SEQ ID NO: 4489201 - DNA, 25 bp, Homo sapien
cataaccatacatatataagcacac

SEQ ID NO: 4489202 - DNA, 25 bp, Homo sapien
tgtggatcctagtttctgacctgtg

SEQ ID NO: 4489203 - DNA, 25 bp, Homo sapien
taacactataccatttcttgaacag

SEQ ID NO: 4489204 - DNA, 25 bp, Homo sapien
aatcgcgttggactcagggaagacc

SEQ ID NO: 4489205 - DNA, 25 bp, Homo sapien
ttcgcgcaggctcagaatcgctcag

SEQ ID NO: 4489206 - DNA, 25 bp, Homo sapien
tttcctgcgcgtgagaggaagtccc

SEQ ID NO: 4489207 - DNA, 25 bp, Homo sapien
tgacattactggaagcgccgaggag

SEQ ID NO: 4489208 - DNA, 25 bp, Homo sapien
aaaagatacacaccgcgacagatgc

SEQ ID NO: 4489209 - DNA, 25 bp, Homo sapien
ctctgaaacctgatacgcctgcctg

SEQ ID NO: 4489210 - DNA, 25 bp, Homo sapien
tgctcggtggccagagacagtactc

SEQ ID NO: 4489211 - DNA, 25 bp, Homo sapien
aatgtaagcgcgatgaatgaggccc

SEQ ID NO: 4489212 - DNA, 25 bp, Homo sapien
gaatcagttttctagggtgagcaca

SEQ ID NO: 4489213 - DNA, 25 bp, Homo sapien
catccggttaaatgagctcctcagt

SEQ ID NO: 4489214 - DNA, 25 bp, Homo sapien
ccagcaggcgtcaccgattcagaat

SEQ ID NO: 4489215 - DNA, 25 bp, Homo sapien
caaatgaccgccagcagattcagga

SEQ ID NO: 4489216 - DNA, 25 bp, Homo sapien
tcacatgctactggctactggcagg

SEQ ID NO: 4489217 - DNA, 25 bp, Homo sapien
aaatttggttcatatgccctggagg

SEQ ID NO: 4489218 - DNA, 25 bp, Homo sapien
tagcccatgattctctagcagctgg

SEQ ID NO: 4489219 - DNA, 25 bp, Homo sapien
ggtagtcttctcttcttagcccatg

SEQ ID NO: 4489220 - DNA, 25 bp, Homo sapien
gctccacttgactataagcaaattg

SEQ ID NO: 4489221 - DNA, 25 bp, Homo sapien
gccttcataatctctgaatgatctg

SEQ ID NO: 4489222 - DNA, 25 bp, Homo sapien
cagtggctatactgcaatcattgac

SEQ ID NO: 4489223 - DNA, 25 bp, Homo sapien
gggtttgtgccttcataatctctga

SEQ ID NO: 4489224 - DNA, 25 bp, Homo sapien
tcctggaaggagtatgactatgacc

SEQ ID NO: 4489225 - DNA, 25 bp, Homo sapien
cattcactgggaaagtacacagcca

SEQ ID NO: 4489226 - DNA, 25 bp, Homo sapien
tcccaggagaggttaagtgccacac

SEQ ID NO: 4489227 - DNA, 25 bp, Homo sapien
cagagtcctaggcacccagaatgga

SEQ ID NO: 4489228 - DNA, 25 bp, Homo sapien
aaagcagagtcagcttgatttcaag

SEQ ID NO: 4489229 - DNA, 25 bp, Homo sapien
ggactctattttcttagtctccaga

SEQ ID NO: 4489230 - DNA, 25 bp, Homo sapien
caagacctgttctatctaccttttc

SEQ ID NO: 4489231 - DNA, 25 bp, Homo sapien
ctatctaccttttcatttaggaggc

SEQ ID NO: 4489232 - DNA, 25 bp, Homo sapien
ggcacccttacaagtcagaattgga

SEQ ID NO: 4489233 - DNA, 25 bp, Homo sapien
gactacattggtcttgatgcaaggc

SEQ ID NO: 4489234 - DNA, 25 bp, Homo sapien
gatgcaaggcggttcagctaccaga

SEQ ID NO: 4489235 - DNA, 25 bp, Homo sapien
tacagtattcaggatttaaggcacc

SEQ ID NO: 4489236 - DNA, 25 bp, Homo sapien
tcattcacataagctgtggcctccc

SEQ ID NO: 4489237 - DNA, 25 bp, Homo sapien
aagtcattcacataagctgtggcct

SEQ ID NO: 4489238 - DNA, 25 bp, Homo sapien
attcacataagctgtggcctcccca

SEQ ID NO: 4489239 - DNA, 25 bp, Homo sapien
gaaagtcattcacataagctgtggc

SEQ ID NO: 4489240 - DNA, 25 bp, Homo sapien
aaaaattagaccactgtagccacaa

SEQ ID NO: 4489241 - DNA, 25 bp, Homo sapien
tgtagccacaatccctaacactgga

SEQ ID NO: 4489242 - DNA, 25 bp, Homo sapien
cacaatccctaacactggacagtta

SEQ ID NO: 4489243 - DNA, 25 bp, Homo sapien
tagaccactgtagccacaatcccta

SEQ ID NO: 4489244 - DNA, 25 bp, Homo sapien
ggccatgttcacctgcaacctgctg

SEQ ID NO: 4489245 - DNA, 25 bp, Homo sapien
ctcaaggccatgttcacctgcaacc

SEQ ID NO: 4489246 - DNA, 25 bp, Homo sapien
tcaaggccatgttcacctgcaacct

SEQ ID NO: 4489247 - DNA, 25 bp, Homo sapien
aaggccatgttcacctgcaacctgc

SEQ ID NO: 4489248 - DNA, 25 bp, Homo sapien
aactactataaacaatctactgaaa

SEQ ID NO: 4489249 - DNA, 25 bp, Homo sapien
actactataaacaatctactgaaac

SEQ ID NO: 4489250 - DNA, 25 bp, Homo sapien
gaaacatctttctcatttatttaga

SEQ ID NO: 4489251 - DNA, 25 bp, Homo sapien
ttgaaacatctttctcatttattta

SEQ ID NO: 4489252 - DNA, 25 bp, Homo sapien
catctttctcatttatttagaagaa

SEQ ID NO: 4489253 - DNA, 25 bp, Homo sapien
aacatctttctcatttatttagaag

SEQ ID NO: 4489254 - DNA, 25 bp, Homo sapien
tcaagcatcacaattattcagcata

SEQ ID NO: 4489255 - DNA, 25 bp, Homo sapien
ccacttaaagcagattagcaacttc

SEQ ID NO: 4489256 - DNA, 25 bp, Homo sapien
caagcatcacaattattcagcataa

SEQ ID NO: 4489257 - DNA, 25 bp, Homo sapien
aaatccacttaaagcagattagcaa

SEQ ID NO: 4489258 - DNA, 25 bp, Homo sapien
tctcaggatctcagggctagtaggg

SEQ ID NO: 4489259 - DNA, 25 bp, Homo sapien
gacccagactgtccagttgcagaaa

SEQ ID NO: 4489260 - DNA, 25 bp, Homo sapien
ctttggaatgatggtgtgcagtcac

SEQ ID NO: 4489261 - DNA, 25 bp, Homo sapien
caatcctgattaaattagcactggc

SEQ ID NO: 4489262 - DNA, 25 bp, Homo sapien
tcacgggacagtccgagccaaatca

SEQ ID NO: 4489263 - DNA, 25 bp, Homo sapien
ctcgcaccgcctgtcacgggacagt

SEQ ID NO: 4489264 - DNA, 25 bp, Homo sapien
tgtcacgggacagtccgagccaaat

SEQ ID NO: 4489265 - DNA, 25 bp, Homo sapien
gcctgtcacgggacagtccgagcca

SEQ ID NO: 4489266 - DNA, 25 bp, Homo sapien
ctctcgggctcggcgaagaggccct

SEQ ID NO: 4489267 - DNA, 25 bp, Homo sapien
ggctcggcgaagaggccctcccgga

SEQ ID NO: 4489268 - DNA, 25 bp, Homo sapien
aagcgcagccggtgcctctcgggct

SEQ ID NO: 4489269 - DNA, 25 bp, Homo sapien
gccggtgcctctcgggctcggcgaa

SEQ ID NO: 4489270 - DNA, 25 bp, Homo sapien
gggagacggcggcctcaggcttggg

SEQ ID NO: 4489271 - DNA, 25 bp, Homo sapien
cgccgctgctgcgcggtacggtcgt

SEQ ID NO: 4489272 - DNA, 25 bp, Homo sapien
ggagacggcggcctcaggcttgggc

SEQ ID NO: 4489273 - DNA, 25 bp, Homo sapien
acagcgccgccaactgccggtgcgc

SEQ ID NO: 4489274 - DNA, 25 bp, Homo sapien
tcggccgccgcgcccagatagcgtt

SEQ ID NO: 4489275 - DNA, 25 bp, Homo sapien
acccgcgcgcgtcggccacagcagc

SEQ ID NO: 4489276 - DNA, 25 bp, Homo sapien
ggaagagtgcgtcgcgcactgtggc

SEQ ID NO: 4489277 - DNA, 25 bp, Homo sapien
ccagattaatattcccatgaagccc

SEQ ID NO: 4489278 - DNA, 25 bp, Homo sapien
aatctaggtggactcacttggcagg

SEQ ID NO: 4489279 - DNA, 25 bp, Homo sapien
tctccaagtacttcagcatgttgat

SEQ ID NO: 4489280 - DNA, 25 bp, Homo sapien
tagcagtcacctcatttacagagcc

SEQ ID NO: 4489281 - DNA, 25 bp, Homo sapien
aaatatcaagcttacataaagttgc

SEQ ID NO: 4489282 - DNA, 25 bp, Homo sapien
aaaatatcaagcttacataaagttg

SEQ ID NO: 4489283 - DNA, 25 bp, Homo sapien
gcctgaactaagacgtgtactgcta

SEQ ID NO: 4489284 - DNA, 25 bp, Homo sapien
tatgtacaagttagccgacaaggaa

SEQ ID NO: 4489285 - DNA, 25 bp, Homo sapien
aaactggccctcacaagacaatgga

SEQ ID NO: 4489286 - DNA, 25 bp, Homo sapien
tgataatgtggacaaaccggaaccc

SEQ ID NO: 4489287 - DNA, 25 bp, Homo sapien
gtatgaataaggctctaagctgagc

SEQ ID NO: 4489288 - DNA, 25 bp, Homo sapien
aataaggctctaagctgagcaccac

SEQ ID NO: 4489289 - DNA, 25 bp, Homo sapien
tgcgtatgaataaggctctaagctg

SEQ ID NO: 4489290 - DNA, 25 bp, Homo sapien
tgaataaggctctaagctgagcacc

SEQ ID NO: 4489291 - DNA, 25 bp, Homo sapien
acccttctaggacctaggtcatcct

SEQ ID NO: 4489292 - DNA, 25 bp, Homo sapien
actacccttctaggacctaggtcat

SEQ ID NO: 4489293 - DNA, 25 bp, Homo sapien
tacccttctaggacctaggtcatcc

SEQ ID NO: 4489294 - DNA, 25 bp, Homo sapien
ccttctaggacctaggtcatcctca

SEQ ID NO: 4489295 - DNA, 25 bp, Homo sapien
tccaacctgggaattgctgtggccc

SEQ ID NO: 4489296 - DNA, 25 bp, Homo sapien
ccaacctgggaattgctgtggccca

SEQ ID NO: 4489297 - DNA, 25 bp, Homo sapien
cagaagatggtgttggaataagcga

SEQ ID NO: 4489298 - DNA, 25 bp, Homo sapien
ggtgttggaataagcgaagaaaaga

SEQ ID NO: 4489299 - DNA, 25 bp, Homo sapien
gatggtgttggaataagcgaagaaa

SEQ ID NO: 4489300 - DNA, 25 bp, Homo sapien
cgaagaaaagaagctctttaacgat

SEQ ID NO: 4489301 - DNA, 25 bp, Homo sapien
agtgactatgcagtgaagtatctct

SEQ ID NO: 4489302 - DNA, 25 bp, Homo sapien
caactgtgtagtaagcagtatttct

SEQ ID NO: 4489303 - DNA, 25 bp, Homo sapien
ccaactgtgtagtaagcagtatttc

SEQ ID NO: 4489304 - DNA, 25 bp, Homo sapien
aactgtgtagtaagcagtatttctt

SEQ ID NO: 4489305 - DNA, 25 bp, Homo sapien
tgcaaagaccactattctccccaaa

SEQ ID NO: 4489306 - DNA, 25 bp, Homo sapien
aaattgcaaagaccactattctccc

SEQ ID NO: 4489307 - DNA, 25 bp, Homo sapien
gttttgaacttgattctaaatttca

SEQ ID NO: 4489308 - DNA, 25 bp, Homo sapien
caaagaccactattctccccaaagt

SEQ ID NO: 4489309 - DNA, 25 bp, Homo sapien
tttcacatggatcgtaatagacaac

SEQ ID NO: 4489310 - DNA, 25 bp, Homo sapien
cacatggatcgtaatagacaacttc

SEQ ID NO: 4489311 - DNA, 25 bp, Homo sapien
catggatcgtaatagacaacttcat

SEQ ID NO: 4489312 - DNA, 25 bp, Homo sapien
ttcacatggatcgtaatagacaact

SEQ ID NO: 4489313 - DNA, 25 bp, Homo sapien
ataggtgcgcaccatagagatgagg

SEQ ID NO: 4489314 - DNA, 25 bp, Homo sapien
taggtgcgcaccatagagatgaggt

SEQ ID NO: 4489315 - DNA, 25 bp, Homo sapien
aggtgcgcaccatagagatgaggtc

SEQ ID NO: 4489316 - DNA, 25 bp, Homo sapien
tacgggtgccgcactagcctatcat

SEQ ID NO: 4489317 - DNA, 25 bp, Homo sapien
cacatggctacctaagtggccaagc

SEQ ID NO: 4489318 - DNA, 25 bp, Homo sapien
gaacccaagttgatagctcacctca

SEQ ID NO: 4489319 - DNA, 25 bp, Homo sapien
tcttgagagtgaaggttaatgctcc

SEQ ID NO: 4489320 - DNA, 25 bp, Homo sapien
gcctgttgcaatctgaaccgatgat

SEQ ID NO: 4489321 - DNA, 25 bp, Homo sapien
ctgtgatgctgacgagagtatctta

SEQ ID NO: 4489322 - DNA, 25 bp, Homo sapien
aatctgaaccgatgattttctttgc

SEQ ID NO: 4489323 - DNA, 25 bp, Homo sapien
gctgacgagagtatcttatgctttc

SEQ ID NO: 4489324 - DNA, 25 bp, Homo sapien
atgatctcaatcgttggagtgtttt

SEQ ID NO: 4489325 - DNA, 25 bp, Homo sapien
tttttgacgttcttggttgatccat

SEQ ID NO: 4489326 - DNA, 25 bp, Homo sapien
caatcgttggagtgttttttgacgt

SEQ ID NO: 4489327 - DNA, 25 bp, Homo sapien
tgctcctcttcttttatcttgtctc

SEQ ID NO: 4489328 - DNA, 25 bp, Homo sapien
tccctgccaatctaaaccaccagtg

SEQ ID NO: 4489329 - DNA, 25 bp, Homo sapien
ggcactttcactacacttatatcac

SEQ ID NO: 4489330 - DNA, 25 bp, Homo sapien
ggaaatgccagctaaagtcaaggga

SEQ ID NO: 4489331 - DNA, 25 bp, Homo sapien
gcaggaacccaagcgtgttgtgatg

SEQ ID NO: 4489332 - DNA, 25 bp, Homo sapien
tttcggacagattgagctaggcgtt

SEQ ID NO: 4489333 - DNA, 25 bp, Homo sapien
gaggtgtttcggacagattgagcta

SEQ ID NO: 4489334 - DNA, 25 bp, Homo sapien
ttctgagccagaggtgtttcggaca

SEQ ID NO: 4489335 - DNA, 25 bp, Homo sapien
ggagccacaggttctgagccagagg

SEQ ID NO: 4489336 - DNA, 25 bp, Homo sapien
cagcttccgataggggaacacctct

SEQ ID NO: 4489337 - DNA, 25 bp, Homo sapien
ctgacaccgcgtgggaagctggcaa

SEQ ID NO: 4489338 - DNA, 25 bp, Homo sapien
tctagttttcctagaggacgggtga

SEQ ID NO: 4489339 - DNA, 25 bp, Homo sapien
cctagaggacgggtgaattactgac

SEQ ID NO: 4489340 - DNA, 25 bp, Homo sapien
gtttgatcaccaactggaacaaaaa

SEQ ID NO: 4489341 - DNA, 25 bp, Homo sapien
cctggacagggatatttccatgaca

SEQ ID NO: 4489342 - DNA, 25 bp, Homo sapien
ggacagggatatttccatgacagtt

SEQ ID NO: 4489343 - DNA, 25 bp, Homo sapien
aaaacctggacagggatatttccat

SEQ ID NO: 4489344 - DNA, 25 bp, Homo sapien
aggtggtggcagtgacaattcctca

SEQ ID NO: 4489345 - DNA, 25 bp, Homo sapien
ggtggtggcagtgacaattcctcac

SEQ ID NO: 4489346 - DNA, 25 bp, Homo sapien
gattcgcacactagaggacgtggct

SEQ ID NO: 4489347 - DNA, 25 bp, Homo sapien
ggtcgctcagcaggtgattcgcaca

SEQ ID NO: 4489348 - DNA, 25 bp, Homo sapien
cactagaggacgtggctggtcatct

SEQ ID NO: 4489349 - DNA, 25 bp, Homo sapien
tctttcactggagcccggaagccta

SEQ ID NO: 4489350 - DNA, 25 bp, Homo sapien
aaggaggccaacacttcatccatag

SEQ ID NO: 4489351 - DNA, 25 bp, Homo sapien
ccttaaggaggccaacacttcatcc

SEQ ID NO: 4489352 - DNA, 25 bp, Homo sapien
atgccttaaggaggccaacacttca

SEQ ID NO: 4489353 - DNA, 25 bp, Homo sapien
gaggccaacacttcatccatagatc

SEQ ID NO: 4489354 - DNA, 25 bp, Homo sapien
tctctggagcgcagccttgatgctc

SEQ ID NO: 4489355 - DNA, 25 bp, Homo sapien
cagcagacaccctcttgattctctg

SEQ ID NO: 4489356 - DNA, 25 bp, Homo sapien
tcaaggtcactggtgcgtctgttgc

SEQ ID NO: 4489357 - DNA, 25 bp, Homo sapien
cagaatgtgctcattgattgaggcg

SEQ ID NO: 4489358 - DNA, 25 bp, Homo sapien
ggcccatctatcagcaccctgttag

SEQ ID NO: 4489359 - DNA, 25 bp, Homo sapien
tcttccggggtgttatgtggcccat

SEQ ID NO: 4489360 - DNA, 25 bp, Homo sapien
gtatgcttttcgataggtctaagac

SEQ ID NO: 4489361 - DNA, 25 bp, Homo sapien
gcaggtgcctttgtcaaacttgagc

SEQ ID NO: 4489362 - DNA, 25 bp, Homo sapien
gctggtgtgtgaaactctcatctct

SEQ ID NO: 4489363 - DNA, 25 bp, Homo sapien
cataaaagctccagcatcagccagg

SEQ ID NO: 4489364 - DNA, 25 bp, Homo sapien
cgatgggtcttgacatcccacctat

SEQ ID NO: 4489365 - DNA, 25 bp, Homo sapien
taggccagcgacacttccgatgggt

SEQ ID NO: 4489366 - DNA, 25 bp, Homo sapien
gaatcagggaacaattctagatcag

SEQ ID NO: 4489367 - DNA, 25 bp, Homo sapien
cagaatcagggaacaattctagatc

SEQ ID NO: 4489368 - DNA, 25 bp, Homo sapien
tcagggaacaattctagatcagcca

SEQ ID NO: 4489369 - DNA, 25 bp, Homo sapien
atcagggaacaattctagatcagcc

SEQ ID NO: 4489370 - DNA, 25 bp, Homo sapien
cagtcagtagtctaatagtactgct

SEQ ID NO: 4489371 - DNA, 25 bp, Homo sapien
cattcaagcctacaaatctgagaaa

SEQ ID NO: 4489372 - DNA, 25 bp, Homo sapien
aggccacagtcagtagtctaatagt

SEQ ID NO: 4489373 - DNA, 25 bp, Homo sapien
tcagtagtctaatagtactgcttac

SEQ ID NO: 4489374 - DNA, 25 bp, Homo sapien
tagttattatgagtttatgtagtgc

SEQ ID NO: 4489375 - DNA, 25 bp, Homo sapien
gagtgatgctaatgcattgcaaata

SEQ ID NO: 4489376 - DNA, 25 bp, Homo sapien
gtatgttttcattaccccgtgagtg

SEQ ID NO: 4489377 - DNA, 25 bp, Homo sapien
tttcagcccacccggacacggaaga

SEQ ID NO: 4489378 - DNA, 25 bp, Homo sapien
tggacctgtctctgggatctggacc

SEQ ID NO: 4489379 - DNA, 25 bp, Homo sapien
tattttagcctgattaagctcgctg

SEQ ID NO: 4489380 - DNA, 25 bp, Homo sapien
tgtttggcagcccttagaaagcaaa

SEQ ID NO: 4489381 - DNA, 25 bp, Homo sapien
taggaagtttgatgctgagcctggc

SEQ ID NO: 4489382 - DNA, 25 bp, Homo sapien
cataggattggctgtactaggagca

SEQ ID NO: 4489383 - DNA, 25 bp, Homo sapien
tgaagagagaatggacgaacagatg

SEQ ID NO: 4489384 - DNA, 25 bp, Homo sapien
atgccagtcctcctttgtaccagac

SEQ ID NO: 4489385 - DNA, 25 bp, Homo sapien
tagctcaatgcttttcactccagga

SEQ ID NO: 4489386 - DNA, 25 bp, Homo sapien
ttaaccaataacctcctcattctgg

SEQ ID NO: 4489387 - DNA, 25 bp, Homo sapien
ggctgccgttaccacctgcctgatt

SEQ ID NO: 4489388 - DNA, 25 bp, Homo sapien
tggctgccgttaccacctgcctgat

SEQ ID NO: 4489389 - DNA, 25 bp, Homo sapien
aacctcctcattctggctgccgtta

SEQ ID NO: 4489390 - DNA, 25 bp, Homo sapien
gctaatgttaagacatctctgcatt

SEQ ID NO: 4489391 - DNA, 25 bp, Homo sapien
tatgattggttggtccatagtagat

SEQ ID NO: 4489392 - DNA, 25 bp, Homo sapien
tatacattcaggttatgccctctat

SEQ ID NO: 4489393 - DNA, 25 bp, Homo sapien
gcatttctacaagaatctgatgtag

SEQ ID NO: 4489394 - DNA, 25 bp, Homo sapien
gcctatcttttctagtataggtgat

SEQ ID NO: 4489395 - DNA, 25 bp, Homo sapien
aatctatcgcttttatgactttaaa

SEQ ID NO: 4489396 - DNA, 25 bp, Homo sapien
tttagtgtggttactattgtaaatg

SEQ ID NO: 4489397 - DNA, 25 bp, Homo sapien
ttttatgtttctcagcctatctttt

SEQ ID NO: 4489398 - DNA, 25 bp, Homo sapien
tgtttggatcgccatagctttggac

SEQ ID NO: 4489399 - DNA, 25 bp, Homo sapien
gataagcaccctggccttgagtgtg

SEQ ID NO: 4489400 - DNA, 25 bp, Homo sapien
ccttctgttgggtgccaggataagc

SEQ ID NO: 4489401 - DNA, 25 bp, Homo sapien
tagcactggtaccacattgtttgga

SEQ ID NO: 4489402 - DNA, 25 bp, Homo sapien
taagttgcacgtatggctttttaaa

SEQ ID NO: 4489403 - DNA, 25 bp, Homo sapien
tatgccgtcatgcttatgcaggtct

SEQ ID NO: 4489404 - DNA, 25 bp, Homo sapien
tttttaatggttgctacctatgccg

SEQ ID NO: 4489405 - DNA, 25 bp, Homo sapien
aacaccttttagtcaagtttatctg

SEQ ID NO: 4489406 - DNA, 25 bp, Homo sapien
ccacgaagactctgtttccttagaa

SEQ ID NO: 4489407 - DNA, 25 bp, Homo sapien
gaaattagggtgagtcaggaagcct

SEQ ID NO: 4489408 - DNA, 25 bp, Homo sapien
ggcactctgagcatccacccttgtg

SEQ ID NO: 4489409 - DNA, 25 bp, Homo sapien
agaggcctgctaactggtccccttc

SEQ ID NO: 4489410 - DNA, 25 bp, Homo sapien
aaatcctgccgtcttaacacataag

SEQ ID NO: 4489411 - DNA, 25 bp, Homo sapien
tgtataataattctgccgacggcct

SEQ ID NO: 4489412 - DNA, 25 bp, Homo sapien
tcagtgtggacggagccaaggtacc

SEQ ID NO: 4489413 - DNA, 25 bp, Homo sapien
gcggtcaccgtttcctacttctatg

SEQ ID NO: 4489414 - DNA, 25 bp, Homo sapien
agtaagaaaagtggatgttctcctt

SEQ ID NO: 4489415 - DNA, 25 bp, Homo sapien
gtaagaaaagtggatgttctccttg

SEQ ID NO: 4489416 - DNA, 25 bp, Homo sapien
aagtaagaaaagtggatgttctcct

SEQ ID NO: 4489417 - DNA, 25 bp, Homo sapien
cacgggggcggatcttccccgcttg

SEQ ID NO: 4489418 - DNA, 25 bp, Homo sapien
tgccatgtccttgggtgcgaaggaa

SEQ ID NO: 4489419 - DNA, 25 bp, Homo sapien
gatcttccccgcttgcaccttcctg

SEQ ID NO: 4489420 - DNA, 25 bp, Homo sapien
tgggtgcgaaggaaagggctgttcc

SEQ ID NO: 4489421 - DNA, 25 bp, Homo sapien
tgtctggtataaatgggagagacct

SEQ ID NO: 4489422 - DNA, 25 bp, Homo sapien
gtataaatgggagagacctgagctt

SEQ ID NO: 4489423 - DNA, 25 bp, Homo sapien
gggctattggtgtaatctaggtcag

SEQ ID NO: 4489424 - DNA, 25 bp, Homo sapien
caatctttttagtgtcacggacaca

SEQ ID NO: 4489425 - DNA, 25 bp, Homo sapien
tgtccttgatcctgtatggacgagc

SEQ ID NO: 4489426 - DNA, 25 bp, Homo sapien
tgtatggacgagcaacccgttgtga

SEQ ID NO: 4489427 - DNA, 25 bp, Homo sapien
cccgttgtgacttccctgagtaagg

SEQ ID NO: 4489428 - DNA, 25 bp, Homo sapien
gagcaacccgttgtgacttccctga

SEQ ID NO: 4489429 - DNA, 25 bp, Homo sapien
ctgtttgtgctgggcgtctggccaa

SEQ ID NO: 4489430 - DNA, 25 bp, Homo sapien
gtttgtgctgggcgtctggccaaca

SEQ ID NO: 4489431 - DNA, 25 bp, Homo sapien
gagctgtttgtgctgggcgtctggc

SEQ ID NO: 4489432 - DNA, 25 bp, Homo sapien
gctgtttgtgctgggcgtctggcca

SEQ ID NO: 4489433 - DNA, 25 bp, Homo sapien
gtttagaaaacagatctcttaggag

SEQ ID NO: 4489434 - DNA, 25 bp, Homo sapien
cagatctcttaggagcagactgtga

SEQ ID NO: 4489435 - DNA, 25 bp, Homo sapien
gagcagactgtgaattgccctgaag

SEQ ID NO: 4489436 - DNA, 25 bp, Homo sapien
gcagactgtgaattgccctgaagcc

SEQ ID NO: 4489437 - DNA, 25 bp, Homo sapien
cattgccgtatgaccatggaaaggc

SEQ ID NO: 4489438 - DNA, 25 bp, Homo sapien
gcaagcattgccgtatgaccatgga

SEQ ID NO: 4489439 - DNA, 25 bp, Homo sapien
gggagcggatcttagcaagcattgc

SEQ ID NO: 4489440 - DNA, 25 bp, Homo sapien
ggatcttagcaagcattgccgtatg

SEQ ID NO: 4489441 - DNA, 25 bp, Homo sapien
tagatttagcccagtagtgtacttc

SEQ ID NO: 4489442 - DNA, 25 bp, Homo sapien
tggtctttaggccagcagtgcattt

SEQ ID NO: 4489443 - DNA, 25 bp, Homo sapien
tgcggtggccgccagtgggaagaga

SEQ ID NO: 4489444 - DNA, 25 bp, Homo sapien
ggaggttacccttgcacacaataga

SEQ ID NO: 4489445 - DNA, 25 bp, Homo sapien
cttgagggccgagctttgcgggagt

SEQ ID NO: 4489446 - DNA, 25 bp, Homo sapien
gaacattgctgggttttcctcatcc

SEQ ID NO: 4489447 - DNA, 25 bp, Homo sapien
tctgaggagtaaacagctttgaaca

SEQ ID NO: 4489448 - DNA, 25 bp, Homo sapien
gaggagaaggcctgtgatgccgcca

SEQ ID NO: 4489449 - DNA, 25 bp, Homo sapien
aagagagtgttctggccagggatgc

SEQ ID NO: 4489450 - DNA, 25 bp, Homo sapien
gaagagagtgttctggccagggatg

SEQ ID NO: 4489451 - DNA, 25 bp, Homo sapien
agagagtgttctggccagggatgct

SEQ ID NO: 4489452 - DNA, 25 bp, Homo sapien
tgaagagagtgttctggccagggat

SEQ ID NO: 4489453 - DNA, 25 bp, Homo sapien
tttgagcactgctgagatgggtcca

SEQ ID NO: 4489454 - DNA, 25 bp, Homo sapien
aggattgagtgtgtaacacccatcc

SEQ ID NO: 4489455 - DNA, 25 bp, Homo sapien
cctaagcaggagagtttgggcattg

SEQ ID NO: 4489456 - DNA, 25 bp, Homo sapien
ccatcctttaggtggccatagagga

SEQ ID NO: 4489457 - DNA, 25 bp, Homo sapien
gaaggtagcttgaaagtgagtcagg

SEQ ID NO: 4489458 - DNA, 25 bp, Homo sapien
ggtagaaggaccattgatgtttgtt

SEQ ID NO: 4489459 - DNA, 25 bp, Homo sapien
gtcagggtagaaggaccattgatgt

SEQ ID NO: 4489460 - DNA, 25 bp, Homo sapien
aaggtagcttgaaagtgagtcaggg

SEQ ID NO: 4489461 - DNA, 25 bp, Homo sapien
tgaccatcacctgaatgttgagtac

SEQ ID NO: 4489462 - DNA, 25 bp, Homo sapien
gatcacccttcatcagttcgtcagc

SEQ ID NO: 4489463 - DNA, 25 bp, Homo sapien
ttcagggtccctgtatgtctctgga

SEQ ID NO: 4489464 - DNA, 25 bp, Homo sapien
tggactcccatccttactcgtatgg

SEQ ID NO: 4489465 - DNA, 25 bp, Homo sapien
aggcccttggcctgattggaaacag

SEQ ID NO: 4489466 - DNA, 25 bp, Homo sapien
gcccttggcctgattggaaacagca

SEQ ID NO: 4489467 - DNA, 25 bp, Homo sapien
gcaggcccttggcctgattggaaac

SEQ ID NO: 4489468 - DNA, 25 bp, Homo sapien
caggggctagggctggtggtcccat

SEQ ID NO: 4489469 - DNA, 25 bp, Homo sapien
gaggaaaggccaaatttgcagaagc

SEQ ID NO: 4489470 - DNA, 25 bp, Homo sapien
gttggtaaaagcagccagtggtctg

SEQ ID NO: 4489471 - DNA, 25 bp, Homo sapien
ggaggaaaggccaaatttgcagaag

SEQ ID NO: 4489472 - DNA, 25 bp, Homo sapien
agccagtggtctgaggagctcccaa

SEQ ID NO: 4489473 - DNA, 25 bp, Homo sapien
ctacatctcatcgtcagtgctcagt

SEQ ID NO: 4489474 - DNA, 25 bp, Homo sapien
ctcatcgtcagtgctcagttgtagg

SEQ ID NO: 4489475 - DNA, 25 bp, Homo sapien
tctcatcgtcagtgctcagttgtag

SEQ ID NO: 4489476 - DNA, 25 bp, Homo sapien
acatctcatcgtcagtgctcagttg

SEQ ID NO: 4489477 - DNA, 25 bp, Homo sapien
ttctccaatgtaaccgagcgccttc

SEQ ID NO: 4489478 - DNA, 25 bp, Homo sapien
aaccccgccggcgagacactgagaa

SEQ ID NO: 4489479 - DNA, 25 bp, Homo sapien
cagctcaggccgaaccccgccggcg

SEQ ID NO: 4489480 - DNA, 25 bp, Homo sapien
cagttctccaatgtaaccgagcgcc

SEQ ID NO: 4489481 - DNA, 25 bp, Homo sapien
tgcgttttccagtccgtcctcaagg

SEQ ID NO: 4489482 - DNA, 25 bp, Homo sapien
acaaagaactttggctgcgggcgac

SEQ ID NO: 4489483 - DNA, 25 bp, Homo sapien
aaacgggcttcggtctagcaaagag

SEQ ID NO: 4489484 - DNA, 25 bp, Homo sapien
gcaaagagtacagatcaccgcacag

SEQ ID NO: 4489485 - DNA, 25 bp, Homo sapien
aaaggtttgaggcagctgtactgct

SEQ ID NO: 4489486 - DNA, 25 bp, Homo sapien
gctgtactgcttaatgtttaggttg

SEQ ID NO: 4489487 - DNA, 25 bp, Homo sapien
gcagctgtactgcttaatgtttagg

SEQ ID NO: 4489488 - DNA, 25 bp, Homo sapien
tgaggcagctgtactgcttaatgtt

SEQ ID NO: 4489489 - DNA, 25 bp, Homo sapien
gatgacccatacctaatccagatgg

SEQ ID NO: 4489490 - DNA, 25 bp, Homo sapien
tccagatgggcagtaaaaatcataa

SEQ ID NO: 4489491 - DNA, 25 bp, Homo sapien
caaggaaaaggtgctactccatttt

SEQ ID NO: 4489492 - DNA, 25 bp, Homo sapien
gtctagaattctagtgggatcacag

SEQ ID NO: 4489493 - DNA, 25 bp, Homo sapien
tggagcacagcggcacaacctcggg

SEQ ID NO: 4489494 - DNA, 25 bp, Homo sapien
gctggagcacagcggcacaacctcg

SEQ ID NO: 4489495 - DNA, 25 bp, Homo sapien
gagcacagcggcacaacctcgggtc

SEQ ID NO: 4489496 - DNA, 25 bp, Homo sapien
ccttgacttccctggctcaaacaat

SEQ ID NO: 4489497 - DNA, 25 bp, Homo sapien
ctcaggagggcgtttcaggtattcc

SEQ ID NO: 4489498 - DNA, 25 bp, Homo sapien
aggtattcctgatactccttgtcat

SEQ ID NO: 4489499 - DNA, 25 bp, Homo sapien
tcaaactttggaacagcttcggcag

SEQ ID NO: 4489500 - DNA, 25 bp, Homo sapien
cctcaacaattggaggagactcagg

SEQ ID NO: 4489501 - DNA, 25 bp, Homo sapien
gattgcctctgtttctttggttccc

SEQ ID NO: 4489502 - DNA, 25 bp, Homo sapien
attgcctctgtttctttggttccca

SEQ ID NO: 4489503 - DNA, 25 bp, Homo sapien
cgattgcctctgtttctttggttcc

SEQ ID NO: 4489504 - DNA, 25 bp, Homo sapien
ttgcctctgtttctttggttcccac

SEQ ID NO: 4489505 - DNA, 25 bp, Homo sapien
accccaggatcgtccatgccactga

SEQ ID NO: 4489506 - DNA, 25 bp, Homo sapien
taaccataatgtccatattgctggg

SEQ ID NO: 4489507 - DNA, 25 bp, Homo sapien
tgtaaccataatgtccatattgctg

SEQ ID NO: 4489508 - DNA, 25 bp, Homo sapien
ggaggccgctggttgtaaccataat

SEQ ID NO: 4489509 - DNA, 25 bp, Homo sapien
tattcccagcaaccatcgcatttcg

SEQ ID NO: 4489510 - DNA, 25 bp, Homo sapien
cgcatttcgcaagtaagatctattt

SEQ ID NO: 4489511 - DNA, 25 bp, Homo sapien
gaagtcaagcaatataatccacagt

SEQ ID NO: 4489512 - DNA, 25 bp, Homo sapien
actatgaccaacagaagacacccaa

SEQ ID NO: 4489513 - DNA, 25 bp, Homo sapien
tatagattaaggaatcacaaagtac

SEQ ID NO: 4489514 - DNA, 25 bp, Homo sapien
ggaatcacaaagtaccatagtcact

SEQ ID NO: 4489515 - DNA, 25 bp, Homo sapien
gaaacgagcacatctaagcatatgg

SEQ ID NO: 4489516 - DNA, 25 bp, Homo sapien
tggatactctcttaccttacaaagt

SEQ ID NO: 4489517 - DNA, 25 bp, Homo sapien
aagagactcaagtgtggagctgact

SEQ ID NO: 4489518 - DNA, 25 bp, Homo sapien
gagactcaagtgtggagctgactca

SEQ ID NO: 4489519 - DNA, 25 bp, Homo sapien
agagactcaagtgtggagctgactc

SEQ ID NO: 4489520 - DNA, 25 bp, Homo sapien
agactcaagtgtggagctgactcat

SEQ ID NO: 4489521 - DNA, 25 bp, Homo sapien
tgtgaattttgacctgctatgttgt

SEQ ID NO: 4489522 - DNA, 25 bp, Homo sapien
tgaaaggaagtttatagcatcacta

SEQ ID NO: 4489523 - DNA, 25 bp, Homo sapien
tgttgttagcaaaaagctttagtgt

SEQ ID NO: 4489524 - DNA, 25 bp, Homo sapien
tgtgaacagtacagagttaaacttt

SEQ ID NO: 4489525 - DNA, 25 bp, Homo sapien
cacaaggtaggtgcgccatcgatac

SEQ ID NO: 4489526 - DNA, 25 bp, Homo sapien
tggaagattcacaagggccaagccg

SEQ ID NO: 4489527 - DNA, 25 bp, Homo sapien
cagtgcagccggtgtctttctaaaa

SEQ ID NO: 4489528 - DNA, 25 bp, Homo sapien
tttacattgtgggatccgctgcgcc

SEQ ID NO: 4489529 - DNA, 25 bp, Homo sapien
ctggtcagtgtcctttggtgacttc

SEQ ID NO: 4489530 - DNA, 25 bp, Homo sapien
tggtgacttctctacctgcccttgc

SEQ ID NO: 4489531 - DNA, 25 bp, Homo sapien
gtgacttctctacctgcccttgctg

SEQ ID NO: 4489532 - DNA, 25 bp, Homo sapien
ctttggtgacttctctacctgccct

SEQ ID NO: 4489533 - DNA, 25 bp, Homo sapien
tattgaacctaagactgcagcccct

SEQ ID NO: 4489534 - DNA, 25 bp, Homo sapien
gtaacgtaactataggccaggcgct

SEQ ID NO: 4489535 - DNA, 25 bp, Homo sapien
tttatactgcatggcctcagtggcc

SEQ ID NO: 4489536 - DNA, 25 bp, Homo sapien
tgaatccaggcatctaaagtaacgt

SEQ ID NO: 4489537 - DNA, 25 bp, Homo sapien
tgcatgcagccataaaagggacaag

SEQ ID NO: 4489538 - DNA, 25 bp, Homo sapien
gataatccttcacagcaagaaaccg

SEQ ID NO: 4489539 - DNA, 25 bp, Homo sapien
aaatgcctcatctgttgtactgaac

SEQ ID NO: 4489540 - DNA, 25 bp, Homo sapien
ggctgaggtctcttgaaattgctaa

SEQ ID NO: 4489541 - DNA, 25 bp, Homo sapien
tgagatgggcaaataggcttaacta

SEQ ID NO: 4489542 - DNA, 25 bp, Homo sapien
ttcatagattggctgacttagggtc

SEQ ID NO: 4489543 - DNA, 25 bp, Homo sapien
cataaatggccacaaaaaagtagtt

SEQ ID NO: 4489544 - DNA, 25 bp, Homo sapien
aagagatgggtcagtattcctacag

SEQ ID NO: 4489545 - DNA, 25 bp, Homo sapien
taagagtcatgcactatgttccaga

SEQ ID NO: 4489546 - DNA, 25 bp, Homo sapien
gagatcctgcccaatgtgtgctaca

SEQ ID NO: 4489547 - DNA, 25 bp, Homo sapien
taccggctttagttgtgatgggaca

SEQ ID NO: 4489548 - DNA, 25 bp, Homo sapien
cattcagggtcatgttcaaggaacc

SEQ ID NO: 4489549 - DNA, 25 bp, Homo sapien
ttcctgtatgtcatcaaaattcagt

SEQ ID NO: 4489550 - DNA, 25 bp, Homo sapien
cattggtgttcctgtatgtcatcaa

SEQ ID NO: 4489551 - DNA, 25 bp, Homo sapien
ggtgttcctgtatgtcatcaaaatt

SEQ ID NO: 4489552 - DNA, 25 bp, Homo sapien
tgtacaatgatatgaatgtatttag

SEQ ID NO: 4489553 - DNA, 25 bp, Homo sapien
actgaatgagagaaattagtctata

SEQ ID NO: 4489554 - DNA, 25 bp, Homo sapien
atcagacttggttgttatgcattat

SEQ ID NO: 4489555 - DNA, 25 bp, Homo sapien
tttggattccttacgtaaatcagac

SEQ ID NO: 4489556 - DNA, 25 bp, Homo sapien
tgtgaatatagtgaactacattaat

SEQ ID NO: 4489557 - DNA, 25 bp, Homo sapien
catagtgtccagtagttagtttttt

SEQ ID NO: 4489558 - DNA, 25 bp, Homo sapien
ttgaggtacagttgattgcatcact

SEQ ID NO: 4489559 - DNA, 25 bp, Homo sapien
ttgcatcacttaggcagtgagcata

SEQ ID NO: 4489560 - DNA, 25 bp, Homo sapien
tgtgcctagctctcatgatttttta

SEQ ID NO: 4489561 - DNA, 25 bp, Homo sapien
gcgacattgttcatgacacagtaca

SEQ ID NO: 4489562 - DNA, 25 bp, Homo sapien
caaagctgcacacagtctgagtttt

SEQ ID NO: 4489563 - DNA, 25 bp, Homo sapien
caatgcaccatctgcaaagctgcac

SEQ ID NO: 4489564 - DNA, 25 bp, Homo sapien
tctgcaaagctgcacacagtctgag

SEQ ID NO: 4489565 - DNA, 25 bp, Homo sapien
tagcatgtgtagaccattgcagaaa

SEQ ID NO: 4489566 - DNA, 25 bp, Homo sapien
tctcctgaccccagcatcccgagta

SEQ ID NO: 4489567 - DNA, 25 bp, Homo sapien
tgtgtagaccattgcagaaaagttt

SEQ ID NO: 4489568 - DNA, 25 bp, Homo sapien
ctgtgttcttgggactatgatacct

SEQ ID NO: 4489569 - DNA, 25 bp, Homo sapien
atgcctagccccaaaaattggtaat

SEQ ID NO: 4489570 - DNA, 25 bp, Homo sapien
tctcctccgggatttgaatatgtgt

SEQ ID NO: 4489571 - DNA, 25 bp, Homo sapien
tcttacagccttttgctaaaggaag

SEQ ID NO: 4489572 - DNA, 25 bp, Homo sapien
gcttcaggagctttttatagctgtc

SEQ ID NO: 4489573 - DNA, 25 bp, Homo sapien
cagggtagcttgacttcgtggctca

SEQ ID NO: 4489574 - DNA, 25 bp, Homo sapien
gagctgccaggcatccttaaggtgt

SEQ ID NO: 4489575 - DNA, 25 bp, Homo sapien
tcgtggctcatgactccgaggaaca

SEQ ID NO: 4489576 - DNA, 25 bp, Homo sapien
cagggacaacccagattcatcatgg

SEQ ID NO: 4489577 - DNA, 25 bp, Homo sapien
ggtcgagcaatagggtcacctcacc

SEQ ID NO: 4489578 - DNA, 25 bp, Homo sapien
gaggtcgagcaatagggtcacctca

SEQ ID NO: 4489579 - DNA, 25 bp, Homo sapien
caggaggtcgagcaatagggtcacc

SEQ ID NO: 4489580 - DNA, 25 bp, Homo sapien
aggaggtcgagcaatagggtcacct

SEQ ID NO: 4489581 - DNA, 25 bp, Homo sapien
gagctccactgaatcactgccacat

SEQ ID NO: 4489582 - DNA, 25 bp, Homo sapien
cttggctttcactgaccccatgagc

SEQ ID NO: 4489583 - DNA, 25 bp, Homo sapien
catgagctccactgaatcactgcca

SEQ ID NO: 4489584 - DNA, 25 bp, Homo sapien
tggctttcactgaccccatgagctc

SEQ ID NO: 4489585 - DNA, 25 bp, Homo sapien
accagctttgttcctctcggtcaga

SEQ ID NO: 4489586 - DNA, 25 bp, Homo sapien
ctaaccagctttgttcctctcggtc

SEQ ID NO: 4489587 - DNA, 25 bp, Homo sapien
taaccagctttgttcctctcggtca

SEQ ID NO: 4489588 - DNA, 25 bp, Homo sapien
aaccagctttgttcctctcggtcag

SEQ ID NO: 4489589 - DNA, 25 bp, Homo sapien
tcacctcgggatctgccggcatcgg

SEQ ID NO: 4489590 - DNA, 25 bp, Homo sapien
ctcctcacctcgggatctgccggca

SEQ ID NO: 4489591 - DNA, 25 bp, Homo sapien
aatctcctcacctcgggatctgccg

SEQ ID NO: 4489592 - DNA, 25 bp, Homo sapien
tcctcacctcgggatctgccggcat

SEQ ID NO: 4489593 - DNA, 25 bp, Homo sapien
gaagcatcgaatttgactccaagct

SEQ ID NO: 4489594 - DNA, 25 bp, Homo sapien
attgcagctgtgacgaagcatcgaa

SEQ ID NO: 4489595 - DNA, 25 bp, Homo sapien
ttaaggagcatcaatcttgcaagcc

SEQ ID NO: 4489596 - DNA, 25 bp, Homo sapien
tgcaagccatgaaggctaatattgc

SEQ ID NO: 4489597 - DNA, 25 bp, Homo sapien
gcgcccccttggcgcttgcccttcg

SEQ ID NO: 4489598 - DNA, 25 bp, Homo sapien
gcgccgctcgcccttcaccgcatcc

SEQ ID NO: 4489599 - DNA, 25 bp, Homo sapien
ccccttggcgcttgcccttcgaggc

SEQ ID NO: 4489600 - DNA, 25 bp, Homo sapien
gcccccttggcgcttgcccttcgag

SEQ ID NO: 4489601 - DNA, 25 bp, Homo sapien
ccaggtggttgaagacataggtgac

SEQ ID NO: 4489602 - DNA, 25 bp, Homo sapien
acagcacgaagaccccggtggccgc

SEQ ID NO: 4489603 - DNA, 25 bp, Homo sapien
gacataggtgaccgggatggccgag

SEQ ID NO: 4489604 - DNA, 25 bp, Homo sapien
cagcacgaagaccccggtggccgca

SEQ ID NO: 4489605 - DNA, 25 bp, Homo sapien
tcgcggcgagccaactcccgccgcc

SEQ ID NO: 4489606 - DNA, 25 bp, Homo sapien
cctcggaaaagttgcgaggctcccg

SEQ ID NO: 4489607 - DNA, 25 bp, Homo sapien
cggaaaagttgcgaggctcccgtcg

SEQ ID NO: 4489608 - DNA, 25 bp, Homo sapien
aaagttgcgaggctcccgtcgcggc

SEQ ID NO: 4489609 - DNA, 25 bp, Homo sapien
gttttcttttgacgaggacacgagc

SEQ ID NO: 4489610 - DNA, 25 bp, Homo sapien
tgctaccaggaacaggatgagggca

SEQ ID NO: 4489611 - DNA, 25 bp, Homo sapien
aggacacgagccagcagtgctacca

SEQ ID NO: 4489612 - DNA, 25 bp, Homo sapien
ggcagcaacccctacaatagtccag

SEQ ID NO: 4489613 - DNA, 25 bp, Homo sapien
caaagccagtaactgagtggccaag

SEQ ID NO: 4489614 - DNA, 25 bp, Homo sapien
cacatgggcagtgggagcaaagcca

SEQ ID NO: 4489615 - DNA, 25 bp, Homo sapien
tgccggctcagtcacagaagattct

SEQ ID NO: 4489616 - DNA, 25 bp, Homo sapien
taagtactctcatcaagggaacact

SEQ ID NO: 4489617 - DNA, 25 bp, Homo sapien
ctctctcaagtagtgtgtcatgaac

SEQ ID NO: 4489618 - DNA, 25 bp, Homo sapien
ggttcaccacgctggtaaatccaaa

SEQ ID NO: 4489619 - DNA, 25 bp, Homo sapien
tgaacccgtcaatgattccatcttg

SEQ ID NO: 4489620 - DNA, 25 bp, Homo sapien
ccagtcctatgatgaggttcaccac

SEQ ID NO: 4489621 - DNA, 25 bp, Homo sapien
ctggtagcttgatgagcatctttaa

SEQ ID NO: 4489622 - DNA, 25 bp, Homo sapien
tcctggtagcttgatgagcatcttt

SEQ ID NO: 4489623 - DNA, 25 bp, Homo sapien
cctggtagcttgatgagcatcttta

SEQ ID NO: 4489624 - DNA, 25 bp, Homo sapien
tcagataatgagcagagccatccca

SEQ ID NO: 4489625 - DNA, 25 bp, Homo sapien
accaggtacatcagataatgagcag

SEQ ID NO: 4489626 - DNA, 25 bp, Homo sapien
tatgcggtgttcagatacggttcac

SEQ ID NO: 4489627 - DNA, 25 bp, Homo sapien
agatcatgtgcccatatgcggtgtt

SEQ ID NO: 4489628 - DNA, 25 bp, Homo sapien
tacaatgtttcctggcacaaaaaca

SEQ ID NO: 4489629 - DNA, 25 bp, Homo sapien
gatccaacccaatataggccaatgg

SEQ ID NO: 4489630 - DNA, 25 bp, Homo sapien
taggccaatggttctataagtttcc

SEQ ID NO: 4489631 - DNA, 25 bp, Homo sapien
caacaacactcataataatagatcc

SEQ ID NO: 4489632 - DNA, 25 bp, Homo sapien
taattataattttctgatggctgat

SEQ ID NO: 4489633 - DNA, 25 bp, Homo sapien
gacaggaagacaagtatatggtatg

SEQ ID NO: 4489634 - DNA, 25 bp, Homo sapien
tatagattctgaaaccagcccagac

SEQ ID NO: 4489635 - DNA, 25 bp, Homo sapien
agacaagtatatggtatgcttaaga

SEQ ID NO: 4489636 - DNA, 25 bp, Homo sapien
tcagcaggtctttcgcttgggcttc

SEQ ID NO: 4489637 - DNA, 25 bp, Homo sapien
tctgaacaggcaaaatccagttgcc

SEQ ID NO: 4489638 - DNA, 25 bp, Homo sapien
cacaaccaacattaaatcaaatggt

SEQ ID NO: 4489639 - DNA, 25 bp, Homo sapien
taaatcaaatggtcttctcagcagg

SEQ ID NO: 4489640 - DNA, 25 bp, Homo sapien
tgaattgttgaactggtacgccttc

SEQ ID NO: 4489641 - DNA, 25 bp, Homo sapien
tgttgaactggtacgccttcctcaa

SEQ ID NO: 4489642 - DNA, 25 bp, Homo sapien
cctacatacacgtgaattgttgaac

SEQ ID NO: 4489643 - DNA, 25 bp, Homo sapien
catgaccctacatacacgtgaattg

SEQ ID NO: 4489644 - DNA, 25 bp, Homo sapien
tgcgtatataatcggcagagctcag

SEQ ID NO: 4489645 - DNA, 25 bp, Homo sapien
tcttgaaattgcgtatataatcggc

SEQ ID NO: 4489646 - DNA, 25 bp, Homo sapien
tagggctcttgaaattgcgtatata

SEQ ID NO: 4489647 - DNA, 25 bp, Homo sapien
tataatcggcagagctcagatgggc

SEQ ID NO: 4489648 - DNA, 25 bp, Homo sapien
tcacaaagtaaggaacagaatagaa

SEQ ID NO: 4489649 - DNA, 25 bp, Homo sapien
cacaaagtaaggaacagaatagaac

SEQ ID NO: 4489650 - DNA, 25 bp, Homo sapien
cagaatagaacatatatgccagcat

SEQ ID NO: 4489651 - DNA, 25 bp, Homo sapien
taaggaacagaatagaacatatatg

SEQ ID NO: 4489652 - DNA, 25 bp, Homo sapien
caggaaccactaagccatacagtgc

SEQ ID NO: 4489653 - DNA, 25 bp, Homo sapien
ggaaccactaagccatacagtgcag

SEQ ID NO: 4489654 - DNA, 25 bp, Homo sapien
aggaaccactaagccatacagtgca

SEQ ID NO: 4489655 - DNA, 25 bp, Homo sapien
ccaggaaccactaagccatacagtg

SEQ ID NO: 4489656 - DNA, 25 bp, Homo sapien
acctccagcatgtatcaatgtgatg

SEQ ID NO: 4489657 - DNA, 25 bp, Homo sapien
gccagacctccagcatgtatcaatg

SEQ ID NO: 4489658 - DNA, 25 bp, Homo sapien
cagacctccagcatgtatcaatgtg

SEQ ID NO: 4489659 - DNA, 25 bp, Homo sapien
tgagccagacctccagcatgtatca

SEQ ID NO: 4489660 - DNA, 25 bp, Homo sapien
ggacaggaaccattacttctggatg

SEQ ID NO: 4489661 - DNA, 25 bp, Homo sapien
tagtgaggcatgcaagtaaaaagac

SEQ ID NO: 4489662 - DNA, 25 bp, Homo sapien
tcttaagcccctcaaggaaaggaca

SEQ ID NO: 4489663 - DNA, 25 bp, Homo sapien
tgaaatacaggagtctgggaacggt

SEQ ID NO: 4489664 - DNA, 25 bp, Homo sapien
tgaatgaggtaatgcccctgcggct

SEQ ID NO: 4489665 - DNA, 25 bp, Homo sapien
ggagtaataagtgcccacctgcaag

SEQ ID NO: 4489666 - DNA, 25 bp, Homo sapien
tgactgttgaccctggccatgtgac

SEQ ID NO: 4489667 - DNA, 25 bp, Homo sapien
cagtgatggataagccccaggatgc

SEQ ID NO: 4489668 - DNA, 25 bp, Homo sapien
tgatctagaacttttcaaaggtggt

SEQ ID NO: 4489669 - DNA, 25 bp, Homo sapien
tccattggcctatactgatctagaa

SEQ ID NO: 4489670 - DNA, 25 bp, Homo sapien
cataaggtttctaaataagaatggc

SEQ ID NO: 4489671 - DNA, 25 bp, Homo sapien
ccttactaagttgcatagattcttg

SEQ ID NO: 4489672 - DNA, 25 bp, Homo sapien
tccccagtggaactctttggtctaa

SEQ ID NO: 4489673 - DNA, 25 bp, Homo sapien
tacatggtctgaaatcaaggcccca

SEQ ID NO: 4489674 - DNA, 25 bp, Homo sapien
gatacctgggttatgagtaagtccc

SEQ ID NO: 4489675 - DNA, 25 bp, Homo sapien
gctaataagtggatctaagcagcct

SEQ ID NO: 4489676 - DNA, 25 bp, Homo sapien
aaaccagccgtatggcctcgggtga

SEQ ID NO: 4489677 - DNA, 25 bp, Homo sapien
tgaaatttacttccaggctgagcgt

SEQ ID NO: 4489678 - DNA, 25 bp, Homo sapien
gacatagcacctacatagccaggga

SEQ ID NO: 4489679 - DNA, 25 bp, Homo sapien
gactgtagaaaatctgggccctttg

SEQ ID NO: 4489680 - DNA, 25 bp, Homo sapien
cttgcagcaagagctcatacccttt

SEQ ID NO: 4489681 - DNA, 25 bp, Homo sapien
gatcctgcatacagactcagttgtg

SEQ ID NO: 4489682 - DNA, 25 bp, Homo sapien
gttgtggttcacaaattgcgttcca

SEQ ID NO: 4489683 - DNA, 25 bp, Homo sapien
tatttagaagtacgacatgtcagca

SEQ ID NO: 4489684 - DNA, 25 bp, Homo sapien
tgagtaagcatgaaacgtgttcagt

SEQ ID NO: 4489685 - DNA, 25 bp, Homo sapien
aaaaattgagtaagcatgaaacgtg

SEQ ID NO: 4489686 - DNA, 25 bp, Homo sapien
tctgaatggttcattcaggctacgt

SEQ ID NO: 4489687 - DNA, 25 bp, Homo sapien
caggctacgtttctgtgccctcaaa

SEQ ID NO: 4489688 - DNA, 25 bp, Homo sapien
aagagatgcaccaatgtgagaaaac

SEQ ID NO: 4489689 - DNA, 25 bp, Homo sapien
agagatgcaccaatgtgagaaaact

SEQ ID NO: 4489690 - DNA, 25 bp, Homo sapien
ttcagggactctgtagacataagca

SEQ ID NO: 4489691 - DNA, 25 bp, Homo sapien
gaagaactccatatgctatgtttaa

SEQ ID NO: 4489692 - DNA, 25 bp, Homo sapien
gaagaactctggtttgtagatacaa

SEQ ID NO: 4489693 - DNA, 25 bp, Homo sapien
gatacaacgataggccaagagctga

SEQ ID NO: 4489694 - DNA, 25 bp, Homo sapien
tatcagtaccagtataacaaaagtt

SEQ ID NO: 4489695 - DNA, 25 bp, Homo sapien
tatagctcacacatacagtgcagag

SEQ ID NO: 4489696 - DNA, 25 bp, Homo sapien
tactcacgtatgagaagagagtgaa

SEQ ID NO: 4489697 - DNA, 25 bp, Homo sapien
cagagcaagaatgtacatattctta

SEQ ID NO: 4489698 - DNA, 25 bp, Homo sapien
cctatttagctgtttaaattcacac

SEQ ID NO: 4489699 - DNA, 25 bp, Homo sapien
gaaatatttccagccaccaataaaa

SEQ ID NO: 4489700 - DNA, 25 bp, Homo sapien
actactgttggcactaaattgtaat

SEQ ID NO: 4489701 - DNA, 25 bp, Homo sapien
agagataaagttactgatccctatt

SEQ ID NO: 4489702 - DNA, 25 bp, Homo sapien
gcccagtggaccctagattttgtaa

SEQ ID NO: 4489703 - DNA, 25 bp, Homo sapien
tggcagctaagggtatgaaagcacc

SEQ ID NO: 4489704 - DNA, 25 bp, Homo sapien
gcctagggccgttaataatgatgat

SEQ ID NO: 4489705 - DNA, 25 bp, Homo sapien
tgtgagcagacctaaaagcctaggg

SEQ ID NO: 4489706 - DNA, 25 bp, Homo sapien
tgagctaagcactcaaggtggatac

SEQ ID NO: 4489707 - DNA, 25 bp, Homo sapien
ctggaatcagcaacagccctatggg

SEQ ID NO: 4489708 - DNA, 25 bp, Homo sapien
tggaacatctttcgcgtattcacgg

SEQ ID NO: 4489709 - DNA, 25 bp, Homo sapien
tatgccagcttatattgtgagaaca

SEQ ID NO: 4489710 - DNA, 25 bp, Homo sapien
gacagaaccccagtttgtatgtaca

SEQ ID NO: 4489711 - DNA, 25 bp, Homo sapien
catagtccttgttgtcattgacaga

SEQ ID NO: 4489712 - DNA, 25 bp, Homo sapien
gctgcatattaagagaaaccacaag

SEQ ID NO: 4489713 - DNA, 25 bp, Homo sapien
ggttgcatgaagttgcccttaacca

SEQ ID NO: 4489714 - DNA, 25 bp, Homo sapien
gatctcaccatgaggcagctcacag

SEQ ID NO: 4489715 - DNA, 25 bp, Homo sapien
ctgggtctcttgcaaaaggaactga

SEQ ID NO: 4489716 - DNA, 25 bp, Homo sapien
cagatcatcttaaggctcaactggg

SEQ ID NO: 4489717 - DNA, 25 bp, Homo sapien
catcaacagtccattcaggtgcaac

SEQ ID NO: 4489718 - DNA, 25 bp, Homo sapien
tcttgtcctgtcattaaccgctaaa

SEQ ID NO: 4489719 - DNA, 25 bp, Homo sapien
tgggtagactactttgccctaggga

SEQ ID NO: 4489720 - DNA, 25 bp, Homo sapien
tggctcagcagcacatgtgcatctt

SEQ ID NO: 4489721 - DNA, 25 bp, Homo sapien
cctagggaccggagctgcttctgtt

SEQ ID NO: 4489722 - DNA, 25 bp, Homo sapien
gttttgtccttcattatcctcttgc

SEQ ID NO: 4489723 - DNA, 25 bp, Homo sapien
ttgtccttcattatcctcttgcgca

SEQ ID NO: 4489724 - DNA, 25 bp, Homo sapien
ttcagtattcatccaggttttgtcc

SEQ ID NO: 4489725 - DNA, 25 bp, Homo sapien
tgtccttcattatcctcttgcgcat

SEQ ID NO: 4489726 - DNA, 25 bp, Homo sapien
actgcacgctacatgggccacatgg

SEQ ID NO: 4489727 - DNA, 25 bp, Homo sapien
agaggagggcactgcacgctacatg

SEQ ID NO: 4489728 - DNA, 25 bp, Homo sapien
gctacatgggccacatggaaattgc

SEQ ID NO: 4489729 - DNA, 25 bp, Homo sapien
gagggcactgcacgctacatgggcc

SEQ ID NO: 4489730 - DNA, 25 bp, Homo sapien
tacagggatgaacaagtcttcccct

SEQ ID NO: 4489731 - DNA, 25 bp, Homo sapien
ggtactgctttaggcagtagtgcta

SEQ ID NO: 4489732 - DNA, 25 bp, Homo sapien
gctttaggcagtagtgctacaggga

SEQ ID NO: 4489733 - DNA, 25 bp, Homo sapien
gcagtagtgctacagggatgaacaa

SEQ ID NO: 4489734 - DNA, 25 bp, Homo sapien
tatatttgaagataactcagcctga

SEQ ID NO: 4489735 - DNA, 25 bp, Homo sapien
cactagtagatggtcgtttttatat

SEQ ID NO: 4489736 - DNA, 25 bp, Homo sapien
tttccatatcatcatgcttgcagtt

SEQ ID NO: 4489737 - DNA, 25 bp, Homo sapien
aatgtctgtagctataagattgttc

SEQ ID NO: 4489738 - DNA, 25 bp, Homo sapien
tcccttgcaactgacgctcgagtag

SEQ ID NO: 4489739 - DNA, 25 bp, Homo sapien
caactgacgctcgagtagttccata

SEQ ID NO: 4489740 - DNA, 25 bp, Homo sapien
gctcgagtagttccatattgacatc

SEQ ID NO: 4489741 - DNA, 25 bp, Homo sapien
tgacgctcgagtagttccatattga

SEQ ID NO: 4489742 - DNA, 25 bp, Homo sapien
atgggttgttggcctaagggcctca

SEQ ID NO: 4489743 - DNA, 25 bp, Homo sapien
tgtaggcttcatagaataactgaca

SEQ ID NO: 4489744 - DNA, 25 bp, Homo sapien
atgtaggcttcatagaataactgac

SEQ ID NO: 4489745 - DNA, 25 bp, Homo sapien
taatggccttcggtttcatccaggt

SEQ ID NO: 4489746 - DNA, 25 bp, Homo sapien
ttagccttccatctttaaccagtag

SEQ ID NO: 4489747 - DNA, 25 bp, Homo sapien
catggatgcattatattgcggtaaa

SEQ ID NO: 4489748 - DNA, 25 bp, Homo sapien
gagtatgcattgtacccagcaggta

SEQ ID NO: 4489749 - DNA, 25 bp, Homo sapien
cgacctggtcttcgccaagatgaag

SEQ ID NO: 4489750 - DNA, 25 bp, Homo sapien
catcttcgcggcgaccaaggactac

SEQ ID NO: 4489751 - DNA, 25 bp, Homo sapien
gggagcgcggcgcaattcgtcggcc

SEQ ID NO: 4489752 - DNA, 25 bp, Homo sapien
gagcggctgggatggcgcgtccgcg

SEQ ID NO: 4489753 - DNA, 25 bp, Homo sapien
ggacagactccaaacgattccttga

SEQ ID NO: 4489754 - DNA, 25 bp, Homo sapien
gccagctgaccccttaaaggaggtg

SEQ ID NO: 4489755 - DNA, 25 bp, Homo sapien
tccgtgtgacaaggtgagggccaca

SEQ ID NO: 4489756 - DNA, 25 bp, Homo sapien
caaaaggttgccaggattggaaaca

SEQ ID NO: 4489757 - DNA, 25 bp, Homo sapien
ttcagcccaggacgttaggacttgc

SEQ ID NO: 4489758 - DNA, 25 bp, Homo sapien
tcagcccaggacgttaggacttgct

SEQ ID NO: 4489759 - DNA, 25 bp, Homo sapien
agcccaggacgttaggacttgctgt

SEQ ID NO: 4489760 - DNA, 25 bp, Homo sapien
gcttcagcccaggacgttaggactt

SEQ ID NO: 4489761 - DNA, 25 bp, Homo sapien
ctgcgggcgcgtcggaggtgccggc

SEQ ID NO: 4489762 - DNA, 25 bp, Homo sapien
gaggtgccggcgggccagcctgtgg

SEQ ID NO: 4489763 - DNA, 25 bp, Homo sapien
cggatctgcgggcgcgtcggaggtg

SEQ ID NO: 4489764 - DNA, 25 bp, Homo sapien
atctgcgggcgcgtcggaggtgccg

SEQ ID NO: 4489765 - DNA, 25 bp, Homo sapien
gagaacttcagagcgtttcgccctt

SEQ ID NO: 4489766 - DNA, 25 bp, Homo sapien
gggaggccgaatcatctcctgagaa

SEQ ID NO: 4489767 - DNA, 25 bp, Homo sapien
gaggcaaacaccgacacgtctgtgt

SEQ ID NO: 4489768 - DNA, 25 bp, Homo sapien
ttaccaacaagtgccttcaagcccg

SEQ ID NO: 4489769 - DNA, 25 bp, Homo sapien
taggaatgagctatccctgggtcac

SEQ ID NO: 4489770 - DNA, 25 bp, Homo sapien
taccgtatctcatagcacagaagcc

SEQ ID NO: 4489771 - DNA, 25 bp, Homo sapien
ttgactcttcagaccacccaaggga

SEQ ID NO: 4489772 - DNA, 25 bp, Homo sapien
taggctacacaatgctactggcacg

SEQ ID NO: 4489773 - DNA, 25 bp, Homo sapien
tattgtcatcaaggatctctcttgg

SEQ ID NO: 4489774 - DNA, 25 bp, Homo sapien
tataataggcataggtggcattcag

SEQ ID NO: 4489775 - DNA, 25 bp, Homo sapien
gccaccgcctgggacatagacattg

SEQ ID NO: 4489776 - DNA, 25 bp, Homo sapien
taaagttattgaagtgggccaccgc

SEQ ID NO: 4489777 - DNA, 25 bp, Homo sapien
cactgagctaactgtggtaaacaag

SEQ ID NO: 4489778 - DNA, 25 bp, Homo sapien
taagtgcaacaagagggaagtacag

SEQ ID NO: 4489779 - DNA, 25 bp, Homo sapien
gaaacactgagagaacaagtaccaa

SEQ ID NO: 4489780 - DNA, 25 bp, Homo sapien
aaataactactgagtgaccactgag

SEQ ID NO: 4489781 - DNA, 25 bp, Homo sapien
tagtgtcaagaatgttatgccaaac

SEQ ID NO: 4489782 - DNA, 25 bp, Homo sapien
cactgacctgatagccaacctgtgg

SEQ ID NO: 4489783 - DNA, 25 bp, Homo sapien
tagtgaattcttaaacccaagagat

SEQ ID NO: 4489784 - DNA, 25 bp, Homo sapien
gaggacttactgtatctgagataag

SEQ ID NO: 4489785 - DNA, 25 bp, Homo sapien
gtacaatagcttcaacaatagccat

SEQ ID NO: 4489786 - DNA, 25 bp, Homo sapien
ttgtacaatagcttcaacaatagcc

SEQ ID NO: 4489787 - DNA, 25 bp, Homo sapien
tgtacaatagcttcaacaatagcca

SEQ ID NO: 4489788 - DNA, 25 bp, Homo sapien
acttgtacaatagcttcaacaatag

SEQ ID NO: 4489789 - DNA, 25 bp, Homo sapien
tggaaaacgcccctagtatgtgatg

SEQ ID NO: 4489790 - DNA, 25 bp, Homo sapien
gaattgtgtccaaggtacctgtaag

SEQ ID NO: 4489791 - DNA, 25 bp, Homo sapien
ttacaccgtggaaggtatcgcgccc

SEQ ID NO: 4489792 - DNA, 25 bp, Homo sapien
gacatgggacccttgttaggatcaa

SEQ ID NO: 4489793 - DNA, 25 bp, Homo sapien
aaagaagccaagctttggcttgttt

SEQ ID NO: 4489794 - DNA, 25 bp, Homo sapien
tctctcacttgtgccaaagaagcca

SEQ ID NO: 4489795 - DNA, 25 bp, Homo sapien
gaagccaagctttggcttgtttgga

SEQ ID NO: 4489796 - DNA, 25 bp, Homo sapien
tcttctctcacttgtgccaaagaag

SEQ ID NO: 4489797 - DNA, 25 bp, Homo sapien
ttttagtctcatggagatgctgagc

SEQ ID NO: 4489798 - DNA, 25 bp, Homo sapien
ctacaaacaaagtaattgggcattg

SEQ ID NO: 4489799 - DNA, 25 bp, Homo sapien
acaattcctcatgcggcagctccag

SEQ ID NO: 4489800 - DNA, 25 bp, Homo sapien
ttgggcattgagagttcgtattcac

SEQ ID NO: 4489801 - DNA, 25 bp, Homo sapien
aatggaagatgtagcctatgtagtc

SEQ ID NO: 4489802 - DNA, 25 bp, Homo sapien
ctttctgctccctcacggaaatgac

SEQ ID NO: 4489803 - DNA, 25 bp, Homo sapien
tctgctccctcacggaaatgactga

SEQ ID NO: 4489804 - DNA, 25 bp, Homo sapien
gctccctcacggaaatgactgagct

SEQ ID NO: 4489805 - DNA, 25 bp, Homo sapien
cgttgtggaacctgataggatttgc

SEQ ID NO: 4489806 - DNA, 25 bp, Homo sapien
taatcctcctttaagatgccctgca

SEQ ID NO: 4489807 - DNA, 25 bp, Homo sapien
gagtaatcctcctttaagatgccct

SEQ ID NO: 4489808 - DNA, 25 bp, Homo sapien
tcgttgtggaacctgataggatttg

SEQ ID NO: 4489809 - DNA, 25 bp, Homo sapien
cagagtcattatggactgcgagtac

SEQ ID NO: 4489810 - DNA, 25 bp, Homo sapien
gagatccaagggcatctccttctgc

SEQ ID NO: 4489811 - DNA, 25 bp, Homo sapien
cagactgacaatgcatagccagggc

SEQ ID NO: 4489812 - DNA, 25 bp, Homo sapien
tatggactgcgagtacatgtggaag

SEQ ID NO: 4489813 - DNA, 25 bp, Homo sapien
tgtggctttgcctgactcctgaccc

SEQ ID NO: 4489814 - DNA, 25 bp, Homo sapien
ctcctgaccctttcctgcccactcc

SEQ ID NO: 4489815 - DNA, 25 bp, Homo sapien
ccttgtggctttgcctgactcctga

SEQ ID NO: 4489816 - DNA, 25 bp, Homo sapien
cctgaccctttcctgcccactccct

SEQ ID NO: 4489817 - DNA, 25 bp, Homo sapien
tatgcgaggggaaagaattcacagt

SEQ ID NO: 4489818 - DNA, 25 bp, Homo sapien
ccctggatatgcgaggggaaagaat

SEQ ID NO: 4489819 - DNA, 25 bp, Homo sapien
tcacagtgtgcacagaacgtgccag

SEQ ID NO: 4489820 - DNA, 25 bp, Homo sapien
tgcacagaacgtgccaggcccacgg

SEQ ID NO: 4489821 - DNA, 25 bp, Homo sapien
tccctgatcttgtgggagccctggc

SEQ ID NO: 4489822 - DNA, 25 bp, Homo sapien
agccctggccccttaagagcactat

SEQ ID NO: 4489823 - DNA, 25 bp, Homo sapien
cagctgtcacaaaagataggaagtt

SEQ ID NO: 4489824 - DNA, 25 bp, Homo sapien
cactatgagattgataacaatgtcc

SEQ ID NO: 4489825 - DNA, 25 bp, Homo sapien
catctccaaggtgccataaagagct

SEQ ID NO: 4489826 - DNA, 25 bp, Homo sapien
aaggtgccataaagagctcgttgca

SEQ ID NO: 4489827 - DNA, 25 bp, Homo sapien
tgtcaacggcactaaaagcaaccat

SEQ ID NO: 4489828 - DNA, 25 bp, Homo sapien
tctgagcccgctgtcaacggcacta

SEQ ID NO: 4489829 - DNA, 25 bp, Homo sapien
agcccattggccaagccgcggcgat

SEQ ID NO: 4489830 - DNA, 25 bp, Homo sapien
gatggcaacactgcgttccaaagcc

SEQ ID NO: 4489831 - DNA, 25 bp, Homo sapien
gccgcggcgatatgcaaatgaagct

SEQ ID NO: 4489832 - DNA, 25 bp, Homo sapien
gcgcacgccgatggcaacactgcgt

SEQ ID NO: 4489833 - DNA, 25 bp, Homo sapien
gcggggtggtctcaaggctcggctg

SEQ ID NO: 4489834 - DNA, 25 bp, Homo sapien
ggcggggtggtctcaaggctcggct

SEQ ID NO: 4489835 - DNA, 25 bp, Homo sapien
ggggtggtctcaaggctcggctggg

SEQ ID NO: 4489836 - DNA, 25 bp, Homo sapien
cggggtggtctcaaggctcggctgg

SEQ ID NO: 4489837 - DNA, 25 bp, Homo sapien
tggctggctttgtggaactgcttct

SEQ ID NO: 4489838 - DNA, 25 bp, Homo sapien
aactgcttcttcagcccggccaccg

SEQ ID NO: 4489839 - DNA, 25 bp, Homo sapien
tgcttcttcagcccggccaccgaca

SEQ ID NO: 4489840 - DNA, 25 bp, Homo sapien
ctggctggctttgtggaactgcttc

SEQ ID NO: 4489841 - DNA, 25 bp, Homo sapien
attgacatcatctggggctcccttc

SEQ ID NO: 4489842 - DNA, 25 bp, Homo sapien
ccattgacatcatctggggctccct

SEQ ID NO: 4489843 - DNA, 25 bp, Homo sapien
cattgacatcatctggggctccctt

SEQ ID NO: 4489844 - DNA, 25 bp, Homo sapien
gtctgaagggaagtcaaaaatacat

SEQ ID NO: 4489845 - DNA, 25 bp, Homo sapien
gtaacactatcaaccaaaaagagct

SEQ ID NO: 4489846 - DNA, 25 bp, Homo sapien
tatcacaattagtgaggcacaactg

SEQ ID NO: 4489847 - DNA, 25 bp, Homo sapien
cacatcgttttaatgtacccacaga

SEQ ID NO: 4489848 - DNA, 25 bp, Homo sapien
taagagaaccaattggagaaatcaa

SEQ ID NO: 4489849 - DNA, 25 bp, Homo sapien
tctgatttccaggttggattcttga

SEQ ID NO: 4489850 - DNA, 25 bp, Homo sapien
gggaaggaaaagtcaaaacagtgca

SEQ ID NO: 4489851 - DNA, 25 bp, Homo sapien
caaagtaagtatgaccataagaaac

SEQ ID NO: 4489852 - DNA, 25 bp, Homo sapien
tttcatttgtcagaaacggatagtg

SEQ ID NO: 4489853 - DNA, 25 bp, Homo sapien
tcatttgtcagaaacggatagtgag

SEQ ID NO: 4489854 - DNA, 25 bp, Homo sapien
atttgtcagaaacggatagtgagag

SEQ ID NO: 4489855 - DNA, 25 bp, Homo sapien
catttgtcagaaacggatagtgaga

SEQ ID NO: 4489856 - DNA, 25 bp, Homo sapien
aagcagatcaatgagcatgattccc

SEQ ID NO: 4489857 - DNA, 25 bp, Homo sapien
gcatgattcccagagtcaaacccaa

SEQ ID NO: 4489858 - DNA, 25 bp, Homo sapien
gagttttcttcacgtgtaggtattc

SEQ ID NO: 4489859 - DNA, 25 bp, Homo sapien
cacgtgtaggtattcactgacatga

SEQ ID NO: 4489860 - DNA, 25 bp, Homo sapien
agaagtggagggtcacagcagtttt

SEQ ID NO: 4489861 - DNA, 25 bp, Homo sapien
aagtggagggtcacagcagtttttc

SEQ ID NO: 4489862 - DNA, 25 bp, Homo sapien
gagaagtggagggtcacagcagttt

SEQ ID NO: 4489863 - DNA, 25 bp, Homo sapien
gaagtggagggtcacagcagttttt

SEQ ID NO: 4489864 - DNA, 25 bp, Homo sapien
gtttatgacactgctcattgggaaa

SEQ ID NO: 4489865 - DNA, 25 bp, Homo sapien
ttatgacactgctcattgggaaaat

SEQ ID NO: 4489866 - DNA, 25 bp, Homo sapien
aagagagtcctcaatgtttatgaca

SEQ ID NO: 4489867 - DNA, 25 bp, Homo sapien
ttaagagagtcctcaatgtttatga

SEQ ID NO: 4489868 - DNA, 25 bp, Homo sapien
gcttgattgcatattatcccagcaa

SEQ ID NO: 4489869 - DNA, 25 bp, Homo sapien
tgggaggtccaggtaaggcacctat

SEQ ID NO: 4489870 - DNA, 25 bp, Homo sapien
gattgcatattatcccagcaaagat

SEQ ID NO: 4489871 - DNA, 25 bp, Homo sapien
taaggcacctattagcttgattgca

SEQ ID NO: 4489872 - DNA, 25 bp, Homo sapien
tgtgctgatgagaatggcttttcca

SEQ ID NO: 4489873 - DNA, 25 bp, Homo sapien
atggcttttccaagtttactgttct

SEQ ID NO: 4489874 - DNA, 25 bp, Homo sapien
ttctgtgctgatgagaatggctttt

SEQ ID NO: 4489875 - DNA, 25 bp, Homo sapien
tcagtgcttctgtgctgatgagaat

SEQ ID NO: 4489876 - DNA, 25 bp, Homo sapien
taatacaaggcttcccacttttcac

SEQ ID NO: 4489877 - DNA, 25 bp, Homo sapien
ctaatacaaggcttcccacttttca

SEQ ID NO: 4489878 - DNA, 25 bp, Homo sapien
acaccagcacaattacaagattttc

SEQ ID NO: 4489879 - DNA, 25 bp, Homo sapien
ccataaatatgtaacaccagcacaa

SEQ ID NO: 4489880 - DNA, 25 bp, Homo sapien
atgtaacaccagcacaattacaaga

SEQ ID NO: 4489881 - DNA, 25 bp, Homo sapien
gccataaatatgtaacaccagcaca

SEQ ID NO: 4489882 - DNA, 25 bp, Homo sapien
tgcagcactaagtcctgataccatc

SEQ ID NO: 4489883 - DNA, 25 bp, Homo sapien
gcttgtgcagcactaagtcctgata

SEQ ID NO: 4489884 - DNA, 25 bp, Homo sapien
actaagtcctgataccatcctagcc

SEQ ID NO: 4489885 - DNA, 25 bp, Homo sapien
tgaaagcttgtgcagcactaagtcc

SEQ ID NO: 4489886 - DNA, 25 bp, Homo sapien
tgttccaagtgtcaaactcccctct

SEQ ID NO: 4489887 - DNA, 25 bp, Homo sapien
tggctccttttaggtccagtattgt

SEQ ID NO: 4489888 - DNA, 25 bp, Homo sapien
agagtgactgtccatccaaggcctg

SEQ ID NO: 4489889 - DNA, 25 bp, Homo sapien
tgctgacatggtgcaaaaactcatg

SEQ ID NO: 4489890 - DNA, 25 bp, Homo sapien
aaggtgtcatagacatggactgtcc

SEQ ID NO: 4489891 - DNA, 25 bp, Homo sapien
tccccatattctactctggctacca

SEQ ID NO: 4489892 - DNA, 25 bp, Homo sapien
tagtccatactcctcagaactgcct

SEQ ID NO: 4489893 - DNA, 25 bp, Homo sapien
gaactgcctcttaaggtgtcataga

SEQ ID NO: 4489894 - DNA, 25 bp, Homo sapien
attcatcgtctagtttagttccttc

SEQ ID NO: 4489895 - DNA, 25 bp, Homo sapien
gtcaagaaattcatcgtctagttta

SEQ ID NO: 4489896 - DNA, 25 bp, Homo sapien
caagaaattcatcgtctagtttagt

SEQ ID NO: 4489897 - DNA, 25 bp, Homo sapien
gaaattcatcgtctagtttagttcc

SEQ ID NO: 4489898 - DNA, 25 bp, Homo sapien
ttcagaactgtaaataaaaaggaga

SEQ ID NO: 4489899 - DNA, 25 bp, Homo sapien
agaggaaaaacacaagctgcctaca

SEQ ID NO: 4489900 - DNA, 25 bp, Homo sapien
ggagatgctttacattctccagatt

SEQ ID NO: 4489901 - DNA, 25 bp, Homo sapien
cacaagctgcctacaaagatttgaa

SEQ ID NO: 4489902 - DNA, 25 bp, Homo sapien
tggctgaagatattcagtggttttt

SEQ ID NO: 4489903 - DNA, 25 bp, Homo sapien
ttggctgaagatattcagtggtttt

SEQ ID NO: 4489904 - DNA, 25 bp, Homo sapien
ccagcaagccttccgtctgcgggta

SEQ ID NO: 4489905 - DNA, 25 bp, Homo sapien
gagctccttcccgtatttcagcata

SEQ ID NO: 4489906 - DNA, 25 bp, Homo sapien
tgcgggtatcctgtggtcttcacct

SEQ ID NO: 4489907 - DNA, 25 bp, Homo sapien
ttcccgtatttcagcatacagtccc

SEQ ID NO: 4489908 - DNA, 25 bp, Homo sapien
aatctttatcttgtagtaactgaag

SEQ ID NO: 4489909 - DNA, 25 bp, Homo sapien
tacattaatatcaagagagtctttc

SEQ ID NO: 4489910 - DNA, 25 bp, Homo sapien
tagcttcatggattcaccaacttct

SEQ ID NO: 4489911 - DNA, 25 bp, Homo sapien
ctgaagtggatcaataaaagtttgc

SEQ ID NO: 4489912 - DNA, 25 bp, Homo sapien
catatccataagacggtgcttgtac

SEQ ID NO: 4489913 - DNA, 25 bp, Homo sapien
tctgtacatatccataagacggtgc

SEQ ID NO: 4489914 - DNA, 25 bp, Homo sapien
taagacggtgcttgtacctccagag

SEQ ID NO: 4489915 - DNA, 25 bp, Homo sapien
gtgcttgtacctccagagtggaagt

SEQ ID NO: 4489916 - DNA, 25 bp, Homo sapien
gacttcttcgtctggtatcttacct

SEQ ID NO: 4489917 - DNA, 25 bp, Homo sapien
aggcggcggccttccagctttttca

SEQ ID NO: 4489918 - DNA, 25 bp, Homo sapien
ttataatcgtaatccaggcggcggc

SEQ ID NO: 4489919 - DNA, 25 bp, Homo sapien
caaatttttctaccgcttgtctgac

SEQ ID NO: 4489920 - DNA, 25 bp, Homo sapien
ctgcaggtcaatttcccacaggaag

SEQ ID NO: 4489921 - DNA, 25 bp, Homo sapien
tgcaggtcaatttcccacaggaagc

SEQ ID NO: 4489922 - DNA, 25 bp, Homo sapien
cacattctctgtttatccccaagca

SEQ ID NO: 4489923 - DNA, 25 bp, Homo sapien
ccaaggagtgaccagcaggagattt

SEQ ID NO: 4489924 - DNA, 25 bp, Homo sapien
gcaccaggcagtatcggcattggca

SEQ ID NO: 4489925 - DNA, 25 bp, Homo sapien
acaggagaggatggtcagaccacct

SEQ ID NO: 4489926 - DNA, 25 bp, Homo sapien
gaggaataatgaggaataaacttct

SEQ ID NO: 4489927 - DNA, 25 bp, Homo sapien
atttgctactagtaagttgtgagga

SEQ ID NO: 4489928 - DNA, 25 bp, Homo sapien
tttgctactagtaagttgtgaggaa

SEQ ID NO: 4489929 - DNA, 25 bp, Homo sapien
tgtgaggaataatgaggaataaact

SEQ ID NO: 4489930 - DNA, 25 bp, Homo sapien
taaagaccaggtgtgctacgataga

SEQ ID NO: 4489931 - DNA, 25 bp, Homo sapien
tccacttccgggttgagacctgggc

SEQ ID NO: 4489932 - DNA, 25 bp, Homo sapien
tcagtacaagtcctgaagggctggc

SEQ ID NO: 4489933 - DNA, 25 bp, Homo sapien
cattcgtaactgctcattgggtggc

SEQ ID NO: 4489934 - DNA, 25 bp, Homo sapien
aaagctcatggatctgaaaacagag

SEQ ID NO: 4489935 - DNA, 25 bp, Homo sapien
cagagagataaagctcttccagtta

SEQ ID NO: 4489936 - DNA, 25 bp, Homo sapien
tagcaaaagaactgcctactttgtc

SEQ ID NO: 4489937 - DNA, 25 bp, Homo sapien
tcttccagttacaaacgaagccaac

SEQ ID NO: 4489938 - DNA, 25 bp, Homo sapien
cagcagcaaagacctagctttgcag

SEQ ID NO: 4489939 - DNA, 25 bp, Homo sapien
gtataataatcatacaggtcatggt

SEQ ID NO: 4489940 - DNA, 25 bp, Homo sapien
caggtcatggtatggagctataaat

SEQ ID NO: 4489941 - DNA, 25 bp, Homo sapien
tttgcagggaagaccagtgtctgcc

SEQ ID NO: 4489942 - DNA, 25 bp, Homo sapien
ctgtggactgtctgtgatagtctaa

SEQ ID NO: 4489943 - DNA, 25 bp, Homo sapien
tctgtgatagtctaatgctgcctct

SEQ ID NO: 4489944 - DNA, 25 bp, Homo sapien
tcctgcagaatctctgtggactgtc

SEQ ID NO: 4489945 - DNA, 25 bp, Homo sapien
tgctgcctctatgaacacagccaac

SEQ ID NO: 4489946 - DNA, 25 bp, Homo sapien
tagttgccctaaacacgggtcacaa

SEQ ID NO: 4489947 - DNA, 25 bp, Homo sapien
gcaatgaagccagggtagttctgta

SEQ ID NO: 4489948 - DNA, 25 bp, Homo sapien
gcccttggcttgtaagaaacgtgga

SEQ ID NO: 4489949 - DNA, 25 bp, Homo sapien
ttcaatagatgttacctccgcagcc

SEQ ID NO: 4489950 - DNA, 25 bp, Homo sapien
gctcactagaactccttttcacagg

SEQ ID NO: 4489951 - DNA, 25 bp, Homo sapien
cttggcttgtattctcgtctgggga

SEQ ID NO: 4489952 - DNA, 25 bp, Homo sapien
gaaactccattgagctcactagaac

SEQ ID NO: 4489953 - DNA, 25 bp, Homo sapien
tgtcgtcttcactacagaggtggtg

SEQ ID NO: 4489954 - DNA, 25 bp, Homo sapien
tcaggtgatcaagcatagtacaggg

SEQ ID NO: 4489955 - DNA, 25 bp, Homo sapien
tcaagcaggccccactggctattat

SEQ ID NO: 4489956 - DNA, 25 bp, Homo sapien
tttatggccgtgtactgtcccatgg

SEQ ID NO: 4489957 - DNA, 25 bp, Homo sapien
tatatatgcggtaacgggaatgctg

SEQ ID NO: 4489958 - DNA, 25 bp, Homo sapien
tacggaagggaatgtagccaacttc

SEQ ID NO: 4489959 - DNA, 25 bp, Homo sapien
taatcagactaaaagggtcaatgcg

SEQ ID NO: 4489960 - DNA, 25 bp, Homo sapien
tattctggcccatcaagcaagcttc

SEQ ID NO: 4489961 - DNA, 25 bp, Homo sapien
tcaatgcgaatgaggaatacggaag

SEQ ID NO: 4489962 - DNA, 25 bp, Homo sapien
gccctggcaactgccttcaggaagg

SEQ ID NO: 4489963 - DNA, 25 bp, Homo sapien
aaactcagtgtaagtggatcctgaa

SEQ ID NO: 4489964 - DNA, 25 bp, Homo sapien
ttgtaccagtgccaggagccctggc

SEQ ID NO: 4489965 - DNA, 25 bp, Homo sapien
gagcagccaggtgagtccactcatc

SEQ ID NO: 4489966 - DNA, 25 bp, Homo sapien
taatctgctggttccagtctgctgt

SEQ ID NO: 4489967 - DNA, 25 bp, Homo sapien
aatctgctggttccagtctgctgta

SEQ ID NO: 4489968 - DNA, 25 bp, Homo sapien
tctgctggttccagtctgctgtagg

SEQ ID NO: 4489969 - DNA, 25 bp, Homo sapien
ctaatctgctggttccagtctgctg

SEQ ID NO: 4489970 - DNA, 25 bp, Homo sapien
tcccttgtagtctggctgcgacctg

SEQ ID NO: 4489971 - DNA, 25 bp, Homo sapien
cagactgctgtgtcttttgagtgtt

SEQ ID NO: 4489972 - DNA, 25 bp, Homo sapien
tagtctggctgcgacctgtcacttt

SEQ ID NO: 4489973 - DNA, 25 bp, Homo sapien
cttttagtaaatcccccagactgct

SEQ ID NO: 4489974 - DNA, 25 bp, Homo sapien
accaccgaaggagcccactgtgctt

SEQ ID NO: 4489975 - DNA, 25 bp, Homo sapien
tttcagaccaccgaaggagcccact

SEQ ID NO: 4489976 - DNA, 25 bp, Homo sapien
tcagaccaccgaaggagcccactgt

SEQ ID NO: 4489977 - DNA, 25 bp, Homo sapien
accgaaggagcccactgtgcttgct

SEQ ID NO: 4489978 - DNA, 25 bp, Homo sapien
cggtgtccttgaacaggcggctgaa

SEQ ID NO: 4489979 - DNA, 25 bp, Homo sapien
tggctgctgtggatctcggtgtcct

SEQ ID NO: 4489980 - DNA, 25 bp, Homo sapien
catagttgtgtaggagctcccaggt

SEQ ID NO: 4489981 - DNA, 25 bp, Homo sapien
aatcgctgggcatagttgtgtagga

SEQ ID NO: 4489982 - DNA, 25 bp, Homo sapien
tattatagttgtttagacagcttga

SEQ ID NO: 4489983 - DNA, 25 bp, Homo sapien
acagcattatgggaggaggaagaca

SEQ ID NO: 4489984 - DNA, 25 bp, Homo sapien
tatatctctaaggaacagggcactc

SEQ ID NO: 4489985 - DNA, 25 bp, Homo sapien
gaaattcatggagtagcgcctatat

SEQ ID NO: 4489986 - DNA, 25 bp, Homo sapien
ccaagtaaagagaataggtacgttg

SEQ ID NO: 4489987 - DNA, 25 bp, Homo sapien
ataggtacgttggggtatttctgtg

SEQ ID NO: 4489988 - DNA, 25 bp, Homo sapien
caagtaaagagaataggtacgttgg

SEQ ID NO: 4489989 - DNA, 25 bp, Homo sapien
tcttttcaatactcccaggcagaga

SEQ ID NO: 4489990 - DNA, 25 bp, Homo sapien
ctaagggagcgacagaggaatcaca

SEQ ID NO: 4489991 - DNA, 25 bp, Homo sapien
tctgggagcttacagtttctttgtg

SEQ ID NO: 4489992 - DNA, 25 bp, Homo sapien
ggcagagaagtcgtgcccagcccat

SEQ ID NO: 4489993 - DNA, 25 bp, Homo sapien
gccgtttgtggtctctggctgcctc

SEQ ID NO: 4489994 - DNA, 25 bp, Homo sapien
ccgtttgtggtctctggctgcctca

SEQ ID NO: 4489995 - DNA, 25 bp, Homo sapien
cgtttgtggtctctggctgcctcag

SEQ ID NO: 4489996 - DNA, 25 bp, Homo sapien
ctgtccacatgatatggagacaaaa

SEQ ID NO: 4489997 - DNA, 25 bp, Homo sapien
ctcagagagacccttaacagcaggc

SEQ ID NO: 4489998 - DNA, 25 bp, Homo sapien
cagagagacccttaacagcaggcct

SEQ ID NO: 4489999 - DNA, 25 bp, Homo sapien
agagacccttaacagcaggccttgc

SEQ ID NO: 4490000 - DNA, 25 bp, Homo sapien
gggaagaatcccgattctccgtgta

SEQ ID NO: 4490001 - DNA, 25 bp, Homo sapien
tcaaagtcatagagaccacgacagc

SEQ ID NO: 4490002 - DNA, 25 bp, Homo sapien
tggttaatgtaatgatgtccccttc

SEQ ID NO: 4490003 - DNA, 25 bp, Homo sapien
accacgacagcagggctggtccatg

SEQ ID NO: 4490004 - DNA, 25 bp, Homo sapien
accaatgacttttaggacaggaagc

SEQ ID NO: 4490005 - DNA, 25 bp, Homo sapien
tataggccattcgttgacataactg

SEQ ID NO: 4490006 - DNA, 25 bp, Homo sapien
ccgcactgagagcacactggtgtga

SEQ ID NO: 4490007 - DNA, 25 bp, Homo sapien
cattgcagctgaggaatataggcca

SEQ ID NO: 4490008 - DNA, 25 bp, Homo sapien
cgtcaacacctcgtgcggaatccgg

SEQ ID NO: 4490009 - DNA, 25 bp, Homo sapien
cagaagtatctgggacgtgcagccc

SEQ ID NO: 4490010 - DNA, 25 bp, Homo sapien
agaagccgcccgtcaacacctcgtg

SEQ ID NO: 4490011 - DNA, 25 bp, Homo sapien
tgcggaatccggcaccaggaccttc

SEQ ID NO: 4490012 - DNA, 25 bp, Homo sapien
ctcgactcccgcttcgcctcgcggg

SEQ ID NO: 4490013 - DNA, 25 bp, Homo sapien
ggcgccttggcggagctggtgtccg

SEQ ID NO: 4490014 - DNA, 25 bp, Homo sapien
gtatgagtcgagactggaaaagccg

SEQ ID NO: 4490015 - DNA, 25 bp, Homo sapien
gaaaagccgaggtcacactcgactc

SEQ ID NO: 4490016 - DNA, 25 bp, Homo sapien
gtctagtctcctccgggtctcagtt

SEQ ID NO: 4490017 - DNA, 25 bp, Homo sapien
tagtctcctccgggtctcagttgta

SEQ ID NO: 4490018 - DNA, 25 bp, Homo sapien
gtctcctccgggtctcagttgtagc

SEQ ID NO: 4490019 - DNA, 25 bp, Homo sapien
ggggtctagtctcctccgggtctca

SEQ ID NO: 4490020 - DNA, 25 bp, Homo sapien
tgaagaccatccctatcagcaccca

SEQ ID NO: 4490021 - DNA, 25 bp, Homo sapien
gcatgaagaccatccctatcagcac

SEQ ID NO: 4490022 - DNA, 25 bp, Homo sapien
gagtgcatgaagaccatccctatca

SEQ ID NO: 4490023 - DNA, 25 bp, Homo sapien
gtgcatgaagaccatccctatcagc

SEQ ID NO: 4490024 - DNA, 25 bp, Homo sapien
gatacttcagaaagggcggccttga

SEQ ID NO: 4490025 - DNA, 25 bp, Homo sapien
tcacaagatacttcagaaagggcgg

SEQ ID NO: 4490026 - DNA, 25 bp, Homo sapien
aatcacaagatacttcagaaagggc

SEQ ID NO: 4490027 - DNA, 25 bp, Homo sapien
caagatacttcagaaagggcggcct

SEQ ID NO: 4490028 - DNA, 25 bp, Homo sapien
agtctctggcttccatggtagcatc

SEQ ID NO: 4490029 - DNA, 25 bp, Homo sapien
tggcatgcgttagctcctggctaca

SEQ ID NO: 4490030 - DNA, 25 bp, Homo sapien
cagttacatctgaagacttgagcag

SEQ ID NO: 4490031 - DNA, 25 bp, Homo sapien
tcaaggtgtcactacagccagttac

SEQ ID NO: 4490032 - DNA, 25 bp, Homo sapien
caataaagcggtgtctgcatccaag

SEQ ID NO: 4490033 - DNA, 25 bp, Homo sapien
cgagtgaacaaaccatccaggaagc

SEQ ID NO: 4490034 - DNA, 25 bp, Homo sapien
tatgacataaaacccggagtgctgg

SEQ ID NO: 4490035 - DNA, 25 bp, Homo sapien
tttacatttgagagacgacatcgtc

SEQ ID NO: 4490036 - DNA, 25 bp, Homo sapien
gacatgtagaaaatactcctcataa

SEQ ID NO: 4490037 - DNA, 25 bp, Homo sapien
tatcaaaatggagtatagtcactgt

SEQ ID NO: 4490038 - DNA, 25 bp, Homo sapien
aattagtataattaaaggtgatgct

SEQ ID NO: 4490039 - DNA, 25 bp, Homo sapien
tttaaatagttatcaaaatggagta

SEQ ID NO: 4490040 - DNA, 25 bp, Homo sapien
tttatctttatctgttgtagggatg

SEQ ID NO: 4490041 - DNA, 25 bp, Homo sapien
ccattgtgcccagtcctgttattcc

SEQ ID NO: 4490042 - DNA, 25 bp, Homo sapien
gtcctgttattccatttctaatgcc

SEQ ID NO: 4490043 - DNA, 25 bp, Homo sapien
tatctttatctgttgtagggatggg

SEQ ID NO: 4490044 - DNA, 25 bp, Homo sapien
ggcaagttctttccaaccttcaaga

SEQ ID NO: 4490045 - DNA, 25 bp, Homo sapien
gaaatcccgaacacaccaacaattg

SEQ ID NO: 4490046 - DNA, 25 bp, Homo sapien
ctttgctgtccagaaggcttctagg

SEQ ID NO: 4490047 - DNA, 25 bp, Homo sapien
taaaacccacattctctgaagagag

SEQ ID NO: 4490048 - DNA, 25 bp, Homo sapien
acagggaaaggcagtttcatattcc

SEQ ID NO: 4490049 - DNA, 25 bp, Homo sapien
aaggcagtttcatattcctggggcc

SEQ ID NO: 4490050 - DNA, 25 bp, Homo sapien
ggaagtcacagggaaaggcagtttc

SEQ ID NO: 4490051 - DNA, 25 bp, Homo sapien
ggaaaggcagtttcatattcctggg

SEQ ID NO: 4490052 - DNA, 25 bp, Homo sapien
ctgtgtggctgaaatcatgcaggct

SEQ ID NO: 4490053 - DNA, 25 bp, Homo sapien
ttcaggaaacagctcgtctgtgtgg

SEQ ID NO: 4490054 - DNA, 25 bp, Homo sapien
tcccaacctgacaaagtccagaaac

SEQ ID NO: 4490055 - DNA, 25 bp, Homo sapien
tccagaaacacgtcggggacacatt

SEQ ID NO: 4490056 - DNA, 25 bp, Homo sapien
ttggcaatgagacacctcccaacct

SEQ ID NO: 4490057 - DNA, 25 bp, Homo sapien
cacgtcggggacacattcatgttta

SEQ ID NO: 4490058 - DNA, 25 bp, Homo sapien
ttagttcatggaaagctcatacccc

SEQ ID NO: 4490059 - DNA, 25 bp, Homo sapien
ataaacatgcatattgtagactgtg

SEQ ID NO: 4490060 - DNA, 25 bp, Homo sapien
gctcataccccagtccgttttcatg

SEQ ID NO: 4490061 - DNA, 25 bp, Homo sapien
tattgtagactgtgtttagttcatg

SEQ ID NO: 4490062 - DNA, 25 bp, Homo sapien
agtggcccgaatcaaactggcagcc

SEQ ID NO: 4490063 - DNA, 25 bp, Homo sapien
ccaggatatcacagtggcccgaatc

SEQ ID NO: 4490064 - DNA, 25 bp, Homo sapien
agggcactgttaggccaggatatca

SEQ ID NO: 4490065 - DNA, 25 bp, Homo sapien
tgttaggccaggatatcacagtggc

SEQ ID NO: 4490066 - DNA, 25 bp, Homo sapien
ctgaggagaaagtgcaaactcggga

SEQ ID NO: 4490067 - DNA, 25 bp, Homo sapien
gtgcaaactcgggaaggaaataggc

SEQ ID NO: 4490068 - DNA, 25 bp, Homo sapien
aactcgggaaggaaataggctccag

SEQ ID NO: 4490069 - DNA, 25 bp, Homo sapien
gagaaagtgcaaactcgggaaggaa

SEQ ID NO: 4490070 - DNA, 25 bp, Homo sapien
catagcgataagtgaggaactgctc

SEQ ID NO: 4490071 - DNA, 25 bp, Homo sapien
tcatagcgataagtgaggaactgct

SEQ ID NO: 4490072 - DNA, 25 bp, Homo sapien
ggtcatcatagcgataagtgaggaa

SEQ ID NO: 4490073 - DNA, 25 bp, Homo sapien
tcatcatagcgataagtgaggaact

SEQ ID NO: 4490074 - DNA, 25 bp, Homo sapien
ctgcccacagcggtctggagggtca

SEQ ID NO: 4490075 - DNA, 25 bp, Homo sapien
cttgccccaatgaccagtgtggctc

SEQ ID NO: 4490076 - DNA, 25 bp, Homo sapien
cactcttgccccaatgaccagtgtg

SEQ ID NO: 4490077 - DNA, 25 bp, Homo sapien
cccacagcggtctggagggtcacag

SEQ ID NO: 4490078 - DNA, 25 bp, Homo sapien
taacaaaggctacactggaaaactg

SEQ ID NO: 4490079 - DNA, 25 bp, Homo sapien
ctgctggcatataacaaaggctaca

SEQ ID NO: 4490080 - DNA, 25 bp, Homo sapien
caaaggctacactggaaaactgtcc

SEQ ID NO: 4490081 - DNA, 25 bp, Homo sapien
gctgctggcatataacaaaggctac

SEQ ID NO: 4490082 - DNA, 25 bp, Homo sapien
tgtatttcatggctgatcgatcttc

SEQ ID NO: 4490083 - DNA, 25 bp, Homo sapien
ccaagttgtagagaacctgatagaa

SEQ ID NO: 4490084 - DNA, 25 bp, Homo sapien
tcagaaggccatctaagacagagaa

SEQ ID NO: 4490085 - DNA, 25 bp, Homo sapien
tcgatcttctttagcagagctcaga

SEQ ID NO: 4490086 - DNA, 25 bp, Homo sapien
tgtaagtgaaggtggccttacttct

SEQ ID NO: 4490087 - DNA, 25 bp, Homo sapien
cgcgtgtaagtgaaggtggccttac

SEQ ID NO: 4490088 - DNA, 25 bp, Homo sapien
ctgcgcgtgtaagtgaaggtggcct

SEQ ID NO: 4490089 - DNA, 25 bp, Homo sapien
cgtgtaagtgaaggtggccttactt

SEQ ID NO: 4490090 - DNA, 25 bp, Homo sapien
ttctctgtattgttcattttaatat

SEQ ID NO: 4490091 - DNA, 25 bp, Homo sapien
ctcatcacaaatttcatatcatcct

SEQ ID NO: 4490092 - DNA, 25 bp, Homo sapien
aactcatcacaaatttcatatcatc

SEQ ID NO: 4490093 - DNA, 25 bp, Homo sapien
tgtattgttcattttaatatatgtg

SEQ ID NO: 4490094 - DNA, 25 bp, Homo sapien
gagtgctgtcaacaaactagaggag

SEQ ID NO: 4490095 - DNA, 25 bp, Homo sapien
catgcttttactgggcactacgcca

SEQ ID NO: 4490096 - DNA, 25 bp, Homo sapien
caaagattagcaagtacggtgcgat

SEQ ID NO: 4490097 - DNA, 25 bp, Homo sapien
tccagatgtctatccagtgggaagg

SEQ ID NO: 4490098 - DNA, 25 bp, Homo sapien
aagggctggtgacaaggatctccca

SEQ ID NO: 4490099 - DNA, 25 bp, Homo sapien
ggctggtgacaaggatctcccacta

SEQ ID NO: 4490100 - DNA, 25 bp, Homo sapien
tgaagggctggtgacaaggatctcc

SEQ ID NO: 4490101 - DNA, 25 bp, Homo sapien
ggtgacaaggatctcccactaacag

SEQ ID NO: 4490102 - DNA, 25 bp, Homo sapien
gatggggacttctagggctccttgg

SEQ ID NO: 4490103 - DNA, 25 bp, Homo sapien
atggggacttctagggctccttggc

SEQ ID NO: 4490104 - DNA, 25 bp, Homo sapien
gcaaatgtggatggagatgtactca

SEQ ID NO: 4490105 - DNA, 25 bp, Homo sapien
aaatgtggatggagatgtactcatg

SEQ ID NO: 4490106 - DNA, 25 bp, Homo sapien
tgtggatggagatgtactcatgcat

SEQ ID NO: 4490107 - DNA, 25 bp, Homo sapien
cagcccagcaaatgtggatggagat

SEQ ID NO: 4490108 - DNA, 25 bp, Homo sapien
tcgtcaggcaggatgctgtgttcca

SEQ ID NO: 4490109 - DNA, 25 bp, Homo sapien
tcaggcaggatgctgtgttccaggc

SEQ ID NO: 4490110 - DNA, 25 bp, Homo sapien
ctggtcgtcaggcaggatgctgtgt

SEQ ID NO: 4490111 - DNA, 25 bp, Homo sapien
gtcgtcaggcaggatgctgtgttcc

SEQ ID NO: 4490112 - DNA, 25 bp, Homo sapien
tgttgaaggatgcgtcttctctccc

SEQ ID NO: 4490113 - DNA, 25 bp, Homo sapien
aaggtgttgaaggatgcgtcttctc

SEQ ID NO: 4490114 - DNA, 25 bp, Homo sapien
gaaggtgttgaaggatgcgtcttct

SEQ ID NO: 4490115 - DNA, 25 bp, Homo sapien
ggtgttgaaggatgcgtcttctctc

SEQ ID NO: 4490116 - DNA, 25 bp, Homo sapien
ctgtcaacagccatgggttccaggt

SEQ ID NO: 4490117 - DNA, 25 bp, Homo sapien
gctcagggttcaagagctgacaata

SEQ ID NO: 4490118 - DNA, 25 bp, Homo sapien
gctgacaataggtgtcagtgtgaac

SEQ ID NO: 4490119 - DNA, 25 bp, Homo sapien
gcaatgctcagggttcaagagctga

SEQ ID NO: 4490120 - DNA, 25 bp, Homo sapien
tgtaagtggccaccggcacagttac

SEQ ID NO: 4490121 - DNA, 25 bp, Homo sapien
agaaaccctaaagccctgtgcactg

SEQ ID NO: 4490122 - DNA, 25 bp, Homo sapien
gttccatgagtgtctaaaatgagca

SEQ ID NO: 4490123 - DNA, 25 bp, Homo sapien
cagttactggcataggtattcctta

SEQ ID NO: 4490124 - DNA, 25 bp, Homo sapien
gactagcttcatcatgtaactatca

SEQ ID NO: 4490125 - DNA, 25 bp, Homo sapien
atactgttttcacaagagactagct

SEQ ID NO: 4490126 - DNA, 25 bp, Homo sapien
tgtaaatatcattcacattacccaa

SEQ ID NO: 4490127 - DNA, 25 bp, Homo sapien
actacttccaacccgaagtatactg

SEQ ID NO: 4490128 - DNA, 25 bp, Homo sapien
gcacagggtcacttccactactgct

SEQ ID NO: 4490129 - DNA, 25 bp, Homo sapien
cttggagaatgtccttcagccaggg

SEQ ID NO: 4490130 - DNA, 25 bp, Homo sapien
ttggagaatgtccttcagccagggc

SEQ ID NO: 4490131 - DNA, 25 bp, Homo sapien
cagccagggcacagggtcacttcca

SEQ ID NO: 4490132 - DNA, 25 bp, Homo sapien
aggaaagataaatcctctcgtcctc

SEQ ID NO: 4490133 - DNA, 25 bp, Homo sapien
aaggaaagataaatcctctcgtcct

SEQ ID NO: 4490134 - DNA, 25 bp, Homo sapien
ggaaagataaatcctctcgtcctcc

SEQ ID NO: 4490135 - DNA, 25 bp, Homo sapien
caagtatgggctcaaactggttcat

SEQ ID NO: 4490136 - DNA, 25 bp, Homo sapien
ctgccagggttaatcccgttttcat

SEQ ID NO: 4490137 - DNA, 25 bp, Homo sapien
tgcaatacggaaagctaattctgta

SEQ ID NO: 4490138 - DNA, 25 bp, Homo sapien
gacaatccatccctgtgcaatacgg

SEQ ID NO: 4490139 - DNA, 25 bp, Homo sapien
gtggtctgcatgctctggaccacct

SEQ ID NO: 4490140 - DNA, 25 bp, Homo sapien
tggaccacctgcaggggttgtgctg

SEQ ID NO: 4490141 - DNA, 25 bp, Homo sapien
gattggttggtggtctgcatgctct

SEQ ID NO: 4490142 - DNA, 25 bp, Homo sapien
ctccttctgggattggttggtggtc

SEQ ID NO: 4490143 - DNA, 25 bp, Homo sapien
accaggaatccagtcaaatacagca

SEQ ID NO: 4490144 - DNA, 25 bp, Homo sapien
aggaatccagtcaaatacagcagcc

SEQ ID NO: 4490145 - DNA, 25 bp, Homo sapien
tccacttcctttcacgaccaggaat

SEQ ID NO: 4490146 - DNA, 25 bp, Homo sapien
cttcctttcacgaccaggaatccag

SEQ ID NO: 4490147 - DNA, 25 bp, Homo sapien
ttgtcttcatctgaacgagtgtttc

SEQ ID NO: 4490148 - DNA, 25 bp, Homo sapien
cttcatctgaacgagtgtttcttga

SEQ ID NO: 4490149 - DNA, 25 bp, Homo sapien
ccagtcaaacatctccgcagagaat

SEQ ID NO: 4490150 - DNA, 25 bp, Homo sapien
aaacatctccgcagagaatatgatg

SEQ ID NO: 4490151 - DNA, 25 bp, Homo sapien
gattgcctcatccaaaatttccagc

SEQ ID NO: 4490152 - DNA, 25 bp, Homo sapien
ctgattgcctcatccaaaatttcca

SEQ ID NO: 4490153 - DNA, 25 bp, Homo sapien
tgattgcctcatccaaaatttccag

SEQ ID NO: 4490154 - DNA, 25 bp, Homo sapien
gctgcatgtcttgtaccgaatgttc

SEQ ID NO: 4490155 - DNA, 25 bp, Homo sapien
tgtcttgtaccgaatgttctgccct

SEQ ID NO: 4490156 - DNA, 25 bp, Homo sapien
taccgaatgttctgcccttcacaat

SEQ ID NO: 4490157 - DNA, 25 bp, Homo sapien
tgattgctgcatgtcttgtaccgaa

SEQ ID NO: 4490158 - DNA, 25 bp, Homo sapien
ccacgtatgaatgagattatgtggt

SEQ ID NO: 4490159 - DNA, 25 bp, Homo sapien
aacacgtgagtgaggatgtctctgt

SEQ ID NO: 4490160 - DNA, 25 bp, Homo sapien
ttacattcccactaatagcaataag

SEQ ID NO: 4490161 - DNA, 25 bp, Homo sapien
actattttccacaaacactgaacta

SEQ ID NO: 4490162 - DNA, 25 bp, Homo sapien
gacatcattgtaggctgagcactgc

SEQ ID NO: 4490163 - DNA, 25 bp, Homo sapien
gatacacatgtccaaggagtccgtg

SEQ ID NO: 4490164 - DNA, 25 bp, Homo sapien
gagttccatccagtaccttaggtgc

SEQ ID NO: 4490165 - DNA, 25 bp, Homo sapien
gagtccgtgttgcaacgagttccat

SEQ ID NO: 4490166 - DNA, 25 bp, Homo sapien
ctatatccctatattaatatctgtc

SEQ ID NO: 4490167 - DNA, 25 bp, Homo sapien
tccaccgctgtcattatacctatat

SEQ ID NO: 4490168 - DNA, 25 bp, Homo sapien
tatgcctatgtatctccaccgctgt

SEQ ID NO: 4490169 - DNA, 25 bp, Homo sapien
ttgtctttatcattagctgtaccta

SEQ ID NO: 4490170 - DNA, 25 bp, Homo sapien
cacagttgtcctccttggcattgct

SEQ ID NO: 4490171 - DNA, 25 bp, Homo sapien
tcgccggcacagactccacagttgt

SEQ ID NO: 4490172 - DNA, 25 bp, Homo sapien
aaacgtgtgactttgattgtccccg

SEQ ID NO: 4490173 - DNA, 25 bp, Homo sapien
gtacaagcctgcaggtggagccatc

SEQ ID NO: 4490174 - DNA, 25 bp, Homo sapien
caccataattctggtcaatgaagca

SEQ ID NO: 4490175 - DNA, 25 bp, Homo sapien
cataattctggtcaatgaagcaaaa

SEQ ID NO: 4490176 - DNA, 25 bp, Homo sapien
acaccataattctggtcaatgaagc

SEQ ID NO: 4490177 - DNA, 25 bp, Homo sapien
agcaaaattccctggggagaatatc

SEQ ID NO: 4490178 - DNA, 25 bp, Homo sapien
cagcatctcgttgccatgtcctgac

SEQ ID NO: 4490179 - DNA, 25 bp, Homo sapien
gggaagattggaatgaattcttggc

SEQ ID NO: 4490180 - DNA, 25 bp, Homo sapien
agcatgattatagggaagtgcttcc

SEQ ID NO: 4490181 - DNA, 25 bp, Homo sapien
gatgtaggagctgcgtagattctgc

SEQ ID NO: 4490182 - DNA, 25 bp, Homo sapien
tcactgtaattctcacacttcgact

SEQ ID NO: 4490183 - DNA, 25 bp, Homo sapien
aattctcacacttcgacttcccaaa

SEQ ID NO: 4490184 - DNA, 25 bp, Homo sapien
gtaattctcacacttcgacttccca

SEQ ID NO: 4490185 - DNA, 25 bp, Homo sapien
actgtaattctcacacttcgacttc

SEQ ID NO: 4490186 - DNA, 25 bp, Homo sapien
cctttgcatgttgagctcttccttc

SEQ ID NO: 4490187 - DNA, 25 bp, Homo sapien
ctacaagtcaggacgctcagctgca

SEQ ID NO: 4490188 - DNA, 25 bp, Homo sapien
ttttccttctacaagtcaggacgct

SEQ ID NO: 4490189 - DNA, 25 bp, Homo sapien
gttcctttgcatgttgagctcttcc

SEQ ID NO: 4490190 - DNA, 25 bp, Homo sapien
tcttaaaagtttgcctctcggagcc

SEQ ID NO: 4490191 - DNA, 25 bp, Homo sapien
tcagccatcagaggtcctggaatct

SEQ ID NO: 4490192 - DNA, 25 bp, Homo sapien
tgtgttttctacgagaaagacgccg

SEQ ID NO: 4490193 - DNA, 25 bp, Homo sapien
gggctgttaaagctgtgttctcctt

SEQ ID NO: 4490194 - DNA, 25 bp, Homo sapien
ggcgcacactatcatgcctagctag

SEQ ID NO: 4490195 - DNA, 25 bp, Homo sapien
actgaaccacgctgtctttggctgc

SEQ ID NO: 4490196 - DNA, 25 bp, Homo sapien
tcctccacacgtcacagtgcaggga

SEQ ID NO: 4490197 - DNA, 25 bp, Homo sapien
gaagaactgaaccacgctgtctttg

SEQ ID NO: 4490198 - DNA, 25 bp, Homo sapien
agaactgaaccacgctgtctttggc

SEQ ID NO: 4490199 - DNA, 25 bp, Homo sapien
acacattcagcagaattgagctgat

SEQ ID NO: 4490200 - DNA, 25 bp, Homo sapien
ggtcaggaactaccctcttcaagcg

SEQ ID NO: 4490201 - DNA, 25 bp, Homo sapien
tagtagtgacaataatggtcaggaa

SEQ ID NO: 4490202 - DNA, 25 bp, Homo sapien
tcaagcggatatccacacattcagc

SEQ ID NO: 4490203 - DNA, 25 bp, Homo sapien
ttgccctgcaaagattgatcagtct

SEQ ID NO: 4490204 - DNA, 25 bp, Homo sapien
attgatcagtctcagttgaagctga

SEQ ID NO: 4490205 - DNA, 25 bp, Homo sapien
aaagggtgtggacaatgacacaaac

SEQ ID NO: 4490206 - DNA, 25 bp, Homo sapien
aaatgtattgccctgcaaagattga

SEQ ID NO: 4490207 - DNA, 25 bp, Homo sapien
agtggtcatagggcattatctcttt

SEQ ID NO: 4490208 - DNA, 25 bp, Homo sapien
ggaagtggtcatagggcattatctc

SEQ ID NO: 4490209 - DNA, 25 bp, Homo sapien
gaagtggtcatagggcattatctct

SEQ ID NO: 4490210 - DNA, 25 bp, Homo sapien
tggaagtggtcatagggcattatct

SEQ ID NO: 4490211 - DNA, 25 bp, Homo sapien
caggacacggaacatgcagtccaag

SEQ ID NO: 4490212 - DNA, 25 bp, Homo sapien
acaggacacggaacatgcagtccaa

SEQ ID NO: 4490213 - DNA, 25 bp, Homo sapien
cacaggacacggaacatgcagtcca

SEQ ID NO: 4490214 - DNA, 25 bp, Homo sapien
tgagaccactccatggcaatccact

SEQ ID NO: 4490215 - DNA, 25 bp, Homo sapien
tttgcataaccttgggtttgggtgc

SEQ ID NO: 4490216 - DNA, 25 bp, Homo sapien
gggcaatcaaacagattacaagttt

SEQ ID NO: 4490217 - DNA, 25 bp, Homo sapien
gggtgcgtacatgcacttccattct

SEQ ID NO: 4490218 - DNA, 25 bp, Homo sapien
ctccaactgtcttcctaagctcttt

SEQ ID NO: 4490219 - DNA, 25 bp, Homo sapien
tgtcttcctaagctctttggagtag

SEQ ID NO: 4490220 - DNA, 25 bp, Homo sapien
caactgtcttcctaagctctttgga

SEQ ID NO: 4490221 - DNA, 25 bp, Homo sapien
cttccctcgtcctccaactgtcttc

SEQ ID NO: 4490222 - DNA, 25 bp, Homo sapien
gaagaaaagagaagccaacgcattt

SEQ ID NO: 4490223 - DNA, 25 bp, Homo sapien
agaagaaaagagaagccaacgcatt

SEQ ID NO: 4490224 - DNA, 25 bp, Homo sapien
aagaagaaaagagaagccaacgcat

SEQ ID NO: 4490225 - DNA, 25 bp, Homo sapien
tgctctccgcggtggttaatacaca

SEQ ID NO: 4490226 - DNA, 25 bp, Homo sapien
tggtttataacacgggatgggaatg

SEQ ID NO: 4490227 - DNA, 25 bp, Homo sapien
gggaatgacacattcttctttgatg

SEQ ID NO: 4490228 - DNA, 25 bp, Homo sapien
aacttcagttgtggattgcagcccc

SEQ ID NO: 4490229 - DNA, 25 bp, Homo sapien
gttcttctgttgctattctggtctc

SEQ ID NO: 4490230 - DNA, 25 bp, Homo sapien
ttcttctgttgctattctggtctct

SEQ ID NO: 4490231 - DNA, 25 bp, Homo sapien
ggttcttctgttgctattctggtct

SEQ ID NO: 4490232 - DNA, 25 bp, Homo sapien
tcttctgttgctattctggtctctt

SEQ ID NO: 4490233 - DNA, 25 bp, Homo sapien
tctctggaacaataagctttcctgg

SEQ ID NO: 4490234 - DNA, 25 bp, Homo sapien
ttggtctctggaacaataagctttc

SEQ ID NO: 4490235 - DNA, 25 bp, Homo sapien
ttcctgggtcttactcctccctctc

SEQ ID NO: 4490236 - DNA, 25 bp, Homo sapien
ctggaacaataagctttcctgggtc

SEQ ID NO: 4490237 - DNA, 25 bp, Homo sapien
agactgacagacaccttgatcctgg

SEQ ID NO: 4490238 - DNA, 25 bp, Homo sapien
ttgatcctggcctactagtaactgg

SEQ ID NO: 4490239 - DNA, 25 bp, Homo sapien
aacaaggatatcactctggctagag

SEQ ID NO: 4490240 - DNA, 25 bp, Homo sapien
tgaaaacaatctctcagcccacagt

SEQ ID NO: 4490241 - DNA, 25 bp, Homo sapien
cttggaagtgaatgcagtgttgaga

SEQ ID NO: 4490242 - DNA, 25 bp, Homo sapien
agatcaaattaatgacacagaggcc

SEQ ID NO: 4490243 - DNA, 25 bp, Homo sapien
tgttacctacgtctttgcacatgga

SEQ ID NO: 4490244 - DNA, 25 bp, Homo sapien
tgaaagagccatgtctgggcaaaac

SEQ ID NO: 4490245 - DNA, 25 bp, Homo sapien
ggaggccgggctctcatcacatgct

SEQ ID NO: 4490246 - DNA, 25 bp, Homo sapien
tcccacgcatgttgctgtgcaaggg

SEQ ID NO: 4490247 - DNA, 25 bp, Homo sapien
gtactcccagtcgtaagtcgtctca

SEQ ID NO: 4490248 - DNA, 25 bp, Homo sapien
cagtctcagtctgcgtgaatgtgag

SEQ ID NO: 4490249 - DNA, 25 bp, Homo sapien
agcagagcacattcaggcaccaagc

SEQ ID NO: 4490250 - DNA, 25 bp, Homo sapien
gctggatcaagagcagagcacattc

SEQ ID NO: 4490251 - DNA, 25 bp, Homo sapien
gcagagcacattcaggcaccaagct

SEQ ID NO: 4490252 - DNA, 25 bp, Homo sapien
cattggctggatcaagagcagagca

SEQ ID NO: 4490253 - DNA, 25 bp, Homo sapien
tagtaaaaggctaccaacttgagct

SEQ ID NO: 4490254 - DNA, 25 bp, Homo sapien
ctgagtagtaaaaggctaccaactt

SEQ ID NO: 4490255 - DNA, 25 bp, Homo sapien
agtaaaaggctaccaacttgagctt

SEQ ID NO: 4490256 - DNA, 25 bp, Homo sapien
agtagtaaaaggctaccaacttgag

SEQ ID NO: 4490257 - DNA, 25 bp, Homo sapien
gacggtggaccatatcacacaagct

SEQ ID NO: 4490258 - DNA, 25 bp, Homo sapien
ggacagggctctgtgttacaggcct

SEQ ID NO: 4490259 - DNA, 25 bp, Homo sapien
tcatggctggaggacggtggaccat

SEQ ID NO: 4490260 - DNA, 25 bp, Homo sapien
tggaggacggtggaccatatcacac

SEQ ID NO: 4490261 - DNA, 25 bp, Homo sapien
taattccaatttacgatgctctgtg

SEQ ID NO: 4490262 - DNA, 25 bp, Homo sapien
tagtggaaccatataaactgccaat

SEQ ID NO: 4490263 - DNA, 25 bp, Homo sapien
gcagacctgagacagatagttctcc

SEQ ID NO: 4490264 - DNA, 25 bp, Homo sapien
gcctttccattgaggtagaccctgg

SEQ ID NO: 4490265 - DNA, 25 bp, Homo sapien
ccattcttcaatgtgccagccagga

SEQ ID NO: 4490266 - DNA, 25 bp, Homo sapien
ggtgcaggcagtacacatctcgggt

SEQ ID NO: 4490267 - DNA, 25 bp, Homo sapien
tgaattccaactccacaggtagctg

SEQ ID NO: 4490268 - DNA, 25 bp, Homo sapien
ttcatctcggcactcctcaggaggg

SEQ ID NO: 4490269 - DNA, 25 bp, Homo sapien
cgacaggtgactcttctgttctgag

SEQ ID NO: 4490270 - DNA, 25 bp, Homo sapien
gagacgatgccttgggtccttggca

SEQ ID NO: 4490271 - DNA, 25 bp, Homo sapien
tccgttagcagctgccgacaggtga

SEQ ID NO: 4490272 - DNA, 25 bp, Homo sapien
tggcacaggacttgtgagacgatgc

SEQ ID NO: 4490273 - DNA, 25 bp, Homo sapien
taagacaccagtgacaaccgtttgt

SEQ ID NO: 4490274 - DNA, 25 bp, Homo sapien
gtggtgatgtcaccactagcctcca

SEQ ID NO: 4490275 - DNA, 25 bp, Homo sapien
tttgttccaccaggcaggatataac

SEQ ID NO: 4490276 - DNA, 25 bp, Homo sapien
ttattcactgagagagcggacacgg

SEQ ID NO: 4490277 - DNA, 25 bp, Homo sapien
gaggaaatccttgagtcatgcttgc

SEQ ID NO: 4490278 - DNA, 25 bp, Homo sapien
caagggcttatcagacagtattctc

SEQ ID NO: 4490279 - DNA, 25 bp, Homo sapien
gattctctgttttgagtcatctctg

SEQ ID NO: 4490280 - DNA, 25 bp, Homo sapien
tgtatctcatcttggccctacagct

SEQ ID NO: 4490281 - DNA, 25 bp, Homo sapien
gattaattcccgaaagaacactcta

SEQ ID NO: 4490282 - DNA, 25 bp, Homo sapien
aagattaaataaaccaacaagagat

SEQ ID NO: 4490283 - DNA, 25 bp, Homo sapien
taatgacaatttgacttaggagagt

SEQ ID NO: 4490284 - DNA, 25 bp, Homo sapien
gacttgctactaagaaggatgagga

SEQ ID NO: 4490285 - DNA, 25 bp, Homo sapien
ggatgcgccgacctttggctgccag

SEQ ID NO: 4490286 - DNA, 25 bp, Homo sapien
gccctggtagatccctgcacatcat

SEQ ID NO: 4490287 - DNA, 25 bp, Homo sapien
gcaagatcttacaagagggagccct

SEQ ID NO: 4490288 - DNA, 25 bp, Homo sapien
tcatctcactgagggggatgcgccg

SEQ ID NO: 4490289 - DNA, 25 bp, Homo sapien
gcctgcttttcaattgctgtcatgg

SEQ ID NO: 4490290 - DNA, 25 bp, Homo sapien
ccactcctcccaataggagtaaaga

SEQ ID NO: 4490291 - DNA, 25 bp, Homo sapien
catttgaagctgtaccaagaacctg

SEQ ID NO: 4490292 - DNA, 25 bp, Homo sapien
taccaagaacctgggcagatacttt

SEQ ID NO: 4490293 - DNA, 25 bp, Homo sapien
gtaaagatctgagaagctcatttga

SEQ ID NO: 4490294 - DNA, 25 bp, Homo sapien
tcacactggggtatggggcattttg

SEQ ID NO: 4490295 - DNA, 25 bp, Homo sapien
aaggcaggccttgtggccccagatg

SEQ ID NO: 4490296 - DNA, 25 bp, Homo sapien
ccagatggtccctttcccaactctg

SEQ ID NO: 4490297 - DNA, 25 bp, Homo sapien
tgctttggccattgctcacactggg

SEQ ID NO: 4490298 - DNA, 25 bp, Homo sapien
cagttacaggtcctccttgttgtag

SEQ ID NO: 4490299 - DNA, 25 bp, Homo sapien
caggtcctccttgttgtagcacacg

SEQ ID NO: 4490300 - DNA, 25 bp, Homo sapien
ccccagttacaggtcctccttgttg

SEQ ID NO: 4490301 - DNA, 25 bp, Homo sapien
tacaggtcctccttgttgtagcaca

SEQ ID NO: 4490302 - DNA, 25 bp, Homo sapien
tgcagtggcctaacagagctctcaa

SEQ ID NO: 4490303 - DNA, 25 bp, Homo sapien
tatcagctgggacgcaagatcatcg

SEQ ID NO: 4490304 - DNA, 25 bp, Homo sapien
caaactattggcttcgctgtggtcc

SEQ ID NO: 4490305 - DNA, 25 bp, Homo sapien
tgcatgcgagctttgggacacactc

SEQ ID NO: 4490306 - DNA, 25 bp, Homo sapien
tgcaaaaatgaatactgcattttta

SEQ ID NO: 4490307 - DNA, 25 bp, Homo sapien
gcaaaaatgaatactgcatttttat

SEQ ID NO: 4490308 - DNA, 25 bp, Homo sapien
aatgaatactgcatttttattttac

SEQ ID NO: 4490309 - DNA, 25 bp, Homo sapien
caaaaatgaatactgcatttttatt

SEQ ID NO: 4490310 - DNA, 25 bp, Homo sapien
tatatgccttgttctttccttgtag

SEQ ID NO: 4490311 - DNA, 25 bp, Homo sapien
gaaccaagatgattagctacagaac

SEQ ID NO: 4490312 - DNA, 25 bp, Homo sapien
tccacatctgaaccaagatgattag

SEQ ID NO: 4490313 - DNA, 25 bp, Homo sapien
ctacagaacattcatatatgccttg

SEQ ID NO: 4490314 - DNA, 25 bp, Homo sapien
ttgtcacgtttgctccaagggctgc

SEQ ID NO: 4490315 - DNA, 25 bp, Homo sapien
tcaacagacaagatgacaggtgcct

SEQ ID NO: 4490316 - DNA, 25 bp, Homo sapien
cttttacaggacatcggattgtcac

SEQ ID NO: 4490317 - DNA, 25 bp, Homo sapien
ttggtgatatttctttcaacagaca

SEQ ID NO: 4490318 - DNA, 25 bp, Homo sapien
ttcaaaagtctgcataggccaaaca

SEQ ID NO: 4490319 - DNA, 25 bp, Homo sapien
tgtgggtggagtcagttgggagcct

SEQ ID NO: 4490320 - DNA, 25 bp, Homo sapien
tggccagagaatgccggccctttct

SEQ ID NO: 4490321 - DNA, 25 bp, Homo sapien
ctgtaatggtgggtgtattttgcca

SEQ ID NO: 4490322 - DNA, 25 bp, Homo sapien
gaaactttagacatctgtggcttgg

SEQ ID NO: 4490323 - DNA, 25 bp, Homo sapien
atttttcagaatcctctgcaggtat

SEQ ID NO: 4490324 - DNA, 25 bp, Homo sapien
caggtatagggctgtagaaacttta

SEQ ID NO: 4490325 - DNA, 25 bp, Homo sapien
gcttggcatctgcagagttccgttc

SEQ ID NO: 4490326 - DNA, 25 bp, Homo sapien
gagagatgagtactcccagtgctga

SEQ ID NO: 4490327 - DNA, 25 bp, Homo sapien
gggcctggatgagaataaaactaga

SEQ ID NO: 4490328 - DNA, 25 bp, Homo sapien
tgagctccatctaggcagcagtgct

SEQ ID NO: 4490329 - DNA, 25 bp, Homo sapien
gaaaggccaaatgggacaattccta

SEQ ID NO: 4490330 - DNA, 25 bp, Homo sapien
ctaagcttagggctgggccattgat

SEQ ID NO: 4490331 - DNA, 25 bp, Homo sapien
ggctgggccattgatggctttgcca

SEQ ID NO: 4490332 - DNA, 25 bp, Homo sapien
tgccagtgcccttcatttgggaatc

SEQ ID NO: 4490333 - DNA, 25 bp, Homo sapien
tgggaatcaccatctagctcaaact

SEQ ID NO: 4490334 - DNA, 25 bp, Homo sapien
ctttccaggcagtttgagtttgctc

SEQ ID NO: 4490335 - DNA, 25 bp, Homo sapien
tttgctctaagaagcagttgtccag

SEQ ID NO: 4490336 - DNA, 25 bp, Homo sapien
gcatctctaatctttccaggcagtt

SEQ ID NO: 4490337 - DNA, 25 bp, Homo sapien
caggcagtttgagtttgctctaaga

SEQ ID NO: 4490338 - DNA, 25 bp, Homo sapien
caatggtccaagatagaatttcagg

SEQ ID NO: 4490339 - DNA, 25 bp, Homo sapien
attcctgcaaaggaccaatggtcca

SEQ ID NO: 4490340 - DNA, 25 bp, Homo sapien
gactggccaggtatcttagttcaag

SEQ ID NO: 4490341 - DNA, 25 bp, Homo sapien
gataggtccaaggtcttacaggaaa

SEQ ID NO: 4490342 - DNA, 25 bp, Homo sapien
tcatgtagactggagagaaagggaa

SEQ ID NO: 4490343 - DNA, 25 bp, Homo sapien
tgtagactggagagaaagggaagat

SEQ ID NO: 4490344 - DNA, 25 bp, Homo sapien
tagactggagagaaagggaagatac

SEQ ID NO: 4490345 - DNA, 25 bp, Homo sapien
ctcatgtagactggagagaaaggga

SEQ ID NO: 4490346 - DNA, 25 bp, Homo sapien
acctggtaagccttttgacttcagg

SEQ ID NO: 4490347 - DNA, 25 bp, Homo sapien
ttattcaagtctcttaaggaagtca

SEQ ID NO: 4490348 - DNA, 25 bp, Homo sapien
tctgtccattacatcaagctgatta

SEQ ID NO: 4490349 - DNA, 25 bp, Homo sapien
ccttttgacttcaggtccagttctg

SEQ ID NO: 4490350 - DNA, 25 bp, Homo sapien
cttacagtaggcaaaatgcgtgctc

SEQ ID NO: 4490351 - DNA, 25 bp, Homo sapien
tctcatagttattcctatttcctgg

SEQ ID NO: 4490352 - DNA, 25 bp, Homo sapien
tgctccatgaacatggtgacacttg

SEQ ID NO: 4490353 - DNA, 25 bp, Homo sapien
caaaatgcgtgctccatgaacatgg

SEQ ID NO: 4490354 - DNA, 25 bp, Homo sapien
ggaaacattgccactcagagatcct

SEQ ID NO: 4490355 - DNA, 25 bp, Homo sapien
caagttatattaggctgagggacac

SEQ ID NO: 4490356 - DNA, 25 bp, Homo sapien
tctcttcaaccaagttatattaggc

SEQ ID NO: 4490357 - DNA, 25 bp, Homo sapien
caacaacagggatccattgaaaagc

SEQ ID NO: 4490358 - DNA, 25 bp, Homo sapien
gcaagtggagtacagatgttgccac

SEQ ID NO: 4490359 - DNA, 25 bp, Homo sapien
ttggtggctatgcagacgtaggttc

SEQ ID NO: 4490360 - DNA, 25 bp, Homo sapien
gctatgcagacgtaggttccttcat

SEQ ID NO: 4490361 - DNA, 25 bp, Homo sapien
gagtacagatgttgccactgccttt

SEQ ID NO: 4490362 - DNA, 25 bp, Homo sapien
gctgttggttctagtgttggttgcc

SEQ ID NO: 4490363 - DNA, 25 bp, Homo sapien
attctactctctggccatcttcgtt

SEQ ID NO: 4490364 - DNA, 25 bp, Homo sapien
gtccttgcagaaatacgattctact

SEQ ID NO: 4490365 - DNA, 25 bp, Homo sapien
ggttgcctggagaatgtacttttta

SEQ ID NO: 4490366 - DNA, 25 bp, Homo sapien
tctgaatgcgggctcccaaatgacc

SEQ ID NO: 4490367 - DNA, 25 bp, Homo sapien
cagttaccaggctcccaaaaaggct

SEQ ID NO: 4490368 - DNA, 25 bp, Homo sapien
aatgcgggctcccaaatgaccacag

SEQ ID NO: 4490369 - DNA, 25 bp, Homo sapien
gcagaacaatgtgaccagttaccag

SEQ ID NO: 4490370 - DNA, 25 bp, Homo sapien
gtcccggatgttacagggctcaaac

SEQ ID NO: 4490371 - DNA, 25 bp, Homo sapien
ggcagtcccggatgttacagggctc

SEQ ID NO: 4490372 - DNA, 25 bp, Homo sapien
tgggcagtcccggatgttacagggc

SEQ ID NO: 4490373 - DNA, 25 bp, Homo sapien
cagtcccggatgttacagggctcaa

SEQ ID NO: 4490374 - DNA, 25 bp, Homo sapien
ctgcacagttccattggcttttgtc

SEQ ID NO: 4490375 - DNA, 25 bp, Homo sapien
tatccttcaccgcaagacacagagc

SEQ ID NO: 4490376 - DNA, 25 bp, Homo sapien
gactgtggtatccttcaccgcaaga

SEQ ID NO: 4490377 - DNA, 25 bp, Homo sapien
tgcacgtcacctgccgactgtggta

SEQ ID NO: 4490378 - DNA, 25 bp, Homo sapien
ctttaggggcacatgctcttggaga

SEQ ID NO: 4490379 - DNA, 25 bp, Homo sapien
catggatgaccaaaacatggttttc

SEQ ID NO: 4490380 - DNA, 25 bp, Homo sapien
actgaacacatggatgaccaaaaca

SEQ ID NO: 4490381 - DNA, 25 bp, Homo sapien
tcccagaggccggtctttaggggca

SEQ ID NO: 4490382 - DNA, 25 bp, Homo sapien
gctgtgtgacgctgctgcatcctca

SEQ ID NO: 4490383 - DNA, 25 bp, Homo sapien
gctgttgtgttgacaagctgtgtga

SEQ ID NO: 4490384 - DNA, 25 bp, Homo sapien
gtcatcacagttggagtcagagctg

SEQ ID NO: 4490385 - DNA, 25 bp, Homo sapien
agcacggcccatgcaacgtccagga

SEQ ID NO: 4490386 - DNA, 25 bp, Homo sapien
ggtcataaaccaatccagcagaaga

SEQ ID NO: 4490387 - DNA, 25 bp, Homo sapien
catggtcataaaccaatccagcaga

SEQ ID NO: 4490388 - DNA, 25 bp, Homo sapien
cataaaccaatccagcagaagaggt

SEQ ID NO: 4490389 - DNA, 25 bp, Homo sapien
ctacagagagcccatggtcataaac

SEQ ID NO: 4490390 - DNA, 25 bp, Homo sapien
caggagggcccaagacagtgccgcc

SEQ ID NO: 4490391 - DNA, 25 bp, Homo sapien
ggccacaggtttgcaactccttgtg

SEQ ID NO: 4490392 - DNA, 25 bp, Homo sapien
tacagtcgactttccgagactggaa

SEQ ID NO: 4490393 - DNA, 25 bp, Homo sapien
gacagtgccgccaggaaattggttt

SEQ ID NO: 4490394 - DNA, 25 bp, Homo sapien
tacaaacatacagtagtgagttgtg

SEQ ID NO: 4490395 - DNA, 25 bp, Homo sapien
catacagtagtgagttgtgtctgtg

SEQ ID NO: 4490396 - DNA, 25 bp, Homo sapien
tagtgagttgtgtctgtgcagtctc

SEQ ID NO: 4490397 - DNA, 25 bp, Homo sapien
cagtagtgagttgtgtctgtgcagt

SEQ ID NO: 4490398 - DNA, 25 bp, Homo sapien
ttatccctcttgacatgactggcag

SEQ ID NO: 4490399 - DNA, 25 bp, Homo sapien
tccctcttgacatgactggcagcac

SEQ ID NO: 4490400 - DNA, 25 bp, Homo sapien
tggcagcacctttgtttgtagcggt

SEQ ID NO: 4490401 - DNA, 25 bp, Homo sapien
ctggcagcacctttgtttgtagcgg

SEQ ID NO: 4490402 - DNA, 25 bp, Homo sapien
cagtagtgctcaacccagtgtcagt

SEQ ID NO: 4490403 - DNA, 25 bp, Homo sapien
tgaccaggaactaggctcagcagag

SEQ ID NO: 4490404 - DNA, 25 bp, Homo sapien
cagtgtgacagcctatccagagaga

SEQ ID NO: 4490405 - DNA, 25 bp, Homo sapien
tcaactgacatgatgaggtcccaag

SEQ ID NO: 4490406 - DNA, 25 bp, Homo sapien
ccccggagatgaagggacgagggcg

SEQ ID NO: 4490407 - DNA, 25 bp, Homo sapien
agggcgcagcgacttccgcacttat

SEQ ID NO: 4490408 - DNA, 25 bp, Homo sapien
tagggcctaggtgcacggagcgggc

SEQ ID NO: 4490409 - DNA, 25 bp, Homo sapien
cgggctcctcgggaaccctgagagt

SEQ ID NO: 4490410 - DNA, 25 bp, Homo sapien
tgtaagagtggagaagctgcaggtg

SEQ ID NO: 4490411 - DNA, 25 bp, Homo sapien
ctgtaagagtggagaagctgcaggt

SEQ ID NO: 4490412 - DNA, 25 bp, Homo sapien
tctgttgccttgacgacggcgggcg

SEQ ID NO: 4490413 - DNA, 25 bp, Homo sapien
cctctgttgccttgacgacggcggg

SEQ ID NO: 4490414 - DNA, 25 bp, Homo sapien
ctctgttgccttgacgacggcgggc

SEQ ID NO: 4490415 - DNA, 25 bp, Homo sapien
ccctctgttgccttgacgacggcgg

SEQ ID NO: 4490416 - DNA, 25 bp, Homo sapien
ggccacaccaagagcttcggaaacg

SEQ ID NO: 4490417 - DNA, 25 bp, Homo sapien
gacgcttctcttacggcgccggaag

SEQ ID NO: 4490418 - DNA, 25 bp, Homo sapien
ttcggaaacgccgagaactctgcgg

SEQ ID NO: 4490419 - DNA, 25 bp, Homo sapien
gaactctgcgggtccagaacgcccg

SEQ ID NO: 4490420 - DNA, 25 bp, Homo sapien
tttctggagttgaatcatcttatcc

SEQ ID NO: 4490421 - DNA, 25 bp, Homo sapien
atcttatccaaactgttgagcacca

SEQ ID NO: 4490422 - DNA, 25 bp, Homo sapien
gagttgaatcatcttatccaaactg

SEQ ID NO: 4490423 - DNA, 25 bp, Homo sapien
agtgtttttctggagttgaatcatc

SEQ ID NO: 4490424 - DNA, 25 bp, Homo sapien
ggagatgattccattgctagatata

SEQ ID NO: 4490425 - DNA, 25 bp, Homo sapien
tataagacagtcagccagagtagtt

SEQ ID NO: 4490426 - DNA, 25 bp, Homo sapien
tagatataagacagtcagccagagt

SEQ ID NO: 4490427 - DNA, 25 bp, Homo sapien
ccattgctagatataagacagtcag

SEQ ID NO: 4490428 - DNA, 25 bp, Homo sapien
ctgttgcataatgtagggaaatggc

SEQ ID NO: 4490429 - DNA, 25 bp, Homo sapien
tggcactggatttcatagtgatccc

SEQ ID NO: 4490430 - DNA, 25 bp, Homo sapien
ggatttcatagtgatccctcggatc

SEQ ID NO: 4490431 - DNA, 25 bp, Homo sapien
gatccctcggatctgttcatcttct

SEQ ID NO: 4490432 - DNA, 25 bp, Homo sapien
cacagcatctaccacaatgatgcat

SEQ ID NO: 4490433 - DNA, 25 bp, Homo sapien
caatgatgcatccatcacaaatgcg

SEQ ID NO: 4490434 - DNA, 25 bp, Homo sapien
cacaaatgcgaacagcggttgatac

SEQ ID NO: 4490435 - DNA, 25 bp, Homo sapien
tggacagactccttccacagcatct

SEQ ID NO: 4490436 - DNA, 25 bp, Homo sapien
taggcctcttgtggggtaaatttca

SEQ ID NO: 4490437 - DNA, 25 bp, Homo sapien
cagttccactatcaagtgatctatc

SEQ ID NO: 4490438 - DNA, 25 bp, Homo sapien
aatactcttaaggtgagaataggcc

SEQ ID NO: 4490439 - DNA, 25 bp, Homo sapien
taaatttcagttccactatcaagtg

SEQ ID NO: 4490440 - DNA, 25 bp, Homo sapien
agccagtgctccagtcatatacttg

SEQ ID NO: 4490441 - DNA, 25 bp, Homo sapien
gaagtaaaaagagtccctgtgagcg

SEQ ID NO: 4490442 - DNA, 25 bp, Homo sapien
tggtaaacaccacatttccctgttc

SEQ ID NO: 4490443 - DNA, 25 bp, Homo sapien
cccacccatctattgcactggtaaa

SEQ ID NO: 4490444 - DNA, 25 bp, Homo sapien
tctagtatcatctttcgggcatcaa

SEQ ID NO: 4490445 - DNA, 25 bp, Homo sapien
catctttcgggcatcaaatggacta

SEQ ID NO: 4490446 - DNA, 25 bp, Homo sapien
agtatcatctttcgggcatcaaatg

SEQ ID NO: 4490447 - DNA, 25 bp, Homo sapien
tagctctagtatcatctttcgggca

SEQ ID NO: 4490448 - DNA, 25 bp, Homo sapien
cttgtctaatacaggggaacattca

SEQ ID NO: 4490449 - DNA, 25 bp, Homo sapien
tgtctaatacaggggaacattcatt

SEQ ID NO: 4490450 - DNA, 25 bp, Homo sapien
tctaatacaggggaacattcattta

SEQ ID NO: 4490451 - DNA, 25 bp, Homo sapien
ctaatacaggggaacattcatttat

SEQ ID NO: 4490452 - DNA, 25 bp, Homo sapien
tagattttccaggatcaactgtaca

SEQ ID NO: 4490453 - DNA, 25 bp, Homo sapien
ttcaagacagcatcatacaaactcc

SEQ ID NO: 4490454 - DNA, 25 bp, Homo sapien
gattttccaggatcaactgtacaaa

SEQ ID NO: 4490455 - DNA, 25 bp, Homo sapien
tcatacaaactccatagattttcca

SEQ ID NO: 4490456 - DNA, 25 bp, Homo sapien
tagggtctgaatgtcgtgcctccca

SEQ ID NO: 4490457 - DNA, 25 bp, Homo sapien
gaagtcactatattatcaattttgt

SEQ ID NO: 4490458 - DNA, 25 bp, Homo sapien
ttttaatcctaaagaagtcactata

SEQ ID NO: 4490459 - DNA, 25 bp, Homo sapien
gtctgaatgtcgtgcctcccaggct

SEQ ID NO: 4490460 - DNA, 25 bp, Homo sapien
ctgactgcaaatggcgttgatctga

SEQ ID NO: 4490461 - DNA, 25 bp, Homo sapien
cactgactgcaaatggcgttgatct

SEQ ID NO: 4490462 - DNA, 25 bp, Homo sapien
gccactgactgcaaatggcgttgat

SEQ ID NO: 4490463 - DNA, 25 bp, Homo sapien
atgggtagccactgactgcaaatgg

SEQ ID NO: 4490464 - DNA, 25 bp, Homo sapien
caaggaagtttctgacataccatag

SEQ ID NO: 4490465 - DNA, 25 bp, Homo sapien
ggaagtttctgacataccatagctg

SEQ ID NO: 4490466 - DNA, 25 bp, Homo sapien
ctctgggctgtaatatcaaggggac

SEQ ID NO: 4490467 - DNA, 25 bp, Homo sapien
gaagtttctgacataccatagctga

SEQ ID NO: 4490468 - DNA, 25 bp, Homo sapien
tgatcctgtgcacatcagtctctcc

SEQ ID NO: 4490469 - DNA, 25 bp, Homo sapien
ctgaggcaaggccttagcatcaact

SEQ ID NO: 4490470 - DNA, 25 bp, Homo sapien
ttctgaggcaaggccttagcatcaa

SEQ ID NO: 4490471 - DNA, 25 bp, Homo sapien
tctgaggcaaggccttagcatcaac

SEQ ID NO: 4490472 - DNA, 25 bp, Homo sapien
ctgagcaatttcttcttgagtgaga

SEQ ID NO: 4490473 - DNA, 25 bp, Homo sapien
agcaatttcttcttgagtgagaggc

SEQ ID NO: 4490474 - DNA, 25 bp, Homo sapien
tctctgagcaatttcttcttgagtg

SEQ ID NO: 4490475 - DNA, 25 bp, Homo sapien
gtctctgagcaatttcttcttgagt

SEQ ID NO: 4490476 - DNA, 25 bp, Homo sapien
ggcactcccatcttgggtgggctcc

SEQ ID NO: 4490477 - DNA, 25 bp, Homo sapien
ccttttggacatgtttcaatggcac

SEQ ID NO: 4490478 - DNA, 25 bp, Homo sapien
ggacatgtttcaatggcactcccat

SEQ ID NO: 4490479 - DNA, 25 bp, Homo sapien
gtttcaatggcactcccatcttggg

SEQ ID NO: 4490480 - DNA, 25 bp, Homo sapien
gtcatactttccacctgttgctcgt

SEQ ID NO: 4490481 - DNA, 25 bp, Homo sapien
atactttccacctgttgctcgtcac

SEQ ID NO: 4490482 - DNA, 25 bp, Homo sapien
gagcacaggtttgggggtcatactt

SEQ ID NO: 4490483 - DNA, 25 bp, Homo sapien
tgggggtcatactttccacctgttg

SEQ ID NO: 4490484 - DNA, 25 bp, Homo sapien
cactgaacacccgagcaaatgcaat

SEQ ID NO: 4490485 - DNA, 25 bp, Homo sapien
ccactgaacacccgagcaaatgcaa

SEQ ID NO: 4490486 - DNA, 25 bp, Homo sapien
actgaacacccgagcaaatgcaata

SEQ ID NO: 4490487 - DNA, 25 bp, Homo sapien
accactgaacacccgagcaaatgca

SEQ ID NO: 4490488 - DNA, 25 bp, Homo sapien
gaggactgtatttgggccccaagac

SEQ ID NO: 4490489 - DNA, 25 bp, Homo sapien
agaggactgtatttgggccccaaga

SEQ ID NO: 4490490 - DNA, 25 bp, Homo sapien
aagaggactgtatttgggccccaag

SEQ ID NO: 4490491 - DNA, 25 bp, Homo sapien
caagaggactgtatttgggccccaa

SEQ ID NO: 4490492 - DNA, 25 bp, Homo sapien
tccagcatgacatctgctcttatca

SEQ ID NO: 4490493 - DNA, 25 bp, Homo sapien
tattttctctaaccacaaggtgatt

SEQ ID NO: 4490494 - DNA, 25 bp, Homo sapien
gcatgacatctgctcttatcagtta

SEQ ID NO: 4490495 - DNA, 25 bp, Homo sapien
tctctaaccacaaggtgattcttgc

SEQ ID NO: 4490496 - DNA, 25 bp, Homo sapien
ctagcacatttcctggaggtacctc

SEQ ID NO: 4490497 - DNA, 25 bp, Homo sapien
gcacatttcctggaggtacctcctc

SEQ ID NO: 4490498 - DNA, 25 bp, Homo sapien
tcccttcccatcagaagatacaggt

SEQ ID NO: 4490499 - DNA, 25 bp, Homo sapien
gcacagtatgccatgtgggggactt

SEQ ID NO: 4490500 - DNA, 25 bp, Homo sapien
aaatccttctggtggactatctttc

SEQ ID NO: 4490501 - DNA, 25 bp, Homo sapien
aatgttacactcaaaatccttctgg

SEQ ID NO: 4490502 - DNA, 25 bp, Homo sapien
tcaaagtggccgctgcattccaatt

SEQ ID NO: 4490503 - DNA, 25 bp, Homo sapien
gccgctgcattccaattccttcaat

SEQ ID NO: 4490504 - DNA, 25 bp, Homo sapien
tttaaagatttaaccatatggaaga

SEQ ID NO: 4490505 - DNA, 25 bp, Homo sapien
ttaaagatttaaccatatggaagag

SEQ ID NO: 4490506 - DNA, 25 bp, Homo sapien
agaagaatatcatgtttcctctcag

SEQ ID NO: 4490507 - DNA, 25 bp, Homo sapien
cattgccaattacttcagacagtga

SEQ ID NO: 4490508 - DNA, 25 bp, Homo sapien
ggaatgtactctttgaagatggagg

SEQ ID NO: 4490509 - DNA, 25 bp, Homo sapien
ataatatctacagcagcaatgggct

SEQ ID NO: 4490510 - DNA, 25 bp, Homo sapien
tttcatcttccctaattatctggtc

SEQ ID NO: 4490511 - DNA, 25 bp, Homo sapien
atcagactgtatcaatttacgggca

SEQ ID NO: 4490512 - DNA, 25 bp, Homo sapien
acttatcaacaagaagaccattgtg

SEQ ID NO: 4490513 - DNA, 25 bp, Homo sapien
tctgaacttatcaacaagaagacca

SEQ ID NO: 4490514 - DNA, 25 bp, Homo sapien
tgtatcaatttacgggcataagaga

SEQ ID NO: 4490515 - DNA, 25 bp, Homo sapien
ccggcgaaggctgcggctgaccagg

SEQ ID NO: 4490516 - DNA, 25 bp, Homo sapien
acctcctcttggaagaactgaacca

SEQ ID NO: 4490517 - DNA, 25 bp, Homo sapien
ctgaaccaggagcagcatgcaaggg

SEQ ID NO: 4490518 - DNA, 25 bp, Homo sapien
gaggcacgtgtcttgcaggtgctgg

SEQ ID NO: 4490519 - DNA, 25 bp, Homo sapien
tgtggagaatgtgccccgcagacgt

SEQ ID NO: 4490520 - DNA, 25 bp, Homo sapien
agccacctggagttcccatggcgac

SEQ ID NO: 4490521 - DNA, 25 bp, Homo sapien
ccatggcgaccacgggagaggagcc

SEQ ID NO: 4490522 - DNA, 25 bp, Homo sapien
tcagccacctggagttcccatggcg

SEQ ID NO: 4490523 - DNA, 25 bp, Homo sapien
acctggagttcccatggcgaccacg

SEQ ID NO: 4490524 - DNA, 25 bp, Homo sapien
tgttttgattctttactccctacag

SEQ ID NO: 4490525 - DNA, 25 bp, Homo sapien
taatgccactttagacaaaaatcag

SEQ ID NO: 4490526 - DNA, 25 bp, Homo sapien
attatcatattttgcagtctttaaa

SEQ ID NO: 4490527 - DNA, 25 bp, Homo sapien
tattttgcagtctttaaataggtgt

SEQ ID NO: 4490528 - DNA, 25 bp, Homo sapien
cctccgctaggtacgatacagaatg

SEQ ID NO: 4490529 - DNA, 25 bp, Homo sapien
tgagagtaagaaggccgtcagacct

SEQ ID NO: 4490530 - DNA, 25 bp, Homo sapien
taccctaatggtaaagggctgactg

SEQ ID NO: 4490531 - DNA, 25 bp, Homo sapien
tcccagccgcgaataattataagaa

SEQ ID NO: 4490532 - DNA, 25 bp, Homo sapien
aggcaagtccatcccgtcctgagag

SEQ ID NO: 4490533 - DNA, 25 bp, Homo sapien
tcaggcaagtccatcccgtcctgag

SEQ ID NO: 4490534 - DNA, 25 bp, Homo sapien
agtccatcccgtcctgagagcccca

SEQ ID NO: 4490535 - DNA, 25 bp, Homo sapien
caagtccatcccgtcctgagagccc

SEQ ID NO: 4490536 - DNA, 25 bp, Homo sapien
caggagtccagagcatgcgcgcgct

SEQ ID NO: 4490537 - DNA, 25 bp, Homo sapien
agtccagagcatgcgcgcgcttccg

SEQ ID NO: 4490538 - DNA, 25 bp, Homo sapien
catgcgcgcgcttccggctgcccct

SEQ ID NO: 4490539 - DNA, 25 bp, Homo sapien
gcttccggctgcccctcctggcctt

SEQ ID NO: 4490540 - DNA, 25 bp, Homo sapien
atagaggccaacaacttcagcttgg

SEQ ID NO: 4490541 - DNA, 25 bp, Homo sapien
cggcggctcctggttcttgtggaag

SEQ ID NO: 4490542 - DNA, 25 bp, Homo sapien
gaagatagaggccaacaacttcagc

SEQ ID NO: 4490543 - DNA, 25 bp, Homo sapien
agatagaggccaacaacttcagctt

SEQ ID NO: 4490544 - DNA, 25 bp, Homo sapien
catccagggtacaatgcgcctttcc

SEQ ID NO: 4490545 - DNA, 25 bp, Homo sapien
gcatccagggtacaatgcgcctttc

SEQ ID NO: 4490546 - DNA, 25 bp, Homo sapien
ttggctcatcagagtccacagacca

SEQ ID NO: 4490547 - DNA, 25 bp, Homo sapien
cagaccatatcggtgaagaagatga

SEQ ID NO: 4490548 - DNA, 25 bp, Homo sapien
cgaactgttctccttagtatcttct

SEQ ID NO: 4490549 - DNA, 25 bp, Homo sapien
gagtccacagaccatatcggtgaag

SEQ ID NO: 4490550 - DNA, 25 bp, Homo sapien
gaaaatagcttggtttctttcctca

SEQ ID NO: 4490551 - DNA, 25 bp, Homo sapien
gactttaattcctctaagattacag

SEQ ID NO: 4490552 - DNA, 25 bp, Homo sapien
tacagttgttaatcatgtttttata

SEQ ID NO: 4490553 - DNA, 25 bp, Homo sapien
aagattacagttgttaatcatgttt

SEQ ID NO: 4490554 - DNA, 25 bp, Homo sapien
aagaggggctttgaatggagagggt

SEQ ID NO: 4490555 - DNA, 25 bp, Homo sapien
gaggggctgcagttgcaagaatcca

SEQ ID NO: 4490556 - DNA, 25 bp, Homo sapien
ctcctgatctcctttttctgcccct

SEQ ID NO: 4490557 - DNA, 25 bp, Homo sapien
gggctgcagttgcaagaatccagaa

SEQ ID NO: 4490558 - DNA, 25 bp, Homo sapien
tctgaggggctgcagttgcaagaat

SEQ ID NO: 4490559 - DNA, 25 bp, Homo sapien
tgcagctgcaggtctatgtcagtca

SEQ ID NO: 4490560 - DNA, 25 bp, Homo sapien
tggccacagtcacctccaggtggtt

SEQ ID NO: 4490561 - DNA, 25 bp, Homo sapien
cagctgcaggtctatgtcagtcaga

SEQ ID NO: 4490562 - DNA, 25 bp, Homo sapien
tcagtcagagccatggccacagtca

SEQ ID NO: 4490563 - DNA, 25 bp, Homo sapien
caggtgtccagagtagagctgcagc

SEQ ID NO: 4490564 - DNA, 25 bp, Homo sapien
ccaggagaaggagggcttcgggttg

SEQ ID NO: 4490565 - DNA, 25 bp, Homo sapien
gggcttcgggttgggacatggagaa

SEQ ID NO: 4490566 - DNA, 25 bp, Homo sapien
aaggagggcttcgggttgggacatg

SEQ ID NO: 4490567 - DNA, 25 bp, Homo sapien
ctggtatggggtaagactcaagtag

SEQ ID NO: 4490568 - DNA, 25 bp, Homo sapien
gggtaagactcaagtaggagccaca

SEQ ID NO: 4490569 - DNA, 25 bp, Homo sapien
actcaagtaggagccacaagactcc

SEQ ID NO: 4490570 - DNA, 25 bp, Homo sapien
caggagggggtctcgccgaggagga

SEQ ID NO: 4490571 - DNA, 25 bp, Homo sapien
gggctgtgcgtcagtcacaggcaca

SEQ ID NO: 4490572 - DNA, 25 bp, Homo sapien
aggagtctgcggccattgagagcgg

SEQ ID NO: 4490573 - DNA, 25 bp, Homo sapien
gctgtgcgtcagtcacaggcacact

SEQ ID NO: 4490574 - DNA, 25 bp, Homo sapien
ctggaggagtctgcggccattgaga

SEQ ID NO: 4490575 - DNA, 25 bp, Homo sapien
agctccccaagaaggagactgtcac

SEQ ID NO: 4490576 - DNA, 25 bp, Homo sapien
cagctccccaagaaggagactgtca

SEQ ID NO: 4490577 - DNA, 25 bp, Homo sapien
cctgagcggtgttcctggaggtgac

SEQ ID NO: 4490578 - DNA, 25 bp, Homo sapien
tcaggcctgagcggtgttcctggag

SEQ ID NO: 4490579 - DNA, 25 bp, Homo sapien
cggtgttcctggaggtgacgagagg

SEQ ID NO: 4490580 - DNA, 25 bp, Homo sapien
tggaggtgacgagaggcctctgcac

SEQ ID NO: 4490581 - DNA, 25 bp, Homo sapien
gcacgcatggctcagctagctccac

SEQ ID NO: 4490582 - DNA, 25 bp, Homo sapien
gtgccaccctcggtcaccaccactg

SEQ ID NO: 4490583 - DNA, 25 bp, Homo sapien
tgtgccaccctcggtcaccaccact

SEQ ID NO: 4490584 - DNA, 25 bp, Homo sapien
ctgtgccaccctcggtcaccaccac

SEQ ID NO: 4490585 - DNA, 25 bp, Homo sapien
cagttcaccacgtccagaagggtga

SEQ ID NO: 4490586 - DNA, 25 bp, Homo sapien
tgcagttcaccacgtccagaagggt

SEQ ID NO: 4490587 - DNA, 25 bp, Homo sapien
cttgcagttcaccacgtccagaagg

SEQ ID NO: 4490588 - DNA, 25 bp, Homo sapien
tcaccacgtccagaagggtgaacat

SEQ ID NO: 4490589 - DNA, 25 bp, Homo sapien
gtggatttgtatggccagctggaca

SEQ ID NO: 4490590 - DNA, 25 bp, Homo sapien
ggaatgtcaagtcctgtgtagggcc

SEQ ID NO: 4490591 - DNA, 25 bp, Homo sapien
tcctcggtgtagtgctgtgggtcag

SEQ ID NO: 4490592 - DNA, 25 bp, Homo sapien
ccggaatgtcaagtcctgtgtaggg

SEQ ID NO: 4490593 - DNA, 25 bp, Homo sapien
ctgagtgtgcagtggctccagctgc

SEQ ID NO: 4490594 - DNA, 25 bp, Homo sapien
tgttctgagtgtgcagtggctccag

SEQ ID NO: 4490595 - DNA, 25 bp, Homo sapien
aaccacctcacagtggaaggttggg

SEQ ID NO: 4490596 - DNA, 25 bp, Homo sapien
ctgaaccacctcacagtggaaggtt

SEQ ID NO: 4490597 - DNA, 25 bp, Homo sapien
aacagaaggtgtcctccactgccac

SEQ ID NO: 4490598 - DNA, 25 bp, Homo sapien
agaaggtgtcctccactgccactga

SEQ ID NO: 4490599 - DNA, 25 bp, Homo sapien
agctggtcagcagagaggacacact

SEQ ID NO: 4490600 - DNA, 25 bp, Homo sapien
tggtcagcagagaggacacactcac

SEQ ID NO: 4490601 - DNA, 25 bp, Homo sapien
ctggcactgttgagactcttgatga

SEQ ID NO: 4490602 - DNA, 25 bp, Homo sapien
tgttgagactcttgatgaagagctg

SEQ ID NO: 4490603 - DNA, 25 bp, Homo sapien
ccaagtcaacctcccatggcggggc

SEQ ID NO: 4490604 - DNA, 25 bp, Homo sapien
tcccatggcggggctgctccatgac

SEQ ID NO: 4490605 - DNA, 25 bp, Homo sapien
aagtcaacctcccatggcggggctg

SEQ ID NO: 4490606 - DNA, 25 bp, Homo sapien
cctcccatggcggggctgctccatg

SEQ ID NO: 4490607 - DNA, 25 bp, Homo sapien
agctggccatgcatcaggtctccat

SEQ ID NO: 4490608 - DNA, 25 bp, Homo sapien
tgcatcaggtctccattggtgaagg

SEQ ID NO: 4490609 - DNA, 25 bp, Homo sapien
catgcatcaggtctccattggtgaa

SEQ ID NO: 4490610 - DNA, 25 bp, Homo sapien
tggccatgcatcaggtctccattgg

SEQ ID NO: 4490611 - DNA, 25 bp, Homo sapien
ctgcataggggcgtggtcattcaca

SEQ ID NO: 4490612 - DNA, 25 bp, Homo sapien
gtggtcattcacaggctggatggcc

SEQ ID NO: 4490613 - DNA, 25 bp, Homo sapien
ataggggcgtggtcattcacaggct

SEQ ID NO: 4490614 - DNA, 25 bp, Homo sapien
cgtggtcattcacaggctggatggc

SEQ ID NO: 4490615 - DNA, 25 bp, Homo sapien
ggccacatggaagacgcagctgatg

SEQ ID NO: 4490616 - DNA, 25 bp, Homo sapien
taccccaggccacatggaagacgca

SEQ ID NO: 4490617 - DNA, 25 bp, Homo sapien
cccaggccacatggaagacgcagct

SEQ ID NO: 4490618 - DNA, 25 bp, Homo sapien
caggccacatggaagacgcagctga

SEQ ID NO: 4490619 - DNA, 25 bp, Homo sapien
agcaaagcccgaatcagcattgctg

SEQ ID NO: 4490620 - DNA, 25 bp, Homo sapien
gctgggcctcagcaaagcccgaatc

SEQ ID NO: 4490621 - DNA, 25 bp, Homo sapien
attgctgaaggccatgttgtctgta

SEQ ID NO: 4490622 - DNA, 25 bp, Homo sapien
tgttgtctgtagtcagcagccgcca

SEQ ID NO: 4490623 - DNA, 25 bp, Homo sapien
ggctgcatgggctcatccgtggcca

SEQ ID NO: 4490624 - DNA, 25 bp, Homo sapien
tgggctcatccgtggccatgatact

SEQ ID NO: 4490625 - DNA, 25 bp, Homo sapien
gcatgggctcatccgtggccatgat

SEQ ID NO: 4490626 - DNA, 25 bp, Homo sapien
catccgtggccatgatactgccaga

SEQ ID NO: 4490627 - DNA, 25 bp, Homo sapien
ggactcgcctcttcctgaggcccct

SEQ ID NO: 4490628 - DNA, 25 bp, Homo sapien
aggactcgcctcttcctgaggcccc

SEQ ID NO: 4490629 - DNA, 25 bp, Homo sapien
gactcgcctcttcctgaggcccctc

SEQ ID NO: 4490630 - DNA, 25 bp, Homo sapien
ctgcagcgggatccagccgtggtca

SEQ ID NO: 4490631 - DNA, 25 bp, Homo sapien
ggtagtgggcctcatccctactgca

SEQ ID NO: 4490632 - DNA, 25 bp, Homo sapien
ggcctccttgaggaaccatgaggcc

SEQ ID NO: 4490633 - DNA, 25 bp, Homo sapien
cctccttgaggaaccatgaggccgg

SEQ ID NO: 4490634 - DNA, 25 bp, Homo sapien
gtagtgggcctcatccctactgcag

SEQ ID NO: 4490635 - DNA, 25 bp, Homo sapien
agatgcagaccagaagggtctccga

SEQ ID NO: 4490636 - DNA, 25 bp, Homo sapien
gatgcagaccagaagggtctccgaa

SEQ ID NO: 4490637 - DNA, 25 bp, Homo sapien
tgcagaccagaagggtctccgaaat

SEQ ID NO: 4490638 - DNA, 25 bp, Homo sapien
cagatgcagaccagaagggtctccg

SEQ ID NO: 4490639 - DNA, 25 bp, Homo sapien
tcatctgccaagatgccacgcagca

SEQ ID NO: 4490640 - DNA, 25 bp, Homo sapien
ggctcatctgccaagatgccacgca

SEQ ID NO: 4490641 - DNA, 25 bp, Homo sapien
ctgccaagatgccacgcagcaccat

SEQ ID NO: 4490642 - DNA, 25 bp, Homo sapien
gccaagatgccacgcagcaccatca

SEQ ID NO: 4490643 - DNA, 25 bp, Homo sapien
tgacgtcctcaaggggagcacccag

SEQ ID NO: 4490644 - DNA, 25 bp, Homo sapien
gtgacgtcctcaaggggagcaccca

SEQ ID NO: 4490645 - DNA, 25 bp, Homo sapien
ctccagctccacgtgacgtcctcaa

SEQ ID NO: 4490646 - DNA, 25 bp, Homo sapien
ctctctccagcagaaggtgctgagg

SEQ ID NO: 4490647 - DNA, 25 bp, Homo sapien
tgcagggccccatgccggggtggct

SEQ ID NO: 4490648 - DNA, 25 bp, Homo sapien
ggtcctggcttgaggcccatcctcc

SEQ ID NO: 4490649 - DNA, 25 bp, Homo sapien
ctgagggtcctggcttgaggcccat

SEQ ID NO: 4490650 - DNA, 25 bp, Homo sapien
caggacaaaaccgtcagtgtcttgc

SEQ ID NO: 4490651 - DNA, 25 bp, Homo sapien
gtgtcttgctcccatcgtgcaggta

SEQ ID NO: 4490652 - DNA, 25 bp, Homo sapien
aaccgtcagtgtcttgctcccatcg

SEQ ID NO: 4490653 - DNA, 25 bp, Homo sapien
caggcctgagtttgtatgaggtcgg

SEQ ID NO: 4490654 - DNA, 25 bp, Homo sapien
ccatcactgggctcccggaacaaac

SEQ ID NO: 4490655 - DNA, 25 bp, Homo sapien
cccatcactgggctcccggaacaaa

SEQ ID NO: 4490656 - DNA, 25 bp, Homo sapien
ccccatcactgggctcccggaacaa

SEQ ID NO: 4490657 - DNA, 25 bp, Homo sapien
catcactgggctcccggaacaaaca

SEQ ID NO: 4490658 - DNA, 25 bp, Homo sapien
ggatgggcacggtggccccctccca

SEQ ID NO: 4490659 - DNA, 25 bp, Homo sapien
ctgtagggatgggcacggtggcccc

SEQ ID NO: 4490660 - DNA, 25 bp, Homo sapien
tagggatgggcacggtggccccctc

SEQ ID NO: 4490661 - DNA, 25 bp, Homo sapien
atgggcacggtggccccctcccacg

SEQ ID NO: 4490662 - DNA, 25 bp, Homo sapien
ctgggctgcttaatggtgtacacca

SEQ ID NO: 4490663 - DNA, 25 bp, Homo sapien
tgggctgcttaatggtgtacaccag

SEQ ID NO: 4490664 - DNA, 25 bp, Homo sapien
gctgggctgcttaatggtgtacacc

SEQ ID NO: 4490665 - DNA, 25 bp, Homo sapien
ggctgcttaatggtgtacaccaggt

SEQ ID NO: 4490666 - DNA, 25 bp, Homo sapien
ctgtgtgagaacagcacgagcccac

SEQ ID NO: 4490667 - DNA, 25 bp, Homo sapien
gctgggtctgcatgaagctgcgcac

SEQ ID NO: 4490668 - DNA, 25 bp, Homo sapien
gcacgagcccaccatccagctgggt

SEQ ID NO: 4490669 - DNA, 25 bp, Homo sapien
ccagctgggtctgcatgaagctgcg

SEQ ID NO: 4490670 - DNA, 25 bp, Homo sapien
catcagcctttgtgatccaggccga

SEQ ID NO: 4490671 - DNA, 25 bp, Homo sapien
ggccatcagcctttgtgatccaggc

SEQ ID NO: 4490672 - DNA, 25 bp, Homo sapien
cagcctttgtgatccaggccgaggc

SEQ ID NO: 4490673 - DNA, 25 bp, Homo sapien
cagaggcaaaaggggccatcagcct

SEQ ID NO: 4490674 - DNA, 25 bp, Homo sapien
tggctgctgagtggctggacggact

SEQ ID NO: 4490675 - DNA, 25 bp, Homo sapien
tctgaggctctggctgctgagtggc

SEQ ID NO: 4490676 - DNA, 25 bp, Homo sapien
ctctggctgctgagtggctggacgg

SEQ ID NO: 4490677 - DNA, 25 bp, Homo sapien
gctctgaggctctggctgctgagtg

SEQ ID NO: 4490678 - DNA, 25 bp, Homo sapien
cgcaccacatggtagagcaggagct

SEQ ID NO: 4490679 - DNA, 25 bp, Homo sapien
gtcctcccctgtgctgtcatgctgg

SEQ ID NO: 4490680 - DNA, 25 bp, Homo sapien
tctgcctgagtgaagttcaccaggt

SEQ ID NO: 4490681 - DNA, 25 bp, Homo sapien
aagagccggcctagctggaggcccc

SEQ ID NO: 4490682 - DNA, 25 bp, Homo sapien
caagcaatgtcctctggtgaaaaaa

SEQ ID NO: 4490683 - DNA, 25 bp, Homo sapien
tacctggatacaggagctctgtggg

SEQ ID NO: 4490684 - DNA, 25 bp, Homo sapien
gtcctgaggtctggggaccaagcaa

SEQ ID NO: 4490685 - DNA, 25 bp, Homo sapien
tgtgggtgggagtgaggcaaaacac

SEQ ID NO: 4490686 - DNA, 25 bp, Homo sapien
ttttcacacgggcttctataccgct

SEQ ID NO: 4490687 - DNA, 25 bp, Homo sapien
tataccgcttcgactggaagatcca

SEQ ID NO: 4490688 - DNA, 25 bp, Homo sapien
tggacttggagccccttggagtatg

SEQ ID NO: 4490689 - DNA, 25 bp, Homo sapien
ctgggcccttctgggactgtgcgct

SEQ ID NO: 4490690 - DNA, 25 bp, Homo sapien
cgggcgggggcatggtaacagtggt

SEQ ID NO: 4490691 - DNA, 25 bp, Homo sapien
gcgggggcatggtaacagtggtcct

SEQ ID NO: 4490692 - DNA, 25 bp, Homo sapien
ggcgggggcatggtaacagtggtcc

SEQ ID NO: 4490693 - DNA, 25 bp, Homo sapien
gggcgggggcatggtaacagtggtc

SEQ ID NO: 4490694 - DNA, 25 bp, Homo sapien
cactcctctgggcatcccgggtggg

SEQ ID NO: 4490695 - DNA, 25 bp, Homo sapien
gtgtgccacttgtccccagggcact

SEQ ID NO: 4490696 - DNA, 25 bp, Homo sapien
tgagggggtgtgccacttgtcccca

SEQ ID NO: 4490697 - DNA, 25 bp, Homo sapien
gagccaccccggtgagggggtgtgc

SEQ ID NO: 4490698 - DNA, 25 bp, Homo sapien
cacaagagcaccaggggggtagggc

SEQ ID NO: 4490699 - DNA, 25 bp, Homo sapien
cccaaagggatcaggggaagcctct

SEQ ID NO: 4490700 - DNA, 25 bp, Homo sapien
gcccaaagggatcaggggaagcctc

SEQ ID NO: 4490701 - DNA, 25 bp, Homo sapien
gggaccccggctggggcacaagagc

SEQ ID NO: 4490702 - DNA, 25 bp, Homo sapien
cacccatggtcccagtgccttggat

SEQ ID NO: 4490703 - DNA, 25 bp, Homo sapien
ggccacacgtggctccggcacccat

SEQ ID NO: 4490704 - DNA, 25 bp, Homo sapien
ctccaggactcagtgatccctgggg

SEQ ID NO: 4490705 - DNA, 25 bp, Homo sapien
tcaaaaacgaccacctccaggactc

SEQ ID NO: 4490706 - DNA, 25 bp, Homo sapien
attctttacactcgtgtgctcgctc

SEQ ID NO: 4490707 - DNA, 25 bp, Homo sapien
ccattctttacactcgtgtgctcgc

SEQ ID NO: 4490708 - DNA, 25 bp, Homo sapien
tgctcgctcacgcacacatcacaca

SEQ ID NO: 4490709 - DNA, 25 bp, Homo sapien
cgtgtgctcgctcacgcacacatca

SEQ ID NO: 4490710 - DNA, 25 bp, Homo sapien
cacacgctagcagctgtgatggtac

SEQ ID NO: 4490711 - DNA, 25 bp, Homo sapien
tcacacgctagcagctgtgatggta

SEQ ID NO: 4490712 - DNA, 25 bp, Homo sapien
aagctgcaggtgagtaggtcctggc

SEQ ID NO: 4490713 - DNA, 25 bp, Homo sapien
ggacaaggcaggtgactcctgacat

SEQ ID NO: 4490714 - DNA, 25 bp, Homo sapien
ggcaggtgactcctgacatgtgacc

SEQ ID NO: 4490715 - DNA, 25 bp, Homo sapien
ggtgactcctgacatgtgaccccat

SEQ ID NO: 4490716 - DNA, 25 bp, Homo sapien
cctgtgatgtcatagtctttataga

SEQ ID NO: 4490717 - DNA, 25 bp, Homo sapien
ggaataaacttagatgtgcaggact

SEQ ID NO: 4490718 - DNA, 25 bp, Homo sapien
gcaggacttttatcaaggacaggac

SEQ ID NO: 4490719 - DNA, 25 bp, Homo sapien
gcattctatgttcctggatgagcag

SEQ ID NO: 4490720 - DNA, 25 bp, Homo sapien
ctaatataaccactattgactgttg

SEQ ID NO: 4490721 - DNA, 25 bp, Homo sapien
aatataaccactattgactgttgac

SEQ ID NO: 4490722 - DNA, 25 bp, Homo sapien
aaaactcataagcaaccattgttga

SEQ ID NO: 4490723 - DNA, 25 bp, Homo sapien
ccattgttgagaaaattggtaaagt

SEQ ID NO: 4490724 - DNA, 25 bp, Homo sapien
ctgatgaagctaaagacaaattttc

SEQ ID NO: 4490725 - DNA, 25 bp, Homo sapien
aaagacaaattttcttcaggcacag

SEQ ID NO: 4490726 - DNA, 25 bp, Homo sapien
agacaaattttcttcaggcacaggc

SEQ ID NO: 4490727 - DNA, 25 bp, Homo sapien
gaagctaaagacaaattttcttcag

SEQ ID NO: 4490728 - DNA, 25 bp, Homo sapien
tggagaagcgttcctgggcttttct

SEQ ID NO: 4490729 - DNA, 25 bp, Homo sapien
tgatttctcgtgctaagtgagtcct

SEQ ID NO: 4490730 - DNA, 25 bp, Homo sapien
gagtgatttctcgtgctaagtgagt

SEQ ID NO: 4490731 - DNA, 25 bp, Homo sapien
tggtgggccttgtgttataaaacca

SEQ ID NO: 4490732 - DNA, 25 bp, Homo sapien
taatgatcctactgtgaattcaaga

SEQ ID NO: 4490733 - DNA, 25 bp, Homo sapien
tctccgctgtttctcgcgggcgcgg

SEQ ID NO: 4490734 - DNA, 25 bp, Homo sapien
ctgaaactgcgaccgtcggaggcga

SEQ ID NO: 4490735 - DNA, 25 bp, Homo sapien
tgcaaaggcaaaccggtatgtgaag

SEQ ID NO: 4490736 - DNA, 25 bp, Homo sapien
tgtagccggtgcgcggggtggctgg

SEQ ID NO: 4490737 - DNA, 25 bp, Homo sapien
gggaggactcgcagacgttactgcc

SEQ ID NO: 4490738 - DNA, 25 bp, Homo sapien
ttgtagccggtgcgcggggtggctg

SEQ ID NO: 4490739 - DNA, 25 bp, Homo sapien
gcagctctgccgtgcaatcccagct

SEQ ID NO: 4490740 - DNA, 25 bp, Homo sapien
cgtgcaatcccagctcgcagccctt

SEQ ID NO: 4490741 - DNA, 25 bp, Homo sapien
tctgccgtgcaatcccagctcgcag

SEQ ID NO: 4490742 - DNA, 25 bp, Homo sapien
tggagcgggatgggcagctctgccg

SEQ ID NO: 4490743 - DNA, 25 bp, Homo sapien
caatccgatgatttctgaggtcctt

SEQ ID NO: 4490744 - DNA, 25 bp, Homo sapien
tcctcggccgccgttggtacacgga

SEQ ID NO: 4490745 - DNA, 25 bp, Homo sapien
gtttctcaaagcaatccgatgattt

SEQ ID NO: 4490746 - DNA, 25 bp, Homo sapien
cgttggtacacggaccacattttgt

SEQ ID NO: 4490747 - DNA, 25 bp, Homo sapien
agaaggatcttcacaatgtaagact

SEQ ID NO: 4490748 - DNA, 25 bp, Homo sapien
gatcttcacaatgtaagactcaggc

SEQ ID NO: 4490749 - DNA, 25 bp, Homo sapien
aggatcttcacaatgtaagactcag

SEQ ID NO: 4490750 - DNA, 25 bp, Homo sapien
ttagagaaggatcttcacaatgtaa

SEQ ID NO: 4490751 - DNA, 25 bp, Homo sapien
tggctgcggccaatttcccctgttg

SEQ ID NO: 4490752 - DNA, 25 bp, Homo sapien
cttggctgcggccaatttcccctgt

SEQ ID NO: 4490753 - DNA, 25 bp, Homo sapien
gctgcggccaatttcccctgttgtg

SEQ ID NO: 4490754 - DNA, 25 bp, Homo sapien
tgcggccaatttcccctgttgtgtt

SEQ ID NO: 4490755 - DNA, 25 bp, Homo sapien
tctttttcctgttagctcctgctgg

SEQ ID NO: 4490756 - DNA, 25 bp, Homo sapien
ctgtgtcagggctactgccattgat

SEQ ID NO: 4490757 - DNA, 25 bp, Homo sapien
ggctcttcctctgccaatatgcttt

SEQ ID NO: 4490758 - DNA, 25 bp, Homo sapien
tgttagctcctgctggaatgccagg

SEQ ID NO: 4490759 - DNA, 25 bp, Homo sapien
ggtagtagaggatgcacggccctcc

SEQ ID NO: 4490760 - DNA, 25 bp, Homo sapien
ggatgcacggccctccccgtagata

SEQ ID NO: 4490761 - DNA, 25 bp, Homo sapien
tcctccagggtagtagaggatgcac

SEQ ID NO: 4490762 - DNA, 25 bp, Homo sapien
gtagaggatgcacggccctccccgt

SEQ ID NO: 4490763 - DNA, 25 bp, Homo sapien
gcggagcttgaatccagggccactg

SEQ ID NO: 4490764 - DNA, 25 bp, Homo sapien
gaattgatgttttcagtgagttgac

SEQ ID NO: 4490765 - DNA, 25 bp, Homo sapien
cagtgagttgactgattattgcgga

SEQ ID NO: 4490766 - DNA, 25 bp, Homo sapien
tattgcggagcttgaatccagggcc

SEQ ID NO: 4490767 - DNA, 25 bp, Homo sapien
tcctcccaagcttctgtaccagatg

SEQ ID NO: 4490768 - DNA, 25 bp, Homo sapien
agatggccctgctgggggctctggg

SEQ ID NO: 4490769 - DNA, 25 bp, Homo sapien
tggccctgctgggggctctggggcc

SEQ ID NO: 4490770 - DNA, 25 bp, Homo sapien
tgggggctctggggccaggggttca

SEQ ID NO: 4490771 - DNA, 25 bp, Homo sapien
ccctgctgggggctctggggccagg

SEQ ID NO: 4490772 - DNA, 25 bp, Homo sapien
cctcctgttcacgtagcctctcctc

SEQ ID NO: 4490773 - DNA, 25 bp, Homo sapien
ctgctgcctctcctgttctaacagc

SEQ ID NO: 4490774 - DNA, 25 bp, Homo sapien
tgcctctcctgttctaacagcttct

SEQ ID NO: 4490775 - DNA, 25 bp, Homo sapien
gcctctcctgttctaacagcttctc

SEQ ID NO: 4490776 - DNA, 25 bp, Homo sapien
tgccgcctctcctgttctaacagct

SEQ ID NO: 4490777 - DNA, 25 bp, Homo sapien
gcctctcatcctgttgccgaagcct

SEQ ID NO: 4490778 - DNA, 25 bp, Homo sapien
cctccacctcatccaggagctcctc

SEQ ID NO: 4490779 - DNA, 25 bp, Homo sapien
tctcatcctgttgccgaagcctctc

SEQ ID NO: 4490780 - DNA, 25 bp, Homo sapien
tcgtacagggcttcccaccccagct

SEQ ID NO: 4490781 - DNA, 25 bp, Homo sapien
agctcctcgaagccgctgcgtggct

SEQ ID NO: 4490782 - DNA, 25 bp, Homo sapien
cagctcctcgaagccgctgcgtggc

SEQ ID NO: 4490783 - DNA, 25 bp, Homo sapien
tcctcgaagccgctgcgtggctcgg

SEQ ID NO: 4490784 - DNA, 25 bp, Homo sapien
ctcgaagccgctgcgtggctcggcc

SEQ ID NO: 4490785 - DNA, 25 bp, Homo sapien
gaagcaatcagtggccacccactaa

SEQ ID NO: 4490786 - DNA, 25 bp, Homo sapien
tggccacccactaaaactggagacc

SEQ ID NO: 4490787 - DNA, 25 bp, Homo sapien
gaaaaatatcccctctctcccacag

SEQ ID NO: 4490788 - DNA, 25 bp, Homo sapien
tcagtggccacccactaaaactgga

SEQ ID NO: 4490789 - DNA, 25 bp, Homo sapien
aactgcagtgtgctcttgttctcgt

SEQ ID NO: 4490790 - DNA, 25 bp, Homo sapien
caactgcagtgtgctcttgttctcg

SEQ ID NO: 4490791 - DNA, 25 bp, Homo sapien
gcagtgtgctcttgttctcgttgtt

SEQ ID NO: 4490792 - DNA, 25 bp, Homo sapien
ctgcagtgtgctcttgttctcgttg

SEQ ID NO: 4490793 - DNA, 25 bp, Homo sapien
ggtgcccgcctcccacatcttcttg

SEQ ID NO: 4490794 - DNA, 25 bp, Homo sapien
cacatcttcttggatgggtcggagg

SEQ ID NO: 4490795 - DNA, 25 bp, Homo sapien
catcttcttggatgggtcggaggtt

SEQ ID NO: 4490796 - DNA, 25 bp, Homo sapien
ctcccacatcttcttggatgggtcg

SEQ ID NO: 4490797 - DNA, 25 bp, Homo sapien
tccccaggctgcagctgcctgtggc

SEQ ID NO: 4490798 - DNA, 25 bp, Homo sapien
gctgcagctgcctgtggcctggcac

SEQ ID NO: 4490799 - DNA, 25 bp, Homo sapien
tgtccccaggctgcagctgcctgtg

SEQ ID NO: 4490800 - DNA, 25 bp, Homo sapien
cccaggctgcagctgcctgtggcct

SEQ ID NO: 4490801 - DNA, 25 bp, Homo sapien
caagaaacagtcataggactgcccc

SEQ ID NO: 4490802 - DNA, 25 bp, Homo sapien
cttcctctgtgattggggggctcca

SEQ ID NO: 4490803 - DNA, 25 bp, Homo sapien
ccacctctaaaagtcagagggcagg

SEQ ID NO: 4490804 - DNA, 25 bp, Homo sapien
cagtcataggactgccccggagggt

SEQ ID NO: 4490805 - DNA, 25 bp, Homo sapien
tgcagactcggagcctcttggctct

SEQ ID NO: 4490806 - DNA, 25 bp, Homo sapien
gactcggagcctcttggctcttcag

SEQ ID NO: 4490807 - DNA, 25 bp, Homo sapien
ctactggtctggctgctgctgcaga

SEQ ID NO: 4490808 - DNA, 25 bp, Homo sapien
ctgctgcagactcggagcctcttgg

SEQ ID NO: 4490809 - DNA, 25 bp, Homo sapien
ttgtccgcacatccaagctccttgt

SEQ ID NO: 4490810 - DNA, 25 bp, Homo sapien
ctgttctccgcagcccgaaaagaat

SEQ ID NO: 4490811 - DNA, 25 bp, Homo sapien
ttagctccctgttctccgcagcccg

SEQ ID NO: 4490812 - DNA, 25 bp, Homo sapien
ttttcaattccttgacccgctctta

SEQ ID NO: 4490813 - DNA, 25 bp, Homo sapien
tcaattccttgacccgctcttagat

SEQ ID NO: 4490814 - DNA, 25 bp, Homo sapien
tgtcagatggttgaagactagctat

SEQ ID NO: 4490815 - DNA, 25 bp, Homo sapien
tcctatgtcagatggttgaagacta

SEQ ID NO: 4490816 - DNA, 25 bp, Homo sapien
gatggttgaagactagctattagcc

SEQ ID NO: 4490817 - DNA, 25 bp, Homo sapien
aattcctatgtcagatggttgaaga

SEQ ID NO: 4490818 - DNA, 25 bp, Homo sapien
gaaacactctggggctcctcgttga

SEQ ID NO: 4490819 - DNA, 25 bp, Homo sapien
gctgaaacactctggggctcctcgt

SEQ ID NO: 4490820 - DNA, 25 bp, Homo sapien
ggggctcctcgttgagtgggacaaa

SEQ ID NO: 4490821 - DNA, 25 bp, Homo sapien
tggggctcctcgttgagtgggacaa

SEQ ID NO: 4490822 - DNA, 25 bp, Homo sapien
ccggactgtactccgtaggtgccat

SEQ ID NO: 4490823 - DNA, 25 bp, Homo sapien
agggccggactgtactccgtaggtg

SEQ ID NO: 4490824 - DNA, 25 bp, Homo sapien
ggactgtactccgtaggtgccatgg

SEQ ID NO: 4490825 - DNA, 25 bp, Homo sapien
ggccggactgtactccgtaggtgcc

SEQ ID NO: 4490826 - DNA, 25 bp, Homo sapien
agctctggcttttctctaacccgtt

SEQ ID NO: 4490827 - DNA, 25 bp, Homo sapien
cagctctggcttttctctaacccgt

SEQ ID NO: 4490828 - DNA, 25 bp, Homo sapien
aggcaagtccatcccatccagggag

SEQ ID NO: 4490829 - DNA, 25 bp, Homo sapien
tccaactgccagctgatcgggtcag

SEQ ID NO: 4490830 - DNA, 25 bp, Homo sapien
ctgaacatgcgggaacaaggaaaac

SEQ ID NO: 4490831 - DNA, 25 bp, Homo sapien
catccagggtacaatgcgcctttcc

SEQ ID NO: 4490832 - DNA, 25 bp, Homo sapien
gcatccagggtacaatgcgcctttc

SEQ ID NO: 4490833 - DNA, 25 bp, Homo sapien
ttagcatcttctagacattccaaaa

SEQ ID NO: 4490834 - DNA, 25 bp, Homo sapien
cgaattgttgttcttagcatcttct

SEQ ID NO: 4490835 - DNA, 25 bp, Homo sapien
gcatcttctagacattccaaaactg

SEQ ID NO: 4490836 - DNA, 25 bp, Homo sapien
catcttctagacattccaaaactga

SEQ ID NO: 4490837 - DNA, 25 bp, Homo sapien
tctggaatgccagggctcttcctct

SEQ ID NO: 4490838 - DNA, 25 bp, Homo sapien
tctttttcctgttagctccttctgg

SEQ ID NO: 4490839 - DNA, 25 bp, Homo sapien
tgtcagggctactgccattgatttt

SEQ ID NO: 4490840 - DNA, 25 bp, Homo sapien
gctgtgtcagggctactgccattga

SEQ ID NO: 4490841 - DNA, 25 bp, Homo sapien
gtagcagatgatgcacggccctccc

SEQ ID NO: 4490842 - DNA, 25 bp, Homo sapien
tgatgcacggccctccccgtagata

SEQ ID NO: 4490843 - DNA, 25 bp, Homo sapien
agatgatgcacggccctccccgtag

SEQ ID NO: 4490844 - DNA, 25 bp, Homo sapien
gcagatgatgcacggccctccccgt

SEQ ID NO: 4490845 - DNA, 25 bp, Homo sapien
actgattattgtggagcttgaatcc

SEQ ID NO: 4490846 - DNA, 25 bp, Homo sapien
ctgattattgtggagcttgaatcca

SEQ ID NO: 4490847 - DNA, 25 bp, Homo sapien
gtggagcttgaatccagggccactg

SEQ ID NO: 4490848 - DNA, 25 bp, Homo sapien
tattgtggagcttgaatccagggcc

SEQ ID NO: 4490849 - DNA, 25 bp, Homo sapien
catgcttctcctctttcaatgtgtg

SEQ ID NO: 4490850 - DNA, 25 bp, Homo sapien
tcctcccaagcttctgtacctgatg

SEQ ID NO: 4490851 - DNA, 25 bp, Homo sapien
gtatctcatgcttctcctctttcaa

SEQ ID NO: 4490852 - DNA, 25 bp, Homo sapien
cctcccaagcttctgtacctgatgt

SEQ ID NO: 4490853 - DNA, 25 bp, Homo sapien
tccttaggtggttggtctcatcttg

SEQ ID NO: 4490854 - DNA, 25 bp, Homo sapien
cagcctggagctgtcttcccacact

SEQ ID NO: 4490855 - DNA, 25 bp, Homo sapien
gcctggagctgtcttcccacactct

SEQ ID NO: 4490856 - DNA, 25 bp, Homo sapien
cttccttaggtggttggtctcatct

SEQ ID NO: 4490857 - DNA, 25 bp, Homo sapien
caggagactcaacatctgattgttt

SEQ ID NO: 4490858 - DNA, 25 bp, Homo sapien
agcagcctctcctgttcctcctgcc

SEQ ID NO: 4490859 - DNA, 25 bp, Homo sapien
ccagcagcctctcctgttcctcctg

SEQ ID NO: 4490860 - DNA, 25 bp, Homo sapien
ttgtccagcagcctctcctgttcct

SEQ ID NO: 4490861 - DNA, 25 bp, Homo sapien
cagcctctcctgttcctcctgccac

SEQ ID NO: 4490862 - DNA, 25 bp, Homo sapien
tgtggggctcggcccgctgcttgta

SEQ ID NO: 4490863 - DNA, 25 bp, Homo sapien
tccagctcccgtagagtctcctgct

SEQ ID NO: 4490864 - DNA, 25 bp, Homo sapien
gcttgtagagggcttcccaccccaa

SEQ ID NO: 4490865 - DNA, 25 bp, Homo sapien
cccgctgcttgtagagggcttccca

SEQ ID NO: 4490866 - DNA, 25 bp, Homo sapien
gcagtgcactcttgttctcattatt

SEQ ID NO: 4490867 - DNA, 25 bp, Homo sapien
ctgcagtgcactcttgttctcatta

SEQ ID NO: 4490868 - DNA, 25 bp, Homo sapien
tgcagtgcactcttgttctcattat

SEQ ID NO: 4490869 - DNA, 25 bp, Homo sapien
actgcagtgcactcttgttctcatt

SEQ ID NO: 4490870 - DNA, 25 bp, Homo sapien
tcccagccattattggatgggtcac

SEQ ID NO: 4490871 - DNA, 25 bp, Homo sapien
cagccattattggatgggtcacagg

SEQ ID NO: 4490872 - DNA, 25 bp, Homo sapien
ccagccattattggatgggtcacag

SEQ ID NO: 4490873 - DNA, 25 bp, Homo sapien
gccattattggatgggtcacaggtt

SEQ ID NO: 4490874 - DNA, 25 bp, Homo sapien
accacgaactgctgcaggtgacaca

SEQ ID NO: 4490875 - DNA, 25 bp, Homo sapien
tctactggctggtagcttccaggtt

SEQ ID NO: 4490876 - DNA, 25 bp, Homo sapien
tactggctggtagcttccaggttct

SEQ ID NO: 4490877 - DNA, 25 bp, Homo sapien
gggctttagctgctgtttctactgg

SEQ ID NO: 4490878 - DNA, 25 bp, Homo sapien
actgggctttagctgctgtttctac

SEQ ID NO: 4490879 - DNA, 25 bp, Homo sapien
ccatccttaggcaagccgatgacct

SEQ ID NO: 4490880 - DNA, 25 bp, Homo sapien
aagccgatgacctgttcccaggagg

SEQ ID NO: 4490881 - DNA, 25 bp, Homo sapien
taggcaagccgatgacctgttccca

SEQ ID NO: 4490882 - DNA, 25 bp, Homo sapien
cttaggcaagccgatgacctgttcc

SEQ ID NO: 4490883 - DNA, 25 bp, Homo sapien
ggcatgggccgaggcgcctcctgct

SEQ ID NO: 4490884 - DNA, 25 bp, Homo sapien
gggatgttcggcatgggccgaggcg

SEQ ID NO: 4490885 - DNA, 25 bp, Homo sapien
atgggccgaggcgcctcctgctcac

SEQ ID NO: 4490886 - DNA, 25 bp, Homo sapien
gggccgaggcgcctcctgctcactg

SEQ ID NO: 4490887 - DNA, 25 bp, Homo sapien
atggcctcccggctctccaggtccc

SEQ ID NO: 4490888 - DNA, 25 bp, Homo sapien
catggcctcccggctctccaggtcc

SEQ ID NO: 4490889 - DNA, 25 bp, Homo sapien
acacataacaaccggggcagggaga

SEQ ID NO: 4490890 - DNA, 25 bp, Homo sapien
atacacataacaaccggggcaggga

SEQ ID NO: 4490891 - DNA, 25 bp, Homo sapien
tacacataacaaccggggcagggag

SEQ ID NO: 4490892 - DNA, 25 bp, Homo sapien
tatacacataacaaccggggcaggg

SEQ ID NO: 4490893 - DNA, 25 bp, Homo sapien
gcattggctccagcggagttgaaaa

SEQ ID NO: 4490894 - DNA, 25 bp, Homo sapien
gggcattggctccagcggagttgaa

SEQ ID NO: 4490895 - DNA, 25 bp, Homo sapien
cctttgctcctcctgggcattggct

SEQ ID NO: 4490896 - DNA, 25 bp, Homo sapien
tttgctcctcctgggcattggctcc

SEQ ID NO: 4490897 - DNA, 25 bp, Homo sapien
ggctggggccgctacctctggcttt

SEQ ID NO: 4490898 - DNA, 25 bp, Homo sapien
acacacagattcacccccagtctct

SEQ ID NO: 4490899 - DNA, 25 bp, Homo sapien
ctggtgggtctccccacacacagat

SEQ ID NO: 4490900 - DNA, 25 bp, Homo sapien
ggctttttctgggacgaggccactg

SEQ ID NO: 4490901 - DNA, 25 bp, Homo sapien
cagcttctccatggccccctgcagg

SEQ ID NO: 4490902 - DNA, 25 bp, Homo sapien
gcttctccatggccccctgcagggc

SEQ ID NO: 4490903 - DNA, 25 bp, Homo sapien
tgcagcttctccatggccccctgca

SEQ ID NO: 4490904 - DNA, 25 bp, Homo sapien
ctgcagcttctccatggccccctgc

SEQ ID NO: 4490905 - DNA, 25 bp, Homo sapien
cccacccttgttggcccatgccagg

SEQ ID NO: 4490906 - DNA, 25 bp, Homo sapien
ctgccttgtcccgaccccacccttg

SEQ ID NO: 4490907 - DNA, 25 bp, Homo sapien
cccttgttggcccatgccaggacta

SEQ ID NO: 4490908 - DNA, 25 bp, Homo sapien
gttggcccatgccaggactactcac

SEQ ID NO: 4490909 - DNA, 25 bp, Homo sapien
gctccagtttctccactcgctcctt

SEQ ID NO: 4490910 - DNA, 25 bp, Homo sapien
aattgaagctccagtttctccactc

SEQ ID NO: 4490911 - DNA, 25 bp, Homo sapien
tgaagctccagtttctccactcgct

SEQ ID NO: 4490912 - DNA, 25 bp, Homo sapien
ccagtttctccactcgctccttcag

SEQ ID NO: 4490913 - DNA, 25 bp, Homo sapien
agcctgacgatgtcctcctctccca

SEQ ID NO: 4490914 - DNA, 25 bp, Homo sapien
ttgtccgcacacccaagctcccggg

SEQ ID NO: 4490915 - DNA, 25 bp, Homo sapien
gtccgcacacccaagctcccgggcg

SEQ ID NO: 4490916 - DNA, 25 bp, Homo sapien
ccgcacacccaagctcccgggcgat

SEQ ID NO: 4490917 - DNA, 25 bp, Homo sapien
cgcacacccaagctcccgggcgatt

SEQ ID NO: 4490918 - DNA, 25 bp, Homo sapien
tcctggtacagcctccatgctatca

SEQ ID NO: 4490919 - DNA, 25 bp, Homo sapien
gggagtcctgcattacaggaagcag

SEQ ID NO: 4490920 - DNA, 25 bp, Homo sapien
ctggggagtcctgcattacaggaag

SEQ ID NO: 4490921 - DNA, 25 bp, Homo sapien
cctccatgctatcagtgaggctcac

SEQ ID NO: 4490922 - DNA, 25 bp, Homo sapien
ccggatgtccccacaggcaatctga

SEQ ID NO: 4490923 - DNA, 25 bp, Homo sapien
cagagtaggcacagtggcacgacga

SEQ ID NO: 4490924 - DNA, 25 bp, Homo sapien
ccaggaccaccgtcagcatgcccat

SEQ ID NO: 4490925 - DNA, 25 bp, Homo sapien
gaggagtgggcagagtaggcacagt

SEQ ID NO: 4490926 - DNA, 25 bp, Homo sapien
gcatcatcagtgacaccaccaggac

SEQ ID NO: 4490927 - DNA, 25 bp, Homo sapien
ccttgggttcactggcttggcctct

SEQ ID NO: 4490928 - DNA, 25 bp, Homo sapien
tggtggctgtgatcatcccaaggca

SEQ ID NO: 4490929 - DNA, 25 bp, Homo sapien
ttctgtccagtttaccttgggttca

SEQ ID NO: 4490930 - DNA, 25 bp, Homo sapien
ccaaggcaggatagggagagaatct

SEQ ID NO: 4490931 - DNA, 25 bp, Homo sapien
ctcccgccagaggtgagagtaaaat

SEQ ID NO: 4490932 - DNA, 25 bp, Homo sapien
ccctcccgccagaggtgagagtaaa

SEQ ID NO: 4490933 - DNA, 25 bp, Homo sapien
cctcccgccagaggtgagagtaaaa

SEQ ID NO: 4490934 - DNA, 25 bp, Homo sapien
ttggtggttgtgctgcccggagcct

SEQ ID NO: 4490935 - DNA, 25 bp, Homo sapien
cggagcctccagtccgcgagtgtga

SEQ ID NO: 4490936 - DNA, 25 bp, Homo sapien
cgcgagtgtgaagaacggaccagat

SEQ ID NO: 4490937 - DNA, 25 bp, Homo sapien
cggaagcgcgcgcatgctctggact

SEQ ID NO: 4490938 - DNA, 25 bp, Homo sapien
gtctcaacactgtcacttctcattc

SEQ ID NO: 4490939 - DNA, 25 bp, Homo sapien
tatgttgcttgtctcaacactgtca

SEQ ID NO: 4490940 - DNA, 25 bp, Homo sapien
tgttgcttgtctcaacactgtcact

SEQ ID NO: 4490941 - DNA, 25 bp, Homo sapien
gcttgtctcaacactgtcacttctc

SEQ ID NO: 4490942 - DNA, 25 bp, Homo sapien
gctcactaatgtccggctgtcattt

SEQ ID NO: 4490943 - DNA, 25 bp, Homo sapien
atactctttggactttgaaggttct

SEQ ID NO: 4490944 - DNA, 25 bp, Homo sapien
ttgctcactaatgtccggctgtcat

SEQ ID NO: 4490945 - DNA, 25 bp, Homo sapien
actaatgtccggctgtcatttctcc

SEQ ID NO: 4490946 - DNA, 25 bp, Homo sapien
agcagtagtgcttcagcaggggcca

SEQ ID NO: 4490947 - DNA, 25 bp, Homo sapien
ttcagtcgcacgctagcagctatca

SEQ ID NO: 4490948 - DNA, 25 bp, Homo sapien
cagtcgcacgctagcagctatcatg

SEQ ID NO: 4490949 - DNA, 25 bp, Homo sapien
gctggccagcagtagtgcttcagca

SEQ ID NO: 4490950 - DNA, 25 bp, Homo sapien
tcttccgttctgtccccctgcctcc

SEQ ID NO: 4490951 - DNA, 25 bp, Homo sapien
ggcgcctacggagtacactctggcc

SEQ ID NO: 4490952 - DNA, 25 bp, Homo sapien
atggcgcctacggagtacactctgg

SEQ ID NO: 4490953 - DNA, 25 bp, Homo sapien
ccatggcgcctacggagtacactct

SEQ ID NO: 4490954 - DNA, 25 bp, Homo sapien
ctgccatggcgcctacggagtacac

SEQ ID NO: 4490955 - DNA, 25 bp, Homo sapien
tagccatactgctcggcctggtatg

SEQ ID NO: 4490956 - DNA, 25 bp, Homo sapien
agccatactgctcggcctggtatgt

SEQ ID NO: 4490957 - DNA, 25 bp, Homo sapien
ttaagagccagaggttggtggagtt

SEQ ID NO: 4490958 - DNA, 25 bp, Homo sapien
ttggaggaggtctgacggccttctt

SEQ ID NO: 4490959 - DNA, 25 bp, Homo sapien
ggtctgacggccttcttactctcac

SEQ ID NO: 4490960 - DNA, 25 bp, Homo sapien
caccttgaccaaggctgagtcctta

SEQ ID NO: 4490961 - DNA, 25 bp, Homo sapien
tcatcttcttcaccgatatggtctg

SEQ ID NO: 4490962 - DNA, 25 bp, Homo sapien
tattcatcttcttcaccgatatggt

SEQ ID NO: 4490963 - DNA, 25 bp, Homo sapien
tcttcttcaccgatatggtctgtgg

SEQ ID NO: 4490964 - DNA, 25 bp, Homo sapien
ctattcatcttcttcaccgatatgg

SEQ ID NO: 4490965 - DNA, 25 bp, Homo sapien
ccagccctactccgactagagttga

SEQ ID NO: 4490966 - DNA, 25 bp, Homo sapien
cctgtcggtggagtctgttacaagg

SEQ ID NO: 4490967 - DNA, 25 bp, Homo sapien
ttggtggttgtgctgcccggagcct

SEQ ID NO: 4490968 - DNA, 25 bp, Homo sapien
cggaccagatgggtccagcagtgct

SEQ ID NO: 4490969 - DNA, 25 bp, Homo sapien
cggagcctccagtccgcgagtgtga

SEQ ID NO: 4490970 - DNA, 25 bp, Homo sapien
cgcgagtgtgaagaacggaccagat

SEQ ID NO: 4490971 - DNA, 25 bp, Homo sapien
gtctcaacactgtcacttctcattc

SEQ ID NO: 4490972 - DNA, 25 bp, Homo sapien
tgttgcttgtctcaacactgtcact

SEQ ID NO: 4490973 - DNA, 25 bp, Homo sapien
tatgttgcttgtctcaacactgtca

SEQ ID NO: 4490974 - DNA, 25 bp, Homo sapien
gcttgtctcaacactgtcacttctc

SEQ ID NO: 4490975 - DNA, 25 bp, Homo sapien
gctcactaatgtccggctgtcattt

SEQ ID NO: 4490976 - DNA, 25 bp, Homo sapien
actaatgtccggctgtcatttctcc

SEQ ID NO: 4490977 - DNA, 25 bp, Homo sapien
atactctttggactttgaaggttct

SEQ ID NO: 4490978 - DNA, 25 bp, Homo sapien
ttgctcactaatgtccggctgtcat

SEQ ID NO: 4490979 - DNA, 25 bp, Homo sapien
catccaacagccaccagacctgata

SEQ ID NO: 4490980 - DNA, 25 bp, Homo sapien
ggatggctggctggagtgaatgcca

SEQ ID NO: 4490981 - DNA, 25 bp, Homo sapien
gaacactgattgaaccaaaatggtg

SEQ ID NO: 4490982 - DNA, 25 bp, Homo sapien
gaaagcccagggtcctctgaggaac

SEQ ID NO: 4490983 - DNA, 25 bp, Homo sapien
agagagagaatttatagctatttat

SEQ ID NO: 4490984 - DNA, 25 bp, Homo sapien
gagagagaatttatagctatttata

SEQ ID NO: 4490985 - DNA, 25 bp, Homo sapien
ggcagttggccacgtatatatatgt

SEQ ID NO: 4490986 - DNA, 25 bp, Homo sapien
tgaggcagttggccacgtatatata

SEQ ID NO: 4490987 - DNA, 25 bp, Homo sapien
gggcgatgtcaggagacagcttcct

SEQ ID NO: 4490988 - DNA, 25 bp, Homo sapien
ggcgatgtcaggagacagcttcctc

SEQ ID NO: 4490989 - DNA, 25 bp, Homo sapien
ggggcgatgtcaggagacagcttcc

SEQ ID NO: 4490990 - DNA, 25 bp, Homo sapien
gaggggcgatgtcaggagacagctt

SEQ ID NO: 4490991 - DNA, 25 bp, Homo sapien
tcttccgttctgtccccctgcctcc

SEQ ID NO: 4490992 - DNA, 25 bp, Homo sapien
ggcgcctacggagtacactctggcc

SEQ ID NO: 4490993 - DNA, 25 bp, Homo sapien
ccatggcgcctacggagtacactct

SEQ ID NO: 4490994 - DNA, 25 bp, Homo sapien
atggcgcctacggagtacactctgg

SEQ ID NO: 4490995 - DNA, 25 bp, Homo sapien
ctgccatggcgcctacggagtacac

SEQ ID NO: 4490996 - DNA, 25 bp, Homo sapien
cagctgggctgttggggaccttcca

SEQ ID NO: 4490997 - DNA, 25 bp, Homo sapien
agctgggctgttggggaccttccag

SEQ ID NO: 4490998 - DNA, 25 bp, Homo sapien
tgttggggaccttccaggcctgtta

SEQ ID NO: 4490999 - DNA, 25 bp, Homo sapien
ggctgttggggaccttccaggcctg

SEQ ID NO: 4491000 - DNA, 25 bp, Homo sapien
cttatacacagaatgcataatggaa

SEQ ID NO: 4491001 - DNA, 25 bp, Homo sapien
ttcaaggtgctgttttgcctaaaaa

SEQ ID NO: 4491002 - DNA, 25 bp, Homo sapien
tagtattgggtattgagactctgca

SEQ ID NO: 4491003 - DNA, 25 bp, Homo sapien
gtttcaaggtgctgttttgcctaaa

SEQ ID NO: 4491004 - DNA, 25 bp, Homo sapien
cacgtataaatgaataggaatgacc

SEQ ID NO: 4491005 - DNA, 25 bp, Homo sapien
ctgacacgtataaatgaataggaat

SEQ ID NO: 4491006 - DNA, 25 bp, Homo sapien
ttaccctgacacgtataaatgaata

SEQ ID NO: 4491007 - DNA, 25 bp, Homo sapien
gacacgtataaatgaataggaatga

SEQ ID NO: 4491008 - DNA, 25 bp, Homo sapien
aggctacgtgaacaggaggagaggc

SEQ ID NO: 4491009 - DNA, 25 bp, Homo sapien
aggagaggctacgtgaacaggagga

SEQ ID NO: 4491010 - DNA, 25 bp, Homo sapien
caggaggagaggctacgtgaacagg

SEQ ID NO: 4491011 - DNA, 25 bp, Homo sapien
gagaggctacgtgaacaggaggaga

SEQ ID NO: 4491012 - DNA, 25 bp, Homo sapien
caccgaggaaatggtcgttgctgtt

SEQ ID NO: 4491013 - DNA, 25 bp, Homo sapien
gccgtgcatcctctactaccctgga

SEQ ID NO: 4491014 - DNA, 25 bp, Homo sapien
tgcagtcagcaacaggtatctacgg

SEQ ID NO: 4491015 - DNA, 25 bp, Homo sapien
ggctgtccctttaggagtcactgaa

SEQ ID NO: 4491016 - DNA, 25 bp, Homo sapien
agatggactgttgggtactggttaa

SEQ ID NO: 4491017 - DNA, 25 bp, Homo sapien
ccagcaggagctaacaggaaaaaga

SEQ ID NO: 4491018 - DNA, 25 bp, Homo sapien
ttctggtggttaccactcacctggg

SEQ ID NO: 4491019 - DNA, 25 bp, Homo sapien
cttgtacagttgttggtggcattac

SEQ ID NO: 4491020 - DNA, 25 bp, Homo sapien
ttcagttaacatgaaatgcaggctg

SEQ ID NO: 4491021 - DNA, 25 bp, Homo sapien
cagttaacatgaaatgcaggctgta

SEQ ID NO: 4491022 - DNA, 25 bp, Homo sapien
ttaacatgaaatgcaggctgtaacc

SEQ ID NO: 4491023 - DNA, 25 bp, Homo sapien
tctgttcagttaacatgaaatgcag

SEQ ID NO: 4491024 - DNA, 25 bp, Homo sapien
tgtgcttggtgctgaacctatgcta

SEQ ID NO: 4491025 - DNA, 25 bp, Homo sapien
tggcattaacactgacctttattta

SEQ ID NO: 4491026 - DNA, 25 bp, Homo sapien
gttgggcacttagaacatcggtttg

SEQ ID NO: 4491027 - DNA, 25 bp, Homo sapien
tgctgaacctatgctagtattggca

SEQ ID NO: 4491028 - DNA, 25 bp, Homo sapien
ccctcccgccagaggtgagagtaaa

SEQ ID NO: 4491029 - DNA, 25 bp, Homo sapien
ctcccgccagaggtgagagtaaaat

SEQ ID NO: 4491030 - DNA, 25 bp, Homo sapien
cctcccgccagaggtgagagtaaaa

SEQ ID NO: 4491031 - DNA, 25 bp, Homo sapien
atgacagcggctcccgaccggctca

SEQ ID NO: 4491032 - DNA, 25 bp, Homo sapien
gagagcgccgccgagaggtcccgcg

SEQ ID NO: 4491033 - DNA, 25 bp, Homo sapien
tgcagcctggagcttccagtccgcg

SEQ ID NO: 4491034 - DNA, 25 bp, Homo sapien
cgccgccgagaggtcccgcgggtgg

SEQ ID NO: 4491035 - DNA, 25 bp, Homo sapien
tagcctgaactcagcagtgctgttc

SEQ ID NO: 4491036 - DNA, 25 bp, Homo sapien
agtgctgttcccttgggagacacac

SEQ ID NO: 4491037 - DNA, 25 bp, Homo sapien
tttgctgacagtccatgagctgata

SEQ ID NO: 4491038 - DNA, 25 bp, Homo sapien
acacacacacgagttggtggttttg

SEQ ID NO: 4491039 - DNA, 25 bp, Homo sapien
tgtctcaacactattatttcttatt

SEQ ID NO: 4491040 - DNA, 25 bp, Homo sapien
agcccctcgaagcatgctctttttg

SEQ ID NO: 4491041 - DNA, 25 bp, Homo sapien
tctttttgacacagttagctttagg

SEQ ID NO: 4491042 - DNA, 25 bp, Homo sapien
ttttgacacagttagctttaggcac

SEQ ID NO: 4491043 - DNA, 25 bp, Homo sapien
taggactctaaagctggtgtgccag

SEQ ID NO: 4491044 - DNA, 25 bp, Homo sapien
tcatagtgacaacgagactcagtgt

SEQ ID NO: 4491045 - DNA, 25 bp, Homo sapien
gccaggatgaagacctaggactcta

SEQ ID NO: 4491046 - DNA, 25 bp, Homo sapien
gagaaaagtctctaagcgttcagga

SEQ ID NO: 4491047 - DNA, 25 bp, Homo sapien
tgagtccaaaggacaccctttccca

SEQ ID NO: 4491048 - DNA, 25 bp, Homo sapien
atgtggctttcatgacaatcttagg

SEQ ID NO: 4491049 - DNA, 25 bp, Homo sapien
caatcttaggaaactaatgactaga

SEQ ID NO: 4491050 - DNA, 25 bp, Homo sapien
caatcatgattgactatatgtggct

SEQ ID NO: 4491051 - DNA, 25 bp, Homo sapien
cacttttaatacaggccaatcatga

SEQ ID NO: 4491052 - DNA, 25 bp, Homo sapien
cttggctttctgtggatacgttgac

SEQ ID NO: 4491053 - DNA, 25 bp, Homo sapien
tggctttctgtggatacgttgactc

SEQ ID NO: 4491054 - DNA, 25 bp, Homo sapien
ttggctttctgtggatacgttgact

SEQ ID NO: 4491055 - DNA, 25 bp, Homo sapien
caaggtctttgactacatgagcaac

SEQ ID NO: 4491056 - DNA, 25 bp, Homo sapien
tctttgactacatgagcaactctca

SEQ ID NO: 4491057 - DNA, 25 bp, Homo sapien
ggtctttgactacatgagcaactct

SEQ ID NO: 4491058 - DNA, 25 bp, Homo sapien
ccagcaaggtctttgactacatgag

SEQ ID NO: 4491059 - DNA, 25 bp, Homo sapien
tcctttccggtcagatgcagtggct

SEQ ID NO: 4491060 - DNA, 25 bp, Homo sapien
caaagctgtccatcttgcaggcaga

SEQ ID NO: 4491061 - DNA, 25 bp, Homo sapien
ttgacatgatgagcacactggcacc

SEQ ID NO: 4491062 - DNA, 25 bp, Homo sapien
tataactgccctgttgatgccgtgc

SEQ ID NO: 4491063 - DNA, 25 bp, Homo sapien
aaaggcagattctccactctggaga

SEQ ID NO: 4491064 - DNA, 25 bp, Homo sapien
acacaaaggcagattctccactctg

SEQ ID NO: 4491065 - DNA, 25 bp, Homo sapien
caaaggcagattctccactctggag

SEQ ID NO: 4491066 - DNA, 25 bp, Homo sapien
acaaaggcagattctccactctgga

SEQ ID NO: 4491067 - DNA, 25 bp, Homo sapien
cgctcattggctgccgagaacggcc

SEQ ID NO: 4491068 - DNA, 25 bp, Homo sapien
gtagtccgcccggagacgaacctga

SEQ ID NO: 4491069 - DNA, 25 bp, Homo sapien
attggctgccgagaacggccctgga

SEQ ID NO: 4491070 - DNA, 25 bp, Homo sapien
gtggagacggcacccagccgggcgg

SEQ ID NO: 4491071 - DNA, 25 bp, Homo sapien
ccgtggggcaccgagaacaatggac

SEQ ID NO: 4491072 - DNA, 25 bp, Homo sapien
gagaacaatggacgggagaggcccg

SEQ ID NO: 4491073 - DNA, 25 bp, Homo sapien
acaatggacgggagaggcccgccca

SEQ ID NO: 4491074 - DNA, 25 bp, Homo sapien
gggcaccgagaacaatggacgggag

SEQ ID NO: 4491075 - DNA, 25 bp, Homo sapien
gttgcttcgcgtgcgaaagcgcccc

SEQ ID NO: 4491076 - DNA, 25 bp, Homo sapien
ccaggtcctgctctagcggttgctt

SEQ ID NO: 4491077 - DNA, 25 bp, Homo sapien
cctgctctagcggttgcttcgcgtg

SEQ ID NO: 4491078 - DNA, 25 bp, Homo sapien
tctagcggttgcttcgcgtgcgaaa

SEQ ID NO: 4491079 - DNA, 25 bp, Homo sapien
ctactgcccggggtccgcgtggctc

SEQ ID NO: 4491080 - DNA, 25 bp, Homo sapien
actgcccggggtccgcgtggctcca

SEQ ID NO: 4491081 - DNA, 25 bp, Homo sapien
ggctactgcccggggtccgcgtggc

SEQ ID NO: 4491082 - DNA, 25 bp, Homo sapien
cgggctactgcccggggtccgcgtg

SEQ ID NO: 4491083 - DNA, 25 bp, Homo sapien
gaccttgacctaacatacaacttag

SEQ ID NO: 4491084 - DNA, 25 bp, Homo sapien
taagtcagtttcgacttgcactgtg

SEQ ID NO: 4491085 - DNA, 25 bp, Homo sapien
tgactgaaatactgaggactctcct

SEQ ID NO: 4491086 - DNA, 25 bp, Homo sapien
tacaacttagtcaccaaactcggtg

SEQ ID NO: 4491087 - DNA, 25 bp, Homo sapien
caatcacttaggcttcaagccttgg

SEQ ID NO: 4491088 - DNA, 25 bp, Homo sapien
taagacacttccctcctcaaatatc

SEQ ID NO: 4491089 - DNA, 25 bp, Homo sapien
cttaggcttcaagccttggacctca

SEQ ID NO: 4491090 - DNA, 25 bp, Homo sapien
tcctggggcaatcacttaggcttca

SEQ ID NO: 4491091 - DNA, 25 bp, Homo sapien
gtcactctcgggatgtctgcagcca

SEQ ID NO: 4491092 - DNA, 25 bp, Homo sapien
gagctcagcggagtggtcactctcg

SEQ ID NO: 4491093 - DNA, 25 bp, Homo sapien
ctggaccaaggagctcagcggagtg

SEQ ID NO: 4491094 - DNA, 25 bp, Homo sapien
cggagtggtcactctcgggatgtct

SEQ ID NO: 4491095 - DNA, 25 bp, Homo sapien
ccaggagtcatcctccaggatcatg

SEQ ID NO: 4491096 - DNA, 25 bp, Homo sapien
gcttcttgcacccaggagtcatcct

SEQ ID NO: 4491097 - DNA, 25 bp, Homo sapien
tccaggatcatggtggtgacctcct

SEQ ID NO: 4491098 - DNA, 25 bp, Homo sapien
tcctgtctatcttcctcttgaggca

SEQ ID NO: 4491099 - DNA, 25 bp, Homo sapien
ttgccagcactctggggaaagggct

SEQ ID NO: 4491100 - DNA, 25 bp, Homo sapien
ctgggggccgcccttgccagcactc

SEQ ID NO: 4491101 - DNA, 25 bp, Homo sapien
cccttgccagcactctggggaaagg

SEQ ID NO: 4491102 - DNA, 25 bp, Homo sapien
ggaaagggctcagactcagggccat

SEQ ID NO: 4491103 - DNA, 25 bp, Homo sapien
tttcaggccgatgctcttgcagcca

SEQ ID NO: 4491104 - DNA, 25 bp, Homo sapien
tggcagcatggttaacatctgctcc

SEQ ID NO: 4491105 - DNA, 25 bp, Homo sapien
caagcctgaatttcctttggcagca

SEQ ID NO: 4491106 - DNA, 25 bp, Homo sapien
aggcggccgagtgcaccctgtggtc

SEQ ID NO: 4491107 - DNA, 25 bp, Homo sapien
tctggagctgactttgcacacagtg

SEQ ID NO: 4491108 - DNA, 25 bp, Homo sapien
tcctctaccttggaagggtgctccc

SEQ ID NO: 4491109 - DNA, 25 bp, Homo sapien
tctccctatgaggttctgcgtctca

SEQ ID NO: 4491110 - DNA, 25 bp, Homo sapien
gctgactgcctgcagacagagcaga

SEQ ID NO: 4491111 - DNA, 25 bp, Homo sapien
tacaaactggtcacctccaccggaa

SEQ ID NO: 4491112 - DNA, 25 bp, Homo sapien
ttacaaactggtcacctccaccgga

SEQ ID NO: 4491113 - DNA, 25 bp, Homo sapien
tcccatctcaggtgcccagttaaag

SEQ ID NO: 4491114 - DNA, 25 bp, Homo sapien
ggatgggaagggctgtaatcacctc

SEQ ID NO: 4491115 - DNA, 25 bp, Homo sapien
acccatgtgtctgggatggtcccca

SEQ ID NO: 4491116 - DNA, 25 bp, Homo sapien
acctgctgagacctgaacctctgct

SEQ ID NO: 4491117 - DNA, 25 bp, Homo sapien
gccaccctcaaagtgtctgattcag

SEQ ID NO: 4491118 - DNA, 25 bp, Homo sapien
gctttatgaagagggtctccacggg

SEQ ID NO: 4491119 - DNA, 25 bp, Homo sapien
cagagatgggacaaggctattccaa

SEQ ID NO: 4491120 - DNA, 25 bp, Homo sapien
ggtgggcactcaaagaacaactggg

SEQ ID NO: 4491121 - DNA, 25 bp, Homo sapien
aatggctttggctactccaggatgc

SEQ ID NO: 4491122 - DNA, 25 bp, Homo sapien
aaaggctggcccctatgagatccag

SEQ ID NO: 4491123 - DNA, 25 bp, Homo sapien
cagcagagcacgttcaagggcaggt

SEQ ID NO: 4491124 - DNA, 25 bp, Homo sapien
tgggaagaataagggatccctggcc

SEQ ID NO: 4491125 - DNA, 25 bp, Homo sapien
ctaacccagggtggctaacagtaag

SEQ ID NO: 4491126 - DNA, 25 bp, Homo sapien
gaaatgacattctaaccaaaactgg

SEQ ID NO: 4491127 - DNA, 25 bp, Homo sapien
cacaaattaatggactgctagaggg

SEQ ID NO: 4491128 - DNA, 25 bp, Homo sapien
tgtgaaagttacaccatgggccaac

SEQ ID NO: 4491129 - DNA, 25 bp, Homo sapien
cagccatgtacgcaggaagctgttt

SEQ ID NO: 4491130 - DNA, 25 bp, Homo sapien
ggcagccatgtacgcaggaagctgt

SEQ ID NO: 4491131 - DNA, 25 bp, Homo sapien
cagggcagccatgtacgcaggaagc

SEQ ID NO: 4491132 - DNA, 25 bp, Homo sapien
gcagccatgtacgcaggaagctgtt

SEQ ID NO: 4491133 - DNA, 25 bp, Homo sapien
gcaccaaaatacatgtcagggcttc

SEQ ID NO: 4491134 - DNA, 25 bp, Homo sapien
aaatatgtaggcaccaaaatacatg

SEQ ID NO: 4491135 - DNA, 25 bp, Homo sapien
agggaacagaactcagaaagctcag

SEQ ID NO: 4491136 - DNA, 25 bp, Homo sapien
ccaaaacagcagactgggtaaaagc

SEQ ID NO: 4491137 - DNA, 25 bp, Homo sapien
tcagtcaatttaagatcacatttat

SEQ ID NO: 4491138 - DNA, 25 bp, Homo sapien
ccactcttgccttcagtcaatttaa

SEQ ID NO: 4491139 - DNA, 25 bp, Homo sapien
caccgaggcggtagtacagtagcga

SEQ ID NO: 4491140 - DNA, 25 bp, Homo sapien
gataaaattggacatgcccctctca

SEQ ID NO: 4491141 - DNA, 25 bp, Homo sapien
tacgtgattcattctcaaacatgtc

SEQ ID NO: 4491142 - DNA, 25 bp, Homo sapien
tctcaaacatgtcttgattacagtt

SEQ ID NO: 4491143 - DNA, 25 bp, Homo sapien
catgtcttgattacagttctcccca

SEQ ID NO: 4491144 - DNA, 25 bp, Homo sapien
ttccgagaatatcttacgtgattca

SEQ ID NO: 4491145 - DNA, 25 bp, Homo sapien
gctgagcactttcaccttcaggcat

SEQ ID NO: 4491146 - DNA, 25 bp, Homo sapien
gccagcatctctctcaaagtcactt

SEQ ID NO: 4491147 - DNA, 25 bp, Homo sapien
ctttccccatcggagtgctgagcac

SEQ ID NO: 4491148 - DNA, 25 bp, Homo sapien
catcggagtgctgagcactttcacc

SEQ ID NO: 4491149 - DNA, 25 bp, Homo sapien
gcttctcccctaggtaggtgccctg

SEQ ID NO: 4491150 - DNA, 25 bp, Homo sapien
ttctcccctaggtaggtgccctgca

SEQ ID NO: 4491151 - DNA, 25 bp, Homo sapien
tccctgtcctgagaaaccacctccc

SEQ ID NO: 4491152 - DNA, 25 bp, Homo sapien
caggcctatgagctggccaacttcc

SEQ ID NO: 4491153 - DNA, 25 bp, Homo sapien
ttaaggctggatcggttgccaaagc

SEQ ID NO: 4491154 - DNA, 25 bp, Homo sapien
gatgtgcaatgaggttgggactcct

SEQ ID NO: 4491155 - DNA, 25 bp, Homo sapien
gagttgtaactaaagctttcgccgc

SEQ ID NO: 4491156 - DNA, 25 bp, Homo sapien
tggatcccctgatgcgtgttaaggc

SEQ ID NO: 4491157 - DNA, 25 bp, Homo sapien
ttctccaccatgtgggttctccggt

SEQ ID NO: 4491158 - DNA, 25 bp, Homo sapien
tgggttctccggtgtgtggccaggt

SEQ ID NO: 4491159 - DNA, 25 bp, Homo sapien
ggttctccggtgtgtggccaggtta

SEQ ID NO: 4491160 - DNA, 25 bp, Homo sapien
cacatgtcaggcactcgtagggttt

SEQ ID NO: 4491161 - DNA, 25 bp, Homo sapien
tccgctggtgcactacgagctggga

SEQ ID NO: 4491162 - DNA, 25 bp, Homo sapien
tggtgtgcaatcagactggagctct

SEQ ID NO: 4491163 - DNA, 25 bp, Homo sapien
tctggtgcatgaccagaatggagcc

SEQ ID NO: 4491164 - DNA, 25 bp, Homo sapien
tctgatgtgtgataaagttagagct

SEQ ID NO: 4491165 - DNA, 25 bp, Homo sapien
tgtgataaagttagagctgttgctg

SEQ ID NO: 4491166 - DNA, 25 bp, Homo sapien
tgatgtataatgaggactgagttcc

SEQ ID NO: 4491167 - DNA, 25 bp, Homo sapien
gactgagttccagctaaagcctttc

SEQ ID NO: 4491168 - DNA, 25 bp, Homo sapien
cgcctatgccctgttcttgaatgta

SEQ ID NO: 4491169 - DNA, 25 bp, Homo sapien
gccaatcaagtcacccaatgtaagg

SEQ ID NO: 4491170 - DNA, 25 bp, Homo sapien
gaatgtttaggaagcacagctcttt

SEQ ID NO: 4491171 - DNA, 25 bp, Homo sapien
aatgtatacgggacttgactcagac

SEQ ID NO: 4491172 - DNA, 25 bp, Homo sapien
gaaggcaccttagcccaacaacgtg

SEQ ID NO: 4491173 - DNA, 25 bp, Homo sapien
atttctctgaggactcggcccacgt

SEQ ID NO: 4491174 - DNA, 25 bp, Homo sapien
gagcagattctaactgacagcttgg

SEQ ID NO: 4491175 - DNA, 25 bp, Homo sapien
ggtgccctggaacactaacagcttg

SEQ ID NO: 4491176 - DNA, 25 bp, Homo sapien
caatggaaaggacactgggacactg

SEQ ID NO: 4491177 - DNA, 25 bp, Homo sapien
ggaaaggacactgggacactggctc

SEQ ID NO: 4491178 - DNA, 25 bp, Homo sapien
caagtttctgtgctcctgacacttt

SEQ ID NO: 4491179 - DNA, 25 bp, Homo sapien
ccaggctgtacttcctcaagtttct

SEQ ID NO: 4491180 - DNA, 25 bp, Homo sapien
cctgaaggccctgtccaactcttac

SEQ ID NO: 4491181 - DNA, 25 bp, Homo sapien
tcctgaaggccctgtccaactctta

SEQ ID NO: 4491182 - DNA, 25 bp, Homo sapien
ttcctgaaggccctgtccaactctt

SEQ ID NO: 4491183 - DNA, 25 bp, Homo sapien
gagacagaagttaccatccaccatg

SEQ ID NO: 4491184 - DNA, 25 bp, Homo sapien
gaacaaatgtgttcccctggtagct

SEQ ID NO: 4491185 - DNA, 25 bp, Homo sapien
tccaccatgggttggcagctagggc

SEQ ID NO: 4491186 - DNA, 25 bp, Homo sapien
tagtatacaaaagctacccgacagg

SEQ ID NO: 4491187 - DNA, 25 bp, Homo sapien
gggaacagatatgtcctcaaagtta

SEQ ID NO: 4491188 - DNA, 25 bp, Homo sapien
ccagggaacagatatgtcctcaaag

SEQ ID NO: 4491189 - DNA, 25 bp, Homo sapien
acagatatgtcctcaaagttaacac

SEQ ID NO: 4491190 - DNA, 25 bp, Homo sapien
gatatgtcctcaaagttaacacttc

SEQ ID NO: 4491191 - DNA, 25 bp, Homo sapien
tactgagcatccatcctataagaac

SEQ ID NO: 4491192 - DNA, 25 bp, Homo sapien
tataagaactaagcccattctgagc

SEQ ID NO: 4491193 - DNA, 25 bp, Homo sapien
aggtgcgaggatcccgagaacaaag

SEQ ID NO: 4491194 - DNA, 25 bp, Homo sapien
tcttcactctccaggtgcgaggatc

SEQ ID NO: 4491195 - DNA, 25 bp, Homo sapien
gccactgtgccagctctttttacca

SEQ ID NO: 4491196 - DNA, 25 bp, Homo sapien
ctgtgccagctctttttaccattta

SEQ ID NO: 4491197 - DNA, 25 bp, Homo sapien
agccactgtgccagctctttttacc

SEQ ID NO: 4491198 - DNA, 25 bp, Homo sapien
cactgtgccagctctttttaccatt

SEQ ID NO: 4491199 - DNA, 25 bp, Homo sapien
ctgggtactagagctggaggttcct

SEQ ID NO: 4491200 - DNA, 25 bp, Homo sapien
tgagctgggtactagagctggaggt

SEQ ID NO: 4491201 - DNA, 25 bp, Homo sapien
tcttgcatttctatgaagagaacca

SEQ ID NO: 4491202 - DNA, 25 bp, Homo sapien
cccagactgcttcttgcatttctat

SEQ ID NO: 4491203 - DNA, 25 bp, Homo sapien
tctggatatagttatatagattcac

SEQ ID NO: 4491204 - DNA, 25 bp, Homo sapien
tttgtaaaaactcaatgagctgtac

SEQ ID NO: 4491205 - DNA, 25 bp, Homo sapien
ctctggatatagttatatagattca

SEQ ID NO: 4491206 - DNA, 25 bp, Homo sapien
cagtttgtaaaaactcaatgagctg

SEQ ID NO: 4491207 - DNA, 25 bp, Homo sapien
cccaaagagttaggattataggcag

SEQ ID NO: 4491208 - DNA, 25 bp, Homo sapien
cctcccaaagagttaggattatagg

SEQ ID NO: 4491209 - DNA, 25 bp, Homo sapien
ctcccaaagagttaggattataggc

SEQ ID NO: 4491210 - DNA, 25 bp, Homo sapien
caaagagttaggattataggcagga

SEQ ID NO: 4491211 - DNA, 25 bp, Homo sapien
agtgtcaacaaaaagtctcagtgca

SEQ ID NO: 4491212 - DNA, 25 bp, Homo sapien
tgcagacaaacccactgaacttaat

SEQ ID NO: 4491213 - DNA, 25 bp, Homo sapien
gaatcagttgcgaagcagggccatg

SEQ ID NO: 4491214 - DNA, 25 bp, Homo sapien
cagggccatggaaattccttctatc

SEQ ID NO: 4491215 - DNA, 25 bp, Homo sapien
taaaaatcgcaagtgttagcccagc

SEQ ID NO: 4491216 - DNA, 25 bp, Homo sapien
gattcggccccgtgacatgttctta

SEQ ID NO: 4491217 - DNA, 25 bp, Homo sapien
gaagagctttgcaaccgcactctaa

SEQ ID NO: 4491218 - DNA, 25 bp, Homo sapien
tgagagaatacggacgattcggccc

SEQ ID NO: 4491219 - DNA, 25 bp, Homo sapien
gatttgttggtccacagctacagcc

SEQ ID NO: 4491220 - DNA, 25 bp, Homo sapien
tcgggaactgttctaggaccagcaa

SEQ ID NO: 4491221 - DNA, 25 bp, Homo sapien
ggtaacggaaatgccaaaagctctg

SEQ ID NO: 4491222 - DNA, 25 bp, Homo sapien
cactctccggatgctgctgtctgac

SEQ ID NO: 4491223 - DNA, 25 bp, Homo sapien
tgttcggaactatgtttttatagct

SEQ ID NO: 4491224 - DNA, 25 bp, Homo sapien
actgttcggaactatgtttttatag

SEQ ID NO: 4491225 - DNA, 25 bp, Homo sapien
ctgttcggaactatgtttttatagc

SEQ ID NO: 4491226 - DNA, 25 bp, Homo sapien
caggtgttttgcaataggctcaata

SEQ ID NO: 4491227 - DNA, 25 bp, Homo sapien
atgtcgacaaagaccaccgaagccg

SEQ ID NO: 4491228 - DNA, 25 bp, Homo sapien
aaaagacataggataattcaggtgt

SEQ ID NO: 4491229 - DNA, 25 bp, Homo sapien
tctggctggctgctacagagtgaga

SEQ ID NO: 4491230 - DNA, 25 bp, Homo sapien
ttatgcaaaagcctgcaacagcagt

SEQ ID NO: 4491231 - DNA, 25 bp, Homo sapien
cagtaaagacggcagacatgtggaa

SEQ ID NO: 4491232 - DNA, 25 bp, Homo sapien
acatgtggaaggctttatggagata

SEQ ID NO: 4491233 - DNA, 25 bp, Homo sapien
gcaacagcagtaaagacggcagaca

SEQ ID NO: 4491234 - DNA, 25 bp, Homo sapien
cagctgagcaggaggggtgcggccg

SEQ ID NO: 4491235 - DNA, 25 bp, Homo sapien
caggaggggtgcggccggacggcct

SEQ ID NO: 4491236 - DNA, 25 bp, Homo sapien
gagcaggaggggtgcggccggacgg

SEQ ID NO: 4491237 - DNA, 25 bp, Homo sapien
gaggggtgcggccggacggcctcgc

SEQ ID NO: 4491238 - DNA, 25 bp, Homo sapien
gcacagctcgcagtactgccggtct

SEQ ID NO: 4491239 - DNA, 25 bp, Homo sapien
acagctcgcagtactgccggtctcg

SEQ ID NO: 4491240 - DNA, 25 bp, Homo sapien
cgcacagctcgcagtactgccggtc

SEQ ID NO: 4491241 - DNA, 25 bp, Homo sapien
cacagctcgcagtactgccggtctc

SEQ ID NO: 4491242 - DNA, 25 bp, Homo sapien
gctggcgctccttgcagcagaagga

SEQ ID NO: 4491243 - DNA, 25 bp, Homo sapien
cgctggcgctccttgcagcagaagg

SEQ ID NO: 4491244 - DNA, 25 bp, Homo sapien
gcgctggcgctccttgcagcagaag

SEQ ID NO: 4491245 - DNA, 25 bp, Homo sapien
gcccggtccctggacggcggcgctg

SEQ ID NO: 4491246 - DNA, 25 bp, Homo sapien
ctgtcccggcgcctcgctgccttcc

SEQ ID NO: 4491247 - DNA, 25 bp, Homo sapien
agtcctggtgagggccccctccgtg

SEQ ID NO: 4491248 - DNA, 25 bp, Homo sapien
ctttgccttggctgcgtccccggag

SEQ ID NO: 4491249 - DNA, 25 bp, Homo sapien
cgcgcgaggcggggacgcggccgcc

SEQ ID NO: 4491250 - DNA, 25 bp, Homo sapien
tgtccggcccggggacgcgcgaggc

SEQ ID NO: 4491251 - DNA, 25 bp, Homo sapien
cgcggccgccgcggggtcggccgcg

SEQ ID NO: 4491252 - DNA, 25 bp, Homo sapien
gcgaggcggggacgcggccgccgcg

SEQ ID NO: 4491253 - DNA, 25 bp, Homo sapien
tcaacatgacgtacataacccgttc

SEQ ID NO: 4491254 - DNA, 25 bp, Homo sapien
atgacgtacataacccgttccattg

SEQ ID NO: 4491255 - DNA, 25 bp, Homo sapien
ttatcaacatgacgtacataacccg

SEQ ID NO: 4491256 - DNA, 25 bp, Homo sapien
tttggattatcaacatgacgtacat

SEQ ID NO: 4491257 - DNA, 25 bp, Homo sapien
gcatcccgttctttaacgtaatgta

SEQ ID NO: 4491258 - DNA, 25 bp, Homo sapien
tggcatcccgttctttaacgtaatg

SEQ ID NO: 4491259 - DNA, 25 bp, Homo sapien
cgttctttaacgtaatgtaatacat

SEQ ID NO: 4491260 - DNA, 25 bp, Homo sapien
tagaaaaattcgaagtatacctcca

SEQ ID NO: 4491261 - DNA, 25 bp, Homo sapien
tgggttcaatgtcagcaaactaggc

SEQ ID NO: 4491262 - DNA, 25 bp, Homo sapien
atcaaatttgggttcaatgtcagca

SEQ ID NO: 4491263 - DNA, 25 bp, Homo sapien
tatcaaatttgggttcaatgtcagc

SEQ ID NO: 4491264 - DNA, 25 bp, Homo sapien
atttgggttcaatgtcagcaaacta

SEQ ID NO: 4491265 - DNA, 25 bp, Homo sapien
cttcatgagggttgcgatggtcaga

SEQ ID NO: 4491266 - DNA, 25 bp, Homo sapien
ggttgcgatggtcagaccagaaaaa

SEQ ID NO: 4491267 - DNA, 25 bp, Homo sapien
catgagggttgcgatggtcagacca

SEQ ID NO: 4491268 - DNA, 25 bp, Homo sapien
atggtcagaccagaaaaacagcagt

SEQ ID NO: 4491269 - DNA, 25 bp, Homo sapien
actttagctcgtgctctctcatctg

SEQ ID NO: 4491270 - DNA, 25 bp, Homo sapien
ttactttagctcgtgctctctcatc

SEQ ID NO: 4491271 - DNA, 25 bp, Homo sapien
caaataccaaacagttattgcgtac

SEQ ID NO: 4491272 - DNA, 25 bp, Homo sapien
ctctcatctgcatcaaataccaaac

SEQ ID NO: 4491273 - DNA, 25 bp, Homo sapien
gattctaagttgatcatgcggtaca

SEQ ID NO: 4491274 - DNA, 25 bp, Homo sapien
ttaactcagctacgtaacagatctg

SEQ ID NO: 4491275 - DNA, 25 bp, Homo sapien
tgtaagataggaaggactgcaaaac

SEQ ID NO: 4491276 - DNA, 25 bp, Homo sapien
tataagacgtctttactgactgaat

SEQ ID NO: 4491277 - DNA, 25 bp, Homo sapien
ctcaagttcacttagtgccagtcac

SEQ ID NO: 4491278 - DNA, 25 bp, Homo sapien
aagctgaggataatctcaagttcac

SEQ ID NO: 4491279 - DNA, 25 bp, Homo sapien
gggacattattgtctacatctagag

SEQ ID NO: 4491280 - DNA, 25 bp, Homo sapien
agaaagcccttatcttaggaacttg

SEQ ID NO: 4491281 - DNA, 25 bp, Homo sapien
ttcaaggcgtatgtaatcttccctt

SEQ ID NO: 4491282 - DNA, 25 bp, Homo sapien
aggcgtatgtaatcttcccttgatg

SEQ ID NO: 4491283 - DNA, 25 bp, Homo sapien
gcgtatgtaatcttcccttgatgct

SEQ ID NO: 4491284 - DNA, 25 bp, Homo sapien
caaggcgtatgtaatcttcccttga

SEQ ID NO: 4491285 - DNA, 25 bp, Homo sapien
tactgcacattaagtcggtaacaac

SEQ ID NO: 4491286 - DNA, 25 bp, Homo sapien
ttactgcacattaagtcggtaacaa

SEQ ID NO: 4491287 - DNA, 25 bp, Homo sapien
gagttactgcacattaagtcggtaa

SEQ ID NO: 4491288 - DNA, 25 bp, Homo sapien
tgcacattaagtcggtaacaacaca

SEQ ID NO: 4491289 - DNA, 25 bp, Homo sapien
tagagtacatggctctcagctcctc

SEQ ID NO: 4491290 - DNA, 25 bp, Homo sapien
gaagaaaagggaggcattagagtac

SEQ ID NO: 4491291 - DNA, 25 bp, Homo sapien
gaggcattagagtacatggctctca

SEQ ID NO: 4491292 - DNA, 25 bp, Homo sapien
tggggactagcccaactgggttcag

SEQ ID NO: 4491293 - DNA, 25 bp, Homo sapien
ggaattcccagagccacatcaggca

SEQ ID NO: 4491294 - DNA, 25 bp, Homo sapien
caggaattcccagagccacatcagg

SEQ ID NO: 4491295 - DNA, 25 bp, Homo sapien
tctctgcaggaattcccagagccac

SEQ ID NO: 4491296 - DNA, 25 bp, Homo sapien
tgcaggaattcccagagccacatca

SEQ ID NO: 4491297 - DNA, 25 bp, Homo sapien
gagatatacacagccgaatcaccag

SEQ ID NO: 4491298 - DNA, 25 bp, Homo sapien
agccgaatcaccaggtgtcactagc

SEQ ID NO: 4491299 - DNA, 25 bp, Homo sapien
gccgaatcaccaggtgtcactagct

SEQ ID NO: 4491300 - DNA, 25 bp, Homo sapien
ctaggagatatacacagccgaatca

SEQ ID NO: 4491301 - DNA, 25 bp, Homo sapien
cgtgacctcattttcagaattctgc

SEQ ID NO: 4491302 - DNA, 25 bp, Homo sapien
cagcgtgacctcattttcagaattc

SEQ ID NO: 4491303 - DNA, 25 bp, Homo sapien
taggtggttcttcagtccaggttct

SEQ ID NO: 4491304 - DNA, 25 bp, Homo sapien
aggtggttcttcagtccaggttctg

SEQ ID NO: 4491305 - DNA, 25 bp, Homo sapien
tacttgttccccaaacactactgaa

SEQ ID NO: 4491306 - DNA, 25 bp, Homo sapien
aaggtctggagtagtgaatactaca

SEQ ID NO: 4491307 - DNA, 25 bp, Homo sapien
acacattgggtacagacttgatgga

SEQ ID NO: 4491308 - DNA, 25 bp, Homo sapien
aaagactacccttgggtgatgggtg

SEQ ID NO: 4491309 - DNA, 25 bp, Homo sapien
tggcttttctccagattagcacctg

SEQ ID NO: 4491310 - DNA, 25 bp, Homo sapien
cggagtttttcgtggatccaggcct

SEQ ID NO: 4491311 - DNA, 25 bp, Homo sapien
ggttttcatcctactccacgtggga

SEQ ID NO: 4491312 - DNA, 25 bp, Homo sapien
cagctgctcagccataatccggtac

SEQ ID NO: 4491313 - DNA, 25 bp, Homo sapien
caaattagtcataacagagccagga

SEQ ID NO: 4491314 - DNA, 25 bp, Homo sapien
tagaaagtgccccaagactcaacag

SEQ ID NO: 4491315 - DNA, 25 bp, Homo sapien
ctgggattccacctcaaggcctggg

SEQ ID NO: 4491316 - DNA, 25 bp, Homo sapien
caggaggtttttgaaccgatagcaa

SEQ ID NO: 4491317 - DNA, 25 bp, Homo sapien
tttttcagctgagtctgggtctcac

SEQ ID NO: 4491318 - DNA, 25 bp, Homo sapien
tatttttcagctgagtctgggtctc

SEQ ID NO: 4491319 - DNA, 25 bp, Homo sapien
ttcacatctatggaacactttattt

SEQ ID NO: 4491320 - DNA, 25 bp, Homo sapien
tttcagctgagtctgggtctcactc

SEQ ID NO: 4491321 - DNA, 25 bp, Homo sapien
tgaaaactaacgtttgccaagtgct

SEQ ID NO: 4491322 - DNA, 25 bp, Homo sapien
gaggtagaaaccatcacaatgtcca

SEQ ID NO: 4491323 - DNA, 25 bp, Homo sapien
cctttgagggtacaggataatgccc

SEQ ID NO: 4491324 - DNA, 25 bp, Homo sapien
gccaagtgctaatactgtgtcagga

SEQ ID NO: 4491325 - DNA, 25 bp, Homo sapien
gtgaaatgagaatgatagtgcctct

SEQ ID NO: 4491326 - DNA, 25 bp, Homo sapien
gagaatgatagtgcctctcaagaag

SEQ ID NO: 4491327 - DNA, 25 bp, Homo sapien
gacaggtgaaatgagaatgatagtg

SEQ ID NO: 4491328 - DNA, 25 bp, Homo sapien
aatgatagtgcctctcaagaaggtc

SEQ ID NO: 4491329 - DNA, 25 bp, Homo sapien
ttttctgcagcattgtgaccccatc

SEQ ID NO: 4491330 - DNA, 25 bp, Homo sapien
gaagtccgggagatcttcattccaa

SEQ ID NO: 4491331 - DNA, 25 bp, Homo sapien
tttgttggtggaatgctagctccca

SEQ ID NO: 4491332 - DNA, 25 bp, Homo sapien
cacctgcactggacgttttctgaat

SEQ ID NO: 4491333 - DNA, 25 bp, Homo sapien
taaaattcaggtcaagcatgtggct

SEQ ID NO: 4491334 - DNA, 25 bp, Homo sapien
ggttaagtgataattaactgcagtt

SEQ ID NO: 4491335 - DNA, 25 bp, Homo sapien
gaattcgctggttaagtgataatta

SEQ ID NO: 4491336 - DNA, 25 bp, Homo sapien
cagttaaaattcaggtcaagcatgt

SEQ ID NO: 4491337 - DNA, 25 bp, Homo sapien
gagaggcttcctaaggtggttgaat

SEQ ID NO: 4491338 - DNA, 25 bp, Homo sapien
gcccttcccatgtgcaacactaatt

SEQ ID NO: 4491339 - DNA, 25 bp, Homo sapien
attagcccttcccatgtgcaacact

SEQ ID NO: 4491340 - DNA, 25 bp, Homo sapien
tgcaacactaattacatgctagaaa

SEQ ID NO: 4491341 - DNA, 25 bp, Homo sapien
gccaagatggaacacggagccaagt

SEQ ID NO: 4491342 - DNA, 25 bp, Homo sapien
cacatcttgggatggaacacggagc

SEQ ID NO: 4491343 - DNA, 25 bp, Homo sapien
cgaaggttagaagaaacgcatggca

SEQ ID NO: 4491344 - DNA, 25 bp, Homo sapien
caagggtgctcatgtaggactcaag

SEQ ID NO: 4491345 - DNA, 25 bp, Homo sapien
gcctgcagacagtaagacactggga

SEQ ID NO: 4491346 - DNA, 25 bp, Homo sapien
tactgccgagcaggatttcgtcttg

SEQ ID NO: 4491347 - DNA, 25 bp, Homo sapien
gcaccatgataaacctggctccagg

SEQ ID NO: 4491348 - DNA, 25 bp, Homo sapien
gcttggccatctcaggtactgccga

SEQ ID NO: 4491349 - DNA, 25 bp, Homo sapien
tagcaagtcactcgaggtcatggaa

SEQ ID NO: 4491350 - DNA, 25 bp, Homo sapien
gagaagcctcagatgtagaatacag

SEQ ID NO: 4491351 - DNA, 25 bp, Homo sapien
gctggcagcctgtcatgtttcaaac

SEQ ID NO: 4491352 - DNA, 25 bp, Homo sapien
ggtgaattagcaaccatagcatggc

SEQ ID NO: 4491353 - DNA, 25 bp, Homo sapien
ataggaaacaatccgagtgcggtga

SEQ ID NO: 4491354 - DNA, 25 bp, Homo sapien
gaaacaatccgagtgcggtgactca

SEQ ID NO: 4491355 - DNA, 25 bp, Homo sapien
aggaaacaatccgagtgcggtgact

SEQ ID NO: 4491356 - DNA, 25 bp, Homo sapien
aataggaaacaatccgagtgcggtg

SEQ ID NO: 4491357 - DNA, 25 bp, Homo sapien
tagaatgtctcgtggtttacagagg

SEQ ID NO: 4491358 - DNA, 25 bp, Homo sapien
tctagtctaacagagggaggcacat

SEQ ID NO: 4491359 - DNA, 25 bp, Homo sapien
gaaagagagaaagcgctaggcctgc

SEQ ID NO: 4491360 - DNA, 25 bp, Homo sapien
gacggaacctcagggaacacattta

SEQ ID NO: 4491361 - DNA, 25 bp, Homo sapien
gcttctgggtagcactggtttgcat

SEQ ID NO: 4491362 - DNA, 25 bp, Homo sapien
tatattaaaaggttgagccaaagcc

SEQ ID NO: 4491363 - DNA, 25 bp, Homo sapien
cacttctaaagtgcctacagagact

SEQ ID NO: 4491364 - DNA, 25 bp, Homo sapien
aacacacgtgttggtgcttctgggt

SEQ ID NO: 4491365 - DNA, 25 bp, Homo sapien
gtagtatttccttttgttgccagat

SEQ ID NO: 4491366 - DNA, 25 bp, Homo sapien
tattgggtataacatgtgctaggct

SEQ ID NO: 4491367 - DNA, 25 bp, Homo sapien
taggctatgtgttcaccactaggaa

SEQ ID NO: 4491368 - DNA, 25 bp, Homo sapien
gtagaactagcatcccctaaaagaa

SEQ ID NO: 4491369 - DNA, 25 bp, Homo sapien
tttgttaaatcctcaaatgacataa

SEQ ID NO: 4491370 - DNA, 25 bp, Homo sapien
ttgttaaatcctcaaatgacataaa

SEQ ID NO: 4491371 - DNA, 25 bp, Homo sapien
ttacacaccagaaaactagggatta

SEQ ID NO: 4491372 - DNA, 25 bp, Homo sapien
atttctcctaattatctcaggccct

SEQ ID NO: 4491373 - DNA, 25 bp, Homo sapien
ttatctcaggccctaatttcttgtt

SEQ ID NO: 4491374 - DNA, 25 bp, Homo sapien
ctaattatctcaggccctaatttct

SEQ ID NO: 4491375 - DNA, 25 bp, Homo sapien
tcaggccctaatttcttgtttgcaa

SEQ ID NO: 4491376 - DNA, 25 bp, Homo sapien
tagatgtaggataattgatggtgca

SEQ ID NO: 4491377 - DNA, 25 bp, Homo sapien
gaaaggggtgagcaaaaagtcagag

SEQ ID NO: 4491378 - DNA, 25 bp, Homo sapien
accttaactaaaggagctgagaggg

SEQ ID NO: 4491379 - DNA, 25 bp, Homo sapien
gcagatagatgtaggataattgatg

SEQ ID NO: 4491380 - DNA, 25 bp, Homo sapien
caaggtcagggtgtgggaacacgga

SEQ ID NO: 4491381 - DNA, 25 bp, Homo sapien
ggtgtgggaacacggagatgaggcc

SEQ ID NO: 4491382 - DNA, 25 bp, Homo sapien
gtcagggtgtgggaacacggagatg

SEQ ID NO: 4491383 - DNA, 25 bp, Homo sapien
agcaaggtcagggtgtgggaacacg

SEQ ID NO: 4491384 - DNA, 25 bp, Homo sapien
caacgggtgcctcgaagaggtagac

SEQ ID NO: 4491385 - DNA, 25 bp, Homo sapien
actgggagatctctcagggttactg

SEQ ID NO: 4491386 - DNA, 25 bp, Homo sapien
gacgcgcggcaaacagagatggagg

SEQ ID NO: 4491387 - DNA, 25 bp, Homo sapien
agatggaggactggcaacgggtgcc

SEQ ID NO: 4491388 - DNA, 25 bp, Homo sapien
cttcactgagacctggcgcataggg

SEQ ID NO: 4491389 - DNA, 25 bp, Homo sapien
acgcagctgtctcgcccggcaaaga

SEQ ID NO: 4491390 - DNA, 25 bp, Homo sapien
aggatctgcctacgcagctgtctcg

SEQ ID NO: 4491391 - DNA, 25 bp, Homo sapien
tagaggaacaggatctgcctacgca

SEQ ID NO: 4491392 - DNA, 25 bp, Homo sapien
ggagccacaacatggcgacggcgat

SEQ ID NO: 4491393 - DNA, 25 bp, Homo sapien
gactgcaggccagagtctcggccgc

SEQ ID NO: 4491394 - DNA, 25 bp, Homo sapien
ctcggacctgggcaccggcccagga

SEQ ID NO: 4491395 - DNA, 25 bp, Homo sapien
caccggcccaggacggtgcggtgga

SEQ ID NO: 4491396 - DNA, 25 bp, Homo sapien
gtgacggcgacagctcttcgggcgg

SEQ ID NO: 4491397 - DNA, 25 bp, Homo sapien
ctgtgacggcgacagctcttcgggc

SEQ ID NO: 4491398 - DNA, 25 bp, Homo sapien
cggcgacagctcttcgggcggcggg

SEQ ID NO: 4491399 - DNA, 25 bp, Homo sapien
tgacggcgacagctcttcgggcggc

SEQ ID NO: 4491400 - DNA, 25 bp, Homo sapien
gaggagcgccaaagagggtcgttcc

SEQ ID NO: 4491401 - DNA, 25 bp, Homo sapien
gggaggggagtactgaggagcgcca

SEQ ID NO: 4491402 - DNA, 25 bp, Homo sapien
ctcagggtcagaacttgggctcagg

SEQ ID NO: 4491403 - DNA, 25 bp, Homo sapien
ctgaggagcgccaaagagggtcgtt

SEQ ID NO: 4491404 - DNA, 25 bp, Homo sapien
ctgaggaccccaactctggagctct

SEQ ID NO: 4491405 - DNA, 25 bp, Homo sapien
cccaactctggagctctaggaatac

SEQ ID NO: 4491406 - DNA, 25 bp, Homo sapien
tgaggaccccaactctggagctcta

SEQ ID NO: 4491407 - DNA, 25 bp, Homo sapien
gaccccaactctggagctctaggaa

SEQ ID NO: 4491408 - DNA, 25 bp, Homo sapien
aatttcaggaactgaactgacaaaa

SEQ ID NO: 4491409 - DNA, 25 bp, Homo sapien
aggaactgaactgacaaaaaagtag

SEQ ID NO: 4491410 - DNA, 25 bp, Homo sapien
ggaactgaactgacaaaaaagtaga

SEQ ID NO: 4491411 - DNA, 25 bp, Homo sapien
caatttcaggaactgaactgacaaa

SEQ ID NO: 4491412 - DNA, 25 bp, Homo sapien
gccattaccaagtctcactgatgtc

SEQ ID NO: 4491413 - DNA, 25 bp, Homo sapien
aactctaccacattggaagcactgg

SEQ ID NO: 4491414 - DNA, 25 bp, Homo sapien
tggaagcctttgtcaaggcagccac

SEQ ID NO: 4491415 - DNA, 25 bp, Homo sapien
cagttggggagcatcccgccattac

SEQ ID NO: 4491416 - DNA, 25 bp, Homo sapien
tatttaaccctcagaccagtgcttc

SEQ ID NO: 4491417 - DNA, 25 bp, Homo sapien
gacctggagcgatcctaatgcctaa

SEQ ID NO: 4491418 - DNA, 25 bp, Homo sapien
gaaagattcaggactatcggagcca

SEQ ID NO: 4491419 - DNA, 25 bp, Homo sapien
caagctgcccctgtactttggactc

SEQ ID NO: 4491420 - DNA, 25 bp, Homo sapien
agtgctcgggatgcccgctgaagct

SEQ ID NO: 4491421 - DNA, 25 bp, Homo sapien
cctcctccagtgctcgggatgcccg

SEQ ID NO: 4491422 - DNA, 25 bp, Homo sapien
tcgggatgcccgctgaagctgaaga

SEQ ID NO: 4491423 - DNA, 25 bp, Homo sapien
tccagtgctcgggatgcccgctgaa

SEQ ID NO: 4491424 - DNA, 25 bp, Homo sapien
tagagaggatctcaaaacaagggtg

SEQ ID NO: 4491425 - DNA, 25 bp, Homo sapien
atctcaaaacaagggtgtggcgagc

SEQ ID NO: 4491426 - DNA, 25 bp, Homo sapien
gaggatctcaaaacaagggtgtggc

SEQ ID NO: 4491427 - DNA, 25 bp, Homo sapien
tcaaaacaagggtgtggcgagcgtt

SEQ ID NO: 4491428 - DNA, 25 bp, Homo sapien
caggtgagttgtcactgctcccact

SEQ ID NO: 4491429 - DNA, 25 bp, Homo sapien
ggcaggtgagttgtcactgctccca

SEQ ID NO: 4491430 - DNA, 25 bp, Homo sapien
tgagttgtcactgctcccactgctc

SEQ ID NO: 4491431 - DNA, 25 bp, Homo sapien
ggtgagttgtcactgctcccactgc

SEQ ID NO: 4491432 - DNA, 25 bp, Homo sapien
ttaaggagcttcttacaaaagactc

SEQ ID NO: 4491433 - DNA, 25 bp, Homo sapien
taaggagcttcttacaaaagactct

SEQ ID NO: 4491434 - DNA, 25 bp, Homo sapien
aaggagcttcttacaaaagactcta

SEQ ID NO: 4491435 - DNA, 25 bp, Homo sapien
cctctgtctccgtacgggggagcgt

SEQ ID NO: 4491436 - DNA, 25 bp, Homo sapien
cgtacgggggagcgtcttccttctg

SEQ ID NO: 4491437 - DNA, 25 bp, Homo sapien
tctgtctccgtacgggggagcgtct

SEQ ID NO: 4491438 - DNA, 25 bp, Homo sapien
tgtctccgtacgggggagcgtcttc

SEQ ID NO: 4491439 - DNA, 25 bp, Homo sapien
aaagccacagagagtatactcctac

SEQ ID NO: 4491440 - DNA, 25 bp, Homo sapien
aagccacagagagtatactcctacc

SEQ ID NO: 4491441 - DNA, 25 bp, Homo sapien
caaagccacagagagtatactccta

SEQ ID NO: 4491442 - DNA, 25 bp, Homo sapien
gccacagagagtatactcctaccat

SEQ ID NO: 4491443 - DNA, 25 bp, Homo sapien
tcactgcagatgctacgagggctgt

SEQ ID NO: 4491444 - DNA, 25 bp, Homo sapien
tgcaatggcgctccctagaggtgac

SEQ ID NO: 4491445 - DNA, 25 bp, Homo sapien
gacacgaacatttggtccgcagaga

SEQ ID NO: 4491446 - DNA, 25 bp, Homo sapien
cacttgattgagtaccggatgagcc

SEQ ID NO: 4491447 - DNA, 25 bp, Homo sapien
ccgatacccgtaacagtgagggtct

SEQ ID NO: 4491448 - DNA, 25 bp, Homo sapien
tccaacaaacaccaaacactaaata

SEQ ID NO: 4491449 - DNA, 25 bp, Homo sapien
cctgtgtgagccaggggcccgatac

SEQ ID NO: 4491450 - DNA, 25 bp, Homo sapien
tgcccagtcatggaacctgtgtgag

SEQ ID NO: 4491451 - DNA, 25 bp, Homo sapien
actgcagggcagaacaacaacttat

SEQ ID NO: 4491452 - DNA, 25 bp, Homo sapien
aaggactctgcaagaacagctgtgt

SEQ ID NO: 4491453 - DNA, 25 bp, Homo sapien
ggctccataaacctctgccacaggc

SEQ ID NO: 4491454 - DNA, 25 bp, Homo sapien
gccattggccctactgcagtttcca

SEQ ID NO: 4491455 - DNA, 25 bp, Homo sapien
ctgtcggcgggtgctcttctccagc

SEQ ID NO: 4491456 - DNA, 25 bp, Homo sapien
ctgatagccttctgtgcactccttc

SEQ ID NO: 4491457 - DNA, 25 bp, Homo sapien
gactcagaagccacaatgagtggca

SEQ ID NO: 4491458 - DNA, 25 bp, Homo sapien
ttttgtgagggatttggagctggct

SEQ ID NO: 4491459 - DNA, 25 bp, Homo sapien
tgcgggcatagtgcaggcaattctc

SEQ ID NO: 4491460 - DNA, 25 bp, Homo sapien
cgctggtgggcacagaaactgcact

SEQ ID NO: 4491461 - DNA, 25 bp, Homo sapien
gacttgtgtgcatgaatccgctggt

SEQ ID NO: 4491462 - DNA, 25 bp, Homo sapien
ggcaattctcctttacatgggtctg

SEQ ID NO: 4491463 - DNA, 25 bp, Homo sapien
gccattgggcaataccaggacagca

SEQ ID NO: 4491464 - DNA, 25 bp, Homo sapien
ggcaataccaggacagcaagccagg

SEQ ID NO: 4491465 - DNA, 25 bp, Homo sapien
ccagccattgggcaataccaggaca

SEQ ID NO: 4491466 - DNA, 25 bp, Homo sapien
gtcctgtgtagactggaacccaagc

SEQ ID NO: 4491467 - DNA, 25 bp, Homo sapien
gacttcttgcttatgtttgacacaa

SEQ ID NO: 4491468 - DNA, 25 bp, Homo sapien
ttaatgtgccaaacataacttggtg

SEQ ID NO: 4491469 - DNA, 25 bp, Homo sapien
tggttttaccaagaggctgatcctt

SEQ ID NO: 4491470 - DNA, 25 bp, Homo sapien
aagaaagatactaaagccctttgag

SEQ ID NO: 4491471 - DNA, 25 bp, Homo sapien
ccacggaaccagaaagctttttgtg

SEQ ID NO: 4491472 - DNA, 25 bp, Homo sapien
gcaatgaagagcagcccacggaacc

SEQ ID NO: 4491473 - DNA, 25 bp, Homo sapien
gtagagaatcaccttcgaaaattta

SEQ ID NO: 4491474 - DNA, 25 bp, Homo sapien
gatacattttcacggcccacataaa

SEQ ID NO: 4491475 - DNA, 25 bp, Homo sapien
agtatagggagtactggacccagag

SEQ ID NO: 4491476 - DNA, 25 bp, Homo sapien
tgagtgtgggtggagtatagggagt

SEQ ID NO: 4491477 - DNA, 25 bp, Homo sapien
gtggagtatagggagtactggaccc

SEQ ID NO: 4491478 - DNA, 25 bp, Homo sapien
tgtgagtgtgggtggagtataggga

SEQ ID NO: 4491479 - DNA, 25 bp, Homo sapien
agaatgcacatttgtggaaaacctg

SEQ ID NO: 4491480 - DNA, 25 bp, Homo sapien
gccaaggtcaggtggacgacaccac

SEQ ID NO: 4491481 - DNA, 25 bp, Homo sapien
ggcagaatgcacatttgtggaaaac

SEQ ID NO: 4491482 - DNA, 25 bp, Homo sapien
aaacctggcagtgtcgctcctggat

SEQ ID NO: 4491483 - DNA, 25 bp, Homo sapien
agggcacttgaagacgcccacctgc

SEQ ID NO: 4491484 - DNA, 25 bp, Homo sapien
gaagaccatttcacaggagcactta

SEQ ID NO: 4491485 - DNA, 25 bp, Homo sapien
tctgcacgaacaagagtgggcactc

SEQ ID NO: 4491486 - DNA, 25 bp, Homo sapien
tgcgtcttgctgacattctggtaaa

SEQ ID NO: 4491487 - DNA, 25 bp, Homo sapien
gacacgtagctctcccgatctggaa

SEQ ID NO: 4491488 - DNA, 25 bp, Homo sapien
gctccgagcagccacactagtggct

SEQ ID NO: 4491489 - DNA, 25 bp, Homo sapien
tgtgtccgctgaagactggaggctt

SEQ ID NO: 4491490 - DNA, 25 bp, Homo sapien
gcttgacagctcgtccacatttcgg

SEQ ID NO: 4491491 - DNA, 25 bp, Homo sapien
tactgtgtcatggttgttgcggatg

SEQ ID NO: 4491492 - DNA, 25 bp, Homo sapien
ggtgtggaaggactgttcacactgc

SEQ ID NO: 4491493 - DNA, 25 bp, Homo sapien
tctttactgtgtcatggttgttgcg

SEQ ID NO: 4491494 - DNA, 25 bp, Homo sapien
tgccggcatgggtaccgcttcaatg

SEQ ID NO: 4491495 - DNA, 25 bp, Homo sapien
cgtctggctcaaatcagggtttctg

SEQ ID NO: 4491496 - DNA, 25 bp, Homo sapien
ggtttctgatgccatgcataaggct

SEQ ID NO: 4491497 - DNA, 25 bp, Homo sapien
atgtccacccggaggtttcactttg

SEQ ID NO: 4491498 - DNA, 25 bp, Homo sapien
tgccatgcataaggctgatgtggct

SEQ ID NO: 4491499 - DNA, 25 bp, Homo sapien
cagacttctttatgcccaaggcaaa

SEQ ID NO: 4491500 - DNA, 25 bp, Homo sapien
ccatgggagaacatacagaggcttc

SEQ ID NO: 4491501 - DNA, 25 bp, Homo sapien
tgagaagtccccaacggcagacatt

SEQ ID NO: 4491502 - DNA, 25 bp, Homo sapien
gaaaggtgctttgccaactactgac

SEQ ID NO: 4491503 - DNA, 25 bp, Homo sapien
cagtcttacctcagagcttaagcga

SEQ ID NO: 4491504 - DNA, 25 bp, Homo sapien
tcttacctcagagcttaagcgatcc

SEQ ID NO: 4491505 - DNA, 25 bp, Homo sapien
cactgcagtcttacctcagagctta

SEQ ID NO: 4491506 - DNA, 25 bp, Homo sapien
tgcagtcttacctcagagcttaagc

SEQ ID NO: 4491507 - DNA, 25 bp, Homo sapien
ggcaaaactacatttcgcgcactga

SEQ ID NO: 4491508 - DNA, 25 bp, Homo sapien
gaagagacagttgcgccattgctgg

SEQ ID NO: 4491509 - DNA, 25 bp, Homo sapien
tgactggtcttttcagatggttcac

SEQ ID NO: 4491510 - DNA, 25 bp, Homo sapien
cattgctggtgcctggagcgtcccc

SEQ ID NO: 4491511 - DNA, 25 bp, Homo sapien
gagctggcagaggtgtagcacaaac

SEQ ID NO: 4491512 - DNA, 25 bp, Homo sapien
cctcctcctcctcctggtctctcac

SEQ ID NO: 4491513 - DNA, 25 bp, Homo sapien
ttctctctagtctccatgggcacct

SEQ ID NO: 4491514 - DNA, 25 bp, Homo sapien
ccattctctctagtctccatgggca

SEQ ID NO: 4491515 - DNA, 25 bp, Homo sapien
attctctctagtctccatgggcacc

SEQ ID NO: 4491516 - DNA, 25 bp, Homo sapien
cattctctctagtctccatgggcac

SEQ ID NO: 4491517 - DNA, 25 bp, Homo sapien
tgtggttgactgtgatcattgtggc

SEQ ID NO: 4491518 - DNA, 25 bp, Homo sapien
cctcgcctctgggtcagctgacaaa

SEQ ID NO: 4491519 - DNA, 25 bp, Homo sapien
tctgggtcagctgacaaaggctcac

SEQ ID NO: 4491520 - DNA, 25 bp, Homo sapien
tgtgatcattgtggccaccatcgtc

SEQ ID NO: 4491521 - DNA, 25 bp, Homo sapien
ggggacagtgtgtggctgtcctggt

SEQ ID NO: 4491522 - DNA, 25 bp, Homo sapien
ctgaggggacagtgtgtggctgtcc

SEQ ID NO: 4491523 - DNA, 25 bp, Homo sapien
acagtgtgtggctgtcctggtcctg

SEQ ID NO: 4491524 - DNA, 25 bp, Homo sapien
gacagtgtgtggctgtcctggtcct

SEQ ID NO: 4491525 - DNA, 25 bp, Homo sapien
ttattttccacggtccgcagggcag

SEQ ID NO: 4491526 - DNA, 25 bp, Homo sapien
tttattttccacggtccgcagggca

SEQ ID NO: 4491527 - DNA, 25 bp, Homo sapien
ctactccagggtacaaccggtcaca

SEQ ID NO: 4491528 - DNA, 25 bp, Homo sapien
cactactccagggtacaaccggtca

SEQ ID NO: 4491529 - DNA, 25 bp, Homo sapien
tccagggtacaaccggtcacactca

SEQ ID NO: 4491530 - DNA, 25 bp, Homo sapien
tggggctgggggatacccagcactg

SEQ ID NO: 4491531 - DNA, 25 bp, Homo sapien
cttctcaggatctaaaggcaggaag

SEQ ID NO: 4491532 - DNA, 25 bp, Homo sapien
acccctcatttccctccttctcagg

SEQ ID NO: 4491533 - DNA, 25 bp, Homo sapien
cagcacccctcatttccctccttct

SEQ ID NO: 4491534 - DNA, 25 bp, Homo sapien
cctccttctcaggatctaaaggcag

SEQ ID NO: 4491535 - DNA, 25 bp, Homo sapien
aggtgatcaagggccctcgccaaac

SEQ ID NO: 4491536 - DNA, 25 bp, Homo sapien
gatcaagggccctcgccaaaccaga

SEQ ID NO: 4491537 - DNA, 25 bp, Homo sapien
ggtgatcaagggccctcgccaaacc

SEQ ID NO: 4491538 - DNA, 25 bp, Homo sapien
cacagcgccttctcaaggggtctgg

SEQ ID NO: 4491539 - DNA, 25 bp, Homo sapien
agcagaacaaagacccacccacagc

SEQ ID NO: 4491540 - DNA, 25 bp, Homo sapien
tctgcccaggttccaaacagaggtg

SEQ ID NO: 4491541 - DNA, 25 bp, Homo sapien
tccaaacagaggtgtgcagcagagg

SEQ ID NO: 4491542 - DNA, 25 bp, Homo sapien
tgaaatatagtctgagcaacatgag

SEQ ID NO: 4491543 - DNA, 25 bp, Homo sapien
cagcagcctctcaaatggcacgaga

SEQ ID NO: 4491544 - DNA, 25 bp, Homo sapien
gcacgagagcagtacaaatattcca

SEQ ID NO: 4491545 - DNA, 25 bp, Homo sapien
caacatgagtgtagccaagaggagt

SEQ ID NO: 4491546 - DNA, 25 bp, Homo sapien
tgaaagatgacctctaagcacccgg

SEQ ID NO: 4491547 - DNA, 25 bp, Homo sapien
catgggacaacagctacggcaggtc

SEQ ID NO: 4491548 - DNA, 25 bp, Homo sapien
taaagccaatgtcactagcctggag

SEQ ID NO: 4491549 - DNA, 25 bp, Homo sapien
cctgggttagaggtcagacgacacc

SEQ ID NO: 4491550 - DNA, 25 bp, Homo sapien
ttcttcccaggaaggagatgtatat

SEQ ID NO: 4491551 - DNA, 25 bp, Homo sapien
gttcttcccaggaaggagatgtata

SEQ ID NO: 4491552 - DNA, 25 bp, Homo sapien
tgtcaacggtgtgatgctcgaggcc

SEQ ID NO: 4491553 - DNA, 25 bp, Homo sapien
cacagtggttgacaggcttgactca

SEQ ID NO: 4491554 - DNA, 25 bp, Homo sapien
caaagtgttgagcttactgggccac

SEQ ID NO: 4491555 - DNA, 25 bp, Homo sapien
caaagcagccttggtcactaacgag

SEQ ID NO: 4491556 - DNA, 25 bp, Homo sapien
cacagctgtgcttgggtaaatggac

SEQ ID NO: 4491557 - DNA, 25 bp, Homo sapien
gcttgggtaaatggacaccaattaa

SEQ ID NO: 4491558 - DNA, 25 bp, Homo sapien
aatggacaccaattaaaggattact

SEQ ID NO: 4491559 - DNA, 25 bp, Homo sapien
ggcaatgagaagtcagtcctgattc

SEQ ID NO: 4491560 - DNA, 25 bp, Homo sapien
ggcagctgagcctctattccaagag

SEQ ID NO: 4491561 - DNA, 25 bp, Homo sapien
ttgctgcttgtctgacctccctcca

SEQ ID NO: 4491562 - DNA, 25 bp, Homo sapien
actccaggtcctaccgctctgggat

SEQ ID NO: 4491563 - DNA, 25 bp, Homo sapien
gcctctattccaagagggtggacac

SEQ ID NO: 4491564 - DNA, 25 bp, Homo sapien
cactgtctagacaaccctggtggag

SEQ ID NO: 4491565 - DNA, 25 bp, Homo sapien
caacccaatgagtagagctgaaaca

SEQ ID NO: 4491566 - DNA, 25 bp, Homo sapien
tccagggcgtgagaatgtgctactc

SEQ ID NO: 4491567 - DNA, 25 bp, Homo sapien
cctcctgaacaaggtagaagcaacc

SEQ ID NO: 4491568 - DNA, 25 bp, Homo sapien
caataatgggttaacagaattgggt

SEQ ID NO: 4491569 - DNA, 25 bp, Homo sapien
ccaaggggagccagtcacaatatca

SEQ ID NO: 4491570 - DNA, 25 bp, Homo sapien
aagacagtgtctctcgatattgctc

SEQ ID NO: 4491571 - DNA, 25 bp, Homo sapien
tttcagttcactaccaaacttctca

SEQ ID NO: 4491572 - DNA, 25 bp, Homo sapien
ccccagtaactagcatagattaggg

SEQ ID NO: 4491573 - DNA, 25 bp, Homo sapien
gattaggggctcaattaacacttct

SEQ ID NO: 4491574 - DNA, 25 bp, Homo sapien
tgacctgagtccctgggaggccgga

SEQ ID NO: 4491575 - DNA, 25 bp, Homo sapien
acacttctagatcactccttcggcc

SEQ ID NO: 4491576 - DNA, 25 bp, Homo sapien
gccttgcctcgccagtggctgttgg

SEQ ID NO: 4491577 - DNA, 25 bp, Homo sapien
agggagccaaagaaccagccctctt

SEQ ID NO: 4491578 - DNA, 25 bp, Homo sapien
aggtcaaccgctggccagcttgggc

SEQ ID NO: 4491579 - DNA, 25 bp, Homo sapien
agcacatagacaagccaagccacct

SEQ ID NO: 4491580 - DNA, 25 bp, Homo sapien
gcctgctcatgtcccgtgtggcata

SEQ ID NO: 4491581 - DNA, 25 bp, Homo sapien
tcatgtcccgtgtggcatatgaggg

SEQ ID NO: 4491582 - DNA, 25 bp, Homo sapien
cggcctgctcatgtcccgtgtggca

SEQ ID NO: 4491583 - DNA, 25 bp, Homo sapien
tgctcatgtcccgtgtggcatatga

SEQ ID NO: 4491584 - DNA, 25 bp, Homo sapien
ggtggccgggccgtcgtcacctgct

SEQ ID NO: 4491585 - DNA, 25 bp, Homo sapien
ctggtgtctgcagtagcgccgcgtc

SEQ ID NO: 4491586 - DNA, 25 bp, Homo sapien
gggcagcgcggcttggagacgccgg

SEQ ID NO: 4491587 - DNA, 25 bp, Homo sapien
aaggcgcagcgggtgtcctggtcat

SEQ ID NO: 4491588 - DNA, 25 bp, Homo sapien
cacggggccgtcgtcctcaccgtcg

SEQ ID NO: 4491589 - DNA, 25 bp, Homo sapien
ccccgcactcgccgctgcctcgcct

SEQ ID NO: 4491590 - DNA, 25 bp, Homo sapien
ctggggatccacacggggccgtcgt

SEQ ID NO: 4491591 - DNA, 25 bp, Homo sapien
gggccctccgcgaccccatggcacc

SEQ ID NO: 4491592 - DNA, 25 bp, Homo sapien
cacgctgagcaggtagctccggctg

SEQ ID NO: 4491593 - DNA, 25 bp, Homo sapien
ggccgcacgctgagcaggtagctcc

SEQ ID NO: 4491594 - DNA, 25 bp, Homo sapien
tctcgggccgcacgctgagcaggta

SEQ ID NO: 4491595 - DNA, 25 bp, Homo sapien
ctggtctcgggccgcacgctgagca

SEQ ID NO: 4491596 - DNA, 25 bp, Homo sapien
agaagcaggaactgcctcgcctcct

SEQ ID NO: 4491597 - DNA, 25 bp, Homo sapien
tctctcagaacctctaggggtctgt

SEQ ID NO: 4491598 - DNA, 25 bp, Homo sapien
tagccagcaggagcagtaaaaaact

SEQ ID NO: 4491599 - DNA, 25 bp, Homo sapien
gcctgataaatctggctgtccttgt

SEQ ID NO: 4491600 - DNA, 25 bp, Homo sapien
tcttcttctttgggtctggacttct

SEQ ID NO: 4491601 - DNA, 25 bp, Homo sapien
cataaatttcatttgtccctctctt

SEQ ID NO: 4491602 - DNA, 25 bp, Homo sapien
ccctctctttcaggattgggagatt

SEQ ID NO: 4491603 - DNA, 25 bp, Homo sapien
ttcaggattgggagatttcttcttc

SEQ ID NO: 4491604 - DNA, 25 bp, Homo sapien
caaggcactggccaactccatcctt

SEQ ID NO: 4491605 - DNA, 25 bp, Homo sapien
aaggcactggccaactccatccttt

SEQ ID NO: 4491606 - DNA, 25 bp, Homo sapien
ggtgagacaaccggttgcttgataa

SEQ ID NO: 4491607 - DNA, 25 bp, Homo sapien
gtgagacaaccggttgcttgataag

SEQ ID NO: 4491608 - DNA, 25 bp, Homo sapien
gggtgagacaaccggttgcttgata

SEQ ID NO: 4491609 - DNA, 25 bp, Homo sapien
tggggtgagacaaccggttgcttga

SEQ ID NO: 4491610 - DNA, 25 bp, Homo sapien
catacagcttctcgttgccacaagc

SEQ ID NO: 4491611 - DNA, 25 bp, Homo sapien
aaagggtggctagctgaaagccttc

SEQ ID NO: 4491612 - DNA, 25 bp, Homo sapien
caaaccattcgaatgtgggatggac

SEQ ID NO: 4491613 - DNA, 25 bp, Homo sapien
gactctgagtgtgctgcaccctata

SEQ ID NO: 4491614 - DNA, 25 bp, Homo sapien
aactaccatgccaaaccctttcaag

SEQ ID NO: 4491615 - DNA, 25 bp, Homo sapien
ggcccaggaagcaaactaccatgcc

SEQ ID NO: 4491616 - DNA, 25 bp, Homo sapien
cccaggaagcaaactaccatgccaa

SEQ ID NO: 4491617 - DNA, 25 bp, Homo sapien
actaccatgccaaaccctttcaagg

SEQ ID NO: 4491618 - DNA, 25 bp, Homo sapien
ccctgcaaaagccagaacttttagt

SEQ ID NO: 4491619 - DNA, 25 bp, Homo sapien
tttcaggggcatcagtaagcactga

SEQ ID NO: 4491620 - DNA, 25 bp, Homo sapien
cacaaacggatccacccctgcaaaa

SEQ ID NO: 4491621 - DNA, 25 bp, Homo sapien
aagcactgagtccagtacaaactca

SEQ ID NO: 4491622 - DNA, 25 bp, Homo sapien
ccccggcaagtctttcttcaaggca

SEQ ID NO: 4491623 - DNA, 25 bp, Homo sapien
tgcagcaccccggcaagtctttctt

SEQ ID NO: 4491624 - DNA, 25 bp, Homo sapien
agcaccccggcaagtctttcttcaa

SEQ ID NO: 4491625 - DNA, 25 bp, Homo sapien
agagctgcagcaccccggcaagtct

SEQ ID NO: 4491626 - DNA, 25 bp, Homo sapien
ctgtgacgatgcaggtgaacctgac

SEQ ID NO: 4491627 - DNA, 25 bp, Homo sapien
aacctgacgtcgctgtcctcggaca

SEQ ID NO: 4491628 - DNA, 25 bp, Homo sapien
tcaaatagcggctgggtctcctctg

SEQ ID NO: 4491629 - DNA, 25 bp, Homo sapien
acacagaccgggacttgagcgtggt

SEQ ID NO: 4491630 - DNA, 25 bp, Homo sapien
cccatgattctataagccagactca

SEQ ID NO: 4491631 - DNA, 25 bp, Homo sapien
aagccagactcatgtctgacatctc

SEQ ID NO: 4491632 - DNA, 25 bp, Homo sapien
tatttgataaaataccccatgattc

SEQ ID NO: 4491633 - DNA, 25 bp, Homo sapien
gactcatgtctgacatctccacatt

SEQ ID NO: 4491634 - DNA, 25 bp, Homo sapien
tctggccatagtggattggtccagt

SEQ ID NO: 4491635 - DNA, 25 bp, Homo sapien
ttggtccagtaacggacaccagatc

SEQ ID NO: 4491636 - DNA, 25 bp, Homo sapien
tagtggattggtccagtaacggaca

SEQ ID NO: 4491637 - DNA, 25 bp, Homo sapien
caccagatcagctaatctagctaat

SEQ ID NO: 4491638 - DNA, 25 bp, Homo sapien
gagtgatctcatattttggcaagcc

SEQ ID NO: 4491639 - DNA, 25 bp, Homo sapien
cggttgccctgatgagtgatctcat

SEQ ID NO: 4491640 - DNA, 25 bp, Homo sapien
ttggcaagccacagtagcggtccag

SEQ ID NO: 4491641 - DNA, 25 bp, Homo sapien
gctgcagtgtgtggcggttgccctg

SEQ ID NO: 4491642 - DNA, 25 bp, Homo sapien
ctagaggtaggagcgggaggtgcca

SEQ ID NO: 4491643 - DNA, 25 bp, Homo sapien
agcgggaggtgccacctctcccctc

SEQ ID NO: 4491644 - DNA, 25 bp, Homo sapien
ggagcgggaggtgccacctctcccc

SEQ ID NO: 4491645 - DNA, 25 bp, Homo sapien
taggagcgggaggtgccacctctcc

SEQ ID NO: 4491646 - DNA, 25 bp, Homo sapien
gatggcggcatcttcttctcgacac

SEQ ID NO: 4491647 - DNA, 25 bp, Homo sapien
tcaacttggcgaaccagcgctggtg

SEQ ID NO: 4491648 - DNA, 25 bp, Homo sapien
gctcaatcgccgctttcgctggaag

SEQ ID NO: 4491649 - DNA, 25 bp, Homo sapien
tgagcttgcgcagagtgtcgacctc

SEQ ID NO: 4491650 - DNA, 25 bp, Homo sapien
ccacaggagtcaggctcgtctgagc

SEQ ID NO: 4491651 - DNA, 25 bp, Homo sapien
tttctgaagaacggcggctttgggc

SEQ ID NO: 4491652 - DNA, 25 bp, Homo sapien
gtcccacaggagtcaggctcgtctg

SEQ ID NO: 4491653 - DNA, 25 bp, Homo sapien
gagtcccacaggagtcaggctcgtc

SEQ ID NO: 4491654 - DNA, 25 bp, Homo sapien
cctggtactatctgtgccagaggac

SEQ ID NO: 4491655 - DNA, 25 bp, Homo sapien
aggctggcttcctggtactatctgt

SEQ ID NO: 4491656 - DNA, 25 bp, Homo sapien
ccaggcgcccggacactcagggtct

SEQ ID NO: 4491657 - DNA, 25 bp, Homo sapien
ttctagccctgaggggtgccttccc

SEQ ID NO: 4491658 - DNA, 25 bp, Homo sapien
gggcttgctgtcagtggtggcctct

SEQ ID NO: 4491659 - DNA, 25 bp, Homo sapien
gaaatgggcttgctgtcagtggtgg

SEQ ID NO: 4491660 - DNA, 25 bp, Homo sapien
tgggcttgctgtcagtggtggcctc

SEQ ID NO: 4491661 - DNA, 25 bp, Homo sapien
aatgggcttgctgtcagtggtggcc

SEQ ID NO: 4491662 - DNA, 25 bp, Homo sapien
ttgcccctgcaacgtgctgtcccgg

SEQ ID NO: 4491663 - DNA, 25 bp, Homo sapien
agggggcgtcggcacctgcacagag

SEQ ID NO: 4491664 - DNA, 25 bp, Homo sapien
ctgcttgcccctgcaacgtgctgtc

SEQ ID NO: 4491665 - DNA, 25 bp, Homo sapien
gcaacgtgctgtcccgggtgccatg

SEQ ID NO: 4491666 - DNA, 25 bp, Homo sapien
aacactgttgcctcagcaaagccca

SEQ ID NO: 4491667 - DNA, 25 bp, Homo sapien
cctacactcccagaagagggtcaca

SEQ ID NO: 4491668 - DNA, 25 bp, Homo sapien
aaacactgttgcctcagcaaagccc

SEQ ID NO: 4491669 - DNA, 25 bp, Homo sapien
tccccttggctgtgaactcctacac

SEQ ID NO: 4491670 - DNA, 25 bp, Homo sapien
ttcactgctccgagaaaccacctgt

SEQ ID NO: 4491671 - DNA, 25 bp, Homo sapien
tccatgggaaagcccctcctgttct

SEQ ID NO: 4491672 - DNA, 25 bp, Homo sapien
tgtgcttcccttcactgctccgaga

SEQ ID NO: 4491673 - DNA, 25 bp, Homo sapien
gccattcccgatctataactgcttc

SEQ ID NO: 4491674 - DNA, 25 bp, Homo sapien
tatgagagccatctcttccaaaagt

SEQ ID NO: 4491675 - DNA, 25 bp, Homo sapien
cttcctaaatgagctatgagggcct

SEQ ID NO: 4491676 - DNA, 25 bp, Homo sapien
gctgtcaggcatgtgcagcagcccc

SEQ ID NO: 4491677 - DNA, 25 bp, Homo sapien
gcagagaagccagatttgcacactc

SEQ ID NO: 4491678 - DNA, 25 bp, Homo sapien
tgtaactgacctatatcactatatt

SEQ ID NO: 4491679 - DNA, 25 bp, Homo sapien
ttctggtcctgtctcacaatctgtc

SEQ ID NO: 4491680 - DNA, 25 bp, Homo sapien
tattgacagcatcaagttgggaaag

SEQ ID NO: 4491681 - DNA, 25 bp, Homo sapien
ttttacttgtaactgacctatatca

SEQ ID NO: 4491682 - DNA, 25 bp, Homo sapien
cttttctatctgtttgctttggatt

SEQ ID NO: 4491683 - DNA, 25 bp, Homo sapien
ttcttttctatctgtttgctttgga

SEQ ID NO: 4491684 - DNA, 25 bp, Homo sapien
ctacatggacattcagatctctttc

SEQ ID NO: 4491685 - DNA, 25 bp, Homo sapien
tcggacctcatctacaactgctctg

SEQ ID NO: 4491686 - DNA, 25 bp, Homo sapien
aaaagcaaggatttaactacatgga

SEQ ID NO: 4491687 - DNA, 25 bp, Homo sapien
agtctggcatcccagtctcctcgga

SEQ ID NO: 4491688 - DNA, 25 bp, Homo sapien
taggagccgtggttgtctggcattc

SEQ ID NO: 4491689 - DNA, 25 bp, Homo sapien
tatctgcacgtgtcctctgggctgt

SEQ ID NO: 4491690 - DNA, 25 bp, Homo sapien
cggaagtgctaaccccaatggaggc

SEQ ID NO: 4491691 - DNA, 25 bp, Homo sapien
caatgataccttgacttccggaagt

SEQ ID NO: 4491692 - DNA, 25 bp, Homo sapien
ctcctcagatctgggcaggcaacca

SEQ ID NO: 4491693 - DNA, 25 bp, Homo sapien
gcacagtttgctcatggttcctgga

SEQ ID NO: 4491694 - DNA, 25 bp, Homo sapien
caatattcagaggagctctaggacc

SEQ ID NO: 4491695 - DNA, 25 bp, Homo sapien
ggttcctggaggctgttactactgc

SEQ ID NO: 4491696 - DNA, 25 bp, Homo sapien
tgactgtggccctcggcatctctct

SEQ ID NO: 4491697 - DNA, 25 bp, Homo sapien
tcctgcttggcctcgactgggcctg

SEQ ID NO: 4491698 - DNA, 25 bp, Homo sapien
cggctgtgctgggagcatgaggttc

SEQ ID NO: 4491699 - DNA, 25 bp, Homo sapien
tggaacgggctgtcctcctgcttgg

SEQ ID NO: 4491700 - DNA, 25 bp, Homo sapien
catcgtgggtacctcctggctcagg

SEQ ID NO: 4491701 - DNA, 25 bp, Homo sapien
ggctagctgtcagcccagttccagg

SEQ ID NO: 4491702 - DNA, 25 bp, Homo sapien
gagaaggcatcgtgggtacctcctg

SEQ ID NO: 4491703 - DNA, 25 bp, Homo sapien
tgagaagtcggggtgctacacggcc

SEQ ID NO: 4491704 - DNA, 25 bp, Homo sapien
tggctgagggcaccagacctccggt

SEQ ID NO: 4491705 - DNA, 25 bp, Homo sapien
ctccacatctggtacctgggcgcag

SEQ ID NO: 4491706 - DNA, 25 bp, Homo sapien
tccaggatgcgcctcgatgtccggg

SEQ ID NO: 4491707 - DNA, 25 bp, Homo sapien
tgcaccaggtggttgttctccacac

SEQ ID NO: 4491708 - DNA, 25 bp, Homo sapien
ccccagtcgaccagccatgctgctc

SEQ ID NO: 4491709 - DNA, 25 bp, Homo sapien
cctgggctatgctctctgctgaggg

SEQ ID NO: 4491710 - DNA, 25 bp, Homo sapien
ttctcctcttgggagggctcctggg

SEQ ID NO: 4491711 - DNA, 25 bp, Homo sapien
gctccttctgaggccagcccagggt

SEQ ID NO: 4491712 - DNA, 25 bp, Homo sapien
tctgtgtccagaccgccggccttgg

SEQ ID NO: 4491713 - DNA, 25 bp, Homo sapien
tcctgcttgccttcatccagggcca

SEQ ID NO: 4491714 - DNA, 25 bp, Homo sapien
tgctcgcctttctgccctgcgtagg

SEQ ID NO: 4491715 - DNA, 25 bp, Homo sapien
gccagttcctcaggtgtagctgccg

SEQ ID NO: 4491716 - DNA, 25 bp, Homo sapien
ccgaatcttccggatcacctgtggg

SEQ ID NO: 4491717 - DNA, 25 bp, Homo sapien
gatccttggcccatgtcaagactga

SEQ ID NO: 4491718 - DNA, 25 bp, Homo sapien
ttcaggctaccggaggcatcaggaa

SEQ ID NO: 4491719 - DNA, 25 bp, Homo sapien
caggaaactgctccacccgaatctt

SEQ ID NO: 4491720 - DNA, 25 bp, Homo sapien
ggcagaagtcggtggaggccgagcc

SEQ ID NO: 4491721 - DNA, 25 bp, Homo sapien
gggaggcctgcacgatggccaaggc

SEQ ID NO: 4491722 - DNA, 25 bp, Homo sapien
aggccgagccgtgctcattgtggat

SEQ ID NO: 4491723 - DNA, 25 bp, Homo sapien
ggtgcaccgatacacaccgcagtct

SEQ ID NO: 4491724 - DNA, 25 bp, Homo sapien
accttcttctctggagatgaatcct

SEQ ID NO: 4491725 - DNA, 25 bp, Homo sapien
ttctctggagatgaatcctgacaac

SEQ ID NO: 4491726 - DNA, 25 bp, Homo sapien
tctctggagatgaatcctgacaaca

SEQ ID NO: 4491727 - DNA, 25 bp, Homo sapien
cttcaccttcttctctggagatgaa

SEQ ID NO: 4491728 - DNA, 25 bp, Homo sapien
gcaggttccctgtgtgaatctaata

SEQ ID NO: 4491729 - DNA, 25 bp, Homo sapien
gtctcttgtaggagcagtacgtgcc

SEQ ID NO: 4491730 - DNA, 25 bp, Homo sapien
tcattaaagatgtctgcagtgcagc

SEQ ID NO: 4491731 - DNA, 25 bp, Homo sapien
tgaaaacgcaatattcctaggtccc

SEQ ID NO: 4491732 - DNA, 25 bp, Homo sapien
gtttctgcccacaagagaagtctca

SEQ ID NO: 4491733 - DNA, 25 bp, Homo sapien
ggttccagcccgtagatgaccttgg

SEQ ID NO: 4491734 - DNA, 25 bp, Homo sapien
accttgatgatgcacgtgcggcccg

SEQ ID NO: 4491735 - DNA, 25 bp, Homo sapien
ggcccaaacacaagcaggctggaca

SEQ ID NO: 4491736 - DNA, 25 bp, Homo sapien
gcagtactcccgactcatgttctgg

SEQ ID NO: 4491737 - DNA, 25 bp, Homo sapien
gactcatgttctggatcttgcaccc

SEQ ID NO: 4491738 - DNA, 25 bp, Homo sapien
gctgcgaagattttgcagtactccc

SEQ ID NO: 4491739 - DNA, 25 bp, Homo sapien
cggcccgggcttctgctgcgaagat

SEQ ID NO: 4491740 - DNA, 25 bp, Homo sapien
gaaattgctgtgtccaaactctgca

SEQ ID NO: 4491741 - DNA, 25 bp, Homo sapien
caagtctgtgacaaggaagctgcca

SEQ ID NO: 4491742 - DNA, 25 bp, Homo sapien
gctgccagatgctgtcggagcctca

SEQ ID NO: 4491743 - DNA, 25 bp, Homo sapien
tgcaggccggtagatcagatacagt

SEQ ID NO: 4491744 - DNA, 25 bp, Homo sapien
ttcccgagaacagtaagactccagg

SEQ ID NO: 4491745 - DNA, 25 bp, Homo sapien
ctctgtccagttctgcttaatgaca

SEQ ID NO: 4491746 - DNA, 25 bp, Homo sapien
aagatttaatgatgtgtgatattcc

SEQ ID NO: 4491747 - DNA, 25 bp, Homo sapien
agagacaagatttaatgatgtgtga

SEQ ID NO: 4491748 - DNA, 25 bp, Homo sapien
tctgcttaatgacagtaggcctgca

SEQ ID NO: 4491749 - DNA, 25 bp, Homo sapien
acatcagtcatcttccagtcaaccc

SEQ ID NO: 4491750 - DNA, 25 bp, Homo sapien
tgcacatcagtcatcttccagtcaa

SEQ ID NO: 4491751 - DNA, 25 bp, Homo sapien
tctgcacatcagtcatcttccagtc

SEQ ID NO: 4491752 - DNA, 25 bp, Homo sapien
gcacatcagtcatcttccagtcaac

SEQ ID NO: 4491753 - DNA, 25 bp, Homo sapien
catcaggatgtcgtgctcagggtac

SEQ ID NO: 4491754 - DNA, 25 bp, Homo sapien
gccatcatcaggatgtcgtgctcag

SEQ ID NO: 4491755 - DNA, 25 bp, Homo sapien
tcaggatgtcgtgctcagggtacat

SEQ ID NO: 4491756 - DNA, 25 bp, Homo sapien
ggtggccatcatcaggatgtcgtgc

SEQ ID NO: 4491757 - DNA, 25 bp, Homo sapien
tggagcactcttccgggtgccctga

SEQ ID NO: 4491758 - DNA, 25 bp, Homo sapien
ccctgaggactagggaggcctttct

SEQ ID NO: 4491759 - DNA, 25 bp, Homo sapien
ggaggctgtcccaacaactgagtgg

SEQ ID NO: 4491760 - DNA, 25 bp, Homo sapien
tccgggcccttgagaggtgtcagcc

SEQ ID NO: 4491761 - DNA, 25 bp, Homo sapien
tcagtatggagtgcaaggtctctca

SEQ ID NO: 4491762 - DNA, 25 bp, Homo sapien
tccaaagggagtaggctagctgcag

SEQ ID NO: 4491763 - DNA, 25 bp, Homo sapien
gatgacgagctgattcacgagagcc

SEQ ID NO: 4491764 - DNA, 25 bp, Homo sapien
ggagaagataccctgagagtcacca

SEQ ID NO: 4491765 - DNA, 25 bp, Homo sapien
cagacctccaaccacaccagatgag

SEQ ID NO: 4491766 - DNA, 25 bp, Homo sapien
acagacctccaaccacaccagatga

SEQ ID NO: 4491767 - DNA, 25 bp, Homo sapien
ccacagacctccaaccacaccagat

SEQ ID NO: 4491768 - DNA, 25 bp, Homo sapien
cacagacctccaaccacaccagatg

SEQ ID NO: 4491769 - DNA, 25 bp, Homo sapien
gctgcgactgaacttcggtccagga

SEQ ID NO: 4491770 - DNA, 25 bp, Homo sapien
gaaggctgcgactgaacttcggtcc

SEQ ID NO: 4491771 - DNA, 25 bp, Homo sapien
gactgaacttcggtccaggaaccaa

SEQ ID NO: 4491772 - DNA, 25 bp, Homo sapien
ccacagaaggctgcgactgaacttc

SEQ ID NO: 4491773 - DNA, 25 bp, Homo sapien
aatgaatgaacagtactccagctct

SEQ ID NO: 4491774 - DNA, 25 bp, Homo sapien
gaagcaggaaatggtcagcaagtag

SEQ ID NO: 4491775 - DNA, 25 bp, Homo sapien
gagcaattccaaaggcgtaagtccc

SEQ ID NO: 4491776 - DNA, 25 bp, Homo sapien
gccagagacacagggcgtttccaga

SEQ ID NO: 4491777 - DNA, 25 bp, Homo sapien
ttacctgtgggagagtcgtcatacg

SEQ ID NO: 4491778 - DNA, 25 bp, Homo sapien
tagaagccgtgtcattacccctgga

SEQ ID NO: 4491779 - DNA, 25 bp, Homo sapien
tcagaactgaaggtttgggtccctc

SEQ ID NO: 4491780 - DNA, 25 bp, Homo sapien
tgattgctgctacgtaaaagagggc

SEQ ID NO: 4491781 - DNA, 25 bp, Homo sapien
tccttcagggataggacgcagtgtg

SEQ ID NO: 4491782 - DNA, 25 bp, Homo sapien
tctccttcagggataggacgcagtg

SEQ ID NO: 4491783 - DNA, 25 bp, Homo sapien
ctccttcagggataggacgcagtgt

SEQ ID NO: 4491784 - DNA, 25 bp, Homo sapien
ccttcagggataggacgcagtgtgg

SEQ ID NO: 4491785 - DNA, 25 bp, Homo sapien
taccaactgacctagaagactgcca

SEQ ID NO: 4491786 - DNA, 25 bp, Homo sapien
tatcaacggtacactgtcgctccag

SEQ ID NO: 4491787 - DNA, 25 bp, Homo sapien
ggaaagtcttttgtgcagccgacgc

SEQ ID NO: 4491788 - DNA, 25 bp, Homo sapien
catagcttgcggtaagtcctgacaa

SEQ ID NO: 4491789 - DNA, 25 bp, Homo sapien
cagctgcccagtgccttggtcaaac

SEQ ID NO: 4491790 - DNA, 25 bp, Homo sapien
gaatcagagtgggagataaatcatg

SEQ ID NO: 4491791 - DNA, 25 bp, Homo sapien
tagatgcatgttgtgaaccttcctt

SEQ ID NO: 4491792 - DNA, 25 bp, Homo sapien
tggtcaaacatatgtgaatcagagt

SEQ ID NO: 4491793 - DNA, 25 bp, Homo sapien
tctgtctcaagtgccaaggtaaagt

SEQ ID NO: 4491794 - DNA, 25 bp, Homo sapien
taactaaagacttctgggccaacag

SEQ ID NO: 4491795 - DNA, 25 bp, Homo sapien
tggaaaccagacctcgagctgtggg

SEQ ID NO: 4491796 - DNA, 25 bp, Homo sapien
tcgtaagggatagggcatggaaacc

SEQ ID NO: 4491797 - DNA, 25 bp, Homo sapien
tacaaatctggaccaaatgttggcc

SEQ ID NO: 4491798 - DNA, 25 bp, Homo sapien
aaaaatgcttgattgggtccctggc

SEQ ID NO: 4491799 - DNA, 25 bp, Homo sapien
tctacgtaaaagctcaaatcgccag

SEQ ID NO: 4491800 - DNA, 25 bp, Homo sapien
gaaatacattcacgaggctctgctg

SEQ ID NO: 4491801 - DNA, 25 bp, Homo sapien
cagtctgtggtggaccttttaaagg

SEQ ID NO: 4491802 - DNA, 25 bp, Homo sapien
gacatctgggagtattcaaaggaca

SEQ ID NO: 4491803 - DNA, 25 bp, Homo sapien
aaaaggtggcatcctgtcagctgga

SEQ ID NO: 4491804 - DNA, 25 bp, Homo sapien
caaggcatggaacgaaattcaggac

SEQ ID NO: 4491805 - DNA, 25 bp, Homo sapien
aaggtgtacctctctcttgcagaag

SEQ ID NO: 4491806 - DNA, 25 bp, Homo sapien
tgggaaagtagcagcctttgtacat

SEQ ID NO: 4491807 - DNA, 25 bp, Homo sapien
atgggaaagtagcagcctttgtaca

SEQ ID NO: 4491808 - DNA, 25 bp, Homo sapien
gggaaagtagcagcctttgtacatc

SEQ ID NO: 4491809 - DNA, 25 bp, Homo sapien
gatgggaaagtagcagcctttgtac

SEQ ID NO: 4491810 - DNA, 25 bp, Homo sapien
cagagaaccgtaactgatggtgaca

SEQ ID NO: 4491811 - DNA, 25 bp, Homo sapien
atggaggtaagatagggtgaagagc

SEQ ID NO: 4491812 - DNA, 25 bp, Homo sapien
tagggtgaagagcattgaaactcct

SEQ ID NO: 4491813 - DNA, 25 bp, Homo sapien
gagccagtttattgctggcagtcag

SEQ ID NO: 4491814 - DNA, 25 bp, Homo sapien
cacacagtaacaaaaggcagttggg

SEQ ID NO: 4491815 - DNA, 25 bp, Homo sapien
gccccaggcctcaaggatacatgta

SEQ ID NO: 4491816 - DNA, 25 bp, Homo sapien
tagggtgatggtcagcaagttcctc

SEQ ID NO: 4491817 - DNA, 25 bp, Homo sapien
tcagagctgccctggttaccattgt

SEQ ID NO: 4491818 - DNA, 25 bp, Homo sapien
gatgggcctgccaatcagacgccat

SEQ ID NO: 4491819 - DNA, 25 bp, Homo sapien
caagggctgcgtccaattccctcag

SEQ ID NO: 4491820 - DNA, 25 bp, Homo sapien
gaagcaaggttcctgattccaaggg

SEQ ID NO: 4491821 - DNA, 25 bp, Homo sapien
cagacgccatgactcacttggaaac

SEQ ID NO: 4491822 - DNA, 25 bp, Homo sapien
tacggcagcaacaagaggcctggta

SEQ ID NO: 4491823 - DNA, 25 bp, Homo sapien
gtggtcatcatccaatacaaaatgg

SEQ ID NO: 4491824 - DNA, 25 bp, Homo sapien
ggtagaattaggatgccgggtccca

SEQ ID NO: 4491825 - DNA, 25 bp, Homo sapien
catccaatacaaaatggaaggccga

SEQ ID NO: 4491826 - DNA, 25 bp, Homo sapien
gcattgaaaaatggacttcccgtag

SEQ ID NO: 4491827 - DNA, 25 bp, Homo sapien
tctctcctaaacctgggatgattgg

SEQ ID NO: 4491828 - DNA, 25 bp, Homo sapien
tgattggcagaaagggcatccatac

SEQ ID NO: 4491829 - DNA, 25 bp, Homo sapien
gttccatgaacatgacctcatcatt

SEQ ID NO: 4491830 - DNA, 25 bp, Homo sapien
acacatccagcagcaaccatgcagt

SEQ ID NO: 4491831 - DNA, 25 bp, Homo sapien
tccagcagcaaccatgcagtgcagc

SEQ ID NO: 4491832 - DNA, 25 bp, Homo sapien
ttgtttctgtcagcatccagaggga

SEQ ID NO: 4491833 - DNA, 25 bp, Homo sapien
ccttgtttctgtcagcatccagagg

SEQ ID NO: 4491834 - DNA, 25 bp, Homo sapien
aaaggacgctacctgcttttccact

SEQ ID NO: 4491835 - DNA, 25 bp, Homo sapien
gggtcttcgccaagccctagtgaag

SEQ ID NO: 4491836 - DNA, 25 bp, Homo sapien
taaatgcctctgagcagcactactg

SEQ ID NO: 4491837 - DNA, 25 bp, Homo sapien
gcttttccactttgccctgtgctac

SEQ ID NO: 4491838 - DNA, 25 bp, Homo sapien
gccacctatgtgattatttccctcc

SEQ ID NO: 4491839 - DNA, 25 bp, Homo sapien
cttccaggaagccacctatgtgatt

SEQ ID NO: 4491840 - DNA, 25 bp, Homo sapien
ccaggcctattagggccgcttcttc

SEQ ID NO: 4491841 - DNA, 25 bp, Homo sapien
ctgacctcttccaggcctattaggg

SEQ ID NO: 4491842 - DNA, 25 bp, Homo sapien
agtaggttgggcctgccacccagtt

SEQ ID NO: 4491843 - DNA, 25 bp, Homo sapien
ccaacacggtctcagggatacagga

SEQ ID NO: 4491844 - DNA, 25 bp, Homo sapien
gcagagtccagggtcggagtaggtt

SEQ ID NO: 4491845 - DNA, 25 bp, Homo sapien
gaccccaacacggtctcagggatac

SEQ ID NO: 4491846 - DNA, 25 bp, Homo sapien
tggcttgccttgtcacttcagcaga

SEQ ID NO: 4491847 - DNA, 25 bp, Homo sapien
gcttgccttgtcacttcagcagaaa

SEQ ID NO: 4491848 - DNA, 25 bp, Homo sapien
gctctggcttgccttgtcacttcag

SEQ ID NO: 4491849 - DNA, 25 bp, Homo sapien
tgccttgtcacttcagcagaaattc

SEQ ID NO: 4491850 - DNA, 25 bp, Homo sapien
tctctgtggggacaagctgggtcca

SEQ ID NO: 4491851 - DNA, 25 bp, Homo sapien
ctctgtggggacaagctgggtccaa

SEQ ID NO: 4491852 - DNA, 25 bp, Homo sapien
tctgtggggacaagctgggtccaac

SEQ ID NO: 4491853 - DNA, 25 bp, Homo sapien
gtctctgtggggacaagctgggtcc

SEQ ID NO: 4491854 - DNA, 25 bp, Homo sapien
gtatttgcggttaacaggtcgctct

SEQ ID NO: 4491855 - DNA, 25 bp, Homo sapien
tttgcggttaacaggtcgctctcag

SEQ ID NO: 4491856 - DNA, 25 bp, Homo sapien
cggttaacaggtcgctctcagagag

SEQ ID NO: 4491857 - DNA, 25 bp, Homo sapien
tgcggttaacaggtcgctctcagag

SEQ ID NO: 4491858 - DNA, 25 bp, Homo sapien
aaagacaaatcagggagcgcccaac

SEQ ID NO: 4491859 - DNA, 25 bp, Homo sapien
aagacaaatcagggagcgcccaacg

SEQ ID NO: 4491860 - DNA, 25 bp, Homo sapien
ctgaaagacaaatcagggagcgccc

SEQ ID NO: 4491861 - DNA, 25 bp, Homo sapien
tgaaagacaaatcagggagcgccca

SEQ ID NO: 4491862 - DNA, 25 bp, Homo sapien
tgagagagatggactctcttcgtct

SEQ ID NO: 4491863 - DNA, 25 bp, Homo sapien
tcttcgtctcgaggggtcgttctcc

SEQ ID NO: 4491864 - DNA, 25 bp, Homo sapien
cccatgttctccagacccttggcca

SEQ ID NO: 4491865 - DNA, 25 bp, Homo sapien
ggctttccaagaaatcagcccccat

SEQ ID NO: 4491866 - DNA, 25 bp, Homo sapien
gggctcaagtcactcctagggagct

SEQ ID NO: 4491867 - DNA, 25 bp, Homo sapien
gctcctgatctctgcggggctcaag

SEQ ID NO: 4491868 - DNA, 25 bp, Homo sapien
gtcactcctagggagctggccttcc

SEQ ID NO: 4491869 - DNA, 25 bp, Homo sapien
tctgcggggctcaagtcactcctag

SEQ ID NO: 4491870 - DNA, 25 bp, Homo sapien
gcagggtccatgagtgcatgagcag

SEQ ID NO: 4491871 - DNA, 25 bp, Homo sapien
ccccatctgggggagatcctcagca

SEQ ID NO: 4491872 - DNA, 25 bp, Homo sapien
tgtccccagtaaagtggcaacaggg

SEQ ID NO: 4491873 - DNA, 25 bp, Homo sapien
taaagtggcaacaggggcaagccag

SEQ ID NO: 4491874 - DNA, 25 bp, Homo sapien
cgatccatcgaaacagctgcatgtg

SEQ ID NO: 4491875 - DNA, 25 bp, Homo sapien
gcctgtgccgatccatcgaaacagc

SEQ ID NO: 4491876 - DNA, 25 bp, Homo sapien
tgtgccgatccatcgaaacagctgc

SEQ ID NO: 4491877 - DNA, 25 bp, Homo sapien
gccgatccatcgaaacagctgcatg

SEQ ID NO: 4491878 - DNA, 25 bp, Homo sapien
tggcaccggccatgggggttcaggg

SEQ ID NO: 4491879 - DNA, 25 bp, Homo sapien
tcattgagacacacgggtggagccc

SEQ ID NO: 4491880 - DNA, 25 bp, Homo sapien
aacgggtgtcattgagacacacggg

SEQ ID NO: 4491881 - DNA, 25 bp, Homo sapien
ctgaacgggtgtcattgagacacac

SEQ ID NO: 4491882 - DNA, 25 bp, Homo sapien
atggaagcttgtgggctggagttcc

SEQ ID NO: 4491883 - DNA, 25 bp, Homo sapien
ggaagcttgtgggctggagttccta

SEQ ID NO: 4491884 - DNA, 25 bp, Homo sapien
tggaagcttgtgggctggagttcct

SEQ ID NO: 4491885 - DNA, 25 bp, Homo sapien
ggcttgagaaacctcctcagctttg

SEQ ID NO: 4491886 - DNA, 25 bp, Homo sapien
ccagaagccgtttcagcaggcggtg

SEQ ID NO: 4491887 - DNA, 25 bp, Homo sapien
gccccagaagccgtttcagcaggcg

SEQ ID NO: 4491888 - DNA, 25 bp, Homo sapien
ggccctgaggcttgagaaacctcct

SEQ ID NO: 4491889 - DNA, 25 bp, Homo sapien
ctgattcgggccctccttgctccat

SEQ ID NO: 4491890 - DNA, 25 bp, Homo sapien
gaggtactgattcgggccctccttg

SEQ ID NO: 4491891 - DNA, 25 bp, Homo sapien
gattcgggccctccttgctccatgg

SEQ ID NO: 4491892 - DNA, 25 bp, Homo sapien
tgagggaggtactgattcgggccct

SEQ ID NO: 4491893 - DNA, 25 bp, Homo sapien
tttccagcgctccaaggaatccagt

SEQ ID NO: 4491894 - DNA, 25 bp, Homo sapien
tctttgggtatctttggtcaccagc

SEQ ID NO: 4491895 - DNA, 25 bp, Homo sapien
aactgttgtccaaggacgctgctgg

SEQ ID NO: 4491896 - DNA, 25 bp, Homo sapien
gctgggcgggaagtctgaattttcc

SEQ ID NO: 4491897 - DNA, 25 bp, Homo sapien
atgacttgtcacagaagaccattgc

SEQ ID NO: 4491898 - DNA, 25 bp, Homo sapien
gacttgtcacagaagaccattgcaa

SEQ ID NO: 4491899 - DNA, 25 bp, Homo sapien
tgacttgtcacagaagaccattgca

SEQ ID NO: 4491900 - DNA, 25 bp, Homo sapien
cttgtcacagaagaccattgcaaaa

SEQ ID NO: 4491901 - DNA, 25 bp, Homo sapien
catctgactgaatatgaagtggtat

SEQ ID NO: 4491902 - DNA, 25 bp, Homo sapien
tgcactgtttcgcatttccaccagc

SEQ ID NO: 4491903 - DNA, 25 bp, Homo sapien
cggccagcctaaccattttctaaag

SEQ ID NO: 4491904 - DNA, 25 bp, Homo sapien
cttattgattatggccatctgactg

SEQ ID NO: 4491905 - DNA, 25 bp, Homo sapien
tacagtgcatggttcaaggatagaa

SEQ ID NO: 4491906 - DNA, 25 bp, Homo sapien
acaatttgcccatttacagtgcatg

SEQ ID NO: 4491907 - DNA, 25 bp, Homo sapien
aaataggactaccatatgattcggt

SEQ ID NO: 4491908 - DNA, 25 bp, Homo sapien
ggactaccatatgattcggtaattc

SEQ ID NO: 4491909 - DNA, 25 bp, Homo sapien
cgcaatgatgctttgagcaggcaaa

SEQ ID NO: 4491910 - DNA, 25 bp, Homo sapien
gcagattcctgcgaaggacaccagt

SEQ ID NO: 4491911 - DNA, 25 bp, Homo sapien
acaccagttgctcaggccgctggga

SEQ ID NO: 4491912 - DNA, 25 bp, Homo sapien
gagagcgacgaacacgcagattcct

SEQ ID NO: 4491913 - DNA, 25 bp, Homo sapien
cctgggccccacaactagcactcac

SEQ ID NO: 4491914 - DNA, 25 bp, Homo sapien
aggaacatctgcctataccccagct

SEQ ID NO: 4491915 - DNA, 25 bp, Homo sapien
tatcctgatacacacaggccttctc

SEQ ID NO: 4491916 - DNA, 25 bp, Homo sapien
tcccaacaggaacatctgcctatac

SEQ ID NO: 4491917 - DNA, 25 bp, Homo sapien
agggctctcccaacaggaacatctg

SEQ ID NO: 4491918 - DNA, 25 bp, Homo sapien
gacgaggagtccaagtacaaactgc

SEQ ID NO: 4491919 - DNA, 25 bp, Homo sapien
ctgatgacgaggagtccaagtacaa

SEQ ID NO: 4491920 - DNA, 25 bp, Homo sapien
caagtacaaactgcagtccaagtcc

SEQ ID NO: 4491921 - DNA, 25 bp, Homo sapien
gagtccaagtacaaactgcagtcca

SEQ ID NO: 4491922 - DNA, 25 bp, Homo sapien
cactcgaacgcaatgaatcctggtt

SEQ ID NO: 4491923 - DNA, 25 bp, Homo sapien
gcccagccactcgaacgcaatgaat

SEQ ID NO: 4491924 - DNA, 25 bp, Homo sapien
cagccactcgaacgcaatgaatcct

SEQ ID NO: 4491925 - DNA, 25 bp, Homo sapien
tcgaacgcaatgaatcctggttctg

SEQ ID NO: 4491926 - DNA, 25 bp, Homo sapien
gagccagccttcgtgtagctcagga

SEQ ID NO: 4491927 - DNA, 25 bp, Homo sapien
agccagccttcgtgtagctcaggaa

SEQ ID NO: 4491928 - DNA, 25 bp, Homo sapien
ccagccttcgtgtagctcaggaaga

SEQ ID NO: 4491929 - DNA, 25 bp, Homo sapien
cagccttcgtgtagctcaggaagat

SEQ ID NO: 4491930 - DNA, 25 bp, Homo sapien
gctgctaaaggcctctgggaccctg

SEQ ID NO: 4491931 - DNA, 25 bp, Homo sapien
tcccctctagctggagtcgctgggc

SEQ ID NO: 4491932 - DNA, 25 bp, Homo sapien
gcggtggctgctaaaggcctctggg

SEQ ID NO: 4491933 - DNA, 25 bp, Homo sapien
gctggagtcgctgggcggtggctgc

SEQ ID NO: 4491934 - DNA, 25 bp, Homo sapien
ccaactactgggtgagtggggccca

SEQ ID NO: 4491935 - DNA, 25 bp, Homo sapien
atggcggtcccggatgtaccagagt

SEQ ID NO: 4491936 - DNA, 25 bp, Homo sapien
ggtcttgcatagcagctccatggtg

SEQ ID NO: 4491937 - DNA, 25 bp, Homo sapien
gccacgcatcagtggcagaaaactg

SEQ ID NO: 4491938 - DNA, 25 bp, Homo sapien
ttatgcaaaggtaagggagcagctg

SEQ ID NO: 4491939 - DNA, 25 bp, Homo sapien
gtacccccgcattggttatgcaaag

SEQ ID NO: 4491940 - DNA, 25 bp, Homo sapien
cgggtacccccgcattggttatgca

SEQ ID NO: 4491941 - DNA, 25 bp, Homo sapien
atgcaaaggtaagggagcagctgct

SEQ ID NO: 4491942 - DNA, 25 bp, Homo sapien
tgcctagctcagtctgtccaaatct

SEQ ID NO: 4491943 - DNA, 25 bp, Homo sapien
tactgcacttgaacgcagctgcctg

SEQ ID NO: 4491944 - DNA, 25 bp, Homo sapien
aaggagtctccctcacggtctctta

SEQ ID NO: 4491945 - DNA, 25 bp, Homo sapien
aatctcttctgtcctaaactccatg

SEQ ID NO: 4491946 - DNA, 25 bp, Homo sapien
tgaactcaagcgatcgaaccacttc

SEQ ID NO: 4491947 - DNA, 25 bp, Homo sapien
tcactgtgccattgcggccaacaca

SEQ ID NO: 4491948 - DNA, 25 bp, Homo sapien
gcttggctggaccatcagtaataca

SEQ ID NO: 4491949 - DNA, 25 bp, Homo sapien
catgaggccgttgatttctgctgat

SEQ ID NO: 4491950 - DNA, 25 bp, Homo sapien
cagaattaggcttatcccggacctg

SEQ ID NO: 4491951 - DNA, 25 bp, Homo sapien
gaattaggcttatcccggacctgag

SEQ ID NO: 4491952 - DNA, 25 bp, Homo sapien
gcttatcccggacctgagccagcat

SEQ ID NO: 4491953 - DNA, 25 bp, Homo sapien
catgctcagaattaggcttatcccg

SEQ ID NO: 4491954 - DNA, 25 bp, Homo sapien
ctgaaaaagacaatgatgggcagaa

SEQ ID NO: 4491955 - DNA, 25 bp, Homo sapien
tgaaaaagacaatgatgggcagaac

SEQ ID NO: 4491956 - DNA, 25 bp, Homo sapien
cccacgtggtagagaacggatatga

SEQ ID NO: 4491957 - DNA, 25 bp, Homo sapien
ttcaggatcacccactgcatgaggc

SEQ ID NO: 4491958 - DNA, 25 bp, Homo sapien
catgaggcccacgtggtagagaacg

SEQ ID NO: 4491959 - DNA, 25 bp, Homo sapien
ctgcatgaggcccacgtggtagaga

SEQ ID NO: 4491960 - DNA, 25 bp, Homo sapien
tgtgggcttggggagcagtgtgtct

SEQ ID NO: 4491961 - DNA, 25 bp, Homo sapien
ctggaagggtgtgggcttggggagc

SEQ ID NO: 4491962 - DNA, 25 bp, Homo sapien
gggcttggggagcagtgtgtctggg

SEQ ID NO: 4491963 - DNA, 25 bp, Homo sapien
gtgtgggcttggggagcagtgtgtc

SEQ ID NO: 4491964 - DNA, 25 bp, Homo sapien
gtggaggcactgggaacaggggact

SEQ ID NO: 4491965 - DNA, 25 bp, Homo sapien
ggtggaggcactgggaacaggggac

SEQ ID NO: 4491966 - DNA, 25 bp, Homo sapien
ctgggaaggtggaggcactgggaac

SEQ ID NO: 4491967 - DNA, 25 bp, Homo sapien
ggaaggtggaggcactgggaacagg

SEQ ID NO: 4491968 - DNA, 25 bp, Homo sapien
ggacatttggtcagcactagattct

SEQ ID NO: 4491969 - DNA, 25 bp, Homo sapien
tgggcctcaggagcaaaggattcta

SEQ ID NO: 4491970 - DNA, 25 bp, Homo sapien
tgggcctcaggagcaaaggattcca

SEQ ID NO: 4491971 - DNA, 25 bp, Homo sapien
tttagtatcatgacaggagaccctg

SEQ ID NO: 4491972 - DNA, 25 bp, Homo sapien
ccacactcagggtctcagtggctgt

SEQ ID NO: 4491973 - DNA, 25 bp, Homo sapien
gccacactcagggtctcagtggctg

SEQ ID NO: 4491974 - DNA, 25 bp, Homo sapien
gccggatcagtaatggagcctcggt

SEQ ID NO: 4491975 - DNA, 25 bp, Homo sapien
tggtggcgtaacctccggtcatgac

SEQ ID NO: 4491976 - DNA, 25 bp, Homo sapien
tcatgacaacgtggacttcagagag

SEQ ID NO: 4491977 - DNA, 25 bp, Homo sapien
tcatgtctgccaagtagggccggat

SEQ ID NO: 4491978 - DNA, 25 bp, Homo sapien
ggtcctcaacatagccaagcagaag

SEQ ID NO: 4491979 - DNA, 25 bp, Homo sapien
caggtcctcaacatagccaagcaga

SEQ ID NO: 4491980 - DNA, 25 bp, Homo sapien
gggcttcaggtcctcaacatagcca

SEQ ID NO: 4491981 - DNA, 25 bp, Homo sapien
ttcaggtcctcaacatagccaagca

SEQ ID NO: 4491982 - DNA, 25 bp, Homo sapien
tcaggggaagccactcctcttgcca

SEQ ID NO: 4491983 - DNA, 25 bp, Homo sapien
gaagatctgagggctgctctggcca

SEQ ID NO: 4491984 - DNA, 25 bp, Homo sapien
gccactcctcttgccagcacagcag

SEQ ID NO: 4491985 - DNA, 25 bp, Homo sapien
agcaggcccaagagagaagatctga

SEQ ID NO: 4491986 - DNA, 25 bp, Homo sapien
agagtgcaggttctaggtggacagt

SEQ ID NO: 4491987 - DNA, 25 bp, Homo sapien
gtgagagtgcaggttctaggtggac

SEQ ID NO: 4491988 - DNA, 25 bp, Homo sapien
agtgagagtgcaggttctaggtgga

SEQ ID NO: 4491989 - DNA, 25 bp, Homo sapien
agtgcaggttctaggtggacagtca

SEQ ID NO: 4491990 - DNA, 25 bp, Homo sapien
cagaggctgcaatcaacgaggtggc

SEQ ID NO: 4491991 - DNA, 25 bp, Homo sapien
aggcacaaggggcagccatcacaga

SEQ ID NO: 4491992 - DNA, 25 bp, Homo sapien
ctgcaatcaacgaggtggcatcgat

SEQ ID NO: 4491993 - DNA, 25 bp, Homo sapien
cacagaggctgcaatcaacgaggtg

SEQ ID NO: 4491994 - DNA, 25 bp, Homo sapien
tactggcctgtctccacaaccagca

SEQ ID NO: 4491995 - DNA, 25 bp, Homo sapien
actggcctgtctccacaaccagcaa

SEQ ID NO: 4491996 - DNA, 25 bp, Homo sapien
tggcctgtctccacaaccagcaagg

SEQ ID NO: 4491997 - DNA, 25 bp, Homo sapien
gcctgtctccacaaccagcaagggt

SEQ ID NO: 4491998 - DNA, 25 bp, Homo sapien
ctgttgttgggatcaagaatgatca

SEQ ID NO: 4491999 - DNA, 25 bp, Homo sapien
tgttgttgggatcaagaatgatcat

SEQ ID NO: 4492000 - DNA, 25 bp, Homo sapien
gagggcagcattgataaagtccagc

SEQ ID NO: 4492001 - DNA, 25 bp, Homo sapien
ggaagctgagcccttggatgtccac

SEQ ID NO: 4492002 - DNA, 25 bp, Homo sapien
ccaggaacgcaatcaggttggcagc

SEQ ID NO: 4492003 - DNA, 25 bp, Homo sapien
gttggcagcgatgttggcgaccacc

SEQ ID NO: 4492004 - DNA, 25 bp, Homo sapien
atcctctctacagactgagtgtggt

SEQ ID NO: 4492005 - DNA, 25 bp, Homo sapien
ggcacaacggtatggctggcaccga

SEQ ID NO: 4492006 - DNA, 25 bp, Homo sapien
ctgagggcacaacggtatggctggc

SEQ ID NO: 4492007 - DNA, 25 bp, Homo sapien
tcctctctacagactgagtgtggtg

SEQ ID NO: 4492008 - DNA, 25 bp, Homo sapien
tgccaggcggcgttgcttgtacttg

SEQ ID NO: 4492009 - DNA, 25 bp, Homo sapien
taggccacaaactcgttcagaaaca

SEQ ID NO: 4492010 - DNA, 25 bp, Homo sapien
tacttggagaggtcttgataggcca

SEQ ID NO: 4492011 - DNA, 25 bp, Homo sapien
tcaagaaggctacaggccgcaggat

SEQ ID NO: 4492012 - DNA, 25 bp, Homo sapien
cctgaggagtggctgtgccgtgtca

SEQ ID NO: 4492013 - DNA, 25 bp, Homo sapien
gagaaagatggcagcgaagcctgaa

SEQ ID NO: 4492014 - DNA, 25 bp, Homo sapien
aggagtggctgtgccgtgtcatccc

SEQ ID NO: 4492015 - DNA, 25 bp, Homo sapien
ggccctgaggagtggctgtgccgtg

SEQ ID NO: 4492016 - DNA, 25 bp, Homo sapien
tgtgtggcgaaataaatgctcgcag

SEQ ID NO: 4492017 - DNA, 25 bp, Homo sapien
taaatgctcgcaggcacagctggtg

SEQ ID NO: 4492018 - DNA, 25 bp, Homo sapien
tagttgtgtggcgaaataaatgctc

SEQ ID NO: 4492019 - DNA, 25 bp, Homo sapien
ggcgaaataaatgctcgcaggcaca

SEQ ID NO: 4492020 - DNA, 25 bp, Homo sapien
caaacgtcgtgaggacttcagctct

SEQ ID NO: 4492021 - DNA, 25 bp, Homo sapien
cacagagggcaaacgtcgtgaggac

SEQ ID NO: 4492022 - DNA, 25 bp, Homo sapien
ggcaaatccacagagggcaaacgtc

SEQ ID NO: 4492023 - DNA, 25 bp, Homo sapien
gatcccaatggagctgaaattggca

SEQ ID NO: 4492024 - DNA, 25 bp, Homo sapien
gcactatctgggagaagtcgctctt

SEQ ID NO: 4492025 - DNA, 25 bp, Homo sapien
gaagagcgcccggagcactatctgg

SEQ ID NO: 4492026 - DNA, 25 bp, Homo sapien
cggagcactatctgggagaagtcgc

SEQ ID NO: 4492027 - DNA, 25 bp, Homo sapien
agtcgctcttccgttgggggaccat

SEQ ID NO: 4492028 - DNA, 25 bp, Homo sapien
aagagggacatgcagtcaacttcag

SEQ ID NO: 4492029 - DNA, 25 bp, Homo sapien
gggacatgcagtcaacttcagcccc

SEQ ID NO: 4492030 - DNA, 25 bp, Homo sapien
gagggacatgcagtcaacttcagcc

SEQ ID NO: 4492031 - DNA, 25 bp, Homo sapien
gggtcgtgttcaagagggacatgca

SEQ ID NO: 4492032 - DNA, 25 bp, Homo sapien
ctcaccctggtaccaaaggcatccc

SEQ ID NO: 4492033 - DNA, 25 bp, Homo sapien
tccccattagctgcagccgtaacat

SEQ ID NO: 4492034 - DNA, 25 bp, Homo sapien
tagctgcagccgtaacatttctacc

SEQ ID NO: 4492035 - DNA, 25 bp, Homo sapien
ggcattctgtctatcactgtgggtg

SEQ ID NO: 4492036 - DNA, 25 bp, Homo sapien
caccgggaacactgtttcaagtctc

SEQ ID NO: 4492037 - DNA, 25 bp, Homo sapien
ttcaagtctctggtccacccttcct

SEQ ID NO: 4492038 - DNA, 25 bp, Homo sapien
tcctccattggtcctcgagccttca

SEQ ID NO: 4492039 - DNA, 25 bp, Homo sapien
caggctgtgcaacaccgggaacact

SEQ ID NO: 4492040 - DNA, 25 bp, Homo sapien
aaaccgacagcagttgtccagggcc

SEQ ID NO: 4492041 - DNA, 25 bp, Homo sapien
taaaaccgacagcagttgtccaggg

SEQ ID NO: 4492042 - DNA, 25 bp, Homo sapien
tcgtgtggttgtaaaaccgacagca

SEQ ID NO: 4492043 - DNA, 25 bp, Homo sapien
tgtgcacagatcgtgtggttgtaaa

SEQ ID NO: 4492044 - DNA, 25 bp, Homo sapien
aattgtgggattgagctgggtctaa

SEQ ID NO: 4492045 - DNA, 25 bp, Homo sapien
agaacagccctcagaagcgcagaag

SEQ ID NO: 4492046 - DNA, 25 bp, Homo sapien
tccatgaacccttcccaattgtggg

SEQ ID NO: 4492047 - DNA, 25 bp, Homo sapien
gcagaagcacaagcatgttctgtcc

SEQ ID NO: 4492048 - DNA, 25 bp, Homo sapien
ggaggctttggtgtgcagcccacaa

SEQ ID NO: 4492049 - DNA, 25 bp, Homo sapien
tggttccaaacctagtccatcatgg

SEQ ID NO: 4492050 - DNA, 25 bp, Homo sapien
tgtgccatgggacctcagtttggga

SEQ ID NO: 4492051 - DNA, 25 bp, Homo sapien
ccacagagagatcctagtgcctagg

SEQ ID NO: 4492052 - DNA, 25 bp, Homo sapien
ggggtgagggtgtagggccccagca

SEQ ID NO: 4492053 - DNA, 25 bp, Homo sapien
caagggcagggtgcatcgcaggtcc

SEQ ID NO: 4492054 - DNA, 25 bp, Homo sapien
cacaagggcagggtgcatcgcaggt

SEQ ID NO: 4492055 - DNA, 25 bp, Homo sapien
acaagggcagggtgcatcgcaggtc

SEQ ID NO: 4492056 - DNA, 25 bp, Homo sapien
cagagacagggttcaatccaagcgc

SEQ ID NO: 4492057 - DNA, 25 bp, Homo sapien
ccaggcaaggtaggaacttgttgca

SEQ ID NO: 4492058 - DNA, 25 bp, Homo sapien
aatggaaagcaacctccaggcaagg

SEQ ID NO: 4492059 - DNA, 25 bp, Homo sapien
tctcaagtgtgggacaatcgcctgg

SEQ ID NO: 4492060 - DNA, 25 bp, Homo sapien
gctccaagcagtccttgtgggatca

SEQ ID NO: 4492061 - DNA, 25 bp, Homo sapien
ggaaagatgtctgtatagagagcag

SEQ ID NO: 4492062 - DNA, 25 bp, Homo sapien
gggacctgagaagcctgtccttctt

SEQ ID NO: 4492063 - DNA, 25 bp, Homo sapien
gcctgtgtgaggatgagaaaactgc

SEQ ID NO: 4492064 - DNA, 25 bp, Homo sapien
tcagctgggacagttgacctggtgc

SEQ ID NO: 4492065 - DNA, 25 bp, Homo sapien
tattccagatgcttcacggtcagac

SEQ ID NO: 4492066 - DNA, 25 bp, Homo sapien
cacttgggctatgatgacttgcagg

SEQ ID NO: 4492067 - DNA, 25 bp, Homo sapien
tatgctctcggattcactgtctcag

SEQ ID NO: 4492068 - DNA, 25 bp, Homo sapien
ttccactgctccgtgaggaactgct

SEQ ID NO: 4492069 - DNA, 25 bp, Homo sapien
ctgctccgtgaggaactgctgtgga

SEQ ID NO: 4492070 - DNA, 25 bp, Homo sapien
gtggggtcagccacagtcccgctga

SEQ ID NO: 4492071 - DNA, 25 bp, Homo sapien
cacagtcccgctgaaccaaagaaac

SEQ ID NO: 4492072 - DNA, 25 bp, Homo sapien
aaggcagtaggatcatttaaggcca

SEQ ID NO: 4492073 - DNA, 25 bp, Homo sapien
agccaaggcagtaggatcatttaag

SEQ ID NO: 4492074 - DNA, 25 bp, Homo sapien
gaagccaaggcagtaggatcattta

SEQ ID NO: 4492075 - DNA, 25 bp, Homo sapien
gggaagccaaggcagtaggatcatt

SEQ ID NO: 4492076 - DNA, 25 bp, Homo sapien
tacaatggctgatagacaggctcgg

SEQ ID NO: 4492077 - DNA, 25 bp, Homo sapien
tctataaagagtcaacgaaggctgg

SEQ ID NO: 4492078 - DNA, 25 bp, Homo sapien
taggtgctgccgttgtgaatcccaa

SEQ ID NO: 4492079 - DNA, 25 bp, Homo sapien
taaagatcctcagctatgggtcaca

SEQ ID NO: 4492080 - DNA, 25 bp, Homo sapien
ctgtggacaacccagccactgtgct

SEQ ID NO: 4492081 - DNA, 25 bp, Homo sapien
cagctgatccagaagatcagagagg

SEQ ID NO: 4492082 - DNA, 25 bp, Homo sapien
tgatccagaagatcagagagggctg

SEQ ID NO: 4492083 - DNA, 25 bp, Homo sapien
tggtgatgccagcatctgtggacaa

SEQ ID NO: 4492084 - DNA, 25 bp, Homo sapien
cctgtggcacttgacttgaggaaat

SEQ ID NO: 4492085 - DNA, 25 bp, Homo sapien
caccaagtcctgtggcacttgactt

SEQ ID NO: 4492086 - DNA, 25 bp, Homo sapien
gactgccaccaagtcctgtggcact

SEQ ID NO: 4492087 - DNA, 25 bp, Homo sapien
gtggcacttgacttgaggaaatctc

SEQ ID NO: 4492088 - DNA, 25 bp, Homo sapien
tagaaactggaacgcagatgttggg

SEQ ID NO: 4492089 - DNA, 25 bp, Homo sapien
taagagcaagaaacacgttactgga

SEQ ID NO: 4492090 - DNA, 25 bp, Homo sapien
tcaaagatgcctgggaatcaactca

SEQ ID NO: 4492091 - DNA, 25 bp, Homo sapien
gataacatcattagttgcaggtgac

SEQ ID NO: 4492092 - DNA, 25 bp, Homo sapien
tgaagcacgaaaacactcctcaggg

SEQ ID NO: 4492093 - DNA, 25 bp, Homo sapien
gcatttatttccagctgagagcctc

SEQ ID NO: 4492094 - DNA, 25 bp, Homo sapien
gactcggcaggtgtacttttgaata

SEQ ID NO: 4492095 - DNA, 25 bp, Homo sapien
gagcctccaagatacttaacaatga

SEQ ID NO: 4492096 - DNA, 25 bp, Homo sapien
ctcatgaacaatcccagtactgctg

SEQ ID NO: 4492097 - DNA, 25 bp, Homo sapien
caggtgtctagagggctcatgaaca

SEQ ID NO: 4492098 - DNA, 25 bp, Homo sapien
tagagggctcatgaacaatcccagt

SEQ ID NO: 4492099 - DNA, 25 bp, Homo sapien
catgaacaatcccagtactgctgga

SEQ ID NO: 4492100 - DNA, 25 bp, Homo sapien
gaaagctgtaactaatttccagttc

SEQ ID NO: 4492101 - DNA, 25 bp, Homo sapien
cctctctgttcccggaaagctgtaa

SEQ ID NO: 4492102 - DNA, 25 bp, Homo sapien
cagttctgcaattttgggaccctag

SEQ ID NO: 4492103 - DNA, 25 bp, Homo sapien
ttgggaccctagacttagagacctg

SEQ ID NO: 4492104 - DNA, 25 bp, Homo sapien
gctccaagcagctctagtcctctcg

SEQ ID NO: 4492105 - DNA, 25 bp, Homo sapien
ctcggcgtcccgcctcccttgttgg

SEQ ID NO: 4492106 - DNA, 25 bp, Homo sapien
cctcccctcctaggcaggacctcgg

SEQ ID NO: 4492107 - DNA, 25 bp, Homo sapien
aagcagctctagtcctctcggccct

SEQ ID NO: 4492108 - DNA, 25 bp, Homo sapien
tgctgtcgcgctgggactgcagcac

SEQ ID NO: 4492109 - DNA, 25 bp, Homo sapien
taacccgagagcacgttactggcga

SEQ ID NO: 4492110 - DNA, 25 bp, Homo sapien
cagcacaggttcaggtgccgggtcc

SEQ ID NO: 4492111 - DNA, 25 bp, Homo sapien
ttactggcgaaactgccccgaacca

SEQ ID NO: 4492112 - DNA, 25 bp, Homo sapien
acgtatcctgtagcgggctgcctcg

SEQ ID NO: 4492113 - DNA, 25 bp, Homo sapien
cgtccatcacgtatcctgtagcggg

SEQ ID NO: 4492114 - DNA, 25 bp, Homo sapien
gtctctgggcgtccatcacgtatcc

SEQ ID NO: 4492115 - DNA, 25 bp, Homo sapien
tcccggtttgcggagaccctggcgc

SEQ ID NO: 4492116 - DNA, 25 bp, Homo sapien
ttggtggctggggctcctcccccac

SEQ ID NO: 4492117 - DNA, 25 bp, Homo sapien
tcttggtggctggggctcctccccc

SEQ ID NO: 4492118 - DNA, 25 bp, Homo sapien
ttcttggtggctggggctcctcccc

SEQ ID NO: 4492119 - DNA, 25 bp, Homo sapien
cttggtggctggggctcctccccca

SEQ ID NO: 4492120 - DNA, 25 bp, Homo sapien
ctccggctccgtgatccgggccggg

SEQ ID NO: 4492121 - DNA, 25 bp, Homo sapien
ttgctggcggtacggctccggctcc

SEQ ID NO: 4492122 - DNA, 25 bp, Homo sapien
ttttgccggcagcgtgccgcgccga

SEQ ID NO: 4492123 - DNA, 25 bp, Homo sapien
cgggccgggttttgccggcagcgtg

SEQ ID NO: 4492124 - DNA, 25 bp, Homo sapien
gaagcgcagaaacggctgcgcgcac

SEQ ID NO: 4492125 - DNA, 25 bp, Homo sapien
cgtcgagaagcgcagaaacggctgc

SEQ ID NO: 4492126 - DNA, 25 bp, Homo sapien
gagaagcgcagaaacggctgcgcgc

SEQ ID NO: 4492127 - DNA, 25 bp, Homo sapien
tcgagaagcgcagaaacggctgcgc

SEQ ID NO: 4492128 - DNA, 25 bp, Homo sapien
aggagcggctgagtccacgccgcgc

SEQ ID NO: 4492129 - DNA, 25 bp, Homo sapien
agtccacgccgcgcgagccacgctg

SEQ ID NO: 4492130 - DNA, 25 bp, Homo sapien
cacgccgcgcgagccacgctgccct

SEQ ID NO: 4492131 - DNA, 25 bp, Homo sapien
caggagcggctgagtccacgccgcg

SEQ ID NO: 4492132 - DNA, 25 bp, Homo sapien
gatctcgcgtcaggaaacgcggccg

SEQ ID NO: 4492133 - DNA, 25 bp, Homo sapien
cgggtagccgcgatccggtcagcaa

SEQ ID NO: 4492134 - DNA, 25 bp, Homo sapien
gggcgccgtgtcatcgccgcctggg

SEQ ID NO: 4492135 - DNA, 25 bp, Homo sapien
cgccccttttatcgcggtgcgggcg

SEQ ID NO: 4492136 - DNA, 25 bp, Homo sapien
ttgccgctgccgtcgcgaagctccg

SEQ ID NO: 4492137 - DNA, 25 bp, Homo sapien
caggcgctcggaaatgtggatgctc

SEQ ID NO: 4492138 - DNA, 25 bp, Homo sapien
cggccgtcttctggccctgcgggag

SEQ ID NO: 4492139 - DNA, 25 bp, Homo sapien
gctaggcgcgtcctcggccaccagg

SEQ ID NO: 4492140 - DNA, 25 bp, Homo sapien
gacacaggcggcgtcctaatcgcaa

SEQ ID NO: 4492141 - DNA, 25 bp, Homo sapien
gatgtgtccaaaaaaccgacgccgc

SEQ ID NO: 4492142 - DNA, 25 bp, Homo sapien
ccgctccgggagtcggatgtgtcca

SEQ ID NO: 4492143 - DNA, 25 bp, Homo sapien
taatcgcaaccctaggaaatcaggg

SEQ ID NO: 4492144 - DNA, 25 bp, Homo sapien
gaggcttacaagacacctaggtgaa

SEQ ID NO: 4492145 - DNA, 25 bp, Homo sapien
taacggcactgcgatagcacaagag

SEQ ID NO: 4492146 - DNA, 25 bp, Homo sapien
gagcaccttgagttagtaagcctaa

SEQ ID NO: 4492147 - DNA, 25 bp, Homo sapien
gaattttaggacacccaatccacca

SEQ ID NO: 4492148 - DNA, 25 bp, Homo sapien
tctatttctacttacctggcctggg

SEQ ID NO: 4492149 - DNA, 25 bp, Homo sapien
gggaaatctactctgctcaacaggg

SEQ ID NO: 4492150 - DNA, 25 bp, Homo sapien
gcctgggtggattttcaacttgaca

SEQ ID NO: 4492151 - DNA, 25 bp, Homo sapien
ttattccctgggtacagtgctctga

SEQ ID NO: 4492152 - DNA, 25 bp, Homo sapien
tgctgatgtgccaccagcgctttgg

SEQ ID NO: 4492153 - DNA, 25 bp, Homo sapien
gatgtgccaccagcgctttgggtta

SEQ ID NO: 4492154 - DNA, 25 bp, Homo sapien
tgggaactgctgatgtgccaccagc

SEQ ID NO: 4492155 - DNA, 25 bp, Homo sapien
ggaactgctgatgtgccaccagcgc

SEQ ID NO: 4492156 - DNA, 25 bp, Homo sapien
aaaggagtatgataggtagaagaat

SEQ ID NO: 4492157 - DNA, 25 bp, Homo sapien
aaggagtatgataggtagaagaatg

SEQ ID NO: 4492158 - DNA, 25 bp, Homo sapien
aaaaggagtatgataggtagaagaa

SEQ ID NO: 4492159 - DNA, 25 bp, Homo sapien
aaaaaggagtatgataggtagaaga

SEQ ID NO: 4492160 - DNA, 25 bp, Homo sapien
tcctggagggcaatttaacaatatt

SEQ ID NO: 4492161 - DNA, 25 bp, Homo sapien
gaccacaaggcagggtaaagtagtg

SEQ ID NO: 4492162 - DNA, 25 bp, Homo sapien
tgaactactgagacatgaaacatag

SEQ ID NO: 4492163 - DNA, 25 bp, Homo sapien
acataacgcttagggaaagaagtct

SEQ ID NO: 4492164 - DNA, 25 bp, Homo sapien
gctaaggcaggagtatcctctgagc

SEQ ID NO: 4492165 - DNA, 25 bp, Homo sapien
ggctaaggcaggagtatcctctgag

SEQ ID NO: 4492166 - DNA, 25 bp, Homo sapien
ggcatgtgccactatacccgcctaa

SEQ ID NO: 4492167 - DNA, 25 bp, Homo sapien
tgaacttacgacctcaggtggtttg

SEQ ID NO: 4492168 - DNA, 25 bp, Homo sapien
ttacgacctcaggtggtttgcccgc

SEQ ID NO: 4492169 - DNA, 25 bp, Homo sapien
atgtgccactatacccgcctaattt

SEQ ID NO: 4492170 - DNA, 25 bp, Homo sapien
tctgcttgcagggtagagatctcct

SEQ ID NO: 4492171 - DNA, 25 bp, Homo sapien
cgaggcattcagtgtgtgaggcaca

SEQ ID NO: 4492172 - DNA, 25 bp, Homo sapien
cattggcaaggaaactgcaccgtca

SEQ ID NO: 4492173 - DNA, 25 bp, Homo sapien
tagctatgggacaggtacacttctc

SEQ ID NO: 4492174 - DNA, 25 bp, Homo sapien
aactgtcctacagcagaccacagga

SEQ ID NO: 4492175 - DNA, 25 bp, Homo sapien
gatccctcctggagttcaacaagga

SEQ ID NO: 4492176 - DNA, 25 bp, Homo sapien
tctgggtcctcaaggccatagtgaa

SEQ ID NO: 4492177 - DNA, 25 bp, Homo sapien
tgaagccacttcaacaacctcagat

SEQ ID NO: 4492178 - DNA, 25 bp, Homo sapien
gctccaggccaataaaggtgaaaga

SEQ ID NO: 4492179 - DNA, 25 bp, Homo sapien
tcccttggtctggttatgtaagcca

SEQ ID NO: 4492180 - DNA, 25 bp, Homo sapien
gaggccaggagctactgatggacat

SEQ ID NO: 4492181 - DNA, 25 bp, Homo sapien
aagcccctagataaccacaagatgg

SEQ ID NO: 4492182 - DNA, 25 bp, Homo sapien
ttgcaactatcctgttctgtgaaag

SEQ ID NO: 4492183 - DNA, 25 bp, Homo sapien
gtgaaagttgttgcccatcgcagag

SEQ ID NO: 4492184 - DNA, 25 bp, Homo sapien
catcgcagaggtcgtccactggctg

SEQ ID NO: 4492185 - DNA, 25 bp, Homo sapien
ccctcattgcaactatcctgttctg

SEQ ID NO: 4492186 - DNA, 25 bp, Homo sapien
aaagtagtattaattcttatgctga

SEQ ID NO: 4492187 - DNA, 25 bp, Homo sapien
ccagtgcagggacagctattgttct

SEQ ID NO: 4492188 - DNA, 25 bp, Homo sapien
gggccttggctgaaccccagtgcag

SEQ ID NO: 4492189 - DNA, 25 bp, Homo sapien
tatgctgaaaaagcgttttggggcc

SEQ ID NO: 4492190 - DNA, 25 bp, Homo sapien
gaaacaaaacgagagagggcagtcc

SEQ ID NO: 4492191 - DNA, 25 bp, Homo sapien
cagtcctaatgctgaggttgtcccc

SEQ ID NO: 4492192 - DNA, 25 bp, Homo sapien
catatttttcaagacggaggtgcta

SEQ ID NO: 4492193 - DNA, 25 bp, Homo sapien
gcaatagtccctaaatacttggtga

SEQ ID NO: 4492194 - DNA, 25 bp, Homo sapien
gctgaatcgtgttgagaagctccac

SEQ ID NO: 4492195 - DNA, 25 bp, Homo sapien
tgaacgtacctgtataaccagcacc

SEQ ID NO: 4492196 - DNA, 25 bp, Homo sapien
gaagcaacattaccggcatactaga

SEQ ID NO: 4492197 - DNA, 25 bp, Homo sapien
ccagtaccactgtgctgaattctaa

SEQ ID NO: 4492198 - DNA, 25 bp, Homo sapien
aaacttgtacctcccatgggcccag

SEQ ID NO: 4492199 - DNA, 25 bp, Homo sapien
tgtacctcccatgggcccagtgtca

SEQ ID NO: 4492200 - DNA, 25 bp, Homo sapien
gaaaaaggtcagaagttgtgtgaag

SEQ ID NO: 4492201 - DNA, 25 bp, Homo sapien
aaaaggtcagaagttgtgtgaagga

SEQ ID NO: 4492202 - DNA, 25 bp, Homo sapien
cactttgaatatcctcagaccctaa

SEQ ID NO: 4492203 - DNA, 25 bp, Homo sapien
tagactgcctttgcctagtcacaaa

SEQ ID NO: 4492204 - DNA, 25 bp, Homo sapien
aactaaaattgtctccataggtcag

SEQ ID NO: 4492205 - DNA, 25 bp, Homo sapien
acaatgggtatgatcttaggacaac

SEQ ID NO: 4492206 - DNA, 25 bp, Homo sapien
gataacctaccacagtccggagaaa

SEQ ID NO: 4492207 - DNA, 25 bp, Homo sapien
tttacattcctgctaacagcatgtg

SEQ ID NO: 4492208 - DNA, 25 bp, Homo sapien
tacaatggacattctagtagtgact

SEQ ID NO: 4492209 - DNA, 25 bp, Homo sapien
tcattcactcaacacgatgcttatg

SEQ ID NO: 4492210 - DNA, 25 bp, Homo sapien
tctggcccgagtctcaaggtgttcc

SEQ ID NO: 4492211 - DNA, 25 bp, Homo sapien
tcagcatcaaaaaggcgtgagactc

SEQ ID NO: 4492212 - DNA, 25 bp, Homo sapien
gagactcactgggaccaaacctgaa

SEQ ID NO: 4492213 - DNA, 25 bp, Homo sapien
taaagactccagtgccttacaaaga

SEQ ID NO: 4492214 - DNA, 25 bp, Homo sapien
gagatagcatccacaaatccggaac

SEQ ID NO: 4492215 - DNA, 25 bp, Homo sapien
ccagaccacatggagagtctacatg

SEQ ID NO: 4492216 - DNA, 25 bp, Homo sapien
cccttgaatctgtgcaggcttgaga

SEQ ID NO: 4492217 - DNA, 25 bp, Homo sapien
gctgattccactagccttcaaggca

SEQ ID NO: 4492218 - DNA, 25 bp, Homo sapien
ggtccacagtccaacaaggccttca

SEQ ID NO: 4492219 - DNA, 25 bp, Homo sapien
tggtccacagtccaacaaggccttc

SEQ ID NO: 4492220 - DNA, 25 bp, Homo sapien
gtccacagtccaacaaggccttcag

SEQ ID NO: 4492221 - DNA, 25 bp, Homo sapien
tggcaaagattggactaaaacttta

SEQ ID NO: 4492222 - DNA, 25 bp, Homo sapien
ctgcaaccctctttagaacagagca

SEQ ID NO: 4492223 - DNA, 25 bp, Homo sapien
cagtggaagccactagatgttcctt

SEQ ID NO: 4492224 - DNA, 25 bp, Homo sapien
acagcagtggaagccactagatgtt

SEQ ID NO: 4492225 - DNA, 25 bp, Homo sapien
gcaaccctctttagaacagagcaga

SEQ ID NO: 4492226 - DNA, 25 bp, Homo sapien
tcagatatctcccaatttcttcaaa

SEQ ID NO: 4492227 - DNA, 25 bp, Homo sapien
cagatatctcccaatttcttcaaag

SEQ ID NO: 4492228 - DNA, 25 bp, Homo sapien
caatttcttcaaagatggagttttc

SEQ ID NO: 4492229 - DNA, 25 bp, Homo sapien
gaggaaggcagttaagtcttcccat

SEQ ID NO: 4492230 - DNA, 25 bp, Homo sapien
tgactgctgttaaaagtagcatcca

SEQ ID NO: 4492231 - DNA, 25 bp, Homo sapien
ctgactgctgttaaaagtagcatcc

SEQ ID NO: 4492232 - DNA, 25 bp, Homo sapien
gctaatttttactttgtgttctata

SEQ ID NO: 4492233 - DNA, 25 bp, Homo sapien
ttttactttgtgttctatagaaatg

SEQ ID NO: 4492234 - DNA, 25 bp, Homo sapien
taatttttactttgtgttctataga

SEQ ID NO: 4492235 - DNA, 25 bp, Homo sapien
ctttgtgttctatagaaatgaggtc

SEQ ID NO: 4492236 - DNA, 25 bp, Homo sapien
taaataaacgctgattccctctgtg

SEQ ID NO: 4492237 - DNA, 25 bp, Homo sapien
ggactgaaaaccagctccaggtgat

SEQ ID NO: 4492238 - DNA, 25 bp, Homo sapien
gaagatggtccaagaggtccacagg

SEQ ID NO: 4492239 - DNA, 25 bp, Homo sapien
tctagtaattatgggccactggctc

SEQ ID NO: 4492240 - DNA, 25 bp, Homo sapien
ggggccaaactgcacatcagctact

SEQ ID NO: 4492241 - DNA, 25 bp, Homo sapien
gccaaactgcacatcagctactgct

SEQ ID NO: 4492242 - DNA, 25 bp, Homo sapien
gggccaaactgcacatcagctactg

SEQ ID NO: 4492243 - DNA, 25 bp, Homo sapien
caaactgcacatcagctactgctac

SEQ ID NO: 4492244 - DNA, 25 bp, Homo sapien
ctgaagttgatcttgatgaaatctc

SEQ ID NO: 4492245 - DNA, 25 bp, Homo sapien
tgaagttgatcttgatgaaatctca

SEQ ID NO: 4492246 - DNA, 25 bp, Homo sapien
gaagttgatcttgatgaaatctcat

SEQ ID NO: 4492247 - DNA, 25 bp, Homo sapien
tgtacacttaaaccctgctttttca

SEQ ID NO: 4492248 - DNA, 25 bp, Homo sapien
tgccctgcagaatccattacattgg

SEQ ID NO: 4492249 - DNA, 25 bp, Homo sapien
gaatccattacattggttatcttct

SEQ ID NO: 4492250 - DNA, 25 bp, Homo sapien
tgtcatgatgtttgtccaggaaaca

SEQ ID NO: 4492251 - DNA, 25 bp, Homo sapien
tgtcctcctcttaggtctgggcggt

SEQ ID NO: 4492252 - DNA, 25 bp, Homo sapien
aacaagcacagttcgggcttggaga

SEQ ID NO: 4492253 - DNA, 25 bp, Homo sapien
tgggcggtagatcacatcaacaagc

SEQ ID NO: 4492254 - DNA, 25 bp, Homo sapien
cctcttaggtctgggcggtagatca

SEQ ID NO: 4492255 - DNA, 25 bp, Homo sapien
aaagcagctctagcgaccagccagt

SEQ ID NO: 4492256 - DNA, 25 bp, Homo sapien
cattcttgcctgtagggattcgggc

SEQ ID NO: 4492257 - DNA, 25 bp, Homo sapien
taacaacacatgcagaataggccag

SEQ ID NO: 4492258 - DNA, 25 bp, Homo sapien
tctaccactgtagcacaaaggcagt

SEQ ID NO: 4492259 - DNA, 25 bp, Homo sapien
cagaggaagacgacttatgttggag

SEQ ID NO: 4492260 - DNA, 25 bp, Homo sapien
agacgacttatgttggagagggact

SEQ ID NO: 4492261 - DNA, 25 bp, Homo sapien
cagacccagaggaagacgacttatg

SEQ ID NO: 4492262 - DNA, 25 bp, Homo sapien
aagacgacttatgttggagagggac

SEQ ID NO: 4492263 - DNA, 25 bp, Homo sapien
ggggcaaactcccactcagtggact

SEQ ID NO: 4492264 - DNA, 25 bp, Homo sapien
tgggggcaaactcccactcagtgga

SEQ ID NO: 4492265 - DNA, 25 bp, Homo sapien
tttgggggcaaactcccactcagtg

SEQ ID NO: 4492266 - DNA, 25 bp, Homo sapien
gggcaaactcccactcagtggactg

SEQ ID NO: 4492267 - DNA, 25 bp, Homo sapien
ctgcgtactacaccaacaataactg

SEQ ID NO: 4492268 - DNA, 25 bp, Homo sapien
caacaataactgtgttttctgagag

SEQ ID NO: 4492269 - DNA, 25 bp, Homo sapien
aacaataactgtgttttctgagagt

SEQ ID NO: 4492270 - DNA, 25 bp, Homo sapien
accaacaataactgtgttttctgag

SEQ ID NO: 4492271 - DNA, 25 bp, Homo sapien
tagtttttatcaattacatctcacc

SEQ ID NO: 4492272 - DNA, 25 bp, Homo sapien
taatacttcgttatgtaatgagtac

SEQ ID NO: 4492273 - DNA, 25 bp, Homo sapien
tacacaaactacattaatagcagga

SEQ ID NO: 4492274 - DNA, 25 bp, Homo sapien
ggaatacaggagtgttcatatatct

SEQ ID NO: 4492275 - DNA, 25 bp, Homo sapien
ggcattacggacaactcttctctat

SEQ ID NO: 4492276 - DNA, 25 bp, Homo sapien
aaaggcattacggacaactcttctc

SEQ ID NO: 4492277 - DNA, 25 bp, Homo sapien
aatgaaaggcattacggacaactct

SEQ ID NO: 4492278 - DNA, 25 bp, Homo sapien
tgaaaggcattacggacaactcttc

SEQ ID NO: 4492279 - DNA, 25 bp, Homo sapien
aaagcttttgctgggtactgaactg

SEQ ID NO: 4492280 - DNA, 25 bp, Homo sapien
tccagaatccttgaactagcttaaa

SEQ ID NO: 4492281 - DNA, 25 bp, Homo sapien
tatgtttagatgaccttagcaggca

SEQ ID NO: 4492282 - DNA, 25 bp, Homo sapien
taagtacgattgaggcaggttctcc

SEQ ID NO: 4492283 - DNA, 25 bp, Homo sapien
tggaaaattttcagctagtaactct

SEQ ID NO: 4492284 - DNA, 25 bp, Homo sapien
tctgtgctacatgtgacttactaag

SEQ ID NO: 4492285 - DNA, 25 bp, Homo sapien
tctactttggatatgtcagaattca

SEQ ID NO: 4492286 - DNA, 25 bp, Homo sapien
caactaaaacttcacacactatcct

SEQ ID NO: 4492287 - DNA, 25 bp, Homo sapien
gacatagtgcttgtgccactccagg

SEQ ID NO: 4492288 - DNA, 25 bp, Homo sapien
gttcctccgcaggtaagattctggg

SEQ ID NO: 4492289 - DNA, 25 bp, Homo sapien
tggacaggaacccacttctgattgg

SEQ ID NO: 4492290 - DNA, 25 bp, Homo sapien
gagtatgctagacctgctgtccaca

SEQ ID NO: 4492291 - DNA, 25 bp, Homo sapien
caggccatgatgttggggttttcta

SEQ ID NO: 4492292 - DNA, 25 bp, Homo sapien
ggagcagttcattgtagcaggccat

SEQ ID NO: 4492293 - DNA, 25 bp, Homo sapien
agcagttcattgtagcaggccatga

SEQ ID NO: 4492294 - DNA, 25 bp, Homo sapien
ctggagcagttcattgtagcaggcc

SEQ ID NO: 4492295 - DNA, 25 bp, Homo sapien
tgtcacctaccagagataactaatg

SEQ ID NO: 4492296 - DNA, 25 bp, Homo sapien
gactgtcttgggcacatacaaatga

SEQ ID NO: 4492297 - DNA, 25 bp, Homo sapien
aaatgaccccttattagacatccag

SEQ ID NO: 4492298 - DNA, 25 bp, Homo sapien
gaatagttgaacacccaaggaagaa

SEQ ID NO: 4492299 - DNA, 25 bp, Homo sapien
catgagattggaacgtagcttaact

SEQ ID NO: 4492300 - DNA, 25 bp, Homo sapien
tatctcttgtgaaccacttgaacat

SEQ ID NO: 4492301 - DNA, 25 bp, Homo sapien
gaggatattaacctaatgtctgtcc

SEQ ID NO: 4492302 - DNA, 25 bp, Homo sapien
cattttgcgggtaggacatgagatt

SEQ ID NO: 4492303 - DNA, 25 bp, Homo sapien
aacggtcttcgcttgtaatttcaat

SEQ ID NO: 4492304 - DNA, 25 bp, Homo sapien
ctgtataaaacggtcttcgcttgta

SEQ ID NO: 4492305 - DNA, 25 bp, Homo sapien
tgtataaaacggtcttcgcttgtaa

SEQ ID NO: 4492306 - DNA, 25 bp, Homo sapien
gtcttcgcttgtaatttcaattgca

SEQ ID NO: 4492307 - DNA, 25 bp, Homo sapien
taacccacgaagaattctggagccc

SEQ ID NO: 4492308 - DNA, 25 bp, Homo sapien
gagcttctgcttgggtgatacccgg

SEQ ID NO: 4492309 - DNA, 25 bp, Homo sapien
aagggatgtgcacagcgccaaacca

SEQ ID NO: 4492310 - DNA, 25 bp, Homo sapien
gaagccataagcacataacccacga

SEQ ID NO: 4492311 - DNA, 25 bp, Homo sapien
gttgtttcaaatgcaggatttgcat

SEQ ID NO: 4492312 - DNA, 25 bp, Homo sapien
tgttgtttcaaatgcaggatttgca

SEQ ID NO: 4492313 - DNA, 25 bp, Homo sapien
ttgtttcaaatgcaggatttgcata

SEQ ID NO: 4492314 - DNA, 25 bp, Homo sapien
ttaattcacctgactgatagcccat

SEQ ID NO: 4492315 - DNA, 25 bp, Homo sapien
ttcatttataggcacttctcctaac

SEQ ID NO: 4492316 - DNA, 25 bp, Homo sapien
gaatttatagtatcgagcaagtcag

SEQ ID NO: 4492317 - DNA, 25 bp, Homo sapien
ttgcctatcctgatgcatgaattta

SEQ ID NO: 4492318 - DNA, 25 bp, Homo sapien
tagtatcgagcaagtcagccttttt

SEQ ID NO: 4492319 - DNA, 25 bp, Homo sapien
ttaacgaggcttggagaaatcttgg

SEQ ID NO: 4492320 - DNA, 25 bp, Homo sapien
taacattccctatacttccctgggc

SEQ ID NO: 4492321 - DNA, 25 bp, Homo sapien
gattacctggtagtactcaatgaac

SEQ ID NO: 4492322 - DNA, 25 bp, Homo sapien
gcaaaatggatataacagggataac

SEQ ID NO: 4492323 - DNA, 25 bp, Homo sapien
gggaccattatgtggccactaccgg

SEQ ID NO: 4492324 - DNA, 25 bp, Homo sapien
cactaccggcttctgaggtgaacta

SEQ ID NO: 4492325 - DNA, 25 bp, Homo sapien
gaggatgagataacagccaggacca

SEQ ID NO: 4492326 - DNA, 25 bp, Homo sapien
acaagaccacagcaagagaaccggg

SEQ ID NO: 4492327 - DNA, 25 bp, Homo sapien
aatgacaggtattatcttcacattt

SEQ ID NO: 4492328 - DNA, 25 bp, Homo sapien
caatgacaggtattatcttcacatt

SEQ ID NO: 4492329 - DNA, 25 bp, Homo sapien
tgttgtatattatctccgtttttct

SEQ ID NO: 4492330 - DNA, 25 bp, Homo sapien
attttgttgtatattatctccgttt

SEQ ID NO: 4492331 - DNA, 25 bp, Homo sapien
tggaaggccattctgtgatgacacc

SEQ ID NO: 4492332 - DNA, 25 bp, Homo sapien
caagactgcccagagtatgttggct

SEQ ID NO: 4492333 - DNA, 25 bp, Homo sapien
caagtagagggtcagactgtagcca

SEQ ID NO: 4492334 - DNA, 25 bp, Homo sapien
tcaatatagggagtctaccagtcag

SEQ ID NO: 4492335 - DNA, 25 bp, Homo sapien
caacaaacaatctgctcacggtcac

SEQ ID NO: 4492336 - DNA, 25 bp, Homo sapien
ggcgtctctgtacaagtgacttcag

SEQ ID NO: 4492337 - DNA, 25 bp, Homo sapien
tgcatgttaaccaactgagagcctt

SEQ ID NO: 4492338 - DNA, 25 bp, Homo sapien
cactgaacgtggttagctagatgtc

SEQ ID NO: 4492339 - DNA, 25 bp, Homo sapien
gttgccattgcacactctgataatg

SEQ ID NO: 4492340 - DNA, 25 bp, Homo sapien
ttgttgccattgcacactctgataa

SEQ ID NO: 4492341 - DNA, 25 bp, Homo sapien
cttattgttgccattgcacactctg

SEQ ID NO: 4492342 - DNA, 25 bp, Homo sapien
tattgttgccattgcacactctgat

SEQ ID NO: 4492343 - DNA, 25 bp, Homo sapien
cagactgaacacattcggatatttt

SEQ ID NO: 4492344 - DNA, 25 bp, Homo sapien
gtgtcagactgaacacattcggata

SEQ ID NO: 4492345 - DNA, 25 bp, Homo sapien
ctgtatgagtgtcagactgaacaca

SEQ ID NO: 4492346 - DNA, 25 bp, Homo sapien
gaacacattcggatattttctcagc

SEQ ID NO: 4492347 - DNA, 25 bp, Homo sapien
tgactgcccaccaggacctcacagg

SEQ ID NO: 4492348 - DNA, 25 bp, Homo sapien
gacctcacaggtagagctctccaca

SEQ ID NO: 4492349 - DNA, 25 bp, Homo sapien
caggacctcacaggtagagctctcc

SEQ ID NO: 4492350 - DNA, 25 bp, Homo sapien
ccaccaggacctcacaggtagagct

SEQ ID NO: 4492351 - DNA, 25 bp, Homo sapien
cagcactcagcaggtactcaacaga

SEQ ID NO: 4492352 - DNA, 25 bp, Homo sapien
gcactcagcaggtactcaacagaaa

SEQ ID NO: 4492353 - DNA, 25 bp, Homo sapien
gccagcactcagcaggtactcaaca

SEQ ID NO: 4492354 - DNA, 25 bp, Homo sapien
cactcagcaggtactcaacagaaat

SEQ ID NO: 4492355 - DNA, 25 bp, Homo sapien
ttcagcttcagcaacgctctccaga

SEQ ID NO: 4492356 - DNA, 25 bp, Homo sapien
ggtggtctctaggaatccacctcac

SEQ ID NO: 4492357 - DNA, 25 bp, Homo sapien
atgcttcccgttctccccgccttca

SEQ ID NO: 4492358 - DNA, 25 bp, Homo sapien
tctccagactccctcgtccctctaa

SEQ ID NO: 4492359 - DNA, 25 bp, Homo sapien
atgctgctttctactctgactcctc

SEQ ID NO: 4492360 - DNA, 25 bp, Homo sapien
gtaggactctccataacaggcccac

SEQ ID NO: 4492361 - DNA, 25 bp, Homo sapien
tcgccattctcctgaaactgcatgt

SEQ ID NO: 4492362 - DNA, 25 bp, Homo sapien
ctgtgaacttgtggtgtaggactct

SEQ ID NO: 4492363 - DNA, 25 bp, Homo sapien
ctgcgtccagccctatggtactctt

SEQ ID NO: 4492364 - DNA, 25 bp, Homo sapien
gcgtccagccctatggtactcttct

SEQ ID NO: 4492365 - DNA, 25 bp, Homo sapien
tgcgtccagccctatggtactcttc

SEQ ID NO: 4492366 - DNA, 25 bp, Homo sapien
ttgtagctgcagccaagatgaggag

SEQ ID NO: 4492367 - DNA, 25 bp, Homo sapien
gaggaggacgacagcatttccagga

SEQ ID NO: 4492368 - DNA, 25 bp, Homo sapien
gaggaggaaactgcttgtgcagatg

SEQ ID NO: 4492369 - DNA, 25 bp, Homo sapien
atggatggagtcttgtagctgcagc

SEQ ID NO: 4492370 - DNA, 25 bp, Homo sapien
ttctcagtcaacaaaacctccttgg

SEQ ID NO: 4492371 - DNA, 25 bp, Homo sapien
tgctctatccctgtccaagctcaga

SEQ ID NO: 4492372 - DNA, 25 bp, Homo sapien
taccataaggtagacagaagtcatc

SEQ ID NO: 4492373 - DNA, 25 bp, Homo sapien
ggttctatccttagcccttctcagt

SEQ ID NO: 4492374 - DNA, 25 bp, Homo sapien
ctgtagaaacaaatgataaatcacc

SEQ ID NO: 4492375 - DNA, 25 bp, Homo sapien
tgtagaaacaaatgataaatcacct

SEQ ID NO: 4492376 - DNA, 25 bp, Homo sapien
cgggaggcaacagctttgacgtcta

SEQ ID NO: 4492377 - DNA, 25 bp, Homo sapien
tcagttgcacgggaggcaacagctt

SEQ ID NO: 4492378 - DNA, 25 bp, Homo sapien
gacgtctagtgagccttttctcctg

SEQ ID NO: 4492379 - DNA, 25 bp, Homo sapien
caacagctttgacgtctagtgagcc

SEQ ID NO: 4492380 - DNA, 25 bp, Homo sapien
ggctccatgtgttcaacagtgattt

SEQ ID NO: 4492381 - DNA, 25 bp, Homo sapien
ccaagaattggaggtagacaggatg

SEQ ID NO: 4492382 - DNA, 25 bp, Homo sapien
gaatggagcccattggcaggagtcc

SEQ ID NO: 4492383 - DNA, 25 bp, Homo sapien
tgcaaaccacgatgggatagatctt

SEQ ID NO: 4492384 - DNA, 25 bp, Homo sapien
gggcaggatagaactgagtttgctg

SEQ ID NO: 4492385 - DNA, 25 bp, Homo sapien
gcatgatgaaggggcaggatagaac

SEQ ID NO: 4492386 - DNA, 25 bp, Homo sapien
gcaggatagaactgagtttgctgag

SEQ ID NO: 4492387 - DNA, 25 bp, Homo sapien
aggatagaactgagtttgctgagct

SEQ ID NO: 4492388 - DNA, 25 bp, Homo sapien
aactctgggcacctgtcttgacagc

SEQ ID NO: 4492389 - DNA, 25 bp, Homo sapien
gatgcacaaatcagggcatgcacaa

SEQ ID NO: 4492390 - DNA, 25 bp, Homo sapien
agaaagggatgcacaaatcagggca

SEQ ID NO: 4492391 - DNA, 25 bp, Homo sapien
actctgggcacctgtcttgacagca

SEQ ID NO: 4492392 - DNA, 25 bp, Homo sapien
gaagagtgtcgtctctggctggaaa

SEQ ID NO: 4492393 - DNA, 25 bp, Homo sapien
cctcaattgtcatggaatgtatccg

SEQ ID NO: 4492394 - DNA, 25 bp, Homo sapien
ggtgatgggcgcctcaattgtcatg

SEQ ID NO: 4492395 - DNA, 25 bp, Homo sapien
ttgtcatggaatgtatccgggccat

SEQ ID NO: 4492396 - DNA, 25 bp, Homo sapien
ggcgcctcaattgtcatggaatgta

SEQ ID NO: 4492397 - DNA, 25 bp, Homo sapien
ggagacagaccacaaactgcttcac

SEQ ID NO: 4492398 - DNA, 25 bp, Homo sapien
accttaaaaacagtgggagagccag

SEQ ID NO: 4492399 - DNA, 25 bp, Homo sapien
agaaaatacttgagtttcataacct

SEQ ID NO: 4492400 - DNA, 25 bp, Homo sapien
tcataaccttaaaaacagtgggaga

SEQ ID NO: 4492401 - DNA, 25 bp, Homo sapien
cttaaaaacagtgggagagccaggc

SEQ ID NO: 4492402 - DNA, 25 bp, Homo sapien
tcctgggcagcattgataatattga

SEQ ID NO: 4492403 - DNA, 25 bp, Homo sapien
caaggtcattggcatggggatcatc

SEQ ID NO: 4492404 - DNA, 25 bp, Homo sapien
tgtcacaggcatgggactactttcc

SEQ ID NO: 4492405 - DNA, 25 bp, Homo sapien
agaatttccagcacacggtctaggg

SEQ ID NO: 4492406 - DNA, 25 bp, Homo sapien
ttgactgaaccctacagagccctgc

SEQ ID NO: 4492407 - DNA, 25 bp, Homo sapien
tcaatatctgtttaagtgaataacc

SEQ ID NO: 4492408 - DNA, 25 bp, Homo sapien
gaacagacaggctctagccaagagt

SEQ ID NO: 4492409 - DNA, 25 bp, Homo sapien
gaataacctctgagaaaacaaccaa

SEQ ID NO: 4492410 - DNA, 25 bp, Homo sapien
accaatgcactcaaggctgccctgg

SEQ ID NO: 4492411 - DNA, 25 bp, Homo sapien
tattcattccctgatagtcttcgca

SEQ ID NO: 4492412 - DNA, 25 bp, Homo sapien
cattccctgatagtcttcgcaaacc

SEQ ID NO: 4492413 - DNA, 25 bp, Homo sapien
catattcattccctgatagtcttcg

SEQ ID NO: 4492414 - DNA, 25 bp, Homo sapien
tccctgatagtcttcgcaaaccatc

SEQ ID NO: 4492415 - DNA, 25 bp, Homo sapien
tttccatggcccgagctatccgtgg

SEQ ID NO: 4492416 - DNA, 25 bp, Homo sapien
cgagctatccgtggtgggacatcat

SEQ ID NO: 4492417 - DNA, 25 bp, Homo sapien
gatgggagtgattatattgcttgaa

SEQ ID NO: 4492418 - DNA, 25 bp, Homo sapien
tatcaaagtcccagtattcctcatt

SEQ ID NO: 4492419 - DNA, 25 bp, Homo sapien
tacttgcactagtgggttcctcaaa

SEQ ID NO: 4492420 - DNA, 25 bp, Homo sapien
gggagtttgctcattctgtccttcc

SEQ ID NO: 4492421 - DNA, 25 bp, Homo sapien
ttggacttgctggacccatgccatt

SEQ ID NO: 4492422 - DNA, 25 bp, Homo sapien
tctccaggctaagcttgtaccacct

SEQ ID NO: 4492423 - DNA, 25 bp, Homo sapien
caaccaactctggttccacttcttg

SEQ ID NO: 4492424 - DNA, 25 bp, Homo sapien
aaagtggagattgcttgggctgtgc

SEQ ID NO: 4492425 - DNA, 25 bp, Homo sapien
ccaagtgtttaaggcctgaataggt

SEQ ID NO: 4492426 - DNA, 25 bp, Homo sapien
gaccatgatgcacgggtgagagctg

SEQ ID NO: 4492427 - DNA, 25 bp, Homo sapien
caaagcgagcaaacattttgagacc

SEQ ID NO: 4492428 - DNA, 25 bp, Homo sapien
catgatcttagcgttgactcggagc

SEQ ID NO: 4492429 - DNA, 25 bp, Homo sapien
taattggcttcgataatttgtaacc

SEQ ID NO: 4492430 - DNA, 25 bp, Homo sapien
tcagcagaatgtgtagaattgtggt

SEQ ID NO: 4492431 - DNA, 25 bp, Homo sapien
tctgccaaatgctagtcccgtgata

SEQ ID NO: 4492432 - DNA, 25 bp, Homo sapien
aactaaagtggtttggcatggccca

SEQ ID NO: 4492433 - DNA, 25 bp, Homo sapien
cccagtcaagggagcaacaggtcaa

SEQ ID NO: 4492434 - DNA, 25 bp, Homo sapien
gagatgatgaacctgaccttagagc

SEQ ID NO: 4492435 - DNA, 25 bp, Homo sapien
ttttaagtgcgcaaatagtatggta

SEQ ID NO: 4492436 - DNA, 25 bp, Homo sapien
taactagtttggctagaacttcacc

SEQ ID NO: 4492437 - DNA, 25 bp, Homo sapien
gaagttcaacacattatgtcccagt

SEQ ID NO: 4492438 - DNA, 25 bp, Homo sapien
cagactcttgagatgtatagctaat

SEQ ID NO: 4492439 - DNA, 25 bp, Homo sapien
caggtgttctcaacagataggagtc

SEQ ID NO: 4492440 - DNA, 25 bp, Homo sapien
tgttagtctcacacaagttaaggac

SEQ ID NO: 4492441 - DNA, 25 bp, Homo sapien
tctaagaaaagcatactacgtgagc

SEQ ID NO: 4492442 - DNA, 25 bp, Homo sapien
taggcaccacttacattaactggga

SEQ ID NO: 4492443 - DNA, 25 bp, Homo sapien
ggctgcgatgagtgcagcgacctca

SEQ ID NO: 4492444 - DNA, 25 bp, Homo sapien
cacatcatgaatggtggctgcgatg

SEQ ID NO: 4492445 - DNA, 25 bp, Homo sapien
acaggaaggagttggttctcccagg

SEQ ID NO: 4492446 - DNA, 25 bp, Homo sapien
agtgcagcgacctcatcaattggat

SEQ ID NO: 4492447 - DNA, 25 bp, Homo sapien
taagaccatgtcgataatcccctgg

SEQ ID NO: 4492448 - DNA, 25 bp, Homo sapien
ttgttgacatgctcaaagtgctttg

SEQ ID NO: 4492449 - DNA, 25 bp, Homo sapien
atttctgtggctaagaccatgtcga

SEQ ID NO: 4492450 - DNA, 25 bp, Homo sapien
ctggcgcagtgtccgataatcattc

SEQ ID NO: 4492451 - DNA, 25 bp, Homo sapien
tatcacttcctggtttttatcagtt

SEQ ID NO: 4492452 - DNA, 25 bp, Homo sapien
ttatcacttcctggtttttatcagt

SEQ ID NO: 4492453 - DNA, 25 bp, Homo sapien
tcacttcctggtttttatcagtttc

SEQ ID NO: 4492454 - DNA, 25 bp, Homo sapien
gtttatcacttcctggtttttatca

SEQ ID NO: 4492455 - DNA, 25 bp, Homo sapien
tcggcagggattggacacatcagca

SEQ ID NO: 4492456 - DNA, 25 bp, Homo sapien
tattcttccgaaatgcgtgcagccc

SEQ ID NO: 4492457 - DNA, 25 bp, Homo sapien
ggtccggttctctggagtcctaagc

SEQ ID NO: 4492458 - DNA, 25 bp, Homo sapien
cagcattcgtttgattagggtccgg

SEQ ID NO: 4492459 - DNA, 25 bp, Homo sapien
tatattgagctgtgtcctatgacat

SEQ ID NO: 4492460 - DNA, 25 bp, Homo sapien
cagtatgtgaacatgatatgcctca

SEQ ID NO: 4492461 - DNA, 25 bp, Homo sapien
tcactgtaaagttctggtcatctct

SEQ ID NO: 4492462 - DNA, 25 bp, Homo sapien
tgaatgttaacactgagccttccag

SEQ ID NO: 4492463 - DNA, 25 bp, Homo sapien
tgaagcacactatgccaaaagttat

SEQ ID NO: 4492464 - DNA, 25 bp, Homo sapien
tggactaatatacgcttaaacaacc

SEQ ID NO: 4492465 - DNA, 25 bp, Homo sapien
gaataaactaaacctaacgctagca

SEQ ID NO: 4492466 - DNA, 25 bp, Homo sapien
acttaacatgttatggagctacaga

SEQ ID NO: 4492467 - DNA, 25 bp, Homo sapien
cagaatgtatagaacatccacccaa

SEQ ID NO: 4492468 - DNA, 25 bp, Homo sapien
ggccaactggacctaacagaatgta

SEQ ID NO: 4492469 - DNA, 25 bp, Homo sapien
tagagtttgaacaatgctctaggcc

SEQ ID NO: 4492470 - DNA, 25 bp, Homo sapien
gcatataagcatcaaataccagagt

SEQ ID NO: 4492471 - DNA, 25 bp, Homo sapien
tgacaagtgcatggaacgtccaggg

SEQ ID NO: 4492472 - DNA, 25 bp, Homo sapien
taaaagactgtacaacacctggcac

SEQ ID NO: 4492473 - DNA, 25 bp, Homo sapien
cagccagagacaaaccagagatgcc

SEQ ID NO: 4492474 - DNA, 25 bp, Homo sapien
gagccaggcaagtggtactcaagcc

SEQ ID NO: 4492475 - DNA, 25 bp, Homo sapien
gagcagctcttctagatgggaccct

SEQ ID NO: 4492476 - DNA, 25 bp, Homo sapien
ggaatcgctgcaagatccctgctgt

SEQ ID NO: 4492477 - DNA, 25 bp, Homo sapien
actgaagtctcgtcccactgttggc

SEQ ID NO: 4492478 - DNA, 25 bp, Homo sapien
tgttggccactcacaagacgtgtct

SEQ ID NO: 4492479 - DNA, 25 bp, Homo sapien
aacattatgtgtagtcagccaccgc

SEQ ID NO: 4492480 - DNA, 25 bp, Homo sapien
tcctggcagcctaaggtggcttgtc

SEQ ID NO: 4492481 - DNA, 25 bp, Homo sapien
tctcagaatgaggactactccatgt

SEQ ID NO: 4492482 - DNA, 25 bp, Homo sapien
cagaaaatgtgatcaggagacccca

SEQ ID NO: 4492483 - DNA, 25 bp, Homo sapien
gatttggggatgctgcaggtatttc

SEQ ID NO: 4492484 - DNA, 25 bp, Homo sapien
gctgcaggtatttctgtcaaacact

SEQ ID NO: 4492485 - DNA, 25 bp, Homo sapien
gaagtaatcaatgaaagagatttgg

SEQ ID NO: 4492486 - DNA, 25 bp, Homo sapien
taatcaatgaaagagatttgggatt

SEQ ID NO: 4492487 - DNA, 25 bp, Homo sapien
tcagtcccagaagcagtgagctgca

SEQ ID NO: 4492488 - DNA, 25 bp, Homo sapien
cagaaagcagtatgtagtgtgcccc

SEQ ID NO: 4492489 - DNA, 25 bp, Homo sapien
ccctcaggacgaagatgcacgtgga

SEQ ID NO: 4492490 - DNA, 25 bp, Homo sapien
gccgtggctgactgaagttaaaccc

SEQ ID NO: 4492491 - DNA, 25 bp, Homo sapien
gatgctgcattaaatcaggcaggtc

SEQ ID NO: 4492492 - DNA, 25 bp, Homo sapien
tattcaggaggtggtcggaggttcc

SEQ ID NO: 4492493 - DNA, 25 bp, Homo sapien
cattaaatcaggcaggtctacaaag

SEQ ID NO: 4492494 - DNA, 25 bp, Homo sapien
gcagcttcatttcgtccagtccttt

SEQ ID NO: 4492495 - DNA, 25 bp, Homo sapien
tagtgttcccaagtgagcgattgca

SEQ ID NO: 4492496 - DNA, 25 bp, Homo sapien
cagaaactgaggcaaaccgtggtcc

SEQ ID NO: 4492497 - DNA, 25 bp, Homo sapien
gaaggttactgatgtccccgtgggc

SEQ ID NO: 4492498 - DNA, 25 bp, Homo sapien
ggctttcacaggctatgcagatcgg

SEQ ID NO: 4492499 - DNA, 25 bp, Homo sapien
tttgaagttggctttggctctgaag

SEQ ID NO: 4492500 - DNA, 25 bp, Homo sapien
atcatgtaaatttggtcacggtatt

SEQ ID NO: 4492501 - DNA, 25 bp, Homo sapien
ttgaagttggctttggctctgaagt

SEQ ID NO: 4492502 - DNA, 25 bp, Homo sapien
tttggtcacggtatttgaagttggc

SEQ ID NO: 4492503 - DNA, 25 bp, Homo sapien
tgcgaaccaacaagagagtctagtt

SEQ ID NO: 4492504 - DNA, 25 bp, Homo sapien
ttagcacttagaatacgaccccagc

SEQ ID NO: 4492505 - DNA, 25 bp, Homo sapien
taggcggctagagctgtttcagagc

SEQ ID NO: 4492506 - DNA, 25 bp, Homo sapien
ttacctgtgaagtgcattaggcggc

SEQ ID NO: 4492507 - DNA, 25 bp, Homo sapien
tgacaaatacattgacatgtcaagt

SEQ ID NO: 4492508 - DNA, 25 bp, Homo sapien
acatgtcaagtgtcattttttatgg

SEQ ID NO: 4492509 - DNA, 25 bp, Homo sapien
catcaaagattcccaccgtagataa

SEQ ID NO: 4492510 - DNA, 25 bp, Homo sapien
caaggtgtgaagatacagaacctct

SEQ ID NO: 4492511 - DNA, 25 bp, Homo sapien
ctggaaagtccgattctgtctctcg

SEQ ID NO: 4492512 - DNA, 25 bp, Homo sapien
gaaagtccgattctgtctctcgcat

SEQ ID NO: 4492513 - DNA, 25 bp, Homo sapien
tgtccaaatccaagggttgtcttcc

SEQ ID NO: 4492514 - DNA, 25 bp, Homo sapien
tatgtccaaatccaagggttgtctt

SEQ ID NO: 4492515 - DNA, 25 bp, Homo sapien
ctagagtccagttccagcaggctct

SEQ ID NO: 4492516 - DNA, 25 bp, Homo sapien
gctctgctccctggatgtccacagg

SEQ ID NO: 4492517 - DNA, 25 bp, Homo sapien
gatgtccacaggccctgacactcat

SEQ ID NO: 4492518 - DNA, 25 bp, Homo sapien
cctagagtccagttccagcaggctc

SEQ ID NO: 4492519 - DNA, 25 bp, Homo sapien
gcatggagccagacgcagcacagac

SEQ ID NO: 4492520 - DNA, 25 bp, Homo sapien
atggagccagacgcagcacagaccc

SEQ ID NO: 4492521 - DNA, 25 bp, Homo sapien
tgcatggagccagacgcagcacaga

SEQ ID NO: 4492522 - DNA, 25 bp, Homo sapien
ggagccagacgcagcacagacccca

SEQ ID NO: 4492523 - DNA, 25 bp, Homo sapien
gcgggaagtctggacactgttgctc

SEQ ID NO: 4492524 - DNA, 25 bp, Homo sapien
agcccagggtactgctgcgctgtgc

SEQ ID NO: 4492525 - DNA, 25 bp, Homo sapien
gtactgctgcgctgtgcggctctcc

SEQ ID NO: 4492526 - DNA, 25 bp, Homo sapien
cagggctgccgcgtggactctgaca

SEQ ID NO: 4492527 - DNA, 25 bp, Homo sapien
attaagccacgcttctcagacatga

SEQ ID NO: 4492528 - DNA, 25 bp, Homo sapien
tgtgaaaatacctcattgcagggcc

SEQ ID NO: 4492529 - DNA, 25 bp, Homo sapien
caaagaagacgttcattaagccacg

SEQ ID NO: 4492530 - DNA, 25 bp, Homo sapien
cagggcctgtgtattttgcaaagaa

SEQ ID NO: 4492531 - DNA, 25 bp, Homo sapien
ttttcttctccaaattcttcagcat

SEQ ID NO: 4492532 - DNA, 25 bp, Homo sapien
tgagtactgcattttcttctccaaa

SEQ ID NO: 4492533 - DNA, 25 bp, Homo sapien
ttcttctccaaattcttcagcatac

SEQ ID NO: 4492534 - DNA, 25 bp, Homo sapien
cttctccaaattcttcagcatacat

SEQ ID NO: 4492535 - DNA, 25 bp, Homo sapien
ttggctcatcagagtccacagacca

SEQ ID NO: 4492536 - DNA, 25 bp, Homo sapien
tagtatcttctagacattccagaac

SEQ ID NO: 4492537 - DNA, 25 bp, Homo sapien
caaactgttgtccttagtatcttct

SEQ ID NO: 4492538 - DNA, 25 bp, Homo sapien
cagaccatatcggtgaagaagatga

SEQ ID NO: 4492539 - DNA, 25 bp, Homo sapien
aataagctaggagtcaatccagagg

SEQ ID NO: 4492540 - DNA, 25 bp, Homo sapien
taagctaggagtcaatccagaggac

SEQ ID NO: 4492541 - DNA, 25 bp, Homo sapien
aagctaggagtcaatccagaggact

SEQ ID NO: 4492542 - DNA, 25 bp, Homo sapien
gtaataagctaggagtcaatccaga

SEQ ID NO: 4492543 - DNA, 25 bp, Homo sapien
aagaggggctttgaatggagagggt

SEQ ID NO: 4492544 - DNA, 25 bp, Homo sapien
ctgagtgggagaggctcacagaggc

SEQ ID NO: 4492545 - DNA, 25 bp, Homo sapien
agggctgagtgggagaggctcacag

SEQ ID NO: 4492546 - DNA, 25 bp, Homo sapien
ggctgagtgggagaggctcacagag

SEQ ID NO: 4492547 - DNA, 25 bp, Homo sapien
ctgtagggctgagtgggagaggctc

SEQ ID NO: 4492548 - DNA, 25 bp, Homo sapien
aatgggtccattgaggctgggccct

SEQ ID NO: 4492549 - DNA, 25 bp, Homo sapien
gaagtagatggttggccctaaccac

SEQ ID NO: 4492550 - DNA, 25 bp, Homo sapien
gagcctgtttggccagagtggaatg

SEQ ID NO: 4492551 - DNA, 25 bp, Homo sapien
gaagcagaggtactttccggagcgc

SEQ ID NO: 4492552 - DNA, 25 bp, Homo sapien
atggccacagtcacctccgggtggt

SEQ ID NO: 4492553 - DNA, 25 bp, Homo sapien
tgcagctgcaggtctatgtcagtca

SEQ ID NO: 4492554 - DNA, 25 bp, Homo sapien
cagctgcaggtctatgtcagtcaga

SEQ ID NO: 4492555 - DNA, 25 bp, Homo sapien
gagccatggccacagtcacctccgg

SEQ ID NO: 4492556 - DNA, 25 bp, Homo sapien
ccaggagaaggagggcttcgggttg

SEQ ID NO: 4492557 - DNA, 25 bp, Homo sapien
gggcttcgggttgggacatggagaa

SEQ ID NO: 4492558 - DNA, 25 bp, Homo sapien
caggtgtccagagtagagctgcagc

SEQ ID NO: 4492559 - DNA, 25 bp, Homo sapien
aaggagggcttcgggttgggacatg

SEQ ID NO: 4492560 - DNA, 25 bp, Homo sapien
actcaagtaggagccacaagactcc

SEQ ID NO: 4492561 - DNA, 25 bp, Homo sapien
caggagggggtctcgccgaggagga

SEQ ID NO: 4492562 - DNA, 25 bp, Homo sapien
gggtaagactcaagtaggagccaca

SEQ ID NO: 4492563 - DNA, 25 bp, Homo sapien
ctggtatggggtaagactcaagtag

SEQ ID NO: 4492564 - DNA, 25 bp, Homo sapien
gctgtgcgtcagtcacaggcacact

SEQ ID NO: 4492565 - DNA, 25 bp, Homo sapien
gggctgtgcgtcagtcacaggcaca

SEQ ID NO: 4492566 - DNA, 25 bp, Homo sapien
ctggaggagtctgcggccattgaga

SEQ ID NO: 4492567 - DNA, 25 bp, Homo sapien
tggggctgtgcgtcagtcacaggca

SEQ ID NO: 4492568 - DNA, 25 bp, Homo sapien
ctcctcagttcgtgtggggtactgg

SEQ ID NO: 4492569 - DNA, 25 bp, Homo sapien
gactcctcagttcgtgtggggtact

SEQ ID NO: 4492570 - DNA, 25 bp, Homo sapien
agctgaggactcctcagttcgtgtg

SEQ ID NO: 4492571 - DNA, 25 bp, Homo sapien
ctgaggactcctcagttcgtgtggg

SEQ ID NO: 4492572 - DNA, 25 bp, Homo sapien
agctccccaagaaggagactgtcac

SEQ ID NO: 4492573 - DNA, 25 bp, Homo sapien
cagctccccaagaaggagactgtca

SEQ ID NO: 4492574 - DNA, 25 bp, Homo sapien
agccaccatgttgtgcgtcagcaag

SEQ ID NO: 4492575 - DNA, 25 bp, Homo sapien
tgtgccaccctcggtcaccaccact

SEQ ID NO: 4492576 - DNA, 25 bp, Homo sapien
gtgccaccctcggtcaccaccactg

SEQ ID NO: 4492577 - DNA, 25 bp, Homo sapien
ctgtgccaccctcggtcaccaccac

SEQ ID NO: 4492578 - DNA, 25 bp, Homo sapien
gcagttcaccacgtccaggagggtg

SEQ ID NO: 4492579 - DNA, 25 bp, Homo sapien
cttgcagttcaccacgtccaggagg

SEQ ID NO: 4492580 - DNA, 25 bp, Homo sapien
ttcaccacgtccaggagggtgaaca

SEQ ID NO: 4492581 - DNA, 25 bp, Homo sapien
tcaccacgtccaggagggtgaacat

SEQ ID NO: 4492582 - DNA, 25 bp, Homo sapien
gtggatttgtatggccagctggaca

SEQ ID NO: 4492583 - DNA, 25 bp, Homo sapien
ggaatgtcaagtcctgtgtagggcc

SEQ ID NO: 4492584 - DNA, 25 bp, Homo sapien
tcctcggtgtagtgctgtgggtcag

SEQ ID NO: 4492585 - DNA, 25 bp, Homo sapien
ccggaatgtcaagtcctgtgtaggg

SEQ ID NO: 4492586 - DNA, 25 bp, Homo sapien
ctgagtgtgcagtggctccagctgc

SEQ ID NO: 4492587 - DNA, 25 bp, Homo sapien
tgttctgagtgtgcagtggctccag

SEQ ID NO: 4492588 - DNA, 25 bp, Homo sapien
aaccacctcacagtggaaggttggg

SEQ ID NO: 4492589 - DNA, 25 bp, Homo sapien
ctgaaccacctcacagtggaaggtt

SEQ ID NO: 4492590 - DNA, 25 bp, Homo sapien
agaaggtgtcctccactgccactga

SEQ ID NO: 4492591 - DNA, 25 bp, Homo sapien
aacagaaggtgtcctccactgccac

SEQ ID NO: 4492592 - DNA, 25 bp, Homo sapien
gcactgttgagactcttgatgaaga

SEQ ID NO: 4492593 - DNA, 25 bp, Homo sapien
ctggcactgttgagactcttgatga

SEQ ID NO: 4492594 - DNA, 25 bp, Homo sapien
tggtcagcagagaggacacacccac

SEQ ID NO: 4492595 - DNA, 25 bp, Homo sapien
tgttgagactcttgatgaagagctg

SEQ ID NO: 4492596 - DNA, 25 bp, Homo sapien
aagtcaacctcccatggcggggctg

SEQ ID NO: 4492597 - DNA, 25 bp, Homo sapien
tcccatggcggggctgctccatgac

SEQ ID NO: 4492598 - DNA, 25 bp, Homo sapien
ccaagtcaacctcccatggcggggc

SEQ ID NO: 4492599 - DNA, 25 bp, Homo sapien
cctcccatggcggggctgctccatg

SEQ ID NO: 4492600 - DNA, 25 bp, Homo sapien
catgcatcaggtctccattggtgaa

SEQ ID NO: 4492601 - DNA, 25 bp, Homo sapien
agctggccatgcatcaggtctccat

SEQ ID NO: 4492602 - DNA, 25 bp, Homo sapien
tgcatcaggtctccattggtgaagg

SEQ ID NO: 4492603 - DNA, 25 bp, Homo sapien
tggccatgcatcaggtctccattgg

SEQ ID NO: 4492604 - DNA, 25 bp, Homo sapien
ctgcataggggcgtggtcattcaca

SEQ ID NO: 4492605 - DNA, 25 bp, Homo sapien
gtggtcattcacaggctggatggcc

SEQ ID NO: 4492606 - DNA, 25 bp, Homo sapien
ataggggcgtggtcattcacaggct

SEQ ID NO: 4492607 - DNA, 25 bp, Homo sapien
cgtggtcattcacaggctggatggc

SEQ ID NO: 4492608 - DNA, 25 bp, Homo sapien
taccccaggccacgtggaagacgca

SEQ ID NO: 4492609 - DNA, 25 bp, Homo sapien
ggccacgtggaagacgcagctgatg

SEQ ID NO: 4492610 - DNA, 25 bp, Homo sapien
ccacgtggaagacgcagctgatggt

SEQ ID NO: 4492611 - DNA, 25 bp, Homo sapien
caggccacgtggaagacgcagctga

SEQ ID NO: 4492612 - DNA, 25 bp, Homo sapien
attgctgaaggccatgttgtctgta

SEQ ID NO: 4492613 - DNA, 25 bp, Homo sapien
agcaaagcccgaatcagcattgctg

SEQ ID NO: 4492614 - DNA, 25 bp, Homo sapien
gctgggcctcagcaaagcccgaatc

SEQ ID NO: 4492615 - DNA, 25 bp, Homo sapien
tgttgtctgtagtcagcagccgcca

SEQ ID NO: 4492616 - DNA, 25 bp, Homo sapien
ggctgcatgggctcatccgtggcca

SEQ ID NO: 4492617 - DNA, 25 bp, Homo sapien
tgggctcatccgtggccatgatact

SEQ ID NO: 4492618 - DNA, 25 bp, Homo sapien
catccgtggccatgatactgccaga

SEQ ID NO: 4492619 - DNA, 25 bp, Homo sapien
gcatgggctcatccgtggccatgat

SEQ ID NO: 4492620 - DNA, 25 bp, Homo sapien
ggactcgcctcttcctgaggcccct

SEQ ID NO: 4492621 - DNA, 25 bp, Homo sapien
aggactcgcctcttcctgaggcccc

SEQ ID NO: 4492622 - DNA, 25 bp, Homo sapien
gactcgcctcttcctgaggcccctc

SEQ ID NO: 4492623 - DNA, 25 bp, Homo sapien
ctgcagcgggatccagccgtggtca

SEQ ID NO: 4492624 - DNA, 25 bp, Homo sapien
ggcctccttgaggaaccatgaggcc

SEQ ID NO: 4492625 - DNA, 25 bp, Homo sapien
gtagtgggcctcatccctactgcag

SEQ ID NO: 4492626 - DNA, 25 bp, Homo sapien
ggtagtgggcctcatccctactgca

SEQ ID NO: 4492627 - DNA, 25 bp, Homo sapien
cctccttgaggaaccatgaggccgg

SEQ ID NO: 4492628 - DNA, 25 bp, Homo sapien
gggtgagcagaagcccttgacagac

SEQ ID NO: 4492629 - DNA, 25 bp, Homo sapien
ctgggtgagcagaagcccttgacag

SEQ ID NO: 4492630 - DNA, 25 bp, Homo sapien
tgggtgagcagaagcccttgacaga

SEQ ID NO: 4492631 - DNA, 25 bp, Homo sapien
agatgcagaccagaagggtctccga

SEQ ID NO: 4492632 - DNA, 25 bp, Homo sapien
gatgcagaccagaagggtctccgaa

SEQ ID NO: 4492633 - DNA, 25 bp, Homo sapien
tgcagaccagaagggtctccgaaat

SEQ ID NO: 4492634 - DNA, 25 bp, Homo sapien
cagatgcagaccagaagggtctccg

SEQ ID NO: 4492635 - DNA, 25 bp, Homo sapien
tcatctgccaagatgccacgcagca

SEQ ID NO: 4492636 - DNA, 25 bp, Homo sapien
ggctcatctgccaagatgccacgca

SEQ ID NO: 4492637 - DNA, 25 bp, Homo sapien
ctgccaagatgccacgcagcaccat

SEQ ID NO: 4492638 - DNA, 25 bp, Homo sapien
gccaagatgccacgcagcaccatca

SEQ ID NO: 4492639 - DNA, 25 bp, Homo sapien
tgacgtcctcaaggggagcacccag

SEQ ID NO: 4492640 - DNA, 25 bp, Homo sapien
gtgacgtcctcaaggggagcaccca

SEQ ID NO: 4492641 - DNA, 25 bp, Homo sapien
ctccagctccacgtgacgtcctcaa

SEQ ID NO: 4492642 - DNA, 25 bp, Homo sapien
aggacctggcaacgcggagcagtgg

SEQ ID NO: 4492643 - DNA, 25 bp, Homo sapien
agctgcgactgtgccccctctactg

SEQ ID NO: 4492644 - DNA, 25 bp, Homo sapien
cctggcaacgcggagcagtggaggg

SEQ ID NO: 4492645 - DNA, 25 bp, Homo sapien
gggtgcagctgcgactgtgccccct

SEQ ID NO: 4492646 - DNA, 25 bp, Homo sapien
ctctctccagcagaaggtgctgagg

SEQ ID NO: 4492647 - DNA, 25 bp, Homo sapien
ggtcctggcttgaggcccatcctcc

SEQ ID NO: 4492648 - DNA, 25 bp, Homo sapien
tgcagggccccatgccggggtggct

SEQ ID NO: 4492649 - DNA, 25 bp, Homo sapien
ctgagggtcctggcttgaggcccat

SEQ ID NO: 4492650 - DNA, 25 bp, Homo sapien
caggacaaaaccgtcagtgtcttgc

SEQ ID NO: 4492651 - DNA, 25 bp, Homo sapien
gtgtcttgctcccatcgtgcaggta

SEQ ID NO: 4492652 - DNA, 25 bp, Homo sapien
aaccgtcagtgtcttgctcccatcg

SEQ ID NO: 4492653 - DNA, 25 bp, Homo sapien
caggcctgagtttgtatgaggtcgg

SEQ ID NO: 4492654 - DNA, 25 bp, Homo sapien
ccatcactgggctcccggaacaaac

SEQ ID NO: 4492655 - DNA, 25 bp, Homo sapien
cccatcactgggctcccggaacaaa

SEQ ID NO: 4492656 - DNA, 25 bp, Homo sapien
ccccatcactgggctcccggaacaa

SEQ ID NO: 4492657 - DNA, 25 bp, Homo sapien
catcactgggctcccggaacaaaca

SEQ ID NO: 4492658 - DNA, 25 bp, Homo sapien
tgggcacggtggccccctcccacat

SEQ ID NO: 4492659 - DNA, 25 bp, Homo sapien
tagggatgggcacggtggccccctc

SEQ ID NO: 4492660 - DNA, 25 bp, Homo sapien
ctgtagggatgggcacggtggcccc

SEQ ID NO: 4492661 - DNA, 25 bp, Homo sapien
gatgggcacggtggccccctcccac

SEQ ID NO: 4492662 - DNA, 25 bp, Homo sapien
ctgggctgcttaatggtgtacacca

SEQ ID NO: 4492663 - DNA, 25 bp, Homo sapien
tgggctgcttaatggtgtacaccag

SEQ ID NO: 4492664 - DNA, 25 bp, Homo sapien
gctgggctgcttaatggtgtacacc

SEQ ID NO: 4492665 - DNA, 25 bp, Homo sapien
ggctgcttaatggtgtacaccaggt

SEQ ID NO: 4492666 - DNA, 25 bp, Homo sapien
tcagtgcccggcaccgcccactgca

SEQ ID NO: 4492667 - DNA, 25 bp, Homo sapien
agtgcccggcaccgcccactgcact

SEQ ID NO: 4492668 - DNA, 25 bp, Homo sapien
tgcccggcaccgcccactgcactac

SEQ ID NO: 4492669 - DNA, 25 bp, Homo sapien
ctcagtgcccggcaccgcccactgc

SEQ ID NO: 4492670 - DNA, 25 bp, Homo sapien
gctgggtctgcatgaagctgcgcac

SEQ ID NO: 4492671 - DNA, 25 bp, Homo sapien
ccagctgggtctgcatgaagctgcg

SEQ ID NO: 4492672 - DNA, 25 bp, Homo sapien
gcacgagcccaccatccagctgggt

SEQ ID NO: 4492673 - DNA, 25 bp, Homo sapien
ctgtgtgagaacagcacgagcccac

SEQ ID NO: 4492674 - DNA, 25 bp, Homo sapien
cagcctttgtgatccaggccgaggc

SEQ ID NO: 4492675 - DNA, 25 bp, Homo sapien
catcagcctttgtgatccaggccga

SEQ ID NO: 4492676 - DNA, 25 bp, Homo sapien
ggccatcagcctttgtgatccaggc

SEQ ID NO: 4492677 - DNA, 25 bp, Homo sapien
cagaggcaaaaggggccatcagcct

SEQ ID NO: 4492678 - DNA, 25 bp, Homo sapien
tctgaggctctggctgctgagtggc

SEQ ID NO: 4492679 - DNA, 25 bp, Homo sapien
ctctggctgctgagtggctggacgg

SEQ ID NO: 4492680 - DNA, 25 bp, Homo sapien
gctctgaggctctggctgctgagtg

SEQ ID NO: 4492681 - DNA, 25 bp, Homo sapien
tggctgctgagtggctggacggact

SEQ ID NO: 4492682 - DNA, 25 bp, Homo sapien
cgcaccacatggtagagcaggagct

SEQ ID NO: 4492683 - DNA, 25 bp, Homo sapien
gtcctcccctgtgctgtcatgctgg

SEQ ID NO: 4492684 - DNA, 25 bp, Homo sapien
tctccctgagtgaagttcaccaggt

SEQ ID NO: 4492685 - DNA, 25 bp, Homo sapien
aagagccggcctagctggaggcccc

SEQ ID NO: 4492686 - DNA, 25 bp, Homo sapien
gaacatgaacttgccctgccagcct

SEQ ID NO: 4492687 - DNA, 25 bp, Homo sapien
tgtatccccgacttcctgcattctt

SEQ ID NO: 4492688 - DNA, 25 bp, Homo sapien
cttctgggaacatgaacttgccctg

SEQ ID NO: 4492689 - DNA, 25 bp, Homo sapien
gggccctgtatccccgacttcctgc

SEQ ID NO: 4492690 - DNA, 25 bp, Homo sapien
ctgctggggtgccactagtgcccct

SEQ ID NO: 4492691 - DNA, 25 bp, Homo sapien
agctgcttcacctccgactccatcc

SEQ ID NO: 4492692 - DNA, 25 bp, Homo sapien
tccctctccagacccttgggtccag

SEQ ID NO: 4492693 - DNA, 25 bp, Homo sapien
ggtgccactagtgcccctacatggt

SEQ ID NO: 4492694 - DNA, 25 bp, Homo sapien
ctcaggaggtccttgccgaagcaag

SEQ ID NO: 4492695 - DNA, 25 bp, Homo sapien
gctccctgccgagaactcactgtga

SEQ ID NO: 4492696 - DNA, 25 bp, Homo sapien
agggatcccctctggaggtacttgg

SEQ ID NO: 4492697 - DNA, 25 bp, Homo sapien
cttgccgaagcaagggagcttgaaa

SEQ ID NO: 4492698 - DNA, 25 bp, Homo sapien
tggacttggagccccttggagtatg

SEQ ID NO: 4492699 - DNA, 25 bp, Homo sapien
tataccgcttcgactggaagatcca

SEQ ID NO: 4492700 - DNA, 25 bp, Homo sapien
ctgggcccttctgggactgtgcgct

SEQ ID NO: 4492701 - DNA, 25 bp, Homo sapien
ttttcacacgggcttctataccgct

SEQ ID NO: 4492702 - DNA, 25 bp, Homo sapien
gtgtgcgtcagggatgctctgcacc

SEQ ID NO: 4492703 - DNA, 25 bp, Homo sapien
ctgtgtgcgtcagggatgctctgca

SEQ ID NO: 4492704 - DNA, 25 bp, Homo sapien
gatgctctgcacctgcaaccaggtg

SEQ ID NO: 4492705 - DNA, 25 bp, Homo sapien
gtcagggatgctctgcacctgcaac

SEQ ID NO: 4492706 - DNA, 25 bp, Homo sapien
gagccaccccggtgagggggtgtgc

SEQ ID NO: 4492707 - DNA, 25 bp, Homo sapien
cacaagagcaccaggggggtagggc

SEQ ID NO: 4492708 - DNA, 25 bp, Homo sapien
cccaaagggatcaggggaagcctct

SEQ ID NO: 4492709 - DNA, 25 bp, Homo sapien
gcccaaagggatcaggggaagcctc

SEQ ID NO: 4492710 - DNA, 25 bp, Homo sapien
gggaccccggctggggcacaagagc

SEQ ID NO: 4492711 - DNA, 25 bp, Homo sapien
cagacctgaagtaggcgcccccggg

SEQ ID NO: 4492712 - DNA, 25 bp, Homo sapien
ctcagacctgaagtaggcgcccccg

SEQ ID NO: 4492713 - DNA, 25 bp, Homo sapien
tcagacctgaagtaggcgcccccgg

SEQ ID NO: 4492714 - DNA, 25 bp, Homo sapien
tcctcacaacgtatgcctatctccg

SEQ ID NO: 4492715 - DNA, 25 bp, Homo sapien
cacaacgtatgcctatctccgtcat

SEQ ID NO: 4492716 - DNA, 25 bp, Homo sapien
gttcctcacaacgtatgcctatctc

SEQ ID NO: 4492717 - DNA, 25 bp, Homo sapien
cagttcctcacaacgtatgcctatc

SEQ ID NO: 4492718 - DNA, 25 bp, Homo sapien
actaatgtccggctgtcatttctcc

SEQ ID NO: 4492719 - DNA, 25 bp, Homo sapien
gctcactaatgtccggctgtcattt

SEQ ID NO: 4492720 - DNA, 25 bp, Homo sapien
atactctttggactttgaaggttct

SEQ ID NO: 4492721 - DNA, 25 bp, Homo sapien
ttgctcactaatgtccggctgtcat

SEQ ID NO: 4492722 - DNA, 25 bp, Homo sapien
tggctgatgctcctcaggggccact

SEQ ID NO: 4492723 - DNA, 25 bp, Homo sapien
tgatgctcctcaggggccactgata

SEQ ID NO: 4492724 - DNA, 25 bp, Homo sapien
tcctcaggggccactgatagtgatt

SEQ ID NO: 4492725 - DNA, 25 bp, Homo sapien
catggctgatgctcctcaggggcca

SEQ ID NO: 4492726 - DNA, 25 bp, Homo sapien
ggctccaggtatgccccctgtgtgg

SEQ ID NO: 4492727 - DNA, 25 bp, Homo sapien
gaggctccaggtatgccccctgtgt

SEQ ID NO: 4492728 - DNA, 25 bp, Homo sapien
ggctctgaggctccaggtatgcccc

SEQ ID NO: 4492729 - DNA, 25 bp, Homo sapien
ctgaggctccaggtatgccccctgt

SEQ ID NO: 4492730 - DNA, 25 bp, Homo sapien
gaccttgagcagtggcactgagtcc

SEQ ID NO: 4492731 - DNA, 25 bp, Homo sapien
agggagggaagtgagacagccagca

SEQ ID NO: 4492732 - DNA, 25 bp, Homo sapien
ccatggagaccttgagcagtggcac

SEQ ID NO: 4492733 - DNA, 25 bp, Homo sapien
ctggcagggagggaagtgagacagc

SEQ ID NO: 4492734 - DNA, 25 bp, Homo sapien
ggcatggagcctgttgtaagagccc

SEQ ID NO: 4492735 - DNA, 25 bp, Homo sapien
gcatggagcctgttgtaagagcccc

SEQ ID NO: 4492736 - DNA, 25 bp, Homo sapien
ctctgtgccctctctgatggttcca

SEQ ID NO: 4492737 - DNA, 25 bp, Homo sapien
tcagtcacacgctagcagctgtgat

SEQ ID NO: 4492738 - DNA, 25 bp, Homo sapien
gtcacacgctagcagctgtgatggt

SEQ ID NO: 4492739 - DNA, 25 bp, Homo sapien
cagtcacacgctagcagctgtgatg

SEQ ID NO: 4492740 - DNA, 25 bp, Homo sapien
cacacgctagcagctgtgatggtac

SEQ ID NO: 4492741 - DNA, 25 bp, Homo sapien
tcattatgccgacaaggtgtccgca

SEQ ID NO: 4492742 - DNA, 25 bp, Homo sapien
gaattcctgcgccaatcggtagtgg

SEQ ID NO: 4492743 - DNA, 25 bp, Homo sapien
tgtggaaaacgtactagcctgtctg

SEQ ID NO: 4492744 - DNA, 25 bp, Homo sapien
cacatatgcctaaacctgggaactg

SEQ ID NO: 4492745 - DNA, 25 bp, Homo sapien
ccattgttgagaaaattggtaaagt

SEQ ID NO: 4492746 - DNA, 25 bp, Homo sapien
ctaatataaccactattgactgttg

SEQ ID NO: 4492747 - DNA, 25 bp, Homo sapien
aatataaccactattgactgttgac

SEQ ID NO: 4492748 - DNA, 25 bp, Homo sapien
aaaactcataagcaaccattgttga

SEQ ID NO: 4492749 - DNA, 25 bp, Homo sapien
aaaagtagtcagcttgtacaaagga

SEQ ID NO: 4492750 - DNA, 25 bp, Homo sapien
gaaacaagccttgactcaggagcct

SEQ ID NO: 4492751 - DNA, 25 bp, Homo sapien
caggagcctaggactttttctttgg

SEQ ID NO: 4492752 - DNA, 25 bp, Homo sapien
aatgtcatattaagcacctcagtgg

SEQ ID NO: 4492753 - DNA, 25 bp, Homo sapien
tggtgggccttgtgttataaaacca

SEQ ID NO: 4492754 - DNA, 25 bp, Homo sapien
tggagaagcgttcctgggcttttct

SEQ ID NO: 4492755 - DNA, 25 bp, Homo sapien
gagtgatttctcgtgctaagtgagt

SEQ ID NO: 4492756 - DNA, 25 bp, Homo sapien
tgatttctcgtgctaagtgagtcct

SEQ ID NO: 4492757 - DNA, 25 bp, Homo sapien
tgtagccggtgcgcggggtggctgg

SEQ ID NO: 4492758 - DNA, 25 bp, Homo sapien
gggaggactcgcagacgttactgcc

SEQ ID NO: 4492759 - DNA, 25 bp, Homo sapien
ttgtagccggtgcgcggggtggctg

SEQ ID NO: 4492760 - DNA, 25 bp, Homo sapien
gcagctctgccgtgcaatcccagct

SEQ ID NO: 4492761 - DNA, 25 bp, Homo sapien
tctgccgtgcaatcccagctcgcag

SEQ ID NO: 4492762 - DNA, 25 bp, Homo sapien
cgtgcaatcccagctcgcagccctt

SEQ ID NO: 4492763 - DNA, 25 bp, Homo sapien
tggagcgggatgggcagctctgccg

SEQ ID NO: 4492764 - DNA, 25 bp, Homo sapien
caatccgatgatttctgaggtcctt

SEQ ID NO: 4492765 - DNA, 25 bp, Homo sapien
tcctcggccgccgttggtacacgga

SEQ ID NO: 4492766 - DNA, 25 bp, Homo sapien
cgttggtacacggaccacattttgt

SEQ ID NO: 4492767 - DNA, 25 bp, Homo sapien
gtttctcaaagcaatccgatgattt

SEQ ID NO: 4492768 - DNA, 25 bp, Homo sapien
gaaataccagtgagcactgctcaat

SEQ ID NO: 4492769 - DNA, 25 bp, Homo sapien
ataccagtgagcactgctcaatgcc

SEQ ID NO: 4492770 - DNA, 25 bp, Homo sapien
cagcgaaataccagtgagcactgct

SEQ ID NO: 4492771 - DNA, 25 bp, Homo sapien
tcacctaccaggcagctgtgcaact

SEQ ID NO: 4492772 - DNA, 25 bp, Homo sapien
tggctgcggccaatttcccctgttg

SEQ ID NO: 4492773 - DNA, 25 bp, Homo sapien
cttggctgcggccaatttcccctgt

SEQ ID NO: 4492774 - DNA, 25 bp, Homo sapien
gctgcggccaatttcccctgttgtg

SEQ ID NO: 4492775 - DNA, 25 bp, Homo sapien
tgcggccaatttcccctgttgtgtt

SEQ ID NO: 4492776 - DNA, 25 bp, Homo sapien
gggggccccatctggtatgcctcag

SEQ ID NO: 4492777 - DNA, 25 bp, Homo sapien
gctgactgactaggctttggttggg

SEQ ID NO: 4492778 - DNA, 25 bp, Homo sapien
gttggggggccccatctggtatgcc

SEQ ID NO: 4492779 - DNA, 25 bp, Homo sapien
tctggcaccggtcttgtcatcggag

SEQ ID NO: 4492780 - DNA, 25 bp, Homo sapien
acacggtttcgacccaggtcctcag

SEQ ID NO: 4492781 - DNA, 25 bp, Homo sapien
cacacggtttcgacccaggtcctca

SEQ ID NO: 4492782 - DNA, 25 bp, Homo sapien
acatcagcgcgatgcccgagtcgct

SEQ ID NO: 4492783 - DNA, 25 bp, Homo sapien
catcagcgcgatgcccgagtcgctg

SEQ ID NO: 4492784 - DNA, 25 bp, Homo sapien
cactgtcaatgtctatgttgaggga

SEQ ID NO: 4492785 - DNA, 25 bp, Homo sapien
tctatgttgagggagtaaggcagcc

SEQ ID NO: 4492786 - DNA, 25 bp, Homo sapien
ttgagggagtaaggcagcctgaaac

SEQ ID NO: 4492787 - DNA, 25 bp, Homo sapien
taggctttttcccactgtcaatgtc

SEQ ID NO: 4492788 - DNA, 25 bp, Homo sapien
ctgtgtcagggctactgccattgat

SEQ ID NO: 4492789 - DNA, 25 bp, Homo sapien
ggctcttcctctgccaatatgcttt

SEQ ID NO: 4492790 - DNA, 25 bp, Homo sapien
cctgttagctcctgctggaatgcca

SEQ ID NO: 4492791 - DNA, 25 bp, Homo sapien
gttagctcctgctggaatgccaggg

SEQ ID NO: 4492792 - DNA, 25 bp, Homo sapien
gtagaggatgcacggccctccccgt

SEQ ID NO: 4492793 - DNA, 25 bp, Homo sapien
ggtagtagaggatgcacggccctcc

SEQ ID NO: 4492794 - DNA, 25 bp, Homo sapien
ggatgcacggccctccccgtagata

SEQ ID NO: 4492795 - DNA, 25 bp, Homo sapien
tcctccagggtagtagaggatgcac

SEQ ID NO: 4492796 - DNA, 25 bp, Homo sapien
tattgcggagcttgaatccagggcc

SEQ ID NO: 4492797 - DNA, 25 bp, Homo sapien
gaattgatgttttcagtgagttgac

SEQ ID NO: 4492798 - DNA, 25 bp, Homo sapien
gcggagcttgaatccagggccactg

SEQ ID NO: 4492799 - DNA, 25 bp, Homo sapien
attgatgttttcagtgagttgactg

SEQ ID NO: 4492800 - DNA, 25 bp, Homo sapien
tcttctcctccttagatgtgcgaac

SEQ ID NO: 4492801 - DNA, 25 bp, Homo sapien
cagatgtatctcatgcttcttctcc

SEQ ID NO: 4492802 - DNA, 25 bp, Homo sapien
gcttcttctcctccttagatgtgcg

SEQ ID NO: 4492803 - DNA, 25 bp, Homo sapien
tgcttcttctcctccttagatgtgc

SEQ ID NO: 4492804 - DNA, 25 bp, Homo sapien
gaacaagctcctcccaagcttctgt

SEQ ID NO: 4492805 - DNA, 25 bp, Homo sapien
tttgagtttgaacaagctcctccca

SEQ ID NO: 4492806 - DNA, 25 bp, Homo sapien
gagtttgaacaagctcctcccaagc

SEQ ID NO: 4492807 - DNA, 25 bp, Homo sapien
tgaacaagctcctcccaagcttctg

SEQ ID NO: 4492808 - DNA, 25 bp, Homo sapien
agatggccctgctgggggctctggg

SEQ ID NO: 4492809 - DNA, 25 bp, Homo sapien
tggccctgctgggggctctggggcc

SEQ ID NO: 4492810 - DNA, 25 bp, Homo sapien
tgggggctctggggccaggggttca

SEQ ID NO: 4492811 - DNA, 25 bp, Homo sapien
ccctgctgggggctctggggccagg

SEQ ID NO: 4492812 - DNA, 25 bp, Homo sapien
caggagactcaacatctgattgttt

SEQ ID NO: 4492813 - DNA, 25 bp, Homo sapien
gccgcctctcctgttctaacagctt

SEQ ID NO: 4492814 - DNA, 25 bp, Homo sapien
tcgtccaggagctcctccacctcgt

SEQ ID NO: 4492815 - DNA, 25 bp, Homo sapien
tgccctggcagcttctcctgttcac

SEQ ID NO: 4492816 - DNA, 25 bp, Homo sapien
tgccgcctctcctgttctaacagct

SEQ ID NO: 4492817 - DNA, 25 bp, Homo sapien
ctgctcgtacagggcttcccacccc

SEQ ID NO: 4492818 - DNA, 25 bp, Homo sapien
cagcctctcatcctgttgccgaagc

SEQ ID NO: 4492819 - DNA, 25 bp, Homo sapien
tctcatcctgttgccgaagcctctc

SEQ ID NO: 4492820 - DNA, 25 bp, Homo sapien
tcgtacagggcttcccaccccagct

SEQ ID NO: 4492821 - DNA, 25 bp, Homo sapien
agctcctcgaagccgctgcgtggct

SEQ ID NO: 4492822 - DNA, 25 bp, Homo sapien
tggacagagagaagcaatcagtggc

SEQ ID NO: 4492823 - DNA, 25 bp, Homo sapien
gacagagagaagcaatcagtggcca

SEQ ID NO: 4492824 - DNA, 25 bp, Homo sapien
cagagagaagcaatcagtggccacc

SEQ ID NO: 4492825 - DNA, 25 bp, Homo sapien
ctggacagagagaagcaatcagtgg

SEQ ID NO: 4492826 - DNA, 25 bp, Homo sapien
aactgcagtgtgctcttgttctcgt

SEQ ID NO: 4492827 - DNA, 25 bp, Homo sapien
ccgacttcttcagctcctttacttg

SEQ ID NO: 4492828 - DNA, 25 bp, Homo sapien
ctgcagtgtgctcttgttctcgttg

SEQ ID NO: 4492829 - DNA, 25 bp, Homo sapien
gcagtgtgctcttgttctcgttgtt

SEQ ID NO: 4492830 - DNA, 25 bp, Homo sapien
tgcagctgcctgtggcctggtacct

SEQ ID NO: 4492831 - DNA, 25 bp, Homo sapien
ggtgcccgcctcccacatcttcttg

SEQ ID NO: 4492832 - DNA, 25 bp, Homo sapien
catcttcttggatgggtcggaggtt

SEQ ID NO: 4492833 - DNA, 25 bp, Homo sapien
gctgcagctgcctgtggcctggtac

SEQ ID NO: 4492834 - DNA, 25 bp, Homo sapien
gctccctgttctcggcagcccgaaa

SEQ ID NO: 4492835 - DNA, 25 bp, Homo sapien
aagaatggcatgcagcctctcctgc

SEQ ID NO: 4492836 - DNA, 25 bp, Homo sapien
cctgtaccaacagcttctccaccca

SEQ ID NO: 4492837 - DNA, 25 bp, Homo sapien
tctcggcagcccgaaaagaatggca

SEQ ID NO: 4492838 - DNA, 25 bp, Homo sapien
tgtcagatggttgaagactagctat

SEQ ID NO: 4492839 - DNA, 25 bp, Homo sapien
tcctatgtcagatggttgaagacta

SEQ ID NO: 4492840 - DNA, 25 bp, Homo sapien
gatggttgaagactagctattagcc

SEQ ID NO: 4492841 - DNA, 25 bp, Homo sapien
aattcctatgtcagatggttgaaga

SEQ ID NO: 4492842 - DNA, 25 bp, Homo sapien
tttatacgtgtcagggtaaaagtga

SEQ ID NO: 4492843 - DNA, 25 bp, Homo sapien
atttatacgtgtcagggtaaaagtg

SEQ ID NO: 4492844 - DNA, 25 bp, Homo sapien
gtgagagtcccatgcacacggtcat

SEQ ID NO: 4492845 - DNA, 25 bp, Homo sapien
ccatagctgctagtgtgtgaccgaa

SEQ ID NO: 4492846 - DNA, 25 bp, Homo sapien
tccagtggtatctaggtgagagtcc

SEQ ID NO: 4492847 - DNA, 25 bp, Homo sapien
aaagcagggctgatagtcagggtcc

SEQ ID NO: 4492848 - DNA, 25 bp, Homo sapien
ccacacactgaaccagtccctaaga

SEQ ID NO: 4492849 - DNA, 25 bp, Homo sapien
gagcagggcctgtcgacttgctcct

SEQ ID NO: 4492850 - DNA, 25 bp, Homo sapien
aggagcagggcctgtcgacttgctc

SEQ ID NO: 4492851 - DNA, 25 bp, Homo sapien
aaggagcagggcctgtcgacttgct

SEQ ID NO: 4492852 - DNA, 25 bp, Homo sapien
gtaaggagcagggcctgtcgacttg

SEQ ID NO: 4492853 - DNA, 25 bp, Homo sapien
gccttagtcagaactgcccctggtg

SEQ ID NO: 4492854 - DNA, 25 bp, Homo sapien
gctctgagtcatgggttcccaggcc

SEQ ID NO: 4492855 - DNA, 25 bp, Homo sapien
caggccttagtcagaactgcccctg

SEQ ID NO: 4492856 - DNA, 25 bp, Homo sapien
ggacccacgctctgagtcatgggtt

SEQ ID NO: 4492857 - DNA, 25 bp, Homo sapien
aaccccttggtgaagagcgtctgtc

SEQ ID NO: 4492858 - DNA, 25 bp, Homo sapien
accccttggtgaagagcgtctgtcc

SEQ ID NO: 4492859 - DNA, 25 bp, Homo sapien
gcagggactgccccctggagtggtg

SEQ ID NO: 4492860 - DNA, 25 bp, Homo sapien
ctgtctgttctatctgttgactctt

SEQ ID NO: 4492861 - DNA, 25 bp, Homo sapien
tccctggctctgtctgttctatctg

SEQ ID NO: 4492862 - DNA, 25 bp, Homo sapien
agggactgccccctggagtggtggg

SEQ ID NO: 4492863 - DNA, 25 bp, Homo sapien
gcgtagcaaacgagtccctgagagc

SEQ ID NO: 4492864 - DNA, 25 bp, Homo sapien
tgaggcacggaaggcctcggaagcc

SEQ ID NO: 4492865 - DNA, 25 bp, Homo sapien
gagtccctgagagcatggcatctgg

SEQ ID NO: 4492866 - DNA, 25 bp, Homo sapien
gggcagcgtagcaaacgagtccctg

SEQ ID NO: 4492867 - DNA, 25 bp, Homo sapien
tcggccgtgagtaggtgggacagag

SEQ ID NO: 4492868 - DNA, 25 bp, Homo sapien
agcagcgcccgttctcgagtcctgg

SEQ ID NO: 4492869 - DNA, 25 bp, Homo sapien
cagagacaccaacagttggagacct

SEQ ID NO: 4492870 - DNA, 25 bp, Homo sapien
tgcaactccggtttgggagccgctc

SEQ ID NO: 4492871 - DNA, 25 bp, Homo sapien
cgggaccgcagttctgtgccaggat

SEQ ID NO: 4492872 - DNA, 25 bp, Homo sapien
ccgggaccgcagttctgtgccagga

SEQ ID NO: 4492873 - DNA, 25 bp, Homo sapien
ccccgggaccgcagttctgtgccag

SEQ ID NO: 4492874 - DNA, 25 bp, Homo sapien
ggccccgggaccgcagttctgtgcc

SEQ ID NO: 4492875 - DNA, 25 bp, Homo sapien
gagatgcgacctgtgactcagaacc

SEQ ID NO: 4492876 - DNA, 25 bp, Homo sapien
tggcctgggagatgcgacctgtgac

SEQ ID NO: 4492877 - DNA, 25 bp, Homo sapien
aggtggtcacggaggtctggcagga

SEQ ID NO: 4492878 - DNA, 25 bp, Homo sapien
ctggaggtggtcacggaggtctggc

SEQ ID NO: 4492879 - DNA, 25 bp, Homo sapien
cctgcggcctcgtgccctctgccgg

SEQ ID NO: 4492880 - DNA, 25 bp, Homo sapien
ctgcggcctcgtgccctctgccggg

SEQ ID NO: 4492881 - DNA, 25 bp, Homo sapien
gcggcctcgtgccctctgccgggcc

SEQ ID NO: 4492882 - DNA, 25 bp, Homo sapien
gcctgcggcctcgtgccctctgccg

SEQ ID NO: 4492883 - DNA, 25 bp, Homo sapien
gttatgatcccaggggatgaggacc

SEQ ID NO: 4492884 - DNA, 25 bp, Homo sapien
tctcgccttcatggctagagctggc

SEQ ID NO: 4492885 - DNA, 25 bp, Homo sapien
ggctctgggcttgcaaggtctccca

SEQ ID NO: 4492886 - DNA, 25 bp, Homo sapien
gggcctagaaccaaggacggatggc

SEQ ID NO: 4492887 - DNA, 25 bp, Homo sapien
ttctaggtcatcaccatacatgccc

SEQ ID NO: 4492888 - DNA, 25 bp, Homo sapien
ggtttctaggtcatcaccatacatg

SEQ ID NO: 4492889 - DNA, 25 bp, Homo sapien
accatacatgcccttgtccagattt

SEQ ID NO: 4492890 - DNA, 25 bp, Homo sapien
ggtcatcaccatacatgcccttgtc

SEQ ID NO: 4492891 - DNA, 25 bp, Homo sapien
tctgctgcatgtttgtgggtgtttg

SEQ ID NO: 4492892 - DNA, 25 bp, Homo sapien
gaagcggctatttagctctgctgca

SEQ ID NO: 4492893 - DNA, 25 bp, Homo sapien
cacaggctccgtgccagggctctgg

SEQ ID NO: 4492894 - DNA, 25 bp, Homo sapien
tgtgggtgtttgtcagaggtggcca

SEQ ID NO: 4492895 - DNA, 25 bp, Homo sapien
tccacccaagaggatgtctggcagg

SEQ ID NO: 4492896 - DNA, 25 bp, Homo sapien
tggcagcttcctttctacactcttg

SEQ ID NO: 4492897 - DNA, 25 bp, Homo sapien
cttttcatagggctcgggtcagagg

SEQ ID NO: 4492898 - DNA, 25 bp, Homo sapien
ttttggtgaaggtcccagaaggcag

SEQ ID NO: 4492899 - DNA, 25 bp, Homo sapien
actgggatgggattctctgagtcca

SEQ ID NO: 4492900 - DNA, 25 bp, Homo sapien
tacgcatgactccaatcaatgattc

SEQ ID NO: 4492901 - DNA, 25 bp, Homo sapien
taccacgggtatacgcatgactcca

SEQ ID NO: 4492902 - DNA, 25 bp, Homo sapien
gatcctttctaccacgggtatacgc

SEQ ID NO: 4492903 - DNA, 25 bp, Homo sapien
tcagccgatcctttctaccacgggt

SEQ ID NO: 4492904 - DNA, 25 bp, Homo sapien
agcgattgtgaagtcgacgtgtagc

SEQ ID NO: 4492905 - DNA, 25 bp, Homo sapien
tcagcagcgattgtgaagtcgacgt

SEQ ID NO: 4492906 - DNA, 25 bp, Homo sapien
ctttattagggaagttcagcagcga

SEQ ID NO: 4492907 - DNA, 25 bp, Homo sapien
tagggaagttcagcagcgattgtga

SEQ ID NO: 4492908 - DNA, 25 bp, Homo sapien
aggagatgagctacagactagggcc

SEQ ID NO: 4492909 - DNA, 25 bp, Homo sapien
cagtgagtgtgaacgggaataccgc

SEQ ID NO: 4492910 - DNA, 25 bp, Homo sapien
gagctacagactagggccaagataa

SEQ ID NO: 4492911 - DNA, 25 bp, Homo sapien
ggaataccgccttgttgggctctgg

SEQ ID NO: 4492912 - DNA, 25 bp, Homo sapien
ctcgattgtcatgggctgtctgcag

SEQ ID NO: 4492913 - DNA, 25 bp, Homo sapien
caatttgagtaggttgaaagcagac

SEQ ID NO: 4492914 - DNA, 25 bp, Homo sapien
caacatcaatccaatttgagtaggt

SEQ ID NO: 4492915 - DNA, 25 bp, Homo sapien
gaatgaacaacatcaatccaatttg

SEQ ID NO: 4492916 - DNA, 25 bp, Homo sapien
tttgaaaaccttcaccaggcagagt

SEQ ID NO: 4492917 - DNA, 25 bp, Homo sapien
tctttgaaaaccttcaccaggcaga

SEQ ID NO: 4492918 - DNA, 25 bp, Homo sapien
gttctttgaaaaccttcaccaggca

SEQ ID NO: 4492919 - DNA, 25 bp, Homo sapien
aaaccttcaccaggcagagttgtgg

SEQ ID NO: 4492920 - DNA, 25 bp, Homo sapien
ggacttgtgggacttgttcacctta

SEQ ID NO: 4492921 - DNA, 25 bp, Homo sapien
cacagctccggagcctgaggaggca

SEQ ID NO: 4492922 - DNA, 25 bp, Homo sapien
ttcttccttgaagggaccaagtgca

SEQ ID NO: 4492923 - DNA, 25 bp, Homo sapien
tgcaaatttgctcaggccctttcgt

SEQ ID NO: 4492924 - DNA, 25 bp, Homo sapien
agctataacaggatccagccatgag

SEQ ID NO: 4492925 - DNA, 25 bp, Homo sapien
ctgagctataacaggatccagccat

SEQ ID NO: 4492926 - DNA, 25 bp, Homo sapien
cagccatgagcttaagtgtcagcat

SEQ ID NO: 4492927 - DNA, 25 bp, Homo sapien
ccagccatgagcttaagtgtcagca

SEQ ID NO: 4492928 - DNA, 25 bp, Homo sapien
ttccaagtgtcagctacctctttag

SEQ ID NO: 4492929 - DNA, 25 bp, Homo sapien
taaagccttagttagttgcatctct

SEQ ID NO: 4492930 - DNA, 25 bp, Homo sapien
gatgacaggagtcctaaagccttag

SEQ ID NO: 4492931 - DNA, 25 bp, Homo sapien
ctctttagagactgccagaccctct

SEQ ID NO: 4492932 - DNA, 25 bp, Homo sapien
ttactcttgtggaggctctgccacc

SEQ ID NO: 4492933 - DNA, 25 bp, Homo sapien
ggaggctctgccaccaggccctcac

SEQ ID NO: 4492934 - DNA, 25 bp, Homo sapien
tggaggctctgccaccaggccctca

SEQ ID NO: 4492935 - DNA, 25 bp, Homo sapien
ctcttgtggaggctctgccaccagg

SEQ ID NO: 4492936 - DNA, 25 bp, Homo sapien
gtaaggccttctacacagagtacat

SEQ ID NO: 4492937 - DNA, 25 bp, Homo sapien
accctttatgggcagccttcagtgt

SEQ ID NO: 4492938 - DNA, 25 bp, Homo sapien
cagagtacatttacgtcttgcagag

SEQ ID NO: 4492939 - DNA, 25 bp, Homo sapien
tgtgccaaggccatgggtttcttcc

SEQ ID NO: 4492940 - DNA, 25 bp, Homo sapien
cttagtgtctgaataaaaccctcct

SEQ ID NO: 4492941 - DNA, 25 bp, Homo sapien
tgtctgaataaaaccctcctccatg

SEQ ID NO: 4492942 - DNA, 25 bp, Homo sapien
agtgtctgaataaaaccctcctcca

SEQ ID NO: 4492943 - DNA, 25 bp, Homo sapien
tagtgtctgaataaaaccctcctcc

SEQ ID NO: 4492944 - DNA, 25 bp, Homo sapien
cagggatagagccaactgtgcaaat

SEQ ID NO: 4492945 - DNA, 25 bp, Homo sapien
gttttccagcagtcagcaatagcag

SEQ ID NO: 4492946 - DNA, 25 bp, Homo sapien
tcacccgaattccatgccagtgaga

SEQ ID NO: 4492947 - DNA, 25 bp, Homo sapien
tgcccttgtgccaaaagcatccagg

SEQ ID NO: 4492948 - DNA, 25 bp, Homo sapien
atgggaaaccccggtgacttctgct

SEQ ID NO: 4492949 - DNA, 25 bp, Homo sapien
gatgggaaaccccggtgacttctgc

SEQ ID NO: 4492950 - DNA, 25 bp, Homo sapien
agatgggaaaccccggtgacttctg

SEQ ID NO: 4492951 - DNA, 25 bp, Homo sapien
tgagtagatgggaaaccccggtgac

SEQ ID NO: 4492952 - DNA, 25 bp, Homo sapien
gctcctgttcgtagcatgagtacca

SEQ ID NO: 4492953 - DNA, 25 bp, Homo sapien
ctcctgttcgtagcatgagtaccat

SEQ ID NO: 4492954 - DNA, 25 bp, Homo sapien
acaagtatatcccagtgttccttca

SEQ ID NO: 4492955 - DNA, 25 bp, Homo sapien
tatatcccagtgttccttcacagca

SEQ ID NO: 4492956 - DNA, 25 bp, Homo sapien
taatagaagcactggaacaagtata

SEQ ID NO: 4492957 - DNA, 25 bp, Homo sapien
ctgtccactttgataatagaagcac

SEQ ID NO: 4492958 - DNA, 25 bp, Homo sapien
tgctcggcggcaaagtgatcaaagt

SEQ ID NO: 4492959 - DNA, 25 bp, Homo sapien
gaggctgaggttgaccgccgctgct

SEQ ID NO: 4492960 - DNA, 25 bp, Homo sapien
gaaaccgcccttcctctgtgtactg

SEQ ID NO: 4492961 - DNA, 25 bp, Homo sapien
tgcagcacttaaccacacatcgtga

SEQ ID NO: 4492962 - DNA, 25 bp, Homo sapien
ctgcatgagaccaatagtaaggctc

SEQ ID NO: 4492963 - DNA, 25 bp, Homo sapien
ggaaggcggtaacgcctgcgagtcc

SEQ ID NO: 4492964 - DNA, 25 bp, Homo sapien
cgcgggaaggcggtaacgcctgcga

SEQ ID NO: 4492965 - DNA, 25 bp, Homo sapien
cgcatgcgccgaaagacgctcggga

SEQ ID NO: 4492966 - DNA, 25 bp, Homo sapien
gcacacagctccagtccgcgcatgc

SEQ ID NO: 4492967 - DNA, 25 bp, Homo sapien
gtctcggcagagcacaggcgcttca

SEQ ID NO: 4492968 - DNA, 25 bp, Homo sapien
tcggcagagcacaggcgcttcaccg

SEQ ID NO: 4492969 - DNA, 25 bp, Homo sapien
agagcacaggcgcttcaccgcggct

SEQ ID NO: 4492970 - DNA, 25 bp, Homo sapien
acggcagtctcggcagagcacaggc

SEQ ID NO: 4492971 - DNA, 25 bp, Homo sapien
gggccgagctgggacaactcttcac

SEQ ID NO: 4492972 - DNA, 25 bp, Homo sapien
ccccgcgggccgagctgggacaact

SEQ ID NO: 4492973 - DNA, 25 bp, Homo sapien
ccgcgggccgagctgggacaactct

SEQ ID NO: 4492974 - DNA, 25 bp, Homo sapien
gcgggccgagctgggacaactcttc

SEQ ID NO: 4492975 - DNA, 25 bp, Homo sapien
tcatctgcgcaatccaacagttcag

SEQ ID NO: 4492976 - DNA, 25 bp, Homo sapien
gacaaaacttgtacttaatgcagcc

SEQ ID NO: 4492977 - DNA, 25 bp, Homo sapien
taatgcagcctgcaaatccccaaga

SEQ ID NO: 4492978 - DNA, 25 bp, Homo sapien
ggcacactggtttttactgtactga

SEQ ID NO: 4492979 - DNA, 25 bp, Homo sapien
ctgattcccatttacgattaagatt

SEQ ID NO: 4492980 - DNA, 25 bp, Homo sapien
ttcccatttacgattaagattattc

SEQ ID NO: 4492981 - DNA, 25 bp, Homo sapien
cccatttacgattaagattattctg

SEQ ID NO: 4492982 - DNA, 25 bp, Homo sapien
gattcccatttacgattaagattat

SEQ ID NO: 4492983 - DNA, 25 bp, Homo sapien
tagaaattaacatgcatgctccatt

SEQ ID NO: 4492984 - DNA, 25 bp, Homo sapien
atcaaggacaattcacatttaaggg

SEQ ID NO: 4492985 - DNA, 25 bp, Homo sapien
acatcctggccttcaaaatgctcaa

SEQ ID NO: 4492986 - DNA, 25 bp, Homo sapien
ctccattcatttgccagagtctctg

SEQ ID NO: 4492987 - DNA, 25 bp, Homo sapien
gccaaaggaacatgatatcagtgac

SEQ ID NO: 4492988 - DNA, 25 bp, Homo sapien
tttagataagcaacagaatggccac

SEQ ID NO: 4492989 - DNA, 25 bp, Homo sapien
gaactcagattaacgtttagcacct

SEQ ID NO: 4492990 - DNA, 25 bp, Homo sapien
tagcacctaagaggacagtaacgat

SEQ ID NO: 4492991 - DNA, 25 bp, Homo sapien
agtgatataatatgccgggcacagt

SEQ ID NO: 4492992 - DNA, 25 bp, Homo sapien
cccacatctgaattaactatctaca

SEQ ID NO: 4492993 - DNA, 25 bp, Homo sapien
ctacatgttccaagactttattata

SEQ ID NO: 4492994 - DNA, 25 bp, Homo sapien
actgggtggtttcaagaccacagaa

SEQ ID NO: 4492995 - DNA, 25 bp, Homo sapien
tcttcatttgagctcagtaaagtta

SEQ ID NO: 4492996 - DNA, 25 bp, Homo sapien
gagctcagtaaagttactataaaag

SEQ ID NO: 4492997 - DNA, 25 bp, Homo sapien
cattaaaaaactactagctgcatca

SEQ ID NO: 4492998 - DNA, 25 bp, Homo sapien
aaaaactactagctgcatcaggcca

SEQ ID NO: 4492999 - DNA, 25 bp, Homo sapien
gagtcgcagaagagaaatggcccac

SEQ ID NO: 4493000 - DNA, 25 bp, Homo sapien
tcaaggtagaaggagttggactgcc

SEQ ID NO: 4493001 - DNA, 25 bp, Homo sapien
gccaatatactaatgaccagggaag

SEQ ID NO: 4493002 - DNA, 25 bp, Homo sapien
gctggaccagctagagaaggattca

SEQ ID NO: 4493003 - DNA, 25 bp, Homo sapien
cttcaccttcacctgacttcaactc

SEQ ID NO: 4493004 - DNA, 25 bp, Homo sapien
tcaccttcacctgacttcaactcca

SEQ ID NO: 4493005 - DNA, 25 bp, Homo sapien
ctgatgcttgcagcacaataaccca

SEQ ID NO: 4493006 - DNA, 25 bp, Homo sapien
caccttcacctgacttcaactccat

SEQ ID NO: 4493007 - DNA, 25 bp, Homo sapien
tgtggccatgaggggtgcgggcgag

SEQ ID NO: 4493008 - DNA, 25 bp, Homo sapien
tggccatgaggggtgcgggcgagct

SEQ ID NO: 4493009 - DNA, 25 bp, Homo sapien
gtggccatgaggggtgcgggcgagc

SEQ ID NO: 4493010 - DNA, 25 bp, Homo sapien
ctgtggccatgaggggtgcgggcga

SEQ ID NO: 4493011 - DNA, 25 bp, Homo sapien
agatccgagtacaggtgacactgtt

SEQ ID NO: 4493012 - DNA, 25 bp, Homo sapien
acaatctggcttggctattgtgtcc

SEQ ID NO: 4493013 - DNA, 25 bp, Homo sapien
aatctggcttggctattgtgtccat

SEQ ID NO: 4493014 - DNA, 25 bp, Homo sapien
aggtgacactgttcatgacacagtc

SEQ ID NO: 4493015 - DNA, 25 bp, Homo sapien
tttgctcattgaactgagcttggtc

SEQ ID NO: 4493016 - DNA, 25 bp, Homo sapien
tgctcattgaactgagcttggtcat

SEQ ID NO: 4493017 - DNA, 25 bp, Homo sapien
gatttgctcattgaactgagcttgg

SEQ ID NO: 4493018 - DNA, 25 bp, Homo sapien
gctcattgaactgagcttggtcatt

SEQ ID NO: 4493019 - DNA, 25 bp, Homo sapien
tgctgtctaacaacagagaactggt

SEQ ID NO: 4493020 - DNA, 25 bp, Homo sapien
attagtccatagcaacactgccagg

SEQ ID NO: 4493021 - DNA, 25 bp, Homo sapien
tgtaaccatcacctatatacctggg

SEQ ID NO: 4493022 - DNA, 25 bp, Homo sapien
taatgaggccttatatccacttagg

SEQ ID NO: 4493023 - DNA, 25 bp, Homo sapien
gggatcttgggacttctaaatctga

SEQ ID NO: 4493024 - DNA, 25 bp, Homo sapien
ggcctcagagttgaaagcacaatac

SEQ ID NO: 4493025 - DNA, 25 bp, Homo sapien
cagaaggatccttgctgagtaggta

SEQ ID NO: 4493026 - DNA, 25 bp, Homo sapien
agtgagtggacttgcctgggaatcc

SEQ ID NO: 4493027 - DNA, 25 bp, Homo sapien
cactcactgtggtgttaaacagacc

SEQ ID NO: 4493028 - DNA, 25 bp, Homo sapien
caatgatatattacggtaggccctc

SEQ ID NO: 4493029 - DNA, 25 bp, Homo sapien
tagaatgtctcgctacagttggtgc

SEQ ID NO: 4493030 - DNA, 25 bp, Homo sapien
cagttggtgcctgactcacagtaga

SEQ ID NO: 4493031 - DNA, 25 bp, Homo sapien
cacaagttctgtatcgacatggcat

SEQ ID NO: 4493032 - DNA, 25 bp, Homo sapien
tgttctggccaaagtctatgtgcac

SEQ ID NO: 4493033 - DNA, 25 bp, Homo sapien
caaatgatgactccagatgagcagc

SEQ ID NO: 4493034 - DNA, 25 bp, Homo sapien
gatgagcagctattccagaagtaaa

SEQ ID NO: 4493035 - DNA, 25 bp, Homo sapien
tgtgtagcgtaaactcaaacccaga

SEQ ID NO: 4493036 - DNA, 25 bp, Homo sapien
cagagcttaaagatggagccctgta

SEQ ID NO: 4493037 - DNA, 25 bp, Homo sapien
tgcttgtagacttgagcaccagggc

SEQ ID NO: 4493038 - DNA, 25 bp, Homo sapien
taacctaccatgactcgagaaaggg

SEQ ID NO: 4493039 - DNA, 25 bp, Homo sapien
ggtacttccatggcacaatgtgctt

SEQ ID NO: 4493040 - DNA, 25 bp, Homo sapien
gtacttccatggcacaatgtgcttc

SEQ ID NO: 4493041 - DNA, 25 bp, Homo sapien
caatgtgcttcaaatgaatttccat

SEQ ID NO: 4493042 - DNA, 25 bp, Homo sapien
gccagagaaacagtgtgtctcctta

SEQ ID NO: 4493043 - DNA, 25 bp, Homo sapien
agtgtgtctccttaggacagacgcg

SEQ ID NO: 4493044 - DNA, 25 bp, Homo sapien
gaaacagtgtgtctccttaggacag

SEQ ID NO: 4493045 - DNA, 25 bp, Homo sapien
tctccttaggacagacgcggtggca

SEQ ID NO: 4493046 - DNA, 25 bp, Homo sapien
tataagggagcttgctgtggattaa

SEQ ID NO: 4493047 - DNA, 25 bp, Homo sapien
atataagggagcttgctgtggatta

SEQ ID NO: 4493048 - DNA, 25 bp, Homo sapien
taagggagcttgctgtggattaagt

SEQ ID NO: 4493049 - DNA, 25 bp, Homo sapien
ataagggagcttgctgtggattaag

SEQ ID NO: 4493050 - DNA, 25 bp, Homo sapien
aaagcttggatgctttctctttaag

SEQ ID NO: 4493051 - DNA, 25 bp, Homo sapien
gaaagcttggatgctttctctttaa

SEQ ID NO: 4493052 - DNA, 25 bp, Homo sapien
cattccgtagctcatgggctccttc

SEQ ID NO: 4493053 - DNA, 25 bp, Homo sapien
ttcaaatctctgaccactgactctc

SEQ ID NO: 4493054 - DNA, 25 bp, Homo sapien
gactctcctgatactccctctcact

SEQ ID NO: 4493055 - DNA, 25 bp, Homo sapien
atactccctctcactcatgagaact

SEQ ID NO: 4493056 - DNA, 25 bp, Homo sapien
tcgcctgagcagtaagataaaactc

SEQ ID NO: 4493057 - DNA, 25 bp, Homo sapien
ggaaatactcccacaatcagattgg

SEQ ID NO: 4493058 - DNA, 25 bp, Homo sapien
aaaggaatgtaccatcgcctgagca

SEQ ID NO: 4493059 - DNA, 25 bp, Homo sapien
ctttaacaaattccggaagatgaca

SEQ ID NO: 4493060 - DNA, 25 bp, Homo sapien
gggtctcaccacatcgcataggctg

SEQ ID NO: 4493061 - DNA, 25 bp, Homo sapien
cagatggttgaagattatactcggc

SEQ ID NO: 4493062 - DNA, 25 bp, Homo sapien
tgctacaagtataccaagcccctga

SEQ ID NO: 4493063 - DNA, 25 bp, Homo sapien
cctgataaagccctatgcctgagca

SEQ ID NO: 4493064 - DNA, 25 bp, Homo sapien
gtacagttttccagcagttcacaca

SEQ ID NO: 4493065 - DNA, 25 bp, Homo sapien
acagttacagtgatataacaggtgc

SEQ ID NO: 4493066 - DNA, 25 bp, Homo sapien
gaagaaactcatgccaacatacagt

SEQ ID NO: 4493067 - DNA, 25 bp, Homo sapien
tgtagcttgccaaccactagtctaa

SEQ ID NO: 4493068 - DNA, 25 bp, Homo sapien
tatatccttgccaggatccatggcc

SEQ ID NO: 4493069 - DNA, 25 bp, Homo sapien
aaaggaggagggacctacaccatca

SEQ ID NO: 4493070 - DNA, 25 bp, Homo sapien
gctgaaacccatctgtaaagatatg

SEQ ID NO: 4493071 - DNA, 25 bp, Homo sapien
tacaccatcaaggacagtttaggaa

SEQ ID NO: 4493072 - DNA, 25 bp, Homo sapien
gaatcagaatcagtcacttaatagc

SEQ ID NO: 4493073 - DNA, 25 bp, Homo sapien
ctcaaacatgaaagacaaggccctt

SEQ ID NO: 4493074 - DNA, 25 bp, Homo sapien
ggtatcagccgccacacatggtagt

SEQ ID NO: 4493075 - DNA, 25 bp, Homo sapien
gacccctgataagaaccacttgaaa

SEQ ID NO: 4493076 - DNA, 25 bp, Homo sapien
caaacgtgttgcttgggtccaaacg

SEQ ID NO: 4493077 - DNA, 25 bp, Homo sapien
ccaaacgtgtgacaaagtcagagag

SEQ ID NO: 4493078 - DNA, 25 bp, Homo sapien
gcaattatgtgcactgcgctgtaca

SEQ ID NO: 4493079 - DNA, 25 bp, Homo sapien
tgtgcaattatgtgcactgcgctgt

SEQ ID NO: 4493080 - DNA, 25 bp, Homo sapien
ggatgtacaccccattagagcatgt

SEQ ID NO: 4493081 - DNA, 25 bp, Homo sapien
ggagaatttccacagggaggaccaa

SEQ ID NO: 4493082 - DNA, 25 bp, Homo sapien
tagtcaagtacaaaccatcacaggt

SEQ ID NO: 4493083 - DNA, 25 bp, Homo sapien
caggcccatttaagagacatcacca

SEQ ID NO: 4493084 - DNA, 25 bp, Homo sapien
tagtgagaaatgtatccctgcaact

SEQ ID NO: 4493085 - DNA, 25 bp, Homo sapien
caacctcaggaagagtacacaccta

SEQ ID NO: 4493086 - DNA, 25 bp, Homo sapien
tatccctgcaactgacaattttttc

SEQ ID NO: 4493087 - DNA, 25 bp, Homo sapien
gaagagtacacacctacatcaccac

SEQ ID NO: 4493088 - DNA, 25 bp, Homo sapien
tcagaactgaccttccgagtacttg

SEQ ID NO: 4493089 - DNA, 25 bp, Homo sapien
aaataccaagtaaaacactacatca

SEQ ID NO: 4493090 - DNA, 25 bp, Homo sapien
tacagtgacggagggtggaacccaa

SEQ ID NO: 4493091 - DNA, 25 bp, Homo sapien
caggagcaatggtctccaatgtatc

SEQ ID NO: 4493092 - DNA, 25 bp, Homo sapien
ggaaacgcaaacatgccaaggactc

SEQ ID NO: 4493093 - DNA, 25 bp, Homo sapien
catgaggataatgcaatgctgtggc

SEQ ID NO: 4493094 - DNA, 25 bp, Homo sapien
gctgggagcccagttcaggaaacgc

SEQ ID NO: 4493095 - DNA, 25 bp, Homo sapien
ctggtttgcatgaggataatgcaat

SEQ ID NO: 4493096 - DNA, 25 bp, Homo sapien
gccagcaccaacttcttatcaaggg

SEQ ID NO: 4493097 - DNA, 25 bp, Homo sapien
aacgggtaaagttcaaagcctgctg

SEQ ID NO: 4493098 - DNA, 25 bp, Homo sapien
cactggttgctaggaattgagctgc

SEQ ID NO: 4493099 - DNA, 25 bp, Homo sapien
catcctggacgaaatgaaagtcttc

SEQ ID NO: 4493100 - DNA, 25 bp, Homo sapien
cacaaacttaaagtgtgtttgtaga

SEQ ID NO: 4493101 - DNA, 25 bp, Homo sapien
taatccctagggtcatttcgctgca

SEQ ID NO: 4493102 - DNA, 25 bp, Homo sapien
gaaactaactatgctatggctcagg

SEQ ID NO: 4493103 - DNA, 25 bp, Homo sapien
tatgatgaccatagaaaagtagccc

SEQ ID NO: 4493104 - DNA, 25 bp, Homo sapien
tcagtgaactctcatagggagggcc

SEQ ID NO: 4493105 - DNA, 25 bp, Homo sapien
gacaccgttctgacggctgaccaca

SEQ ID NO: 4493106 - DNA, 25 bp, Homo sapien
ggactatccaggtagaatctgacag

SEQ ID NO: 4493107 - DNA, 25 bp, Homo sapien
tagatttaagagaatcaaagctggc

SEQ ID NO: 4493108 - DNA, 25 bp, Homo sapien
tctgacagtatgcacctgacagtat

SEQ ID NO: 4493109 - DNA, 25 bp, Homo sapien
gacactgatttgtgaaaggcagcca

SEQ ID NO: 4493110 - DNA, 25 bp, Homo sapien
gtattaaggcccatcaccaggttta

SEQ ID NO: 4493111 - DNA, 25 bp, Homo sapien
caggtttatataaggcatgagtgcc

SEQ ID NO: 4493112 - DNA, 25 bp, Homo sapien
gcacgtccgtgcacagactttttgg

SEQ ID NO: 4493113 - DNA, 25 bp, Homo sapien
ttttcactaaccaccgagctgagaa

SEQ ID NO: 4493114 - DNA, 25 bp, Homo sapien
tttcactaaccaccgagctgagaaa

SEQ ID NO: 4493115 - DNA, 25 bp, Homo sapien
attttcactaaccaccgagctgaga

SEQ ID NO: 4493116 - DNA, 25 bp, Homo sapien
cattttcactaaccaccgagctgag

SEQ ID NO: 4493117 - DNA, 25 bp, Homo sapien
tgcatcaatgtctctcgcgggccag

SEQ ID NO: 4493118 - DNA, 25 bp, Homo sapien
aatgcatcaatgtctctcgcgggcc

SEQ ID NO: 4493119 - DNA, 25 bp, Homo sapien
aggaaccacgtcaacctcagcagtc

SEQ ID NO: 4493120 - DNA, 25 bp, Homo sapien
gtcccagccgcacagcaaaatgcat

SEQ ID NO: 4493121 - DNA, 25 bp, Homo sapien
tggtgcagcttgtgatagcctcgct

SEQ ID NO: 4493122 - DNA, 25 bp, Homo sapien
aaggccaagctcacaggcgtcgccc

SEQ ID NO: 4493123 - DNA, 25 bp, Homo sapien
ttgtggatactgagagctccgcggc

SEQ ID NO: 4493124 - DNA, 25 bp, Homo sapien
gtgatagcctcgctccaaggccaag

SEQ ID NO: 4493125 - DNA, 25 bp, Homo sapien
accttatctttaccaagacacaaag

SEQ ID NO: 4493126 - DNA, 25 bp, Homo sapien
tacaaccttatctttaccaagacac

SEQ ID NO: 4493127 - DNA, 25 bp, Homo sapien
cttatctttaccaagacacaaagac

SEQ ID NO: 4493128 - DNA, 25 bp, Homo sapien
ttctacaaccttatctttaccaaga

SEQ ID NO: 4493129 - DNA, 25 bp, Homo sapien
tctcagagataaggttacagcatcc

SEQ ID NO: 4493130 - DNA, 25 bp, Homo sapien
ctagcatgcgcaagaaaacaatggg

SEQ ID NO: 4493131 - DNA, 25 bp, Homo sapien
gatcctaacaacacaagtccttcag

SEQ ID NO: 4493132 - DNA, 25 bp, Homo sapien
gctgatactcacacatggctgccca

SEQ ID NO: 4493133 - DNA, 25 bp, Homo sapien
taataaaccatgacgcagacatctg

SEQ ID NO: 4493134 - DNA, 25 bp, Homo sapien
aggagctccttgaaacgaacacagg

SEQ ID NO: 4493135 - DNA, 25 bp, Homo sapien
cagacatctgcgcttaggctccaat

SEQ ID NO: 4493136 - DNA, 25 bp, Homo sapien
tcacagtagaccaacaccaacatca

SEQ ID NO: 4493137 - DNA, 25 bp, Homo sapien
tattcttaatatgcatactactagt

SEQ ID NO: 4493138 - DNA, 25 bp, Homo sapien
ttcttaatatgcatactactagtaa

SEQ ID NO: 4493139 - DNA, 25 bp, Homo sapien
tatattcttaatatgcatactacta

SEQ ID NO: 4493140 - DNA, 25 bp, Homo sapien
tcttaatatgcatactactagtaag

SEQ ID NO: 4493141 - DNA, 25 bp, Homo sapien
gatgtgaatcagactcagaggttaa

SEQ ID NO: 4493142 - DNA, 25 bp, Homo sapien
tccagtgcaaccgtctccaggaaat

SEQ ID NO: 4493143 - DNA, 25 bp, Homo sapien
cagaacagtctccatacggtatttc

SEQ ID NO: 4493144 - DNA, 25 bp, Homo sapien
tccaactctcgatgatgcctcacag

SEQ ID NO: 4493145 - DNA, 25 bp, Homo sapien
caatcaggcaagctctgaaggcagc

SEQ ID NO: 4493146 - DNA, 25 bp, Homo sapien
tctgtttccacaggacgaaaggcct

SEQ ID NO: 4493147 - DNA, 25 bp, Homo sapien
gagtccacaataggtgctggctcca

SEQ ID NO: 4493148 - DNA, 25 bp, Homo sapien
gcaggtttgttaccatccagggaac

SEQ ID NO: 4493149 - DNA, 25 bp, Homo sapien
tttgcaaccaaatcgccactagaag

SEQ ID NO: 4493150 - DNA, 25 bp, Homo sapien
gaagggctaaatctgagggtgacat

SEQ ID NO: 4493151 - DNA, 25 bp, Homo sapien
tctgagttctggtgtggcattacat

SEQ ID NO: 4493152 - DNA, 25 bp, Homo sapien
tcgtctccagttgtagaacaaatgg

SEQ ID NO: 4493153 - DNA, 25 bp, Homo sapien
tctagtggccgcgtatcaggctcat

SEQ ID NO: 4493154 - DNA, 25 bp, Homo sapien
tggtattccccatcccgtgctgaag

SEQ ID NO: 4493155 - DNA, 25 bp, Homo sapien
caaaaatccgcacgttcctgggtat

SEQ ID NO: 4493156 - DNA, 25 bp, Homo sapien
gctgtggtgctttcggactcgctaa

SEQ ID NO: 4493157 - DNA, 25 bp, Homo sapien
aaggcagaggatgcacccggtgaat

SEQ ID NO: 4493158 - DNA, 25 bp, Homo sapien
tcagcagtgagacttgtggggccac

SEQ ID NO: 4493159 - DNA, 25 bp, Homo sapien
gggccacttccttgttatgttcagt

SEQ ID NO: 4493160 - DNA, 25 bp, Homo sapien
tcagtttctgccttaagaaaggcag

SEQ ID NO: 4493161 - DNA, 25 bp, Homo sapien
acagacatggcaacagagcggagct

SEQ ID NO: 4493162 - DNA, 25 bp, Homo sapien
gcttcctgccttgactctgtggcca

SEQ ID NO: 4493163 - DNA, 25 bp, Homo sapien
cagttaagagcatcggacccatcag

SEQ ID NO: 4493164 - DNA, 25 bp, Homo sapien
cttgtagagcattaacccctgtaac

SEQ ID NO: 4493165 - DNA, 25 bp, Homo sapien
tggacagtgacatgtgacaggcctc

SEQ ID NO: 4493166 - DNA, 25 bp, Homo sapien
tagagccactggcaaacctagaacg

SEQ ID NO: 4493167 - DNA, 25 bp, Homo sapien
ccagcggccttgacttgttcgatga

SEQ ID NO: 4493168 - DNA, 25 bp, Homo sapien
ttagtgagaggacccaactcagggc

SEQ ID NO: 4493169 - DNA, 25 bp, Homo sapien
tgactattaacttggctacctaccc

SEQ ID NO: 4493170 - DNA, 25 bp, Homo sapien
gaagcaaaatctgtccaaccctgag

SEQ ID NO: 4493171 - DNA, 25 bp, Homo sapien
agtgcaaggcctcaaaacaacaaag

SEQ ID NO: 4493172 - DNA, 25 bp, Homo sapien
gactcttaagggaatctgcttctca

SEQ ID NO: 4493173 - DNA, 25 bp, Homo sapien
cagatagtttatttccacggagcaa

SEQ ID NO: 4493174 - DNA, 25 bp, Homo sapien
gaagtgtgcatcaaactgaccttta

SEQ ID NO: 4493175 - DNA, 25 bp, Homo sapien
tctgtctacagctggtaacaggtgg

SEQ ID NO: 4493176 - DNA, 25 bp, Homo sapien
tgtccgactcccgtttcagcttcag

SEQ ID NO: 4493177 - DNA, 25 bp, Homo sapien
tgctctaaaatccacttcatcttca

SEQ ID NO: 4493178 - DNA, 25 bp, Homo sapien
ttcttcagaaattgaacttgctcta

SEQ ID NO: 4493179 - DNA, 25 bp, Homo sapien
aattgaacttgctctaaaatccact

SEQ ID NO: 4493180 - DNA, 25 bp, Homo sapien
atcttcagctttcacgtctggcatt

SEQ ID NO: 4493181 - DNA, 25 bp, Homo sapien
gggtcattgggccttgcttcatctt

SEQ ID NO: 4493182 - DNA, 25 bp, Homo sapien
ggtcattgggccttgcttcatcttc

SEQ ID NO: 4493183 - DNA, 25 bp, Homo sapien
tcagaaagcaaagggtctagagcca

SEQ ID NO: 4493184 - DNA, 25 bp, Homo sapien
aaagacacacgtacccatgcagggt

SEQ ID NO: 4493185 - DNA, 25 bp, Homo sapien
gccacccaggcattagtcatgaata

SEQ ID NO: 4493186 - DNA, 25 bp, Homo sapien
taatgcctgctttacaagtagccac

SEQ ID NO: 4493187 - DNA, 25 bp, Homo sapien
tgtcagagcaccacggagaagagtt

SEQ ID NO: 4493188 - DNA, 25 bp, Homo sapien
cacggagaagagttaagtagtcaga

SEQ ID NO: 4493189 - DNA, 25 bp, Homo sapien
aggcaagtttgtcagagcaccacgg

SEQ ID NO: 4493190 - DNA, 25 bp, Homo sapien
caccacggagaagagttaagtagtc

SEQ ID NO: 4493191 - DNA, 25 bp, Homo sapien
aaatgtttgccgacctctgctctct

SEQ ID NO: 4493192 - DNA, 25 bp, Homo sapien
tatttcacgacacatgaccatcaca

SEQ ID NO: 4493193 - DNA, 25 bp, Homo sapien
tcatactcacagcaaagcttactag

SEQ ID NO: 4493194 - DNA, 25 bp, Homo sapien
taaagttgtattgaagcacagtgac

SEQ ID NO: 4493195 - DNA, 25 bp, Homo sapien
cataagagtattctctgccctgaac

SEQ ID NO: 4493196 - DNA, 25 bp, Homo sapien
ggtccacagcagtgatagggttttg

SEQ ID NO: 4493197 - DNA, 25 bp, Homo sapien
tctgacttctgagttaggtttaaac

SEQ ID NO: 4493198 - DNA, 25 bp, Homo sapien
cacttaagacactgtcccagttgct

SEQ ID NO: 4493199 - DNA, 25 bp, Homo sapien
gatacacggtaactctgacacccag

SEQ ID NO: 4493200 - DNA, 25 bp, Homo sapien
tctgggacagctagaagcacagtag

SEQ ID NO: 4493201 - DNA, 25 bp, Homo sapien
cagacaaatggcagtataagttccc

SEQ ID NO: 4493202 - DNA, 25 bp, Homo sapien
cagtggctacaaagaaacctgtggg

SEQ ID NO: 4493203 - DNA, 25 bp, Homo sapien
aacatcttgggcctttacacagctg

SEQ ID NO: 4493204 - DNA, 25 bp, Homo sapien
tacacagctgttgccatatcatggc

SEQ ID NO: 4493205 - DNA, 25 bp, Homo sapien
tcaagaggcttatgtttagttatcc

SEQ ID NO: 4493206 - DNA, 25 bp, Homo sapien
tggctttggtgcatggtcggtcaca

SEQ ID NO: 4493207 - DNA, 25 bp, Homo sapien
aactctggagctaggctgccttacg

SEQ ID NO: 4493208 - DNA, 25 bp, Homo sapien
tgactctattaagctagcatcgtgg

SEQ ID NO: 4493209 - DNA, 25 bp, Homo sapien
tcgtggttaaaagcatgaactctgg

SEQ ID NO: 4493210 - DNA, 25 bp, Homo sapien
tatttgtcaacactactgccaggtt

SEQ ID NO: 4493211 - DNA, 25 bp, Homo sapien
tttcaaagcgatggcatgaaaaaag

SEQ ID NO: 4493212 - DNA, 25 bp, Homo sapien
aaaatccagtatatactttgccagg

SEQ ID NO: 4493213 - DNA, 25 bp, Homo sapien
ccagtatatactttgccaggaagag

SEQ ID NO: 4493214 - DNA, 25 bp, Homo sapien
gaaaggaagacgacgctatttcaaa

SEQ ID NO: 4493215 - DNA, 25 bp, Homo sapien
gcaggaagtatatccactgttaact

SEQ ID NO: 4493216 - DNA, 25 bp, Homo sapien
ccaaatttctcacggttaggtggtg

SEQ ID NO: 4493217 - DNA, 25 bp, Homo sapien
cagagaaaatgcaggaagtatatcc

SEQ ID NO: 4493218 - DNA, 25 bp, Homo sapien
gggaccagtgcaagtccttagttcc

SEQ ID NO: 4493219 - DNA, 25 bp, Homo sapien
tgtcacagaggctgtagcgcctctt

SEQ ID NO: 4493220 - DNA, 25 bp, Homo sapien
acagaggctgtagcgcctcttgtgc

SEQ ID NO: 4493221 - DNA, 25 bp, Homo sapien
tagcgcctcttgtgccgttcataca

SEQ ID NO: 4493222 - DNA, 25 bp, Homo sapien
gctgtagcgcctcttgtgccgttca

SEQ ID NO: 4493223 - DNA, 25 bp, Homo sapien
catcagggcatggctctattgtaca

SEQ ID NO: 4493224 - DNA, 25 bp, Homo sapien
agggcatggctctattgtacaccag

SEQ ID NO: 4493225 - DNA, 25 bp, Homo sapien
gctctattgtacaccagttttctcg

SEQ ID NO: 4493226 - DNA, 25 bp, Homo sapien
gcatggctctattgtacaccagttt

SEQ ID NO: 4493227 - DNA, 25 bp, Homo sapien
ccaagtttgggacgagagtctgctc

SEQ ID NO: 4493228 - DNA, 25 bp, Homo sapien
gactggaaaacaaactagctcacga

SEQ ID NO: 4493229 - DNA, 25 bp, Homo sapien
gggctgtcacagcaactacgctgag

SEQ ID NO: 4493230 - DNA, 25 bp, Homo sapien
tccctaaaggcagagctaatccaca

SEQ ID NO: 4493231 - DNA, 25 bp, Homo sapien
gggtcacgacagtcaaaccgtctga

SEQ ID NO: 4493232 - DNA, 25 bp, Homo sapien
ttagtaaatagtacacgggcatcca

SEQ ID NO: 4493233 - DNA, 25 bp, Homo sapien
gagatacatacagcttgccgaggag

SEQ ID NO: 4493234 - DNA, 25 bp, Homo sapien
tatttggacaaccaggtaggcatgc

SEQ ID NO: 4493235 - DNA, 25 bp, Homo sapien
catctgccacgtttatattaggtac

SEQ ID NO: 4493236 - DNA, 25 bp, Homo sapien
gtagctctgctactccaattctagg

SEQ ID NO: 4493237 - DNA, 25 bp, Homo sapien
ggttgaaatagctcctacaggacaa

SEQ ID NO: 4493238 - DNA, 25 bp, Homo sapien
tacaggacaatcatgcatctgccac

SEQ ID NO: 4493239 - DNA, 25 bp, Homo sapien
ccatgtcatcactgggtgagtgaaa

SEQ ID NO: 4493240 - DNA, 25 bp, Homo sapien
gaggtcagaatcactcccagattct

SEQ ID NO: 4493241 - DNA, 25 bp, Homo sapien
ggtgagtgaaagaggtcagaatcac

SEQ ID NO: 4493242 - DNA, 25 bp, Homo sapien
tgtccatgtcatcactgggtgagtg

SEQ ID NO: 4493243 - DNA, 25 bp, Homo sapien
gtttagtggcgcgaacttgactcac

SEQ ID NO: 4493244 - DNA, 25 bp, Homo sapien
tgggttcaagtgagcacgtccagct

SEQ ID NO: 4493245 - DNA, 25 bp, Homo sapien
taaaccctggtaatctggcgcttcc

SEQ ID NO: 4493246 - DNA, 25 bp, Homo sapien
cctacaaggctagctggatcacaac

SEQ ID NO: 4493247 - DNA, 25 bp, Homo sapien
caaggtcccattatattggcccagg

SEQ ID NO: 4493248 - DNA, 25 bp, Homo sapien
tagcacaggccatttatatgagcaa

SEQ ID NO: 4493249 - DNA, 25 bp, Homo sapien
aaaatgctaagatccaccacgcctg

SEQ ID NO: 4493250 - DNA, 25 bp, Homo sapien
gcgttaacctcctacacttaagtga

SEQ ID NO: 4493251 - DNA, 25 bp, Homo sapien
caacacatgaaagaaggatgttccc

SEQ ID NO: 4493252 - DNA, 25 bp, Homo sapien
cacgcccagccgcaattgtcatttt

SEQ ID NO: 4493253 - DNA, 25 bp, Homo sapien
ttgtagatacatctgctaacctggg

SEQ ID NO: 4493254 - DNA, 25 bp, Homo sapien
gaccttgatttacctctctttggga

SEQ ID NO: 4493255 - DNA, 25 bp, Homo sapien
gcaatgaagggaatccatctgtctc

SEQ ID NO: 4493256 - DNA, 25 bp, Homo sapien
tatgaccccacctaaagtttgccac

SEQ ID NO: 4493257 - DNA, 25 bp, Homo sapien
aaaatgtggaatagcttatgacccc

SEQ ID NO: 4493258 - DNA, 25 bp, Homo sapien
taaatatcaccaactgcaatgaagg

SEQ ID NO: 4493259 - DNA, 25 bp, Homo sapien
actgccatgagaagaatgtcggtcc

SEQ ID NO: 4493260 - DNA, 25 bp, Homo sapien
tgtagaatccatcaaggctttgccg

SEQ ID NO: 4493261 - DNA, 25 bp, Homo sapien
tcatcggtggatgaactggatccgg

SEQ ID NO: 4493262 - DNA, 25 bp, Homo sapien
taggacagagcagtttgcaggcact

SEQ ID NO: 4493263 - DNA, 25 bp, Homo sapien
agaagcttctcaaaagcaagcagac

SEQ ID NO: 4493264 - DNA, 25 bp, Homo sapien
tctttcttctatactatggggtctc

SEQ ID NO: 4493265 - DNA, 25 bp, Homo sapien
tatactatggggtctcctaaattct

SEQ ID NO: 4493266 - DNA, 25 bp, Homo sapien
ttccaaagcctatattctttcttct

SEQ ID NO: 4493267 - DNA, 25 bp, Homo sapien
gctattgctgagctgtttacatcaa

SEQ ID NO: 4493268 - DNA, 25 bp, Homo sapien
taattgctattgctgagctgtttac

SEQ ID NO: 4493269 - DNA, 25 bp, Homo sapien
gctgagctgtttacatcaattatta

SEQ ID NO: 4493270 - DNA, 25 bp, Homo sapien
agcaaataattgctattgctgagct

SEQ ID NO: 4493271 - DNA, 25 bp, Homo sapien
gataagactgtcctgccaaaaaagt

SEQ ID NO: 4493272 - DNA, 25 bp, Homo sapien
caggagatcccatgacattatgcag

SEQ ID NO: 4493273 - DNA, 25 bp, Homo sapien
ttcagaggtattaggacagtggtcc

SEQ ID NO: 4493274 - DNA, 25 bp, Homo sapien
tcaaagttgtgacaaaggaacccat

SEQ ID NO: 4493275 - DNA, 25 bp, Homo sapien
tgacaacatccccaagaactcgcat

SEQ ID NO: 4493276 - DNA, 25 bp, Homo sapien
tcctgacaacatccccaagaactcg

SEQ ID NO: 4493277 - DNA, 25 bp, Homo sapien
gacaacatccccaagaactcgcatt

SEQ ID NO: 4493278 - DNA, 25 bp, Homo sapien
aacatccccaagaactcgcattgaa

SEQ ID NO: 4493279 - DNA, 25 bp, Homo sapien
tatagtggagacacttcgctggtct

SEQ ID NO: 4493280 - DNA, 25 bp, Homo sapien
tctggtaagtgggatgacactgaca

SEQ ID NO: 4493281 - DNA, 25 bp, Homo sapien
caatagggagataggaagacagaca

SEQ ID NO: 4493282 - DNA, 25 bp, Homo sapien
tgaggagatttaacacgaagagagt

SEQ ID NO: 4493283 - DNA, 25 bp, Homo sapien
ggccagcagagtactgcacaccaga

SEQ ID NO: 4493284 - DNA, 25 bp, Homo sapien
ctcaggccagcagagtactgcacac

SEQ ID NO: 4493285 - DNA, 25 bp, Homo sapien
tcaggccagcagagtactgcacacc

SEQ ID NO: 4493286 - DNA, 25 bp, Homo sapien
cagcagagtactgcacaccagaggg

SEQ ID NO: 4493287 - DNA, 25 bp, Homo sapien
tttagtaattaaatctggctgttca

SEQ ID NO: 4493288 - DNA, 25 bp, Homo sapien
tatgaaacgatgaggagtctctgaa

SEQ ID NO: 4493289 - DNA, 25 bp, Homo sapien
ggctgttcagttgagagaagaatat

SEQ ID NO: 4493290 - DNA, 25 bp, Homo sapien
gaaaaccagatctatgcttactgca

SEQ ID NO: 4493291 - DNA, 25 bp, Homo sapien
tgaggatggcttgtttccgacacca

SEQ ID NO: 4493292 - DNA, 25 bp, Homo sapien
tgttctctctggtctgactccagat

SEQ ID NO: 4493293 - DNA, 25 bp, Homo sapien
gtgacaccaaagagtcaacccgttc

SEQ ID NO: 4493294 - DNA, 25 bp, Homo sapien
agctcctcctgtcaagccttctaga

SEQ ID NO: 4493295 - DNA, 25 bp, Homo sapien
attaggtgctaaacacttggtttag

SEQ ID NO: 4493296 - DNA, 25 bp, Homo sapien
aacacttggtttagtgctagattaa

SEQ ID NO: 4493297 - DNA, 25 bp, Homo sapien
atgagatggattttgtcaatggaga

SEQ ID NO: 4493298 - DNA, 25 bp, Homo sapien
agaggaaatggctgatgtacagtaa

SEQ ID NO: 4493299 - DNA, 25 bp, Homo sapien
gaaatggctgatgtacagtaattaa

SEQ ID NO: 4493300 - DNA, 25 bp, Homo sapien
gatggattttgtcaatggagaggaa

SEQ ID NO: 4493301 - DNA, 25 bp, Homo sapien
gtcatgaagtgagatggaacatccc

SEQ ID NO: 4493302 - DNA, 25 bp, Homo sapien
tatcagggaacaatgaggaaacccc

SEQ ID NO: 4493303 - DNA, 25 bp, Homo sapien
aatatagggcatctgcttctgtcac

SEQ ID NO: 4493304 - DNA, 25 bp, Homo sapien
gagacacatggtctttcagcaaaga

SEQ ID NO: 4493305 - DNA, 25 bp, Homo sapien
agatccgccttgctggccgcatctg

SEQ ID NO: 4493306 - DNA, 25 bp, Homo sapien
atgctgatggagatccgccttgctg

SEQ ID NO: 4493307 - DNA, 25 bp, Homo sapien
gctgatggagatccgccttgctggc

SEQ ID NO: 4493308 - DNA, 25 bp, Homo sapien
atggagatccgccttgctggccgca

SEQ ID NO: 4493309 - DNA, 25 bp, Homo sapien
tcatcactcgaataagaagagccaa

SEQ ID NO: 4493310 - DNA, 25 bp, Homo sapien
ctcctcatcactcgaataagaagag

SEQ ID NO: 4493311 - DNA, 25 bp, Homo sapien
atcactcgaataagaagagccaaga

SEQ ID NO: 4493312 - DNA, 25 bp, Homo sapien
cctcatcactcgaataagaagagcc

SEQ ID NO: 4493313 - DNA, 25 bp, Homo sapien
tacaaaggatggcatgcaagaggct

SEQ ID NO: 4493314 - DNA, 25 bp, Homo sapien
ggaggccagtagctcagcgttagta

SEQ ID NO: 4493315 - DNA, 25 bp, Homo sapien
gaacagtcactggacaccaaagttg

SEQ ID NO: 4493316 - DNA, 25 bp, Homo sapien
aatttcttagtaccaagcctacagc

SEQ ID NO: 4493317 - DNA, 25 bp, Homo sapien
tatcaatcttcagtttgcacaaacc

SEQ ID NO: 4493318 - DNA, 25 bp, Homo sapien
aaagtcagcacatggtacctcctcc

SEQ ID NO: 4493319 - DNA, 25 bp, Homo sapien
caaaaacagcgtgtgaaagtcagca

SEQ ID NO: 4493320 - DNA, 25 bp, Homo sapien
cactgatgccgggtagaatatttat

SEQ ID NO: 4493321 - DNA, 25 bp, Homo sapien
ctctcagtcagattagcactggtat

SEQ ID NO: 4493322 - DNA, 25 bp, Homo sapien
cactggtattgtggaaggtactgtg

SEQ ID NO: 4493323 - DNA, 25 bp, Homo sapien
gaaggtactgtggaagggccgtgaa

SEQ ID NO: 4493324 - DNA, 25 bp, Homo sapien
cagattagcactggtattgtggaag

SEQ ID NO: 4493325 - DNA, 25 bp, Homo sapien
ttaattatggattttcagtgacctc

SEQ ID NO: 4493326 - DNA, 25 bp, Homo sapien
gttttaattatggattttcagtgac

SEQ ID NO: 4493327 - DNA, 25 bp, Homo sapien
tatggattttcagtgacctcatgtt

SEQ ID NO: 4493328 - DNA, 25 bp, Homo sapien
taatgttttaattatggattttcag

SEQ ID NO: 4493329 - DNA, 25 bp, Homo sapien
tctgttatcaaaacttggctaagtt

SEQ ID NO: 4493330 - DNA, 25 bp, Homo sapien
tgaatggctttttatagagtatgcc

SEQ ID NO: 4493331 - DNA, 25 bp, Homo sapien
tttatagagtatgccacaacgccca

SEQ ID NO: 4493332 - DNA, 25 bp, Homo sapien
gctaagtttccttagatccgtcact

SEQ ID NO: 4493333 - DNA, 25 bp, Homo sapien
tatgtggcaggaaattatagttctc

SEQ ID NO: 4493334 - DNA, 25 bp, Homo sapien
ctatgtggcaggaaattatagttct

SEQ ID NO: 4493335 - DNA, 25 bp, Homo sapien
gatgtagctgaatgtacgactgact

SEQ ID NO: 4493336 - DNA, 25 bp, Homo sapien
tgtagctgaatgtacgactgacttt

SEQ ID NO: 4493337 - DNA, 25 bp, Homo sapien
tagctgaatgtacgactgacttttg

SEQ ID NO: 4493338 - DNA, 25 bp, Homo sapien
ctgaatgtacgactgacttttgttc

SEQ ID NO: 4493339 - DNA, 25 bp, Homo sapien
tttaaacatagctcagcacgatggc

SEQ ID NO: 4493340 - DNA, 25 bp, Homo sapien
cacacagtgattccttgcaagagtt

SEQ ID NO: 4493341 - DNA, 25 bp, Homo sapien
tacggtgcgaggcaggaaactgctt

SEQ ID NO: 4493342 - DNA, 25 bp, Homo sapien
gagagataacacctacctgacaggg

SEQ ID NO: 4493343 - DNA, 25 bp, Homo sapien
tattggtcttccacgaaaagcttgt

SEQ ID NO: 4493344 - DNA, 25 bp, Homo sapien
taacacctagtggaatgctaagact

SEQ ID NO: 4493345 - DNA, 25 bp, Homo sapien
tccatgagatgagtggtacattcac

SEQ ID NO: 4493346 - DNA, 25 bp, Homo sapien
tcaaggtcaggactatgagctttag

SEQ ID NO: 4493347 - DNA, 25 bp, Homo sapien
ttccactgctaaagacagcacgacc

SEQ ID NO: 4493348 - DNA, 25 bp, Homo sapien
aagacagcacgaccccaagagatca

SEQ ID NO: 4493349 - DNA, 25 bp, Homo sapien
ttgccactagggcactctaaacact

SEQ ID NO: 4493350 - DNA, 25 bp, Homo sapien
tagggcactctaaacacttggtaat

SEQ ID NO: 4493351 - DNA, 25 bp, Homo sapien
tttaaaagtgagctagtaacacctc

SEQ ID NO: 4493352 - DNA, 25 bp, Homo sapien
gacaaaagccaagctgttccaattt

SEQ ID NO: 4493353 - DNA, 25 bp, Homo sapien
aatcatcttttgctacattgacaaa

SEQ ID NO: 4493354 - DNA, 25 bp, Homo sapien
tggagtgcacacagcgtactgcagc

SEQ ID NO: 4493355 - DNA, 25 bp, Homo sapien
ttagtgaaatcgtaagaggaagcca

SEQ ID NO: 4493356 - DNA, 25 bp, Homo sapien
gtgaaatcgtaagaggaagccagag

SEQ ID NO: 4493357 - DNA, 25 bp, Homo sapien
tagtgaaatcgtaagaggaagccag

SEQ ID NO: 4493358 - DNA, 25 bp, Homo sapien
ttatcgacatgattcgacccccatg

SEQ ID NO: 4493359 - DNA, 25 bp, Homo sapien
atgccaggaagcgtgctctcacaga

SEQ ID NO: 4493360 - DNA, 25 bp, Homo sapien
gcgcatgccgtcagggcagagctca

SEQ ID NO: 4493361 - DNA, 25 bp, Homo sapien
aggaagcgtgctctcacagaagcgg

SEQ ID NO: 4493362 - DNA, 25 bp, Homo sapien
ttatgtggggtacttcatgaaaccg

SEQ ID NO: 4493363 - DNA, 25 bp, Homo sapien
gggtacttcatgaaaccgagcccat

SEQ ID NO: 4493364 - DNA, 25 bp, Homo sapien
tttggtcctatgaatctcactgtta

SEQ ID NO: 4493365 - DNA, 25 bp, Homo sapien
atgctttggtcctatgaatctcact

SEQ ID NO: 4493366 - DNA, 25 bp, Homo sapien
actggctctttctgtgtttactaga

SEQ ID NO: 4493367 - DNA, 25 bp, Homo sapien
tagtgctttaaagaagtcaggctct

SEQ ID NO: 4493368 - DNA, 25 bp, Homo sapien
tctttttatggcaaccagcttatcc

SEQ ID NO: 4493369 - DNA, 25 bp, Homo sapien
tcaagccttgcaatgctcttcaaac

SEQ ID NO: 4493370 - DNA, 25 bp, Homo sapien
aattcacacgaaaactgggcaggcg

SEQ ID NO: 4493371 - DNA, 25 bp, Homo sapien
caaggaccagcactgcaaggaggct

SEQ ID NO: 4493372 - DNA, 25 bp, Homo sapien
ttttcaaaccggcaagaggagactg

SEQ ID NO: 4493373 - DNA, 25 bp, Homo sapien
gcaattctgggatcagcctgaggga

SEQ ID NO: 4493374 - DNA, 25 bp, Homo sapien
tgggcacccagatggcatgtggtta

SEQ ID NO: 4493375 - DNA, 25 bp, Homo sapien
ttaacaacagctggtgactattttg

SEQ ID NO: 4493376 - DNA, 25 bp, Homo sapien
agaaacaaagttctgggcaaagtgt

SEQ ID NO: 4493377 - DNA, 25 bp, Homo sapien
aaataatccacagttaattgaacac

SEQ ID NO: 4493378 - DNA, 25 bp, Homo sapien
ctgaaagtgtgcccgttgacagtct

SEQ ID NO: 4493379 - DNA, 25 bp, Homo sapien
ttgtctttagaatctttctccttct

SEQ ID NO: 4493380 - DNA, 25 bp, Homo sapien
gaaagtgtgcccgttgacagtcttc

SEQ ID NO: 4493381 - DNA, 25 bp, Homo sapien
ttctccttctccttaatcttatctt

SEQ ID NO: 4493382 - DNA, 25 bp, Homo sapien
gaagggcttcatacactggctacag

SEQ ID NO: 4493383 - DNA, 25 bp, Homo sapien
tggctacagctgatgggacccacaa

SEQ ID NO: 4493384 - DNA, 25 bp, Homo sapien
ggcatctttgttggtgaagggcttc

SEQ ID NO: 4493385 - DNA, 25 bp, Homo sapien
ttgcacaagtataggcatctttgtt

SEQ ID NO: 4493386 - DNA, 25 bp, Homo sapien
tgcctgagagtgtcttatcaaaacc

SEQ ID NO: 4493387 - DNA, 25 bp, Homo sapien
caaaaacgtgcaaattatggtctgt

SEQ ID NO: 4493388 - DNA, 25 bp, Homo sapien
tgtgggtcacgatgcctaagatact

SEQ ID NO: 4493389 - DNA, 25 bp, Homo sapien
ttttgagatgcactgccttacagca

SEQ ID NO: 4493390 - DNA, 25 bp, Homo sapien
tgaagctctccccttactaatgcag

SEQ ID NO: 4493391 - DNA, 25 bp, Homo sapien
taagactttctagactgaagctctc

SEQ ID NO: 4493392 - DNA, 25 bp, Homo sapien
gaatcacatatcaaacacagtagct

SEQ ID NO: 4493393 - DNA, 25 bp, Homo sapien
cactgtgggtgcctgactcatattg

SEQ ID NO: 4493394 - DNA, 25 bp, Homo sapien
tactacttctgattcaagctggtgc

SEQ ID NO: 4493395 - DNA, 25 bp, Homo sapien
cctctatagcacaagattctttggg

SEQ ID NO: 4493396 - DNA, 25 bp, Homo sapien
tactctgttctggtagtaattctgc

SEQ ID NO: 4493397 - DNA, 25 bp, Homo sapien
tacagccactcattataaccataag

SEQ ID NO: 4493398 - DNA, 25 bp, Homo sapien
catcgttgggcaatggaagtctcca

SEQ ID NO: 4493399 - DNA, 25 bp, Homo sapien
gaggcggttctagcacatacgacac

SEQ ID NO: 4493400 - DNA, 25 bp, Homo sapien
catacgacactgatagcataaggag

SEQ ID NO: 4493401 - DNA, 25 bp, Homo sapien
aaaatgggcttaggatgcctgtgca

SEQ ID NO: 4493402 - DNA, 25 bp, Homo sapien
ctacacaagtgattctccacgggta

SEQ ID NO: 4493403 - DNA, 25 bp, Homo sapien
tacacaagtgattctccacgggtac

SEQ ID NO: 4493404 - DNA, 25 bp, Homo sapien
agcaaattccttgggtgacttcata

SEQ ID NO: 4493405 - DNA, 25 bp, Homo sapien
tagcacagaaccagtagccaatcca

SEQ ID NO: 4493406 - DNA, 25 bp, Homo sapien
actattagcacagaaccagtagcca

SEQ ID NO: 4493407 - DNA, 25 bp, Homo sapien
aaagcaaattccttgggtgacttca

SEQ ID NO: 4493408 - DNA, 25 bp, Homo sapien
ggcgcgatctttggctgactgtaac

SEQ ID NO: 4493409 - DNA, 25 bp, Homo sapien
caaaggtgactatgcagtgctgagg

SEQ ID NO: 4493410 - DNA, 25 bp, Homo sapien
tgctacatttcctacgactcctggg

SEQ ID NO: 4493411 - DNA, 25 bp, Homo sapien
ggtaaacgactaactgcatggatgc

SEQ ID NO: 4493412 - DNA, 25 bp, Homo sapien
gcacaactttctcctatcatttcaa

SEQ ID NO: 4493413 - DNA, 25 bp, Homo sapien
ttaaatatgagcaaatttagaaatg

SEQ ID NO: 4493414 - DNA, 25 bp, Homo sapien
aatgcatgctacaaaattctttctg

SEQ ID NO: 4493415 - DNA, 25 bp, Homo sapien
gacacaagttgaggaattaccttta

SEQ ID NO: 4493416 - DNA, 25 bp, Homo sapien
aaaccagaaaggagactgctagaat

SEQ ID NO: 4493417 - DNA, 25 bp, Homo sapien
accagaaaggagactgctagaatcc

SEQ ID NO: 4493418 - DNA, 25 bp, Homo sapien
aggaaaccagaaaggagactgctag

SEQ ID NO: 4493419 - DNA, 25 bp, Homo sapien
ggaaggaaaccagaaaggagactgc

SEQ ID NO: 4493420 - DNA, 25 bp, Homo sapien
ctcttttagcccagacacatggatt

SEQ ID NO: 4493421 - DNA, 25 bp, Homo sapien
tagcccagacacatggatttgtggg

SEQ ID NO: 4493422 - DNA, 25 bp, Homo sapien
cccagacacatggatttgtggggga

SEQ ID NO: 4493423 - DNA, 25 bp, Homo sapien
cttttagcccagacacatggatttg

SEQ ID NO: 4493424 - DNA, 25 bp, Homo sapien
gaaggcttaccatcagctctcagcg

SEQ ID NO: 4493425 - DNA, 25 bp, Homo sapien
gaaacaaatgaaagatcggcctgtg

SEQ ID NO: 4493426 - DNA, 25 bp, Homo sapien
cagcttaatgagaggaacaacgact

SEQ ID NO: 4493427 - DNA, 25 bp, Homo sapien
tctgaaaagcttaactacgctgggc

SEQ ID NO: 4493428 - DNA, 25 bp, Homo sapien
caggaggctagactttctcggcagc

SEQ ID NO: 4493429 - DNA, 25 bp, Homo sapien
cctttgcacaggaggctagactttc

SEQ ID NO: 4493430 - DNA, 25 bp, Homo sapien
tttgacctttgcacaggaggctaga

SEQ ID NO: 4493431 - DNA, 25 bp, Homo sapien
ttctcggcagcctttgtggacaaaa

SEQ ID NO: 4493432 - DNA, 25 bp, Homo sapien
ccccaccagcaggtcaatgcccctg

SEQ ID NO: 4493433 - DNA, 25 bp, Homo sapien
ccaccagcaggtcaatgcccctgac

SEQ ID NO: 4493434 - DNA, 25 bp, Homo sapien
cccaccagcaggtcaatgcccctga

SEQ ID NO: 4493435 - DNA, 25 bp, Homo sapien
agattatacactgaagcgattaatc

SEQ ID NO: 4493436 - DNA, 25 bp, Homo sapien
tacactgaagcgattaatctgagat

SEQ ID NO: 4493437 - DNA, 25 bp, Homo sapien
ttatacactgaagcgattaatctga

SEQ ID NO: 4493438 - DNA, 25 bp, Homo sapien
gattaatctgagataaatcattaga

SEQ ID NO: 4493439 - DNA, 25 bp, Homo sapien
gaagccgagtaggaagggagcaagc

SEQ ID NO: 4493440 - DNA, 25 bp, Homo sapien
ctctgacaagccctgagaagccgag

SEQ ID NO: 4493441 - DNA, 25 bp, Homo sapien
caagccctgagaagccgagtaggaa

SEQ ID NO: 4493442 - DNA, 25 bp, Homo sapien
gaaagtaagtccattgacaattcac

SEQ ID NO: 4493443 - DNA, 25 bp, Homo sapien
tgtttctcataatgaccgtgggcag

SEQ ID NO: 4493444 - DNA, 25 bp, Homo sapien
cataatgaccgtgggcagtgatgat

SEQ ID NO: 4493445 - DNA, 25 bp, Homo sapien
gatgtgtcatgtgcctgaaggctcc

SEQ ID NO: 4493446 - DNA, 25 bp, Homo sapien
tcatgtgcctgaaggctccctttgg

SEQ ID NO: 4493447 - DNA, 25 bp, Homo sapien
gaggacactaactgaagcatcaccc

SEQ ID NO: 4493448 - DNA, 25 bp, Homo sapien
cgctttacagtggatttgccctgga

SEQ ID NO: 4493449 - DNA, 25 bp, Homo sapien
ctggtactgacccatctgacaaata

SEQ ID NO: 4493450 - DNA, 25 bp, Homo sapien
caaataacaagcagaagtaaggcgc

SEQ ID NO: 4493451 - DNA, 25 bp, Homo sapien
ggaccgaggacgctccttgggctgt

SEQ ID NO: 4493452 - DNA, 25 bp, Homo sapien
gtggtagcggtttcatccaccagga

SEQ ID NO: 4493453 - DNA, 25 bp, Homo sapien
gctgggatcgtctattggcaaatat

SEQ ID NO: 4493454 - DNA, 25 bp, Homo sapien
tttggagagcgagacactctgctgg

SEQ ID NO: 4493455 - DNA, 25 bp, Homo sapien
ttgactcattgaccttgctgatttt

SEQ ID NO: 4493456 - DNA, 25 bp, Homo sapien
ccttgctgattttatttagtgagtc

SEQ ID NO: 4493457 - DNA, 25 bp, Homo sapien
tgttgactcattgaccttgctgatt

SEQ ID NO: 4493458 - DNA, 25 bp, Homo sapien
tctgttgactcattgaccttgctga

SEQ ID NO: 4493459 - DNA, 25 bp, Homo sapien
gaaacttgctgtctattatccgact

SEQ ID NO: 4493460 - DNA, 25 bp, Homo sapien
aaagtctcccagtagttgtccttca

SEQ ID NO: 4493461 - DNA, 25 bp, Homo sapien
cttgccgtttgaccacatctttctt

SEQ ID NO: 4493462 - DNA, 25 bp, Homo sapien
tattatccgactccaagactctgct

SEQ ID NO: 4493463 - DNA, 25 bp, Homo sapien
tctgataataggtaccccggattcc

SEQ ID NO: 4493464 - DNA, 25 bp, Homo sapien
cactggattcagcacctgtcgtaac

SEQ ID NO: 4493465 - DNA, 25 bp, Homo sapien
aaggagataggataccaacaggacc

SEQ ID NO: 4493466 - DNA, 25 bp, Homo sapien
tgcaggctgaagtcatggctcattg

SEQ ID NO: 4493467 - DNA, 25 bp, Homo sapien
catgatcttgagagtgcggacatga

SEQ ID NO: 4493468 - DNA, 25 bp, Homo sapien
tactgatcagctcatccaaacaggg

SEQ ID NO: 4493469 - DNA, 25 bp, Homo sapien
ggctgtacacaccactcatgatctt

SEQ ID NO: 4493470 - DNA, 25 bp, Homo sapien
tcctctggaagaattggctatggat

SEQ ID NO: 4493471 - DNA, 25 bp, Homo sapien
tacaaaggcttgaaaacgcttatcc

SEQ ID NO: 4493472 - DNA, 25 bp, Homo sapien
tgttgcccacaaaacttgccatatg

SEQ ID NO: 4493473 - DNA, 25 bp, Homo sapien
aacgcttatccttggcataaaggtc

SEQ ID NO: 4493474 - DNA, 25 bp, Homo sapien
agtttacagactggttatgttgccc

SEQ ID NO: 4493475 - DNA, 25 bp, Homo sapien
acacatggctctcaacaataacggg

SEQ ID NO: 4493476 - DNA, 25 bp, Homo sapien
tagtgaaagccgacagggacacatg

SEQ ID NO: 4493477 - DNA, 25 bp, Homo sapien
gggacacatggctctcaacaataac

SEQ ID NO: 4493478 - DNA, 25 bp, Homo sapien
ggaatcacatgaaaaaggctctagt

SEQ ID NO: 4493479 - DNA, 25 bp, Homo sapien
aactgggtacttggtaatccgctga

SEQ ID NO: 4493480 - DNA, 25 bp, Homo sapien
tccgctgagttacaagcaatatgca

SEQ ID NO: 4493481 - DNA, 25 bp, Homo sapien
ggaattccaagccttctaacaactg

SEQ ID NO: 4493482 - DNA, 25 bp, Homo sapien
tggtacactgcaatattctttggaa

SEQ ID NO: 4493483 - DNA, 25 bp, Homo sapien
tatcctaagtctggtaacataacag

SEQ ID NO: 4493484 - DNA, 25 bp, Homo sapien
tcccagcctagtgataacagaatac

SEQ ID NO: 4493485 - DNA, 25 bp, Homo sapien
cagcagcaattctagcacttctggg

SEQ ID NO: 4493486 - DNA, 25 bp, Homo sapien
gaattagccaagagagagaaaccag

SEQ ID NO: 4493487 - DNA, 25 bp, Homo sapien
agaataattctgttttttatggctc

SEQ ID NO: 4493488 - DNA, 25 bp, Homo sapien
tttatggctctttttggacaagggc

SEQ ID NO: 4493489 - DNA, 25 bp, Homo sapien
gacaagggcagaagcaagggaatcc

SEQ ID NO: 4493490 - DNA, 25 bp, Homo sapien
cttggaaggaaagaataattctgtt

SEQ ID NO: 4493491 - DNA, 25 bp, Homo sapien
tgtctacagctccaatcacatcctt

SEQ ID NO: 4493492 - DNA, 25 bp, Homo sapien
cctcatgattgacttgctatctgtc

SEQ ID NO: 4493493 - DNA, 25 bp, Homo sapien
tcttccttggcaaacatctgaccac

SEQ ID NO: 4493494 - DNA, 25 bp, Homo sapien
cacgtacaagcttcttccgtttcaa

SEQ ID NO: 4493495 - DNA, 25 bp, Homo sapien
ttgcctgttttacctgggcacatac

SEQ ID NO: 4493496 - DNA, 25 bp, Homo sapien
gttttacctgggcacatacttaaga

SEQ ID NO: 4493497 - DNA, 25 bp, Homo sapien
tacctgggcacatacttaagacaaa

SEQ ID NO: 4493498 - DNA, 25 bp, Homo sapien
tgggcacatacttaagacaaaagag

SEQ ID NO: 4493499 - DNA, 25 bp, Homo sapien
aaatgtcagtgagaagaactgcttg

SEQ ID NO: 4493500 - DNA, 25 bp, Homo sapien
aaaatgtcagtgagaagaactgctt

SEQ ID NO: 4493501 - DNA, 25 bp, Homo sapien
atgcaaagatgtacttctggtcttt

SEQ ID NO: 4493502 - DNA, 25 bp, Homo sapien
caatgatgcaaagatgtacttctgg

SEQ ID NO: 4493503 - DNA, 25 bp, Homo sapien
aatgatgcaaagatgtacttctggt

SEQ ID NO: 4493504 - DNA, 25 bp, Homo sapien
tgatgcaaagatgtacttctggtct

SEQ ID NO: 4493505 - DNA, 25 bp, Homo sapien
gatgaatctttccaggttccccaaa

SEQ ID NO: 4493506 - DNA, 25 bp, Homo sapien
cagaaaattctgagggcatgtggga

SEQ ID NO: 4493507 - DNA, 25 bp, Homo sapien
gaaggacagcttcaatctaaggtaa

SEQ ID NO: 4493508 - DNA, 25 bp, Homo sapien
caatattctaactctgaaggacagc

SEQ ID NO: 4493509 - DNA, 25 bp, Homo sapien
gctgatcaggaataaacctttctcc

SEQ ID NO: 4493510 - DNA, 25 bp, Homo sapien
ggcatggacttctaccatctctgga

SEQ ID NO: 4493511 - DNA, 25 bp, Homo sapien
cagctgtttcgttcctctttggagc

SEQ ID NO: 4493512 - DNA, 25 bp, Homo sapien
gcttctttaaagagatcactgttga

SEQ ID NO: 4493513 - DNA, 25 bp, Homo sapien
cttttaattctcgggctctggtgtc

SEQ ID NO: 4493514 - DNA, 25 bp, Homo sapien
aattctcgggctctggtgtccaaca

SEQ ID NO: 4493515 - DNA, 25 bp, Homo sapien
cgggctctggtgtccaacattttct

SEQ ID NO: 4493516 - DNA, 25 bp, Homo sapien
tctcactaggaattccttcatcttc

SEQ ID NO: 4493517 - DNA, 25 bp, Homo sapien
catgtcccggaaaatcatctccttc

SEQ ID NO: 4493518 - DNA, 25 bp, Homo sapien
cttccaacaagagtaggattttttg

SEQ ID NO: 4493519 - DNA, 25 bp, Homo sapien
gaagagaactctagggctatgtgtt

SEQ ID NO: 4493520 - DNA, 25 bp, Homo sapien
gagcctcttctgtgttggagcggaa

SEQ ID NO: 4493521 - DNA, 25 bp, Homo sapien
gatagggttgcaccatgtgggccac

SEQ ID NO: 4493522 - DNA, 25 bp, Homo sapien
tctaggagtaggcacttaagccata

SEQ ID NO: 4493523 - DNA, 25 bp, Homo sapien
tataagtaagtgattaatggccggg

SEQ ID NO: 4493524 - DNA, 25 bp, Homo sapien
gaacacaacactataagggcacaat

SEQ ID NO: 4493525 - DNA, 25 bp, Homo sapien
taaaggaaacatgcaaagctgacat

SEQ ID NO: 4493526 - DNA, 25 bp, Homo sapien
aataaaggaaacatgcaaagctgac

SEQ ID NO: 4493527 - DNA, 25 bp, Homo sapien
gaaacatgcaaagctgacatcttat

SEQ ID NO: 4493528 - DNA, 25 bp, Homo sapien
aggaaacatgcaaagctgacatctt

SEQ ID NO: 4493529 - DNA, 25 bp, Homo sapien
gaccgaccacatcttgctcaatggg

SEQ ID NO: 4493530 - DNA, 25 bp, Homo sapien
ggctgctgacagtcggcccaagtgt

SEQ ID NO: 4493531 - DNA, 25 bp, Homo sapien
gaagcattcatctgatggctgtcaa

SEQ ID NO: 4493532 - DNA, 25 bp, Homo sapien
gaaacgggaccgaccacatcttgct

SEQ ID NO: 4493533 - DNA, 25 bp, Homo sapien
ttttttaggccactatctgattccg

SEQ ID NO: 4493534 - DNA, 25 bp, Homo sapien
cactatctgattccgttctcctaag

SEQ ID NO: 4493535 - DNA, 25 bp, Homo sapien
tgattccgttctcctaagatcttgg

SEQ ID NO: 4493536 - DNA, 25 bp, Homo sapien
tccgttctcctaagatcttggccat

SEQ ID NO: 4493537 - DNA, 25 bp, Homo sapien
ttttaagcataaataccaggttagc

SEQ ID NO: 4493538 - DNA, 25 bp, Homo sapien
taagcataaataccaggttagcatt

SEQ ID NO: 4493539 - DNA, 25 bp, Homo sapien
gcataaataccaggttagcatttcc

SEQ ID NO: 4493540 - DNA, 25 bp, Homo sapien
taaataccaggttagcatttccacc

SEQ ID NO: 4493541 - DNA, 25 bp, Homo sapien
agagatgaacaacgctctggacaac

SEQ ID NO: 4493542 - DNA, 25 bp, Homo sapien
tcgtagagatgaacaacgctctgga

SEQ ID NO: 4493543 - DNA, 25 bp, Homo sapien
tgcagagcgctgaggagctcgtaga

SEQ ID NO: 4493544 - DNA, 25 bp, Homo sapien
agctcgtagagatgaacaacgctct

SEQ ID NO: 4493545 - DNA, 25 bp, Homo sapien
tgcaaacctcaaagatccaagtcaa

SEQ ID NO: 4493546 - DNA, 25 bp, Homo sapien
tctagacaaataaacgcagggatgg

SEQ ID NO: 4493547 - DNA, 25 bp, Homo sapien
gtaactttctcaccacgagagccag

SEQ ID NO: 4493548 - DNA, 25 bp, Homo sapien
cctggaaggtcgatgcattctgtaa

SEQ ID NO: 4493549 - DNA, 25 bp, Homo sapien
ctatgacggactagaactctcccct

SEQ ID NO: 4493550 - DNA, 25 bp, Homo sapien
caggacgacagcgagcttctggatc

SEQ ID NO: 4493551 - DNA, 25 bp, Homo sapien
aactctggccaggacgacagcgagc

SEQ ID NO: 4493552 - DNA, 25 bp, Homo sapien
caccaggcactatgacggactagaa

SEQ ID NO: 4493553 - DNA, 25 bp, Homo sapien
ctctcgctcagcaccagtttctggt

SEQ ID NO: 4493554 - DNA, 25 bp, Homo sapien
tcctcaatgtagctgtcctgctgca

SEQ ID NO: 4493555 - DNA, 25 bp, Homo sapien
tgctcaatgagggagctcgggcggg

SEQ ID NO: 4493556 - DNA, 25 bp, Homo sapien
gcttctcctcgaggtactgggcctg

SEQ ID NO: 4493557 - DNA, 25 bp, Homo sapien
ctgccgctggctgagccgctctgcc

SEQ ID NO: 4493558 - DNA, 25 bp, Homo sapien
tttctgggcagcacgcagtcgctcc

SEQ ID NO: 4493559 - DNA, 25 bp, Homo sapien
gtcccgttctgtctgccgctggctg

SEQ ID NO: 4493560 - DNA, 25 bp, Homo sapien
tgtttctgggcagcacgcagtcgct

SEQ ID NO: 4493561 - DNA, 25 bp, Homo sapien
atcattaggttgctctcggcaggga

SEQ ID NO: 4493562 - DNA, 25 bp, Homo sapien
atatcatcattaggttgctctcggc

SEQ ID NO: 4493563 - DNA, 25 bp, Homo sapien
cagggggtcttaattaatatcatca

SEQ ID NO: 4493564 - DNA, 25 bp, Homo sapien
cttgcttaatacacagggggtctta

SEQ ID NO: 4493565 - DNA, 25 bp, Homo sapien
caggctctatatttctgctcacttt

SEQ ID NO: 4493566 - DNA, 25 bp, Homo sapien
aggctctatatttctgctcactttc

SEQ ID NO: 4493567 - DNA, 25 bp, Homo sapien
acaggctctatatttctgctcactt

SEQ ID NO: 4493568 - DNA, 25 bp, Homo sapien
ccaggctggtcaagctaccctctca

SEQ ID NO: 4493569 - DNA, 25 bp, Homo sapien
tctagctgagggaagtgccaactcc

SEQ ID NO: 4493570 - DNA, 25 bp, Homo sapien
agtggcgttgctcctaaaatcctgg

SEQ ID NO: 4493571 - DNA, 25 bp, Homo sapien
caggcagatctgtgtacacccaggc

SEQ ID NO: 4493572 - DNA, 25 bp, Homo sapien
ttaagattgctctacacagggatgc

SEQ ID NO: 4493573 - DNA, 25 bp, Homo sapien
tctgcgaactctacagagctcacgt

SEQ ID NO: 4493574 - DNA, 25 bp, Homo sapien
tagagcttgaaggtttcattagctg

SEQ ID NO: 4493575 - DNA, 25 bp, Homo sapien
gctcacgtctgtggactgcatagag

SEQ ID NO: 4493576 - DNA, 25 bp, Homo sapien
tacagagctcacgtctgtggactgc

SEQ ID NO: 4493577 - DNA, 25 bp, Homo sapien
cctggctgaattcaactgggtgtgc

SEQ ID NO: 4493578 - DNA, 25 bp, Homo sapien
gtgatgccaactcaataaatcctgg

SEQ ID NO: 4493579 - DNA, 25 bp, Homo sapien
aggctgtcagcgtccgtgatgccaa

SEQ ID NO: 4493580 - DNA, 25 bp, Homo sapien
agaagggttttcacttggaggctgt

SEQ ID NO: 4493581 - DNA, 25 bp, Homo sapien
tggggaagaacgatgggatcctcat

SEQ ID NO: 4493582 - DNA, 25 bp, Homo sapien
actggggaagaacgatgggatcctc

SEQ ID NO: 4493583 - DNA, 25 bp, Homo sapien
tatggaaggtgcagatggcgagggg

SEQ ID NO: 4493584 - DNA, 25 bp, Homo sapien
gctcctcaggactggggaagaacga

SEQ ID NO: 4493585 - DNA, 25 bp, Homo sapien
gaaagttctgagtccaatgaccctg

SEQ ID NO: 4493586 - DNA, 25 bp, Homo sapien
tggctggttgaactcagtatgtgaa

SEQ ID NO: 4493587 - DNA, 25 bp, Homo sapien
taacccaaacaggcgggtagaggca

SEQ ID NO: 4493588 - DNA, 25 bp, Homo sapien
cccttctggtcctttgtttgtctgg

SEQ ID NO: 4493589 - DNA, 25 bp, Homo sapien
gaatgcacagacactatggccacag

SEQ ID NO: 4493590 - DNA, 25 bp, Homo sapien
tgcacagacactatggccacaggga

SEQ ID NO: 4493591 - DNA, 25 bp, Homo sapien
cacagacactatggccacagggaga

SEQ ID NO: 4493592 - DNA, 25 bp, Homo sapien
ctcagaatgcacagacactatggcc

SEQ ID NO: 4493593 - DNA, 25 bp, Homo sapien
cctctgctgatacttctgacgcggg

SEQ ID NO: 4493594 - DNA, 25 bp, Homo sapien
tctgctgatacttctgacgcgggac

SEQ ID NO: 4493595 - DNA, 25 bp, Homo sapien
gctgatacttctgacgcgggaccat

SEQ ID NO: 4493596 - DNA, 25 bp, Homo sapien
tgctgatacttctgacgcgggacca

SEQ ID NO: 4493597 - DNA, 25 bp, Homo sapien
gtcacaaatcatggccgaagcagag

SEQ ID NO: 4493598 - DNA, 25 bp, Homo sapien
gacaggtccccatgtacgtacacag

SEQ ID NO: 4493599 - DNA, 25 bp, Homo sapien
cattccccgtgtgtatatgcagaca

SEQ ID NO: 4493600 - DNA, 25 bp, Homo sapien
tgtgctaagttgaccagacgcctgg

SEQ ID NO: 4493601 - DNA, 25 bp, Homo sapien
accgagatcgaggtggtgcacatca

SEQ ID NO: 4493602 - DNA, 25 bp, Homo sapien
gccaaaacatgtgggtaaacatgct

SEQ ID NO: 4493603 - DNA, 25 bp, Homo sapien
caatcaaaaggtgtcacgctgcagg

SEQ ID NO: 4493604 - DNA, 25 bp, Homo sapien
tttagtgcctgaaacaccgagatcg

SEQ ID NO: 4493605 - DNA, 25 bp, Homo sapien
ccagcaagggccagacagctgctgt

SEQ ID NO: 4493606 - DNA, 25 bp, Homo sapien
caaggcctcctaacataagaagggc

SEQ ID NO: 4493607 - DNA, 25 bp, Homo sapien
gcaggaactgctacacatggcttca

SEQ ID NO: 4493608 - DNA, 25 bp, Homo sapien
gaattgaaggccacgttggaagcac

SEQ ID NO: 4493609 - DNA, 25 bp, Homo sapien
aagccccgggtagatctcaggaaag

SEQ ID NO: 4493610 - DNA, 25 bp, Homo sapien
taacgacaacgactgagatgactgg

SEQ ID NO: 4493611 - DNA, 25 bp, Homo sapien
tgaaaatgaagccaaccgatgagag

SEQ ID NO: 4493612 - DNA, 25 bp, Homo sapien
cattgatgtcaagctctgtggcgac

SEQ ID NO: 4493613 - DNA, 25 bp, Homo sapien
caagacaggccattagatccagcaa

SEQ ID NO: 4493614 - DNA, 25 bp, Homo sapien
gttgaaagtggcagtttgcatgttt

SEQ ID NO: 4493615 - DNA, 25 bp, Homo sapien
tgcatgtttttaaccctctccattt

SEQ ID NO: 4493616 - DNA, 25 bp, Homo sapien
cttccccccagatagctctcacggg

SEQ ID NO: 4493617 - DNA, 25 bp, Homo sapien
ctctcacgggggtagagggaatact

SEQ ID NO: 4493618 - DNA, 25 bp, Homo sapien
cagcaggcagtagattccaaggctc

SEQ ID NO: 4493619 - DNA, 25 bp, Homo sapien
tagtattaccctgagacacagaagg

SEQ ID NO: 4493620 - DNA, 25 bp, Homo sapien
caaggctctggttaactaggaatgc

SEQ ID NO: 4493621 - DNA, 25 bp, Homo sapien
caaggacatccaaaacgcagagggt

SEQ ID NO: 4493622 - DNA, 25 bp, Homo sapien
tggagaagtaattcatggcctatca

SEQ ID NO: 4493623 - DNA, 25 bp, Homo sapien
ggcctatcaatcttttgacaattaa

SEQ ID NO: 4493624 - DNA, 25 bp, Homo sapien
gaagtaattcatggcctatcaatct

SEQ ID NO: 4493625 - DNA, 25 bp, Homo sapien
tcatggcctatcaatcttttgacaa

SEQ ID NO: 4493626 - DNA, 25 bp, Homo sapien
gtagggcaggtcactcacttcggtg

SEQ ID NO: 4493627 - DNA, 25 bp, Homo sapien
gacacagccagtggggggttgcacg

SEQ ID NO: 4493628 - DNA, 25 bp, Homo sapien
gccagtggggggttgcacgccttta

SEQ ID NO: 4493629 - DNA, 25 bp, Homo sapien
agggcaggtcactcacttcggtggc

SEQ ID NO: 4493630 - DNA, 25 bp, Homo sapien
tcaggtggtgacgaaaggtagggga

SEQ ID NO: 4493631 - DNA, 25 bp, Homo sapien
ggaagctcaggccggggaaggtgtg

SEQ ID NO: 4493632 - DNA, 25 bp, Homo sapien
gaagcccctccggactgcagcacag

SEQ ID NO: 4493633 - DNA, 25 bp, Homo sapien
tgcagaagcccctccggactgcagc

SEQ ID NO: 4493634 - DNA, 25 bp, Homo sapien
catttgcaaacaagcaatgagagca

SEQ ID NO: 4493635 - DNA, 25 bp, Homo sapien
tgcgcatcccatgcgggcagcagca

SEQ ID NO: 4493636 - DNA, 25 bp, Homo sapien
gaggtatccggtgtatcccaaccac

SEQ ID NO: 4493637 - DNA, 25 bp, Homo sapien
taggatttagcacacaaatgtccat

SEQ ID NO: 4493638 - DNA, 25 bp, Homo sapien
tggcaaaattcgagaaaacacactg

SEQ ID NO: 4493639 - DNA, 25 bp, Homo sapien
agccagtatgttgtggcaaaattcg

SEQ ID NO: 4493640 - DNA, 25 bp, Homo sapien
aataaaatacgaagccagtatgttg

SEQ ID NO: 4493641 - DNA, 25 bp, Homo sapien
taaataaaatacgaagccagtatgt

SEQ ID NO: 4493642 - DNA, 25 bp, Homo sapien
agggctgagggagactttacaaggg

SEQ ID NO: 4493643 - DNA, 25 bp, Homo sapien
aagggctgagggagactttacaagg

SEQ ID NO: 4493644 - DNA, 25 bp, Homo sapien
ggctgagggagactttacaagggtc

SEQ ID NO: 4493645 - DNA, 25 bp, Homo sapien
ttagggctgatcagtcactctctgg

SEQ ID NO: 4493646 - DNA, 25 bp, Homo sapien
gagagtgaaatgcgtccccagcagc

SEQ ID NO: 4493647 - DNA, 25 bp, Homo sapien
tttgggtcccactccgagagagtga

SEQ ID NO: 4493648 - DNA, 25 bp, Homo sapien
gctgctcggtgcataaggcgtctcc

SEQ ID NO: 4493649 - DNA, 25 bp, Homo sapien
cagcatcatgacgaatgtgcgcgcc

SEQ ID NO: 4493650 - DNA, 25 bp, Homo sapien
ggctccgctgacatgcttccagatg

SEQ ID NO: 4493651 - DNA, 25 bp, Homo sapien
tcagactcgggacatgaatccgggg

SEQ ID NO: 4493652 - DNA, 25 bp, Homo sapien
actgccgtccgtggcagctgtcccg

SEQ ID NO: 4493653 - DNA, 25 bp, Homo sapien
cgttgaggtactctgtgtctctcat

SEQ ID NO: 4493654 - DNA, 25 bp, Homo sapien
catccaagactgtcgaggagcaggt

SEQ ID NO: 4493655 - DNA, 25 bp, Homo sapien
tcatctgtacaaccctaactagggc

SEQ ID NO: 4493656 - DNA, 25 bp, Homo sapien
ctgcagagtgaacgttgaggtactc

SEQ ID NO: 4493657 - DNA, 25 bp, Homo sapien
tgacacgtgcatgcaggataaatgc

SEQ ID NO: 4493658 - DNA, 25 bp, Homo sapien
agtgccacggatgactcctccatgg

SEQ ID NO: 4493659 - DNA, 25 bp, Homo sapien
catggccgcactttcttcacattgg

SEQ ID NO: 4493660 - DNA, 25 bp, Homo sapien
cctgtggtggctctaccagcgtcgg

SEQ ID NO: 4493661 - DNA, 25 bp, Homo sapien
gagcaagagacacatcctgccaagc

SEQ ID NO: 4493662 - DNA, 25 bp, Homo sapien
ggatgggagcaagagacacatcctg

SEQ ID NO: 4493663 - DNA, 25 bp, Homo sapien
aggtagactcatcacagcttctcca

SEQ ID NO: 4493664 - DNA, 25 bp, Homo sapien
gctccaaagccatttccaggtagac

SEQ ID NO: 4493665 - DNA, 25 bp, Homo sapien
aggcctgagcgcttcactctgggca

SEQ ID NO: 4493666 - DNA, 25 bp, Homo sapien
caggagttggctccagctagagtcc

SEQ ID NO: 4493667 - DNA, 25 bp, Homo sapien
aggagttggctccagctagagtcca

SEQ ID NO: 4493668 - DNA, 25 bp, Homo sapien
ctgagcgcttcactctgggcatcca

SEQ ID NO: 4493669 - DNA, 25 bp, Homo sapien
gaatgatcttgagcgggtgtgtctc

SEQ ID NO: 4493670 - DNA, 25 bp, Homo sapien
gtgcgtgtagaagagccaagagcac

SEQ ID NO: 4493671 - DNA, 25 bp, Homo sapien
agtatggtgcgtgtagaagagccaa

SEQ ID NO: 4493672 - DNA, 25 bp, Homo sapien
tgtctcagaggtgagtatggtgcgt

SEQ ID NO: 4493673 - DNA, 25 bp, Homo sapien
cacggtggctctcagcagtggcttc

SEQ ID NO: 4493674 - DNA, 25 bp, Homo sapien
aaatagcgccttcacagtgtaagaa

SEQ ID NO: 4493675 - DNA, 25 bp, Homo sapien
tctgctgtgaacaggaacccggagg

SEQ ID NO: 4493676 - DNA, 25 bp, Homo sapien
cagcccgagaaggtcatgccgtggc

SEQ ID NO: 4493677 - DNA, 25 bp, Homo sapien
gtaaacatcgtgttctgtgttttgt

SEQ ID NO: 4493678 - DNA, 25 bp, Homo sapien
ctgcagggagggtgcctggacccgt

SEQ ID NO: 4493679 - DNA, 25 bp, Homo sapien
ctggccgcggggactgcagggaggg

SEQ ID NO: 4493680 - DNA, 25 bp, Homo sapien
cagggagggtgcctggacccgtggg

SEQ ID NO: 4493681 - DNA, 25 bp, Homo sapien
gactgcagggagggtgcctggaccc

SEQ ID NO: 4493682 - DNA, 25 bp, Homo sapien
ggccagctgcccgaaggcacttggc

SEQ ID NO: 4493683 - DNA, 25 bp, Homo sapien
ccgaaggcacttggctgtggtccca

SEQ ID NO: 4493684 - DNA, 25 bp, Homo sapien
ccaggggacggctctgctggcacac

SEQ ID NO: 4493685 - DNA, 25 bp, Homo sapien
gtgtcaggccagctgcccgaaggca

SEQ ID NO: 4493686 - DNA, 25 bp, Homo sapien
tacttaagcagccacgagtgtcccc

SEQ ID NO: 4493687 - DNA, 25 bp, Homo sapien
ttgcccactgacacgcccgccatgg

SEQ ID NO: 4493688 - DNA, 25 bp, Homo sapien
cttggtgcgggtcctggaggcctct

SEQ ID NO: 4493689 - DNA, 25 bp, Homo sapien
tgacacgcccgccatggggcactgg

SEQ ID NO: 4493690 - DNA, 25 bp, Homo sapien
ctgagctccaagataagaatggccc

SEQ ID NO: 4493691 - DNA, 25 bp, Homo sapien
gaacatttgttcattgctgtcacct

SEQ ID NO: 4493692 - DNA, 25 bp, Homo sapien
cagggccgcatccatctcagtgtgg

SEQ ID NO: 4493693 - DNA, 25 bp, Homo sapien
gccccgagagaactgctgaacattt

SEQ ID NO: 4493694 - DNA, 25 bp, Homo sapien
gggcatggactgccaccaggactga

SEQ ID NO: 4493695 - DNA, 25 bp, Homo sapien
cacttgcagagccttgagatcacct

SEQ ID NO: 4493696 - DNA, 25 bp, Homo sapien
aaggacacttgcagagccttgagat

SEQ ID NO: 4493697 - DNA, 25 bp, Homo sapien
cagagccttgagatcacctgtttgg

SEQ ID NO: 4493698 - DNA, 25 bp, Homo sapien
gtgtgggatggagaggtgtacccca

SEQ ID NO: 4493699 - DNA, 25 bp, Homo sapien
ctgtgtgggatggagaggtgtaccc

SEQ ID NO: 4493700 - DNA, 25 bp, Homo sapien
tgtgtgggatggagaggtgtacccc

SEQ ID NO: 4493701 - DNA, 25 bp, Homo sapien
gggccttctcagtcgccgaacccag

SEQ ID NO: 4493702 - DNA, 25 bp, Homo sapien
tctgtatctggaaacaacttgagca

SEQ ID NO: 4493703 - DNA, 25 bp, Homo sapien
gccgaacccagcctctgtatctgga

SEQ ID NO: 4493704 - DNA, 25 bp, Homo sapien
tctggaaacaacttgagcacgtggg

SEQ ID NO: 4493705 - DNA, 25 bp, Homo sapien
cgtggctgtttagttccaggtagca

SEQ ID NO: 4493706 - DNA, 25 bp, Homo sapien
tattcctttcagcaactcagggtgc

SEQ ID NO: 4493707 - DNA, 25 bp, Homo sapien
tagcagtgaggccttgccctgaagg

SEQ ID NO: 4493708 - DNA, 25 bp, Homo sapien
ccagaggttcgggtttgcagtctta

SEQ ID NO: 4493709 - DNA, 25 bp, Homo sapien
aaattaaagggacccagcctgagag

SEQ ID NO: 4493710 - DNA, 25 bp, Homo sapien
agctggaggattagcccatttcaca

SEQ ID NO: 4493711 - DNA, 25 bp, Homo sapien
tctgcaagctggaggattagcccat

SEQ ID NO: 4493712 - DNA, 25 bp, Homo sapien
ccactctgcaagctggaggattagc

SEQ ID NO: 4493713 - DNA, 25 bp, Homo sapien
ggccgctgacccttgtccactctgc

SEQ ID NO: 4493714 - DNA, 25 bp, Homo sapien
tgccgaatgcaaggcaggcatccgg

SEQ ID NO: 4493715 - DNA, 25 bp, Homo sapien
cgacagcttgtcttctcttcagggt

SEQ ID NO: 4493716 - DNA, 25 bp, Homo sapien
aggcatccggctgccgacagcttgt

SEQ ID NO: 4493717 - DNA, 25 bp, Homo sapien
gaatgcaaggcaggcatccggctgc

SEQ ID NO: 4493718 - DNA, 25 bp, Homo sapien
aaggcgcagactcccaacccttctt

SEQ ID NO: 4493719 - DNA, 25 bp, Homo sapien
ggccctttaaggcgcagactcccaa

SEQ ID NO: 4493720 - DNA, 25 bp, Homo sapien
ctttaaggcgcagactcccaaccct

SEQ ID NO: 4493721 - DNA, 25 bp, Homo sapien
tccaggccctttaaggcgcagactc

SEQ ID NO: 4493722 - DNA, 25 bp, Homo sapien
tccagagctgtttgtcgtaggtcct

SEQ ID NO: 4493723 - DNA, 25 bp, Homo sapien
gagacagttggcatcacatgaatgg

SEQ ID NO: 4493724 - DNA, 25 bp, Homo sapien
agggcgcccactaggactctgagag

SEQ ID NO: 4493725 - DNA, 25 bp, Homo sapien
ccagtgttgcggttggatccacagc

SEQ ID NO: 4493726 - DNA, 25 bp, Homo sapien
tactcacttatccccacggcctttg

SEQ ID NO: 4493727 - DNA, 25 bp, Homo sapien
acttatccccacggcctttgtcagc

SEQ ID NO: 4493728 - DNA, 25 bp, Homo sapien
actcacttatccccacggcctttgt

SEQ ID NO: 4493729 - DNA, 25 bp, Homo sapien
ctactcacttatccccacggccttt

SEQ ID NO: 4493730 - DNA, 25 bp, Homo sapien
tagctgtggtcttcgagatggcctc

SEQ ID NO: 4493731 - DNA, 25 bp, Homo sapien
aggtagctgtggtcttcgagatggc

SEQ ID NO: 4493732 - DNA, 25 bp, Homo sapien
tgtggtcttcgagatggcctcaagg

SEQ ID NO: 4493733 - DNA, 25 bp, Homo sapien
agatggcctcaagggtgttggccat

SEQ ID NO: 4493734 - DNA, 25 bp, Homo sapien
taattcactttatttttcttgtata

SEQ ID NO: 4493735 - DNA, 25 bp, Homo sapien
ctccaaagggagtctctgcctgggt

SEQ ID NO: 4493736 - DNA, 25 bp, Homo sapien
tccagggccgtagttactaaggtga

SEQ ID NO: 4493737 - DNA, 25 bp, Homo sapien
gcaggcagcccagttaacacagtgc

SEQ ID NO: 4493738 - DNA, 25 bp, Homo sapien
tgccccagagtggagttagttctag

SEQ ID NO: 4493739 - DNA, 25 bp, Homo sapien
tcattgttggtggaatcctgactcc

SEQ ID NO: 4493740 - DNA, 25 bp, Homo sapien
ccaagttccaagaatgtggcgttga

SEQ ID NO: 4493741 - DNA, 25 bp, Homo sapien
aacgggaatgatggaactcctggca

SEQ ID NO: 4493742 - DNA, 25 bp, Homo sapien
gaattagcagctcaaagtctgcagt

SEQ ID NO: 4493743 - DNA, 25 bp, Homo sapien
gagcaaggagttcatctttccatct

SEQ ID NO: 4493744 - DNA, 25 bp, Homo sapien
agagcaaggagttcatctttccatc

SEQ ID NO: 4493745 - DNA, 25 bp, Homo sapien
gctgcaggctgacgggtagggccat

SEQ ID NO: 4493746 - DNA, 25 bp, Homo sapien
tgggtctgtcgggacctcccttcgc

SEQ ID NO: 4493747 - DNA, 25 bp, Homo sapien
gaaggcactgaaacatcggccggcc

SEQ ID NO: 4493748 - DNA, 25 bp, Homo sapien
catgtgtagagtaatcctctgattc

SEQ ID NO: 4493749 - DNA, 25 bp, Homo sapien
tgcagtcaccctgggactctgcggt

SEQ ID NO: 4493750 - DNA, 25 bp, Homo sapien
cagtcaccctgggactctgcggtca

SEQ ID NO: 4493751 - DNA, 25 bp, Homo sapien
gtcaccctgggactctgcggtcaat

SEQ ID NO: 4493752 - DNA, 25 bp, Homo sapien
tcaccctgggactctgcggtcaatc

SEQ ID NO: 4493753 - DNA, 25 bp, Homo sapien
gcctgacccgttcctctggagtgga

SEQ ID NO: 4493754 - DNA, 25 bp, Homo sapien
agagcttcaccaaactgggtagggc

SEQ ID NO: 4493755 - DNA, 25 bp, Homo sapien
agcgtggtgcaccgcctgacccgtt

SEQ ID NO: 4493756 - DNA, 25 bp, Homo sapien
gaaggcgtccctctcaacttgtaat

SEQ ID NO: 4493757 - DNA, 25 bp, Homo sapien
cagtcctgccatagagggggaatcc

SEQ ID NO: 4493758 - DNA, 25 bp, Homo sapien
ctctggcttgctctggataagtgga

SEQ ID NO: 4493759 - DNA, 25 bp, Homo sapien
tcctcaggaggccacgtttgctttg

SEQ ID NO: 4493760 - DNA, 25 bp, Homo sapien
gaaacgagttacttcaccagatggg

SEQ ID NO: 4493761 - DNA, 25 bp, Homo sapien
tagagctggttttgcatgggtcctc

SEQ ID NO: 4493762 - DNA, 25 bp, Homo sapien
tctagagctggttttgcatgggtcc

SEQ ID NO: 4493763 - DNA, 25 bp, Homo sapien
ctggttttgcatgggtcctcctggg

SEQ ID NO: 4493764 - DNA, 25 bp, Homo sapien
agctggttttgcatgggtcctcctg

SEQ ID NO: 4493765 - DNA, 25 bp, Homo sapien
aggaagcaacatccaggtttggcca

SEQ ID NO: 4493766 - DNA, 25 bp, Homo sapien
ggaagcaacatccaggtttggccat

SEQ ID NO: 4493767 - DNA, 25 bp, Homo sapien
agagtaggggagtcgtgcttggccc

SEQ ID NO: 4493768 - DNA, 25 bp, Homo sapien
tacatgcaggttcccttacccctgt

SEQ ID NO: 4493769 - DNA, 25 bp, Homo sapien
gtgtgactacatgcaggttccctta

SEQ ID NO: 4493770 - DNA, 25 bp, Homo sapien
ccccagcttgcctgtgtgactacat

SEQ ID NO: 4493771 - DNA, 25 bp, Homo sapien
cccatagctagagccctcagacctg

SEQ ID NO: 4493772 - DNA, 25 bp, Homo sapien
atagctagagccctcagacctggaa

SEQ ID NO: 4493773 - DNA, 25 bp, Homo sapien
tagctagagccctcagacctggaac

SEQ ID NO: 4493774 - DNA, 25 bp, Homo sapien
catagctagagccctcagacctgga

SEQ ID NO: 4493775 - DNA, 25 bp, Homo sapien
ggccacttcttgtttcagcgtgacc

SEQ ID NO: 4493776 - DNA, 25 bp, Homo sapien
tcttgtttcagcgtgaccaaggccc

SEQ ID NO: 4493777 - DNA, 25 bp, Homo sapien
aggcccgaggccaactccgtctctt

SEQ ID NO: 4493778 - DNA, 25 bp, Homo sapien
tttcagcgtgaccaaggcccgaggc

SEQ ID NO: 4493779 - DNA, 25 bp, Homo sapien
atcttcctggtcatacttttctccc

SEQ ID NO: 4493780 - DNA, 25 bp, Homo sapien
cctgagttgggtacagagtctgtat

SEQ ID NO: 4493781 - DNA, 25 bp, Homo sapien
atctgagctgtgaggattcctggca

SEQ ID NO: 4493782 - DNA, 25 bp, Homo sapien
ggaactgatgctcagtgtgctgatc

SEQ ID NO: 4493783 - DNA, 25 bp, Homo sapien
cagtctccccattcataggaggaac

SEQ ID NO: 4493784 - DNA, 25 bp, Homo sapien
aggaggcaggattccacggtctgta

SEQ ID NO: 4493785 - DNA, 25 bp, Homo sapien
ctatcggcccaatagagagaggaag

SEQ ID NO: 4493786 - DNA, 25 bp, Homo sapien
aagggaaggaagttagcagtagcac

SEQ ID NO: 4493787 - DNA, 25 bp, Homo sapien
ggaagggaaggaagttagcagtagc

SEQ ID NO: 4493788 - DNA, 25 bp, Homo sapien
gaggaagggaaggaagttagcagta

SEQ ID NO: 4493789 - DNA, 25 bp, Homo sapien
ggtgtctggaccatttggttccact

SEQ ID NO: 4493790 - DNA, 25 bp, Homo sapien
tgccaggtgtctggaccatttggtt

SEQ ID NO: 4493791 - DNA, 25 bp, Homo sapien
ggcagagaatgccaggtgtctggac

SEQ ID NO: 4493792 - DNA, 25 bp, Homo sapien
gaatgccaggtgtctggaccatttg

SEQ ID NO: 4493793 - DNA, 25 bp, Homo sapien
gtcctgctggatcccggtgaatttg

SEQ ID NO: 4493794 - DNA, 25 bp, Homo sapien
gggtcctgctggatcccggtgaatt

SEQ ID NO: 4493795 - DNA, 25 bp, Homo sapien
tcctgctggatcccggtgaatttga

SEQ ID NO: 4493796 - DNA, 25 bp, Homo sapien
ggtcctgctggatcccggtgaattt

SEQ ID NO: 4493797 - DNA, 25 bp, Homo sapien
aaacatctctctagaggcctgaccc

SEQ ID NO: 4493798 - DNA, 25 bp, Homo sapien
tgtgttgctgctctaagcccccaaa

SEQ ID NO: 4493799 - DNA, 25 bp, Homo sapien
ctgacccaacgaactgtgggtgagg

SEQ ID NO: 4493800 - DNA, 25 bp, Homo sapien
ctctctagaggcctgacccaacgaa

SEQ ID NO: 4493801 - DNA, 25 bp, Homo sapien
gacgggagccgcggcggagcctgtt

SEQ ID NO: 4493802 - DNA, 25 bp, Homo sapien
ctgtggagagccggccgacgggagc

SEQ ID NO: 4493803 - DNA, 25 bp, Homo sapien
gccgacgggagccgcggcggagcct

SEQ ID NO: 4493804 - DNA, 25 bp, Homo sapien
gagccgcggcggagcctgttgagct

SEQ ID NO: 4493805 - DNA, 25 bp, Homo sapien
gagaaactagtttgttggcggcgcc

SEQ ID NO: 4493806 - DNA, 25 bp, Homo sapien
tgcactgaagggttcggctgcccat

SEQ ID NO: 4493807 - DNA, 25 bp, Homo sapien
tgtatcgcagcgagagcgtttttgc

SEQ ID NO: 4493808 - DNA, 25 bp, Homo sapien
tgcccatccgtcacagaggcgatgc

SEQ ID NO: 4493809 - DNA, 25 bp, Homo sapien
ccaccaggaatactagctagatggc

SEQ ID NO: 4493810 - DNA, 25 bp, Homo sapien
accaggaatactagctagatggcaa

SEQ ID NO: 4493811 - DNA, 25 bp, Homo sapien
ggccaccaggaatactagctagatg

SEQ ID NO: 4493812 - DNA, 25 bp, Homo sapien
tgggccaccaggaatactagctaga

SEQ ID NO: 4493813 - DNA, 25 bp, Homo sapien
tcagccaggaacttcggcagacttg

SEQ ID NO: 4493814 - DNA, 25 bp, Homo sapien
agccaggaacttcggcagacttgcg

SEQ ID NO: 4493815 - DNA, 25 bp, Homo sapien
acagagtcgtcatcgattgagcaag

SEQ ID NO: 4493816 - DNA, 25 bp, Homo sapien
acagctctaaggtggtctgcgtgac

SEQ ID NO: 4493817 - DNA, 25 bp, Homo sapien
ttgttgagatcattacagatacaca

SEQ ID NO: 4493818 - DNA, 25 bp, Homo sapien
aactatagtatactgccgggcacag

SEQ ID NO: 4493819 - DNA, 25 bp, Homo sapien
ccaaggcgggcataacacgtgaggt

SEQ ID NO: 4493820 - DNA, 25 bp, Homo sapien
tctccaagggtaatagtttgcaaaa

SEQ ID NO: 4493821 - DNA, 25 bp, Homo sapien
tctacgattgtttggtcggtccacc

SEQ ID NO: 4493822 - DNA, 25 bp, Homo sapien
gagcctttgtccctctagtcttcca

SEQ ID NO: 4493823 - DNA, 25 bp, Homo sapien
ggaccagtgcggttgtctacgattg

SEQ ID NO: 4493824 - DNA, 25 bp, Homo sapien
ttatgcttgcctggaccagtgcggt

SEQ ID NO: 4493825 - DNA, 25 bp, Homo sapien
ggtattccaaccattggtcccatgt

SEQ ID NO: 4493826 - DNA, 25 bp, Homo sapien
catgttccttgtcacgctctgcgag

SEQ ID NO: 4493827 - DNA, 25 bp, Homo sapien
tctttgtctggtataagtcttctaa

SEQ ID NO: 4493828 - DNA, 25 bp, Homo sapien
cacgctctgcgaggatctttaggac

SEQ ID NO: 4493829 - DNA, 25 bp, Homo sapien
ctcacaagccgtgaagagcagcgcc

SEQ ID NO: 4493830 - DNA, 25 bp, Homo sapien
tcctcacaagccgtgaagagcagcg

SEQ ID NO: 4493831 - DNA, 25 bp, Homo sapien
gccaggaagccccaccgcatcacct

SEQ ID NO: 4493832 - DNA, 25 bp, Homo sapien
gagctcctcacaagccgtgaagagc

SEQ ID NO: 4493833 - DNA, 25 bp, Homo sapien
aggtccaggtgccatgtggcattct

SEQ ID NO: 4493834 - DNA, 25 bp, Homo sapien
catagacaccgccagggcttgttct

SEQ ID NO: 4493835 - DNA, 25 bp, Homo sapien
ggcattctctgggtagacaccggct

SEQ ID NO: 4493836 - DNA, 25 bp, Homo sapien
cacaggggtgccagaggacttctcc

SEQ ID NO: 4493837 - DNA, 25 bp, Homo sapien
gctgtaggtgttgggctattccgaa

SEQ ID NO: 4493838 - DNA, 25 bp, Homo sapien
tgcagaataaccctgaggctgtagg

SEQ ID NO: 4493839 - DNA, 25 bp, Homo sapien
aaggcatctgcagaataaccctgag

SEQ ID NO: 4493840 - DNA, 25 bp, Homo sapien
gctattccgaactccctctctggga

SEQ ID NO: 4493841 - DNA, 25 bp, Homo sapien
ttcactgaggtattctttcagcaag

SEQ ID NO: 4493842 - DNA, 25 bp, Homo sapien
gagggagccctggaatgtgctccat

SEQ ID NO: 4493843 - DNA, 25 bp, Homo sapien
cactactagggccacgtggactatc

SEQ ID NO: 4493844 - DNA, 25 bp, Homo sapien
tgtgctccatctacactactagggc

SEQ ID NO: 4493845 - DNA, 25 bp, Homo sapien
tgcctcctttaagggacgcctcctg

SEQ ID NO: 4493846 - DNA, 25 bp, Homo sapien
ccccagtagaagctaaggtgtatct

SEQ ID NO: 4493847 - DNA, 25 bp, Homo sapien
gcaactccccagtagaagctaaggt

SEQ ID NO: 4493848 - DNA, 25 bp, Homo sapien
ctggcaactccccagtagaagctaa

SEQ ID NO: 4493849 - DNA, 25 bp, Homo sapien
aactccccagtagaagctaaggtgt

SEQ ID NO: 4493850 - DNA, 25 bp, Homo sapien
cagctcttcgaaccggacagtgcga

SEQ ID NO: 4493851 - DNA, 25 bp, Homo sapien
ccggacagtgcgagagtcagcgcct

SEQ ID NO: 4493852 - DNA, 25 bp, Homo sapien
tcgaaccggacagtgcgagagtcag

SEQ ID NO: 4493853 - DNA, 25 bp, Homo sapien
agaaaacagctcttcgaaccggaca

SEQ ID NO: 4493854 - DNA, 25 bp, Homo sapien
ggccaccggcagagtcgtgtttgct

SEQ ID NO: 4493855 - DNA, 25 bp, Homo sapien
gcagagtcgtgtttgctagtgcaca

SEQ ID NO: 4493856 - DNA, 25 bp, Homo sapien
tgtttgctagtgcacagggccactg

SEQ ID NO: 4493857 - DNA, 25 bp, Homo sapien
cagggccactgtatgttcactctct

SEQ ID NO: 4493858 - DNA, 25 bp, Homo sapien
caaggatggttgggctgggcaggga

SEQ ID NO: 4493859 - DNA, 25 bp, Homo sapien
ggctgggcagggagtggtggctcat

SEQ ID NO: 4493860 - DNA, 25 bp, Homo sapien
gttgggctgggcagggagtggtggc

SEQ ID NO: 4493861 - DNA, 25 bp, Homo sapien
gggctgggcagggagtggtggctca

SEQ ID NO: 4493862 - DNA, 25 bp, Homo sapien
acagcaacacgttcttagagtttct

SEQ ID NO: 4493863 - DNA, 25 bp, Homo sapien
taacaacagcaacacgttcttagag

SEQ ID NO: 4493864 - DNA, 25 bp, Homo sapien
caacagcaacacgttcttagagttt

SEQ ID NO: 4493865 - DNA, 25 bp, Homo sapien
tcttagagtttcttgtcttggggga

SEQ ID NO: 4493866 - DNA, 25 bp, Homo sapien
ccctggagtgtctgcaggccaaagc

SEQ ID NO: 4493867 - DNA, 25 bp, Homo sapien
cctggagtgtctgcaggccaaagcc

SEQ ID NO: 4493868 - DNA, 25 bp, Homo sapien
ggctgccaggtggtgccagtgaaag

SEQ ID NO: 4493869 - DNA, 25 bp, Homo sapien
gccctgccaaccttcttgaacaatg

SEQ ID NO: 4493870 - DNA, 25 bp, Homo sapien
ctgctatgtcatgctcgggtatcaa

SEQ ID NO: 4493871 - DNA, 25 bp, Homo sapien
aggttgtcaacattccttcatcaca

SEQ ID NO: 4493872 - DNA, 25 bp, Homo sapien
catcacaattcagcaaaacactagc

SEQ ID NO: 4493873 - DNA, 25 bp, Homo sapien
caacagagtccctttccttgtaagt

SEQ ID NO: 4493874 - DNA, 25 bp, Homo sapien
atgtggggttgatggtgtctttctt

SEQ ID NO: 4493875 - DNA, 25 bp, Homo sapien
gtggggttgatggtgtctttcttgg

SEQ ID NO: 4493876 - DNA, 25 bp, Homo sapien
ggtgtctttcttggttcccagcttc

SEQ ID NO: 4493877 - DNA, 25 bp, Homo sapien
gtctttcttggttcccagcttccta

SEQ ID NO: 4493878 - DNA, 25 bp, Homo sapien
gccccatgagtcttaaagaggccct

SEQ ID NO: 4493879 - DNA, 25 bp, Homo sapien
aaagaggcccttgtgagagtcatcc

SEQ ID NO: 4493880 - DNA, 25 bp, Homo sapien
gagtcatccggcagccaatctgacc

SEQ ID NO: 4493881 - DNA, 25 bp, Homo sapien
tgacccctgaactcagcgcacaggg

SEQ ID NO: 4493882 - DNA, 25 bp, Homo sapien
aacttccttccagagtgagtgacga

SEQ ID NO: 4493883 - DNA, 25 bp, Homo sapien
tgacgatgcagcctacatccttcag

SEQ ID NO: 4493884 - DNA, 25 bp, Homo sapien
atgccctggaggttaaaggtgtaag

SEQ ID NO: 4493885 - DNA, 25 bp, Homo sapien
gggtcctccgcctttaaagtcagca

SEQ ID NO: 4493886 - DNA, 25 bp, Homo sapien
ttctgcaaagttggaaacatattcc

SEQ ID NO: 4493887 - DNA, 25 bp, Homo sapien
tcttgtggatctcagcacttctgca

SEQ ID NO: 4493888 - DNA, 25 bp, Homo sapien
cctgtgcgaagcttgagcggctgct

SEQ ID NO: 4493889 - DNA, 25 bp, Homo sapien
cagggaccctgtgcgaagcttgagc

SEQ ID NO: 4493890 - DNA, 25 bp, Homo sapien
caccaagaagggaatatgcctctca

SEQ ID NO: 4493891 - DNA, 25 bp, Homo sapien
aattcagcaaatcctccatcacgag

SEQ ID NO: 4493892 - DNA, 25 bp, Homo sapien
agaacagaaagactctccccacagg

SEQ ID NO: 4493893 - DNA, 25 bp, Homo sapien
gagcccctgcctgtattgtgtctgc

SEQ ID NO: 4493894 - DNA, 25 bp, Homo sapien
ggattttatcatcggccatgtaatg

SEQ ID NO: 4493895 - DNA, 25 bp, Homo sapien
taaagcacggagacattagggattt

SEQ ID NO: 4493896 - DNA, 25 bp, Homo sapien
gaatcaaatccactaggaggtaaag

SEQ ID NO: 4493897 - DNA, 25 bp, Homo sapien
ccactaggaggtaaagcacggagac

SEQ ID NO: 4493898 - DNA, 25 bp, Homo sapien
cacatagccgccctggaaatactgc

SEQ ID NO: 4493899 - DNA, 25 bp, Homo sapien
ttactcaactctgaatgacgtgacc

SEQ ID NO: 4493900 - DNA, 25 bp, Homo sapien
catagccgccctggaaatactgcag

SEQ ID NO: 4493901 - DNA, 25 bp, Homo sapien
accacgatcctccaagagaaagatg

SEQ ID NO: 4493902 - DNA, 25 bp, Homo sapien
tcataaaccttgaatgttcccagtt

SEQ ID NO: 4493903 - DNA, 25 bp, Homo sapien
cccatcctcataaaccttgaatgtt

SEQ ID NO: 4493904 - DNA, 25 bp, Homo sapien
attcatagagtcagccccatcctca

SEQ ID NO: 4493905 - DNA, 25 bp, Homo sapien
ccagttgcttataaaacagcaccaa

SEQ ID NO: 4493906 - DNA, 25 bp, Homo sapien
attgggggatgcaggcaccgcctgg

SEQ ID NO: 4493907 - DNA, 25 bp, Homo sapien
ttgaattgggggatgcaggcaccgc

SEQ ID NO: 4493908 - DNA, 25 bp, Homo sapien
gaattgggggatgcaggcaccgcct

SEQ ID NO: 4493909 - DNA, 25 bp, Homo sapien
cgttgaattgggggatgcaggcacc

SEQ ID NO: 4493910 - DNA, 25 bp, Homo sapien
gatacccattgtcctgagttcaagc

SEQ ID NO: 4493911 - DNA, 25 bp, Homo sapien
cagaatgccctagaggatccaggag

SEQ ID NO: 4493912 - DNA, 25 bp, Homo sapien
gagtcgccttcacgtttcacttgga

SEQ ID NO: 4493913 - DNA, 25 bp, Homo sapien
gagatctgtccattcgcccttgtac

SEQ ID NO: 4493914 - DNA, 25 bp, Homo sapien
ggatgagtcctttccctcacttcca

SEQ ID NO: 4493915 - DNA, 25 bp, Homo sapien
ctccatctggggatgagtcctttcc

SEQ ID NO: 4493916 - DNA, 25 bp, Homo sapien
catctggggatgagtcctttccctc

SEQ ID NO: 4493917 - DNA, 25 bp, Homo sapien
tggggatgagtcctttccctcactt

SEQ ID NO: 4493918 - DNA, 25 bp, Homo sapien
tggttagttgaataagccctcctac

SEQ ID NO: 4493919 - DNA, 25 bp, Homo sapien
gtggttagttgaataagccctccta

SEQ ID NO: 4493920 - DNA, 25 bp, Homo sapien
caagtggttagttgaataagccctc

SEQ ID NO: 4493921 - DNA, 25 bp, Homo sapien
agtggttagttgaataagccctcct

SEQ ID NO: 4493922 - DNA, 25 bp, Homo sapien
tgaatgacctttcagcataagcagg

SEQ ID NO: 4493923 - DNA, 25 bp, Homo sapien
gacctttcagcataagcaggtcagc

SEQ ID NO: 4493924 - DNA, 25 bp, Homo sapien
gaacacatgaatgacctttcagcat

SEQ ID NO: 4493925 - DNA, 25 bp, Homo sapien
cctttcagcataagcaggtcagcaa

SEQ ID NO: 4493926 - DNA, 25 bp, Homo sapien
cctacaactgggatgccaaaagaac

SEQ ID NO: 4493927 - DNA, 25 bp, Homo sapien
gccccaatcggctaagaaagacatt

SEQ ID NO: 4493928 - DNA, 25 bp, Homo sapien
cgcccacctggttgaggcaaacagt

SEQ ID NO: 4493929 - DNA, 25 bp, Homo sapien
gatgacatgacagacaaggcgccca

SEQ ID NO: 4493930 - DNA, 25 bp, Homo sapien
ggaggtgggcttgctcatatgcagt

SEQ ID NO: 4493931 - DNA, 25 bp, Homo sapien
gaggtgggcttgctcatatgcagta

SEQ ID NO: 4493932 - DNA, 25 bp, Homo sapien
ttggaatatctttgcttcgtgggga

SEQ ID NO: 4493933 - DNA, 25 bp, Homo sapien
tggaatatctttgcttcgtggggag

SEQ ID NO: 4493934 - DNA, 25 bp, Homo sapien
ggttgtaactgttactatcggtagc

SEQ ID NO: 4493935 - DNA, 25 bp, Homo sapien
cagattctggtgtagaaattccacc

SEQ ID NO: 4493936 - DNA, 25 bp, Homo sapien
agtactgagcagatgtaagtcgtgg

SEQ ID NO: 4493937 - DNA, 25 bp, Homo sapien
aaagtactgagcagatgtaagtcgt

SEQ ID NO: 4493938 - DNA, 25 bp, Homo sapien
gccaactctgttgcgcaaagcacag

SEQ ID NO: 4493939 - DNA, 25 bp, Homo sapien
tctctcctcaccaagaccttccatt

SEQ ID NO: 4493940 - DNA, 25 bp, Homo sapien
tttgccaactctgttgcgcaaagca

SEQ ID NO: 4493941 - DNA, 25 bp, Homo sapien
agtcctgaatcagccgcaatctgac

SEQ ID NO: 4493942 - DNA, 25 bp, Homo sapien
tcaagggcgaagacagaaatgattc

SEQ ID NO: 4493943 - DNA, 25 bp, Homo sapien
tgattcaaaatgttcctgtgtcggc

SEQ ID NO: 4493944 - DNA, 25 bp, Homo sapien
tgtgtcggccacttgaaaggtccca

SEQ ID NO: 4493945 - DNA, 25 bp, Homo sapien
caagcaggcacacagaccgtgtcaa

SEQ ID NO: 4493946 - DNA, 25 bp, Homo sapien
tctccagatgtacctgaggggtggg

SEQ ID NO: 4493947 - DNA, 25 bp, Homo sapien
tggggagccccctaggaggaactca

SEQ ID NO: 4493948 - DNA, 25 bp, Homo sapien
aaataggacttggaaggtctgtgga

SEQ ID NO: 4493949 - DNA, 25 bp, Homo sapien
cttgagcttgaaataggacttggaa

SEQ ID NO: 4493950 - DNA, 25 bp, Homo sapien
taggaatggcctgattggctgctat

SEQ ID NO: 4493951 - DNA, 25 bp, Homo sapien
tacaaataacaggaaacctgtggaa

SEQ ID NO: 4493952 - DNA, 25 bp, Homo sapien
tccttgaaggtgagttacaaataac

SEQ ID NO: 4493953 - DNA, 25 bp, Homo sapien
ccaactcccctaggaatggcctgat

SEQ ID NO: 4493954 - DNA, 25 bp, Homo sapien
gatcatggctattgcaggtcttagg

SEQ ID NO: 4493955 - DNA, 25 bp, Homo sapien
tgagtcctctgttgatgtaccaccc

SEQ ID NO: 4493956 - DNA, 25 bp, Homo sapien
ccatgtctgaccaagtataactacc

SEQ ID NO: 4493957 - DNA, 25 bp, Homo sapien
gaggattcacctgttgctgagcagc

SEQ ID NO: 4493958 - DNA, 25 bp, Homo sapien
tgagggcccaagacattgtggatca

SEQ ID NO: 4493959 - DNA, 25 bp, Homo sapien
ctgagggcccaagacattgtggatc

SEQ ID NO: 4493960 - DNA, 25 bp, Homo sapien
tctgagggcccaagacattgtggat

SEQ ID NO: 4493961 - DNA, 25 bp, Homo sapien
agggcccaagacattgtggatcatc

SEQ ID NO: 4493962 - DNA, 25 bp, Homo sapien
tctcctgctgagatggtgttccact

SEQ ID NO: 4493963 - DNA, 25 bp, Homo sapien
cctgctgagatggtgttccactggt

SEQ ID NO: 4493964 - DNA, 25 bp, Homo sapien
tgagatggtgttccactggttgagc

SEQ ID NO: 4493965 - DNA, 25 bp, Homo sapien
gctgagatggtgttccactggttga

SEQ ID NO: 4493966 - DNA, 25 bp, Homo sapien
tggcttcatcatccctgctccattt

SEQ ID NO: 4493967 - DNA, 25 bp, Homo sapien
gtcctattccagtccaagatccttg

SEQ ID NO: 4493968 - DNA, 25 bp, Homo sapien
cagtccaagatccttgctgatccat

SEQ ID NO: 4493969 - DNA, 25 bp, Homo sapien
tccatgtcctattccagtccaagat

SEQ ID NO: 4493970 - DNA, 25 bp, Homo sapien
aaatcaaagcacgtcctccccgttg

SEQ ID NO: 4493971 - DNA, 25 bp, Homo sapien
cgttgccgtggaaactggaaacagg

SEQ ID NO: 4493972 - DNA, 25 bp, Homo sapien
gatgtccccagaaatcaaagcacgt

SEQ ID NO: 4493973 - DNA, 25 bp, Homo sapien
ccgttgccgtggaaactggaaacag

SEQ ID NO: 4493974 - DNA, 25 bp, Homo sapien
gctatagtggccactgccaacaaag

SEQ ID NO: 4493975 - DNA, 25 bp, Homo sapien
catgaactcagtggttggaaaatct

SEQ ID NO: 4493976 - DNA, 25 bp, Homo sapien
ggaaccacacaagagaagggcaaga

SEQ ID NO: 4493977 - DNA, 25 bp, Homo sapien
cctaacatcccactgttttacattt

SEQ ID NO: 4493978 - DNA, 25 bp, Homo sapien
ggcttctctagagccgactccttct

SEQ ID NO: 4493979 - DNA, 25 bp, Homo sapien
caggcttctctagagccgactcctt

SEQ ID NO: 4493980 - DNA, 25 bp, Homo sapien
agcagctcgccaggcttctctagag

SEQ ID NO: 4493981 - DNA, 25 bp, Homo sapien
tgggacccttagcagctcgccaggc

SEQ ID NO: 4493982 - DNA, 25 bp, Homo sapien
cgacctccttcgctgacaatgctga

SEQ ID NO: 4493983 - DNA, 25 bp, Homo sapien
tgctgatgactggaaaatctgctct

SEQ ID NO: 4493984 - DNA, 25 bp, Homo sapien
gctgacaatgctgatgactggaaaa

SEQ ID NO: 4493985 - DNA, 25 bp, Homo sapien
tagaaggttccacagcgacctcctt

SEQ ID NO: 4493986 - DNA, 25 bp, Homo sapien
tcatcccctgaggaagtgccacatt

SEQ ID NO: 4493987 - DNA, 25 bp, Homo sapien
catcccctgaggaagtgccacattc

SEQ ID NO: 4493988 - DNA, 25 bp, Homo sapien
atcccctgaggaagtgccacattca

SEQ ID NO: 4493989 - DNA, 25 bp, Homo sapien
cccctgaggaagtgccacattcacc

SEQ ID NO: 4493990 - DNA, 25 bp, Homo sapien
tgcagcacctctagaatccaatgac

SEQ ID NO: 4493991 - DNA, 25 bp, Homo sapien
atgaggaagcgccaagtcagctgca

SEQ ID NO: 4493992 - DNA, 25 bp, Homo sapien
gaattcaacgatgctgacatgagga

SEQ ID NO: 4493993 - DNA, 25 bp, Homo sapien
ggaaggtaaatactggcacagttct

SEQ ID NO: 4493994 - DNA, 25 bp, Homo sapien
atcaatttgctcgtctgtctcccca

SEQ ID NO: 4493995 - DNA, 25 bp, Homo sapien
taatttatcaatttgctcgtctgtc

SEQ ID NO: 4493996 - DNA, 25 bp, Homo sapien
ataatttatcaatttgctcgtctgt

SEQ ID NO: 4493997 - DNA, 25 bp, Homo sapien
tttatcaatttgctcgtctgtctcc

SEQ ID NO: 4493998 - DNA, 25 bp, Homo sapien
gacttgcacccctagccacatgtct

SEQ ID NO: 4493999 - DNA, 25 bp, Homo sapien
agccccactcactcttccgacttgc

SEQ ID NO: 4494000 - DNA, 25 bp, Homo sapien
aggagaagccttcccgcaggtgcag

SEQ ID NO: 4494001 - DNA, 25 bp, Homo sapien
cctgggcaaagcctgcggcagcccc

SEQ ID NO: 4494002 - DNA, 25 bp, Homo sapien
gagctgccggggaagtcaaattatc

SEQ ID NO: 4494003 - DNA, 25 bp, Homo sapien
tcactccatcggcaggagctgccgg

SEQ ID NO: 4494004 - DNA, 25 bp, Homo sapien
acatctgtctgaccgaacacgcatt

SEQ ID NO: 4494005 - DNA, 25 bp, Homo sapien
tatccaactgttgcttggtgagtgt

SEQ ID NO: 4494006 - DNA, 25 bp, Homo sapien
gtgcttccagtatcccttgcatcaa

SEQ ID NO: 4494007 - DNA, 25 bp, Homo sapien
cagtatcccttgcatcaactaacat

SEQ ID NO: 4494008 - DNA, 25 bp, Homo sapien
gtccagaccatctctctgtgggttg

SEQ ID NO: 4494009 - DNA, 25 bp, Homo sapien
ctgtgggttgtgcttccagtatccc

SEQ ID NO: 4494010 - DNA, 25 bp, Homo sapien
gctgtgaggctcttccattagttta

SEQ ID NO: 4494011 - DNA, 25 bp, Homo sapien
catacaggtgtgctgcaaggccaca

SEQ ID NO: 4494012 - DNA, 25 bp, Homo sapien
gccactcccgaaagtagtctgtgta

SEQ ID NO: 4494013 - DNA, 25 bp, Homo sapien
tgtgtaagttgagacccagagggca

SEQ ID NO: 4494014 - DNA, 25 bp, Homo sapien
caggtatgcctgctacgtcaggcat

SEQ ID NO: 4494015 - DNA, 25 bp, Homo sapien
aagcaggtatgcctgctacgtcagg

SEQ ID NO: 4494016 - DNA, 25 bp, Homo sapien
taaagcaggtatgcctgctacgtca

SEQ ID NO: 4494017 - DNA, 25 bp, Homo sapien
ctgtaaagcaggtatgcctgctacg

SEQ ID NO: 4494018 - DNA, 25 bp, Homo sapien
ggccatctgttcccaattattttct

SEQ ID NO: 4494019 - DNA, 25 bp, Homo sapien
gatgtcaaatcaggatcttggtgga

SEQ ID NO: 4494020 - DNA, 25 bp, Homo sapien
gaggacatcagaggccatctgttcc

SEQ ID NO: 4494021 - DNA, 25 bp, Homo sapien
cacctcgagggctgaacacttagca

SEQ ID NO: 4494022 - DNA, 25 bp, Homo sapien
cagacacctcgagggctgaacactt

SEQ ID NO: 4494023 - DNA, 25 bp, Homo sapien
gaagaatcagacacctcgagggctg

SEQ ID NO: 4494024 - DNA, 25 bp, Homo sapien
catccagaagaatcagacacctcga

SEQ ID NO: 4494025 - DNA, 25 bp, Homo sapien
gggacaaaacactctgtccactgtt

SEQ ID NO: 4494026 - DNA, 25 bp, Homo sapien
ccagcatgagaatgtactttacaaa

SEQ ID NO: 4494027 - DNA, 25 bp, Homo sapien
cagttgccttgaggcaattaaagca

SEQ ID NO: 4494028 - DNA, 25 bp, Homo sapien
tgctctgtcacagttgccttgaggc

SEQ ID NO: 4494029 - DNA, 25 bp, Homo sapien
ccaggaagatgggctcttgtccact

SEQ ID NO: 4494030 - DNA, 25 bp, Homo sapien
gaacagtttcactgttgaaagctgg

SEQ ID NO: 4494031 - DNA, 25 bp, Homo sapien
gcaatcatgtccttgctggtttggc

SEQ ID NO: 4494032 - DNA, 25 bp, Homo sapien
tgttgcaatcatgtccttgctggtt

SEQ ID NO: 4494033 - DNA, 25 bp, Homo sapien
agtagttttactgcccatgagcact

SEQ ID NO: 4494034 - DNA, 25 bp, Homo sapien
ctcagtagttttactgcccatgagc

SEQ ID NO: 4494035 - DNA, 25 bp, Homo sapien
tctccatcatcccatgaggtggcct

SEQ ID NO: 4494036 - DNA, 25 bp, Homo sapien
gaggtggcctgctttgctgtcaacg

SEQ ID NO: 4494037 - DNA, 25 bp, Homo sapien
cagtaaagctgtgacaaactatcaa

SEQ ID NO: 4494038 - DNA, 25 bp, Homo sapien
gaaaatgactttgagagccaattaa

SEQ ID NO: 4494039 - DNA, 25 bp, Homo sapien
gcgacaattgtacctgtcagtaaag

SEQ ID NO: 4494040 - DNA, 25 bp, Homo sapien
gcagcttagaggagctattttgcat

SEQ ID NO: 4494041 - DNA, 25 bp, Homo sapien
tttcttatctacaaatcctggtcta

SEQ ID NO: 4494042 - DNA, 25 bp, Homo sapien
tccaggtgataacttattctccttc

SEQ ID NO: 4494043 - DNA, 25 bp, Homo sapien
cctggtctattaaacaggtgtccag

SEQ ID NO: 4494044 - DNA, 25 bp, Homo sapien
cctggttgatgtgaagcaaagccca

SEQ ID NO: 4494045 - DNA, 25 bp, Homo sapien
ggggagatcatttcatggttgtcaa

SEQ ID NO: 4494046 - DNA, 25 bp, Homo sapien
ttaaggggagatcatttcatggttg

SEQ ID NO: 4494047 - DNA, 25 bp, Homo sapien
aggggagatcatttcatggttgtca

SEQ ID NO: 4494048 - DNA, 25 bp, Homo sapien
aaggggagatcatttcatggttgtc

SEQ ID NO: 4494049 - DNA, 25 bp, Homo sapien
ttctcgggtcctagggaaccgctgc

SEQ ID NO: 4494050 - DNA, 25 bp, Homo sapien
tagcttcttgttcggccatcctttt

SEQ ID NO: 4494051 - DNA, 25 bp, Homo sapien
tgcagcaggacctgtagcccactag

SEQ ID NO: 4494052 - DNA, 25 bp, Homo sapien
tgtagcccactagcttcttgttcgg

SEQ ID NO: 4494053 - DNA, 25 bp, Homo sapien
ctgatcccacgaggatcaataattt

SEQ ID NO: 4494054 - DNA, 25 bp, Homo sapien
taatttaagcagaacaatcatcaac

SEQ ID NO: 4494055 - DNA, 25 bp, Homo sapien
aataatttaagcagaacaatcatca

SEQ ID NO: 4494056 - DNA, 25 bp, Homo sapien
cccacgaggatcaataatttaagca

SEQ ID NO: 4494057 - DNA, 25 bp, Homo sapien
agctctgcatgctctcagcaggtct

SEQ ID NO: 4494058 - DNA, 25 bp, Homo sapien
aactcggatcttttacccagagcct

SEQ ID NO: 4494059 - DNA, 25 bp, Homo sapien
gcaggtctccagccttattcaggag

SEQ ID NO: 4494060 - DNA, 25 bp, Homo sapien
ccttcatttgccaaacaggcttttt

SEQ ID NO: 4494061 - DNA, 25 bp, Homo sapien
gaggacatccacaaacatagcacag

SEQ ID NO: 4494062 - DNA, 25 bp, Homo sapien
acatagcacagggatattctgttat

SEQ ID NO: 4494063 - DNA, 25 bp, Homo sapien
gtcagaaatggtgatatgcttaagt

SEQ ID NO: 4494064 - DNA, 25 bp, Homo sapien
tattctgttatgcttgtgtttgcct

SEQ ID NO: 4494065 - DNA, 25 bp, Homo sapien
ctgtttgattcatagctgcctgttc

SEQ ID NO: 4494066 - DNA, 25 bp, Homo sapien
ttatttcaggcctggcgtaaaggag

SEQ ID NO: 4494067 - DNA, 25 bp, Homo sapien
tgtccagtctgtttgattcatagct

SEQ ID NO: 4494068 - DNA, 25 bp, Homo sapien
aagaggatgcatttccatacaccca

SEQ ID NO: 4494069 - DNA, 25 bp, Homo sapien
gttcctacttggcagtttgccgcag

SEQ ID NO: 4494070 - DNA, 25 bp, Homo sapien
tttgccgcagcaattaccacctcgt

SEQ ID NO: 4494071 - DNA, 25 bp, Homo sapien
gagttgagaacatccaccacagaga

SEQ ID NO: 4494072 - DNA, 25 bp, Homo sapien
caccctgggagttgagaacatccac

SEQ ID NO: 4494073 - DNA, 25 bp, Homo sapien
caggttctccaagacttgcacccag

SEQ ID NO: 4494074 - DNA, 25 bp, Homo sapien
gcacccagaggcatggtttgatctg

SEQ ID NO: 4494075 - DNA, 25 bp, Homo sapien
gaactgcatagttcaggttctccaa

SEQ ID NO: 4494076 - DNA, 25 bp, Homo sapien
tccaagacttgcacccagaggcatg

SEQ ID NO: 4494077 - DNA, 25 bp, Homo sapien
ccactgatagccagaaaagctgtgg

SEQ ID NO: 4494078 - DNA, 25 bp, Homo sapien
tccactgatagccagaaaagctgtg

SEQ ID NO: 4494079 - DNA, 25 bp, Homo sapien
ctccactgatagccagaaaagctgt

SEQ ID NO: 4494080 - DNA, 25 bp, Homo sapien
cactgatagccagaaaagctgtggc

SEQ ID NO: 4494081 - DNA, 25 bp, Homo sapien
tgaagaacttggcatctgactgcgc

SEQ ID NO: 4494082 - DNA, 25 bp, Homo sapien
gaggggcacccacaacatgcacggg

SEQ ID NO: 4494083 - DNA, 25 bp, Homo sapien
tctgactgcgctatgactctgggag

SEQ ID NO: 4494084 - DNA, 25 bp, Homo sapien
cacggggaataccaagacctgacca

SEQ ID NO: 4494085 - DNA, 25 bp, Homo sapien
agaaagcagatctccgaggaccttg

SEQ ID NO: 4494086 - DNA, 25 bp, Homo sapien
cagaaagcagatctccgaggacctt

SEQ ID NO: 4494087 - DNA, 25 bp, Homo sapien
taggccaactttggccagcagccgg

SEQ ID NO: 4494088 - DNA, 25 bp, Homo sapien
ctgccacccttgctgatcatgtagt

SEQ ID NO: 4494089 - DNA, 25 bp, Homo sapien
ccaactttggccagcagccggaaga

SEQ ID NO: 4494090 - DNA, 25 bp, Homo sapien
catgtagtgaattctccggtctgtg

SEQ ID NO: 4494091 - DNA, 25 bp, Homo sapien
gtcagctttaggtcttggagtacga

SEQ ID NO: 4494092 - DNA, 25 bp, Homo sapien
gctttaggtcttggagtacgagtac

SEQ ID NO: 4494093 - DNA, 25 bp, Homo sapien
cagctttaggtcttggagtacgagt

SEQ ID NO: 4494094 - DNA, 25 bp, Homo sapien
cagtcagctttaggtcttggagtac

SEQ ID NO: 4494095 - DNA, 25 bp, Homo sapien
tcctggccagaatcaatgtcacatc

SEQ ID NO: 4494096 - DNA, 25 bp, Homo sapien
caattctagggccttccgtccaatc

SEQ ID NO: 4494097 - DNA, 25 bp, Homo sapien
ccatgggataggttcttcctggcca

SEQ ID NO: 4494098 - DNA, 25 bp, Homo sapien
caatgtcacatcaagtgcttccaat

SEQ ID NO: 4494099 - DNA, 25 bp, Homo sapien
ccatggctccattaattcccagcat

SEQ ID NO: 4494100 - DNA, 25 bp, Homo sapien
gcgctttcgggtgtaaggagtaata

SEQ ID NO: 4494101 - DNA, 25 bp, Homo sapien
gcagttccatggctccattaattcc

SEQ ID NO: 4494102 - DNA, 25 bp, Homo sapien
tgattgcttgggtgcgctttcgggt

SEQ ID NO: 4494103 - DNA, 25 bp, Homo sapien
ggcagaagtattacatggcactctg

SEQ ID NO: 4494104 - DNA, 25 bp, Homo sapien
catgtagggcaatctccatctctcc

SEQ ID NO: 4494105 - DNA, 25 bp, Homo sapien
ccatctgttacaaaaggggcagaag

SEQ ID NO: 4494106 - DNA, 25 bp, Homo sapien
catctctccatctgttacaaaaggg

SEQ ID NO: 4494107 - DNA, 25 bp, Homo sapien
tacactgtgagaatccaaaaggatc

SEQ ID NO: 4494108 - DNA, 25 bp, Homo sapien
catctgataacccagttccaaaggt

SEQ ID NO: 4494109 - DNA, 25 bp, Homo sapien
ggttgggttcaatattacactgtga

SEQ ID NO: 4494110 - DNA, 25 bp, Homo sapien
ctgtactttggaaaaggtcaagcac

SEQ ID NO: 4494111 - DNA, 25 bp, Homo sapien
gcttcccctcagatgttcggttgga

SEQ ID NO: 4494112 - DNA, 25 bp, Homo sapien
gtttgtctttacacagcctgagtca

SEQ ID NO: 4494113 - DNA, 25 bp, Homo sapien
ttatgtttgtctttacacagcctga

SEQ ID NO: 4494114 - DNA, 25 bp, Homo sapien
ccctcagatgttcggttggaggtaa

SEQ ID NO: 4494115 - DNA, 25 bp, Homo sapien
tgttctgtgcctgagtactggccca

SEQ ID NO: 4494116 - DNA, 25 bp, Homo sapien
ctgttctgtgcctgagtactggccc

SEQ ID NO: 4494117 - DNA, 25 bp, Homo sapien
gttctgtgcctgagtactggcccat

SEQ ID NO: 4494118 - DNA, 25 bp, Homo sapien
aagtcagctgctgagtaatgtcaca

SEQ ID NO: 4494119 - DNA, 25 bp, Homo sapien
agatgaaataagtcagctgctgagt

SEQ ID NO: 4494120 - DNA, 25 bp, Homo sapien
gtaatgtcacaatttccgtaacagt

SEQ ID NO: 4494121 - DNA, 25 bp, Homo sapien
ccgtaacagttcagtgtcacaaatg

SEQ ID NO: 4494122 - DNA, 25 bp, Homo sapien
gtttgattgagatgtaacatggcca

SEQ ID NO: 4494123 - DNA, 25 bp, Homo sapien
ctgtcctgtttgattgagatgtaac

SEQ ID NO: 4494124 - DNA, 25 bp, Homo sapien
cctgtttgattgagatgtaacatgg

SEQ ID NO: 4494125 - DNA, 25 bp, Homo sapien
ctgactgttatctgtcctgtttgat

SEQ ID NO: 4494126 - DNA, 25 bp, Homo sapien
caatgctgccaaaacttcagtggct

SEQ ID NO: 4494127 - DNA, 25 bp, Homo sapien
tttcagcaatgctgccaaaacttca

SEQ ID NO: 4494128 - DNA, 25 bp, Homo sapien
tggatttcagcaatgctgccaaaac

SEQ ID NO: 4494129 - DNA, 25 bp, Homo sapien
tgctgccaaaacttcagtggctgcc

SEQ ID NO: 4494130 - DNA, 25 bp, Homo sapien
gatatttaaggcacccgtctgtcca

SEQ ID NO: 4494131 - DNA, 25 bp, Homo sapien
cgtctgtccaccagtgatgctgcct

SEQ ID NO: 4494132 - DNA, 25 bp, Homo sapien
caagcatcgctcatgaatcggttca

SEQ ID NO: 4494133 - DNA, 25 bp, Homo sapien
gccagagtacagacaaccaacatag

SEQ ID NO: 4494134 - DNA, 25 bp, Homo sapien
tgaagaggatctccatgccctgtgc

SEQ ID NO: 4494135 - DNA, 25 bp, Homo sapien
tcggatctgcacgtaggcgttggct

SEQ ID NO: 4494136 - DNA, 25 bp, Homo sapien
cccgagcaggctggtgacgtagcct

SEQ ID NO: 4494137 - DNA, 25 bp, Homo sapien
gacgtagcctcggttcactgctctg

SEQ ID NO: 4494138 - DNA, 25 bp, Homo sapien
ctgtgcacagattcatagcacctca

SEQ ID NO: 4494139 - DNA, 25 bp, Homo sapien
tgtgcacagattcatagcacctcat

SEQ ID NO: 4494140 - DNA, 25 bp, Homo sapien
tggaagcttcttgctaatgtgctta

SEQ ID NO: 4494141 - DNA, 25 bp, Homo sapien
tccattccaacagtagttcaaggct

SEQ ID NO: 4494142 - DNA, 25 bp, Homo sapien
gcttccattccaacagtagttcaag

SEQ ID NO: 4494143 - DNA, 25 bp, Homo sapien
gctaatgtgcttaattgagcaactg

SEQ ID NO: 4494144 - DNA, 25 bp, Homo sapien
tttagggtatccagttcttgattcc

SEQ ID NO: 4494145 - DNA, 25 bp, Homo sapien
cagagaggagcctgatgaatcaagg

SEQ ID NO: 4494146 - DNA, 25 bp, Homo sapien
gaggtcattggtcttgttggccaga

SEQ ID NO: 4494147 - DNA, 25 bp, Homo sapien
gaatcaaggcttggcctactgtgct

SEQ ID NO: 4494148 - DNA, 25 bp, Homo sapien
aagtggactcgtagggtagcactgc

SEQ ID NO: 4494149 - DNA, 25 bp, Homo sapien
ctggctgtgaccaagggaagtggac

SEQ ID NO: 4494150 - DNA, 25 bp, Homo sapien
ctcgtagggtagcactgcctcagga

SEQ ID NO: 4494151 - DNA, 25 bp, Homo sapien
gcaccacagagatgacgggctccat

SEQ ID NO: 4494152 - DNA, 25 bp, Homo sapien
caggtagatcatgtggaggttcagt

SEQ ID NO: 4494153 - DNA, 25 bp, Homo sapien
tggaggttcagtggtgatgcacccg

SEQ ID NO: 4494154 - DNA, 25 bp, Homo sapien
cttcaggtagatcatgtggaggttc

SEQ ID NO: 4494155 - DNA, 25 bp, Homo sapien
tgtggaggttcagtggtgatgcacc

SEQ ID NO: 4494156 - DNA, 25 bp, Homo sapien
agtatcagagtctttgtccacttca

SEQ ID NO: 4494157 - DNA, 25 bp, Homo sapien
cagtatcagagtctttgtccacttc

SEQ ID NO: 4494158 - DNA, 25 bp, Homo sapien
ttgggcaaacacaggaagtaatatt

SEQ ID NO: 4494159 - DNA, 25 bp, Homo sapien
tatggacatcattagaagcatgggc

SEQ ID NO: 4494160 - DNA, 25 bp, Homo sapien
gcttgggcaaacacaggaagtaata

SEQ ID NO: 4494161 - DNA, 25 bp, Homo sapien
tctgtgcatgatgtgactatggaca

SEQ ID NO: 4494162 - DNA, 25 bp, Homo sapien
aatccaggtaatgctttctggctct

SEQ ID NO: 4494163 - DNA, 25 bp, Homo sapien
taatccaggtaatgctttctggctc

SEQ ID NO: 4494164 - DNA, 25 bp, Homo sapien
ctaatccaggtaatgctttctggct

SEQ ID NO: 4494165 - DNA, 25 bp, Homo sapien
taaggctgtgctccaactggtgcat

SEQ ID NO: 4494166 - DNA, 25 bp, Homo sapien
agtgagtaaggctgtgctccaactg

SEQ ID NO: 4494167 - DNA, 25 bp, Homo sapien
cagtgagtaaggctgtgctccaact

SEQ ID NO: 4494168 - DNA, 25 bp, Homo sapien
gagtaaggctgtgctccaactggtg

SEQ ID NO: 4494169 - DNA, 25 bp, Homo sapien
ctggaaggccactgggaaggatgtc

SEQ ID NO: 4494170 - DNA, 25 bp, Homo sapien
aaggccactgggaaggatgtcccca

SEQ ID NO: 4494171 - DNA, 25 bp, Homo sapien
catggcccagggtggtactaaggga

SEQ ID NO: 4494172 - DNA, 25 bp, Homo sapien
ggaaacacaacctggaaggccactg

SEQ ID NO: 4494173 - DNA, 25 bp, Homo sapien
tcaggtcggtcaagaccaggtttgg

SEQ ID NO: 4494174 - DNA, 25 bp, Homo sapien
ttcaggtcggtcaagaccaggtttg

SEQ ID NO: 4494175 - DNA, 25 bp, Homo sapien
tgtggtggtgattggcatactgagt

SEQ ID NO: 4494176 - DNA, 25 bp, Homo sapien
atcatctccaagtttggactgcagt

SEQ ID NO: 4494177 - DNA, 25 bp, Homo sapien
tggtggtgattggcatactgagtct

SEQ ID NO: 4494178 - DNA, 25 bp, Homo sapien
catctccaagtttggactgcagttc

SEQ ID NO: 4494179 - DNA, 25 bp, Homo sapien
gggaagtctggacagcatattctct

SEQ ID NO: 4494180 - DNA, 25 bp, Homo sapien
gggatttcactttcagaagaatctc

SEQ ID NO: 4494181 - DNA, 25 bp, Homo sapien
cctagatgcacagtggaccttcccg

SEQ ID NO: 4494182 - DNA, 25 bp, Homo sapien
tctcctgagactattggattgcaca

SEQ ID NO: 4494183 - DNA, 25 bp, Homo sapien
tctctagtcctagtggaattagaaa

SEQ ID NO: 4494184 - DNA, 25 bp, Homo sapien
gaaaattgcatctacgtcccaggca

SEQ ID NO: 4494185 - DNA, 25 bp, Homo sapien
gcagaaaattgcatctacgtcccag

SEQ ID NO: 4494186 - DNA, 25 bp, Homo sapien
gaattagaaaaggaggcactcatcc

SEQ ID NO: 4494187 - DNA, 25 bp, Homo sapien
ggacacgcttcagatgtgtctgcag

SEQ ID NO: 4494188 - DNA, 25 bp, Homo sapien
ggatcgtggaaagggacacgcttca

SEQ ID NO: 4494189 - DNA, 25 bp, Homo sapien
tggactccacattttcgttccaaca

SEQ ID NO: 4494190 - DNA, 25 bp, Homo sapien
gccatcatcttgaagtccaccacag

SEQ ID NO: 4494191 - DNA, 25 bp, Homo sapien
caaggctcatctaaactgaagacaa

SEQ ID NO: 4494192 - DNA, 25 bp, Homo sapien
aggctcatctaaactgaagacaact

SEQ ID NO: 4494193 - DNA, 25 bp, Homo sapien
aaggctcatctaaactgaagacaac

SEQ ID NO: 4494194 - DNA, 25 bp, Homo sapien
tgactcaaatttggagaagaaccgt

SEQ ID NO: 4494195 - DNA, 25 bp, Homo sapien
gctttgcgaagatttcctgactcaa

SEQ ID NO: 4494196 - DNA, 25 bp, Homo sapien
gaagaaccgtaaacaattggaagca

SEQ ID NO: 4494197 - DNA, 25 bp, Homo sapien
aattggaagcattgtcttgcaaagg

SEQ ID NO: 4494198 - DNA, 25 bp, Homo sapien
gcagcttagccgcatcctgatctga

SEQ ID NO: 4494199 - DNA, 25 bp, Homo sapien
accaggagactcataatcaggtctc

SEQ ID NO: 4494200 - DNA, 25 bp, Homo sapien
gcttagccgcatcctgatctgataa

SEQ ID NO: 4494201 - DNA, 25 bp, Homo sapien
ggccagcagcttagccgcatcctga

SEQ ID NO: 4494202 - DNA, 25 bp, Homo sapien
atttgactctattaccctgaccata

SEQ ID NO: 4494203 - DNA, 25 bp, Homo sapien
taggtttgtttctgctatttgactc

SEQ ID NO: 4494204 - DNA, 25 bp, Homo sapien
gactctggtccaagggaaatgtata

SEQ ID NO: 4494205 - DNA, 25 bp, Homo sapien
taccctgaccataactgatgaattt

SEQ ID NO: 4494206 - DNA, 25 bp, Homo sapien
tggaaagtctttcaggtaaacttca

SEQ ID NO: 4494207 - DNA, 25 bp, Homo sapien
ctgcagatcagaagcaagactggag

SEQ ID NO: 4494208 - DNA, 25 bp, Homo sapien
agactggagggttatctggaaagtc

SEQ ID NO: 4494209 - DNA, 25 bp, Homo sapien
tctttcaggtaaacttcagacacta

SEQ ID NO: 4494210 - DNA, 25 bp, Homo sapien
ctattcacatctgcgttgaccagca

SEQ ID NO: 4494211 - DNA, 25 bp, Homo sapien
gcataccgctcactttgaaatagaa

SEQ ID NO: 4494212 - DNA, 25 bp, Homo sapien
gttgaagtggtaagggatggccgcc

SEQ ID NO: 4494213 - DNA, 25 bp, Homo sapien
tgctgggtgctattcacatctgcgt

SEQ ID NO: 4494214 - DNA, 25 bp, Homo sapien
ttcctggcatgttccagaaagcccc

SEQ ID NO: 4494215 - DNA, 25 bp, Homo sapien
gcaaaggctctttgaatccaaacag

SEQ ID NO: 4494216 - DNA, 25 bp, Homo sapien
attcctggcatgttccagaaagccc

SEQ ID NO: 4494217 - DNA, 25 bp, Homo sapien
gcccctgctccccaagcgttcatac

SEQ ID NO: 4494218 - DNA, 25 bp, Homo sapien
ccttcacagaatatagggtgggctg

SEQ ID NO: 4494219 - DNA, 25 bp, Homo sapien
cctccttcacagaatatagggtggg

SEQ ID NO: 4494220 - DNA, 25 bp, Homo sapien
ccaggtgggtttgccaagaagagcc

SEQ ID NO: 4494221 - DNA, 25 bp, Homo sapien
tgtccttatccaggtgggtttgcca

SEQ ID NO: 4494222 - DNA, 25 bp, Homo sapien
cttgtgcctcactgtccccagttct

SEQ ID NO: 4494223 - DNA, 25 bp, Homo sapien
ttgtgcctcactgtccccagttctt

SEQ ID NO: 4494224 - DNA, 25 bp, Homo sapien
tgtgcctcactgtccccagttcttc

SEQ ID NO: 4494225 - DNA, 25 bp, Homo sapien
tgcctcactgtccccagttcttcac

SEQ ID NO: 4494226 - DNA, 25 bp, Homo sapien
gccagttcatgagtcagttcagcaa

SEQ ID NO: 4494227 - DNA, 25 bp, Homo sapien
gccgtatatgctaccgacctttcct

SEQ ID NO: 4494228 - DNA, 25 bp, Homo sapien
catctgcctcccaattgtgccgtat

SEQ ID NO: 4494229 - DNA, 25 bp, Homo sapien
tcagttcagcaacatgtagcctggc

SEQ ID NO: 4494230 - DNA, 25 bp, Homo sapien
taggtatagggatagtggtaggcca

SEQ ID NO: 4494231 - DNA, 25 bp, Homo sapien
tatagtagcacttcccagatgctcc

SEQ ID NO: 4494232 - DNA, 25 bp, Homo sapien
taggccaggtagcagacatcctcac

SEQ ID NO: 4494233 - DNA, 25 bp, Homo sapien
agatgctccgcctgcaacagctgta

SEQ ID NO: 4494234 - DNA, 25 bp, Homo sapien
gaggttgacactcttttccaggatg

SEQ ID NO: 4494235 - DNA, 25 bp, Homo sapien
tggccgtgatggtcaccaagggaca

SEQ ID NO: 4494236 - DNA, 25 bp, Homo sapien
cagagaacatcttgccggaagtaga

SEQ ID NO: 4494237 - DNA, 25 bp, Homo sapien
ctgttggactcaggcatggccgtga

SEQ ID NO: 4494238 - DNA, 25 bp, Homo sapien
taacaggtcaacaggtcagtcgcac

SEQ ID NO: 4494239 - DNA, 25 bp, Homo sapien
tttccaaaccttgactgactgagag

SEQ ID NO: 4494240 - DNA, 25 bp, Homo sapien
tcagtcgcacatatgcacttaggca

SEQ ID NO: 4494241 - DNA, 25 bp, Homo sapien
aagttcttagctagagcctgtccac

SEQ ID NO: 4494242 - DNA, 25 bp, Homo sapien
ggtgtatctttaccagggaaggcta

SEQ ID NO: 4494243 - DNA, 25 bp, Homo sapien
caccagggaaggctgtatcttcatt

SEQ ID NO: 4494244 - DNA, 25 bp, Homo sapien
cattacggaaggcagtatcttctgg

SEQ ID NO: 4494245 - DNA, 25 bp, Homo sapien
accagggaaggctatgtcttcatca

SEQ ID NO: 4494246 - DNA, 25 bp, Homo sapien
aggttgttaagcatccattgtcaga

SEQ ID NO: 4494247 - DNA, 25 bp, Homo sapien
attaatccagatgggttaatcggtt

SEQ ID NO: 4494248 - DNA, 25 bp, Homo sapien
taattccgatctaccaaagagtcac

SEQ ID NO: 4494249 - DNA, 25 bp, Homo sapien
tccagatgggttaatcggttgttga

SEQ ID NO: 4494250 - DNA, 25 bp, Homo sapien
gatgaaagataccaatcagctacat

SEQ ID NO: 4494251 - DNA, 25 bp, Homo sapien
gttgaaaatctgtcacctctactga

SEQ ID NO: 4494252 - DNA, 25 bp, Homo sapien
cattaagcagagtgcatggcccttc

SEQ ID NO: 4494253 - DNA, 25 bp, Homo sapien
taaatcacatccaggaccagctatg

SEQ ID NO: 4494254 - DNA, 25 bp, Homo sapien
tggcttaggtcatgcaatctcagct

SEQ ID NO: 4494255 - DNA, 25 bp, Homo sapien
catttttattatgtagccctgctga

SEQ ID NO: 4494256 - DNA, 25 bp, Homo sapien
actgtgccccagcacgtggcttagg

SEQ ID NO: 4494257 - DNA, 25 bp, Homo sapien
tacacagacacgtaccctgtataca

SEQ ID NO: 4494258 - DNA, 25 bp, Homo sapien
gatatcttctgctccaacctgttgg

SEQ ID NO: 4494259 - DNA, 25 bp, Homo sapien
atgggatatcttctgctccaacctg

SEQ ID NO: 4494260 - DNA, 25 bp, Homo sapien
gttcctcctcactcccgttctgctg

SEQ ID NO: 4494261 - DNA, 25 bp, Homo sapien
tgtgcaaaacccaaatgccctgcct

SEQ ID NO: 4494262 - DNA, 25 bp, Homo sapien
gatggccacatcttctctcagtgtc

SEQ ID NO: 4494263 - DNA, 25 bp, Homo sapien
gtgccaacaaggtcaggttctgaag

SEQ ID NO: 4494264 - DNA, 25 bp, Homo sapien
agggccccacccatatgatcttgtt

SEQ ID NO: 4494265 - DNA, 25 bp, Homo sapien
gaacactagtatcatcagggcccca

SEQ ID NO: 4494266 - DNA, 25 bp, Homo sapien
tgagaatgcccttgccctgtaaaat

SEQ ID NO: 4494267 - DNA, 25 bp, Homo sapien
gggatgtgcatcactacatgttgag

SEQ ID NO: 4494268 - DNA, 25 bp, Homo sapien
tgccacctggactcgttgctcaatg

SEQ ID NO: 4494269 - DNA, 25 bp, Homo sapien
ccctgtaaaattctgggatgtcaaa

SEQ ID NO: 4494270 - DNA, 25 bp, Homo sapien
cctgattgctccataagctccaaat

SEQ ID NO: 4494271 - DNA, 25 bp, Homo sapien
ctctaattcaagtcctgattgctcc

SEQ ID NO: 4494272 - DNA, 25 bp, Homo sapien
tcctgattgctccataagctccaaa

SEQ ID NO: 4494273 - DNA, 25 bp, Homo sapien
ctgattgctccataagctccaaata

SEQ ID NO: 4494274 - DNA, 25 bp, Homo sapien
gactccccatgtgtgaaacctgatt

SEQ ID NO: 4494275 - DNA, 25 bp, Homo sapien
ggtgatataacaatgccaggctggc

SEQ ID NO: 4494276 - DNA, 25 bp, Homo sapien
gaagatggctgtgccggcagatatt

SEQ ID NO: 4494277 - DNA, 25 bp, Homo sapien
ggagctggcccactcggtgatataa

SEQ ID NO: 4494278 - DNA, 25 bp, Homo sapien
gataagggaacagaacttcctgctc

SEQ ID NO: 4494279 - DNA, 25 bp, Homo sapien
tggaagatacaggaggggataaggg

SEQ ID NO: 4494280 - DNA, 25 bp, Homo sapien
gatatgagggcttgagtgtaggagg

SEQ ID NO: 4494281 - DNA, 25 bp, Homo sapien
gggataagggaacagaacttcctgc

SEQ ID NO: 4494282 - DNA, 25 bp, Homo sapien
cttttctatctcaagaatggcttct

SEQ ID NO: 4494283 - DNA, 25 bp, Homo sapien
tgctccagacagatatttaagaagg

SEQ ID NO: 4494284 - DNA, 25 bp, Homo sapien
tctatctcaagaatggcttctgctc

SEQ ID NO: 4494285 - DNA, 25 bp, Homo sapien
tggctgcacttctgatcttttctat

SEQ ID NO: 4494286 - DNA, 25 bp, Homo sapien
actcccttgtcatgcacaccctcca

SEQ ID NO: 4494287 - DNA, 25 bp, Homo sapien
cagtccgcacattgactatctctgt

SEQ ID NO: 4494288 - DNA, 25 bp, Homo sapien
gttccatcagacctattgatcactg

SEQ ID NO: 4494289 - DNA, 25 bp, Homo sapien
cacattgggtcagtccgcacattga

SEQ ID NO: 4494290 - DNA, 25 bp, Homo sapien
taaaccgtcagatgctattattaat

SEQ ID NO: 4494291 - DNA, 25 bp, Homo sapien
ataaagccctcaaagctccaccagg

SEQ ID NO: 4494292 - DNA, 25 bp, Homo sapien
ttgtgtaaacgaagcatcagatggg

SEQ ID NO: 4494293 - DNA, 25 bp, Homo sapien
catattcaataaaccgtcagatgct

SEQ ID NO: 4494294 - DNA, 25 bp, Homo sapien
caacacacaatggtagaggaacgcc

SEQ ID NO: 4494295 - DNA, 25 bp, Homo sapien
acacacaatggtagaggaacgccat

SEQ ID NO: 4494296 - DNA, 25 bp, Homo sapien
aacacacaatggtagaggaacgcca

SEQ ID NO: 4494297 - DNA, 25 bp, Homo sapien
taaggagtgcacacatactgcccaa

SEQ ID NO: 4494298 - DNA, 25 bp, Homo sapien
tactgcccaactgcctagggggact

SEQ ID NO: 4494299 - DNA, 25 bp, Homo sapien
cgcagaagatagctctgttgactac

SEQ ID NO: 4494300 - DNA, 25 bp, Homo sapien
cacactcagatttaaaacgcagaag

SEQ ID NO: 4494301 - DNA, 25 bp, Homo sapien
agataaaaggagagcacacatccaa

SEQ ID NO: 4494302 - DNA, 25 bp, Homo sapien
cagaagccttcagagttgaattcta

SEQ ID NO: 4494303 - DNA, 25 bp, Homo sapien
gagcagaagccttcagagttgaatt

SEQ ID NO: 4494304 - DNA, 25 bp, Homo sapien
aaccagtctttcttaaactctgcca

SEQ ID NO: 4494305 - DNA, 25 bp, Homo sapien
tgtaggtaaggtgcttttctaagta

SEQ ID NO: 4494306 - DNA, 25 bp, Homo sapien
caggttgtaggtaaggtgcttttct

SEQ ID NO: 4494307 - DNA, 25 bp, Homo sapien
tgaccatttcattacgtgccagaaa

SEQ ID NO: 4494308 - DNA, 25 bp, Homo sapien
taaaggtaatgacccattaggctgc

SEQ ID NO: 4494309 - DNA, 25 bp, Homo sapien
cctaaggatatgttgattaaaccac

SEQ ID NO: 4494310 - DNA, 25 bp, Homo sapien
tgagggtcaatgaggtatatttgta

SEQ ID NO: 4494311 - DNA, 25 bp, Homo sapien
cttcttctcatctagctgacaattg

SEQ ID NO: 4494312 - DNA, 25 bp, Homo sapien
ctttgtcccattgagtctctaactt

SEQ ID NO: 4494313 - DNA, 25 bp, Homo sapien
tcatctagctgacaattgtctctga

SEQ ID NO: 4494314 - DNA, 25 bp, Homo sapien
gctgacaattgtctctgattctgac

SEQ ID NO: 4494315 - DNA, 25 bp, Homo sapien
tatcttatgagcatgagtttttatc

SEQ ID NO: 4494316 - DNA, 25 bp, Homo sapien
caggatatgtatcttatgagcatga

SEQ ID NO: 4494317 - DNA, 25 bp, Homo sapien
atcttcaggcaatcatacgaataat

SEQ ID NO: 4494318 - DNA, 25 bp, Homo sapien
gagaggaccacagcaggatatgtat

SEQ ID NO: 4494319 - DNA, 25 bp, Homo sapien
cgtgtctgcttagggtcaggcaaaa

SEQ ID NO: 4494320 - DNA, 25 bp, Homo sapien
tcttagtaactcgtgtctgcttagg

SEQ ID NO: 4494321 - DNA, 25 bp, Homo sapien
tttcttgcaattgacaatctcagtc

SEQ ID NO: 4494322 - DNA, 25 bp, Homo sapien
aaaagtgccagatatttgcatttat

SEQ ID NO: 4494323 - DNA, 25 bp, Homo sapien
agcatgggtatgatcttgaagatga

SEQ ID NO: 4494324 - DNA, 25 bp, Homo sapien
catctgggttgagcatgggtatgat

SEQ ID NO: 4494325 - DNA, 25 bp, Homo sapien
ctgaccaggaactccaaggtaccct

SEQ ID NO: 4494326 - DNA, 25 bp, Homo sapien
ttcatcacccaactggcattgctct

SEQ ID NO: 4494327 - DNA, 25 bp, Homo sapien
tggtagcataattgtgggtttggct

SEQ ID NO: 4494328 - DNA, 25 bp, Homo sapien
gtagcataattgtgggtttggctga

SEQ ID NO: 4494329 - DNA, 25 bp, Homo sapien
gtgggtttggctgagccaggtgcct

SEQ ID NO: 4494330 - DNA, 25 bp, Homo sapien
gtggtagcataattgtgggtttggc

SEQ ID NO: 4494331 - DNA, 25 bp, Homo sapien
tcatatatttcgaagagttctgtaa

SEQ ID NO: 4494332 - DNA, 25 bp, Homo sapien
tatatttcgaagagttctgtaaggg

SEQ ID NO: 4494333 - DNA, 25 bp, Homo sapien
atatatttcgaagagttctgtaagg

SEQ ID NO: 4494334 - DNA, 25 bp, Homo sapien
catatatttcgaagagttctgtaag

SEQ ID NO: 4494335 - DNA, 25 bp, Homo sapien
tctgcctttgctggtctgcgctgct

SEQ ID NO: 4494336 - DNA, 25 bp, Homo sapien
tgcagaggagtcctggtcctctgcc

SEQ ID NO: 4494337 - DNA, 25 bp, Homo sapien
gccctagctttgtgggtgagcactg

SEQ ID NO: 4494338 - DNA, 25 bp, Homo sapien
cccataggcatacagggaatgtgca

SEQ ID NO: 4494339 - DNA, 25 bp, Homo sapien
tttggacggttgcaccaagtgccat

SEQ ID NO: 4494340 - DNA, 25 bp, Homo sapien
cacttgtctgaagacgcattgcgga

SEQ ID NO: 4494341 - DNA, 25 bp, Homo sapien
gacgcattgcggatgccctgcaaat

SEQ ID NO: 4494342 - DNA, 25 bp, Homo sapien
tgaagacgcattgcggatgccctgc

SEQ ID NO: 4494343 - DNA, 25 bp, Homo sapien
ttcctcctataggaggatcagagga

SEQ ID NO: 4494344 - DNA, 25 bp, Homo sapien
ccctgcatccctgcacggatttctt

SEQ ID NO: 4494345 - DNA, 25 bp, Homo sapien
aaggagaaacattggaatgcggaca

SEQ ID NO: 4494346 - DNA, 25 bp, Homo sapien
ttggaatgcggacagacatcagaag

SEQ ID NO: 4494347 - DNA, 25 bp, Homo sapien
gctgtgctgcatgaggattccaaat

SEQ ID NO: 4494348 - DNA, 25 bp, Homo sapien
gggatagttaattgtgctgtcacag

SEQ ID NO: 4494349 - DNA, 25 bp, Homo sapien
ccaggtattgcaggtggcaccctag

SEQ ID NO: 4494350 - DNA, 25 bp, Homo sapien
caaatacccagggtttcatttggat

SEQ ID NO: 4494351 - DNA, 25 bp, Homo sapien
ggggctgctcctcattgttctcaaa

SEQ ID NO: 4494352 - DNA, 25 bp, Homo sapien
gggctgctcctcattgttctcaaag

SEQ ID NO: 4494353 - DNA, 25 bp, Homo sapien
tgtgcacgcttgtcctgatatgatc

SEQ ID NO: 4494354 - DNA, 25 bp, Homo sapien
ccctggcttgagcacagctgagtca

SEQ ID NO: 4494355 - DNA, 25 bp, Homo sapien
tcttagcatcttgaatgtgcacgct

SEQ ID NO: 4494356 - DNA, 25 bp, Homo sapien
tgatatgatcaccaggactggacct

SEQ ID NO: 4494357 - DNA, 25 bp, Homo sapien
cagacagaagattctggcttaactc

SEQ ID NO: 4494358 - DNA, 25 bp, Homo sapien
agattctggcttaactcctgctgcc

SEQ ID NO: 4494359 - DNA, 25 bp, Homo sapien
caggctgctgggctagcatctctgc

SEQ ID NO: 4494360 - DNA, 25 bp, Homo sapien
gtctcttccctgtgatcaatgcaga

SEQ ID NO: 4494361 - DNA, 25 bp, Homo sapien
gaggagaaacccttctacacagcaa

SEQ ID NO: 4494362 - DNA, 25 bp, Homo sapien
gaatagcagtaacacccacgatcct

SEQ ID NO: 4494363 - DNA, 25 bp, Homo sapien
tctacacagcaatcgcatctctctg

SEQ ID NO: 4494364 - DNA, 25 bp, Homo sapien
ttgcagccaccttgccttgcgggca

SEQ ID NO: 4494365 - DNA, 25 bp, Homo sapien
tcccatcatgcaatagctgagtgaa

SEQ ID NO: 4494366 - DNA, 25 bp, Homo sapien
gagtaagaattcctatccaagtgac

SEQ ID NO: 4494367 - DNA, 25 bp, Homo sapien
tgaatccaggtagggctaaccccag

SEQ ID NO: 4494368 - DNA, 25 bp, Homo sapien
tagatttccaggaactctccacttc

SEQ ID NO: 4494369 - DNA, 25 bp, Homo sapien
aatacagcttgctatgccaatgaag

SEQ ID NO: 4494370 - DNA, 25 bp, Homo sapien
ctggctcagaagagatcctatgcaa

SEQ ID NO: 4494371 - DNA, 25 bp, Homo sapien
gttgcagaatgctcccttgagcttc

SEQ ID NO: 4494372 - DNA, 25 bp, Homo sapien
tcacttgagcaattctaatacagct

SEQ ID NO: 4494373 - DNA, 25 bp, Homo sapien
gaaatccaagttccctgctggcaca

SEQ ID NO: 4494374 - DNA, 25 bp, Homo sapien
aatccaagttccctgctggcacaaa

SEQ ID NO: 4494375 - DNA, 25 bp, Homo sapien
tccaagttccctgctggcacaaaac

SEQ ID NO: 4494376 - DNA, 25 bp, Homo sapien
atccaagttccctgctggcacaaaa

SEQ ID NO: 4494377 - DNA, 25 bp, Homo sapien
tgcgattgccaccatgagcatgtgg

SEQ ID NO: 4494378 - DNA, 25 bp, Homo sapien
cgattgccaccatgagcatgtggaa

SEQ ID NO: 4494379 - DNA, 25 bp, Homo sapien
gatgcgattgccaccatgagcatgt

SEQ ID NO: 4494380 - DNA, 25 bp, Homo sapien
cttgatgcgattgccaccatgagca

SEQ ID NO: 4494381 - DNA, 25 bp, Homo sapien
tgctttcttcttgcggagaggagga

SEQ ID NO: 4494382 - DNA, 25 bp, Homo sapien
ttcttcaaggccttagtgtgaatta

SEQ ID NO: 4494383 - DNA, 25 bp, Homo sapien
caggtaggaagttccctatctgtcc

SEQ ID NO: 4494384 - DNA, 25 bp, Homo sapien
tatctgcaggtaggaagttccctat

SEQ ID NO: 4494385 - DNA, 25 bp, Homo sapien
cgtcacaaggactgagatgtcagtg

SEQ ID NO: 4494386 - DNA, 25 bp, Homo sapien
cgtcaagggttcagaaatgaaggaa

SEQ ID NO: 4494387 - DNA, 25 bp, Homo sapien
agatgtcagtgagcgtcaagggttc

SEQ ID NO: 4494388 - DNA, 25 bp, Homo sapien
gctccaacgtcacaaggactgagat

SEQ ID NO: 4494389 - DNA, 25 bp, Homo sapien
cagacccaatctttttcttctccat

SEQ ID NO: 4494390 - DNA, 25 bp, Homo sapien
tgcagacccaatctttttcttctcc

SEQ ID NO: 4494391 - DNA, 25 bp, Homo sapien
tctgcagacccaatctttttcttct

SEQ ID NO: 4494392 - DNA, 25 bp, Homo sapien
gtctgcagacccaatctttttcttc

SEQ ID NO: 4494393 - DNA, 25 bp, Homo sapien
tcatcttggaattctggagttcctt

SEQ ID NO: 4494394 - DNA, 25 bp, Homo sapien
tctggagttccttttccttgatttc

SEQ ID NO: 4494395 - DNA, 25 bp, Homo sapien
tcaagagtcatcttggaattctgga

SEQ ID NO: 4494396 - DNA, 25 bp, Homo sapien
gagtcatcttggaattctggagttc

SEQ ID NO: 4494397 - DNA, 25 bp, Homo sapien
caggaacccagaaatgggttaccag

SEQ ID NO: 4494398 - DNA, 25 bp, Homo sapien
aacagggatcctccagaggttggga

SEQ ID NO: 4494399 - DNA, 25 bp, Homo sapien
aacaactagatcctgaactaccaga

SEQ ID NO: 4494400 - DNA, 25 bp, Homo sapien
cataaccgcgggctttaacaactag

SEQ ID NO: 4494401 - DNA, 25 bp, Homo sapien
taaaggctggacagtctaaaggaca

SEQ ID NO: 4494402 - DNA, 25 bp, Homo sapien
tagcatttctgaaatgacagctgct

SEQ ID NO: 4494403 - DNA, 25 bp, Homo sapien
gcatttctgaaatgacagctgctcc

SEQ ID NO: 4494404 - DNA, 25 bp, Homo sapien
tgtagcatttctgaaatgacagctg

SEQ ID NO: 4494405 - DNA, 25 bp, Homo sapien
atttctgaaatgacagctgctcctt

SEQ ID NO: 4494406 - DNA, 25 bp, Homo sapien
acgggacttcggccaatgctgctca

SEQ ID NO: 4494407 - DNA, 25 bp, Homo sapien
gcatggtaaatggttggctgcagat

SEQ ID NO: 4494408 - DNA, 25 bp, Homo sapien
tagaggaggcctttggcatggtaaa

SEQ ID NO: 4494409 - DNA, 25 bp, Homo sapien
tgttcaaatcttccccgctcagtga

SEQ ID NO: 4494410 - DNA, 25 bp, Homo sapien
ccttgatgctacagccataaaggaa

SEQ ID NO: 4494411 - DNA, 25 bp, Homo sapien
ggagtggccatggaagtcacagaaa

SEQ ID NO: 4494412 - DNA, 25 bp, Homo sapien
ctaggatagtagatgtgcccacagt

SEQ ID NO: 4494413 - DNA, 25 bp, Homo sapien
ctgtagttgacctcctctaggatag

SEQ ID NO: 4494414 - DNA, 25 bp, Homo sapien
gaatgctggtgctagcttatcaagg

SEQ ID NO: 4494415 - DNA, 25 bp, Homo sapien
gctggtgctagcttatcaaggattt

SEQ ID NO: 4494416 - DNA, 25 bp, Homo sapien
ggtgctagcttatcaaggattttgg

SEQ ID NO: 4494417 - DNA, 25 bp, Homo sapien
gctagcttatcaaggattttgggaa

SEQ ID NO: 4494418 - DNA, 25 bp, Homo sapien
gccgtggaagctcgagatttctcca

SEQ ID NO: 4494419 - DNA, 25 bp, Homo sapien
tggttgcagccacagtagctgcttt

SEQ ID NO: 4494420 - DNA, 25 bp, Homo sapien
tccatggtgtagcttctggacaccc

SEQ ID NO: 4494421 - DNA, 25 bp, Homo sapien
gatttctccacgagaaagctgcagc

SEQ ID NO: 4494422 - DNA, 25 bp, Homo sapien
gaggtccaggtattcttagggttga

SEQ ID NO: 4494423 - DNA, 25 bp, Homo sapien
tcttagggttgaatggaagtcaccg

SEQ ID NO: 4494424 - DNA, 25 bp, Homo sapien
ttacaagagtctattaccctggcac

SEQ ID NO: 4494425 - DNA, 25 bp, Homo sapien
gaagtcaccgaggagcagtctgtca

SEQ ID NO: 4494426 - DNA, 25 bp, Homo sapien
tccaatacctgaaggccatccactg

SEQ ID NO: 4494427 - DNA, 25 bp, Homo sapien
ggtgagccctttcattctttgtcct

SEQ ID NO: 4494428 - DNA, 25 bp, Homo sapien
actgggtgagccctttcattctttg

SEQ ID NO: 4494429 - DNA, 25 bp, Homo sapien
cctgaaggccatccactgggtgagc

SEQ ID NO: 4494430 - DNA, 25 bp, Homo sapien
ctttgctgtccaagttagcagtgtt

SEQ ID NO: 4494431 - DNA, 25 bp, Homo sapien
tgcttgggtaaagggactcacatcc

SEQ ID NO: 4494432 - DNA, 25 bp, Homo sapien
cctgcttgggtaaagggactcacat

SEQ ID NO: 4494433 - DNA, 25 bp, Homo sapien
tgtccttctttaagatccactttgc

SEQ ID NO: 4494434 - DNA, 25 bp, Homo sapien
tgggctgcgcaagtccaaagaactg

SEQ ID NO: 4494435 - DNA, 25 bp, Homo sapien
aagaactgtgtgagagccatggttc

SEQ ID NO: 4494436 - DNA, 25 bp, Homo sapien
atctgggctgcgcaagtccaaagaa

SEQ ID NO: 4494437 - DNA, 25 bp, Homo sapien
tcccatctgggctgcgcaagtccaa

SEQ ID NO: 4494438 - DNA, 25 bp, Homo sapien
caaacctactcctgaagagctctca

SEQ ID NO: 4494439 - DNA, 25 bp, Homo sapien
tccttaccccagatcccactggaca

SEQ ID NO: 4494440 - DNA, 25 bp, Homo sapien
gacaccacctgcatcaaacctactc

SEQ ID NO: 4494441 - DNA, 25 bp, Homo sapien
cctgcatcaaacctactcctgaaga

SEQ ID NO: 4494442 - DNA, 25 bp, Homo sapien
cccaagagaaggagttagcgccaga

SEQ ID NO: 4494443 - DNA, 25 bp, Homo sapien
gttagcgccagagggtccagcaaaa

SEQ ID NO: 4494444 - DNA, 25 bp, Homo sapien
ggagcagaacctgtatcccaagaga

SEQ ID NO: 4494445 - DNA, 25 bp, Homo sapien
cctgtatcccaagagaaggagttag

SEQ ID NO: 4494446 - DNA, 25 bp, Homo sapien
catgtaagtctgaggtggacagagt

SEQ ID NO: 4494447 - DNA, 25 bp, Homo sapien
cttttccacgagtgaagtcatttcc

SEQ ID NO: 4494448 - DNA, 25 bp, Homo sapien
gtttattgcttctctatgtaactca

SEQ ID NO: 4494449 - DNA, 25 bp, Homo sapien
tttcaaatgacctttcgcttttcca

SEQ ID NO: 4494450 - DNA, 25 bp, Homo sapien
gccaaaatgtcgatcccctccgtta

SEQ ID NO: 4494451 - DNA, 25 bp, Homo sapien
tcgatcccctccgttagaccaagag

SEQ ID NO: 4494452 - DNA, 25 bp, Homo sapien
aatgtcgatcccctccgttagacca

SEQ ID NO: 4494453 - DNA, 25 bp, Homo sapien
caaaatgtcgatcccctccgttaga

SEQ ID NO: 4494454 - DNA, 25 bp, Homo sapien
cattccattattaatgacagagcca

SEQ ID NO: 4494455 - DNA, 25 bp, Homo sapien
tgagttccacagaaactatcatgga

SEQ ID NO: 4494456 - DNA, 25 bp, Homo sapien
caggtgtccctgttggtacagtgac

SEQ ID NO: 4494457 - DNA, 25 bp, Homo sapien
cacaagtgaccaacgctgagttcca

SEQ ID NO: 4494458 - DNA, 25 bp, Homo sapien
tgcagcacatcgcttccttggaaga

SEQ ID NO: 4494459 - DNA, 25 bp, Homo sapien
gcggcacccatggtcttgaaatgga

SEQ ID NO: 4494460 - DNA, 25 bp, Homo sapien
aaatggaccaggtgatacagatgca

SEQ ID NO: 4494461 - DNA, 25 bp, Homo sapien
tcattacaaagagccagatcccaca

SEQ ID NO: 4494462 - DNA, 25 bp, Homo sapien
ttcagcaaacctcggtcccacatat

SEQ ID NO: 4494463 - DNA, 25 bp, Homo sapien
tccattcagcaaacctcggtcccac

SEQ ID NO: 4494464 - DNA, 25 bp, Homo sapien
cattcagcaaacctcggtcccacat

SEQ ID NO: 4494465 - DNA, 25 bp, Homo sapien
atccattcagcaaacctcggtccca

SEQ ID NO: 4494466 - DNA, 25 bp, Homo sapien
tctggcaagctgtgagtatgaattc

SEQ ID NO: 4494467 - DNA, 25 bp, Homo sapien
taacagaaacagacctccaactgct

SEQ ID NO: 4494468 - DNA, 25 bp, Homo sapien
ctcccttataaacagatgcatcacc

SEQ ID NO: 4494469 - DNA, 25 bp, Homo sapien
gagtatgaattcttggctaacagaa

SEQ ID NO: 4494470 - DNA, 25 bp, Homo sapien
cccgcggcacttgtacagttggcat

SEQ ID NO: 4494471 - DNA, 25 bp, Homo sapien
gtcagcccgcggcacttgtacagtt

SEQ ID NO: 4494472 - DNA, 25 bp, Homo sapien
gcggcacttgtacagttggcattgt

SEQ ID NO: 4494473 - DNA, 25 bp, Homo sapien
acttgtacagttggcattgtcccag

SEQ ID NO: 4494474 - DNA, 25 bp, Homo sapien
ggttgacaaaagaactgggatgtat

SEQ ID NO: 4494475 - DNA, 25 bp, Homo sapien
gtagcagaagataggagcatactgc

SEQ ID NO: 4494476 - DNA, 25 bp, Homo sapien
attaaagacgccgtggcgggtagca

SEQ ID NO: 4494477 - DNA, 25 bp, Homo sapien
tgtattgtcaatgaaagagacttgg

SEQ ID NO: 4494478 - DNA, 25 bp, Homo sapien
aacagtcctaccatgggcccatata

SEQ ID NO: 4494479 - DNA, 25 bp, Homo sapien
actgtcagactgtaattgccctggc

SEQ ID NO: 4494480 - DNA, 25 bp, Homo sapien
tataactttgatgcccaagtgctca

SEQ ID NO: 4494481 - DNA, 25 bp, Homo sapien
ctgagcactgtcagactgtaattgc

SEQ ID NO: 4494482 - DNA, 25 bp, Homo sapien
ctacgcgatgatgatgaaatgtttc

SEQ ID NO: 4494483 - DNA, 25 bp, Homo sapien
agaaaaagctcttctacgcgatgat

SEQ ID NO: 4494484 - DNA, 25 bp, Homo sapien
gaaatgtttcggtattgatataaaa

SEQ ID NO: 4494485 - DNA, 25 bp, Homo sapien
gctcttctacgcgatgatgatgaaa

SEQ ID NO: 4494486 - DNA, 25 bp, Homo sapien
ctccagcagacacataacaggtgct

SEQ ID NO: 4494487 - DNA, 25 bp, Homo sapien
agaaggggaatgagagtaagactct

SEQ ID NO: 4494488 - DNA, 25 bp, Homo sapien
tcgggggcaggagcactcgcataca

SEQ ID NO: 4494489 - DNA, 25 bp, Homo sapien
ggagcactcgcatacacatttgcaa

SEQ ID NO: 4494490 - DNA, 25 bp, Homo sapien
cagctggcagatttgagctccagga

SEQ ID NO: 4494491 - DNA, 25 bp, Homo sapien
gctggcagatttgagctccaggatg

SEQ ID NO: 4494492 - DNA, 25 bp, Homo sapien
ccaggatgaggaggcccaaacagaa

SEQ ID NO: 4494493 - DNA, 25 bp, Homo sapien
ctgcagctggcagatttgagctcca

SEQ ID NO: 4494494 - DNA, 25 bp, Homo sapien
actggccattcagtatgtcacactg

SEQ ID NO: 4494495 - DNA, 25 bp, Homo sapien
cattcagtatgtcacactgcaacag

SEQ ID NO: 4494496 - DNA, 25 bp, Homo sapien
cagtatgtcacactgcaacagccac

SEQ ID NO: 4494497 - DNA, 25 bp, Homo sapien
ggccattcagtatgtcacactgcaa

SEQ ID NO: 4494498 - DNA, 25 bp, Homo sapien
cacaattccttccacgcaacaacaa

SEQ ID NO: 4494499 - DNA, 25 bp, Homo sapien
acaattccttccacgcaacaacaat

SEQ ID NO: 4494500 - DNA, 25 bp, Homo sapien
caattccttccacgcaacaacaata

SEQ ID NO: 4494501 - DNA, 25 bp, Homo sapien
tgcaggatattagatccgaaaggag

SEQ ID NO: 4494502 - DNA, 25 bp, Homo sapien
gagattccctaatgttaaagccaaa

SEQ ID NO: 4494503 - DNA, 25 bp, Homo sapien
tttgagagtaaatgcaggatattag

SEQ ID NO: 4494504 - DNA, 25 bp, Homo sapien
tattagatccgaaaggagattccct

SEQ ID NO: 4494505 - DNA, 25 bp, Homo sapien
ccatcgatacttggtgttttgtcta

SEQ ID NO: 4494506 - DNA, 25 bp, Homo sapien
taatcacgtgcatcaccccaacatg

SEQ ID NO: 4494507 - DNA, 25 bp, Homo sapien
ctgaaggattggctgtcacattttt

SEQ ID NO: 4494508 - DNA, 25 bp, Homo sapien
caaagcattgtaatgcatctgaagg

SEQ ID NO: 4494509 - DNA, 25 bp, Homo sapien
cagattacattcccacgtctgggcc

SEQ ID NO: 4494510 - DNA, 25 bp, Homo sapien
tccccttcctaaaagcagattacat

SEQ ID NO: 4494511 - DNA, 25 bp, Homo sapien
gattacattcccacgtctgggccag

SEQ ID NO: 4494512 - DNA, 25 bp, Homo sapien
atctccccttcctaaaagcagatta

SEQ ID NO: 4494513 - DNA, 25 bp, Homo sapien
tacccttgggcatagctgacaaacc

SEQ ID NO: 4494514 - DNA, 25 bp, Homo sapien
tgtactatgtgaccctacccttggg

SEQ ID NO: 4494515 - DNA, 25 bp, Homo sapien
tgcctgtagcccttggaacgaaaag

SEQ ID NO: 4494516 - DNA, 25 bp, Homo sapien
gatgtgacactttgcaccagcagta

SEQ ID NO: 4494517 - DNA, 25 bp, Homo sapien
gggacgctctcttgccagaagctca

SEQ ID NO: 4494518 - DNA, 25 bp, Homo sapien
gctccccagtgtatgtaagtgaaga

SEQ ID NO: 4494519 - DNA, 25 bp, Homo sapien
tattcaggtaagaacgctccccagt

SEQ ID NO: 4494520 - DNA, 25 bp, Homo sapien
gaagatcccacatgcactatggcca

SEQ ID NO: 4494521 - DNA, 25 bp, Homo sapien
tttctgtgggctttgtgattagaaa

SEQ ID NO: 4494522 - DNA, 25 bp, Homo sapien
tgcaggtcctatagtgatgcccacc

SEQ ID NO: 4494523 - DNA, 25 bp, Homo sapien
ttgcaggtcctatagtgatgcccac

SEQ ID NO: 4494524 - DNA, 25 bp, Homo sapien
ctagcttgcaggtcctatagtgatg

SEQ ID NO: 4494525 - DNA, 25 bp, Homo sapien
gcttgcaggtcctatagtgatgccc

SEQ ID NO: 4494526 - DNA, 25 bp, Homo sapien
tgtgcaaatgcaacatagagaacac

SEQ ID NO: 4494527 - DNA, 25 bp, Homo sapien
ctacaggaaaggcacgggtagcatg

SEQ ID NO: 4494528 - DNA, 25 bp, Homo sapien
gtgcaaatgcaacatagagaacacc

SEQ ID NO: 4494529 - DNA, 25 bp, Homo sapien
ttctctacaggaaaggcacgggtag

SEQ ID NO: 4494530 - DNA, 25 bp, Homo sapien
gcctgaaggtcccatgtgttcgagg

SEQ ID NO: 4494531 - DNA, 25 bp, Homo sapien
aaggtcccatgtgttcgaggctgtt

SEQ ID NO: 4494532 - DNA, 25 bp, Homo sapien
aaaggtgtgacccatcattactccc

SEQ ID NO: 4494533 - DNA, 25 bp, Homo sapien
ggctgtttcatgactccttgtacgc

SEQ ID NO: 4494534 - DNA, 25 bp, Homo sapien
aatgctgccacccacgagaaatgag

SEQ ID NO: 4494535 - DNA, 25 bp, Homo sapien
ccagaggatctgtctgttggcctga

SEQ ID NO: 4494536 - DNA, 25 bp, Homo sapien
atgagagccaggtgaggactccaga

SEQ ID NO: 4494537 - DNA, 25 bp, Homo sapien
ggccaaagggccttaggatgacagc

SEQ ID NO: 4494538 - DNA, 25 bp, Homo sapien
caccttcaaacactttgaaggtgat

SEQ ID NO: 4494539 - DNA, 25 bp, Homo sapien
tttgaaggtgattcatagtctccat

SEQ ID NO: 4494540 - DNA, 25 bp, Homo sapien
ttgaaggtgattcatagtctccata

SEQ ID NO: 4494541 - DNA, 25 bp, Homo sapien
tgaaggtgattcatagtctccatat

SEQ ID NO: 4494542 - DNA, 25 bp, Homo sapien
cacaatggcattaaagaatcttggc

SEQ ID NO: 4494543 - DNA, 25 bp, Homo sapien
tttggtgtcgatgtcacctgtcaac

SEQ ID NO: 4494544 - DNA, 25 bp, Homo sapien
cacctgtcaactgaactgccttttt

SEQ ID NO: 4494545 - DNA, 25 bp, Homo sapien
gatatttctttggtgtcgatgtcac

SEQ ID NO: 4494546 - DNA, 25 bp, Homo sapien
tatatttgcgtaggttgagttctga

SEQ ID NO: 4494547 - DNA, 25 bp, Homo sapien
aataaggtgtgagttgtaggtcaag

SEQ ID NO: 4494548 - DNA, 25 bp, Homo sapien
gtaggtcaaggtgcattttctttcc

SEQ ID NO: 4494549 - DNA, 25 bp, Homo sapien
ttggtatcaagactaaagactcagc

SEQ ID NO: 4494550 - DNA, 25 bp, Homo sapien
atagcagcctggccgcttcagcagc

SEQ ID NO: 4494551 - DNA, 25 bp, Homo sapien
aatgtgatcccagcgtgcatagcag

SEQ ID NO: 4494552 - DNA, 25 bp, Homo sapien
tatgccgaatgtgatcccagcgtgc

SEQ ID NO: 4494553 - DNA, 25 bp, Homo sapien
ggactcttccgagggacttgcaatt

SEQ ID NO: 4494554 - DNA, 25 bp, Homo sapien
gggaacgaattgcaactatgtaatg

SEQ ID NO: 4494555 - DNA, 25 bp, Homo sapien
caaaaatcagtgatggtctttgagc

SEQ ID NO: 4494556 - DNA, 25 bp, Homo sapien
gctgctaggcggaaagtctgagaat

SEQ ID NO: 4494557 - DNA, 25 bp, Homo sapien
gtaatgtttttcatgcgaatcatca

SEQ ID NO: 4494558 - DNA, 25 bp, Homo sapien
gatctgcttttgtgggtggcatcgc

SEQ ID NO: 4494559 - DNA, 25 bp, Homo sapien
aactccatgtggaaatcagtccctc

SEQ ID NO: 4494560 - DNA, 25 bp, Homo sapien
gttccagaacagacgcagtttacac

SEQ ID NO: 4494561 - DNA, 25 bp, Homo sapien
ggcatcgctgagctactaaactcca

SEQ ID NO: 4494562 - DNA, 25 bp, Homo sapien
ttgctgttctccgactgggtccaag

SEQ ID NO: 4494563 - DNA, 25 bp, Homo sapien
tcctcaaatacggttggggccttgc

SEQ ID NO: 4494564 - DNA, 25 bp, Homo sapien
gggccttgctgttctccgactgggt

SEQ ID NO: 4494565 - DNA, 25 bp, Homo sapien
ctgggtccaagctgactctagctgg

SEQ ID NO: 4494566 - DNA, 25 bp, Homo sapien
tcagactaaggcaacaggactggtc

SEQ ID NO: 4494567 - DNA, 25 bp, Homo sapien
gatacaatcagacccatcaccgggc

SEQ ID NO: 4494568 - DNA, 25 bp, Homo sapien
catctttggcatgtagaggcagccg

SEQ ID NO: 4494569 - DNA, 25 bp, Homo sapien
tgtgggcccaaacgaaaagaatcca

SEQ ID NO: 4494570 - DNA, 25 bp, Homo sapien
gacacactgagtatgctcaccatga

SEQ ID NO: 4494571 - DNA, 25 bp, Homo sapien
tcaccatcatcacccgggacagtta

SEQ ID NO: 4494572 - DNA, 25 bp, Homo sapien
tgaatgtctcaccatcatcacccgg

SEQ ID NO: 4494573 - DNA, 25 bp, Homo sapien
acactgagtatgctcaccatgaatg

SEQ ID NO: 4494574 - DNA, 25 bp, Homo sapien
gcaactctgaattccctgggtgagt

SEQ ID NO: 4494575 - DNA, 25 bp, Homo sapien
gaaacgcaactctggctgcatctca

SEQ ID NO: 4494576 - DNA, 25 bp, Homo sapien
gcatctcagtttttgcaggcgagaa

SEQ ID NO: 4494577 - DNA, 25 bp, Homo sapien
gagtccccgaggcagtatttagcag

SEQ ID NO: 4494578 - DNA, 25 bp, Homo sapien
aaactgaaggtctggtgggacattg

SEQ ID NO: 4494579 - DNA, 25 bp, Homo sapien
aactgaaggtctggtgggacattgc

SEQ ID NO: 4494580 - DNA, 25 bp, Homo sapien
gttccgaagggacgctgccactgct

SEQ ID NO: 4494581 - DNA, 25 bp, Homo sapien
catcctccagttccgaagggacgct

SEQ ID NO: 4494582 - DNA, 25 bp, Homo sapien
aggttcatcctccagttccgaaggg

SEQ ID NO: 4494583 - DNA, 25 bp, Homo sapien
ctccagttccgaagggacgctgcca

SEQ ID NO: 4494584 - DNA, 25 bp, Homo sapien
tggtctgagctgttgtcggtactgt

SEQ ID NO: 4494585 - DNA, 25 bp, Homo sapien
gagctgttgtcggtactgtaatcaa

SEQ ID NO: 4494586 - DNA, 25 bp, Homo sapien
tgttgtcggtactgtaatcaatctc

SEQ ID NO: 4494587 - DNA, 25 bp, Homo sapien
gtctgagctgttgtcggtactgtaa

SEQ ID NO: 4494588 - DNA, 25 bp, Homo sapien
caatagcagcttgcataggccccaa

SEQ ID NO: 4494589 - DNA, 25 bp, Homo sapien
taatcttgaggctacccattgggtc

SEQ ID NO: 4494590 - DNA, 25 bp, Homo sapien
ggctagcttctacgcatagggaaac

SEQ ID NO: 4494591 - DNA, 25 bp, Homo sapien
agtttttcatgttcaagccccagca

SEQ ID NO: 4494592 - DNA, 25 bp, Homo sapien
gtttggaacatcaggagaagtcttt

SEQ ID NO: 4494593 - DNA, 25 bp, Homo sapien
gatatatccaaaactcccttggtgg

SEQ ID NO: 4494594 - DNA, 25 bp, Homo sapien
ctatgccttggagctaatcctgttt

SEQ ID NO: 4494595 - DNA, 25 bp, Homo sapien
ggcagatatgtaatctcccaatatg

SEQ ID NO: 4494596 - DNA, 25 bp, Homo sapien
ttggtacaggacagcatgcacttgg

SEQ ID NO: 4494597 - DNA, 25 bp, Homo sapien
ggaccacatttgcttcccattatgg

SEQ ID NO: 4494598 - DNA, 25 bp, Homo sapien
tgcatgcagagcaccggatgacagt

SEQ ID NO: 4494599 - DNA, 25 bp, Homo sapien
cattatggcctacaactccttggaa

SEQ ID NO: 4494600 - DNA, 25 bp, Homo sapien
tcaagcattggtagcatgaaccaaa

SEQ ID NO: 4494601 - DNA, 25 bp, Homo sapien
caagtttaggaatttggaggtagag

SEQ ID NO: 4494602 - DNA, 25 bp, Homo sapien
ctgcctcggccagacagtgagctct

SEQ ID NO: 4494603 - DNA, 25 bp, Homo sapien
tactatcggcataatcaagtttagg

SEQ ID NO: 4494604 - DNA, 25 bp, Homo sapien
aacaacgccggtttactatcggcat

SEQ ID NO: 4494605 - DNA, 25 bp, Homo sapien
gcttgcttaattatagacacccggg

SEQ ID NO: 4494606 - DNA, 25 bp, Homo sapien
cagtcggtgattggaaaacaaggcc

SEQ ID NO: 4494607 - DNA, 25 bp, Homo sapien
tggaaaattaccgaccaggaggcac

SEQ ID NO: 4494608 - DNA, 25 bp, Homo sapien
tcttgggcacgatgctaggctctca

SEQ ID NO: 4494609 - DNA, 25 bp, Homo sapien
gatatatgggagagcggacagtctg

SEQ ID NO: 4494610 - DNA, 25 bp, Homo sapien
ttactagatcaactgctcctgaagg

SEQ ID NO: 4494611 - DNA, 25 bp, Homo sapien
gaacatctcaaatgtcgttactaga

SEQ ID NO: 4494612 - DNA, 25 bp, Homo sapien
gaaacgtgtgctctttataactaag

SEQ ID NO: 4494613 - DNA, 25 bp, Homo sapien
tcaccaggctgatggatagtgccat

SEQ ID NO: 4494614 - DNA, 25 bp, Homo sapien
tctacctggccatgtaggcaaaggt

SEQ ID NO: 4494615 - DNA, 25 bp, Homo sapien
cattccctaagatgcatctacctgg

SEQ ID NO: 4494616 - DNA, 25 bp, Homo sapien
gtgtatctgaaaggaacctctgggc

SEQ ID NO: 4494617 - DNA, 25 bp, Homo sapien
gctgaaacacgctggctctctggaa

SEQ ID NO: 4494618 - DNA, 25 bp, Homo sapien
catctgtgaatatgatatatagaac

SEQ ID NO: 4494619 - DNA, 25 bp, Homo sapien
gaacttcagttggatgccagtgatg

SEQ ID NO: 4494620 - DNA, 25 bp, Homo sapien
aagctattactggaagtttttcagt

SEQ ID NO: 4494621 - DNA, 25 bp, Homo sapien
tgacagctgactaacaattctgttt

SEQ ID NO: 4494622 - DNA, 25 bp, Homo sapien
atgacagctgactaacaattctgtt

SEQ ID NO: 4494623 - DNA, 25 bp, Homo sapien
gatgacagctgactaacaattctgt

SEQ ID NO: 4494624 - DNA, 25 bp, Homo sapien
caggcacaagaacatgatggagaag

SEQ ID NO: 4494625 - DNA, 25 bp, Homo sapien
gaacatgatggagaagtctgaaaac

SEQ ID NO: 4494626 - DNA, 25 bp, Homo sapien
ggagaaaatccgctgagttcatttt

SEQ ID NO: 4494627 - DNA, 25 bp, Homo sapien
gaatcggggagaaaatccgctgagt

SEQ ID NO: 4494628 - DNA, 25 bp, Homo sapien
cgtgactcttcaacaacttttccaa

SEQ ID NO: 4494629 - DNA, 25 bp, Homo sapien
tttctggccatcaggcaagatccag

SEQ ID NO: 4494630 - DNA, 25 bp, Homo sapien
aaggcttcttccaaccaaatagtag

SEQ ID NO: 4494631 - DNA, 25 bp, Homo sapien
cagtctgctcagcacatcacttgtg

SEQ ID NO: 4494632 - DNA, 25 bp, Homo sapien
gaatgtgatcagcatgaggtacctg

SEQ ID NO: 4494633 - DNA, 25 bp, Homo sapien
gaaactctttctgagggcagtaact

SEQ ID NO: 4494634 - DNA, 25 bp, Homo sapien
gaggaatcattctgctggactaaga

SEQ ID NO: 4494635 - DNA, 25 bp, Homo sapien
aaaccattctgcctattatttggga

SEQ ID NO: 4494636 - DNA, 25 bp, Homo sapien
aggctcaaatcctagttcctcctca

SEQ ID NO: 4494637 - DNA, 25 bp, Homo sapien
aaatcctagttcctcctcagagccc

SEQ ID NO: 4494638 - DNA, 25 bp, Homo sapien
ggctcaaatcctagttcctcctcag

SEQ ID NO: 4494639 - DNA, 25 bp, Homo sapien
ggcaggcatctctgtccctctctac

SEQ ID NO: 4494640 - DNA, 25 bp, Homo sapien
aggcaggcatctctgtccctctcta

SEQ ID NO: 4494641 - DNA, 25 bp, Homo sapien
ctggagatattttagggatgctcat

SEQ ID NO: 4494642 - DNA, 25 bp, Homo sapien
cacactggagatattttagggatgc

SEQ ID NO: 4494643 - DNA, 25 bp, Homo sapien
actggagatattttagggatgctca

SEQ ID NO: 4494644 - DNA, 25 bp, Homo sapien
cactggagatattttagggatgctc

SEQ ID NO: 4494645 - DNA, 25 bp, Homo sapien
gctatccttgcaaagcaggccagcg

SEQ ID NO: 4494646 - DNA, 25 bp, Homo sapien
tgccaagagctctcagtaaagaagt

SEQ ID NO: 4494647 - DNA, 25 bp, Homo sapien
aggagtcccggtttctgccaagagc

SEQ ID NO: 4494648 - DNA, 25 bp, Homo sapien
taaagaagtgtctaaagagctatcc

SEQ ID NO: 4494649 - DNA, 25 bp, Homo sapien
ggtctccataggactgaagttgagt

SEQ ID NO: 4494650 - DNA, 25 bp, Homo sapien
cataggactgaagttgagttcttct

SEQ ID NO: 4494651 - DNA, 25 bp, Homo sapien
ctccataggactgaagttgagttct

SEQ ID NO: 4494652 - DNA, 25 bp, Homo sapien
tctccataggactgaagttgagttc

SEQ ID NO: 4494653 - DNA, 25 bp, Homo sapien
tgaatttgaaagacaaatttcccat

SEQ ID NO: 4494654 - DNA, 25 bp, Homo sapien
ttccaatctactgctttgaatttga

SEQ ID NO: 4494655 - DNA, 25 bp, Homo sapien
tcattccaatctactgctttgaatt

SEQ ID NO: 4494656 - DNA, 25 bp, Homo sapien
tttcccatcaaaactcagttcctgg

SEQ ID NO: 4494657 - DNA, 25 bp, Homo sapien
gctgctaagcctagaagatctggga

SEQ ID NO: 4494658 - DNA, 25 bp, Homo sapien
ctgcaggcttccgaggcaatcgggc

SEQ ID NO: 4494659 - DNA, 25 bp, Homo sapien
tctgggaaggtgtcagtcagagagc

SEQ ID NO: 4494660 - DNA, 25 bp, Homo sapien
gtcctgcaggcttccgaggcaatcg

SEQ ID NO: 4494661 - DNA, 25 bp, Homo sapien
tccttggacacatctctgagtaagt

SEQ ID NO: 4494662 - DNA, 25 bp, Homo sapien
tccaggcattcataagacttagacc

SEQ ID NO: 4494663 - DNA, 25 bp, Homo sapien
gcacaaaatagtggcttccaggcat

SEQ ID NO: 4494664 - DNA, 25 bp, Homo sapien
ccatgtgctctcaacagtagtatga

SEQ ID NO: 4494665 - DNA, 25 bp, Homo sapien
attgcattggtgtggaaacaaaccc

SEQ ID NO: 4494666 - DNA, 25 bp, Homo sapien
tcaacctgaatagctgagcaaacgc

SEQ ID NO: 4494667 - DNA, 25 bp, Homo sapien
gaatctcctgtagcaaggaccccag

SEQ ID NO: 4494668 - DNA, 25 bp, Homo sapien
taagttctcctagtaccagtagcct

SEQ ID NO: 4494669 - DNA, 25 bp, Homo sapien
gtatagtctgatgggccaaaacctg

SEQ ID NO: 4494670 - DNA, 25 bp, Homo sapien
tgtacttcggtaccaatgactagag

SEQ ID NO: 4494671 - DNA, 25 bp, Homo sapien
gatgagagccctatgcttgcctata

SEQ ID NO: 4494672 - DNA, 25 bp, Homo sapien
agaacagtcattttccacggccaga

SEQ ID NO: 4494673 - DNA, 25 bp, Homo sapien
aattagcaactctagctccccagtg

SEQ ID NO: 4494674 - DNA, 25 bp, Homo sapien
tgcatcagcgtaattagagaaacag

SEQ ID NO: 4494675 - DNA, 25 bp, Homo sapien
tctggaatgcatcgtggcacaggct

SEQ ID NO: 4494676 - DNA, 25 bp, Homo sapien
cttcagatcgtgcatcagcgtaatt

SEQ ID NO: 4494677 - DNA, 25 bp, Homo sapien
aactggctgccgtttggggcctgaa

SEQ ID NO: 4494678 - DNA, 25 bp, Homo sapien
gggtttggactccatccaactggct

SEQ ID NO: 4494679 - DNA, 25 bp, Homo sapien
gcctgaattcgcattgagaaatagt

SEQ ID NO: 4494680 - DNA, 25 bp, Homo sapien
ggtttggactccatccaactggctg

SEQ ID NO: 4494681 - DNA, 25 bp, Homo sapien
tcacatcacaaatgtagagtgatag

SEQ ID NO: 4494682 - DNA, 25 bp, Homo sapien
ctgcagcaggtattgatgttcacat

SEQ ID NO: 4494683 - DNA, 25 bp, Homo sapien
gggctgggaccgatcctcttcttga

SEQ ID NO: 4494684 - DNA, 25 bp, Homo sapien
gagatctgtacatccgggctgggac

SEQ ID NO: 4494685 - DNA, 25 bp, Homo sapien
gtcggatttccatagaggtaggctc

SEQ ID NO: 4494686 - DNA, 25 bp, Homo sapien
tgtcggatttccatagaggtaggct

SEQ ID NO: 4494687 - DNA, 25 bp, Homo sapien
ttgtcggatttccatagaggtaggc

SEQ ID NO: 4494688 - DNA, 25 bp, Homo sapien
aggagcacagcttgggaaccgagat

SEQ ID NO: 4494689 - DNA, 25 bp, Homo sapien
tgacttttctgtggtgttcgggaag

SEQ ID NO: 4494690 - DNA, 25 bp, Homo sapien
gtacagctttggcaaaaggagcaca

SEQ ID NO: 4494691 - DNA, 25 bp, Homo sapien
ttttcggactagaaggattaggctg

SEQ ID NO: 4494692 - DNA, 25 bp, Homo sapien
ggttgctcaaagtcgtgtagtcctc

SEQ ID NO: 4494693 - DNA, 25 bp, Homo sapien
tccagagtcgccttgctgcttggct

SEQ ID NO: 4494694 - DNA, 25 bp, Homo sapien
tccactctggcgagtctaaatacgc

SEQ ID NO: 4494695 - DNA, 25 bp, Homo sapien
taaatacgctactgccttcctgacc

SEQ ID NO: 4494696 - DNA, 25 bp, Homo sapien
tgtgtgataaaagatggcgcctgtg

SEQ ID NO: 4494697 - DNA, 25 bp, Homo sapien
gggtctccaataattcttcatcggc

SEQ ID NO: 4494698 - DNA, 25 bp, Homo sapien
tttctgtcgcatgctagagctaggg

SEQ ID NO: 4494699 - DNA, 25 bp, Homo sapien
catcggctcttttagtattctggga

SEQ ID NO: 4494700 - DNA, 25 bp, Homo sapien
tgacctgcaggatctccctctaatg

SEQ ID NO: 4494701 - DNA, 25 bp, Homo sapien
gacctgcaggatctccctctaatgc

SEQ ID NO: 4494702 - DNA, 25 bp, Homo sapien
ctgacctgcaggatctccctctaat

SEQ ID NO: 4494703 - DNA, 25 bp, Homo sapien
acctgcaggatctccctctaatgcc

SEQ ID NO: 4494704 - DNA, 25 bp, Homo sapien
tgttagtgacatgcatgggaacctc

SEQ ID NO: 4494705 - DNA, 25 bp, Homo sapien
tgggaacctcttgtctttagtgaac

SEQ ID NO: 4494706 - DNA, 25 bp, Homo sapien
tcacaggaaggctaaaggactgtcc

SEQ ID NO: 4494707 - DNA, 25 bp, Homo sapien
cattgaggatgccactgtgagtcac

SEQ ID NO: 4494708 - DNA, 25 bp, Homo sapien
ctgtcacagtgcacacatctggtgc

SEQ ID NO: 4494709 - DNA, 25 bp, Homo sapien
tcacagtgcacacatctggtgcttt

SEQ ID NO: 4494710 - DNA, 25 bp, Homo sapien
agaactttgccctcctgtcagagct

SEQ ID NO: 4494711 - DNA, 25 bp, Homo sapien
tacagattggtcatggtctgtagta

SEQ ID NO: 4494712 - DNA, 25 bp, Homo sapien
caaagcggatctcataggcgaagac

SEQ ID NO: 4494713 - DNA, 25 bp, Homo sapien
gcgaagacaagtacagcctcctgaa

SEQ ID NO: 4494714 - DNA, 25 bp, Homo sapien
gctagagtatgagctgcggactttc

SEQ ID NO: 4494715 - DNA, 25 bp, Homo sapien
tagcagctctgtaggcagcttgggc

SEQ ID NO: 4494716 - DNA, 25 bp, Homo sapien
gagctctcccagttagcgagcaaaa

SEQ ID NO: 4494717 - DNA, 25 bp, Homo sapien
tgagctctcccagttagcgagcaaa

SEQ ID NO: 4494718 - DNA, 25 bp, Homo sapien
cagttagcgagcaaaaggtttttct

SEQ ID NO: 4494719 - DNA, 25 bp, Homo sapien
ctcccagttagcgagcaaaaggttt

SEQ ID NO: 4494720 - DNA, 25 bp, Homo sapien
gtaaccatgtggaataagacagatg

SEQ ID NO: 4494721 - DNA, 25 bp, Homo sapien
taagatcctgataccctgatacgcc

SEQ ID NO: 4494722 - DNA, 25 bp, Homo sapien
aattgcttcatgagcccttggcact

SEQ ID NO: 4494723 - DNA, 25 bp, Homo sapien
tggatactgccaaagccgcttcaaa

SEQ ID NO: 4494724 - DNA, 25 bp, Homo sapien
gtagttcttgttgtatttgcccaat

SEQ ID NO: 4494725 - DNA, 25 bp, Homo sapien
tgtatttgcccaatcccaggatgga

SEQ ID NO: 4494726 - DNA, 25 bp, Homo sapien
cttgttgtatttgcccaatcccagg

SEQ ID NO: 4494727 - DNA, 25 bp, Homo sapien
caggatggactaggaagtgttccat

SEQ ID NO: 4494728 - DNA, 25 bp, Homo sapien
tatatgaaggatgaggcacagacat

SEQ ID NO: 4494729 - DNA, 25 bp, Homo sapien
ggatgaggcacagacatgactggat

SEQ ID NO: 4494730 - DNA, 25 bp, Homo sapien
gttattgttatatgaaggatgaggc

SEQ ID NO: 4494731 - DNA, 25 bp, Homo sapien
gttatatgaaggatgaggcacagac

SEQ ID NO: 4494732 - DNA, 25 bp, Homo sapien
tgtgtcccctggatacagtgaaacc

SEQ ID NO: 4494733 - DNA, 25 bp, Homo sapien
ttagcttgactgcacacttgtgtcc

SEQ ID NO: 4494734 - DNA, 25 bp, Homo sapien
tctgctggcattagcttgactgcac

SEQ ID NO: 4494735 - DNA, 25 bp, Homo sapien
aacaccacacaaatcatcaatccat

SEQ ID NO: 4494736 - DNA, 25 bp, Homo sapien
tcttggaccaataaccacgaaggtg

SEQ ID NO: 4494737 - DNA, 25 bp, Homo sapien
tgttcttataggtagccctcagcac

SEQ ID NO: 4494738 - DNA, 25 bp, Homo sapien
ggctctgcgaggctcagctaactta

SEQ ID NO: 4494739 - DNA, 25 bp, Homo sapien
tagcatttgccaccagagatccatg

SEQ ID NO: 4494740 - DNA, 25 bp, Homo sapien
taggaagctccatttagcacttgca

SEQ ID NO: 4494741 - DNA, 25 bp, Homo sapien
aggaagctccatttagcacttgcat

SEQ ID NO: 4494742 - DNA, 25 bp, Homo sapien
tgtaggaagctccatttagcacttg

SEQ ID NO: 4494743 - DNA, 25 bp, Homo sapien
cttgtaggaagctccatttagcact

SEQ ID NO: 4494744 - DNA, 25 bp, Homo sapien
ctgaggagcctgaacagtctgcttt

SEQ ID NO: 4494745 - DNA, 25 bp, Homo sapien
ggctgagcaagtctacaagtcagag

SEQ ID NO: 4494746 - DNA, 25 bp, Homo sapien
gctgagcaagtctacaagtcagaga

SEQ ID NO: 4494747 - DNA, 25 bp, Homo sapien
ctgagcaagtctacaagtcagagag

SEQ ID NO: 4494748 - DNA, 25 bp, Homo sapien
ctgggttatttgggaaagaatgatg

SEQ ID NO: 4494749 - DNA, 25 bp, Homo sapien
gggttatttgggaaagaatgatgag

SEQ ID NO: 4494750 - DNA, 25 bp, Homo sapien
tgggttatttgggaaagaatgatga

SEQ ID NO: 4494751 - DNA, 25 bp, Homo sapien
ttggctttgatgtcctgaccctgca

SEQ ID NO: 4494752 - DNA, 25 bp, Homo sapien
tgcatccaccgcagcttggctttga

SEQ ID NO: 4494753 - DNA, 25 bp, Homo sapien
ttgagatctgagcacccagctgtga

SEQ ID NO: 4494754 - DNA, 25 bp, Homo sapien
agtcatccctggtaacggcagagct

SEQ ID NO: 4494755 - DNA, 25 bp, Homo sapien
caggcgaacaggctgtgcgtggaga

SEQ ID NO: 4494756 - DNA, 25 bp, Homo sapien
tggagaatttgtctggtaaacagca

SEQ ID NO: 4494757 - DNA, 25 bp, Homo sapien
ggtaaacagcatgcaggatgaatta

SEQ ID NO: 4494758 - DNA, 25 bp, Homo sapien
tgcaggatgaattatagctaaggga

SEQ ID NO: 4494759 - DNA, 25 bp, Homo sapien
ctagatgagagatttcccgttggat

SEQ ID NO: 4494760 - DNA, 25 bp, Homo sapien
attttccagagggacatattcctgg

SEQ ID NO: 4494761 - DNA, 25 bp, Homo sapien
catgctcttgcatctttgccattaa

SEQ ID NO: 4494762 - DNA, 25 bp, Homo sapien
tgccattaaaaagggcagtgccatg

SEQ ID NO: 4494763 - DNA, 25 bp, Homo sapien
gacataaagaggtttggtttcagat

SEQ ID NO: 4494764 - DNA, 25 bp, Homo sapien
tccaaaccctcatcggacataaaga

SEQ ID NO: 4494765 - DNA, 25 bp, Homo sapien
gctttttgcctatggcccgttacca

SEQ ID NO: 4494766 - DNA, 25 bp, Homo sapien
cagtgactactaaagtggattgtgc

SEQ ID NO: 4494767 - DNA, 25 bp, Homo sapien
tttctaagtggtttctcctctgact

SEQ ID NO: 4494768 - DNA, 25 bp, Homo sapien
ctgactggcatcactgagtggactt

SEQ ID NO: 4494769 - DNA, 25 bp, Homo sapien
actggcatcactgagtggactttcc

SEQ ID NO: 4494770 - DNA, 25 bp, Homo sapien
taagtggtttctcctctgactggca

SEQ ID NO: 4494771 - DNA, 25 bp, Homo sapien
gttcttgtgccttagtgttcagctc

SEQ ID NO: 4494772 - DNA, 25 bp, Homo sapien
cttgtgccttagtgttcagctccat

SEQ ID NO: 4494773 - DNA, 25 bp, Homo sapien
cgtagttcttgtgccttagtgttca

SEQ ID NO: 4494774 - DNA, 25 bp, Homo sapien
tagttcttgtgccttagtgttcagc

SEQ ID NO: 4494775 - DNA, 25 bp, Homo sapien
tctcatggtatacctgctttagctt

SEQ ID NO: 4494776 - DNA, 25 bp, Homo sapien
ggaggtttctcatggtatacctgct

SEQ ID NO: 4494777 - DNA, 25 bp, Homo sapien
catggtatacctgctttagcttctt

SEQ ID NO: 4494778 - DNA, 25 bp, Homo sapien
ggtttctcatggtatacctgcttta

SEQ ID NO: 4494779 - DNA, 25 bp, Homo sapien
cttctttggctgctagggttgtaaa

SEQ ID NO: 4494780 - DNA, 25 bp, Homo sapien
ttctttggctgctagggttgtaaat

SEQ ID NO: 4494781 - DNA, 25 bp, Homo sapien
tctatttaagtctagacgagcacag

SEQ ID NO: 4494782 - DNA, 25 bp, Homo sapien
cacttgggtgtctatttaagtctag

SEQ ID NO: 4494783 - DNA, 25 bp, Homo sapien
tatccgaaggtggtcacttgggtgt

SEQ ID NO: 4494784 - DNA, 25 bp, Homo sapien
agtctagacgagcacagcaggccat

SEQ ID NO: 4494785 - DNA, 25 bp, Homo sapien
tggtgcacagcgaaatgcagatgct

SEQ ID NO: 4494786 - DNA, 25 bp, Homo sapien
ctgtggtcaagggtactggtgcaca

SEQ ID NO: 4494787 - DNA, 25 bp, Homo sapien
gtcaagggtactggtgcacagcgaa

SEQ ID NO: 4494788 - DNA, 25 bp, Homo sapien
gggtactggtgcacagcgaaatgca

SEQ ID NO: 4494789 - DNA, 25 bp, Homo sapien
atttagaggcacaaaagctgaaggc

SEQ ID NO: 4494790 - DNA, 25 bp, Homo sapien
aagctgaaggcttaggtctaaacct

SEQ ID NO: 4494791 - DNA, 25 bp, Homo sapien
gatttagaggcacaaaagctgaagg

SEQ ID NO: 4494792 - DNA, 25 bp, Homo sapien
ctgaaggcttaggtctaaaccttgg

SEQ ID NO: 4494793 - DNA, 25 bp, Homo sapien
ccatgttggtgtgcgtgctaaaggc

SEQ ID NO: 4494794 - DNA, 25 bp, Homo sapien
aatcctcagtgaaaactcagtatca

SEQ ID NO: 4494795 - DNA, 25 bp, Homo sapien
tgaggaccacaagggatacttccca

SEQ ID NO: 4494796 - DNA, 25 bp, Homo sapien
aaaaatctatcctatgtcccttatg

SEQ ID NO: 4494797 - DNA, 25 bp, Homo sapien
aattctagttccagctgccaaggta

SEQ ID NO: 4494798 - DNA, 25 bp, Homo sapien
tttctcaaagcctgtgtcctctgta

SEQ ID NO: 4494799 - DNA, 25 bp, Homo sapien
caggatttaataggtattttctcaa

SEQ ID NO: 4494800 - DNA, 25 bp, Homo sapien
caaggtagccatgagagtgatagta

SEQ ID NO: 4494801 - DNA, 25 bp, Homo sapien
tccacaagcgtgtacctagccaagt

SEQ ID NO: 4494802 - DNA, 25 bp, Homo sapien
gcattcatccacaagcgtgtaccta

SEQ ID NO: 4494803 - DNA, 25 bp, Homo sapien
tcagcattcatccacaagcgtgtac

SEQ ID NO: 4494804 - DNA, 25 bp, Homo sapien
cgtgtacctagccaagtcagtaaag

SEQ ID NO: 4494805 - DNA, 25 bp, Homo sapien
ttagacacaattgccggcatcccac

SEQ ID NO: 4494806 - DNA, 25 bp, Homo sapien
ttgatgtagtaactcagctcttggc

SEQ ID NO: 4494807 - DNA, 25 bp, Homo sapien
gagtaatcagcatgttttccgagtg

SEQ ID NO: 4494808 - DNA, 25 bp, Homo sapien
ttccgagtgaatgtggtgcgccatc

SEQ ID NO: 4494809 - DNA, 25 bp, Homo sapien
ctgcctggtgcaaggttgtgcgttt

SEQ ID NO: 4494810 - DNA, 25 bp, Homo sapien
gcaaggttgtgcgtttccccagcaa

SEQ ID NO: 4494811 - DNA, 25 bp, Homo sapien
ggttgtgcgtttccccagcaactgg

SEQ ID NO: 4494812 - DNA, 25 bp, Homo sapien
tggtgcaaggttgtgcgtttcccca

SEQ ID NO: 4494813 - DNA, 25 bp, Homo sapien
tccaatgaacaccaattccttctaa

SEQ ID NO: 4494814 - DNA, 25 bp, Homo sapien
caatgaacaccaattccttctaact

SEQ ID NO: 4494815 - DNA, 25 bp, Homo sapien
tgaacaccaattccttctaacttcc

SEQ ID NO: 4494816 - DNA, 25 bp, Homo sapien
ctccaatgaacaccaattccttcta

SEQ ID NO: 4494817 - DNA, 25 bp, Homo sapien
tagagccttaagcatgagcaccagg

SEQ ID NO: 4494818 - DNA, 25 bp, Homo sapien
ggcagcgtagtaaatcccacttcca

SEQ ID NO: 4494819 - DNA, 25 bp, Homo sapien
ctttttaccccgtcagtgtagacat

SEQ ID NO: 4494820 - DNA, 25 bp, Homo sapien
gcctgaaggactctagtcgttaatg

SEQ ID NO: 4494821 - DNA, 25 bp, Homo sapien
actgggaaacttgatttgcatgtgc

SEQ ID NO: 4494822 - DNA, 25 bp, Homo sapien
taaaggaagagctgataaagaaagc

SEQ ID NO: 4494823 - DNA, 25 bp, Homo sapien
agaggtaaaggaagagctgataaag

SEQ ID NO: 4494824 - DNA, 25 bp, Homo sapien
atggaactgggaaacttgatttgca

SEQ ID NO: 4494825 - DNA, 25 bp, Homo sapien
tctgtgtagcctccagttgctccag

SEQ ID NO: 4494826 - DNA, 25 bp, Homo sapien
tatgagatgcctgcatttttattcc

SEQ ID NO: 4494827 - DNA, 25 bp, Homo sapien
ggtgttcttcggagagctgcacaca

SEQ ID NO: 4494828 - DNA, 25 bp, Homo sapien
aggacacattggcacaggtgttctt

SEQ ID NO: 4494829 - DNA, 25 bp, Homo sapien
tgagaactatgagatgcctgcattt

SEQ ID NO: 4494830 - DNA, 25 bp, Homo sapien
tcactttcgatcctcttttctcctt

SEQ ID NO: 4494831 - DNA, 25 bp, Homo sapien
aaccgcctttctcactttcgatcct

SEQ ID NO: 4494832 - DNA, 25 bp, Homo sapien
tttctcactttcgatcctcttttct

SEQ ID NO: 4494833 - DNA, 25 bp, Homo sapien
cccaaccgcctttctcactttcgat

SEQ ID NO: 4494834 - DNA, 25 bp, Homo sapien
ggtctgctcagtggaaactcaggct

SEQ ID NO: 4494835 - DNA, 25 bp, Homo sapien
tgaagtcaggctgcttaacaggcat

SEQ ID NO: 4494836 - DNA, 25 bp, Homo sapien
ttgccatggcaaacactgtgagccc

SEQ ID NO: 4494837 - DNA, 25 bp, Homo sapien
gccagccttctggtatactagcaag

SEQ ID NO: 4494838 - DNA, 25 bp, Homo sapien
cagagttccaaggtgttgcagggca

SEQ ID NO: 4494839 - DNA, 25 bp, Homo sapien
agtccaaggtcgaaggttcacctca

SEQ ID NO: 4494840 - DNA, 25 bp, Homo sapien
acctcaggtgagaccttcctgctgg

SEQ ID NO: 4494841 - DNA, 25 bp, Homo sapien
caaggtgttgcagggcaatcgcatg

SEQ ID NO: 4494842 - DNA, 25 bp, Homo sapien
cagactgtagggctttgggccaatt

SEQ ID NO: 4494843 - DNA, 25 bp, Homo sapien
ctgtagggctttgggccaatttctt

SEQ ID NO: 4494844 - DNA, 25 bp, Homo sapien
ggctttgggccaatttcttgatttg

SEQ ID NO: 4494845 - DNA, 25 bp, Homo sapien
tttgcagactgtagggctttgggcc

SEQ ID NO: 4494846 - DNA, 25 bp, Homo sapien
gagaaacttcaggatgaattgttat

SEQ ID NO: 4494847 - DNA, 25 bp, Homo sapien
ggagaaacttcaggatgaattgtta

SEQ ID NO: 4494848 - DNA, 25 bp, Homo sapien
gaaacttcaggatgaattgttatga

SEQ ID NO: 4494849 - DNA, 25 bp, Homo sapien
aaacttcaggatgaattgttatgat

SEQ ID NO: 4494850 - DNA, 25 bp, Homo sapien
gcttggaaccctgtgctaatgagaa

SEQ ID NO: 4494851 - DNA, 25 bp, Homo sapien
taatgtatcggtgccaaacagtagc

SEQ ID NO: 4494852 - DNA, 25 bp, Homo sapien
cattcaaacccgtgtaggcgaactc

SEQ ID NO: 4494853 - DNA, 25 bp, Homo sapien
gaattcaggtgggaaccaggccttc

SEQ ID NO: 4494854 - DNA, 25 bp, Homo sapien
ttcttggggttcatgcactgctttc

SEQ ID NO: 4494855 - DNA, 25 bp, Homo sapien
tgagcagccggtgtcttttcctgaa

SEQ ID NO: 4494856 - DNA, 25 bp, Homo sapien
tcagcttccggcaggattctttttg

SEQ ID NO: 4494857 - DNA, 25 bp, Homo sapien
aatgatccgattcccagaggtagca

SEQ ID NO: 4494858 - DNA, 25 bp, Homo sapien
aaaagctgtctgctgacagctctga

SEQ ID NO: 4494859 - DNA, 25 bp, Homo sapien
tgacagctctgacagtccctctgtc

SEQ ID NO: 4494860 - DNA, 25 bp, Homo sapien
tttgccaaaagctgtctgctgacag

SEQ ID NO: 4494861 - DNA, 25 bp, Homo sapien
gacagctctgacagtccctctgtca

SEQ ID NO: 4494862 - DNA, 25 bp, Homo sapien
gtgctcaggaacctctaactcctcc

SEQ ID NO: 4494863 - DNA, 25 bp, Homo sapien
ctcaggaacctctaactcctcccac

SEQ ID NO: 4494864 - DNA, 25 bp, Homo sapien
ctccgtgctcaggaacctctaactc

SEQ ID NO: 4494865 - DNA, 25 bp, Homo sapien
tccgtgctcaggaacctctaactcc

SEQ ID NO: 4494866 - DNA, 25 bp, Homo sapien
tggcttccactcagccctctggtgt

SEQ ID NO: 4494867 - DNA, 25 bp, Homo sapien
tggttttgcaacagagtcaccccca

SEQ ID NO: 4494868 - DNA, 25 bp, Homo sapien
tgctgttagaagcattgtctgggtc

SEQ ID NO: 4494869 - DNA, 25 bp, Homo sapien
aggagaagtgctgttagaagcattg

SEQ ID NO: 4494870 - DNA, 25 bp, Homo sapien
tgcctttcgtagtgctggtttggct

SEQ ID NO: 4494871 - DNA, 25 bp, Homo sapien
gcagtagctgtacattgtctgcctt

SEQ ID NO: 4494872 - DNA, 25 bp, Homo sapien
ctgcctttcgtagtgctggtttggc

SEQ ID NO: 4494873 - DNA, 25 bp, Homo sapien
tctgcctttcgtagtgctggtttgg

SEQ ID NO: 4494874 - DNA, 25 bp, Homo sapien
agtgggctctctagaccgctctggg

SEQ ID NO: 4494875 - DNA, 25 bp, Homo sapien
ctctctagaccgctctgggtgcttt

SEQ ID NO: 4494876 - DNA, 25 bp, Homo sapien
tctctagaccgctctgggtgctttt

SEQ ID NO: 4494877 - DNA, 25 bp, Homo sapien
gggctctctagaccgctctgggtgc

SEQ ID NO: 4494878 - DNA, 25 bp, Homo sapien
atcctgccacacagtcctccaagtc

SEQ ID NO: 4494879 - DNA, 25 bp, Homo sapien
catcctgccacacagtcctccaagt

SEQ ID NO: 4494880 - DNA, 25 bp, Homo sapien
tgcatcctgccacacagtcctccaa

SEQ ID NO: 4494881 - DNA, 25 bp, Homo sapien
gcatcctgccacacagtcctccaag

SEQ ID NO: 4494882 - DNA, 25 bp, Homo sapien
gaagctggcacactccgtaggtggc

SEQ ID NO: 4494883 - DNA, 25 bp, Homo sapien
ggcacactccgtaggtggctccagg

SEQ ID NO: 4494884 - DNA, 25 bp, Homo sapien
agctggcacactccgtaggtggctc

SEQ ID NO: 4494885 - DNA, 25 bp, Homo sapien
ctggcacactccgtaggtggctcca

SEQ ID NO: 4494886 - DNA, 25 bp, Homo sapien
tctttggtccccagtggatgtgcta

SEQ ID NO: 4494887 - DNA, 25 bp, Homo sapien
ttctttggtccccagtggatgtgct

SEQ ID NO: 4494888 - DNA, 25 bp, Homo sapien
cttctttggtccccagtggatgtgc

SEQ ID NO: 4494889 - DNA, 25 bp, Homo sapien
ctttggtccccagtggatgtgctac

SEQ ID NO: 4494890 - DNA, 25 bp, Homo sapien
gctcgggtcttcagtgggccctgtc

SEQ ID NO: 4494891 - DNA, 25 bp, Homo sapien
ccctgtcagtaccaggaagccagga

SEQ ID NO: 4494892 - DNA, 25 bp, Homo sapien
cttgcaccaccttggcctgttctgt

SEQ ID NO: 4494893 - DNA, 25 bp, Homo sapien
aaagtgagactagccctgccttgca

SEQ ID NO: 4494894 - DNA, 25 bp, Homo sapien
agatggccaagagggatttccagtt

SEQ ID NO: 4494895 - DNA, 25 bp, Homo sapien
gacctggtaacaccttatccgatcc

SEQ ID NO: 4494896 - DNA, 25 bp, Homo sapien
gcaagacctggtaacaccttatccg

SEQ ID NO: 4494897 - DNA, 25 bp, Homo sapien
tggccaagagggatttccagttttc

SEQ ID NO: 4494898 - DNA, 25 bp, Homo sapien
tatggttaagcataaggcacatgct

SEQ ID NO: 4494899 - DNA, 25 bp, Homo sapien
cttaagataagcagctcagtatggt

SEQ ID NO: 4494900 - DNA, 25 bp, Homo sapien
gggataacttaagataagcagctca

SEQ ID NO: 4494901 - DNA, 25 bp, Homo sapien
gcagctcagtatggttaagcataag

SEQ ID NO: 4494902 - DNA, 25 bp, Homo sapien
gccagcactatcactgcaatgtacg

SEQ ID NO: 4494903 - DNA, 25 bp, Homo sapien
caagggttctggagagggccagcac

SEQ ID NO: 4494904 - DNA, 25 bp, Homo sapien
taacggccggagagtgcaagggttc

SEQ ID NO: 4494905 - DNA, 25 bp, Homo sapien
gctgagtcaccatttcggcataggg

SEQ ID NO: 4494906 - DNA, 25 bp, Homo sapien
tattaactgccaaagaccattctgg

SEQ ID NO: 4494907 - DNA, 25 bp, Homo sapien
tgagctcagcctttctctggtgtag

SEQ ID NO: 4494908 - DNA, 25 bp, Homo sapien
cctgtacacttgtgctggtcaaatg

SEQ ID NO: 4494909 - DNA, 25 bp, Homo sapien
tctggtgtagggtgtaccgagtccc

SEQ ID NO: 4494910 - DNA, 25 bp, Homo sapien
tgctcctgcattctaggggcttgtg

SEQ ID NO: 4494911 - DNA, 25 bp, Homo sapien
tactgctcctgcattctaggggctt

SEQ ID NO: 4494912 - DNA, 25 bp, Homo sapien
actgctcctgcattctaggggcttg

SEQ ID NO: 4494913 - DNA, 25 bp, Homo sapien
tcctgcattctaggggcttgtgtgt

SEQ ID NO: 4494914 - DNA, 25 bp, Homo sapien
cctctgtagactgcaggagtgtgga

SEQ ID NO: 4494915 - DNA, 25 bp, Homo sapien
gtagactgcaggagtgtggaaaggt

SEQ ID NO: 4494916 - DNA, 25 bp, Homo sapien
tctgtagactgcaggagtgtggaaa

SEQ ID NO: 4494917 - DNA, 25 bp, Homo sapien
tcctctgtagactgcaggagtgtgg

SEQ ID NO: 4494918 - DNA, 25 bp, Homo sapien
ctggggatgatccaacgtaaagcaa

SEQ ID NO: 4494919 - DNA, 25 bp, Homo sapien
cctgagactggggatgatccaacgt

SEQ ID NO: 4494920 - DNA, 25 bp, Homo sapien
gagactggggatgatccaacgtaaa

SEQ ID NO: 4494921 - DNA, 25 bp, Homo sapien
gggatgatccaacgtaaagcaagac

SEQ ID NO: 4494922 - DNA, 25 bp, Homo sapien
gcagcttccctactggcagagctat

SEQ ID NO: 4494923 - DNA, 25 bp, Homo sapien
ggagcagcttccctactggcagagc

SEQ ID NO: 4494924 - DNA, 25 bp, Homo sapien
ttccctactggcagagctatcttct

SEQ ID NO: 4494925 - DNA, 25 bp, Homo sapien
atggagcagcttccctactggcaga

SEQ ID NO: 4494926 - DNA, 25 bp, Homo sapien
tggcttacaggagccaagtttagga

SEQ ID NO: 4494927 - DNA, 25 bp, Homo sapien
gtgttgtggcttacaggagccaagt

SEQ ID NO: 4494928 - DNA, 25 bp, Homo sapien
ttgtggcttacaggagccaagttta

SEQ ID NO: 4494929 - DNA, 25 bp, Homo sapien
tgtgttgtggcttacaggagccaag

SEQ ID NO: 4494930 - DNA, 25 bp, Homo sapien
tggatgtgacttccgtcattggcaa

SEQ ID NO: 4494931 - DNA, 25 bp, Homo sapien
caaaccatttggatgtgacttccgt

SEQ ID NO: 4494932 - DNA, 25 bp, Homo sapien
gatgtgacttccgtcattggcaaaa

SEQ ID NO: 4494933 - DNA, 25 bp, Homo sapien
catttggatgtgacttccgtcattg

SEQ ID NO: 4494934 - DNA, 25 bp, Homo sapien
tcctgtcagacacactagagtatcc

SEQ ID NO: 4494935 - DNA, 25 bp, Homo sapien
tgattgataattggagatgtttggg

SEQ ID NO: 4494936 - DNA, 25 bp, Homo sapien
tgaatgctgttgtgctagttaggga

SEQ ID NO: 4494937 - DNA, 25 bp, Homo sapien
ctttactgaggagttgggctaggac

SEQ ID NO: 4494938 - DNA, 25 bp, Homo sapien
tgatagctgcatggcggctagccag

SEQ ID NO: 4494939 - DNA, 25 bp, Homo sapien
ccagcactgtgatagctgcatggcg

SEQ ID NO: 4494940 - DNA, 25 bp, Homo sapien
gccagagaccccactgagtccatgg

SEQ ID NO: 4494941 - DNA, 25 bp, Homo sapien
gacatggggtgacatttttgcatcc

SEQ ID NO: 4494942 - DNA, 25 bp, Homo sapien
taagacctgtgactctcagaatggc

SEQ ID NO: 4494943 - DNA, 25 bp, Homo sapien
tggccctctgagttgccacatcact

SEQ ID NO: 4494944 - DNA, 25 bp, Homo sapien
ctctgagttgccacatcactcttga

SEQ ID NO: 4494945 - DNA, 25 bp, Homo sapien
gacctgtgactctcagaatggccct

SEQ ID NO: 4494946 - DNA, 25 bp, Homo sapien
gcctgtcaggtcttgtaggcccctg

SEQ ID NO: 4494947 - DNA, 25 bp, Homo sapien
aagtgatgcctgtcaggtcttgtag

SEQ ID NO: 4494948 - DNA, 25 bp, Homo sapien
tagataaagtgatgcctgtcaggtc

SEQ ID NO: 4494949 - DNA, 25 bp, Homo sapien
tcatagataaagtgatgcctgtcag

SEQ ID NO: 4494950 - DNA, 25 bp, Homo sapien
gtctgaattgaagtccctaattctt

SEQ ID NO: 4494951 - DNA, 25 bp, Homo sapien
gaagtccctaattcttcagacttag

SEQ ID NO: 4494952 - DNA, 25 bp, Homo sapien
gacttagaaccaccaagttgagccc

SEQ ID NO: 4494953 - DNA, 25 bp, Homo sapien
cctaattcttcagacttagaaccac

SEQ ID NO: 4494954 - DNA, 25 bp, Homo sapien
cagttatctacactgcacaccaggg

SEQ ID NO: 4494955 - DNA, 25 bp, Homo sapien
cacaccagggctaggcaatgctcat

SEQ ID NO: 4494956 - DNA, 25 bp, Homo sapien
tctatgcacacatgagtggtctccg

SEQ ID NO: 4494957 - DNA, 25 bp, Homo sapien
cattggaaggcagcgatttaaactc

SEQ ID NO: 4494958 - DNA, 25 bp, Homo sapien
tctctggtgttttagcaatagcatt

SEQ ID NO: 4494959 - DNA, 25 bp, Homo sapien
gatgcacttgagtgctttggctgta

SEQ ID NO: 4494960 - DNA, 25 bp, Homo sapien
aaatgccaccaccaacttgacctgt

SEQ ID NO: 4494961 - DNA, 25 bp, Homo sapien
cattaggactgttacaaatattcag

SEQ ID NO: 4494962 - DNA, 25 bp, Homo sapien
tagaacaccaagagcaatgaaggag

SEQ ID NO: 4494963 - DNA, 25 bp, Homo sapien
caagagcaatgaaggaggttgagca

SEQ ID NO: 4494964 - DNA, 25 bp, Homo sapien
ctaacaggttagaacaccaagagca

SEQ ID NO: 4494965 - DNA, 25 bp, Homo sapien
gaatccatcaggtgacacatggact

SEQ ID NO: 4494966 - DNA, 25 bp, Homo sapien
tgtttccatgaggacaaaggattct

SEQ ID NO: 4494967 - DNA, 25 bp, Homo sapien
aactgggtatgggtgtttccatgag

SEQ ID NO: 4494968 - DNA, 25 bp, Homo sapien
ggaaccaagagataatcaacaacag

SEQ ID NO: 4494969 - DNA, 25 bp, Homo sapien
taagctattggaagattttgggaac

SEQ ID NO: 4494970 - DNA, 25 bp, Homo sapien
gctgtttcctctgcatgaactatct

SEQ ID NO: 4494971 - DNA, 25 bp, Homo sapien
tcctcttctgctgggtgataacttc

SEQ ID NO: 4494972 - DNA, 25 bp, Homo sapien
tcctctaagtcttttcttgtgctgt

SEQ ID NO: 4494973 - DNA, 25 bp, Homo sapien
ctgcatgaactatcttttcctcttc

SEQ ID NO: 4494974 - DNA, 25 bp, Homo sapien
gaagcacgcgtacttttctgcaggc

SEQ ID NO: 4494975 - DNA, 25 bp, Homo sapien
tttgaagatcacactgaagcacgcg

SEQ ID NO: 4494976 - DNA, 25 bp, Homo sapien
gggaaatgacgtggtctgagctggg

SEQ ID NO: 4494977 - DNA, 25 bp, Homo sapien
gccaatgcgcatgtcagcacaggga

SEQ ID NO: 4494978 - DNA, 25 bp, Homo sapien
gccaattgaatccttgcctgaggcc

SEQ ID NO: 4494979 - DNA, 25 bp, Homo sapien
tcttgggctgatgaataggggtcaa

SEQ ID NO: 4494980 - DNA, 25 bp, Homo sapien
gttggcagccagtcgtggaggccct

SEQ ID NO: 4494981 - DNA, 25 bp, Homo sapien
gggtcaatggttatgttggcagcca

SEQ ID NO: 4494982 - DNA, 25 bp, Homo sapien
tcagtgtagacatcgccttgtggtt

SEQ ID NO: 4494983 - DNA, 25 bp, Homo sapien
gttcagacgtgttactgaagttagc

SEQ ID NO: 4494984 - DNA, 25 bp, Homo sapien
ttgtggttcagacgtgttactgaag

SEQ ID NO: 4494985 - DNA, 25 bp, Homo sapien
ggttactctcgtaaactgagccttg

SEQ ID NO: 4494986 - DNA, 25 bp, Homo sapien
cgggttctgagactcatatttggct

SEQ ID NO: 4494987 - DNA, 25 bp, Homo sapien
ggctgcctgttgagcatagggaatc

SEQ ID NO: 4494988 - DNA, 25 bp, Homo sapien
gagactcatatttggctgcctgttg

SEQ ID NO: 4494989 - DNA, 25 bp, Homo sapien
ttctgagactcatatttggctgcct

SEQ ID NO: 4494990 - DNA, 25 bp, Homo sapien
tcttgagtattaagactccccatga

SEQ ID NO: 4494991 - DNA, 25 bp, Homo sapien
catgatggggactcctccattcgtt

SEQ ID NO: 4494992 - DNA, 25 bp, Homo sapien
gagtattaagactccccatgatggg

SEQ ID NO: 4494993 - DNA, 25 bp, Homo sapien
tcagaagtcttgagtattaagactc

SEQ ID NO: 4494994 - DNA, 25 bp, Homo sapien
tcatggtactagaggacatcatccc

SEQ ID NO: 4494995 - DNA, 25 bp, Homo sapien
aggaaggtttataactctgttgagg

SEQ ID NO: 4494996 - DNA, 25 bp, Homo sapien
tgctgacatgagtcatcatggtact

SEQ ID NO: 4494997 - DNA, 25 bp, Homo sapien
ataactctgttgaggttgagcttgc

SEQ ID NO: 4494998 - DNA, 25 bp, Homo sapien
ggtgctgaaagcctagattcgttct

SEQ ID NO: 4494999 - DNA, 25 bp, Homo sapien
ctttcccattggatctattgtttcc

SEQ ID NO: 4495000 - DNA, 25 bp, Homo sapien
cactccccagttttggcaggtgctg

SEQ ID NO: 4495001 - DNA, 25 bp, Homo sapien
gcctagattcgttctttcccattgg

SEQ ID NO: 4495002 - DNA, 25 bp, Homo sapien
tggtggtaaaaatttggtcagtgct

SEQ ID NO: 4495003 - DNA, 25 bp, Homo sapien
gaagcatattgcctctttccttggc

SEQ ID NO: 4495004 - DNA, 25 bp, Homo sapien
tgaaggcccagtctccctggaagca

SEQ ID NO: 4495005 - DNA, 25 bp, Homo sapien
aaggctccaaatagggcaggaagca

SEQ ID NO: 4495006 - DNA, 25 bp, Homo sapien
tatatgggctctgattactaggctg

SEQ ID NO: 4495007 - DNA, 25 bp, Homo sapien
cagaagaacgaggaggcataaaagt

SEQ ID NO: 4495008 - DNA, 25 bp, Homo sapien
aaactgaactggactgaacagtggg

SEQ ID NO: 4495009 - DNA, 25 bp, Homo sapien
tgtttatatgggctctgattactag

SEQ ID NO: 4495010 - DNA, 25 bp, Homo sapien
tctgctcagcactcgggtcatggtc

SEQ ID NO: 4495011 - DNA, 25 bp, Homo sapien
ggtcatggtcctgagtggaactcca

SEQ ID NO: 4495012 - DNA, 25 bp, Homo sapien
agtggaactccaatgctgagccaga

SEQ ID NO: 4495013 - DNA, 25 bp, Homo sapien
gctctgctcagcactcgggtcatgg

SEQ ID NO: 4495014 - DNA, 25 bp, Homo sapien
catcaggccagtcatctgtaagacc

SEQ ID NO: 4495015 - DNA, 25 bp, Homo sapien
cagaatggtatcattagctgacgtc

SEQ ID NO: 4495016 - DNA, 25 bp, Homo sapien
cagtgacttcaatggtccagaatgg

SEQ ID NO: 4495017 - DNA, 25 bp, Homo sapien
tggctatggcatcgtctctactctc

SEQ ID NO: 4495018 - DNA, 25 bp, Homo sapien
ttaataatccactttgtgaataagg

SEQ ID NO: 4495019 - DNA, 25 bp, Homo sapien
taataatccactttgtgaataaggc

SEQ ID NO: 4495020 - DNA, 25 bp, Homo sapien
aataatccactttgtgaataaggca

SEQ ID NO: 4495021 - DNA, 25 bp, Homo sapien
caaagagaccgatagggctttcagg

SEQ ID NO: 4495022 - DNA, 25 bp, Homo sapien
tcaggaactctaatggccttcaaga

SEQ ID NO: 4495023 - DNA, 25 bp, Homo sapien
ctttggactttataacatattcatt

SEQ ID NO: 4495024 - DNA, 25 bp, Homo sapien
aatccaagcccattccacacaggca

SEQ ID NO: 4495025 - DNA, 25 bp, Homo sapien
gcattggcggcacctgtcactgctg

SEQ ID NO: 4495026 - DNA, 25 bp, Homo sapien
ggtgcattggcggcacctgtcactg

SEQ ID NO: 4495027 - DNA, 25 bp, Homo sapien
aacaggtgcattggcggcacctgtc

SEQ ID NO: 4495028 - DNA, 25 bp, Homo sapien
tgctgcaggtgcctggcgtcttggc

SEQ ID NO: 4495029 - DNA, 25 bp, Homo sapien
tttctaggccaattcagtaccggga

SEQ ID NO: 4495030 - DNA, 25 bp, Homo sapien
ggtttgctgtgattcccatacccag

SEQ ID NO: 4495031 - DNA, 25 bp, Homo sapien
tactgttacttcctggagcatggga

SEQ ID NO: 4495032 - DNA, 25 bp, Homo sapien
gtaattatgtacaggctctccacgt

SEQ ID NO: 4495033 - DNA, 25 bp, Homo sapien
ggtccacactttggatttctcttgc

SEQ ID NO: 4495034 - DNA, 25 bp, Homo sapien
agtggaccacactctgctttgccca

SEQ ID NO: 4495035 - DNA, 25 bp, Homo sapien
tcttgccttgtcttgagagtggacc

SEQ ID NO: 4495036 - DNA, 25 bp, Homo sapien
ccttgtcttgagagtggaccacact

SEQ ID NO: 4495037 - DNA, 25 bp, Homo sapien
tagactacagacttgacccagggag

SEQ ID NO: 4495038 - DNA, 25 bp, Homo sapien
aatgctggctgacacgcaggaggac

SEQ ID NO: 4495039 - DNA, 25 bp, Homo sapien
gaattccttctctaacgacgacacg

SEQ ID NO: 4495040 - DNA, 25 bp, Homo sapien
aagagagattctgcgtgctggagcc

SEQ ID NO: 4495041 - DNA, 25 bp, Homo sapien
agaacataggccaagggagtagaag

SEQ ID NO: 4495042 - DNA, 25 bp, Homo sapien
ttttgagaacataggccaagggagt

SEQ ID NO: 4495043 - DNA, 25 bp, Homo sapien
tgagaacataggccaagggagtaga

SEQ ID NO: 4495044 - DNA, 25 bp, Homo sapien
aacataggccaagggagtagaagga

SEQ ID NO: 4495045 - DNA, 25 bp, Homo sapien
cactttgagtatctagccatggaga

SEQ ID NO: 4495046 - DNA, 25 bp, Homo sapien
ggtgaactgtacagggccagacaaa

SEQ ID NO: 4495047 - DNA, 25 bp, Homo sapien
ccagctttcgaaatgagagtccaaa

SEQ ID NO: 4495048 - DNA, 25 bp, Homo sapien
gactgagagccgcttttgagacgtg

SEQ ID NO: 4495049 - DNA, 25 bp, Homo sapien
tgaaatgtgggcctccctatgtggg

SEQ ID NO: 4495050 - DNA, 25 bp, Homo sapien
gacgtcctggttagctgaaggcagc

SEQ ID NO: 4495051 - DNA, 25 bp, Homo sapien
agagactgccggcagcctggacgtc

SEQ ID NO: 4495052 - DNA, 25 bp, Homo sapien
ccctatgtggggtttagtactgaat

SEQ ID NO: 4495053 - DNA, 25 bp, Homo sapien
ggagaatctacttggcacctgtgcc

SEQ ID NO: 4495054 - DNA, 25 bp, Homo sapien
ccctgggaggattgatgcatctgcc

SEQ ID NO: 4495055 - DNA, 25 bp, Homo sapien
tctgggagatgtccaatgagcggcc

SEQ ID NO: 4495056 - DNA, 25 bp, Homo sapien
gcatctgcctttgagctgttgtgaa

SEQ ID NO: 4495057 - DNA, 25 bp, Homo sapien
agtagatgagttgctttctcatgta

SEQ ID NO: 4495058 - DNA, 25 bp, Homo sapien
atgagttgctttctcatgtacttca

SEQ ID NO: 4495059 - DNA, 25 bp, Homo sapien
tgagttgctttctcatgtacttcat

SEQ ID NO: 4495060 - DNA, 25 bp, Homo sapien
tccaaagtagatgagttgctttctc

SEQ ID NO: 4495061 - DNA, 25 bp, Homo sapien
actgctaaacggcttggctctcaac

SEQ ID NO: 4495062 - DNA, 25 bp, Homo sapien
tgtttgcgtaaactgtcagaaagcc

SEQ ID NO: 4495063 - DNA, 25 bp, Homo sapien
cactgagattctgctaaatggatgc

SEQ ID NO: 4495064 - DNA, 25 bp, Homo sapien
tcagactgagacagccgttccactg

SEQ ID NO: 4495065 - DNA, 25 bp, Homo sapien
tggctggcatatcatccctgaagtg

SEQ ID NO: 4495066 - DNA, 25 bp, Homo sapien
gtctcattgtaagggtaattgggca

SEQ ID NO: 4495067 - DNA, 25 bp, Homo sapien
tgggattattgtctcattgtaaggg

SEQ ID NO: 4495068 - DNA, 25 bp, Homo sapien
agggtaattgggcagaatgtctaag

SEQ ID NO: 4495069 - DNA, 25 bp, Homo sapien
tctaagccccgcttttgtaaacagc

SEQ ID NO: 4495070 - DNA, 25 bp, Homo sapien
gactggcagtcacacagatctggca

SEQ ID NO: 4495071 - DNA, 25 bp, Homo sapien
tgtaaacagcctgaatccaaggatc

SEQ ID NO: 4495072 - DNA, 25 bp, Homo sapien
cctttaaactgcttccagaacttag

SEQ ID NO: 4495073 - DNA, 25 bp, Homo sapien
tcagtgaacagatgggaaattcagc

SEQ ID NO: 4495074 - DNA, 25 bp, Homo sapien
cagatgggaaattcagctccagctc

SEQ ID NO: 4495075 - DNA, 25 bp, Homo sapien
tccagctcagagaagctagataagg

SEQ ID NO: 4495076 - DNA, 25 bp, Homo sapien
tgatgtgcatccgactaccctttgc

SEQ ID NO: 4495077 - DNA, 25 bp, Homo sapien
ggtacacaaggagagcataagacaa

SEQ ID NO: 4495078 - DNA, 25 bp, Homo sapien
cccctcttggcatgcgagtgttttc

SEQ ID NO: 4495079 - DNA, 25 bp, Homo sapien
ttgttcacccctcttggcatgcgag

SEQ ID NO: 4495080 - DNA, 25 bp, Homo sapien
tacacaaggagagcataagacaagc

SEQ ID NO: 4495081 - DNA, 25 bp, Homo sapien
gggaatctgcttagagacttggtca

SEQ ID NO: 4495082 - DNA, 25 bp, Homo sapien
tttacagcagtacgccgggatttca

SEQ ID NO: 4495083 - DNA, 25 bp, Homo sapien
gagacttggtcatagatgcatcctt

SEQ ID NO: 4495084 - DNA, 25 bp, Homo sapien
agtgtgcctcggtctgggaatctgc

SEQ ID NO: 4495085 - DNA, 25 bp, Homo sapien
tgtgggctgatttgcatggctggat

SEQ ID NO: 4495086 - DNA, 25 bp, Homo sapien
gatcaggagcagtagatgtgttggg

SEQ ID NO: 4495087 - DNA, 25 bp, Homo sapien
gctgatttgcatggctggatcagga

SEQ ID NO: 4495088 - DNA, 25 bp, Homo sapien
cccgaatgtcccatgtgtgggctga

SEQ ID NO: 4495089 - DNA, 25 bp, Homo sapien
tgagacggcatcagaaagtgaacat

SEQ ID NO: 4495090 - DNA, 25 bp, Homo sapien
ctgagacggcatcagaaagtgaaca

SEQ ID NO: 4495091 - DNA, 25 bp, Homo sapien
cagcacgggtttcatctccctctga

SEQ ID NO: 4495092 - DNA, 25 bp, Homo sapien
tgatggtcagcacgggtttcatctc

SEQ ID NO: 4495093 - DNA, 25 bp, Homo sapien
gcttgatggtcagcacgggtttcat

SEQ ID NO: 4495094 - DNA, 25 bp, Homo sapien
tggtcagcacgggtttcatctccct

SEQ ID NO: 4495095 - DNA, 25 bp, Homo sapien
gaaatactcacaaacttcataatga

SEQ ID NO: 4495096 - DNA, 25 bp, Homo sapien
ggatgaaatcgtatctgaaaattct

SEQ ID NO: 4495097 - DNA, 25 bp, Homo sapien
aagaaatactcacaaacttcataat

SEQ ID NO: 4495098 - DNA, 25 bp, Homo sapien
tgtatggatgaaatcgtatctgaaa

SEQ ID NO: 4495099 - DNA, 25 bp, Homo sapien
tcagactgtattggatgacttcctt

SEQ ID NO: 4495100 - DNA, 25 bp, Homo sapien
cagactgtattggatgacttccttc

SEQ ID NO: 4495101 - DNA, 25 bp, Homo sapien
tgggttgctgcggtcttccgctgtc

SEQ ID NO: 4495102 - DNA, 25 bp, Homo sapien
tgccttgtgtttctgggcggactcc

SEQ ID NO: 4495103 - DNA, 25 bp, Homo sapien
cggactccagagtaagggccttgaa

SEQ ID NO: 4495104 - DNA, 25 bp, Homo sapien
cctaatgatgcaggacaaatgtttg

SEQ ID NO: 4495105 - DNA, 25 bp, Homo sapien
ttctttgcacgttggcaggagctgc

SEQ ID NO: 4495106 - DNA, 25 bp, Homo sapien
cgggtccatgcctggtcagtccaaa

SEQ ID NO: 4495107 - DNA, 25 bp, Homo sapien
cacgcacacaccttcaggcttggag

SEQ ID NO: 4495108 - DNA, 25 bp, Homo sapien
tagcatccgtgaaaactctcttggg

SEQ ID NO: 4495109 - DNA, 25 bp, Homo sapien
ccaggtttcagtacagagatgtatg

SEQ ID NO: 4495110 - DNA, 25 bp, Homo sapien
caggtttcagtacagagatgtatgc

SEQ ID NO: 4495111 - DNA, 25 bp, Homo sapien
tatgcaagggttgtcctccattatt

SEQ ID NO: 4495112 - DNA, 25 bp, Homo sapien
agagatgtatgcaagggttgtcctc

SEQ ID NO: 4495113 - DNA, 25 bp, Homo sapien
cacagagacttataggagtgttcag

SEQ ID NO: 4495114 - DNA, 25 bp, Homo sapien
gactgaatcagacctcttatttgga

SEQ ID NO: 4495115 - DNA, 25 bp, Homo sapien
aatacagaaattccaggttacctgc

SEQ ID NO: 4495116 - DNA, 25 bp, Homo sapien
gacaatggggcgttgtgtttccaca

SEQ ID NO: 4495117 - DNA, 25 bp, Homo sapien
taaccatggcatctatgttgaggat

SEQ ID NO: 4495118 - DNA, 25 bp, Homo sapien
catctatgttgaggatgtcaatgtt

SEQ ID NO: 4495119 - DNA, 25 bp, Homo sapien
tcttaaccatggcatctatgttgag

SEQ ID NO: 4495120 - DNA, 25 bp, Homo sapien
ccatggcatctatgttgaggatgtc

SEQ ID NO: 4495121 - DNA, 25 bp, Homo sapien
cctcagctcatcgtcagggtctcct

SEQ ID NO: 4495122 - DNA, 25 bp, Homo sapien
gatgcttatagactgagacccactt

SEQ ID NO: 4495123 - DNA, 25 bp, Homo sapien
agggtctcctcctttcagaaagatg

SEQ ID NO: 4495124 - DNA, 25 bp, Homo sapien
gactgagacccacttagatgagacc

SEQ ID NO: 4495125 - DNA, 25 bp, Homo sapien
ttgctcgaggcagcacgtggcctcg

SEQ ID NO: 4495126 - DNA, 25 bp, Homo sapien
cagtgttactcctccagggtatttt

SEQ ID NO: 4495127 - DNA, 25 bp, Homo sapien
tccttgctcgaggcagcacgtggcc

SEQ ID NO: 4495128 - DNA, 25 bp, Homo sapien
ccagtgttactcctccagggtattt

SEQ ID NO: 4495129 - DNA, 25 bp, Homo sapien
tgtccactgtggttctgggctcccc

SEQ ID NO: 4495130 - DNA, 25 bp, Homo sapien
tgctcttcccccagtaaatgccttt

SEQ ID NO: 4495131 - DNA, 25 bp, Homo sapien
gccttctttggaaatgcctttgatt

SEQ ID NO: 4495132 - DNA, 25 bp, Homo sapien
ctgttgacagacagaggaaaaggtc

SEQ ID NO: 4495133 - DNA, 25 bp, Homo sapien
tttgtgctgaatgttttggggaaag

SEQ ID NO: 4495134 - DNA, 25 bp, Homo sapien
ctttgtgctgaatgttttggggaaa

SEQ ID NO: 4495135 - DNA, 25 bp, Homo sapien
catgtctgatggtacgattggcata

SEQ ID NO: 4495136 - DNA, 25 bp, Homo sapien
tacgattggcatagttgggtattgc

SEQ ID NO: 4495137 - DNA, 25 bp, Homo sapien
tagatctatggattccagggctatc

SEQ ID NO: 4495138 - DNA, 25 bp, Homo sapien
tccagggctatcagcaacatgtctg

SEQ ID NO: 4495139 - DNA, 25 bp, Homo sapien
tctgggggcctttaattagcatgat

SEQ ID NO: 4495140 - DNA, 25 bp, Homo sapien
caggcaattgtttcaatggagtctg

SEQ ID NO: 4495141 - DNA, 25 bp, Homo sapien
gagtctgtgttgctcttggttggca

SEQ ID NO: 4495142 - DNA, 25 bp, Homo sapien
agcatgattgcagtgcaggcaattg

SEQ ID NO: 4495143 - DNA, 25 bp, Homo sapien
tagtgcatagcattgcaccaggtgc

SEQ ID NO: 4495144 - DNA, 25 bp, Homo sapien
gaaaagctgcctccactgctaatct

SEQ ID NO: 4495145 - DNA, 25 bp, Homo sapien
gcagttgtgcatgatgatctctatc

SEQ ID NO: 4495146 - DNA, 25 bp, Homo sapien
tgaaaagcactttgcctggaaagac

SEQ ID NO: 4495147 - DNA, 25 bp, Homo sapien
tgggcctctccaaatgggcaagttt

SEQ ID NO: 4495148 - DNA, 25 bp, Homo sapien
cctgtgatttccgtgctatttctgg

SEQ ID NO: 4495149 - DNA, 25 bp, Homo sapien
cctgcctgtgatttccgtgctattt

SEQ ID NO: 4495150 - DNA, 25 bp, Homo sapien
aagtttgccaaagctcggggtcaga

SEQ ID NO: 4495151 - DNA, 25 bp, Homo sapien
caagttgacctatttttggccgagt

SEQ ID NO: 4495152 - DNA, 25 bp, Homo sapien
ggcaatgtataagcttctgtcccca

SEQ ID NO: 4495153 - DNA, 25 bp, Homo sapien
cgcattggattctgctgagtcgagc

SEQ ID NO: 4495154 - DNA, 25 bp, Homo sapien
gatctgtagcttgatttgtcaccca

SEQ ID NO: 4495155 - DNA, 25 bp, Homo sapien
ctagagatgggcattggtggtgatg

SEQ ID NO: 4495156 - DNA, 25 bp, Homo sapien
gagatgggcattggtggtgatgcaa

SEQ ID NO: 4495157 - DNA, 25 bp, Homo sapien
tgggcattggtggtgatgcaagagc

SEQ ID NO: 4495158 - DNA, 25 bp, Homo sapien
gcattggtggtgatgcaagagctac

SEQ ID NO: 4495159 - DNA, 25 bp, Homo sapien
tctggctgttggcacttattacccc

SEQ ID NO: 4495160 - DNA, 25 bp, Homo sapien
ggctgttggcacttattacccctct

SEQ ID NO: 4495161 - DNA, 25 bp, Homo sapien
tctccatagaatcaagttcttgagg

SEQ ID NO: 4495162 - DNA, 25 bp, Homo sapien
ctctgaattctccatagaatcaagt

SEQ ID NO: 4495163 - DNA, 25 bp, Homo sapien
catttctcgcttcttgtgaattctt

SEQ ID NO: 4495164 - DNA, 25 bp, Homo sapien
tcatttctcgcttcttgtgaattct

SEQ ID NO: 4495165 - DNA, 25 bp, Homo sapien
ttcatttctcgcttcttgtgaattc

SEQ ID NO: 4495166 - DNA, 25 bp, Homo sapien
tttcatttctcgcttcttgtgaatt

SEQ ID NO: 4495167 - DNA, 25 bp, Homo sapien
cagtaagttgttcatggatgagggc

SEQ ID NO: 4495168 - DNA, 25 bp, Homo sapien
tgagggctggactgcttgctgcttt

SEQ ID NO: 4495169 - DNA, 25 bp, Homo sapien
agctctggactgcagtaagttgttc

SEQ ID NO: 4495170 - DNA, 25 bp, Homo sapien
aatcttaaggatgaacagggttctc

SEQ ID NO: 4495171 - DNA, 25 bp, Homo sapien
cagaagctcctgataccaggttatc

SEQ ID NO: 4495172 - DNA, 25 bp, Homo sapien
tctggtgtgttggaggcaagtttcc

SEQ ID NO: 4495173 - DNA, 25 bp, Homo sapien
tcagaataagtgtccccatggaagc

SEQ ID NO: 4495174 - DNA, 25 bp, Homo sapien
ttatccgcacagttgccagatggga

SEQ ID NO: 4495175 - DNA, 25 bp, Homo sapien
ggttcaatctgggcccagcaacacc

SEQ ID NO: 4495176 - DNA, 25 bp, Homo sapien
ctgtgtgcccaggttcaatctgggc

SEQ ID NO: 4495177 - DNA, 25 bp, Homo sapien
tgagccctgctaggccccctctgag

SEQ ID NO: 4495178 - DNA, 25 bp, Homo sapien
gcctcaatgacttgtctgtccatcc

SEQ ID NO: 4495179 - DNA, 25 bp, Homo sapien
agggacacaactgccacaagccgga

SEQ ID NO: 4495180 - DNA, 25 bp, Homo sapien
ccggacacgtgtaagtactgggatg

SEQ ID NO: 4495181 - DNA, 25 bp, Homo sapien
ggcatgactcgcatccctgtcattg

SEQ ID NO: 4495182 - DNA, 25 bp, Homo sapien
cgggcccgacactgtggtcattggc

SEQ ID NO: 4495183 - DNA, 25 bp, Homo sapien
gaatggtggtgtacccacaggtcct

SEQ ID NO: 4495184 - DNA, 25 bp, Homo sapien
ctgcattatgaaccctgagaagaac

SEQ ID NO: 4495185 - DNA, 25 bp, Homo sapien
ttctgcattatgaaccctgagaaga

SEQ ID NO: 4495186 - DNA, 25 bp, Homo sapien
tctgcattatgaaccctgagaagaa

SEQ ID NO: 4495187 - DNA, 25 bp, Homo sapien
attctcagaccccttgctgccggcc

SEQ ID NO: 4495188 - DNA, 25 bp, Homo sapien
cctgttgatgcctgggatggtctga

SEQ ID NO: 4495189 - DNA, 25 bp, Homo sapien
tctttggagaagtctgatggcatct

SEQ ID NO: 4495190 - DNA, 25 bp, Homo sapien
ctgaaatactgtctgtacaaagagt

SEQ ID NO: 4495191 - DNA, 25 bp, Homo sapien
aatagggacgcagtgaaattcagag

SEQ ID NO: 4495192 - DNA, 25 bp, Homo sapien
gcaacgtatattttgtaattgcctg

SEQ ID NO: 4495193 - DNA, 25 bp, Homo sapien
gtccttgccttgtagggatttatga

SEQ ID NO: 4495194 - DNA, 25 bp, Homo sapien
gatatccaggatagagtccttgcct

SEQ ID NO: 4495195 - DNA, 25 bp, Homo sapien
tcatcactttgatagcccgtcagga

SEQ ID NO: 4495196 - DNA, 25 bp, Homo sapien
gaatatgggactttgcccagccttg

SEQ ID NO: 4495197 - DNA, 25 bp, Homo sapien
caagatggcctaagattgattgacc

SEQ ID NO: 4495198 - DNA, 25 bp, Homo sapien
ccagaggacaagtggtttagcttca

SEQ ID NO: 4495199 - DNA, 25 bp, Homo sapien
gacaccaggaaaaacctgcatccca

SEQ ID NO: 4495200 - DNA, 25 bp, Homo sapien
ttaagagaggtgtggggccaaaggc

SEQ ID NO: 4495201 - DNA, 25 bp, Homo sapien
aaaaacctgcatcccacattctaca

SEQ ID NO: 4495202 - DNA, 25 bp, Homo sapien
gggccaaaggcttctttgcaagcct

SEQ ID NO: 4495203 - DNA, 25 bp, Homo sapien
catcagatccatggtcagattgctc

SEQ ID NO: 4495204 - DNA, 25 bp, Homo sapien
gtcagattgctcttgtcaaattcag

SEQ ID NO: 4495205 - DNA, 25 bp, Homo sapien
caaattcagagtgaagtacaggcat

SEQ ID NO: 4495206 - DNA, 25 bp, Homo sapien
tgtatgttgggcatcagatccatgg

SEQ ID NO: 4495207 - DNA, 25 bp, Homo sapien
tcaccaggagcttcccgttgctcca

SEQ ID NO: 4495208 - DNA, 25 bp, Homo sapien
tagtcaatagcaatgtagaaggacc

SEQ ID NO: 4495209 - DNA, 25 bp, Homo sapien
gaaggcactgatcatatttccctga

SEQ ID NO: 4495210 - DNA, 25 bp, Homo sapien
gctcccctgaggttgtagtcaatag

SEQ ID NO: 4495211 - DNA, 25 bp, Homo sapien
ccagatttgaaagccgctcaacaag

SEQ ID NO: 4495212 - DNA, 25 bp, Homo sapien
tgccagatttgaaagccgctcaaca

SEQ ID NO: 4495213 - DNA, 25 bp, Homo sapien
agccgctcaacaagggggtctcttt

SEQ ID NO: 4495214 - DNA, 25 bp, Homo sapien
gatgccagatttgaaagccgctcaa

SEQ ID NO: 4495215 - DNA, 25 bp, Homo sapien
acaccttgtggagggcagcacaagc

SEQ ID NO: 4495216 - DNA, 25 bp, Homo sapien
tgttgtgggcctgcattcaagatgc

SEQ ID NO: 4495217 - DNA, 25 bp, Homo sapien
gcagccacgggctgacccaccccac

SEQ ID NO: 4495218 - DNA, 25 bp, Homo sapien
ttcaagatgctcttagcagccacgg

SEQ ID NO: 4495219 - DNA, 25 bp, Homo sapien
gctatgattatatggatttcttccc

SEQ ID NO: 4495220 - DNA, 25 bp, Homo sapien
gaacgttttctgctagagagctaga

SEQ ID NO: 4495221 - DNA, 25 bp, Homo sapien
agtcttaaagtgctctgaactggaa

SEQ ID NO: 4495222 - DNA, 25 bp, Homo sapien
cctggtggtgggtaggaccatgatc

SEQ ID NO: 4495223 - DNA, 25 bp, Homo sapien
accaagcagagcctcaaaccacctg

SEQ ID NO: 4495224 - DNA, 25 bp, Homo sapien
gcttttcaaggttctaccttgctta

SEQ ID NO: 4495225 - DNA, 25 bp, Homo sapien
acagggaccatatgggcttttcaag

SEQ ID NO: 4495226 - DNA, 25 bp, Homo sapien
caccaagcagagcctcaaaccacct

SEQ ID NO: 4495227 - DNA, 25 bp, Homo sapien
ctgtttgtacataagagaggttccc

SEQ ID NO: 4495228 - DNA, 25 bp, Homo sapien
aagtttctagctggacttgtaccca

SEQ ID NO: 4495229 - DNA, 25 bp, Homo sapien
tctaataggaacttggctaatcaag

SEQ ID NO: 4495230 - DNA, 25 bp, Homo sapien
gggacagtcatccagatggcatctg

SEQ ID NO: 4495231 - DNA, 25 bp, Homo sapien
gacgtgcccattgaatatctagcct

SEQ ID NO: 4495232 - DNA, 25 bp, Homo sapien
gtctgacgtgcccattgaatatcta

SEQ ID NO: 4495233 - DNA, 25 bp, Homo sapien
gaatatctagccttgttctggggtg

SEQ ID NO: 4495234 - DNA, 25 bp, Homo sapien
ctacatgtctgacgtgcccattgaa

SEQ ID NO: 4495235 - DNA, 25 bp, Homo sapien
tagactctcaacagcgacctgtgag

SEQ ID NO: 4495236 - DNA, 25 bp, Homo sapien
tcacgggaggttccggtgtagctct

SEQ ID NO: 4495237 - DNA, 25 bp, Homo sapien
cagctgaggttgcaacatgttctgc

SEQ ID NO: 4495238 - DNA, 25 bp, Homo sapien
caaaatcctacgtgttctgtgccaa

SEQ ID NO: 4495239 - DNA, 25 bp, Homo sapien
gattggaagagccacgtcactgtgg

SEQ ID NO: 4495240 - DNA, 25 bp, Homo sapien
gactctgggtctttgctcctgcctt

SEQ ID NO: 4495241 - DNA, 25 bp, Homo sapien
tagccaaacctactgggacttcctg

SEQ ID NO: 4495242 - DNA, 25 bp, Homo sapien
taagtgatgtttggtcctcaggccc

SEQ ID NO: 4495243 - DNA, 25 bp, Homo sapien
aatgaagcagaatggaactcctggc

SEQ ID NO: 4495244 - DNA, 25 bp, Homo sapien
tccaatgaagcagaatggaactcct

SEQ ID NO: 4495245 - DNA, 25 bp, Homo sapien
gctgcttccaatgaagcagaatgga

SEQ ID NO: 4495246 - DNA, 25 bp, Homo sapien
agtgaagacgctgcttccaatgaag

SEQ ID NO: 4495247 - DNA, 25 bp, Homo sapien
gctcagaccagggacttcgggccat

SEQ ID NO: 4495248 - DNA, 25 bp, Homo sapien
agctcagaccagggacttcgggcca

SEQ ID NO: 4495249 - DNA, 25 bp, Homo sapien
gagctcagaccagggacttcgggcc

SEQ ID NO: 4495250 - DNA, 25 bp, Homo sapien
agtccacagttgagctcagaccagg

SEQ ID NO: 4495251 - DNA, 25 bp, Homo sapien
gcagggggacgtctttgtgcagtgc

SEQ ID NO: 4495252 - DNA, 25 bp, Homo sapien
ggcagggggacgtctttgtgcagtg

SEQ ID NO: 4495253 - DNA, 25 bp, Homo sapien
aatggagcactcatttactgtcccc

SEQ ID NO: 4495254 - DNA, 25 bp, Homo sapien
gcacccattgtagagttgcctgcat

SEQ ID NO: 4495255 - DNA, 25 bp, Homo sapien
aaaatggagcactcatttactgtcc

SEQ ID NO: 4495256 - DNA, 25 bp, Homo sapien
gtagagttgcctgcatgagaagcct

SEQ ID NO: 4495257 - DNA, 25 bp, Homo sapien
tcagatggcttgagcacgcatggcc

SEQ ID NO: 4495258 - DNA, 25 bp, Homo sapien
gcatggccgtgcaccaggttcccag

SEQ ID NO: 4495259 - DNA, 25 bp, Homo sapien
gggctgcatccaagttgtcctggaa

SEQ ID NO: 4495260 - DNA, 25 bp, Homo sapien
tcacatttagggctgaaggccagtt

SEQ ID NO: 4495261 - DNA, 25 bp, Homo sapien
attttgacggctttccctggttctg

SEQ ID NO: 4495262 - DNA, 25 bp, Homo sapien
cttccaaagtcagtcgtgctccaca

SEQ ID NO: 4495263 - DNA, 25 bp, Homo sapien
gtcgtgctccacattttgacggctt

SEQ ID NO: 4495264 - DNA, 25 bp, Homo sapien
aagtcagtcgtgctccacattttga

SEQ ID NO: 4495265 - DNA, 25 bp, Homo sapien
ttagcaggtactgtagccaaagcac

SEQ ID NO: 4495266 - DNA, 25 bp, Homo sapien
gtgcatgttttcagctcggctttgt

SEQ ID NO: 4495267 - DNA, 25 bp, Homo sapien
ttgtcctgccggccgctgtagcagc

SEQ ID NO: 4495268 - DNA, 25 bp, Homo sapien
caagccaaccttgtcctgccggccg

SEQ ID NO: 4495269 - DNA, 25 bp, Homo sapien
gctcggctttgttcagggagcctct

SEQ ID NO: 4495270 - DNA, 25 bp, Homo sapien
ttattgccataaatttccaggcact

SEQ ID NO: 4495271 - DNA, 25 bp, Homo sapien
ttgttattgccataaatttccaggc

SEQ ID NO: 4495272 - DNA, 25 bp, Homo sapien
ttttgttattgccataaatttccag

SEQ ID NO: 4495273 - DNA, 25 bp, Homo sapien
tgttattgccataaatttccaggca

SEQ ID NO: 4495274 - DNA, 25 bp, Homo sapien
caaagactccccatggattggggga

SEQ ID NO: 4495275 - DNA, 25 bp, Homo sapien
gatctgccacctgttctaccttgcg

SEQ ID NO: 4495276 - DNA, 25 bp, Homo sapien
gggagaagcatccgctgactagaaa

SEQ ID NO: 4495277 - DNA, 25 bp, Homo sapien
tgcgcggtggtgctgtttgcttaac

SEQ ID NO: 4495278 - DNA, 25 bp, Homo sapien
tgtcagcagaccacttaaggcatag

SEQ ID NO: 4495279 - DNA, 25 bp, Homo sapien
tactactgtggtgaagatataatct

SEQ ID NO: 4495280 - DNA, 25 bp, Homo sapien
catagggtgcataaatgtcctctgg

SEQ ID NO: 4495281 - DNA, 25 bp, Homo sapien
ttgggcattgcacccaaagggctgg

SEQ ID NO: 4495282 - DNA, 25 bp, Homo sapien
ccttgccatgatcctgtacttggga

SEQ ID NO: 4495283 - DNA, 25 bp, Homo sapien
tcctgtgttgtgatcccagggtcct

SEQ ID NO: 4495284 - DNA, 25 bp, Homo sapien
gatcccagggtcctcgtattctcct

SEQ ID NO: 4495285 - DNA, 25 bp, Homo sapien
cagggtcctcgtattctcctaacaa

SEQ ID NO: 4495286 - DNA, 25 bp, Homo sapien
aagagcagtgcaaggcggaaatgaa

SEQ ID NO: 4495287 - DNA, 25 bp, Homo sapien
ttgactacatttagcagggggtcgg

SEQ ID NO: 4495288 - DNA, 25 bp, Homo sapien
gcaaggcggaaatgaaactgggtaa

SEQ ID NO: 4495289 - DNA, 25 bp, Homo sapien
gggtcgggaaccaagagcagtgcaa

SEQ ID NO: 4495290 - DNA, 25 bp, Homo sapien
tgttatcacttgcaatggctctgga

SEQ ID NO: 4495291 - DNA, 25 bp, Homo sapien
cgcaacctgccgctgcaatgtggga

SEQ ID NO: 4495292 - DNA, 25 bp, Homo sapien
gaccgtacgagagggtgacaacgct

SEQ ID NO: 4495293 - DNA, 25 bp, Homo sapien
tagagtcattactgggcaaggcaag

SEQ ID NO: 4495294 - DNA, 25 bp, Homo sapien
ggatctcttagacagttgcatgaag

SEQ ID NO: 4495295 - DNA, 25 bp, Homo sapien
ttagacagttgcatgaagtgaggtg

SEQ ID NO: 4495296 - DNA, 25 bp, Homo sapien
tttaaaaggatctcttagacagttg

SEQ ID NO: 4495297 - DNA, 25 bp, Homo sapien
acgcccggccgctgatatctcttta

SEQ ID NO: 4495298 - DNA, 25 bp, Homo sapien
caggttggaaaaatttgacgtggca

SEQ ID NO: 4495299 - DNA, 25 bp, Homo sapien
catgacttgcattggagtaaccagc

SEQ ID NO: 4495300 - DNA, 25 bp, Homo sapien
tcttcgcatcttccatgacttgcat

SEQ ID NO: 4495301 - DNA, 25 bp, Homo sapien
accagcacagtttcaatggcacagg

SEQ ID NO: 4495302 - DNA, 25 bp, Homo sapien
actctcgtggcagctcttccagacg

SEQ ID NO: 4495303 - DNA, 25 bp, Homo sapien
tgagtcttcgggaattgtaagtttg

SEQ ID NO: 4495304 - DNA, 25 bp, Homo sapien
gacgctgagtcttcgggaattgtaa

SEQ ID NO: 4495305 - DNA, 25 bp, Homo sapien
tccagacgctgagtcttcgggaatt

SEQ ID NO: 4495306 - DNA, 25 bp, Homo sapien
gcagaaacctgtcaagtaaccggct

SEQ ID NO: 4495307 - DNA, 25 bp, Homo sapien
cagaaacctgtcaagtaaccggctc

SEQ ID NO: 4495308 - DNA, 25 bp, Homo sapien
tacagacctagaaggtctagaggtc

SEQ ID NO: 4495309 - DNA, 25 bp, Homo sapien
tagaaggtctagaggtctccctgat

SEQ ID NO: 4495310 - DNA, 25 bp, Homo sapien
tgctcatgtacagacctagaaggtc

SEQ ID NO: 4495311 - DNA, 25 bp, Homo sapien
ctgctcatgtacagacctagaaggt

SEQ ID NO: 4495312 - DNA, 25 bp, Homo sapien
cagcagcactggctttacttgtgat

SEQ ID NO: 4495313 - DNA, 25 bp, Homo sapien
tatatggataataccataaagggcc

SEQ ID NO: 4495314 - DNA, 25 bp, Homo sapien
cttgttcaatgcaggtaacaggtgc

SEQ ID NO: 4495315 - DNA, 25 bp, Homo sapien
tgccagaaactaacttgaaagtagt

SEQ ID NO: 4495316 - DNA, 25 bp, Homo sapien
caggtacgtattaggtctcccaaag

SEQ ID NO: 4495317 - DNA, 25 bp, Homo sapien
tattaggtctcccaaagcgtctgtg

SEQ ID NO: 4495318 - DNA, 25 bp, Homo sapien
gcctgcaggtacgtattaggtctcc

SEQ ID NO: 4495319 - DNA, 25 bp, Homo sapien
cagagcctgcaggtacgtattaggt

SEQ ID NO: 4495320 - DNA, 25 bp, Homo sapien
tgtctgtcctccagacgccctgtgg

SEQ ID NO: 4495321 - DNA, 25 bp, Homo sapien
ttctgaggccctgtaaaggtactgc

SEQ ID NO: 4495322 - DNA, 25 bp, Homo sapien
ccctgtaaaggtactgctcctggta

SEQ ID NO: 4495323 - DNA, 25 bp, Homo sapien
tcctggtacccttgtgaggcaggtg

SEQ ID NO: 4495324 - DNA, 25 bp, Homo sapien
tcgagcaggtggagatgaatcatgc

SEQ ID NO: 4495325 - DNA, 25 bp, Homo sapien
catgctgtgatatgtcgatgcagga

SEQ ID NO: 4495326 - DNA, 25 bp, Homo sapien
aatggagcctgatgatcgagcaggt

SEQ ID NO: 4495327 - DNA, 25 bp, Homo sapien
gatgattacacagagtgggtattta

SEQ ID NO: 4495328 - DNA, 25 bp, Homo sapien
accagcattattgaacttgggttgt

SEQ ID NO: 4495329 - DNA, 25 bp, Homo sapien
cttgggttgttctcagagtcctctg

SEQ ID NO: 4495330 - DNA, 25 bp, Homo sapien
tcctccaccagcattattgaacttg

SEQ ID NO: 4495331 - DNA, 25 bp, Homo sapien
gcattattgaacttgggttgttctc

SEQ ID NO: 4495332 - DNA, 25 bp, Homo sapien
cacccctaagctactgttgcgttaa

SEQ ID NO: 4495333 - DNA, 25 bp, Homo sapien
cattgcccctagtactgatgtcaga

SEQ ID NO: 4495334 - DNA, 25 bp, Homo sapien
gattggttgaactgtctcccacccc

SEQ ID NO: 4495335 - DNA, 25 bp, Homo sapien
taatcagtgtaattcttcctcatgc

SEQ ID NO: 4495336 - DNA, 25 bp, Homo sapien
tgggcatgttcccaaagagcagagg

SEQ ID NO: 4495337 - DNA, 25 bp, Homo sapien
tctcggacaccctttgggcatgttc

SEQ ID NO: 4495338 - DNA, 25 bp, Homo sapien
aaggatagtggccatctcggacacc

SEQ ID NO: 4495339 - DNA, 25 bp, Homo sapien
gtatttgttgtctgggtcaactcca

SEQ ID NO: 4495340 - DNA, 25 bp, Homo sapien
gctctacaccggacttcaaaagctg

SEQ ID NO: 4495341 - DNA, 25 bp, Homo sapien
gctgtgagtacacccggccacagag

SEQ ID NO: 4495342 - DNA, 25 bp, Homo sapien
gacacatagagaactggcgcagtct

SEQ ID NO: 4495343 - DNA, 25 bp, Homo sapien
tcaacgccgtggacatggagctcta

SEQ ID NO: 4495344 - DNA, 25 bp, Homo sapien
ccaagtggtgagtcataggagaact

SEQ ID NO: 4495345 - DNA, 25 bp, Homo sapien
ggcatctatgcactccttgaacctg

SEQ ID NO: 4495346 - DNA, 25 bp, Homo sapien
tccggaaatgtcagggcctcatctt

SEQ ID NO: 4495347 - DNA, 25 bp, Homo sapien
tcctcggaacctgctctgatgtggc

SEQ ID NO: 4495348 - DNA, 25 bp, Homo sapien
cctccacagcgggagtgggtttgta

SEQ ID NO: 4495349 - DNA, 25 bp, Homo sapien
gaattgcacagtcccttgggcattg

SEQ ID NO: 4495350 - DNA, 25 bp, Homo sapien
ctgtttctgattgaaccaggacacc

SEQ ID NO: 4495351 - DNA, 25 bp, Homo sapien
gacacccagattgagagcagagctg

SEQ ID NO: 4495352 - DNA, 25 bp, Homo sapien
tctgaatgcttactgagcgcagaac

SEQ ID NO: 4495353 - DNA, 25 bp, Homo sapien
aatgcttactgagcgcagaactgag

SEQ ID NO: 4495354 - DNA, 25 bp, Homo sapien
caaggtctgaatgcttactgagcgc

SEQ ID NO: 4495355 - DNA, 25 bp, Homo sapien
tctgcaaggtctgaatgcttactga

SEQ ID NO: 4495356 - DNA, 25 bp, Homo sapien
tgaggtttctgctttagagaatggg

SEQ ID NO: 4495357 - DNA, 25 bp, Homo sapien
gaatggggcattctgcctgttgctg

SEQ ID NO: 4495358 - DNA, 25 bp, Homo sapien
tgttgctgccaactatgacttcaca

SEQ ID NO: 4495359 - DNA, 25 bp, Homo sapien
gttctttgaggtttctgctttagag

SEQ ID NO: 4495360 - DNA, 25 bp, Homo sapien
agatgggcttgaatggaaacttgca

SEQ ID NO: 4495361 - DNA, 25 bp, Homo sapien
ggtgtggatgctctccttggcaaca

SEQ ID NO: 4495362 - DNA, 25 bp, Homo sapien
gaatcctaggacaggaacaggtctg

SEQ ID NO: 4495363 - DNA, 25 bp, Homo sapien
caggcagcctctgaggaatcctagg

SEQ ID NO: 4495364 - DNA, 25 bp, Homo sapien
ggtcacactcagcctttggacacac

SEQ ID NO: 4495365 - DNA, 25 bp, Homo sapien
tcatgggtcacactcagcctttgga

SEQ ID NO: 4495366 - DNA, 25 bp, Homo sapien
catgggtcacactcagcctttggac

SEQ ID NO: 4495367 - DNA, 25 bp, Homo sapien
tgggtcacactcagcctttggacac

SEQ ID NO: 4495368 - DNA, 25 bp, Homo sapien
gggatgggctgtttggaagggatgt

SEQ ID NO: 4495369 - DNA, 25 bp, Homo sapien
ctcctgtttctgacattgccacttc

SEQ ID NO: 4495370 - DNA, 25 bp, Homo sapien
gccacttccttggttatgatccagg

SEQ ID NO: 4495371 - DNA, 25 bp, Homo sapien
cttggttatgatccaggcatgctgg

SEQ ID NO: 4495372 - DNA, 25 bp, Homo sapien
aggaggccagcacagttagaggggt

SEQ ID NO: 4495373 - DNA, 25 bp, Homo sapien
cagcacagttagaggggtctgaggc

SEQ ID NO: 4495374 - DNA, 25 bp, Homo sapien
gaggccagcacagttagaggggtct

SEQ ID NO: 4495375 - DNA, 25 bp, Homo sapien
ggccagcacagttagaggggtctga

SEQ ID NO: 4495376 - DNA, 25 bp, Homo sapien
ggaacaactgcttgagatacaggac

SEQ ID NO: 4495377 - DNA, 25 bp, Homo sapien
ctctctgttttggaatcgggctgct

SEQ ID NO: 4495378 - DNA, 25 bp, Homo sapien
tccgcgaggaagatagatcaggtca

SEQ ID NO: 4495379 - DNA, 25 bp, Homo sapien
caccacctgggagagttgttcctgc

SEQ ID NO: 4495380 - DNA, 25 bp, Homo sapien
tggatttttgctctgccaatggcag

SEQ ID NO: 4495381 - DNA, 25 bp, Homo sapien
ctgactcagtatagggtgaggatgg

SEQ ID NO: 4495382 - DNA, 25 bp, Homo sapien
cagagtgggacatactgctggccat

SEQ ID NO: 4495383 - DNA, 25 bp, Homo sapien
tggagttggactccactcagtgtgg

SEQ ID NO: 4495384 - DNA, 25 bp, Homo sapien
cctgcaatgtctcagcgtgggcatc

SEQ ID NO: 4495385 - DNA, 25 bp, Homo sapien
caatgtctcagcgtgggcatcggtg

SEQ ID NO: 4495386 - DNA, 25 bp, Homo sapien
aatgtctcagcgtgggcatcggtgc

SEQ ID NO: 4495387 - DNA, 25 bp, Homo sapien
tgcaatgtctcagcgtgggcatcgg

SEQ ID NO: 4495388 - DNA, 25 bp, Homo sapien
tgaactgggatttgtcaaggaagcc

SEQ ID NO: 4495389 - DNA, 25 bp, Homo sapien
tgcttaggtccatcccgggtgacag

SEQ ID NO: 4495390 - DNA, 25 bp, Homo sapien
tgaatatctgcacgagggagacagt

SEQ ID NO: 4495391 - DNA, 25 bp, Homo sapien
taacgctggaatgaatgcctacacg

SEQ ID NO: 4495392 - DNA, 25 bp, Homo sapien
cctttgaggtttcggtcattcttct

SEQ ID NO: 4495393 - DNA, 25 bp, Homo sapien
tgaggtttcggtcattcttctgagt

SEQ ID NO: 4495394 - DNA, 25 bp, Homo sapien
tttgaggtttcggtcattcttctga

SEQ ID NO: 4495395 - DNA, 25 bp, Homo sapien
gcctttgaggtttcggtcattcttc

SEQ ID NO: 4495396 - DNA, 25 bp, Homo sapien
cctggccggctggtcaaggacattc

SEQ ID NO: 4495397 - DNA, 25 bp, Homo sapien
cggctggtcaaggacattccactcg

SEQ ID NO: 4495398 - DNA, 25 bp, Homo sapien
cactgtccgccctgggggccgtgtg

SEQ ID NO: 4495399 - DNA, 25 bp, Homo sapien
gacattccactcggctgatttggaa

SEQ ID NO: 4495400 - DNA, 25 bp, Homo sapien
ttctgcctctgagcgtgtgggcaga

SEQ ID NO: 4495401 - DNA, 25 bp, Homo sapien
acaagcccacccttgttgcccacgg

SEQ ID NO: 4495402 - DNA, 25 bp, Homo sapien
tcttgtccctggtgcagtcttcgcc

SEQ ID NO: 4495403 - DNA, 25 bp, Homo sapien
cgcagtctctggcccttgcaaaact

SEQ ID NO: 4495404 - DNA, 25 bp, Homo sapien
gagcatcctgatctgaacttggggc

SEQ ID NO: 4495405 - DNA, 25 bp, Homo sapien
actgtatcatccttaggacgagagg

SEQ ID NO: 4495406 - DNA, 25 bp, Homo sapien
ggcccaggcctcttgtcttacatta

SEQ ID NO: 4495407 - DNA, 25 bp, Homo sapien
ttgtcttacattatctgcaccagct

SEQ ID NO: 4495408 - DNA, 25 bp, Homo sapien
gaagcagtgtcacaggccagataac

SEQ ID NO: 4495409 - DNA, 25 bp, Homo sapien
tgggcagtgcgtttctgctgtagaa

SEQ ID NO: 4495410 - DNA, 25 bp, Homo sapien
tcacaggccagataacagcatgggt

SEQ ID NO: 4495411 - DNA, 25 bp, Homo sapien
tgggtgagaataatgacagtcgtga

SEQ ID NO: 4495412 - DNA, 25 bp, Homo sapien
ttcccagagtcgcagcactcctggt

SEQ ID NO: 4495413 - DNA, 25 bp, Homo sapien
ccagagtcgcagcactcctggtagg

SEQ ID NO: 4495414 - DNA, 25 bp, Homo sapien
gagtcgcagcactcctggtaggtac

SEQ ID NO: 4495415 - DNA, 25 bp, Homo sapien
cagagtcgcagcactcctggtaggt

SEQ ID NO: 4495416 - DNA, 25 bp, Homo sapien
ccatccagtcggcacttcctgggat

SEQ ID NO: 4495417 - DNA, 25 bp, Homo sapien
tggcctgtttcttatccactcacac

SEQ ID NO: 4495418 - DNA, 25 bp, Homo sapien
caccttgtggactgctcgtggcctg

SEQ ID NO: 4495419 - DNA, 25 bp, Homo sapien
tgggatctaccctgagggatgctct

SEQ ID NO: 4495420 - DNA, 25 bp, Homo sapien
ggtctgtaggtagaatcgggcctct

SEQ ID NO: 4495421 - DNA, 25 bp, Homo sapien
ccaggtctgtaggtagaatcgggcc

SEQ ID NO: 4495422 - DNA, 25 bp, Homo sapien
ttctcaccaggtctgtaggtagaat

SEQ ID NO: 4495423 - DNA, 25 bp, Homo sapien
catccccactcttctcaccaggtct

SEQ ID NO: 4495424 - DNA, 25 bp, Homo sapien
tttgccatgagaagaaggcttggtc

SEQ ID NO: 4495425 - DNA, 25 bp, Homo sapien
ctcctttgccatgagaagaaggctt

SEQ ID NO: 4495426 - DNA, 25 bp, Homo sapien
tgccatgagaagaaggcttggtccc

SEQ ID NO: 4495427 - DNA, 25 bp, Homo sapien
ccatgagaagaaggcttggtcccac

SEQ ID NO: 4495428 - DNA, 25 bp, Homo sapien
tttagctgcgagtcctgcttgctga

SEQ ID NO: 4495429 - DNA, 25 bp, Homo sapien
tctctcccacaatggtttagctgcg

SEQ ID NO: 4495430 - DNA, 25 bp, Homo sapien
gtactgactgcgtgggtccagcgac

SEQ ID NO: 4495431 - DNA, 25 bp, Homo sapien
agtgtccactgtctgcggcagggta

SEQ ID NO: 4495432 - DNA, 25 bp, Homo sapien
tcatgtgcaagggatagatgaatgc

SEQ ID NO: 4495433 - DNA, 25 bp, Homo sapien
atgccactcgaagagggcctggtcc

SEQ ID NO: 4495434 - DNA, 25 bp, Homo sapien
tgtgcaagggatagatgaatgccac

SEQ ID NO: 4495435 - DNA, 25 bp, Homo sapien
tagatgaatgccactcgaagagggc

SEQ ID NO: 4495436 - DNA, 25 bp, Homo sapien
ctttgagaggttctttgttgcccag

SEQ ID NO: 4495437 - DNA, 25 bp, Homo sapien
gagaggttctttgttgcccagaccc

SEQ ID NO: 4495438 - DNA, 25 bp, Homo sapien
gaggttctttgttgcccagacccat

SEQ ID NO: 4495439 - DNA, 25 bp, Homo sapien
ttgagaggttctttgttgcccagac

SEQ ID NO: 4495440 - DNA, 25 bp, Homo sapien
ccacttgcccccaaggtgtagttga

SEQ ID NO: 4495441 - DNA, 25 bp, Homo sapien
cacttgcccccaaggtgtagttgag

SEQ ID NO: 4495442 - DNA, 25 bp, Homo sapien
cacccctgatgtggtgcctggttct

SEQ ID NO: 4495443 - DNA, 25 bp, Homo sapien
ccttgtcctggtgcttggttctctg

SEQ ID NO: 4495444 - DNA, 25 bp, Homo sapien
aacctgccttgacctgcgtgatcca

SEQ ID NO: 4495445 - DNA, 25 bp, Homo sapien
ccctaagggctggacttgacctgaa

SEQ ID NO: 4495446 - DNA, 25 bp, Homo sapien
agggcagcccgttggaggaatcttc

SEQ ID NO: 4495447 - DNA, 25 bp, Homo sapien
agcagggcagcccgttggaggaatc

SEQ ID NO: 4495448 - DNA, 25 bp, Homo sapien
ctcgggctttgcccttagcagggca

SEQ ID NO: 4495449 - DNA, 25 bp, Homo sapien
tcgggctttgcccttagcagggcag

SEQ ID NO: 4495450 - DNA, 25 bp, Homo sapien
gagggctgtggatatagggcagccc

SEQ ID NO: 4495451 - DNA, 25 bp, Homo sapien
cttctccccagtgcgctgggtggag

SEQ ID NO: 4495452 - DNA, 25 bp, Homo sapien
gttctcggcagaaaagtcagagggc

SEQ ID NO: 4495453 - DNA, 25 bp, Homo sapien
gctgtggatatagggcagcccttct

SEQ ID NO: 4495454 - DNA, 25 bp, Homo sapien
tattggagagtctctgatgggccag

SEQ ID NO: 4495455 - DNA, 25 bp, Homo sapien
ccattgtcgttctaggatgtgtgca

SEQ ID NO: 4495456 - DNA, 25 bp, Homo sapien
tgcacctggaaatcgacctctggag

SEQ ID NO: 4495457 - DNA, 25 bp, Homo sapien
tgctgagagtgcacggcagattccg

SEQ ID NO: 4495458 - DNA, 25 bp, Homo sapien
gcttcagttgaagcccgtgccttgc

SEQ ID NO: 4495459 - DNA, 25 bp, Homo sapien
ggctgtaatgtttcgagatccttcc

SEQ ID NO: 4495460 - DNA, 25 bp, Homo sapien
tggtaaggtcacttgccccagacac

SEQ ID NO: 4495461 - DNA, 25 bp, Homo sapien
ccagggtatagcttgggcacactct

SEQ ID NO: 4495462 - DNA, 25 bp, Homo sapien
gctggtattgactgagctcgagaag

SEQ ID NO: 4495463 - DNA, 25 bp, Homo sapien
ttgactgagctcgagaagagcccag

SEQ ID NO: 4495464 - DNA, 25 bp, Homo sapien
actgagctcgagaagagcccagatt

SEQ ID NO: 4495465 - DNA, 25 bp, Homo sapien
gagagagggcggagagtcacgctta

SEQ ID NO: 4495466 - DNA, 25 bp, Homo sapien
cgtaaggctcggagcacttgtacat

SEQ ID NO: 4495467 - DNA, 25 bp, Homo sapien
tgcgtttcgtaaggctcggagcact

SEQ ID NO: 4495468 - DNA, 25 bp, Homo sapien
tttcgtaaggctcggagcacttgta

SEQ ID NO: 4495469 - DNA, 25 bp, Homo sapien
ccgtgcgtttcgtaaggctcggagc

SEQ ID NO: 4495470 - DNA, 25 bp, Homo sapien
gctggcgtggcgcttgccaaaatat

SEQ ID NO: 4495471 - DNA, 25 bp, Homo sapien
agcgcagccctttcgacccctgttt

SEQ ID NO: 4495472 - DNA, 25 bp, Homo sapien
cgagaagccggcctctgacggtgct

SEQ ID NO: 4495473 - DNA, 25 bp, Homo sapien
ggccatttctcttgcacgcacagct

SEQ ID NO: 4495474 - DNA, 25 bp, Homo sapien
tcccggatgagatctgagctctcgt

SEQ ID NO: 4495475 - DNA, 25 bp, Homo sapien
gagctctcgtcgaaagctgcacctg

SEQ ID NO: 4495476 - DNA, 25 bp, Homo sapien
ttctttcccggatgagatctgagct

SEQ ID NO: 4495477 - DNA, 25 bp, Homo sapien
tgagatctgagctctcgtcgaaagc

SEQ ID NO: 4495478 - DNA, 25 bp, Homo sapien
ctggtgggagggcaaaatgccagtc

SEQ ID NO: 4495479 - DNA, 25 bp, Homo sapien
tgctggtgggagggcaaaatgccag

SEQ ID NO: 4495480 - DNA, 25 bp, Homo sapien
gagacaaggccataatggcgacggg

SEQ ID NO: 4495481 - DNA, 25 bp, Homo sapien
aaatgccagtctggagacaaggcca

SEQ ID NO: 4495482 - DNA, 25 bp, Homo sapien
tgtctgctcgcctgtaaagggtttc

SEQ ID NO: 4495483 - DNA, 25 bp, Homo sapien
gaaagattgcattcgaatcttggga

SEQ ID NO: 4495484 - DNA, 25 bp, Homo sapien
aacccttggtactggaaggtgtctg

SEQ ID NO: 4495485 - DNA, 25 bp, Homo sapien
ctgtctggtgaaagattgcattcga

SEQ ID NO: 4495486 - DNA, 25 bp, Homo sapien
gttagtggataaaggctgctggggc

SEQ ID NO: 4495487 - DNA, 25 bp, Homo sapien
ctgttagtggataaaggctgctggg

SEQ ID NO: 4495488 - DNA, 25 bp, Homo sapien
gtggataaaggctgctggggcctcc

SEQ ID NO: 4495489 - DNA, 25 bp, Homo sapien
ttagtggataaaggctgctggggcc

SEQ ID NO: 4495490 - DNA, 25 bp, Homo sapien
aagagcttcatggcggcattgtgtt

SEQ ID NO: 4495491 - DNA, 25 bp, Homo sapien
cccagggacccgagattcactgaac

SEQ ID NO: 4495492 - DNA, 25 bp, Homo sapien
tctggcagcacaccactttggggtc

SEQ ID NO: 4495493 - DNA, 25 bp, Homo sapien
gacccattgcaccaacttgccaggg

SEQ ID NO: 4495494 - DNA, 25 bp, Homo sapien
aaaacaggagctgctaatctttctg

SEQ ID NO: 4495495 - DNA, 25 bp, Homo sapien
gaagtgtgtggcggcacatataact

SEQ ID NO: 4495496 - DNA, 25 bp, Homo sapien
acaggagctgctaatctttctgctt

SEQ ID NO: 4495497 - DNA, 25 bp, Homo sapien
ttctagaaaccccttgatatttgcc

SEQ ID NO: 4495498 - DNA, 25 bp, Homo sapien
ggactggaaactttcagtggacttg

SEQ ID NO: 4495499 - DNA, 25 bp, Homo sapien
aagttgaaagcaaagtgagctggct

SEQ ID NO: 4495500 - DNA, 25 bp, Homo sapien
tcagtggacttggaagttgaaagca

SEQ ID NO: 4495501 - DNA, 25 bp, Homo sapien
gaaatgtctagtatcttctttcttc

SEQ ID NO: 4495502 - DNA, 25 bp, Homo sapien
gagatgcttaaagagctgatgtcat

SEQ ID NO: 4495503 - DNA, 25 bp, Homo sapien
gaattttgtgttccttggagagaga

SEQ ID NO: 4495504 - DNA, 25 bp, Homo sapien
gagagatgcttaaagagctgatgtc

SEQ ID NO: 4495505 - DNA, 25 bp, Homo sapien
ggagagagatgcttaaagagctgat

SEQ ID NO: 4495506 - DNA, 25 bp, Homo sapien
aacaccaaaaattgctgtactctgc

SEQ ID NO: 4495507 - DNA, 25 bp, Homo sapien
caaaaattgctgtactctgctggat

SEQ ID NO: 4495508 - DNA, 25 bp, Homo sapien
aatccatttcggaaacgaggcagga

SEQ ID NO: 4495509 - DNA, 25 bp, Homo sapien
gatggagaggtcattatatttgcct

SEQ ID NO: 4495510 - DNA, 25 bp, Homo sapien
ggagcctcgggcagagacttcaaca

SEQ ID NO: 4495511 - DNA, 25 bp, Homo sapien
atgcgctgccactcccatgtgggtc

SEQ ID NO: 4495512 - DNA, 25 bp, Homo sapien
gggcctagaatcttctctctgaaat

SEQ ID NO: 4495513 - DNA, 25 bp, Homo sapien
gaaaccacaagctgtcagacaagtg

SEQ ID NO: 4495514 - DNA, 25 bp, Homo sapien
ggctccaggcatgtctgcagaagat

SEQ ID NO: 4495515 - DNA, 25 bp, Homo sapien
caggctccaggcatgtctgcagaag

SEQ ID NO: 4495516 - DNA, 25 bp, Homo sapien
tccaggcatgtctgcagaagatcag

SEQ ID NO: 4495517 - DNA, 25 bp, Homo sapien
ggcatgtctgcagaagatcagctcc

SEQ ID NO: 4495518 - DNA, 25 bp, Homo sapien
gactctgtgtaaatatatggccctg

SEQ ID NO: 4495519 - DNA, 25 bp, Homo sapien
tgaggtcagacagatgcaagtttgc

SEQ ID NO: 4495520 - DNA, 25 bp, Homo sapien
gacagagttttgacaggctggagct

SEQ ID NO: 4495521 - DNA, 25 bp, Homo sapien
tcttctttaacaaggagctggacca

SEQ ID NO: 4495522 - DNA, 25 bp, Homo sapien
accaggtacatctttctaagtcaag

SEQ ID NO: 4495523 - DNA, 25 bp, Homo sapien
catctttctaagtcaagaaacttcc

SEQ ID NO: 4495524 - DNA, 25 bp, Homo sapien
tctttctaagtcaagaaacttcctc

SEQ ID NO: 4495525 - DNA, 25 bp, Homo sapien
ggtacatctttctaagtcaagaaac

SEQ ID NO: 4495526 - DNA, 25 bp, Homo sapien
tctgttccttctccctttgtctctt

SEQ ID NO: 4495527 - DNA, 25 bp, Homo sapien
ttctccctttgtctctttccagtct

SEQ ID NO: 4495528 - DNA, 25 bp, Homo sapien
tccctttgtctctttccagtcttca

SEQ ID NO: 4495529 - DNA, 25 bp, Homo sapien
ccctttgtctctttccagtcttcat

SEQ ID NO: 4495530 - DNA, 25 bp, Homo sapien
gcatcaggctgtgggaagttctgaa

SEQ ID NO: 4495531 - DNA, 25 bp, Homo sapien
ggctttttccgttcactcactgagc

SEQ ID NO: 4495532 - DNA, 25 bp, Homo sapien
ctttttccgttcactcactgagcgc

SEQ ID NO: 4495533 - DNA, 25 bp, Homo sapien
tctgaataatgaatgctgcagagag

SEQ ID NO: 4495534 - DNA, 25 bp, Homo sapien
tgggatcggggatgatgagtctgga

SEQ ID NO: 4495535 - DNA, 25 bp, Homo sapien
cttgggatcggggatgatgagtctg

SEQ ID NO: 4495536 - DNA, 25 bp, Homo sapien
ttgggatcggggatgatgagtctgg

SEQ ID NO: 4495537 - DNA, 25 bp, Homo sapien
gggatcggggatgatgagtctggag

SEQ ID NO: 4495538 - DNA, 25 bp, Homo sapien
ctacacatctttttcccccagcggg

SEQ ID NO: 4495539 - DNA, 25 bp, Homo sapien
acacatctttttcccccagcgggtg

SEQ ID NO: 4495540 - DNA, 25 bp, Homo sapien
tccttctcccactgaagtaggttac

SEQ ID NO: 4495541 - DNA, 25 bp, Homo sapien
ccttttccttctcccactgaagtag

SEQ ID NO: 4495542 - DNA, 25 bp, Homo sapien
tcattgatggtcatgctcctctcca

SEQ ID NO: 4495543 - DNA, 25 bp, Homo sapien
aaggctttgtggttcattgatggtc

SEQ ID NO: 4495544 - DNA, 25 bp, Homo sapien
cagcagcagtcgcaaatggatgcta

SEQ ID NO: 4495545 - DNA, 25 bp, Homo sapien
aaatggatgctaaaaggctttgtgg

SEQ ID NO: 4495546 - DNA, 25 bp, Homo sapien
ccggatggattcgatggctatttct

SEQ ID NO: 4495547 - DNA, 25 bp, Homo sapien
agctgttctgggaaatttggttccg

SEQ ID NO: 4495548 - DNA, 25 bp, Homo sapien
cagctgttctgggaaatttggttcc

SEQ ID NO: 4495549 - DNA, 25 bp, Homo sapien
ccaccctggtcttgcggtgtttcaa

SEQ ID NO: 4495550 - DNA, 25 bp, Homo sapien
agctgcccacacgtgacgccattaa

SEQ ID NO: 4495551 - DNA, 25 bp, Homo sapien
cacacgtgacgccattaaggaaggc

SEQ ID NO: 4495552 - DNA, 25 bp, Homo sapien
gccattaaggaaggccaccctggtc

SEQ ID NO: 4495553 - DNA, 25 bp, Homo sapien
gggagtacagggcaccacgcattgc

SEQ ID NO: 4495554 - DNA, 25 bp, Homo sapien
cgcattgcttggttctgttggagga

SEQ ID NO: 4495555 - DNA, 25 bp, Homo sapien
agggatggagctatgcaccaagctg

SEQ ID NO: 4495556 - DNA, 25 bp, Homo sapien
gatgaaggataagggtacgtggagt

SEQ ID NO: 4495557 - DNA, 25 bp, Homo sapien
tcctccttgatcctttttgcagctt

SEQ ID NO: 4495558 - DNA, 25 bp, Homo sapien
gtggactcgtatctaacaagggctg

SEQ ID NO: 4495559 - DNA, 25 bp, Homo sapien
ctgaggctgccgtggactcgtatct

SEQ ID NO: 4495560 - DNA, 25 bp, Homo sapien
ggagagagtcggctgaggctgccgt

SEQ ID NO: 4495561 - DNA, 25 bp, Homo sapien
agcacagccaccagttaatggatct

SEQ ID NO: 4495562 - DNA, 25 bp, Homo sapien
gcctgcagcggccaccctcgcagct

SEQ ID NO: 4495563 - DNA, 25 bp, Homo sapien
ctggtggttgcataggccagcagct

SEQ ID NO: 4495564 - DNA, 25 bp, Homo sapien
agcggccaccctcgcagctcggctt

SEQ ID NO: 4495565 - DNA, 25 bp, Homo sapien
aatatgggtaaaattggggcatgtg

SEQ ID NO: 4495566 - DNA, 25 bp, Homo sapien
tgaatatgggtaaaattggggcatg

SEQ ID NO: 4495567 - DNA, 25 bp, Homo sapien
tatgggtaaaattggggcatgtggg

SEQ ID NO: 4495568 - DNA, 25 bp, Homo sapien
cttgaatatgggtaaaattggggca

SEQ ID NO: 4495569 - DNA, 25 bp, Homo sapien
gctgggacgtggttcatctcttgca

SEQ ID NO: 4495570 - DNA, 25 bp, Homo sapien
tgctgggacgtggttcatctcttgc

SEQ ID NO: 4495571 - DNA, 25 bp, Homo sapien
agctctcctagatcccggggcctga

SEQ ID NO: 4495572 - DNA, 25 bp, Homo sapien
ctgctgggacgtggttcatctcttg

SEQ ID NO: 4495573 - DNA, 25 bp, Homo sapien
gatacatttaggatacatttatata

SEQ ID NO: 4495574 - DNA, 25 bp, Homo sapien
tggattgtatgtatagacttttttg

SEQ ID NO: 4495575 - DNA, 25 bp, Homo sapien
attagctattccccaaccttgttat

SEQ ID NO: 4495576 - DNA, 25 bp, Homo sapien
tattttaacagttgcatggtaaccc

SEQ ID NO: 4495577 - DNA, 25 bp, Homo sapien
tgtgcgtttgtcacatagctctcgt

SEQ ID NO: 4495578 - DNA, 25 bp, Homo sapien
cgtttgtcacatagctctcgtgcct

SEQ ID NO: 4495579 - DNA, 25 bp, Homo sapien
cttgtgcgtttgtcacatagctctc

SEQ ID NO: 4495580 - DNA, 25 bp, Homo sapien
tgcgtttgtcacatagctctcgtgc

SEQ ID NO: 4495581 - DNA, 25 bp, Homo sapien
ttcacttctgtggctaaggttatca

SEQ ID NO: 4495582 - DNA, 25 bp, Homo sapien
tggaatccaagggcccacgcagtca

SEQ ID NO: 4495583 - DNA, 25 bp, Homo sapien
ggaatccaagggcccacgcagtcat

SEQ ID NO: 4495584 - DNA, 25 bp, Homo sapien
tcacttctgtggctaaggttatcaa

SEQ ID NO: 4495585 - DNA, 25 bp, Homo sapien
cattctgtggcggtgtcagggagtt

SEQ ID NO: 4495586 - DNA, 25 bp, Homo sapien
ccaagactgggagttgttaggttgc

SEQ ID NO: 4495587 - DNA, 25 bp, Homo sapien
gtttgtctgtctgccaagactggga

SEQ ID NO: 4495588 - DNA, 25 bp, Homo sapien
agactgggagttgttaggttgccca

SEQ ID NO: 4495589 - DNA, 25 bp, Homo sapien
gcccaggaccgtctctgcttgtaga

SEQ ID NO: 4495590 - DNA, 25 bp, Homo sapien
tctgcttgtagacacggagcacaac

SEQ ID NO: 4495591 - DNA, 25 bp, Homo sapien
ggctctctatcctcacatgccagag

SEQ ID NO: 4495592 - DNA, 25 bp, Homo sapien
ccagcatgtcttgctgctgacattg

SEQ ID NO: 4495593 - DNA, 25 bp, Homo sapien
tggaggctaatagcacagatccttt

SEQ ID NO: 4495594 - DNA, 25 bp, Homo sapien
tcagtgaagggcatggaggctaata

SEQ ID NO: 4495595 - DNA, 25 bp, Homo sapien
gggtagagcgcagggacagattttc

SEQ ID NO: 4495596 - DNA, 25 bp, Homo sapien
tcttaaggagttgcatatgagggtg

SEQ ID NO: 4495597 - DNA, 25 bp, Homo sapien
tgagtggaagtcaacaatccttttc

SEQ ID NO: 4495598 - DNA, 25 bp, Homo sapien
tccacatctttgagtggaagtcaac

SEQ ID NO: 4495599 - DNA, 25 bp, Homo sapien
ccaagagggcctggtcattgtaaca

SEQ ID NO: 4495600 - DNA, 25 bp, Homo sapien
tccttggtccggagattccacatct

SEQ ID NO: 4495601 - DNA, 25 bp, Homo sapien
tgtccatcatagtctgctctgcgct

SEQ ID NO: 4495602 - DNA, 25 bp, Homo sapien
tgggaagtctttctgatctggagag

SEQ ID NO: 4495603 - DNA, 25 bp, Homo sapien
gctctgcgctgagatgtctgcttct

SEQ ID NO: 4495604 - DNA, 25 bp, Homo sapien
caggtaagtcttttagttcagtgga

SEQ ID NO: 4495605 - DNA, 25 bp, Homo sapien
attatgctgcttgccggagccaagc

SEQ ID NO: 4495606 - DNA, 25 bp, Homo sapien
gagttctcgagtcctgcattatgct

SEQ ID NO: 4495607 - DNA, 25 bp, Homo sapien
taaggtggtgctgatccagttgaca

SEQ ID NO: 4495608 - DNA, 25 bp, Homo sapien
ggatgagcagctgttatcaaagcca

SEQ ID NO: 4495609 - DNA, 25 bp, Homo sapien
tcctgattacattcattcccgtgat

SEQ ID NO: 4495610 - DNA, 25 bp, Homo sapien
tatcctgattacattcattcccgtg

SEQ ID NO: 4495611 - DNA, 25 bp, Homo sapien
gatatcctgattacattcattcccg

SEQ ID NO: 4495612 - DNA, 25 bp, Homo sapien
cctgattacattcattcccgtgatg

SEQ ID NO: 4495613 - DNA, 25 bp, Homo sapien
aatcttgccaggatagcaggaggcc

SEQ ID NO: 4495614 - DNA, 25 bp, Homo sapien
gcaatcttgccaggatagcaggagg

SEQ ID NO: 4495615 - DNA, 25 bp, Homo sapien
caatcttgccaggatagcaggaggc

SEQ ID NO: 4495616 - DNA, 25 bp, Homo sapien
tggcaatcttgccaggatagcagga

SEQ ID NO: 4495617 - DNA, 25 bp, Homo sapien
ttcaggtggcagaagggtcttctga

SEQ ID NO: 4495618 - DNA, 25 bp, Homo sapien
gctctcccacacatgagtagctgcc

SEQ ID NO: 4495619 - DNA, 25 bp, Homo sapien
tgccagagactgtccaaacggagtt

SEQ ID NO: 4495620 - DNA, 25 bp, Homo sapien
ctgccagagactgtccaaacggagt

SEQ ID NO: 4495621 - DNA, 25 bp, Homo sapien
gttaactgcaatctcattctgtctc

SEQ ID NO: 4495622 - DNA, 25 bp, Homo sapien
tactttcatctcatatcctgttcgg

SEQ ID NO: 4495623 - DNA, 25 bp, Homo sapien
tacaagtggcaaatactcggattca

SEQ ID NO: 4495624 - DNA, 25 bp, Homo sapien
tcggattcatccctgtgtccccgga

SEQ ID NO: 4495625 - DNA, 25 bp, Homo sapien
cttctggctgcccccacactgctcc

SEQ ID NO: 4495626 - DNA, 25 bp, Homo sapien
gctgcccccacactgctccagctcc

SEQ ID NO: 4495627 - DNA, 25 bp, Homo sapien
ggctgcccccacactgctccagctc

SEQ ID NO: 4495628 - DNA, 25 bp, Homo sapien
tctggctgcccccacactgctccag

SEQ ID NO: 4495629 - DNA, 25 bp, Homo sapien
cctctcaaataatatcttaaggttt

SEQ ID NO: 4495630 - DNA, 25 bp, Homo sapien
ttaaggtttaagaaagcatcctgca

SEQ ID NO: 4495631 - DNA, 25 bp, Homo sapien
tttcttgcttagaaaggccttgccc

SEQ ID NO: 4495632 - DNA, 25 bp, Homo sapien
ggtttaagaaagcatcctgcatttt

SEQ ID NO: 4495633 - DNA, 25 bp, Homo sapien
gcgccggtaccatgagtgcctgtcg

SEQ ID NO: 4495634 - DNA, 25 bp, Homo sapien
cagtttccgtctgcagcgacagtca

SEQ ID NO: 4495635 - DNA, 25 bp, Homo sapien
tgaattgaccccagtcagtttccgt

SEQ ID NO: 4495636 - DNA, 25 bp, Homo sapien
tggttcgttctagcagttccgggac

SEQ ID NO: 4495637 - DNA, 25 bp, Homo sapien
gaaccgcgaccccgcgtttctcaca

SEQ ID NO: 4495638 - DNA, 25 bp, Homo sapien
gggccaagtccaggaccgcaggaac

SEQ ID NO: 4495639 - DNA, 25 bp, Homo sapien
accccgcgtttctcacagcctgcat

SEQ ID NO: 4495640 - DNA, 25 bp, Homo sapien
ggccaagtccaggaccgcaggaacc

SEQ ID NO: 4495641 - DNA, 25 bp, Homo sapien
agggccacggcctaacggtcactgg

SEQ ID NO: 4495642 - DNA, 25 bp, Homo sapien
gctcaagggacacgagtaggagcat

SEQ ID NO: 4495643 - DNA, 25 bp, Homo sapien
cacgagtaggagcatagtcctggag

SEQ ID NO: 4495644 - DNA, 25 bp, Homo sapien
ggaagaaaagctcggtgagggccac

SEQ ID NO: 4495645 - DNA, 25 bp, Homo sapien
tgcagatggtcccggccggcgttct

SEQ ID NO: 4495646 - DNA, 25 bp, Homo sapien
tcttggagctgtcgagcgcctgtgc

SEQ ID NO: 4495647 - DNA, 25 bp, Homo sapien
gctgggagccgcgttctgttcaact

SEQ ID NO: 4495648 - DNA, 25 bp, Homo sapien
tctgcttggccgcagcgtcttggag

SEQ ID NO: 4495649 - DNA, 25 bp, Homo sapien
gatttatttgcataaggtcccacgg

SEQ ID NO: 4495650 - DNA, 25 bp, Homo sapien
catttttagatgagaaggctgaggc

SEQ ID NO: 4495651 - DNA, 25 bp, Homo sapien
ggtcccacggatagcaagtgacata

SEQ ID NO: 4495652 - DNA, 25 bp, Homo sapien
tccgtaagacgtgcaggaacatctg

SEQ ID NO: 4495653 - DNA, 25 bp, Homo sapien
tgccagttcctagggctgagcacaa

SEQ ID NO: 4495654 - DNA, 25 bp, Homo sapien
tggtgggaagcaagatgccagttcc

SEQ ID NO: 4495655 - DNA, 25 bp, Homo sapien
cccggccaggagttagacacttatg

SEQ ID NO: 4495656 - DNA, 25 bp, Homo sapien
tatctgtattcacggcacctagcat

SEQ ID NO: 4495657 - DNA, 25 bp, Homo sapien
gcaggtatacccgtgttcattattt

SEQ ID NO: 4495658 - DNA, 25 bp, Homo sapien
ctgcaggtatacccgtgttcattat

SEQ ID NO: 4495659 - DNA, 25 bp, Homo sapien
tatttcatcaaccatagacaatatc

SEQ ID NO: 4495660 - DNA, 25 bp, Homo sapien
atttcatcaaccatagacaatatct

SEQ ID NO: 4495661 - DNA, 25 bp, Homo sapien
ggactttccgctatgagaagggatt

SEQ ID NO: 4495662 - DNA, 25 bp, Homo sapien
ctgctgtgcttatgatgctgtttct

SEQ ID NO: 4495663 - DNA, 25 bp, Homo sapien
ttgacttgctgacttcagacacatc

SEQ ID NO: 4495664 - DNA, 25 bp, Homo sapien
ggattttcatgcatactccccatct

SEQ ID NO: 4495665 - DNA, 25 bp, Homo sapien
gggatgctttaatgtgtgcaattgg

SEQ ID NO: 4495666 - DNA, 25 bp, Homo sapien
taatgtgtgcaattgggatctcctc

SEQ ID NO: 4495667 - DNA, 25 bp, Homo sapien
ttgtgggatgctttaatgtgtgcaa

SEQ ID NO: 4495668 - DNA, 25 bp, Homo sapien
tgcaattgggatctcctcaaatttc

SEQ ID NO: 4495669 - DNA, 25 bp, Homo sapien
tgatttcccctttagtcatcatcat

SEQ ID NO: 4495670 - DNA, 25 bp, Homo sapien
cttaatcatctctaataagttactt

SEQ ID NO: 4495671 - DNA, 25 bp, Homo sapien
tgccttaagaaatcctcagatatgc

SEQ ID NO: 4495672 - DNA, 25 bp, Homo sapien
ctgcatccacccacaactttttctt

SEQ ID NO: 4495673 - DNA, 25 bp, Homo sapien
ctagcagagactacctggatctgtg

SEQ ID NO: 4495674 - DNA, 25 bp, Homo sapien
gggctcattactagcagagactacc

SEQ ID NO: 4495675 - DNA, 25 bp, Homo sapien
tcattactagcagagactacctgga

SEQ ID NO: 4495676 - DNA, 25 bp, Homo sapien
aaaggcaaggggctcattactagca

SEQ ID NO: 4495677 - DNA, 25 bp, Homo sapien
ctgcggctatgcctgctgtctgtgc

SEQ ID NO: 4495678 - DNA, 25 bp, Homo sapien
gcggctatgcctgctgtctgtgctg

SEQ ID NO: 4495679 - DNA, 25 bp, Homo sapien
cgctgcggctatgcctgctgtctgt

SEQ ID NO: 4495680 - DNA, 25 bp, Homo sapien
gccgctgcggctatgcctgctgtct

SEQ ID NO: 4495681 - DNA, 25 bp, Homo sapien
aatgctccaatcagggcatcaaagc

SEQ ID NO: 4495682 - DNA, 25 bp, Homo sapien
tcaaaccaatgctccaatcagggca

SEQ ID NO: 4495683 - DNA, 25 bp, Homo sapien
ccaatgctccaatcagggcatcaaa

SEQ ID NO: 4495684 - DNA, 25 bp, Homo sapien
aaaccaatgctccaatcagggcatc

SEQ ID NO: 4495685 - DNA, 25 bp, Homo sapien
tacatcctagaatgaaccaacaagg

SEQ ID NO: 4495686 - DNA, 25 bp, Homo sapien
tggtatcttggctcttacatcctag

SEQ ID NO: 4495687 - DNA, 25 bp, Homo sapien
gaatgaaccaacaagggcttcacct

SEQ ID NO: 4495688 - DNA, 25 bp, Homo sapien
tctttggttctcaagcctttggtat

SEQ ID NO: 4495689 - DNA, 25 bp, Homo sapien
cacgtgactgtgatctgtttagcct

SEQ ID NO: 4495690 - DNA, 25 bp, Homo sapien
ctatagtggaggacaggcgccagca

SEQ ID NO: 4495691 - DNA, 25 bp, Homo sapien
gccccggagagagaactactgcatc

SEQ ID NO: 4495692 - DNA, 25 bp, Homo sapien
tggcaggttgcagaattcacgtgac

SEQ ID NO: 4495693 - DNA, 25 bp, Homo sapien
ggatcacgcccttttgtttagctct

SEQ ID NO: 4495694 - DNA, 25 bp, Homo sapien
cacaactcggatgtggatcacgccc

SEQ ID NO: 4495695 - DNA, 25 bp, Homo sapien
tcggatgtggatcacgcccttttgt

SEQ ID NO: 4495696 - DNA, 25 bp, Homo sapien
tttcaccacaactcggatgtggatc

SEQ ID NO: 4495697 - DNA, 25 bp, Homo sapien
ccaaattctcacacttactaggagg

SEQ ID NO: 4495698 - DNA, 25 bp, Homo sapien
tgtactctgctctcaagccccaaat

SEQ ID NO: 4495699 - DNA, 25 bp, Homo sapien
cacacttactaggaggcaagtacac

SEQ ID NO: 4495700 - DNA, 25 bp, Homo sapien
ctaggaggcaagtacactatggaaa

SEQ ID NO: 4495701 - DNA, 25 bp, Homo sapien
tgatgggctcccagcgatctgggca

SEQ ID NO: 4495702 - DNA, 25 bp, Homo sapien
tctgggcacatgctttaccacagcg

SEQ ID NO: 4495703 - DNA, 25 bp, Homo sapien
gaaagattatccctgctaggttcgg

SEQ ID NO: 4495704 - DNA, 25 bp, Homo sapien
gcgctcaccagtctgtcctaaggga

SEQ ID NO: 4495705 - DNA, 25 bp, Homo sapien
ggcggcagccgttgtgtgggattgg

SEQ ID NO: 4495706 - DNA, 25 bp, Homo sapien
cccatgatcagtccgtgcatggcag

SEQ ID NO: 4495707 - DNA, 25 bp, Homo sapien
ttccaggccgcccatgatcagtccg

SEQ ID NO: 4495708 - DNA, 25 bp, Homo sapien
gccgcccatgatcagtccgtgcatg

SEQ ID NO: 4495709 - DNA, 25 bp, Homo sapien
agagcagagtttgggcctaggccac

SEQ ID NO: 4495710 - DNA, 25 bp, Homo sapien
catattctggagagctctgacaggg

SEQ ID NO: 4495711 - DNA, 25 bp, Homo sapien
cactgtgtaaggaggcaaaactctc

SEQ ID NO: 4495712 - DNA, 25 bp, Homo sapien
ttgaggtcaggtccaagtgcaggcc

SEQ ID NO: 4495713 - DNA, 25 bp, Homo sapien
ggaattacgtaactctgaaagcaaa

SEQ ID NO: 4495714 - DNA, 25 bp, Homo sapien
gaattacgtaactctgaaagcaaaa

SEQ ID NO: 4495715 - DNA, 25 bp, Homo sapien
cactctctcgttagtgctgggactg

SEQ ID NO: 4495716 - DNA, 25 bp, Homo sapien
acgatgactgccactttagtgtggg

SEQ ID NO: 4495717 - DNA, 25 bp, Homo sapien
gctgaagcccatggagtgtaaacga

SEQ ID NO: 4495718 - DNA, 25 bp, Homo sapien
cctggccaagaatcatgttttgtac

SEQ ID NO: 4495719 - DNA, 25 bp, Homo sapien
tgagttcaggcagatcacagtactt

SEQ ID NO: 4495720 - DNA, 25 bp, Homo sapien
taattccttccgacagtggctttga

SEQ ID NO: 4495721 - DNA, 25 bp, Homo sapien
ttgaactgtctgatggctacgggcc

SEQ ID NO: 4495722 - DNA, 25 bp, Homo sapien
cactcatctgggaggaacagtgctt

SEQ ID NO: 4495723 - DNA, 25 bp, Homo sapien
gaaaccacactgtgcaccgagagct

SEQ ID NO: 4495724 - DNA, 25 bp, Homo sapien
cctgtctgcgcatgtaggctctgct

SEQ ID NO: 4495725 - DNA, 25 bp, Homo sapien
ggttgcgccagacatccatttccgg

SEQ ID NO: 4495726 - DNA, 25 bp, Homo sapien
caccagctttattggccactcagag

SEQ ID NO: 4495727 - DNA, 25 bp, Homo sapien
tggtccccatcaggaagacagggct

SEQ ID NO: 4495728 - DNA, 25 bp, Homo sapien
gggcgggcgaccttcagcttcttga

SEQ ID NO: 4495729 - DNA, 25 bp, Homo sapien
aagctgctatggaaaaatccaccat

SEQ ID NO: 4495730 - DNA, 25 bp, Homo sapien
tcagcttcttgaccccaatggaggg

SEQ ID NO: 4495731 - DNA, 25 bp, Homo sapien
tggccaggcggttcacccagcaagt

SEQ ID NO: 4495732 - DNA, 25 bp, Homo sapien
ctctcgatggccaggcggttcaccc

SEQ ID NO: 4495733 - DNA, 25 bp, Homo sapien
tctcgatggccaggcggttcaccca

SEQ ID NO: 4495734 - DNA, 25 bp, Homo sapien
cgatggccaggcggttcacccagca

SEQ ID NO: 4495735 - DNA, 25 bp, Homo sapien
cccaggcgagttgtcagcagttgct

SEQ ID NO: 4495736 - DNA, 25 bp, Homo sapien
tctcttctaagtgtagtcattaact

SEQ ID NO: 4495737 - DNA, 25 bp, Homo sapien
tcattaacttcccagagtgagaaga

SEQ ID NO: 4495738 - DNA, 25 bp, Homo sapien
tattctgaaccggaatgaaaaagtg

SEQ ID NO: 4495739 - DNA, 25 bp, Homo sapien
tatttatgagcgcttaactgtccct

SEQ ID NO: 4495740 - DNA, 25 bp, Homo sapien
tacagcaaggaattagaccagttcc

SEQ ID NO: 4495741 - DNA, 25 bp, Homo sapien
aactgtcccttctcctaggtgctgg

SEQ ID NO: 4495742 - DNA, 25 bp, Homo sapien
tcatgtgggcagacgtaaggtgcct

SEQ ID NO: 4495743 - DNA, 25 bp, Homo sapien
tcttcagctaagtccaagggagggg

SEQ ID NO: 4495744 - DNA, 25 bp, Homo sapien
taaggcactgacatggtagtcgatc

SEQ ID NO: 4495745 - DNA, 25 bp, Homo sapien
gaccaactctcacccagtggcatta

SEQ ID NO: 4495746 - DNA, 25 bp, Homo sapien
aaaaccaaggctcaacccagtagcg

SEQ ID NO: 4495747 - DNA, 25 bp, Homo sapien
agcctccaagcccgtcagaccctcc

SEQ ID NO: 4495748 - DNA, 25 bp, Homo sapien
cagcctccaagcccgtcagaccctc

SEQ ID NO: 4495749 - DNA, 25 bp, Homo sapien
ccagcctccaagcccgtcagaccct

SEQ ID NO: 4495750 - DNA, 25 bp, Homo sapien
ggcagggggaggcgcgcacagaaca

SEQ ID NO: 4495751 - DNA, 25 bp, Homo sapien
gggggaggcgcgcacagaacaggct

SEQ ID NO: 4495752 - DNA, 25 bp, Homo sapien
cagggggaggcgcgcacagaacagg

SEQ ID NO: 4495753 - DNA, 25 bp, Homo sapien
ggaggcgcgcacagaacaggctggg

SEQ ID NO: 4495754 - DNA, 25 bp, Homo sapien
cgcagttccggtggctggcggaaac

SEQ ID NO: 4495755 - DNA, 25 bp, Homo sapien
ggcggaaacgggaacgtgcagccgc

SEQ ID NO: 4495756 - DNA, 25 bp, Homo sapien
gtgttggctgaacagtgccgtgctc

SEQ ID NO: 4495757 - DNA, 25 bp, Homo sapien
tccctttttgctgggccgcagttcc

SEQ ID NO: 4495758 - DNA, 25 bp, Homo sapien
ttttatcgaatctccgtgtcttgca

SEQ ID NO: 4495759 - DNA, 25 bp, Homo sapien
ctgatcgcctccctaggttttatcg

SEQ ID NO: 4495760 - DNA, 25 bp, Homo sapien
ccctaggttttatcgaatctccgtg

SEQ ID NO: 4495761 - DNA, 25 bp, Homo sapien
tccgtgtcttgcaattacctctaat

SEQ ID NO: 4495762 - DNA, 25 bp, Homo sapien
aggatcaccagttcccaaagccatt

SEQ ID NO: 4495763 - DNA, 25 bp, Homo sapien
gcagctccaggcccagggctcccat

SEQ ID NO: 4495764 - DNA, 25 bp, Homo sapien
cacaggacctcccagcaggacaagg

SEQ ID NO: 4495765 - DNA, 25 bp, Homo sapien
cccagcaggacaagggcagctccag

SEQ ID NO: 4495766 - DNA, 25 bp, Homo sapien
ggcagctccaggcccagggctccca

SEQ ID NO: 4495767 - DNA, 25 bp, Homo sapien
atcaggcaacgtggccgctccataa

SEQ ID NO: 4495768 - DNA, 25 bp, Homo sapien
gagagagggctgtctgcgcaggaat

SEQ ID NO: 4495769 - DNA, 25 bp, Homo sapien
tatggtgtccttgctatcaggcaac

SEQ ID NO: 4495770 - DNA, 25 bp, Homo sapien
ggctcctggttctgattatgcagct

SEQ ID NO: 4495771 - DNA, 25 bp, Homo sapien
ggccttcgtggagtttctgagctat

SEQ ID NO: 4495772 - DNA, 25 bp, Homo sapien
tgtaatagtccttcccctaagcgta

SEQ ID NO: 4495773 - DNA, 25 bp, Homo sapien
tctgagctattcctcgctgtgggac

SEQ ID NO: 4495774 - DNA, 25 bp, Homo sapien
tccaagtaggcccaagtgtctgctg

SEQ ID NO: 4495775 - DNA, 25 bp, Homo sapien
aaactgaggcttcaaagcagccttg

SEQ ID NO: 4495776 - DNA, 25 bp, Homo sapien
aaacccactactgatccagtgcgca

SEQ ID NO: 4495777 - DNA, 25 bp, Homo sapien
gcagccttgagagcttcagaacatg

SEQ ID NO: 4495778 - DNA, 25 bp, Homo sapien
ctgcacacacgacaaactgaggctt

SEQ ID NO: 4495779 - DNA, 25 bp, Homo sapien
tcagggccacggatgttcatgacgt

SEQ ID NO: 4495780 - DNA, 25 bp, Homo sapien
gcctgtcagggccacggatgttcat

SEQ ID NO: 4495781 - DNA, 25 bp, Homo sapien
ggccacggatgttcatgacgtcatc

SEQ ID NO: 4495782 - DNA, 25 bp, Homo sapien
ggtggcctgtcagggccacggatgt

SEQ ID NO: 4495783 - DNA, 25 bp, Homo sapien
catcagtcctgtccgggtccgtagt

SEQ ID NO: 4495784 - DNA, 25 bp, Homo sapien
aggccatcagtcctgtccgggtccg

SEQ ID NO: 4495785 - DNA, 25 bp, Homo sapien
gccatcagtcctgtccgggtccgta

SEQ ID NO: 4495786 - DNA, 25 bp, Homo sapien
tctctgaggccatcagtcctgtccg

SEQ ID NO: 4495787 - DNA, 25 bp, Homo sapien
acatttggcgggtgccaagcctggc

SEQ ID NO: 4495788 - DNA, 25 bp, Homo sapien
cagcctcaggcttagcttcccgaat

SEQ ID NO: 4495789 - DNA, 25 bp, Homo sapien
gcaaggcacatttggcgggtgccaa

SEQ ID NO: 4495790 - DNA, 25 bp, Homo sapien
gaatatcagctccagttggctgctt

SEQ ID NO: 4495791 - DNA, 25 bp, Homo sapien
ggctccggagtcgccttccttcctc

SEQ ID NO: 4495792 - DNA, 25 bp, Homo sapien
ctgggctccggagtcgccttccttc

SEQ ID NO: 4495793 - DNA, 25 bp, Homo sapien
ctgctgggctccggagtcgccttcc

SEQ ID NO: 4495794 - DNA, 25 bp, Homo sapien
gctccggagtcgccttccttcctct

SEQ ID NO: 4495795 - DNA, 25 bp, Homo sapien
ctgcccagcatcccgtaggagcgct

SEQ ID NO: 4495796 - DNA, 25 bp, Homo sapien
cccagcatcccgtaggagcgctcac

SEQ ID NO: 4495797 - DNA, 25 bp, Homo sapien
tgcccagcatcccgtaggagcgctc

SEQ ID NO: 4495798 - DNA, 25 bp, Homo sapien
gcccagcatcccgtaggagcgctca

SEQ ID NO: 4495799 - DNA, 25 bp, Homo sapien
ccctgagtaggactatttggtgcag

SEQ ID NO: 4495800 - DNA, 25 bp, Homo sapien
taaccatcacctacctgcaacaagt

SEQ ID NO: 4495801 - DNA, 25 bp, Homo sapien
caacaaaggactgggataatctcca

SEQ ID NO: 4495802 - DNA, 25 bp, Homo sapien
tcttcctgggaagcgatgagtcagc

SEQ ID NO: 4495803 - DNA, 25 bp, Homo sapien
gactgactgaagtggtctgtactca

SEQ ID NO: 4495804 - DNA, 25 bp, Homo sapien
ccgtgatgatcaggcatctatccat

SEQ ID NO: 4495805 - DNA, 25 bp, Homo sapien
tatccattcccagtatcccctcctg

SEQ ID NO: 4495806 - DNA, 25 bp, Homo sapien
tggctcttgatagcaccgtgatgat

SEQ ID NO: 4495807 - DNA, 25 bp, Homo sapien
gaagactggcaatacctagctctga

SEQ ID NO: 4495808 - DNA, 25 bp, Homo sapien
ggttaatttcccttgcagtgtggca

SEQ ID NO: 4495809 - DNA, 25 bp, Homo sapien
tctgccatgggtctgagaaaaacca

SEQ ID NO: 4495810 - DNA, 25 bp, Homo sapien
cctgtggttactgagccctggaagc

SEQ ID NO: 4495811 - DNA, 25 bp, Homo sapien
ggcaccattaggtagactgggattt

SEQ ID NO: 4495812 - DNA, 25 bp, Homo sapien
gccagccggtccactctgtatccag

SEQ ID NO: 4495813 - DNA, 25 bp, Homo sapien
actgggatttgttgttgagcgcagt

SEQ ID NO: 4495814 - DNA, 25 bp, Homo sapien
tgttgagcgcagtaagacaacaaca

SEQ ID NO: 4495815 - DNA, 25 bp, Homo sapien
cccaggatgtggagtcacaaggtgc

SEQ ID NO: 4495816 - DNA, 25 bp, Homo sapien
tataggtgccccaaagtgattgttg

SEQ ID NO: 4495817 - DNA, 25 bp, Homo sapien
tcaggtagtggtatggaagcagtcc

SEQ ID NO: 4495818 - DNA, 25 bp, Homo sapien
acaaggtgcctccattataggtgcc

SEQ ID NO: 4495819 - DNA, 25 bp, Homo sapien
tcggtgcccgcatacactgtggctg

SEQ ID NO: 4495820 - DNA, 25 bp, Homo sapien
ggtctccagtgcatacctctcggtg

SEQ ID NO: 4495821 - DNA, 25 bp, Homo sapien
ccaggtacactgaacatccgggaac

SEQ ID NO: 4495822 - DNA, 25 bp, Homo sapien
aagctccgaggtcaggtgtgtcccc

SEQ ID NO: 4495823 - DNA, 25 bp, Homo sapien
ggcaggtactgggaccaagaaattc

SEQ ID NO: 4495824 - DNA, 25 bp, Homo sapien
tctgatcactaattctaattgtatt

SEQ ID NO: 4495825 - DNA, 25 bp, Homo sapien
gtactgggaccaagaaattccatac

SEQ ID NO: 4495826 - DNA, 25 bp, Homo sapien
caggtactgggaccaagaaattcca

SEQ ID NO: 4495827 - DNA, 25 bp, Homo sapien
aatcattatgctacagtcagagtgc

SEQ ID NO: 4495828 - DNA, 25 bp, Homo sapien
gtactcattctgaggactttttggg

SEQ ID NO: 4495829 - DNA, 25 bp, Homo sapien
ctgccctgtgtactcattctgagga

SEQ ID NO: 4495830 - DNA, 25 bp, Homo sapien
gtcagagtgccattctgcctgccct

SEQ ID NO: 4495831 - DNA, 25 bp, Homo sapien
gaggggaatccatgagttttatctc

SEQ ID NO: 4495832 - DNA, 25 bp, Homo sapien
gctagtcacttatgaggcaaatggg

SEQ ID NO: 4495833 - DNA, 25 bp, Homo sapien
tatctgtatccggtctagtaacagg

SEQ ID NO: 4495834 - DNA, 25 bp, Homo sapien
taacagggtatagtggggaatcgcc

SEQ ID NO: 4495835 - DNA, 25 bp, Homo sapien
cagtagatcagagattgctttatcc

SEQ ID NO: 4495836 - DNA, 25 bp, Homo sapien
atttcatgctggtttaggctgaggg

SEQ ID NO: 4495837 - DNA, 25 bp, Homo sapien
cctggtgtaggtaagtgggatgaac

SEQ ID NO: 4495838 - DNA, 25 bp, Homo sapien
gaacactcaggccataaatctacaa

SEQ ID NO: 4495839 - DNA, 25 bp, Homo sapien
aagcagtctgacttctcttagttca

SEQ ID NO: 4495840 - DNA, 25 bp, Homo sapien
agcagtctgacttctcttagttcac

SEQ ID NO: 4495841 - DNA, 25 bp, Homo sapien
gcagtctgacttctcttagttcaca

SEQ ID NO: 4495842 - DNA, 25 bp, Homo sapien
taagcagtctgacttctcttagttc

SEQ ID NO: 4495843 - DNA, 25 bp, Homo sapien
gattgggaacatcggcccttacctc

SEQ ID NO: 4495844 - DNA, 25 bp, Homo sapien
aaaggccgaatgacttactgagtac

SEQ ID NO: 4495845 - DNA, 25 bp, Homo sapien
cagattgggaacatcggcccttacc

SEQ ID NO: 4495846 - DNA, 25 bp, Homo sapien
cttactgagtacacccacatctgca

SEQ ID NO: 4495847 - DNA, 25 bp, Homo sapien
ctgggtcgggatgtgggctcctgta

SEQ ID NO: 4495848 - DNA, 25 bp, Homo sapien
tgggtcgggatgtgggctcctgtaa

SEQ ID NO: 4495849 - DNA, 25 bp, Homo sapien
gggtcgggatgtgggctcctgtaag

SEQ ID NO: 4495850 - DNA, 25 bp, Homo sapien
ggtcgggatgtgggctcctgtaagc

SEQ ID NO: 4495851 - DNA, 25 bp, Homo sapien
gggactcctgaagagggcgtaactc

SEQ ID NO: 4495852 - DNA, 25 bp, Homo sapien
agtgttccccggctccaatccactc

SEQ ID NO: 4495853 - DNA, 25 bp, Homo sapien
gtaactcgtgctgcgagccggccat

SEQ ID NO: 4495854 - DNA, 25 bp, Homo sapien
ggaagggagactgacctcctgtcgt

SEQ ID NO: 4495855 - DNA, 25 bp, Homo sapien
tgaagccccgcgtgtctcttccggt

SEQ ID NO: 4495856 - DNA, 25 bp, Homo sapien
tctgcacgtggcgtccggaaagccg

SEQ ID NO: 4495857 - DNA, 25 bp, Homo sapien
tattggctcgctggacggcagcgcc

SEQ ID NO: 4495858 - DNA, 25 bp, Homo sapien
gacctcttctgattggtcgagcctg

SEQ ID NO: 4495859 - DNA, 25 bp, Homo sapien
gaaacaacgcgcggggacctgcgac

SEQ ID NO: 4495860 - DNA, 25 bp, Homo sapien
cgccccggtgcagggtcctggatct

SEQ ID NO: 4495861 - DNA, 25 bp, Homo sapien
cagttcaggcgtccccgccgcaggc

SEQ ID NO: 4495862 - DNA, 25 bp, Homo sapien
ccgggacacgcggcctcagcccgcc

SEQ ID NO: 4495863 - DNA, 25 bp, Homo sapien
ctggacccccgagcagagcgagggc

SEQ ID NO: 4495864 - DNA, 25 bp, Homo sapien
acccccgagcagagcgagggctgga

SEQ ID NO: 4495865 - DNA, 25 bp, Homo sapien
agctgggccgagtcccaacgaccag

SEQ ID NO: 4495866 - DNA, 25 bp, Homo sapien
aggactcgggcgttggtcacttgct

SEQ ID NO: 4495867 - DNA, 25 bp, Homo sapien
tgacgcgtgggaggcctgatctcac

SEQ ID NO: 4495868 - DNA, 25 bp, Homo sapien
tggcgttctcccaggcgtgacgcgt

SEQ ID NO: 4495869 - DNA, 25 bp, Homo sapien
taaggtcccctgtgctgctaaaaag

SEQ ID NO: 4495870 - DNA, 25 bp, Homo sapien
tgctaaaaagtccacggaacaacga

SEQ ID NO: 4495871 - DNA, 25 bp, Homo sapien
tggcctaaagaaagggtcccagctg

SEQ ID NO: 4495872 - DNA, 25 bp, Homo sapien
aacctgctggctgatcaagagggca

SEQ ID NO: 4495873 - DNA, 25 bp, Homo sapien
tcttcaccatcaaccgagggctgtg

SEQ ID NO: 4495874 - DNA, 25 bp, Homo sapien
caagaagtcagaatcctcggtggca

SEQ ID NO: 4495875 - DNA, 25 bp, Homo sapien
cgctcagataaaacaaccctttcaa

SEQ ID NO: 4495876 - DNA, 25 bp, Homo sapien
gggacccaaatgtagctcagtgaag

SEQ ID NO: 4495877 - DNA, 25 bp, Homo sapien
agctggagagaagttccgctcagat

SEQ ID NO: 4495878 - DNA, 25 bp, Homo sapien
caaatgtagctcagtgaagctggag

SEQ ID NO: 4495879 - DNA, 25 bp, Homo sapien
taaacccatgacctagcaaccgatg

SEQ ID NO: 4495880 - DNA, 25 bp, Homo sapien
actgtgcactcaacaagctcggatt

SEQ ID NO: 4495881 - DNA, 25 bp, Homo sapien
agatgctagtctgccgatgcttcca

SEQ ID NO: 4495882 - DNA, 25 bp, Homo sapien
caccctgaccttgcttaagagaaga

SEQ ID NO: 4495883 - DNA, 25 bp, Homo sapien
acagccagcctagaagctagcatgt

SEQ ID NO: 4495884 - DNA, 25 bp, Homo sapien
gaagctagcatgtggcaggtcctct

SEQ ID NO: 4495885 - DNA, 25 bp, Homo sapien
ctcagagctgtaagaaggcaggtta

SEQ ID NO: 4495886 - DNA, 25 bp, Homo sapien
tcttcagaagggtgtagaaagaggt

SEQ ID NO: 4495887 - DNA, 25 bp, Homo sapien
cataaagtgtgttaagggctgaagc

SEQ ID NO: 4495888 - DNA, 25 bp, Homo sapien
agaaattcatccctctgtgctgagc

SEQ ID NO: 4495889 - DNA, 25 bp, Homo sapien
tcccagagaggttagactctagccc

SEQ ID NO: 4495890 - DNA, 25 bp, Homo sapien
taccgcaatctggtgtcccctgaat

SEQ ID NO: 4495891 - DNA, 25 bp, Homo sapien
gtcagctcactgcttggggcaaggg

SEQ ID NO: 4495892 - DNA, 25 bp, Homo sapien
accgctggtgctgtcggctccttct

SEQ ID NO: 4495893 - DNA, 25 bp, Homo sapien
tcttgtgcctcttccgaagcacatc

SEQ ID NO: 4495894 - DNA, 25 bp, Homo sapien
agttgctgtcgctgccccgaaaggg

SEQ ID NO: 4495895 - DNA, 25 bp, Homo sapien
tgcagcaaggccttccgggccatga

SEQ ID NO: 4495896 - DNA, 25 bp, Homo sapien
catgtgctgccgagtgatgccactc

SEQ ID NO: 4495897 - DNA, 25 bp, Homo sapien
tagctcacaatggaacagcgggcca

SEQ ID NO: 4495898 - DNA, 25 bp, Homo sapien
acggtagtcagcgatgggcatctca

SEQ ID NO: 4495899 - DNA, 25 bp, Homo sapien
caggcctgatgtacttgtcatagag

SEQ ID NO: 4495900 - DNA, 25 bp, Homo sapien
cataggtcgtatcccgggtctggct

SEQ ID NO: 4495901 - DNA, 25 bp, Homo sapien
ctggctccgagggtggacatacttg

SEQ ID NO: 4495902 - DNA, 25 bp, Homo sapien
aagtcgttgtgcagcgcgtgcccca

SEQ ID NO: 4495903 - DNA, 25 bp, Homo sapien
cttgagcgcctggaagtcgttgtgc

SEQ ID NO: 4495904 - DNA, 25 bp, Homo sapien
tctactgatgagtgcccgtgctggc

SEQ ID NO: 4495905 - DNA, 25 bp, Homo sapien
tggctgtcgtggcatcttctactga

SEQ ID NO: 4495906 - DNA, 25 bp, Homo sapien
tggtcctccatgtactgttccatgt

SEQ ID NO: 4495907 - DNA, 25 bp, Homo sapien
tccaccagccggtagagctccatgg

SEQ ID NO: 4495908 - DNA, 25 bp, Homo sapien
tcctcctctgctgccgtgggccagg

SEQ ID NO: 4495909 - DNA, 25 bp, Homo sapien
tgctgccgtgggccaggtcatcggg

SEQ ID NO: 4495910 - DNA, 25 bp, Homo sapien
cctctgctgccgtgggccaggtcat

SEQ ID NO: 4495911 - DNA, 25 bp, Homo sapien
tccttctgtcctgtgcctccctggc

SEQ ID NO: 4495912 - DNA, 25 bp, Homo sapien
tctccatggagtctgtaaagtgcca

SEQ ID NO: 4495913 - DNA, 25 bp, Homo sapien
tattccactgtagcctagcagggag

SEQ ID NO: 4495914 - DNA, 25 bp, Homo sapien
caggcacggagttcctacaatggct

SEQ ID NO: 4495915 - DNA, 25 bp, Homo sapien
tcctgctgggccctagaagatggtc

SEQ ID NO: 4495916 - DNA, 25 bp, Homo sapien
agacttttgcttaagagcccagtac

SEQ ID NO: 4495917 - DNA, 25 bp, Homo sapien
cttttgcttaagagcccagtactgg

SEQ ID NO: 4495918 - DNA, 25 bp, Homo sapien
gaattcaaaccactgtcttgtttct

SEQ ID NO: 4495919 - DNA, 25 bp, Homo sapien
cagaattcaaaccactgtcttgttt

SEQ ID NO: 4495920 - DNA, 25 bp, Homo sapien
cagtagctgtggctcaccatgtgcc

SEQ ID NO: 4495921 - DNA, 25 bp, Homo sapien
gatatccgtgaaccttgctgctgtg

SEQ ID NO: 4495922 - DNA, 25 bp, Homo sapien
cacagacaagacacacggatatccg

SEQ ID NO: 4495923 - DNA, 25 bp, Homo sapien
gaccaagggatcaaagctactgctc

SEQ ID NO: 4495924 - DNA, 25 bp, Homo sapien
actgtatatactaaaggttgaacca

SEQ ID NO: 4495925 - DNA, 25 bp, Homo sapien
tgactgtgtggggagtcaacaccca

SEQ ID NO: 4495926 - DNA, 25 bp, Homo sapien
ggagtcaacacccaatccctatgtt

SEQ ID NO: 4495927 - DNA, 25 bp, Homo sapien
tatactaaaggttgaaccataagaa

SEQ ID NO: 4495928 - DNA, 25 bp, Homo sapien
cacgtggcaccattctcagtcaaga

SEQ ID NO: 4495929 - DNA, 25 bp, Homo sapien
gaccacacgtggcaccattctcagt

SEQ ID NO: 4495930 - DNA, 25 bp, Homo sapien
gtggcaccattctcagtcaagagaa

SEQ ID NO: 4495931 - DNA, 25 bp, Homo sapien
tacagaccacacgtggcaccattct

SEQ ID NO: 4495932 - DNA, 25 bp, Homo sapien
ctttaactggcgtcacccatcggca

SEQ ID NO: 4495933 - DNA, 25 bp, Homo sapien
caggctacgcccacaaatcttgttg

SEQ ID NO: 4495934 - DNA, 25 bp, Homo sapien
tttcaaggcacacatccagctacag

SEQ ID NO: 4495935 - DNA, 25 bp, Homo sapien
agtcactcagggcaaacttgtcagc

SEQ ID NO: 4495936 - DNA, 25 bp, Homo sapien
gccagagggaccagtaagatcaggt

SEQ ID NO: 4495937 - DNA, 25 bp, Homo sapien
catccagggctttggtttatgcaca

SEQ ID NO: 4495938 - DNA, 25 bp, Homo sapien
gtactgttcatcaccgaggcacttc

SEQ ID NO: 4495939 - DNA, 25 bp, Homo sapien
cctgcatctcccaaggactaggtct

SEQ ID NO: 4495940 - DNA, 25 bp, Homo sapien
tcggcatcccgaccctgtttcagtt

SEQ ID NO: 4495941 - DNA, 25 bp, Homo sapien
atctcctgggctaccggcaggtggg

SEQ ID NO: 4495942 - DNA, 25 bp, Homo sapien
ctctcagcggtgactcatctctaac

SEQ ID NO: 4495943 - DNA, 25 bp, Homo sapien
tctaactccaagccggcatcggcat

SEQ ID NO: 4495944 - DNA, 25 bp, Homo sapien
tctggcctgccccgcagcctgggga

SEQ ID NO: 4495945 - DNA, 25 bp, Homo sapien
cctgcccgtgtgtcccagggcctct

SEQ ID NO: 4495946 - DNA, 25 bp, Homo sapien
ggcctctggcctgccccgcagcctg

SEQ ID NO: 4495947 - DNA, 25 bp, Homo sapien
tgccccgcagcctggggaccgggaa

SEQ ID NO: 4495948 - DNA, 25 bp, Homo sapien
ccaccacctcacggctcccagccat

SEQ ID NO: 4495949 - DNA, 25 bp, Homo sapien
gccaccacctcacggctcccagcca

SEQ ID NO: 4495950 - DNA, 25 bp, Homo sapien
ggccaccacctcacggctcccagcc

SEQ ID NO: 4495951 - DNA, 25 bp, Homo sapien
gggttctgtaatcggtgatctctcc

SEQ ID NO: 4495952 - DNA, 25 bp, Homo sapien
ctctagcctggccacggcaaatggt

SEQ ID NO: 4495953 - DNA, 25 bp, Homo sapien
tgaccccgctgacccgggttctgta

SEQ ID NO: 4495954 - DNA, 25 bp, Homo sapien
acgttcacgaggctgcaacgagcca

SEQ ID NO: 4495955 - DNA, 25 bp, Homo sapien
tgggagggccaaagcctcttgccag

SEQ ID NO: 4495956 - DNA, 25 bp, Homo sapien
tccaggactgggagggccaaagcct

SEQ ID NO: 4495957 - DNA, 25 bp, Homo sapien
tgctagcctgagagcaaggtcctca

SEQ ID NO: 4495958 - DNA, 25 bp, Homo sapien
ttgccagagcctcagccaagaatcc

SEQ ID NO: 4495959 - DNA, 25 bp, Homo sapien
tcctcgcaataacccaacaaagttg

SEQ ID NO: 4495960 - DNA, 25 bp, Homo sapien
tatttaggcactctatctagaccct

SEQ ID NO: 4495961 - DNA, 25 bp, Homo sapien
tgcgttaacagttcctgaggacctg

SEQ ID NO: 4495962 - DNA, 25 bp, Homo sapien
tgaaactgaccctcttaactctgcg

SEQ ID NO: 4495963 - DNA, 25 bp, Homo sapien
ctcccacctgtgcaagggctaccag

SEQ ID NO: 4495964 - DNA, 25 bp, Homo sapien
cctctccctgttcacaagctaccat

SEQ ID NO: 4495965 - DNA, 25 bp, Homo sapien
ctctccctgttcacaagctaccatg

SEQ ID NO: 4495966 - DNA, 25 bp, Homo sapien
ccacctgtgcaagggctaccaggct

SEQ ID NO: 4495967 - DNA, 25 bp, Homo sapien
atctggatattgaagccttcctcct

SEQ ID NO: 4495968 - DNA, 25 bp, Homo sapien
caaatctggatattgaagccttcct

SEQ ID NO: 4495969 - DNA, 25 bp, Homo sapien
gcaaatctggatattgaagccttcc

SEQ ID NO: 4495970 - DNA, 25 bp, Homo sapien
aatctggatattgaagccttcctcc

SEQ ID NO: 4495971 - DNA, 25 bp, Homo sapien
caatgataacggtgcaaggcggtga

SEQ ID NO: 4495972 - DNA, 25 bp, Homo sapien
tattattagcacaaggaccaaggga

SEQ ID NO: 4495973 - DNA, 25 bp, Homo sapien
aaggcggtgacttccataccatctg

SEQ ID NO: 4495974 - DNA, 25 bp, Homo sapien
gaaagctgcagtgccgtgtctggat

SEQ ID NO: 4495975 - DNA, 25 bp, Homo sapien
cagctgccgttggagaggatgggaa

SEQ ID NO: 4495976 - DNA, 25 bp, Homo sapien
cactcagctgccgttggagaggatg

SEQ ID NO: 4495977 - DNA, 25 bp, Homo sapien
agctgccgttggagaggatgggaag

SEQ ID NO: 4495978 - DNA, 25 bp, Homo sapien
ctcagctgccgttggagaggatggg

SEQ ID NO: 4495979 - DNA, 25 bp, Homo sapien
tctggtcacacaggccagtcagctt

SEQ ID NO: 4495980 - DNA, 25 bp, Homo sapien
cgcctcccacatggacagcctgccc

SEQ ID NO: 4495981 - DNA, 25 bp, Homo sapien
ctgctctggtcacacaggccagtca

SEQ ID NO: 4495982 - DNA, 25 bp, Homo sapien
ctcccacatggacagcctgccctgc

SEQ ID NO: 4495983 - DNA, 25 bp, Homo sapien
aattctataagaagtccggccacca

SEQ ID NO: 4495984 - DNA, 25 bp, Homo sapien
tgggctggcctgtatgacttctgac

SEQ ID NO: 4495985 - DNA, 25 bp, Homo sapien
ttcaaggtgccttaactgacggcct

SEQ ID NO: 4495986 - DNA, 25 bp, Homo sapien
agaggagtgacatgcccaggcttac

SEQ ID NO: 4495987 - DNA, 25 bp, Homo sapien
gaggtcagagtgaatccacatgagg

SEQ ID NO: 4495988 - DNA, 25 bp, Homo sapien
tttgattttagaccagtgagaccca

SEQ ID NO: 4495989 - DNA, 25 bp, Homo sapien
cccagagcatccagaaggaacctag

SEQ ID NO: 4495990 - DNA, 25 bp, Homo sapien
cacgctgaacttcgaaactacagaa

SEQ ID NO: 4495991 - DNA, 25 bp, Homo sapien
gaagagattgcactaggaccctcct

SEQ ID NO: 4495992 - DNA, 25 bp, Homo sapien
gctaatcagtcgaccttcaaatggg

SEQ ID NO: 4495993 - DNA, 25 bp, Homo sapien
gggcaaattatcagtcctccctggg

SEQ ID NO: 4495994 - DNA, 25 bp, Homo sapien
gtatttcccaggtgccaagcgtgcc

SEQ ID NO: 4495995 - DNA, 25 bp, Homo sapien
caggtcatgacccaccaccagcttg

SEQ ID NO: 4495996 - DNA, 25 bp, Homo sapien
tcaggtcatgacccaccaccagctt

SEQ ID NO: 4495997 - DNA, 25 bp, Homo sapien
gaagtcgtgcttcaggtcatgaccc

SEQ ID NO: 4495998 - DNA, 25 bp, Homo sapien
ctggaagtcgtgcttcaggtcatga

SEQ ID NO: 4495999 - DNA, 25 bp, Homo sapien
acccgcagggagacacgcctgcagt

SEQ ID NO: 4496000 - DNA, 25 bp, Homo sapien
tagccgctcatgtcctctttcagtg

SEQ ID NO: 4496001 - DNA, 25 bp, Homo sapien
caacagcctgtcagtggacgtgtcg

SEQ ID NO: 4496002 - DNA, 25 bp, Homo sapien
tcttgtgtaggaggcgctcactcag

SEQ ID NO: 4496003 - DNA, 25 bp, Homo sapien
gaagtgctgcggaatcagtgcccag

SEQ ID NO: 4496004 - DNA, 25 bp, Homo sapien
tatggtgggagcaagcttcacttcc

SEQ ID NO: 4496005 - DNA, 25 bp, Homo sapien
tagcaccactgtccatgtgagcggg

SEQ ID NO: 4496006 - DNA, 25 bp, Homo sapien
tgatgatctggttaagggccacctc

SEQ ID NO: 4496007 - DNA, 25 bp, Homo sapien
gaaaggccgcaagcatttcggaggc

SEQ ID NO: 4496008 - DNA, 25 bp, Homo sapien
tgctgtcagacacacgcagtggctg

SEQ ID NO: 4496009 - DNA, 25 bp, Homo sapien
ccattcaagggagaagcgatgacca

SEQ ID NO: 4496010 - DNA, 25 bp, Homo sapien
gctaaaataagaggcctgcgagggt

SEQ ID NO: 4496011 - DNA, 25 bp, Homo sapien
gatgaggctgaattcagaggccccg

SEQ ID NO: 4496012 - DNA, 25 bp, Homo sapien
tctgacactctggacttaggagact

SEQ ID NO: 4496013 - DNA, 25 bp, Homo sapien
tggtcacatcccgatttccagagtc

SEQ ID NO: 4496014 - DNA, 25 bp, Homo sapien
tgggtgagagtctcttgaggtctct

SEQ ID NO: 4496015 - DNA, 25 bp, Homo sapien
atagagctccatcgttgccctcgca

SEQ ID NO: 4496016 - DNA, 25 bp, Homo sapien
tctctgggagatttgatagagctcc

SEQ ID NO: 4496017 - DNA, 25 bp, Homo sapien
cgggctcggattctctgggagattt

SEQ ID NO: 4496018 - DNA, 25 bp, Homo sapien
cctcgcatcttccaccgagctgtgt

SEQ ID NO: 4496019 - DNA, 25 bp, Homo sapien
tgtggcaccaactcaagaggagctg

SEQ ID NO: 4496020 - DNA, 25 bp, Homo sapien
caattacttatcgacacctggtggg

SEQ ID NO: 4496021 - DNA, 25 bp, Homo sapien
tgaatgccaccccaggaaataatgc

SEQ ID NO: 4496022 - DNA, 25 bp, Homo sapien
tagttgctgtcccaaaaagccgaaa

SEQ ID NO: 4496023 - DNA, 25 bp, Homo sapien
taaaccccttcagtcttatgcctgg

SEQ ID NO: 4496024 - DNA, 25 bp, Homo sapien
gaaggagagtgaatttccttaggca

SEQ ID NO: 4496025 - DNA, 25 bp, Homo sapien
catcatgggatgggcggatcctgct

SEQ ID NO: 4496026 - DNA, 25 bp, Homo sapien
ttccttaggcaacaaagccctccaa

SEQ ID NO: 4496027 - DNA, 25 bp, Homo sapien
caacaggaagtggtctggctaagac

SEQ ID NO: 4496028 - DNA, 25 bp, Homo sapien
caggaagtggtctggctaagacgaa

SEQ ID NO: 4496029 - DNA, 25 bp, Homo sapien
tggtctggctaagacgaagggcagc

SEQ ID NO: 4496030 - DNA, 25 bp, Homo sapien
tctggctaagacgaagggcagctgc

SEQ ID NO: 4496031 - DNA, 25 bp, Homo sapien
tggctggctcctgtccgaaggtcac

SEQ ID NO: 4496032 - DNA, 25 bp, Homo sapien
gctcctgtccgaaggtcactgaagg

SEQ ID NO: 4496033 - DNA, 25 bp, Homo sapien
aggctgctgatccatgcggcccttg

SEQ ID NO: 4496034 - DNA, 25 bp, Homo sapien
catgcggcccttgtctgtgtggctg

SEQ ID NO: 4496035 - DNA, 25 bp, Homo sapien
gaagaggggcccttctctcctgcag

SEQ ID NO: 4496036 - DNA, 25 bp, Homo sapien
agaagaggggcccttctctcctgca

SEQ ID NO: 4496037 - DNA, 25 bp, Homo sapien
gagagaagaggggcccttctctcct

SEQ ID NO: 4496038 - DNA, 25 bp, Homo sapien
agtggagagaagaggggcccttctc

SEQ ID NO: 4496039 - DNA, 25 bp, Homo sapien
tgtctccagctgacgccagccccag

SEQ ID NO: 4496040 - DNA, 25 bp, Homo sapien
gcctgagccgcgtccaggacagagc

SEQ ID NO: 4496041 - DNA, 25 bp, Homo sapien
actgtggcctgagccgcgtccagga

SEQ ID NO: 4496042 - DNA, 25 bp, Homo sapien
ccagactgtggcctgagccgcgtcc

SEQ ID NO: 4496043 - DNA, 25 bp, Homo sapien
agccctttcttttgggagtgtgaag

SEQ ID NO: 4496044 - DNA, 25 bp, Homo sapien
cttttgcaaactcaaagccctttct

SEQ ID NO: 4496045 - DNA, 25 bp, Homo sapien
ttcttttgggagtgtgaagccactg

SEQ ID NO: 4496046 - DNA, 25 bp, Homo sapien
ccagtttgggtagctcatctttcct

SEQ ID NO: 4496047 - DNA, 25 bp, Homo sapien
agcccttaatgactggaggcttgcc

SEQ ID NO: 4496048 - DNA, 25 bp, Homo sapien
aggaagctggcccttaagccctgcg

SEQ ID NO: 4496049 - DNA, 25 bp, Homo sapien
cctgcgggcacctctccacaaacag

SEQ ID NO: 4496050 - DNA, 25 bp, Homo sapien
cccttaatgactggaggcttgccca

SEQ ID NO: 4496051 - DNA, 25 bp, Homo sapien
attttccagaagcaggcgtcgcctc

SEQ ID NO: 4496052 - DNA, 25 bp, Homo sapien
cttggcgtccaacaggaaagcgtta

SEQ ID NO: 4496053 - DNA, 25 bp, Homo sapien
gaaggctgctttaacatgaaagtcc

SEQ ID NO: 4496054 - DNA, 25 bp, Homo sapien
tcttgtttgaattagcacgggtgct

SEQ ID NO: 4496055 - DNA, 25 bp, Homo sapien
ttgagaacagcacacaaagttagtg

SEQ ID NO: 4496056 - DNA, 25 bp, Homo sapien
cttgagaacagcacacaaagttagt

SEQ ID NO: 4496057 - DNA, 25 bp, Homo sapien
acacaaagttagtgaggctcggggc

SEQ ID NO: 4496058 - DNA, 25 bp, Homo sapien
cacaaagttagtgaggctcggggct

SEQ ID NO: 4496059 - DNA, 25 bp, Homo sapien
cgttccaaggtctcagcaccccctt

SEQ ID NO: 4496060 - DNA, 25 bp, Homo sapien
agcggcattggctcgggctgatgtg

SEQ ID NO: 4496061 - DNA, 25 bp, Homo sapien
ttttcctgctggagcggcattggct

SEQ ID NO: 4496062 - DNA, 25 bp, Homo sapien
tggagcggcattggctcgggctgat

SEQ ID NO: 4496063 - DNA, 25 bp, Homo sapien
cctttcaaatctatggctgaactct

SEQ ID NO: 4496064 - DNA, 25 bp, Homo sapien
aactgaggcgggtagccctctgcgt

SEQ ID NO: 4496065 - DNA, 25 bp, Homo sapien
cctgaactgaggcgggtagccctct

SEQ ID NO: 4496066 - DNA, 25 bp, Homo sapien
tgcgtggccctttcggtgcccttct

SEQ ID NO: 4496067 - DNA, 25 bp, Homo sapien
ccagggaccacctgcttttgtttca

SEQ ID NO: 4496068 - DNA, 25 bp, Homo sapien
tcacctccaggttaatcagataagc

SEQ ID NO: 4496069 - DNA, 25 bp, Homo sapien
taatcagataagcagtgcccttcca

SEQ ID NO: 4496070 - DNA, 25 bp, Homo sapien
ggtagcttggaccaggacctcccac

SEQ ID NO: 4496071 - DNA, 25 bp, Homo sapien
aaaggcataagggtgggagaattca

SEQ ID NO: 4496072 - DNA, 25 bp, Homo sapien
gcttctacgagaggaacttctgttt

SEQ ID NO: 4496073 - DNA, 25 bp, Homo sapien
atgttgggaatttggacgaccaggt

SEQ ID NO: 4496074 - DNA, 25 bp, Homo sapien
ataaaccatgtcaagaagggccatt

SEQ ID NO: 4496075 - DNA, 25 bp, Homo sapien
aactgctgaacgttctccatactct

SEQ ID NO: 4496076 - DNA, 25 bp, Homo sapien
actgctgaacgttctccatactctt

SEQ ID NO: 4496077 - DNA, 25 bp, Homo sapien
tccaccacaaggttcaactgctgaa

SEQ ID NO: 4496078 - DNA, 25 bp, Homo sapien
tagtaactttacgtctagtccttgc

SEQ ID NO: 4496079 - DNA, 25 bp, Homo sapien
catcattaccaccatgacttgtgcc

SEQ ID NO: 4496080 - DNA, 25 bp, Homo sapien
tctttcccctcattattatcagatt

SEQ ID NO: 4496081 - DNA, 25 bp, Homo sapien
taccaccatgacttgtgccattgtc

SEQ ID NO: 4496082 - DNA, 25 bp, Homo sapien
gctggatcccctgagctcagtggga

SEQ ID NO: 4496083 - DNA, 25 bp, Homo sapien
agagtaggtcgtgggctgctggaag

SEQ ID NO: 4496084 - DNA, 25 bp, Homo sapien
agtccaagagagtagagtaggtcgt

SEQ ID NO: 4496085 - DNA, 25 bp, Homo sapien
ttgggaagtccaagagagtagagta

SEQ ID NO: 4496086 - DNA, 25 bp, Homo sapien
aggtcttgggaagtccaagagagta

SEQ ID NO: 4496087 - DNA, 25 bp, Homo sapien
ttggggacactcgttccccatgcag

SEQ ID NO: 4496088 - DNA, 25 bp, Homo sapien
cttcttggggacactcgttccccat

SEQ ID NO: 4496089 - DNA, 25 bp, Homo sapien
tcttggggacactcgttccccatgc

SEQ ID NO: 4496090 - DNA, 25 bp, Homo sapien
ttcttggggacactcgttccccatg

SEQ ID NO: 4496091 - DNA, 25 bp, Homo sapien
tcctgtgctgtctctattaaatggc

SEQ ID NO: 4496092 - DNA, 25 bp, Homo sapien
tgtgctgtctctattaaatggcttt

SEQ ID NO: 4496093 - DNA, 25 bp, Homo sapien
ggtcctgtgctgtctctattaaatg

SEQ ID NO: 4496094 - DNA, 25 bp, Homo sapien
gggtcctgtgctgtctctattaaat

SEQ ID NO: 4496095 - DNA, 25 bp, Homo sapien
aaacccttgactatgatgtagacct

SEQ ID NO: 4496096 - DNA, 25 bp, Homo sapien
tatgatgtagacctttggtggaatc

SEQ ID NO: 4496097 - DNA, 25 bp, Homo sapien
ccaatgggaattggaatacaggcct

SEQ ID NO: 4496098 - DNA, 25 bp, Homo sapien
aattggaatacaggcctctctgtcc

SEQ ID NO: 4496099 - DNA, 25 bp, Homo sapien
tgataatcatggtggccaatacttg

SEQ ID NO: 4496100 - DNA, 25 bp, Homo sapien
gataactcgtagatttgctgcctgt

SEQ ID NO: 4496101 - DNA, 25 bp, Homo sapien
ctcagtgctcactgtgctaggtcct

SEQ ID NO: 4496102 - DNA, 25 bp, Homo sapien
tccagccaaagatgataactcgtag

SEQ ID NO: 4496103 - DNA, 25 bp, Homo sapien
taacaggtacgccaacagactgcca

SEQ ID NO: 4496104 - DNA, 25 bp, Homo sapien
gactgccagactcgtgtctggattt

SEQ ID NO: 4496105 - DNA, 25 bp, Homo sapien
caacagactgccagactcgtgtctg

SEQ ID NO: 4496106 - DNA, 25 bp, Homo sapien
aaacataacaggtacgccaacagac

SEQ ID NO: 4496107 - DNA, 25 bp, Homo sapien
gatttgcatccttcggaggtccagg

SEQ ID NO: 4496108 - DNA, 25 bp, Homo sapien
gggtgatttgcatccttcggaggtc

SEQ ID NO: 4496109 - DNA, 25 bp, Homo sapien
ttgcatccttcggaggtccaggctc

SEQ ID NO: 4496110 - DNA, 25 bp, Homo sapien
tcagtgggtgatttgcatccttcgg

SEQ ID NO: 4496111 - DNA, 25 bp, Homo sapien
gctttcagtgatcagcacgctgtca

SEQ ID NO: 4496112 - DNA, 25 bp, Homo sapien
gcaaaatatactccctcaggcaggg

SEQ ID NO: 4496113 - DNA, 25 bp, Homo sapien
cacgatgttgcaggattggtgacat

SEQ ID NO: 4496114 - DNA, 25 bp, Homo sapien
gaacaggatgcagagggcattggat

SEQ ID NO: 4496115 - DNA, 25 bp, Homo sapien
tccatccttgtgagttcaggagttg

SEQ ID NO: 4496116 - DNA, 25 bp, Homo sapien
catttttggtccagagaggccctgg

SEQ ID NO: 4496117 - DNA, 25 bp, Homo sapien
agttcaggagttgagtagtgatggc

SEQ ID NO: 4496118 - DNA, 25 bp, Homo sapien
gggccttggcctggttccatccttg

SEQ ID NO: 4496119 - DNA, 25 bp, Homo sapien
gtctggaatgtacagggccgttaga

SEQ ID NO: 4496120 - DNA, 25 bp, Homo sapien
ttaataagggtcttgtgtagcctgg

SEQ ID NO: 4496121 - DNA, 25 bp, Homo sapien
tacagggccgttagagccagtttaa

SEQ ID NO: 4496122 - DNA, 25 bp, Homo sapien
atgtacagggccgttagagccagtt

SEQ ID NO: 4496123 - DNA, 25 bp, Homo sapien
ctctcagagcaatggctaaagtgtt

SEQ ID NO: 4496124 - DNA, 25 bp, Homo sapien
tggctaaagtgttccagtggttggc

SEQ ID NO: 4496125 - DNA, 25 bp, Homo sapien
caatggctaaagtgttccagtggtt

SEQ ID NO: 4496126 - DNA, 25 bp, Homo sapien
cagagcaatggctaaagtgttccag

SEQ ID NO: 4496127 - DNA, 25 bp, Homo sapien
aaggcggcgcgagaagggctggagg

SEQ ID NO: 4496128 - DNA, 25 bp, Homo sapien
ggaaggcggcgcgagaagggctgga

SEQ ID NO: 4496129 - DNA, 25 bp, Homo sapien
aggaaggcggcgcgagaagggctgg

SEQ ID NO: 4496130 - DNA, 25 bp, Homo sapien
aggcggcgcgagaagggctggaggg

SEQ ID NO: 4496131 - DNA, 25 bp, Homo sapien
cgggagaggagcgctccccggggcg

SEQ ID NO: 4496132 - DNA, 25 bp, Homo sapien
cggcctgcgctcagggcgggagagg

SEQ ID NO: 4496133 - DNA, 25 bp, Homo sapien
cgcgccgatggggaagccggcctgc

SEQ ID NO: 4496134 - DNA, 25 bp, Homo sapien
gggaagccggcctgcgctcagggcg

SEQ ID NO: 4496135 - DNA, 25 bp, Homo sapien
tggcacccgcgtcagacgccggccg

SEQ ID NO: 4496136 - DNA, 25 bp, Homo sapien
gaaaggtgcccggagaccctggcac

SEQ ID NO: 4496137 - DNA, 25 bp, Homo sapien
agagagagagaccttgagcagcgct

SEQ ID NO: 4496138 - DNA, 25 bp, Homo sapien
gaatggacactgaaaggtgcccgga

SEQ ID NO: 4496139 - DNA, 25 bp, Homo sapien
tgctgggttgcggagtcctggctgg

SEQ ID NO: 4496140 - DNA, 25 bp, Homo sapien
tcctgccggcgtcctgtccgcaggt

SEQ ID NO: 4496141 - DNA, 25 bp, Homo sapien
gctgtggccgcagcggcaactgctg

SEQ ID NO: 4496142 - DNA, 25 bp, Homo sapien
ctgtccgcaggtcccctcgggctgt

SEQ ID NO: 4496143 - DNA, 25 bp, Homo sapien
ccgggtctcgctgcgtagcgaggga

SEQ ID NO: 4496144 - DNA, 25 bp, Homo sapien
tctcgctgcgtagcgagggagacgc

SEQ ID NO: 4496145 - DNA, 25 bp, Homo sapien
tagcgagggagacgctctgcgcggg

SEQ ID NO: 4496146 - DNA, 25 bp, Homo sapien
tgcgtagcgagggagacgctctgcg

SEQ ID NO: 4496147 - DNA, 25 bp, Homo sapien
cttgaagagttggactcccttctcc

SEQ ID NO: 4496148 - DNA, 25 bp, Homo sapien
tctccaagaacttcagtcccacaca

SEQ ID NO: 4496149 - DNA, 25 bp, Homo sapien
ctcccttctccaagaacttcagtcc

SEQ ID NO: 4496150 - DNA, 25 bp, Homo sapien
tgaagagttggactcccttctccaa

SEQ ID NO: 4496151 - DNA, 25 bp, Homo sapien
cacctagggccacaatgctgaaatt

SEQ ID NO: 4496152 - DNA, 25 bp, Homo sapien
cccctgtggggctgtcacggtgcag

SEQ ID NO: 4496153 - DNA, 25 bp, Homo sapien
tgtggggctgtcacggtgcagctgc

SEQ ID NO: 4496154 - DNA, 25 bp, Homo sapien
gtgctgcaacctgatgcagcacgtt

SEQ ID NO: 4496155 - DNA, 25 bp, Homo sapien
ctgcaacctgatgcagcacgttctg

SEQ ID NO: 4496156 - DNA, 25 bp, Homo sapien
gtgcagaacatttcatgtcttgaaa

SEQ ID NO: 4496157 - DNA, 25 bp, Homo sapien
tgcagaacatttcatgtcttgaaat

SEQ ID NO: 4496158 - DNA, 25 bp, Homo sapien
agtgcagaacatttcatgtcttgaa

SEQ ID NO: 4496159 - DNA, 25 bp, Homo sapien
cagtgcagaacatttcatgtcttga

SEQ ID NO: 4496160 - DNA, 25 bp, Homo sapien
gcggaatttctcactaaagtattct

SEQ ID NO: 4496161 - DNA, 25 bp, Homo sapien
acctgcggaatttctcactaaagta

SEQ ID NO: 4496162 - DNA, 25 bp, Homo sapien
ctgcggaatttctcactaaagtatt

SEQ ID NO: 4496163 - DNA, 25 bp, Homo sapien
agaacctgcggaatttctcactaaa

SEQ ID NO: 4496164 - DNA, 25 bp, Homo sapien
tacagacgggttctccacatggagc

SEQ ID NO: 4496165 - DNA, 25 bp, Homo sapien
cacatggagcgagttcaacatcaga

SEQ ID NO: 4496166 - DNA, 25 bp, Homo sapien
atagcctcccaacaggatgccagag

SEQ ID NO: 4496167 - DNA, 25 bp, Homo sapien
tcaaagaaccaaggtacctcagggc

SEQ ID NO: 4496168 - DNA, 25 bp, Homo sapien
catgttcctattatgatccagtttg

SEQ ID NO: 4496169 - DNA, 25 bp, Homo sapien
tattatgatccagtttgccgtcctc

SEQ ID NO: 4496170 - DNA, 25 bp, Homo sapien
tatgatccagtttgccgtcctcgat

SEQ ID NO: 4496171 - DNA, 25 bp, Homo sapien
tccagtttgccgtcctcgatcacag

SEQ ID NO: 4496172 - DNA, 25 bp, Homo sapien
gatctttggtggtgggcccttcctc

SEQ ID NO: 4496173 - DNA, 25 bp, Homo sapien
ctgctaaaagaggtgcaagagtgga

SEQ ID NO: 4496174 - DNA, 25 bp, Homo sapien
ttctgctaaaagaggtgcaagagtg

SEQ ID NO: 4496175 - DNA, 25 bp, Homo sapien
ttttctgctaaaagaggtgcaagag

SEQ ID NO: 4496176 - DNA, 25 bp, Homo sapien
aagaggtgcaagagtggagaaggat

SEQ ID NO: 4496177 - DNA, 25 bp, Homo sapien
ctggcagtgccctatttgaatctgg

SEQ ID NO: 4496178 - DNA, 25 bp, Homo sapien
cagtgccctatttgaatctggggct

SEQ ID NO: 4496179 - DNA, 25 bp, Homo sapien
tggcagtgccctatttgaatctggg

SEQ ID NO: 4496180 - DNA, 25 bp, Homo sapien
ggcagtgccctatttgaatctgggg

SEQ ID NO: 4496181 - DNA, 25 bp, Homo sapien
tttctccattccgggcaagtgtgta

SEQ ID NO: 4496182 - DNA, 25 bp, Homo sapien
tctccattccgggcaagtgtgtagg

SEQ ID NO: 4496183 - DNA, 25 bp, Homo sapien
tccattccgggcaagtgtgtaggtc

SEQ ID NO: 4496184 - DNA, 25 bp, Homo sapien
ttttctccattccgggcaagtgtgt

SEQ ID NO: 4496185 - DNA, 25 bp, Homo sapien
ccttgtctttttccgtatctttgat

SEQ ID NO: 4496186 - DNA, 25 bp, Homo sapien
tgtctttttccgtatctttgatttc

SEQ ID NO: 4496187 - DNA, 25 bp, Homo sapien
caccttgtctttttccgtatctttg

SEQ ID NO: 4496188 - DNA, 25 bp, Homo sapien
tcaacaccttgtctttttccgtatc

SEQ ID NO: 4496189 - DNA, 25 bp, Homo sapien
cactgagccttttatgcgagaagac

SEQ ID NO: 4496190 - DNA, 25 bp, Homo sapien
gagaagactgactttggcagccctg

SEQ ID NO: 4496191 - DNA, 25 bp, Homo sapien
cagcaacatgtgcagtggagacccc

SEQ ID NO: 4496192 - DNA, 25 bp, Homo sapien
caaattatgggattgaacaggcagc

SEQ ID NO: 4496193 - DNA, 25 bp, Homo sapien
gctgcagtgatgaccctcagagtca

SEQ ID NO: 4496194 - DNA, 25 bp, Homo sapien
ctgaagtttctacagtgacagctgc

SEQ ID NO: 4496195 - DNA, 25 bp, Homo sapien
agctgcagtgatgaccctcagagtc

SEQ ID NO: 4496196 - DNA, 25 bp, Homo sapien
catgcatcacctcgcagcggtagac

SEQ ID NO: 4496197 - DNA, 25 bp, Homo sapien
tggacttccaaggtggcgtcactgg

SEQ ID NO: 4496198 - DNA, 25 bp, Homo sapien
ggtagaccccagagtcattggagcg

SEQ ID NO: 4496199 - DNA, 25 bp, Homo sapien
cagtgagaccttgtcctgataggca

SEQ ID NO: 4496200 - DNA, 25 bp, Homo sapien
ccttgggccatggagagaaagagac

SEQ ID NO: 4496201 - DNA, 25 bp, Homo sapien
gactgttctccttgggccatggaga

SEQ ID NO: 4496202 - DNA, 25 bp, Homo sapien
ctgactgttctccttgggccatgga

SEQ ID NO: 4496203 - DNA, 25 bp, Homo sapien
ttgggccatggagagaaagagacca

SEQ ID NO: 4496204 - DNA, 25 bp, Homo sapien
cctgtcaaagtcgagggtgtagcgt

SEQ ID NO: 4496205 - DNA, 25 bp, Homo sapien
aagccgtcttcgtaggcggcctgca

SEQ ID NO: 4496206 - DNA, 25 bp, Homo sapien
gctcaggcgtggcaatgatggcact

SEQ ID NO: 4496207 - DNA, 25 bp, Homo sapien
agccagccggcgtcacactggtgga

SEQ ID NO: 4496208 - DNA, 25 bp, Homo sapien
catctcctcggcgaagcagtacaca

SEQ ID NO: 4496209 - DNA, 25 bp, Homo sapien
gaagcagtacacatcataggtctcg

SEQ ID NO: 4496210 - DNA, 25 bp, Homo sapien
tcataggtctcgttggtgtctcgga

SEQ ID NO: 4496211 - DNA, 25 bp, Homo sapien
gtctcggatgccatacgtcctcaca

SEQ ID NO: 4496212 - DNA, 25 bp, Homo sapien
ggtcctcacgcccaggaggttgcca

SEQ ID NO: 4496213 - DNA, 25 bp, Homo sapien
tagcccgtctggttggcatgcacgt

SEQ ID NO: 4496214 - DNA, 25 bp, Homo sapien
ggagatgttgcataaaagacctcac

SEQ ID NO: 4496215 - DNA, 25 bp, Homo sapien
ttgccaccgcagttgggccgggcct

SEQ ID NO: 4496216 - DNA, 25 bp, Homo sapien
gctttacggtaaggatcacgctgcc

SEQ ID NO: 4496217 - DNA, 25 bp, Homo sapien
tcagtgatgtttcgaggcagtggca

SEQ ID NO: 4496218 - DNA, 25 bp, Homo sapien
ttctcaacctcagcgaaggcagtgg

SEQ ID NO: 4496219 - DNA, 25 bp, Homo sapien
tcctcactggtgaatgccgtggcag

SEQ ID NO: 4496220 - DNA, 25 bp, Homo sapien
ctgctccggcgaggcaatgaccgcc

SEQ ID NO: 4496221 - DNA, 25 bp, Homo sapien
tagcctgcttcgtaggcggcctgga

SEQ ID NO: 4496222 - DNA, 25 bp, Homo sapien
ggcgtcacactgctcatagcctgct

SEQ ID NO: 4496223 - DNA, 25 bp, Homo sapien
tcctcaaaggtcagcgagtagcggg

SEQ ID NO: 4496224 - DNA, 25 bp, Homo sapien
cagtagacatcgtaggtctctgttg

SEQ ID NO: 4496225 - DNA, 25 bp, Homo sapien
caaagcagtagacatcgtaggtctc

SEQ ID NO: 4496226 - DNA, 25 bp, Homo sapien
atgggcgcacgccataggtcctgac

SEQ ID NO: 4496227 - DNA, 25 bp, Homo sapien
tctctgttgatgggcgcacgccata

SEQ ID NO: 4496228 - DNA, 25 bp, Homo sapien
catctagggcccgaaatgtgagaat

SEQ ID NO: 4496229 - DNA, 25 bp, Homo sapien
gcccatctagggcccgaaatgtgag

SEQ ID NO: 4496230 - DNA, 25 bp, Homo sapien
tctagggcccgaaatgtgagaatgt

SEQ ID NO: 4496231 - DNA, 25 bp, Homo sapien
ctgcccatctagggcccgaaatgtg

SEQ ID NO: 4496232 - DNA, 25 bp, Homo sapien
ggtagaatatgacccccccacactc

SEQ ID NO: 4496233 - DNA, 25 bp, Homo sapien
ccccacactcaggccaggtccatcc

SEQ ID NO: 4496234 - DNA, 25 bp, Homo sapien
gggcagaggcaaggggtagaatatg

SEQ ID NO: 4496235 - DNA, 25 bp, Homo sapien
gaggcaaggggtagaatatgacccc

SEQ ID NO: 4496236 - DNA, 25 bp, Homo sapien
agccagccggcatagcacttgtcca

SEQ ID NO: 4496237 - DNA, 25 bp, Homo sapien
ggccagcgtagcattgtgagattca

SEQ ID NO: 4496238 - DNA, 25 bp, Homo sapien
ctcaaggcgtgtggcgaagaacacc

SEQ ID NO: 4496239 - DNA, 25 bp, Homo sapien
tagaggtagaccgttctcacgcctg

SEQ ID NO: 4496240 - DNA, 25 bp, Homo sapien
tggcaggatccggtgaacccagtgg

SEQ ID NO: 4496241 - DNA, 25 bp, Homo sapien
ttggagccgaagtgaggctgcatac

SEQ ID NO: 4496242 - DNA, 25 bp, Homo sapien
tctccagacaaaaggggctgttgga

SEQ ID NO: 4496243 - DNA, 25 bp, Homo sapien
cttgctctgatggatgggatactgg

SEQ ID NO: 4496244 - DNA, 25 bp, Homo sapien
gacttgacttattgaggctggctga

SEQ ID NO: 4496245 - DNA, 25 bp, Homo sapien
tgtgtcacgaccaaaaataggagga

SEQ ID NO: 4496246 - DNA, 25 bp, Homo sapien
gataatacacaaggctgagttcacg

SEQ ID NO: 4496247 - DNA, 25 bp, Homo sapien
gcatatccatagcataggtcaacga

SEQ ID NO: 4496248 - DNA, 25 bp, Homo sapien
cgcttagtaagagccatcggcacca

SEQ ID NO: 4496249 - DNA, 25 bp, Homo sapien
tgcaccatcagcactttagttccag

SEQ ID NO: 4496250 - DNA, 25 bp, Homo sapien
tcggcaccaatgatataatatccat

SEQ ID NO: 4496251 - DNA, 25 bp, Homo sapien
gctgtttgccttctcgcttagtaag

SEQ ID NO: 4496252 - DNA, 25 bp, Homo sapien
tggcagtagtctcccctgagggtac

SEQ ID NO: 4496253 - DNA, 25 bp, Homo sapien
ttctcctggagaaggaaccgctgaa

SEQ ID NO: 4496254 - DNA, 25 bp, Homo sapien
caggaaccacttgggtcacgatcca

SEQ ID NO: 4496255 - DNA, 25 bp, Homo sapien
tctggctcggtggtgaactctagga

SEQ ID NO: 4496256 - DNA, 25 bp, Homo sapien
tgccccagaacccaagccataccaa

SEQ ID NO: 4496257 - DNA, 25 bp, Homo sapien
acactgtaggaagacaggggtatgc

SEQ ID NO: 4496258 - DNA, 25 bp, Homo sapien
aagacaggggtatgcagcttcaggg

SEQ ID NO: 4496259 - DNA, 25 bp, Homo sapien
acaggggtatgcagcttcagggtgt

SEQ ID NO: 4496260 - DNA, 25 bp, Homo sapien
tcctctgttgctgcgccagtgggag

SEQ ID NO: 4496261 - DNA, 25 bp, Homo sapien
ttccgaggctgatggttcctctgag

SEQ ID NO: 4496262 - DNA, 25 bp, Homo sapien
gcctgtgaagtcaccactgacatca

SEQ ID NO: 4496263 - DNA, 25 bp, Homo sapien
aggtgtatacggctcttccgaggct

SEQ ID NO: 4496264 - DNA, 25 bp, Homo sapien
cagagggcagtccacttgccctgtc

SEQ ID NO: 4496265 - DNA, 25 bp, Homo sapien
gcctgagcccactgtggaagtaaga

SEQ ID NO: 4496266 - DNA, 25 bp, Homo sapien
taagaccactggagtccaggtctcc

SEQ ID NO: 4496267 - DNA, 25 bp, Homo sapien
cctgtcccctgacagctgcccactg

SEQ ID NO: 4496268 - DNA, 25 bp, Homo sapien
ccaaccgtaggagtgctgggccact

SEQ ID NO: 4496269 - DNA, 25 bp, Homo sapien
tccagagggcagttcaccaaccgta

SEQ ID NO: 4496270 - DNA, 25 bp, Homo sapien
tcttcatcccctgagggtagtccac

SEQ ID NO: 4496271 - DNA, 25 bp, Homo sapien
tccagaaggaagtccactgagatcc

SEQ ID NO: 4496272 - DNA, 25 bp, Homo sapien
aagcccgctgatgtcctctactcca

SEQ ID NO: 4496273 - DNA, 25 bp, Homo sapien
gcccgctgatgtcctctactccagg

SEQ ID NO: 4496274 - DNA, 25 bp, Homo sapien
cccgctgatgtcctctactccaggg

SEQ ID NO: 4496275 - DNA, 25 bp, Homo sapien
agcccgctgatgtcctctactccag

SEQ ID NO: 4496276 - DNA, 25 bp, Homo sapien
cccgctgatgtcctctactccaggg

SEQ ID NO: 4496277 - DNA, 25 bp, Homo sapien
agcccgctgatgtcctctactccag

SEQ ID NO: 4496278 - DNA, 25 bp, Homo sapien
gcccgctgatgtcctctactccagg

SEQ ID NO: 4496279 - DNA, 25 bp, Homo sapien
aagcccgctgatgtcctctactcca

SEQ ID NO: 4496280 - DNA, 25 bp, Homo sapien
cccgctgatgtcctctactccaggg

SEQ ID NO: 4496281 - DNA, 25 bp, Homo sapien
aagcccgctgatgtcctctactcca

SEQ ID NO: 4496282 - DNA, 25 bp, Homo sapien
gcccgctgatgtcctctactccagg

SEQ ID NO: 4496283 - DNA, 25 bp, Homo sapien
agcccgctgatgtcctctactccag

SEQ ID NO: 4496284 - DNA, 25 bp, Homo sapien
gaggtcagtccctacttcagaagca

SEQ ID NO: 4496285 - DNA, 25 bp, Homo sapien
tgaggtcccctaccgcagaggtaga

SEQ ID NO: 4496286 - DNA, 25 bp, Homo sapien
tcctgaaggaagttcactgacatcc

SEQ ID NO: 4496287 - DNA, 25 bp, Homo sapien
gacatcctctattccagaggcagaa

SEQ ID NO: 4496288 - DNA, 25 bp, Homo sapien
gaagtccactaaagtcaggcaggcc

SEQ ID NO: 4496289 - DNA, 25 bp, Homo sapien
cagaaggcagtttgcccaagtccaa

SEQ ID NO: 4496290 - DNA, 25 bp, Homo sapien
cagttgggaatccagatggaagtcc

SEQ ID NO: 4496291 - DNA, 25 bp, Homo sapien
gaaggcaacccactgaggtcctcag

SEQ ID NO: 4496292 - DNA, 25 bp, Homo sapien
ggagggcagtccagatatttctcct

SEQ ID NO: 4496293 - DNA, 25 bp, Homo sapien
ctcactggagggcagtccagatatt

SEQ ID NO: 4496294 - DNA, 25 bp, Homo sapien
gaccacttccaccaatgtagaatcc

SEQ ID NO: 4496295 - DNA, 25 bp, Homo sapien
tgaccacttccaccaatgtagaatc

SEQ ID NO: 4496296 - DNA, 25 bp, Homo sapien
cactcagatcagttatgccaaaggg

SEQ ID NO: 4496297 - DNA, 25 bp, Homo sapien
aagagtccaggtatttccccactga

SEQ ID NO: 4496298 - DNA, 25 bp, Homo sapien
ggaaaccctgatggctgtccactga

SEQ ID NO: 4496299 - DNA, 25 bp, Homo sapien
gggactcctgatgttgccccactga

SEQ ID NO: 4496300 - DNA, 25 bp, Homo sapien
tgggttacagattccaccaaagttc

SEQ ID NO: 4496301 - DNA, 25 bp, Homo sapien
aatatgctcccgagggcaggctgct

SEQ ID NO: 4496302 - DNA, 25 bp, Homo sapien
gaaactagatggagttccactgcca

SEQ ID NO: 4496303 - DNA, 25 bp, Homo sapien
gttctgtctacaagagagacagtgg

SEQ ID NO: 4496304 - DNA, 25 bp, Homo sapien
taaaatatggagtacctggtggctc

SEQ ID NO: 4496305 - DNA, 25 bp, Homo sapien
gactgcagcccacttaggtccagaa

SEQ ID NO: 4496306 - DNA, 25 bp, Homo sapien
tgggctctatcagcccggactgcag

SEQ ID NO: 4496307 - DNA, 25 bp, Homo sapien
aatccagaatgctccccagacatgt

SEQ ID NO: 4496308 - DNA, 25 bp, Homo sapien
gacgtctcactgctagattctggga

SEQ ID NO: 4496309 - DNA, 25 bp, Homo sapien
cagcttcaggataggcggacgtctc

SEQ ID NO: 4496310 - DNA, 25 bp, Homo sapien
gggcctttggcctagttcctgagaa

SEQ ID NO: 4496311 - DNA, 25 bp, Homo sapien
tctgattcacgtttccattccggag

SEQ ID NO: 4496312 - DNA, 25 bp, Homo sapien
acagggctcctctgcacaggacctg

SEQ ID NO: 4496313 - DNA, 25 bp, Homo sapien
gcacaggcatatgacgtgtccctct

SEQ ID NO: 4496314 - DNA, 25 bp, Homo sapien
tatgttacagtgctcgccagtgtag

SEQ ID NO: 4496315 - DNA, 25 bp, Homo sapien
gacgtgtccctctgtctccttgcag

SEQ ID NO: 4496316 - DNA, 25 bp, Homo sapien
caagttggaactgttccaagcaaac

SEQ ID NO: 4496317 - DNA, 25 bp, Homo sapien
agcaataggtcaggccagtcggcag

SEQ ID NO: 4496318 - DNA, 25 bp, Homo sapien
aagcaaacccaaaatgcatggagga

SEQ ID NO: 4496319 - DNA, 25 bp, Homo sapien
catagactagaaccaacagttccaa

SEQ ID NO: 4496320 - DNA, 25 bp, Homo sapien
tagctgggaaggcataagcatgtga

SEQ ID NO: 4496321 - DNA, 25 bp, Homo sapien
agagtcgatggcatccacgcaggtg

SEQ ID NO: 4496322 - DNA, 25 bp, Homo sapien
ggcataagcatgtgaaagagtcgat

SEQ ID NO: 4496323 - DNA, 25 bp, Homo sapien
acacaggtccccttcgtagctggga

SEQ ID NO: 4496324 - DNA, 25 bp, Homo sapien
tcctcgggggtgacgatgctgctca

SEQ ID NO: 4496325 - DNA, 25 bp, Homo sapien
atccacccaggtctcgcggtccggg

SEQ ID NO: 4496326 - DNA, 25 bp, Homo sapien
tccgggaagtggcggtaacagtggc

SEQ ID NO: 4496327 - DNA, 25 bp, Homo sapien
tgctgctcccgacaccggcgctcag

SEQ ID NO: 4496328 - DNA, 25 bp, Homo sapien
catggggtgtccatctgaccagcgg

SEQ ID NO: 4496329 - DNA, 25 bp, Homo sapien
gatccactggtagtcttgggcattg

SEQ ID NO: 4496330 - DNA, 25 bp, Homo sapien
tgaccagcggaagtccccttcgatg

SEQ ID NO: 4496331 - DNA, 25 bp, Homo sapien
ttcaggccgatccactggtagtctt

SEQ ID NO: 4496332 - DNA, 25 bp, Homo sapien
ctccagcggcaaaaaagttgtcagg

SEQ ID NO: 4496333 - DNA, 25 bp, Homo sapien
ctgtgccctttttacacgtgaaggg

SEQ ID NO: 4496334 - DNA, 25 bp, Homo sapien
aacatcattccactcgcccttctcg

SEQ ID NO: 4496335 - DNA, 25 bp, Homo sapien
tcgtgccagatcatcaccacacagt

SEQ ID NO: 4496336 - DNA, 25 bp, Homo sapien
gtgggggtcctgtcttctagcctgt

SEQ ID NO: 4496337 - DNA, 25 bp, Homo sapien
tgggggtcctgtcttctagcctgtg

SEQ ID NO: 4496338 - DNA, 25 bp, Homo sapien
tgtccctgcaaacggtccctggcag

SEQ ID NO: 4496339 - DNA, 25 bp, Homo sapien
tgaccttcatgtgcttgctgtccct

SEQ ID NO: 4496340 - DNA, 25 bp, Homo sapien
tgctggttgtgacccgaggcactgt

SEQ ID NO: 4496341 - DNA, 25 bp, Homo sapien
ctgggatgacctatgctggttgtga

SEQ ID NO: 4496342 - DNA, 25 bp, Homo sapien
acaccctttataaagggtctcatag

SEQ ID NO: 4496343 - DNA, 25 bp, Homo sapien
gggtctcatagggtctcctgggatg

SEQ ID NO: 4496344 - DNA, 25 bp, Homo sapien
gaattgatctcataccggtccttct

SEQ ID NO: 4496345 - DNA, 25 bp, Homo sapien
tctgtgcaggtgatctgaggctcct

SEQ ID NO: 4496346 - DNA, 25 bp, Homo sapien
tggtaccgcaccagggaattgatct

SEQ ID NO: 4496347 - DNA, 25 bp, Homo sapien
tgcccgaaggtcctggcatgctcca

SEQ ID NO: 4496348 - DNA, 25 bp, Homo sapien
tgtgctcagcgagatggccggggtg

SEQ ID NO: 4496349 - DNA, 25 bp, Homo sapien
cctgtgctcagcgagatggccgggg

SEQ ID NO: 4496350 - DNA, 25 bp, Homo sapien
gcgagatggccggggtgatgctcac

SEQ ID NO: 4496351 - DNA, 25 bp, Homo sapien
tgctcagcgagatggccggggtgat

SEQ ID NO: 4496352 - DNA, 25 bp, Homo sapien
tctcccttgtggaaaccaggactca

SEQ ID NO: 4496353 - DNA, 25 bp, Homo sapien
cctgaggctttatcggctttcctga

SEQ ID NO: 4496354 - DNA, 25 bp, Homo sapien
tctcctgggacaagtacgtggccct

SEQ ID NO: 4496355 - DNA, 25 bp, Homo sapien
gggcagtggtcagctatttgtgact

SEQ ID NO: 4496356 - DNA, 25 bp, Homo sapien
gggagatggaaagatatcagtggac

SEQ ID NO: 4496357 - DNA, 25 bp, Homo sapien
cgaaagggagatggaaagatatcag

SEQ ID NO: 4496358 - DNA, 25 bp, Homo sapien
ctaggacgaaagggagatggaaaga

SEQ ID NO: 4496359 - DNA, 25 bp, Homo sapien
aaagggagatggaaagatatcagtg

SEQ ID NO: 4496360 - DNA, 25 bp, Homo sapien
tctgtagtctgcgtttgtaggtggt

SEQ ID NO: 4496361 - DNA, 25 bp, Homo sapien
cggctcctccgagggtgccgtgagc

SEQ ID NO: 4496362 - DNA, 25 bp, Homo sapien
tccgcttctgtagtctgcgtttgta

SEQ ID NO: 4496363 - DNA, 25 bp, Homo sapien
cttctgtagtctgcgtttgtaggtg

SEQ ID NO: 4496364 - DNA, 25 bp, Homo sapien
tcctgggtgcgtcctggaagctctt

SEQ ID NO: 4496365 - DNA, 25 bp, Homo sapien
ggatgcacgtcagcctggcaggctc

SEQ ID NO: 4496366 - DNA, 25 bp, Homo sapien
caaaaagcgacaagaagaggacacc

SEQ ID NO: 4496367 - DNA, 25 bp, Homo sapien
taatgggattccttatatgacaaaa

SEQ ID NO: 4496368 - DNA, 25 bp, Homo sapien
catacacaaatgtgggatttatttt

SEQ ID NO: 4496369 - DNA, 25 bp, Homo sapien
gcatacacaaatgtgggatttattt

SEQ ID NO: 4496370 - DNA, 25 bp, Homo sapien
tgcatacacaaatgtgggatttatt

SEQ ID NO: 4496371 - DNA, 25 bp, Homo sapien
gaggacactgaaagagggacccttg

SEQ ID NO: 4496372 - DNA, 25 bp, Homo sapien
gaaatgtctctaaactcagtccaag

SEQ ID NO: 4496373 - DNA, 25 bp, Homo sapien
tataaataggtgcacggaaccctgg

SEQ ID NO: 4496374 - DNA, 25 bp, Homo sapien
tctccctggaggtgaaataaccaac

SEQ ID NO: 4496375 - DNA, 25 bp, Homo sapien
tcttcagtctcatttggacattccc

SEQ ID NO: 4496376 - DNA, 25 bp, Homo sapien
ggacattcccgtttctgtacctcca

SEQ ID NO: 4496377 - DNA, 25 bp, Homo sapien
agtctcatttggacattcccgtttc

SEQ ID NO: 4496378 - DNA, 25 bp, Homo sapien
catttggacattcccgtttctgtac

SEQ ID NO: 4496379 - DNA, 25 bp, Homo sapien
tcctgaggagttggtggctggatag

SEQ ID NO: 4496380 - DNA, 25 bp, Homo sapien
tggtggtcctgaggagttggtggct

SEQ ID NO: 4496381 - DNA, 25 bp, Homo sapien
ctgaggagttggtggctggatagcc

SEQ ID NO: 4496382 - DNA, 25 bp, Homo sapien
tctgtggtggtcctgaggagttggt

SEQ ID NO: 4496383 - DNA, 25 bp, Homo sapien
gacttgtactcacggaaggcccagt

SEQ ID NO: 4496384 - DNA, 25 bp, Homo sapien
tcgtgcagacctcgcgggcgatgct

SEQ ID NO: 4496385 - DNA, 25 bp, Homo sapien
ggatgtcaaatttctcgctgggagc

SEQ ID NO: 4496386 - DNA, 25 bp, Homo sapien
gggccagcggattgggaaacacctc

SEQ ID NO: 4496387 - DNA, 25 bp, Homo sapien
cgaccctcagggagaaacgtaggct

SEQ ID NO: 4496388 - DNA, 25 bp, Homo sapien
tgggaccttggtgtccagcgctgac

SEQ ID NO: 4496389 - DNA, 25 bp, Homo sapien
cagtatggaaacagcacggcacttg

SEQ ID NO: 4496390 - DNA, 25 bp, Homo sapien
tgacccgcgggagtgcctgtgctcc

SEQ ID NO: 4496391 - DNA, 25 bp, Homo sapien
agagctctagccgtcgaggagctgc

SEQ ID NO: 4496392 - DNA, 25 bp, Homo sapien
ctgctgccttggaccgggacagctc

SEQ ID NO: 4496393 - DNA, 25 bp, Homo sapien
tgctgccttggaccgggacagctcg

SEQ ID NO: 4496394 - DNA, 25 bp, Homo sapien
ccccgagagctctagccgtcgagga

SEQ ID NO: 4496395 - DNA, 25 bp, Homo sapien
gccgatcccaggtgcgtgtgtctct

SEQ ID NO: 4496396 - DNA, 25 bp, Homo sapien
caaagtagggcgtgtggtttccctg

SEQ ID NO: 4496397 - DNA, 25 bp, Homo sapien
tcccatggtggcctcaagaaaggcc

SEQ ID NO: 4496398 - DNA, 25 bp, Homo sapien
gagataacagcctcttgcccgtcgg

SEQ ID NO: 4496399 - DNA, 25 bp, Homo sapien
gagatggtccaagcagagaaaatgt

SEQ ID NO: 4496400 - DNA, 25 bp, Homo sapien
cttctgtaggtggacctgggctcct

SEQ ID NO: 4496401 - DNA, 25 bp, Homo sapien
gaattcatgcctcagtgtgtctgcc

SEQ ID NO: 4496402 - DNA, 25 bp, Homo sapien
tcttttcaccttactggagatggtc

SEQ ID NO: 4496403 - DNA, 25 bp, Homo sapien
cgcttctgaatattttaagaagggc

SEQ ID NO: 4496404 - DNA, 25 bp, Homo sapien
ccgcttctgaatattttaagaaggg

SEQ ID NO: 4496405 - DNA, 25 bp, Homo sapien
cttctgaatattttaagaagggcat

SEQ ID NO: 4496406 - DNA, 25 bp, Homo sapien
gcttctgaatattttaagaagggca

SEQ ID NO: 4496407 - DNA, 25 bp, Homo sapien
caacacaggcttgccaggtaggaca

SEQ ID NO: 4496408 - DNA, 25 bp, Homo sapien
gctcagtatgaggatggaaaattta

SEQ ID NO: 4496409 - DNA, 25 bp, Homo sapien
gttccgttggcatccaacacaggct

SEQ ID NO: 4496410 - DNA, 25 bp, Homo sapien
gccaggtaggacatgctcagtatga

SEQ ID NO: 4496411 - DNA, 25 bp, Homo sapien
gctttgttagtcctggatgagcttg

SEQ ID NO: 4496412 - DNA, 25 bp, Homo sapien
ggcacttgtgctttgttagtcctgg

SEQ ID NO: 4496413 - DNA, 25 bp, Homo sapien
tgtgctttgttagtcctggatgagc

SEQ ID NO: 4496414 - DNA, 25 bp, Homo sapien
cacttgtgctttgttagtcctggat

SEQ ID NO: 4496415 - DNA, 25 bp, Homo sapien
cagggggacatggcccagggcatct

SEQ ID NO: 4496416 - DNA, 25 bp, Homo sapien
gcccagggcatcttcagcatgggcc

SEQ ID NO: 4496417 - DNA, 25 bp, Homo sapien
ggacatggcccagggcatcttcagc

SEQ ID NO: 4496418 - DNA, 25 bp, Homo sapien
cagggcatcttcagcatgggcctgt

SEQ ID NO: 4496419 - DNA, 25 bp, Homo sapien
tttcctagttagccacttagcctgt

SEQ ID NO: 4496420 - DNA, 25 bp, Homo sapien
agtttcctagttagccacttagcct

SEQ ID NO: 4496421 - DNA, 25 bp, Homo sapien
gtttcctagttagccacttagcctg

SEQ ID NO: 4496422 - DNA, 25 bp, Homo sapien
tagtttcctagttagccacttagcc

SEQ ID NO: 4496423 - DNA, 25 bp, Homo sapien
ccacgctgctcgtgagccagacact

SEQ ID NO: 4496424 - DNA, 25 bp, Homo sapien
ggccacgctgctcgtgagccagaca

SEQ ID NO: 4496425 - DNA, 25 bp, Homo sapien
tggccacgctgctcgtgagccagac

SEQ ID NO: 4496426 - DNA, 25 bp, Homo sapien
gccacgctgctcgtgagccagacac

SEQ ID NO: 4496427 - DNA, 25 bp, Homo sapien
ggagcaggacatgaagatccaggag

SEQ ID NO: 4496428 - DNA, 25 bp, Homo sapien
atccaggagaataagcccccagcac

SEQ ID NO: 4496429 - DNA, 25 bp, Homo sapien
gagcaggacatgaagatccaggaga

SEQ ID NO: 4496430 - DNA, 25 bp, Homo sapien
attgtccacagaattatctgagccc

SEQ ID NO: 4496431 - DNA, 25 bp, Homo sapien
aagtgacatcaacgacctcgcagat

SEQ ID NO: 4496432 - DNA, 25 bp, Homo sapien
tctgccctgatcttgctgatgtacc

SEQ ID NO: 4496433 - DNA, 25 bp, Homo sapien
tcttgctgatgtaccgagatctggg

SEQ ID NO: 4496434 - DNA, 25 bp, Homo sapien
tcgcagatctcatggatgtcactct

SEQ ID NO: 4496435 - DNA, 25 bp, Homo sapien
ccagtacttgtccagctcctctcgg

SEQ ID NO: 4496436 - DNA, 25 bp, Homo sapien
agtacttgtccagctcctctcggtt

SEQ ID NO: 4496437 - DNA, 25 bp, Homo sapien
acttgtccagctcctctcggttctt

SEQ ID NO: 4496438 - DNA, 25 bp, Homo sapien
gtacttgtccagctcctctcggttc

SEQ ID NO: 4496439 - DNA, 25 bp, Homo sapien
tgtggtgccctcctcagtctgctgg

SEQ ID NO: 4496440 - DNA, 25 bp, Homo sapien
ctgtggtgccctcctcagtctgctg

SEQ ID NO: 4496441 - DNA, 25 bp, Homo sapien
cactgtggtgccctcctcagtctgc

SEQ ID NO: 4496442 - DNA, 25 bp, Homo sapien
tggtgccctcctcagtctgctggga

SEQ ID NO: 4496443 - DNA, 25 bp, Homo sapien
gctccatggactgctaagatgacat

SEQ ID NO: 4496444 - DNA, 25 bp, Homo sapien
tccatggactgctaagatgacattt

SEQ ID NO: 4496445 - DNA, 25 bp, Homo sapien
ctccatggactgctaagatgacatt

SEQ ID NO: 4496446 - DNA, 25 bp, Homo sapien
catggactgctaagatgacatttac

SEQ ID NO: 4496447 - DNA, 25 bp, Homo sapien
agctggccttcagatattgagtcca

SEQ ID NO: 4496448 - DNA, 25 bp, Homo sapien
caagctggccttcagatattgagtc

SEQ ID NO: 4496449 - DNA, 25 bp, Homo sapien
ctccaagctggccttcagatattga

SEQ ID NO: 4496450 - DNA, 25 bp, Homo sapien
tccaagctggccttcagatattgag

SEQ ID NO: 4496451 - DNA, 25 bp, Homo sapien
agtgaacctccaccaccctcaggct

SEQ ID NO: 4496452 - DNA, 25 bp, Homo sapien
ggtgtagtgaacctccaccaccctc

SEQ ID NO: 4496453 - DNA, 25 bp, Homo sapien
gtgtagtgaacctccaccaccctca

SEQ ID NO: 4496454 - DNA, 25 bp, Homo sapien
gaacctccaccaccctcaggctgtt

SEQ ID NO: 4496455 - DNA, 25 bp, Homo sapien
tcaccgagaatgaagtcctccctgt

SEQ ID NO: 4496456 - DNA, 25 bp, Homo sapien
atcaccgagaatgaagtcctccctg

SEQ ID NO: 4496457 - DNA, 25 bp, Homo sapien
catcaccgagaatgaagtcctccct

SEQ ID NO: 4496458 - DNA, 25 bp, Homo sapien
aatttcctcagcgtggagccagcac

SEQ ID NO: 4496459 - DNA, 25 bp, Homo sapien
ctgccagtcctttgaatgctggaat

SEQ ID NO: 4496460 - DNA, 25 bp, Homo sapien
gagccagcacttctcctgtcactca

SEQ ID NO: 4496461 - DNA, 25 bp, Homo sapien
gaatgctggaatttcctcagcgtgg

SEQ ID NO: 4496462 - DNA, 25 bp, Homo sapien
ttgccaagacggtgaagacacttta

SEQ ID NO: 4496463 - DNA, 25 bp, Homo sapien
gaagacactttatccagcaactgaa

SEQ ID NO: 4496464 - DNA, 25 bp, Homo sapien
tccagcaactgaaagcgtgtctttt

SEQ ID NO: 4496465 - DNA, 25 bp, Homo sapien
gccctgatgttgtcactggcaagga

SEQ ID NO: 4496466 - DNA, 25 bp, Homo sapien
gggcaggaaggaaggtcagtgccat

SEQ ID NO: 4496467 - DNA, 25 bp, Homo sapien
ctgggcaggaaggaaggtcagtgcc

SEQ ID NO: 4496468 - DNA, 25 bp, Homo sapien
tgggcaggaaggaaggtcagtgcca

SEQ ID NO: 4496469 - DNA, 25 bp, Homo sapien
catctattgagggcagtgataccca

SEQ ID NO: 4496470 - DNA, 25 bp, Homo sapien
ctgcttcatctattgagggcagtga

SEQ ID NO: 4496471 - DNA, 25 bp, Homo sapien
gcttcatctattgagggcagtgata

SEQ ID NO: 4496472 - DNA, 25 bp, Homo sapien
ttcatctattgagggcagtgatacc

SEQ ID NO: 4496473 - DNA, 25 bp, Homo sapien
tggaacttgctccaatttatggcaa

SEQ ID NO: 4496474 - DNA, 25 bp, Homo sapien
gaggttacgtagcagaccagggacc

SEQ ID NO: 4496475 - DNA, 25 bp, Homo sapien
gtttaattgagcctgtggaccaact

SEQ ID NO: 4496476 - DNA, 25 bp, Homo sapien
cagcaacaacttctagcacaaacag

SEQ ID NO: 4496477 - DNA, 25 bp, Homo sapien
cagagcagaatcactcttctgcggg

SEQ ID NO: 4496478 - DNA, 25 bp, Homo sapien
gaacggtccctgtgacaatcaagca

SEQ ID NO: 4496479 - DNA, 25 bp, Homo sapien
tctggcatctagcagcattgactag

SEQ ID NO: 4496480 - DNA, 25 bp, Homo sapien
tgctcacacactcgagaaatacgtg

SEQ ID NO: 4496481 - DNA, 25 bp, Homo sapien
cagagctcggcagcggcagttcatc

SEQ ID NO: 4496482 - DNA, 25 bp, Homo sapien
gctcggcagcggcagttcatctctg

SEQ ID NO: 4496483 - DNA, 25 bp, Homo sapien
cggcagcggcagttcatctctgttc

SEQ ID NO: 4496484 - DNA, 25 bp, Homo sapien
ttctgcaacgtgggcagagctcggc

SEQ ID NO: 4496485 - DNA, 25 bp, Homo sapien
ccttaggcctgagctacggtgttca

SEQ ID NO: 4496486 - DNA, 25 bp, Homo sapien
caaaccatatcagtacctcaaagtg

SEQ ID NO: 4496487 - DNA, 25 bp, Homo sapien
tctgtccctcccttgagccattgta

SEQ ID NO: 4496488 - DNA, 25 bp, Homo sapien
atccttccaggaagagtatgaggta

SEQ ID NO: 4496489 - DNA, 25 bp, Homo sapien
aaggcagtgggactgctcttgctcc

SEQ ID NO: 4496490 - DNA, 25 bp, Homo sapien
tccaaggggcgccatcataggtatg

SEQ ID NO: 4496491 - DNA, 25 bp, Homo sapien
tgcaaaggcagtgggactgctcttg

SEQ ID NO: 4496492 - DNA, 25 bp, Homo sapien
gcagtgggactgctcttgctccaag

SEQ ID NO: 4496493 - DNA, 25 bp, Homo sapien
tgcccgaatgcccgaacaaccttta

SEQ ID NO: 4496494 - DNA, 25 bp, Homo sapien
tgacaaacagcaaacttggggcctt

SEQ ID NO: 4496495 - DNA, 25 bp, Homo sapien
gaatgcccgaacaacctttatattc

SEQ ID NO: 4496496 - DNA, 25 bp, Homo sapien
aacctttatattcctgacaaacagc

SEQ ID NO: 4496497 - DNA, 25 bp, Homo sapien
cccagagcagagttacagccaatcc

SEQ ID NO: 4496498 - DNA, 25 bp, Homo sapien
cagagttacagccaatccacaacat

SEQ ID NO: 4496499 - DNA, 25 bp, Homo sapien
tttttcttctgcctggagactagta

SEQ ID NO: 4496500 - DNA, 25 bp, Homo sapien
gtaatgttccagatagagcctgctc

SEQ ID NO: 4496501 - DNA, 25 bp, Homo sapien
ctgctgcaagctcactccatccata

SEQ ID NO: 4496502 - DNA, 25 bp, Homo sapien
tctgctgcaagctcactccatccat

SEQ ID NO: 4496503 - DNA, 25 bp, Homo sapien
tgctgcaagctcactccatccataa

SEQ ID NO: 4496504 - DNA, 25 bp, Homo sapien
ctctgctgcaagctcactccatcca

SEQ ID NO: 4496505 - DNA, 25 bp, Homo sapien
ccctgcttgggaagcacctctggtt

SEQ ID NO: 4496506 - DNA, 25 bp, Homo sapien
catcttggtagcttgggactctggt

SEQ ID NO: 4496507 - DNA, 25 bp, Homo sapien
cagcagttggctttcagttcttctt

SEQ ID NO: 4496508 - DNA, 25 bp, Homo sapien
ctgcatccagcagttggctttcagt

SEQ ID NO: 4496509 - DNA, 25 bp, Homo sapien
ggattcttggagatttgaattggtt

SEQ ID NO: 4496510 - DNA, 25 bp, Homo sapien
gggctgaatttggtagggcagcatt

SEQ ID NO: 4496511 - DNA, 25 bp, Homo sapien
ggtttttgaaggtctatgggctgaa

SEQ ID NO: 4496512 - DNA, 25 bp, Homo sapien
cagcattggcggtgagggagcatgg

SEQ ID NO: 4496513 - DNA, 25 bp, Homo sapien
aaatgggaaatattgacgagataac

SEQ ID NO: 4496514 - DNA, 25 bp, Homo sapien
tactagaaagacagaatcatgaagt

SEQ ID NO: 4496515 - DNA, 25 bp, Homo sapien
gagcaagacatctaatactagaaag

SEQ ID NO: 4496516 - DNA, 25 bp, Homo sapien
cgagataactcaaaggactgagcaa

SEQ ID NO: 4496517 - DNA, 25 bp, Homo sapien
ctcaaatttcgcaggggtgaaattt

SEQ ID NO: 4496518 - DNA, 25 bp, Homo sapien
aatttcgcaggggtgaaatttgagg

SEQ ID NO: 4496519 - DNA, 25 bp, Homo sapien
gtactcaaatttcgcaggggtgaaa

SEQ ID NO: 4496520 - DNA, 25 bp, Homo sapien
gtgtactcaaatttcgcaggggtga

SEQ ID NO: 4496521 - DNA, 25 bp, Homo sapien
gcgtgtgattgactacaggtgctca

SEQ ID NO: 4496522 - DNA, 25 bp, Homo sapien
tgccagcggcgctcatggatataca

SEQ ID NO: 4496523 - DNA, 25 bp, Homo sapien
cacggaaaccgcttgttcattgggc

SEQ ID NO: 4496524 - DNA, 25 bp, Homo sapien
ggatccattgatcagcgaagctgtt

SEQ ID NO: 4496525 - DNA, 25 bp, Homo sapien
tcagatgtagtaactccatgcactt

SEQ ID NO: 4496526 - DNA, 25 bp, Homo sapien
aaatgcttcagatgtagtaactcca

SEQ ID NO: 4496527 - DNA, 25 bp, Homo sapien
gcttcagatgtagtaactccatgca

SEQ ID NO: 4496528 - DNA, 25 bp, Homo sapien
acaatcttctaacataagtatcatt

SEQ ID NO: 4496529 - DNA, 25 bp, Homo sapien
caagacgaaggttaaggcacattca

SEQ ID NO: 4496530 - DNA, 25 bp, Homo sapien
tcggcatcagtggaaccctttgtta

SEQ ID NO: 4496531 - DNA, 25 bp, Homo sapien
caggctcagaccttggaagtttaaa

SEQ ID NO: 4496532 - DNA, 25 bp, Homo sapien
ctttgttagcgaggccaggtcaggc

SEQ ID NO: 4496533 - DNA, 25 bp, Homo sapien
tctgtggtacaactgactaataatg

SEQ ID NO: 4496534 - DNA, 25 bp, Homo sapien
tgtaacacagtatctgtggtacaac

SEQ ID NO: 4496535 - DNA, 25 bp, Homo sapien
cacagtatctgtggtacaactgact

SEQ ID NO: 4496536 - DNA, 25 bp, Homo sapien
tgtggtacaactgactaataatgtg

SEQ ID NO: 4496537 - DNA, 25 bp, Homo sapien
ggaaaaagtggaactgataacacca

SEQ ID NO: 4496538 - DNA, 25 bp, Homo sapien
gaaaaagtggaactgataacaccac

SEQ ID NO: 4496539 - DNA, 25 bp, Homo sapien
cagcctggaaaatgacgctacacag

SEQ ID NO: 4496540 - DNA, 25 bp, Homo sapien
ctgtgcactgttgttcatatgaggg

SEQ ID NO: 4496541 - DNA, 25 bp, Homo sapien
cttggctgtgcgcatagggctgtgc

SEQ ID NO: 4496542 - DNA, 25 bp, Homo sapien
gctacacaggtgctgccttggctgt

SEQ ID NO: 4496543 - DNA, 25 bp, Homo sapien
caccctcgtggataaagcagtggct

SEQ ID NO: 4496544 - DNA, 25 bp, Homo sapien
cataagtagggagcaccctcgtgga

SEQ ID NO: 4496545 - DNA, 25 bp, Homo sapien
aaagcagtggcttgcaaatgaagag

SEQ ID NO: 4496546 - DNA, 25 bp, Homo sapien
taattcactggcataagtagggagc

SEQ ID NO: 4496547 - DNA, 25 bp, Homo sapien
aggcaaggaactggccatcaaggaa

SEQ ID NO: 4496548 - DNA, 25 bp, Homo sapien
tggccatcaaggaagatggtttcat

SEQ ID NO: 4496549 - DNA, 25 bp, Homo sapien
cattcgtcttgcctcctcatcagtt

SEQ ID NO: 4496550 - DNA, 25 bp, Homo sapien
aggagctcttcctccgctgggcttt

SEQ ID NO: 4496551 - DNA, 25 bp, Homo sapien
ctccgctgggctttcccaatacatt

SEQ ID NO: 4496552 - DNA, 25 bp, Homo sapien
tttcccaatacattcgtcttgcctc

SEQ ID NO: 4496553 - DNA, 25 bp, Homo sapien
gagacaaatgctaccagctaaatcc

SEQ ID NO: 4496554 - DNA, 25 bp, Homo sapien
aggatctcctgccagtttagagcag

SEQ ID NO: 4496555 - DNA, 25 bp, Homo sapien
aaatgctaccagctaaatccagata

SEQ ID NO: 4496556 - DNA, 25 bp, Homo sapien
ggatctcctgccagtttagagcaga

SEQ ID NO: 4496557 - DNA, 25 bp, Homo sapien
atgctgaattctgccacctgggagc

SEQ ID NO: 4496558 - DNA, 25 bp, Homo sapien
aacagcgcccctcagggctcggcca

SEQ ID NO: 4496559 - DNA, 25 bp, Homo sapien
ctgggagcaacagcgcccctcaggg

SEQ ID NO: 4496560 - DNA, 25 bp, Homo sapien
attctgccacctgggagcaacagcg

SEQ ID NO: 4496561 - DNA, 25 bp, Homo sapien
gagcgttctggtttcccaacgccga

SEQ ID NO: 4496562 - DNA, 25 bp, Homo sapien
tctggtttcccaacgccgactggga

SEQ ID NO: 4496563 - DNA, 25 bp, Homo sapien
cccaacgccgactgggagcagacaa

SEQ ID NO: 4496564 - DNA, 25 bp, Homo sapien
ctgagcgttctggtttcccaacgcc

SEQ ID NO: 4496565 - DNA, 25 bp, Homo sapien
aagagttgtacagttgggccggtca

SEQ ID NO: 4496566 - DNA, 25 bp, Homo sapien
agttgggccggtcaggtcagatctc

SEQ ID NO: 4496567 - DNA, 25 bp, Homo sapien
tccttgaagagttgtacagttgggc

SEQ ID NO: 4496568 - DNA, 25 bp, Homo sapien
tgcaaatacgaattttccttgaaga

SEQ ID NO: 4496569 - DNA, 25 bp, Homo sapien
tcttcaggttcaaacaccggacgat

SEQ ID NO: 4496570 - DNA, 25 bp, Homo sapien
gagagccccgagtcctggaagtaga

SEQ ID NO: 4496571 - DNA, 25 bp, Homo sapien
catcaaacacggctgggagttcggg

SEQ ID NO: 4496572 - DNA, 25 bp, Homo sapien
tctttggtcagaagaggacaggact

SEQ ID NO: 4496573 - DNA, 25 bp, Homo sapien
cagaagatgtccgtgctgaagggca

SEQ ID NO: 4496574 - DNA, 25 bp, Homo sapien
aaaaccacagggatgattgcccaca

SEQ ID NO: 4496575 - DNA, 25 bp, Homo sapien
caaacgtgagtagacaggtagcagc

SEQ ID NO: 4496576 - DNA, 25 bp, Homo sapien
tttgctaacaaagcaagggtaccag

SEQ ID NO: 4496577 - DNA, 25 bp, Homo sapien
tttagatctttcaggcttcggcaat

SEQ ID NO: 4496578 - DNA, 25 bp, Homo sapien
caggtatgatgaatagggcggtata

SEQ ID NO: 4496579 - DNA, 25 bp, Homo sapien
aatagggcggtataagggtcataca

SEQ ID NO: 4496580 - DNA, 25 bp, Homo sapien
ctgaagagtaaactcaggtatgatg

SEQ ID NO: 4496581 - DNA, 25 bp, Homo sapien
gtaaactcaggtatgatgaataggg

SEQ ID NO: 4496582 - DNA, 25 bp, Homo sapien
gataccacgtgatggaatcagttgt

SEQ ID NO: 4496583 - DNA, 25 bp, Homo sapien
cagttgtagcatatacttccttttg

SEQ ID NO: 4496584 - DNA, 25 bp, Homo sapien
tactgaatttgataccacgtgatgg

SEQ ID NO: 4496585 - DNA, 25 bp, Homo sapien
tgtagcatatacttccttttggaag

SEQ ID NO: 4496586 - DNA, 25 bp, Homo sapien
taaggatgaatggtgaaccaaggtg

SEQ ID NO: 4496587 - DNA, 25 bp, Homo sapien
aacaggaccttacacgtggagccaa

SEQ ID NO: 4496588 - DNA, 25 bp, Homo sapien
ggaccttacacgtggagccaaggcc

SEQ ID NO: 4496589 - DNA, 25 bp, Homo sapien
aagcaaatgaggtgtaagctaaaag

SEQ ID NO: 4496590 - DNA, 25 bp, Homo sapien
ctatcatagtgaaggagggcatgct

SEQ ID NO: 4496591 - DNA, 25 bp, Homo sapien
tggctatccttagaaattcgagact

SEQ ID NO: 4496592 - DNA, 25 bp, Homo sapien
cagtggagatcaaaattggcaacct

SEQ ID NO: 4496593 - DNA, 25 bp, Homo sapien
ccggatagtggagcaattttcagtc

SEQ ID NO: 4496594 - DNA, 25 bp, Homo sapien
gcaacacggagggtacaaggtcata

SEQ ID NO: 4496595 - DNA, 25 bp, Homo sapien
taaacaagagccgactgacagcaag

SEQ ID NO: 4496596 - DNA, 25 bp, Homo sapien
tcttgtccacaaagtgagagagcgc

SEQ ID NO: 4496597 - DNA, 25 bp, Homo sapien
ctatactgacaggtgcgcatcgtga

SEQ ID NO: 4496598 - DNA, 25 bp, Homo sapien
agttgtagccattttgttgacattc

SEQ ID NO: 4496599 - DNA, 25 bp, Homo sapien
gaaaaagttgtagccattttgttga

SEQ ID NO: 4496600 - DNA, 25 bp, Homo sapien
aaagaaagaacacaccaatcaagag

SEQ ID NO: 4496601 - DNA, 25 bp, Homo sapien
ccaatcaagagatgactttaaggat

SEQ ID NO: 4496602 - DNA, 25 bp, Homo sapien
tttgtgcaaacttgtagggaggcac

SEQ ID NO: 4496603 - DNA, 25 bp, Homo sapien
catacgaaagagaaacgaaaacctg

SEQ ID NO: 4496604 - DNA, 25 bp, Homo sapien
gcagacagggcccatacgaaagaga

SEQ ID NO: 4496605 - DNA, 25 bp, Homo sapien
tagggaggcacataagaacaaacat

SEQ ID NO: 4496606 - DNA, 25 bp, Homo sapien
taacatagcacgtgagtggaagcct

SEQ ID NO: 4496607 - DNA, 25 bp, Homo sapien
tgtcaggtccacaggtctttcagta

SEQ ID NO: 4496608 - DNA, 25 bp, Homo sapien
ccactgaggcaaaacgcagaggtgt

SEQ ID NO: 4496609 - DNA, 25 bp, Homo sapien
ttccaaagcatcaggtacaagaagg

SEQ ID NO: 4496610 - DNA, 25 bp, Homo sapien
tagaaccaatgtgatgagaccaaac

SEQ ID NO: 4496611 - DNA, 25 bp, Homo sapien
gctagggagttcatggcttggccac

SEQ ID NO: 4496612 - DNA, 25 bp, Homo sapien
ggccacattcacactgctagtcaag

SEQ ID NO: 4496613 - DNA, 25 bp, Homo sapien
ggcagatactgttaaccccacttta

SEQ ID NO: 4496614 - DNA, 25 bp, Homo sapien
gctgctaaaatggtacacgaaggaa

SEQ ID NO: 4496615 - DNA, 25 bp, Homo sapien
ccagtcacatggtttaggtcaggaa

SEQ ID NO: 4496616 - DNA, 25 bp, Homo sapien
tgtggtagttcgaaaatgtagcggc

SEQ ID NO: 4496617 - DNA, 25 bp, Homo sapien
tattccattcttctgccgggagcta

SEQ ID NO: 4496618 - DNA, 25 bp, Homo sapien
ggtcgaatgtagaagtggctccatc

SEQ ID NO: 4496619 - DNA, 25 bp, Homo sapien
tcagccaagggctcgaagaggtcga

SEQ ID NO: 4496620 - DNA, 25 bp, Homo sapien
tgcccataaggatgtggcgacctca

SEQ ID NO: 4496621 - DNA, 25 bp, Homo sapien
tcagacatagtgatgaacttccggt

SEQ ID NO: 4496622 - DNA, 25 bp, Homo sapien
aaagagatcctgatgtatccaagaa

SEQ ID NO: 4496623 - DNA, 25 bp, Homo sapien
gaaagagatcctgatgtatccaaga

SEQ ID NO: 4496624 - DNA, 25 bp, Homo sapien
ctatagcgtagagaaagagatcctg

SEQ ID NO: 4496625 - DNA, 25 bp, Homo sapien
aagagatcctgatgtatccaagaaa

SEQ ID NO: 4496626 - DNA, 25 bp, Homo sapien
tccagggcagatgaccatggtgata

SEQ ID NO: 4496627 - DNA, 25 bp, Homo sapien
tctgggcgtagtcaacgaaagtgcg

SEQ ID NO: 4496628 - DNA, 25 bp, Homo sapien
aaagtgcggatgtattgcttctcgc

SEQ ID NO: 4496629 - DNA, 25 bp, Homo sapien
catgcgtggcgaggtcaattcaatg

SEQ ID NO: 4496630 - DNA, 25 bp, Homo sapien
caggttagctaatgtctttatcaaa

SEQ ID NO: 4496631 - DNA, 25 bp, Homo sapien
tactcttgtaggtgttcttcacatt

SEQ ID NO: 4496632 - DNA, 25 bp, Homo sapien
cctcgcttggcacaataagaaattt

SEQ ID NO: 4496633 - DNA, 25 bp, Homo sapien
ggttaaaatgtagcatgtactacag

SEQ ID NO: 4496634 - DNA, 25 bp, Homo sapien
ttgcacacaatgttaccacccaggc

SEQ ID NO: 4496635 - DNA, 25 bp, Homo sapien
aggctgaagcccacgacgaccagct

SEQ ID NO: 4496636 - DNA, 25 bp, Homo sapien
agtctcccccaagtatttgcacaca

SEQ ID NO: 4496637 - DNA, 25 bp, Homo sapien
tcttgatgtagttcaccatggctcc

SEQ ID NO: 4496638 - DNA, 25 bp, Homo sapien
ccatgtttgtaccacacaagggagt

SEQ ID NO: 4496639 - DNA, 25 bp, Homo sapien
ggtagagcctctggacccaaaagac

SEQ ID NO: 4496640 - DNA, 25 bp, Homo sapien
tcagactagagtagggatggccacc

SEQ ID NO: 4496641 - DNA, 25 bp, Homo sapien
aagagggcacgatcctaggcaggct

SEQ ID NO: 4496642 - DNA, 25 bp, Homo sapien
ttagctctctagacactgcacaaat

SEQ ID NO: 4496643 - DNA, 25 bp, Homo sapien
tattggagctggtagtggctacact

SEQ ID NO: 4496644 - DNA, 25 bp, Homo sapien
tcacaaaatgggcacgaaaccaggg

SEQ ID NO: 4496645 - DNA, 25 bp, Homo sapien
ctaggtctcggcctccttccaaagt

SEQ ID NO: 4496646 - DNA, 25 bp, Homo sapien
gagtcttttagagctacctagtgaa

SEQ ID NO: 4496647 - DNA, 25 bp, Homo sapien
cagcacttccatgagacaatcaagg

SEQ ID NO: 4496648 - DNA, 25 bp, Homo sapien
tcaaggaaatctggacactgactag

SEQ ID NO: 4496649 - DNA, 25 bp, Homo sapien
taggcagtatgtggatcctgattca

SEQ ID NO: 4496650 - DNA, 25 bp, Homo sapien
aggactgatgtcttcaataccaaca

SEQ ID NO: 4496651 - DNA, 25 bp, Homo sapien
caccctgaagggtcaaaaggccact

SEQ ID NO: 4496652 - DNA, 25 bp, Homo sapien
gactttggatccaagccacccagag

SEQ ID NO: 4496653 - DNA, 25 bp, Homo sapien
gaagagtataggaccagaccaccat

SEQ ID NO: 4496654 - DNA, 25 bp, Homo sapien
ggaccccggctaaagcaggactgtg

SEQ ID NO: 4496655 - DNA, 25 bp, Homo sapien
ctggaagaaccacagcgagtgaggg

SEQ ID NO: 4496656 - DNA, 25 bp, Homo sapien
tggaagaaccacagcgagtgagggt

SEQ ID NO: 4496657 - DNA, 25 bp, Homo sapien
agaaccgccggcactgatcccattg

SEQ ID NO: 4496658 - DNA, 25 bp, Homo sapien
gaggaagttgtagaaccgccggcac

SEQ ID NO: 4496659 - DNA, 25 bp, Homo sapien
ctgtgcgagaggatgatcttcttca

SEQ ID NO: 4496660 - DNA, 25 bp, Homo sapien
tgcgagaggatgatcttcttcatgt

SEQ ID NO: 4496661 - DNA, 25 bp, Homo sapien
ctggaagcggactgaatttgttgag

SEQ ID NO: 4496662 - DNA, 25 bp, Homo sapien
tggaagcggactgaatttgttgagg

SEQ ID NO: 4496663 - DNA, 25 bp, Homo sapien
atgttgctgtgtagagccggctcaa

SEQ ID NO: 4496664 - DNA, 25 bp, Homo sapien
cttaacatggtctccaaaaagagct

SEQ ID NO: 4496665 - DNA, 25 bp, Homo sapien
ttcttaacatggtctccaaaaagag

SEQ ID NO: 4496666 - DNA, 25 bp, Homo sapien
gctcaagtccgtgtcttccaggctc

SEQ ID NO: 4496667 - DNA, 25 bp, Homo sapien
tcttcctcatagtattccttcaggg

SEQ ID NO: 4496668 - DNA, 25 bp, Homo sapien
ggtaccgcatgcaactttcttcctc

SEQ ID NO: 4496669 - DNA, 25 bp, Homo sapien
cagggagttatagccgtgaaacttc

SEQ ID NO: 4496670 - DNA, 25 bp, Homo sapien
gtgcaggtaccgcatgcaactttct

SEQ ID NO: 4496671 - DNA, 25 bp, Homo sapien
ctttcatgcaccaacggatcgtcag

SEQ ID NO: 4496672 - DNA, 25 bp, Homo sapien
tcagctgcattaaccagcatgagag

SEQ ID NO: 4496673 - DNA, 25 bp, Homo sapien
caccaacggatcgtcagctgcatta

SEQ ID NO: 4496674 - DNA, 25 bp, Homo sapien
gaatggttagaagactttcatgcac

SEQ ID NO: 4496675 - DNA, 25 bp, Homo sapien
gccaacacacctagtctcgaatttt

SEQ ID NO: 4496676 - DNA, 25 bp, Homo sapien
cacacctagtctcgaattttaaatc

SEQ ID NO: 4496677 - DNA, 25 bp, Homo sapien
tgagccaacacacctagtctcgaat

SEQ ID NO: 4496678 - DNA, 25 bp, Homo sapien
cacctagtctcgaattttaaatcta

SEQ ID NO: 4496679 - DNA, 25 bp, Homo sapien
tagcttgctgcagcctcgaacttct

SEQ ID NO: 4496680 - DNA, 25 bp, Homo sapien
gcttgctgcagcctcgaacttctgg

SEQ ID NO: 4496681 - DNA, 25 bp, Homo sapien
ttgctgcagcctcgaacttctggac

SEQ ID NO: 4496682 - DNA, 25 bp, Homo sapien
catagcttgctgcagcctcgaactt

SEQ ID NO: 4496683 - DNA, 25 bp, Homo sapien
aatgggcaccagctgaagaaagcct

SEQ ID NO: 4496684 - DNA, 25 bp, Homo sapien
tgaatgggcaccagctgaagaaagc

SEQ ID NO: 4496685 - DNA, 25 bp, Homo sapien
gggcaccagctgaagaaagccttag

SEQ ID NO: 4496686 - DNA, 25 bp, Homo sapien
tgggcaccagctgaagaaagcctta

SEQ ID NO: 4496687 - DNA, 25 bp, Homo sapien
caacttgttacgctcccattggcaa

SEQ ID NO: 4496688 - DNA, 25 bp, Homo sapien
cagcacaaacatgacgttctctcgt

SEQ ID NO: 4496689 - DNA, 25 bp, Homo sapien
gcaaatggcgttggcgtactccacc

SEQ ID NO: 4496690 - DNA, 25 bp, Homo sapien
agagccctcaaagaagcccaagtgg

SEQ ID NO: 4496691 - DNA, 25 bp, Homo sapien
tgaggtcagatccaggtcactgagg

SEQ ID NO: 4496692 - DNA, 25 bp, Homo sapien
ctgctggagcgtgccagagtccgga

SEQ ID NO: 4496693 - DNA, 25 bp, Homo sapien
tactccgagacaggtgtgcatggtg

SEQ ID NO: 4496694 - DNA, 25 bp, Homo sapien
agagctgcctactccgagacaggtg

SEQ ID NO: 4496695 - DNA, 25 bp, Homo sapien
ttaatagggaaactagatgtacttg

SEQ ID NO: 4496696 - DNA, 25 bp, Homo sapien
taaaagcaaccagatgctgaaactg

SEQ ID NO: 4496697 - DNA, 25 bp, Homo sapien
aaactggacagagggcaagaactct

SEQ ID NO: 4496698 - DNA, 25 bp, Homo sapien
ggaaactagatgtacttggcttaaa

SEQ ID NO: 4496699 - DNA, 25 bp, Homo sapien
tctcaggagacagggcgaaaacttg

SEQ ID NO: 4496700 - DNA, 25 bp, Homo sapien
tttgtccagggtgaaaagcagagcc

SEQ ID NO: 4496701 - DNA, 25 bp, Homo sapien
cagcaaagcgtagggaaatggtctc

SEQ ID NO: 4496702 - DNA, 25 bp, Homo sapien
gatattcaagtaccacaggatcgga

SEQ ID NO: 4496703 - DNA, 25 bp, Homo sapien
gatgccgggcatataagctcagcta

SEQ ID NO: 4496704 - DNA, 25 bp, Homo sapien
taataccagggattctctagaggca

SEQ ID NO: 4496705 - DNA, 25 bp, Homo sapien
taagataacaaggagcctacaggcc

SEQ ID NO: 4496706 - DNA, 25 bp, Homo sapien
aaattgcttatgagacacggagtgc

SEQ ID NO: 4496707 - DNA, 25 bp, Homo sapien
gctgctgtgcaatcctgcaagtatg

SEQ ID NO: 4496708 - DNA, 25 bp, Homo sapien
cccggctgctgtgcaatcctgcaag

SEQ ID NO: 4496709 - DNA, 25 bp, Homo sapien
tgctgtgcaatcctgcaagtatgaa

SEQ ID NO: 4496710 - DNA, 25 bp, Homo sapien
cggctgctgtgcaatcctgcaagta

SEQ ID NO: 4496711 - DNA, 25 bp, Homo sapien
agcgcttgcctggccgcccaactgt

SEQ ID NO: 4496712 - DNA, 25 bp, Homo sapien
gcttgcctggccgcccaactgtctg

SEQ ID NO: 4496713 - DNA, 25 bp, Homo sapien
cgcttgcctggccgcccaactgtct

SEQ ID NO: 4496714 - DNA, 25 bp, Homo sapien
ggagcgcttgcctggccgcccaact

SEQ ID NO: 4496715 - DNA, 25 bp, Homo sapien
tcaccggtactgtgtgaggcccaac

SEQ ID NO: 4496716 - DNA, 25 bp, Homo sapien
gcagcacggaggctttcagaacaca

SEQ ID NO: 4496717 - DNA, 25 bp, Homo sapien
gaatgcatctaagcaagacgggccc

SEQ ID NO: 4496718 - DNA, 25 bp, Homo sapien
ttcaaagtgaagactaccgtgcctc

SEQ ID NO: 4496719 - DNA, 25 bp, Homo sapien
ctcttgttgcacgaatgcatcatct

SEQ ID NO: 4496720 - DNA, 25 bp, Homo sapien
tgtgtctacccactggcattgatgc

SEQ ID NO: 4496721 - DNA, 25 bp, Homo sapien
tcttgtctcctcttgttgcacgaat

SEQ ID NO: 4496722 - DNA, 25 bp, Homo sapien
cattgatgcctcagggttcttgtct

SEQ ID NO: 4496723 - DNA, 25 bp, Homo sapien
aagcccgctcaacccaacgccgcca

SEQ ID NO: 4496724 - DNA, 25 bp, Homo sapien
cgctcaacccaacgccgccacactt

SEQ ID NO: 4496725 - DNA, 25 bp, Homo sapien
cgtaacaacaagatccgcccccgcg

SEQ ID NO: 4496726 - DNA, 25 bp, Homo sapien
taacaacaagatccgcccccgcggc

SEQ ID NO: 4496727 - DNA, 25 bp, Homo sapien
acaggcccttccacatgtttccatc

SEQ ID NO: 4496728 - DNA, 25 bp, Homo sapien
catgcagaattgcttccagtccttc

SEQ ID NO: 4496729 - DNA, 25 bp, Homo sapien
agccatgcagaattgcttccagtcc

SEQ ID NO: 4496730 - DNA, 25 bp, Homo sapien
ggcccttccacatgtttccatctgg

SEQ ID NO: 4496731 - DNA, 25 bp, Homo sapien
ttatgtgacttatcttccctccatg

SEQ ID NO: 4496732 - DNA, 25 bp, Homo sapien
gattatgtgacttatcttccctcca

SEQ ID NO: 4496733 - DNA, 25 bp, Homo sapien
tgattatgtgacttatcttccctcc

SEQ ID NO: 4496734 - DNA, 25 bp, Homo sapien
atgtgacttatcttccctccatgcc

SEQ ID NO: 4496735 - DNA, 25 bp, Homo sapien
aaatcttctggtccattgttgctca

SEQ ID NO: 4496736 - DNA, 25 bp, Homo sapien
tttttctgctgctagagataaaatc

SEQ ID NO: 4496737 - DNA, 25 bp, Homo sapien
ggtccattgttgctcatatcacaga

SEQ ID NO: 4496738 - DNA, 25 bp, Homo sapien
ttctgctgctagagataaaatcttc

SEQ ID NO: 4496739 - DNA, 25 bp, Homo sapien
ttacttttagcagaacatgcttcct

SEQ ID NO: 4496740 - DNA, 25 bp, Homo sapien
gtcatcatgcctgacatttactttt

SEQ ID NO: 4496741 - DNA, 25 bp, Homo sapien
gtgtcatcatgcctgacatttactt

SEQ ID NO: 4496742 - DNA, 25 bp, Homo sapien
gcttgattctgaaggagattagtca

SEQ ID NO: 4496743 - DNA, 25 bp, Homo sapien
tgcttgattctgaaggagattagtc

SEQ ID NO: 4496744 - DNA, 25 bp, Homo sapien
cactgcttgattctgaaggagatta

SEQ ID NO: 4496745 - DNA, 25 bp, Homo sapien
gctctcaggagtgctccagcaactt

SEQ ID NO: 4496746 - DNA, 25 bp, Homo sapien
tcagcaacgcaatctcaggtagcca

SEQ ID NO: 4496747 - DNA, 25 bp, Homo sapien
gttacttgccccttgctaagcatgg

SEQ ID NO: 4496748 - DNA, 25 bp, Homo sapien
tccactagacaggaaactgctgctg

SEQ ID NO: 4496749 - DNA, 25 bp, Homo sapien
gaaaacaaatacgtctcagcgggca

SEQ ID NO: 4496750 - DNA, 25 bp, Homo sapien
acgactgattactacggtgcttaga

SEQ ID NO: 4496751 - DNA, 25 bp, Homo sapien
gaaacaagtcttacaacattgacag

SEQ ID NO: 4496752 - DNA, 25 bp, Homo sapien
aaaacagaattatcaaacgactgat

SEQ ID NO: 4496753 - DNA, 25 bp, Homo sapien
caacattgacaggtaaataggaaaa

SEQ ID NO: 4496754 - DNA, 25 bp, Homo sapien
cttacgtctcctaagtgttccagct

SEQ ID NO: 4496755 - DNA, 25 bp, Homo sapien
tggatacaacaagtgtatatcttac

SEQ ID NO: 4496756 - DNA, 25 bp, Homo sapien
caacaagtgtatatcttacgtctcc

SEQ ID NO: 4496757 - DNA, 25 bp, Homo sapien
cgtctcctaagtgttccagcttcct

SEQ ID NO: 4496758 - DNA, 25 bp, Homo sapien
cctatgatctcagacgctatttctt

SEQ ID NO: 4496759 - DNA, 25 bp, Homo sapien
ctcagacgctatttctttctgcaaa

SEQ ID NO: 4496760 - DNA, 25 bp, Homo sapien
tctttctgcaaatcccccgattcca

SEQ ID NO: 4496761 - DNA, 25 bp, Homo sapien
gatctcagacgctatttctttctgc

SEQ ID NO: 4496762 - DNA, 25 bp, Homo sapien
gtcttactcataaataaggactatg

SEQ ID NO: 4496763 - DNA, 25 bp, Homo sapien
tactcataaataaggactatgctag

SEQ ID NO: 4496764 - DNA, 25 bp, Homo sapien
aaataaggactatgctaggttgggc

SEQ ID NO: 4496765 - DNA, 25 bp, Homo sapien
ctatgctaggttgggcacttaagtt

SEQ ID NO: 4496766 - DNA, 25 bp, Homo sapien
tagccagggcagtgagaatgatagg

SEQ ID NO: 4496767 - DNA, 25 bp, Homo sapien
tgccttctctgacagcactaataaa

SEQ ID NO: 4496768 - DNA, 25 bp, Homo sapien
tgagaatgataggtagtaactccaa

SEQ ID NO: 4496769 - DNA, 25 bp, Homo sapien
aataaactcattggctaattcaacc

SEQ ID NO: 4496770 - DNA, 25 bp, Homo sapien
ccagaacacagggtgttaatcaact

SEQ ID NO: 4496771 - DNA, 25 bp, Homo sapien
cagaacacagggtgttaatcaactg

SEQ ID NO: 4496772 - DNA, 25 bp, Homo sapien
agaacacagggtgttaatcaactgt

SEQ ID NO: 4496773 - DNA, 25 bp, Homo sapien
gaggtgagttggattacatattgct

SEQ ID NO: 4496774 - DNA, 25 bp, Homo sapien
gagttggattacatattgctgatcc

SEQ ID NO: 4496775 - DNA, 25 bp, Homo sapien
ttggattacatattgctgatcccac

SEQ ID NO: 4496776 - DNA, 25 bp, Homo sapien
ggtgagttggattacatattgctga

SEQ ID NO: 4496777 - DNA, 25 bp, Homo sapien
tgaagattcatcttggagaacatgc

SEQ ID NO: 4496778 - DNA, 25 bp, Homo sapien
aagattcatcttggagaacatgctc

SEQ ID NO: 4496779 - DNA, 25 bp, Homo sapien
aaccagaagctgatagaccaaaggt

SEQ ID NO: 4496780 - DNA, 25 bp, Homo sapien
tagaccaaaggtggtatttcttgaa

SEQ ID NO: 4496781 - DNA, 25 bp, Homo sapien
ctaaggagaaacaattttccatttg

SEQ ID NO: 4496782 - DNA, 25 bp, Homo sapien
caccagaactaaggagaaacaattt

SEQ ID NO: 4496783 - DNA, 25 bp, Homo sapien
tcggctatgtttgctcacgtgaaat

SEQ ID NO: 4496784 - DNA, 25 bp, Homo sapien
ggcctatagtctaccctttctgaga

SEQ ID NO: 4496785 - DNA, 25 bp, Homo sapien
ggtaaggtctcccaattaacagcaa

SEQ ID NO: 4496786 - DNA, 25 bp, Homo sapien
taccagaccaaaccactatatgtga

SEQ ID NO: 4496787 - DNA, 25 bp, Homo sapien
gcttatctagtgcactgaagaaggc

SEQ ID NO: 4496788 - DNA, 25 bp, Homo sapien
caccactctgttcctcattgtgctg

SEQ ID NO: 4496789 - DNA, 25 bp, Homo sapien
tcattgtgctgcttatctagtgcac

SEQ ID NO: 4496790 - DNA, 25 bp, Homo sapien
cactctgttcctcattgtgctgctt

SEQ ID NO: 4496791 - DNA, 25 bp, Homo sapien
aaatgatctttatttctacactata

SEQ ID NO: 4496792 - DNA, 25 bp, Homo sapien
gtaaaaatgatctttatttctacac

SEQ ID NO: 4496793 - DNA, 25 bp, Homo sapien
aatgatctttatttctacactatat

SEQ ID NO: 4496794 - DNA, 25 bp, Homo sapien
gatctttatttctacactatattac

SEQ ID NO: 4496795 - DNA, 25 bp, Homo sapien
cacatgacgaagttcacctgatggc

SEQ ID NO: 4496796 - DNA, 25 bp, Homo sapien
ttaagtgtttcacgagttctctgcc

SEQ ID NO: 4496797 - DNA, 25 bp, Homo sapien
gcctagttcatagtccaatttgatg

SEQ ID NO: 4496798 - DNA, 25 bp, Homo sapien
gaataatggtgccttccacatgacg

SEQ ID NO: 4496799 - DNA, 25 bp, Homo sapien
tgtcattaactggcataacagtggc

SEQ ID NO: 4496800 - DNA, 25 bp, Homo sapien
tcattaactggcataacagtggctt

SEQ ID NO: 4496801 - DNA, 25 bp, Homo sapien
taacagtggcttaagttcaaacact

SEQ ID NO: 4496802 - DNA, 25 bp, Homo sapien
attaactggcataacagtggcttaa

SEQ ID NO: 4496803 - DNA, 25 bp, Homo sapien
tcagaaatccaaatgtaagagcaaa

SEQ ID NO: 4496804 - DNA, 25 bp, Homo sapien
tatgactcgagagacataaaaaaca

SEQ ID NO: 4496805 - DNA, 25 bp, Homo sapien
agcctatttaacagtaagtcccttg

SEQ ID NO: 4496806 - DNA, 25 bp, Homo sapien
aagtccttatgactcgagagacata

SEQ ID NO: 4496807 - DNA, 25 bp, Homo sapien
gctgaagggacttaagttattattg

SEQ ID NO: 4496808 - DNA, 25 bp, Homo sapien
ttattattggaatctccttgctgtc

SEQ ID NO: 4496809 - DNA, 25 bp, Homo sapien
gaagagcaatgctgaagggacttaa

SEQ ID NO: 4496810 - DNA, 25 bp, Homo sapien
agttattattggaatctccttgctg

SEQ ID NO: 4496811 - DNA, 25 bp, Homo sapien
gatccttaaagctctttacaaccga

SEQ ID NO: 4496812 - DNA, 25 bp, Homo sapien
ggaggagttgaagatccttaaagct

SEQ ID NO: 4496813 - DNA, 25 bp, Homo sapien
aagaaattttgagccttggaggagt

SEQ ID NO: 4496814 - DNA, 25 bp, Homo sapien
ctgaagaaattttgagccttggagg

SEQ ID NO: 4496815 - DNA, 25 bp, Homo sapien
tattcttcactacttccaagatcat

SEQ ID NO: 4496816 - DNA, 25 bp, Homo sapien
ctattcttcactacttccaagatca

SEQ ID NO: 4496817 - DNA, 25 bp, Homo sapien
gaaagacttgggctggtttcaatag

SEQ ID NO: 4496818 - DNA, 25 bp, Homo sapien
gctggtttggcattctagaaagact

SEQ ID NO: 4496819 - DNA, 25 bp, Homo sapien
aagaaccttctttggcccatatgaa

SEQ ID NO: 4496820 - DNA, 25 bp, Homo sapien
tgaaaccaagttctacgaggccctg

SEQ ID NO: 4496821 - DNA, 25 bp, Homo sapien
aacaggatattagctccgagcttac

SEQ ID NO: 4496822 - DNA, 25 bp, Homo sapien
taaaagtttccaacaggatattagc

SEQ ID NO: 4496823 - DNA, 25 bp, Homo sapien
agatgctctggtaacaaccctgttg

SEQ ID NO: 4496824 - DNA, 25 bp, Homo sapien
aagatgctctggtaacaaccctgtt

SEQ ID NO: 4496825 - DNA, 25 bp, Homo sapien
aacaaccctgttgaggacctgctcc

SEQ ID NO: 4496826 - DNA, 25 bp, Homo sapien
gatgctctggtaacaaccctgttga

SEQ ID NO: 4496827 - DNA, 25 bp, Homo sapien
cagaatctataatcagttgtctcaa

SEQ ID NO: 4496828 - DNA, 25 bp, Homo sapien
gaatctataatcagttgtctcaaat

SEQ ID NO: 4496829 - DNA, 25 bp, Homo sapien
aatctataatcagttgtctcaaata

SEQ ID NO: 4496830 - DNA, 25 bp, Homo sapien
aacagaatctataatcagttgtctc

SEQ ID NO: 4496831 - DNA, 25 bp, Homo sapien
tttgaagaactaagggtgcatacat

SEQ ID NO: 4496832 - DNA, 25 bp, Homo sapien
gaaaggacaaatagtcaaaagcttc

SEQ ID NO: 4496833 - DNA, 25 bp, Homo sapien
gcttctgtgactttagaagaacaac

SEQ ID NO: 4496834 - DNA, 25 bp, Homo sapien
agaagaacaactttgaagaactaag

SEQ ID NO: 4496835 - DNA, 25 bp, Homo sapien
ctgcactgccttaagcagcctttgt

SEQ ID NO: 4496836 - DNA, 25 bp, Homo sapien
ctgccttaagcagcctttgtacagt

SEQ ID NO: 4496837 - DNA, 25 bp, Homo sapien
tgcactgccttaagcagcctttgta

SEQ ID NO: 4496838 - DNA, 25 bp, Homo sapien
cactgccttaagcagcctttgtaca

SEQ ID NO: 4496839 - DNA, 25 bp, Homo sapien
catagctttccgaaggacaagtatc

SEQ ID NO: 4496840 - DNA, 25 bp, Homo sapien
ggacaagtatcaagcagtctctcat

SEQ ID NO: 4496841 - DNA, 25 bp, Homo sapien
ttggcaaacatagctttccgaagga

SEQ ID NO: 4496842 - DNA, 25 bp, Homo sapien
tctctcattgacatgctgactttga

SEQ ID NO: 4496843 - DNA, 25 bp, Homo sapien
tagttgttcctctggacacccatga

SEQ ID NO: 4496844 - DNA, 25 bp, Homo sapien
gggtcagaaaaatccagctagttgc

SEQ ID NO: 4496845 - DNA, 25 bp, Homo sapien
tgccatgtttgaaggagtgcttccc

SEQ ID NO: 4496846 - DNA, 25 bp, Homo sapien
cacaagctctgatgttagacctgac

SEQ ID NO: 4496847 - DNA, 25 bp, Homo sapien
gcaactgcagattttcgggcatcaa

SEQ ID NO: 4496848 - DNA, 25 bp, Homo sapien
caactgcagattttcgggcatcaag

SEQ ID NO: 4496849 - DNA, 25 bp, Homo sapien
gactgacactgagagactgactgca

SEQ ID NO: 4496850 - DNA, 25 bp, Homo sapien
ctgactgacactgagagactgactg

SEQ ID NO: 4496851 - DNA, 25 bp, Homo sapien
tgactgacactgagagactgactgc

SEQ ID NO: 4496852 - DNA, 25 bp, Homo sapien
caaggcaaaaagtttcattggcgac

SEQ ID NO: 4496853 - DNA, 25 bp, Homo sapien
catgagtcgaacatcagcttgctgg

SEQ ID NO: 4496854 - DNA, 25 bp, Homo sapien
taatggctgtgaacatccacatgaa

SEQ ID NO: 4496855 - DNA, 25 bp, Homo sapien
tcaaactatccatgatctcaaggca

SEQ ID NO: 4496856 - DNA, 25 bp, Homo sapien
ccagtttagtaaggcatgttacaag

SEQ ID NO: 4496857 - DNA, 25 bp, Homo sapien
ctgactggttccactgactgggcca

SEQ ID NO: 4496858 - DNA, 25 bp, Homo sapien
ggtttgaagagtcacgaattgtgtc

SEQ ID NO: 4496859 - DNA, 25 bp, Homo sapien
gtctggtaaaagaccaagccagcca

SEQ ID NO: 4496860 - DNA, 25 bp, Homo sapien
ggtttatacagaatatgggcgtacc

SEQ ID NO: 4496861 - DNA, 25 bp, Homo sapien
caaatggcaatctggcatacacttg

SEQ ID NO: 4496862 - DNA, 25 bp, Homo sapien
caaagctcaccctaaagaagagtgg

SEQ ID NO: 4496863 - DNA, 25 bp, Homo sapien
ggcatatcaaggactgcacaagagt

SEQ ID NO: 4496864 - DNA, 25 bp, Homo sapien
ttgcatgactgaattagccagctga

SEQ ID NO: 4496865 - DNA, 25 bp, Homo sapien
agctgagagttccttcgaagaacat

SEQ ID NO: 4496866 - DNA, 25 bp, Homo sapien
gcatgactgaattagccagctgaga

SEQ ID NO: 4496867 - DNA, 25 bp, Homo sapien
tccttcgaagaacatcataaaaccc

SEQ ID NO: 4496868 - DNA, 25 bp, Homo sapien
taagtggtgaccgagataagacaac

SEQ ID NO: 4496869 - DNA, 25 bp, Homo sapien
cataatggatacagttgcaatggtc

SEQ ID NO: 4496870 - DNA, 25 bp, Homo sapien
tgtccttctgacttaggatacagac

SEQ ID NO: 4496871 - DNA, 25 bp, Homo sapien
caaggataactgctagatgatggta

SEQ ID NO: 4496872 - DNA, 25 bp, Homo sapien
caataatttcacacatctgagacct

SEQ ID NO: 4496873 - DNA, 25 bp, Homo sapien
tatcacaaagcaatggcattgagag

SEQ ID NO: 4496874 - DNA, 25 bp, Homo sapien
tatataggatcaagcctaaggccag

SEQ ID NO: 4496875 - DNA, 25 bp, Homo sapien
gaaagatacaatatagctgacagaa

SEQ ID NO: 4496876 - DNA, 25 bp, Homo sapien
gaggcagcagatcaggttttggctc

SEQ ID NO: 4496877 - DNA, 25 bp, Homo sapien
atctccttgggtcagaatacaagct

SEQ ID NO: 4496878 - DNA, 25 bp, Homo sapien
ccttgggtcagaatacaagcttcta

SEQ ID NO: 4496879 - DNA, 25 bp, Homo sapien
gttttggctcatagaactgttttaa

SEQ ID NO: 4496880 - DNA, 25 bp, Homo sapien
aagtcttccagctcactcttaatca

SEQ ID NO: 4496881 - DNA, 25 bp, Homo sapien
tatgactgtattcttataccaggcc

SEQ ID NO: 4496882 - DNA, 25 bp, Homo sapien
aatggactccaatatatcatctagg

SEQ ID NO: 4496883 - DNA, 25 bp, Homo sapien
catctaggtcttcgtagaatgcctc

SEQ ID NO: 4496884 - DNA, 25 bp, Homo sapien
ctcacaaactcccatcacaagaaaa

SEQ ID NO: 4496885 - DNA, 25 bp, Homo sapien
gaaactacttatggagaaattgtat

SEQ ID NO: 4496886 - DNA, 25 bp, Homo sapien
tttatgccaatactggtgctctgag

SEQ ID NO: 4496887 - DNA, 25 bp, Homo sapien
taaaacctcacaaactcccatcaca

SEQ ID NO: 4496888 - DNA, 25 bp, Homo sapien
tttcatggacaaaagactatcactt

SEQ ID NO: 4496889 - DNA, 25 bp, Homo sapien
aagaatgtcagagagttttttgtaa

SEQ ID NO: 4496890 - DNA, 25 bp, Homo sapien
tcacttgtcttgttggccattttag

SEQ ID NO: 4496891 - DNA, 25 bp, Homo sapien
gaatgtcagagagttttttgtaaca

SEQ ID NO: 4496892 - DNA, 25 bp, Homo sapien
agaaaggctttcttggtggctttgg

SEQ ID NO: 4496893 - DNA, 25 bp, Homo sapien
aaggctttcttggtggctttggata

SEQ ID NO: 4496894 - DNA, 25 bp, Homo sapien
ctgagaacagaaaggctttcttggt

SEQ ID NO: 4496895 - DNA, 25 bp, Homo sapien
tgagaacagaaaggctttcttggtg

SEQ ID NO: 4496896 - DNA, 25 bp, Homo sapien
tctgaaagatcttttctgggttttg

SEQ ID NO: 4496897 - DNA, 25 bp, Homo sapien
ggttttggccatcagggccactcac

SEQ ID NO: 4496898 - DNA, 25 bp, Homo sapien
tgtaccttctgcagagctacattca

SEQ ID NO: 4496899 - DNA, 25 bp, Homo sapien
tgcatagcgcataaactcattgctg

SEQ ID NO: 4496900 - DNA, 25 bp, Homo sapien
ttgttctcttggagacaccacagcc

SEQ ID NO: 4496901 - DNA, 25 bp, Homo sapien
aacctcaaattaccttcatcctctg

SEQ ID NO: 4496902 - DNA, 25 bp, Homo sapien
cagccaagtggaataagtttctaag

SEQ ID NO: 4496903 - DNA, 25 bp, Homo sapien
tcctaaaatatgtccaacctcaaat

SEQ ID NO: 4496904 - DNA, 25 bp, Homo sapien
gaatttaccacggaatagacctaga

SEQ ID NO: 4496905 - DNA, 25 bp, Homo sapien
accatgtgcacctaaaaagaagtgt

SEQ ID NO: 4496906 - DNA, 25 bp, Homo sapien
tttcctcaatagcactttggctgga

SEQ ID NO: 4496907 - DNA, 25 bp, Homo sapien
ctgacgactttttgactatgggcta

SEQ ID NO: 4496908 - DNA, 25 bp, Homo sapien
gacaggttcaccgagataaaataac

SEQ ID NO: 4496909 - DNA, 25 bp, Homo sapien
tgctcactgatagtcaattctctcc

SEQ ID NO: 4496910 - DNA, 25 bp, Homo sapien
catggttgtgtaatctccccacaat

SEQ ID NO: 4496911 - DNA, 25 bp, Homo sapien
taccctgtaggtgaacagttctaga

SEQ ID NO: 4496912 - DNA, 25 bp, Homo sapien
gatagaactgttgcacagcactgaa

SEQ ID NO: 4496913 - DNA, 25 bp, Homo sapien
tgaagtgtatctccatagcaagact

SEQ ID NO: 4496914 - DNA, 25 bp, Homo sapien
agtaggaattgaagtgtatctccat

SEQ ID NO: 4496915 - DNA, 25 bp, Homo sapien
ctgaatcttgggctgatagaactgt

SEQ ID NO: 4496916 - DNA, 25 bp, Homo sapien
ctctcttctccttccttatctgtga

SEQ ID NO: 4496917 - DNA, 25 bp, Homo sapien
tcttctccttccttatctgtgacat

SEQ ID NO: 4496918 - DNA, 25 bp, Homo sapien
catctgcatcttctctctcttctcc

SEQ ID NO: 4496919 - DNA, 25 bp, Homo sapien
ctgagtgacactgacatctgcatct

SEQ ID NO: 4496920 - DNA, 25 bp, Homo sapien
attgccggatctggaatgctgttct

SEQ ID NO: 4496921 - DNA, 25 bp, Homo sapien
aattgccggatctggaatgctgttc

SEQ ID NO: 4496922 - DNA, 25 bp, Homo sapien
gaaattgccggatctggaatgctgt

SEQ ID NO: 4496923 - DNA, 25 bp, Homo sapien
ctgaaattgccggatctggaatgct

SEQ ID NO: 4496924 - DNA, 25 bp, Homo sapien
tgcccctgctaacagttcctttgca

SEQ ID NO: 4496925 - DNA, 25 bp, Homo sapien
ccctgctaacagttcctttgcaaag

SEQ ID NO: 4496926 - DNA, 25 bp, Homo sapien
ctgctaacagttcctttgcaaagcc

SEQ ID NO: 4496927 - DNA, 25 bp, Homo sapien
tcctttgcaaagcctctcaggccag

SEQ ID NO: 4496928 - DNA, 25 bp, Homo sapien
tggtaagaaccgtgactagcaggag

SEQ ID NO: 4496929 - DNA, 25 bp, Homo sapien
ctcttgactgctaagtaaattcaac

SEQ ID NO: 4496930 - DNA, 25 bp, Homo sapien
tcctcttgactgctaagtaaattca

SEQ ID NO: 4496931 - DNA, 25 bp, Homo sapien
caaactggtaagaaccgtgactagc

SEQ ID NO: 4496932 - DNA, 25 bp, Homo sapien
tttccttgcaaatctttgatgtcca

SEQ ID NO: 4496933 - DNA, 25 bp, Homo sapien
ttttccttgcaaatctttgatgtcc

SEQ ID NO: 4496934 - DNA, 25 bp, Homo sapien
gttttccttgcaaatctttgatgtc

SEQ ID NO: 4496935 - DNA, 25 bp, Homo sapien
ggactcttatacgaaacatgcaggc

SEQ ID NO: 4496936 - DNA, 25 bp, Homo sapien
cgcagcagaatgacaggactcttat

SEQ ID NO: 4496937 - DNA, 25 bp, Homo sapien
tatacgaaacatgcaggctgaagag

SEQ ID NO: 4496938 - DNA, 25 bp, Homo sapien
gaatgacaggactcttatacgaaac

SEQ ID NO: 4496939 - DNA, 25 bp, Homo sapien
tatctcccagatgcccgtggatatc

SEQ ID NO: 4496940 - DNA, 25 bp, Homo sapien
gtctatatctcccagatgcccgtgg

SEQ ID NO: 4496941 - DNA, 25 bp, Homo sapien
tatatctcccagatgcccgtggata

SEQ ID NO: 4496942 - DNA, 25 bp, Homo sapien
ctggtctatatctcccagatgcccg

SEQ ID NO: 4496943 - DNA, 25 bp, Homo sapien
gggggcagccgttctcaaattcact

SEQ ID NO: 4496944 - DNA, 25 bp, Homo sapien
ctcaaattcactattgcaaagtggt

SEQ ID NO: 4496945 - DNA, 25 bp, Homo sapien
ttcactattgcaaagtggtttgttt

SEQ ID NO: 4496946 - DNA, 25 bp, Homo sapien
ggggcagccgttctcaaattcacta

SEQ ID NO: 4496947 - DNA, 25 bp, Homo sapien
cttgtcccttaagcttggtgattag

SEQ ID NO: 4496948 - DNA, 25 bp, Homo sapien
tggtgattagccagtccacttcttc

SEQ ID NO: 4496949 - DNA, 25 bp, Homo sapien
ttctagaaccttctcggcctgactc

SEQ ID NO: 4496950 - DNA, 25 bp, Homo sapien
ttcttggctcacttgtcccttaagc

SEQ ID NO: 4496951 - DNA, 25 bp, Homo sapien
ctgatttggtagggttgcctgagaa

SEQ ID NO: 4496952 - DNA, 25 bp, Homo sapien
gctttctcaacaggctgatttggta

SEQ ID NO: 4496953 - DNA, 25 bp, Homo sapien
tggtagggttgcctgagaagaggcc

SEQ ID NO: 4496954 - DNA, 25 bp, Homo sapien
gatgatagctttctcaacaggctga

SEQ ID NO: 4496955 - DNA, 25 bp, Homo sapien
atatctgacaagggctgtaagtgtg

SEQ ID NO: 4496956 - DNA, 25 bp, Homo sapien
aatgtaagcagagttcccagttgca

SEQ ID NO: 4496957 - DNA, 25 bp, Homo sapien
gctgtaagtgtggtgtacattttgc

SEQ ID NO: 4496958 - DNA, 25 bp, Homo sapien
gtacattttgcacaagtcctttaac

SEQ ID NO: 4496959 - DNA, 25 bp, Homo sapien
ggaattcctccggagctctgacaca

SEQ ID NO: 4496960 - DNA, 25 bp, Homo sapien
tttttggaattcctccggagctctg

SEQ ID NO: 4496961 - DNA, 25 bp, Homo sapien
ctccggagctctgacacacctggag

SEQ ID NO: 4496962 - DNA, 25 bp, Homo sapien
catattttttggaattcctccggag

SEQ ID NO: 4496963 - DNA, 25 bp, Homo sapien
cctaggaaaggcattctcaactcac

SEQ ID NO: 4496964 - DNA, 25 bp, Homo sapien
ttcctaggaaaggcattctcaactc

SEQ ID NO: 4496965 - DNA, 25 bp, Homo sapien
tcctaggaaaggcattctcaactca

SEQ ID NO: 4496966 - DNA, 25 bp, Homo sapien
gagaaggaaaccaatgtaaccagca

SEQ ID NO: 4496967 - DNA, 25 bp, Homo sapien
aataacacaggggggtcagatgaga

SEQ ID NO: 4496968 - DNA, 25 bp, Homo sapien
ggggggtcagatgagaaccagacag

SEQ ID NO: 4496969 - DNA, 25 bp, Homo sapien
caggggggtcagatgagaaccagac

SEQ ID NO: 4496970 - DNA, 25 bp, Homo sapien
acacaggggggtcagatgagaacca

SEQ ID NO: 4496971 - DNA, 25 bp, Homo sapien
tgaagacctattgggtactgcctct

SEQ ID NO: 4496972 - DNA, 25 bp, Homo sapien
ggtgatcaatagtcccctgggcatg

SEQ ID NO: 4496973 - DNA, 25 bp, Homo sapien
aaagtttatatatgctcagttcagg

SEQ ID NO: 4496974 - DNA, 25 bp, Homo sapien
cataaagatgtccttgctgcaaagc

SEQ ID NO: 4496975 - DNA, 25 bp, Homo sapien
tctcaaactccagaccttgtgattc

SEQ ID NO: 4496976 - DNA, 25 bp, Homo sapien
caaactccagaccttgtgattctcc

SEQ ID NO: 4496977 - DNA, 25 bp, Homo sapien
ctttagttgagacgggatttcacca

SEQ ID NO: 4496978 - DNA, 25 bp, Homo sapien
accgtgccctgctattttttgtatc

SEQ ID NO: 4496979 - DNA, 25 bp, Homo sapien
tattactgcagtgggtcagccaagg

SEQ ID NO: 4496980 - DNA, 25 bp, Homo sapien
tctgcgccccgagttaagtgattct

SEQ ID NO: 4496981 - DNA, 25 bp, Homo sapien
tagccagtgggctagaaggatccca

SEQ ID NO: 4496982 - DNA, 25 bp, Homo sapien
gaacataccatgctccacgagggca

SEQ ID NO: 4496983 - DNA, 25 bp, Homo sapien
tttttctctcccgtatagttcaggc

SEQ ID NO: 4496984 - DNA, 25 bp, Homo sapien
tctctcccgtatagttcaggctctt

SEQ ID NO: 4496985 - DNA, 25 bp, Homo sapien
tcctttttctctcccgtatagttca

SEQ ID NO: 4496986 - DNA, 25 bp, Homo sapien
cccgtatagttcaggctcttactct

SEQ ID NO: 4496987 - DNA, 25 bp, Homo sapien
caaagatgaggttagggattggctt

SEQ ID NO: 4496988 - DNA, 25 bp, Homo sapien
acttcttagaaaggtggatgagaaa

SEQ ID NO: 4496989 - DNA, 25 bp, Homo sapien
atggcaaagatgaggttagggattg

SEQ ID NO: 4496990 - DNA, 25 bp, Homo sapien
cttcttagaaaggtggatgagaaat

SEQ ID NO: 4496991 - DNA, 25 bp, Homo sapien
ttgatcttgaagtctcgtgaggtgc

SEQ ID NO: 4496992 - DNA, 25 bp, Homo sapien
tcctctcgaagaaccatgtctagga

SEQ ID NO: 4496993 - DNA, 25 bp, Homo sapien
atcttgaagtctcgtgaggtgctga

SEQ ID NO: 4496994 - DNA, 25 bp, Homo sapien
tcaccatcctctcgaagaaccatgt

SEQ ID NO: 4496995 - DNA, 25 bp, Homo sapien
aagagtggctgggctccagacagaa

SEQ ID NO: 4496996 - DNA, 25 bp, Homo sapien
taggaagagtggctgggctccagac

SEQ ID NO: 4496997 - DNA, 25 bp, Homo sapien
cagctaggaagagtggctgggctcc

SEQ ID NO: 4496998 - DNA, 25 bp, Homo sapien
ggctgggctccagacagaagccagc

SEQ ID NO: 4496999 - DNA, 25 bp, Homo sapien
gatggggatgcggtactgtcacttg

SEQ ID NO: 4497000 - DNA, 25 bp, Homo sapien
ggttctgtttcaaaggtggtgcagg

SEQ ID NO: 4497001 - DNA, 25 bp, Homo sapien
cttattagacaaacctaagatgaaa

SEQ ID NO: 4497002 - DNA, 25 bp, Homo sapien
ttaggtgctagaagtaaggaaacat

SEQ ID NO: 4497003 - DNA, 25 bp, Homo sapien
tggctggttctttgttctgtccccc

SEQ ID NO: 4497004 - DNA, 25 bp, Homo sapien
caacatcggtgtggactacaggaca

SEQ ID NO: 4497005 - DNA, 25 bp, Homo sapien
tacagttcttgaggtggcatcctaa

SEQ ID NO: 4497006 - DNA, 25 bp, Homo sapien
tccttggaaaaacgaagccagcctg

SEQ ID NO: 4497007 - DNA, 25 bp, Homo sapien
ggtaaaaatgaagcagaagccccaa

SEQ ID NO: 4497008 - DNA, 25 bp, Homo sapien
tcagtttataaggtgccctgtgtcc

SEQ ID NO: 4497009 - DNA, 25 bp, Homo sapien
tcattacacataggatctgaggtgg

SEQ ID NO: 4497010 - DNA, 25 bp, Homo sapien
gatattgaccggtgcctcaggaagg

SEQ ID NO: 4497011 - DNA, 25 bp, Homo sapien
tgcctacaagctgggtctgaatgac

SEQ ID NO: 4497012 - DNA, 25 bp, Homo sapien
gcggcaggactcgaacctgcaatct

SEQ ID NO: 4497013 - DNA, 25 bp, Homo sapien
gaccgcggcaggactcgaacctgca

SEQ ID NO: 4497014 - DNA, 25 bp, Homo sapien
ccgcggcaggactcgaacctgcaat

SEQ ID NO: 4497015 - DNA, 25 bp, Homo sapien
gcaggactcgaacctgcaatcttct

SEQ ID NO: 4497016 - DNA, 25 bp, Homo sapien
tcggcggcgactacgttcacattgt

SEQ ID NO: 4497017 - DNA, 25 bp, Homo sapien
gacttgctgggcgtggttacttccg

SEQ ID NO: 4497018 - DNA, 25 bp, Homo sapien
catctttgaagtgcggtgggaatcg

SEQ ID NO: 4497019 - DNA, 25 bp, Homo sapien
ttagaaatgtgcctccgctgagaca

SEQ ID NO: 4497020 - DNA, 25 bp, Homo sapien
cggaggctagcatctgcgggcaaat

SEQ ID NO: 4497021 - DNA, 25 bp, Homo sapien
caacacaagacggatgcggagactg

SEQ ID NO: 4497022 - DNA, 25 bp, Homo sapien
tcagaattgctctggacgaggaggc

SEQ ID NO: 4497023 - DNA, 25 bp, Homo sapien
tcaggttcaacggaaggcaacattt

SEQ ID NO: 4497024 - DNA, 25 bp, Homo sapien
catatttaaatagaagggaccaggg

SEQ ID NO: 4497025 - DNA, 25 bp, Homo sapien
gaccagggctcaatgctgcttggcc

SEQ ID NO: 4497026 - DNA, 25 bp, Homo sapien
caggcggtgcttaatcacgtagacc

SEQ ID NO: 4497027 - DNA, 25 bp, Homo sapien
cggttggtcccaaacgtctctgagc

SEQ ID NO: 4497028 - DNA, 25 bp, Homo sapien
taaggagccccgtgttggtgtgtca

SEQ ID NO: 4497029 - DNA, 25 bp, Homo sapien
caatgggacacagtcctcagcaggt

SEQ ID NO: 4497030 - DNA, 25 bp, Homo sapien
tcagcaggttgtctgtccttgtccc

SEQ ID NO: 4497031 - DNA, 25 bp, Homo sapien
gctctctgattcttgcaatgggaca

SEQ ID NO: 4497032 - DNA, 25 bp, Homo sapien
acgggttagtcatcaccttagagca

SEQ ID NO: 4497033 - DNA, 25 bp, Homo sapien
cagctaaatcgaaactcagtgatgc

SEQ ID NO: 4497034 - DNA, 25 bp, Homo sapien
tcagtgatgccacccttctgtgtca

SEQ ID NO: 4497035 - DNA, 25 bp, Homo sapien
ccttagagcacatggatctgcagaa

SEQ ID NO: 4497036 - DNA, 25 bp, Homo sapien
ccttcacctaaagactggatgggcc

SEQ ID NO: 4497037 - DNA, 25 bp, Homo sapien
tggcctcttccttcacctaaagact

SEQ ID NO: 4497038 - DNA, 25 bp, Homo sapien
tgaacatatccatcgtggcctcttc

SEQ ID NO: 4497039 - DNA, 25 bp, Homo sapien
gatgggcctaactggccatacttct

SEQ ID NO: 4497040 - DNA, 25 bp, Homo sapien
gtccagtccatttgcagctttgccc

SEQ ID NO: 4497041 - DNA, 25 bp, Homo sapien
cctcgattcttgcagcctggcaaga

SEQ ID NO: 4497042 - DNA, 25 bp, Homo sapien
ttcttgcagcctggcaagaaccctg

SEQ ID NO: 4497043 - DNA, 25 bp, Homo sapien
ctgccttcatggcaggtccagtcca

SEQ ID NO: 4497044 - DNA, 25 bp, Homo sapien
ggcggtgctgacctcgcagctcttc

SEQ ID NO: 4497045 - DNA, 25 bp, Homo sapien
cccgagtgctccagtcggcggtgct

SEQ ID NO: 4497046 - DNA, 25 bp, Homo sapien
gctcttccgccccataagcttggct

SEQ ID NO: 4497047 - DNA, 25 bp, Homo sapien
aagcttggctctgcgcgctgtccaa

SEQ ID NO: 4497048 - DNA, 25 bp, Homo sapien
tcagctgccttttggactccgcggt

SEQ ID NO: 4497049 - DNA, 25 bp, Homo sapien
tggagtcacagaacgctgcgggtcc

SEQ ID NO: 4497050 - DNA, 25 bp, Homo sapien
tgtgggctgtgtcctatcctgcaag

SEQ ID NO: 4497051 - DNA, 25 bp, Homo sapien
tgcttggctgctgggtactacttgg

SEQ ID NO: 4497052 - DNA, 25 bp, Homo sapien
tccacgctggattggatggtcccgg

SEQ ID NO: 4497053 - DNA, 25 bp, Homo sapien
gaaaacgtgtcccattcggagctgg

SEQ ID NO: 4497054 - DNA, 25 bp, Homo sapien
cccagagccgctgtccaaatgctga

SEQ ID NO: 4497055 - DNA, 25 bp, Homo sapien
tcggtcgaagggagacagaagccaa

SEQ ID NO: 4497056 - DNA, 25 bp, Homo sapien
ccaacgacctgggaggtgatggcaa

SEQ ID NO: 4497057 - DNA, 25 bp, Homo sapien
tcggagccaccaacgacctgggagg

SEQ ID NO: 4497058 - DNA, 25 bp, Homo sapien
gcagctccagacttagggatccgag

SEQ ID NO: 4497059 - DNA, 25 bp, Homo sapien
cagcgggttggaagcctcgctggca

SEQ ID NO: 4497060 - DNA, 25 bp, Homo sapien
gcggctccgccacccctgatcaggc

SEQ ID NO: 4497061 - DNA, 25 bp, Homo sapien
aggcaggcacggcagtggcggagcg

SEQ ID NO: 4497062 - DNA, 25 bp, Homo sapien
cacccctgatcaggcgcgttcccgg

SEQ ID NO: 4497063 - DNA, 25 bp, Homo sapien
tctagccgccctccgggcgcccctg

SEQ ID NO: 4497064 - DNA, 25 bp, Homo sapien
ctccagctcagtggagcctaggctg

SEQ ID NO: 4497065 - DNA, 25 bp, Homo sapien
caccgctgcccatattcttctccag

SEQ ID NO: 4497066 - DNA, 25 bp, Homo sapien
caacctccaccgctgcccatattct

SEQ ID NO: 4497067 - DNA, 25 bp, Homo sapien
tgcagagacgcccacagacagatca

SEQ ID NO: 4497068 - DNA, 25 bp, Homo sapien
aatggcctcggcgttcacggcttcc

SEQ ID NO: 4497069 - DNA, 25 bp, Homo sapien
ccccgagggcaaggaagcgcaccct

SEQ ID NO: 4497070 - DNA, 25 bp, Homo sapien
ttacaatggcctcggcgttcacggc

SEQ ID NO: 4497071 - DNA, 25 bp, Homo sapien
ccagccttacaatggcctcggcgtt

SEQ ID NO: 4497072 - DNA, 25 bp, Homo sapien
gaatcatttctactttcggttatct

SEQ ID NO: 4497073 - DNA, 25 bp, Homo sapien
gagaatcatttctactttcggttat

SEQ ID NO: 4497074 - DNA, 25 bp, Homo sapien
tatctagctttatgacggctctgtg

SEQ ID NO: 4497075 - DNA, 25 bp, Homo sapien
tgagaatcatttctactttcggtta

SEQ ID NO: 4497076 - DNA, 25 bp, Homo sapien
ggccgctccgtcgagctggagtccg

SEQ ID NO: 4497077 - DNA, 25 bp, Homo sapien
ggcgcggccgctccgtcgagctgga

SEQ ID NO: 4497078 - DNA, 25 bp, Homo sapien
cgctccgtcgagctggagtccgctg

SEQ ID NO: 4497079 - DNA, 25 bp, Homo sapien
ctggagtccgctgggccggcgctgg

SEQ ID NO: 4497080 - DNA, 25 bp, Homo sapien
agccgtatgctaatggcgctcaggg

SEQ ID NO: 4497081 - DNA, 25 bp, Homo sapien
tgactcgtcgaataattcgataaag

SEQ ID NO: 4497082 - DNA, 25 bp, Homo sapien
cccagccgtatgctaatggcgctca

SEQ ID NO: 4497083 - DNA, 25 bp, Homo sapien
gctcaggggctgactcgtcgaataa

SEQ ID NO: 4497084 - DNA, 25 bp, Homo sapien
caagccaaggcatcagggtggaaag

SEQ ID NO: 4497085 - DNA, 25 bp, Homo sapien
ccttggtctacagccactcgctggg

SEQ ID NO: 4497086 - DNA, 25 bp, Homo sapien
cttgggaggtttcccaagctacagg

SEQ ID NO: 4497087 - DNA, 25 bp, Homo sapien
ggccctgagcttcaggacaagccaa

SEQ ID NO: 4497088 - DNA, 25 bp, Homo sapien
gattagaactggcatgctcatcgcc

SEQ ID NO: 4497089 - DNA, 25 bp, Homo sapien
gccgaaatcggatgggttggcctct

SEQ ID NO: 4497090 - DNA, 25 bp, Homo sapien
gaagcgggaggtttgcatcaacaga

SEQ ID NO: 4497091 - DNA, 25 bp, Homo sapien
caacagattttcgtagaaagcggga

SEQ ID NO: 4497092 - DNA, 25 bp, Homo sapien
ctctagtaggggcaggcattcgtac

SEQ ID NO: 4497093 - DNA, 25 bp, Homo sapien
gtgtccaaaggggattcgaacattg

SEQ ID NO: 4497094 - DNA, 25 bp, Homo sapien
aaaggggattcgaacattgctctag

SEQ ID NO: 4497095 - DNA, 25 bp, Homo sapien
ggattcgaacattgctctagtaggg

SEQ ID NO: 4497096 - DNA, 25 bp, Homo sapien
cctggagggcgcatccgtcccgcct

SEQ ID NO: 4497097 - DNA, 25 bp, Homo sapien
gttggagaaatcccggcggttctgc

SEQ ID NO: 4497098 - DNA, 25 bp, Homo sapien
agggcgcatccgtcccgcctgggct

SEQ ID NO: 4497099 - DNA, 25 bp, Homo sapien
gaaatcccggcggttctgcaccgcg

SEQ ID NO: 4497100 - DNA, 25 bp, Homo sapien
tgcccggccttcttgaaggtgcact

SEQ ID NO: 4497101 - DNA, 25 bp, Homo sapien
atagagcggagatatcaggcacccc

SEQ ID NO: 4497102 - DNA, 25 bp, Homo sapien
ctgtaaaatagagcggagatatcag

SEQ ID NO: 4497103 - DNA, 25 bp, Homo sapien
tgcactcagggtcgcgtagcggtgg

SEQ ID NO: 4497104 - DNA, 25 bp, Homo sapien
tagctgctggcgagttcgtgactgc

SEQ ID NO: 4497105 - DNA, 25 bp, Homo sapien
tgactgcgaagagggcgccgatcgc

SEQ ID NO: 4497106 - DNA, 25 bp, Homo sapien
ttcgtgactgcgaagagggcgccga

SEQ ID NO: 4497107 - DNA, 25 bp, Homo sapien
tgctgctagctgctggcgagttcgt

SEQ ID NO: 4497108 - DNA, 25 bp, Homo sapien
tgcgacgaccttcccggcctgatgg

SEQ ID NO: 4497109 - DNA, 25 bp, Homo sapien
cctcttcgcgctctcaaaatggcct

SEQ ID NO: 4497110 - DNA, 25 bp, Homo sapien
cctggtgtagacgaggtgtgaatct

SEQ ID NO: 4497111 - DNA, 25 bp, Homo sapien
tgcttaggctcttgccgtaccgcgg

SEQ ID NO: 4497112 - DNA, 25 bp, Homo sapien
tcgacgcgcgttccgcttctgtggg

SEQ ID NO: 4497113 - DNA, 25 bp, Homo sapien
gacagggcgctctcgacgcgcgttc

SEQ ID NO: 4497114 - DNA, 25 bp, Homo sapien
gcggtaatgaataaccgggcatctg

SEQ ID NO: 4497115 - DNA, 25 bp, Homo sapien
actctttcctctaggcctcgcggta

SEQ ID NO: 4497116 - DNA, 25 bp, Homo sapien
aataacgccattgttccccacgcgg

SEQ ID NO: 4497117 - DNA, 25 bp, Homo sapien
ttgaagcgctcgcggttgcagactc

SEQ ID NO: 4497118 - DNA, 25 bp, Homo sapien
tcctcgaaaataatcaaagagcttg

SEQ ID NO: 4497119 - DNA, 25 bp, Homo sapien
ggttgcagactccaaaataacgcca

SEQ ID NO: 4497120 - DNA, 25 bp, Homo sapien
agaaaacgcgggagttagccacgca

SEQ ID NO: 4497121 - DNA, 25 bp, Homo sapien
cattttgggcttcgtggttccaaga

SEQ ID NO: 4497122 - DNA, 25 bp, Homo sapien
caaccacagggacgatggaggccca

SEQ ID NO: 4497123 - DNA, 25 bp, Homo sapien
acggcccgctcgccattttgggctt

SEQ ID NO: 4497124 - DNA, 25 bp, Homo sapien
taggaactacccacaaaagctcctc

SEQ ID NO: 4497125 - DNA, 25 bp, Homo sapien
actccagcactgggtttggtgaatt

SEQ ID NO: 4497126 - DNA, 25 bp, Homo sapien
gattttttgtgctgccttaggctag

SEQ ID NO: 4497127 - DNA, 25 bp, Homo sapien
tgtcttgccctctcaacagcctaga

SEQ ID NO: 4497128 - DNA, 25 bp, Homo sapien
cagcctagaagacctgtttgggcac

SEQ ID NO: 4497129 - DNA, 25 bp, Homo sapien
gcactgcagagcttatggctggtct

SEQ ID NO: 4497130 - DNA, 25 bp, Homo sapien
cacgtgaattcatcaagatgtaagt

SEQ ID NO: 4497131 - DNA, 25 bp, Homo sapien
tttaagatgtttcctaccaatctca

SEQ ID NO: 4497132 - DNA, 25 bp, Homo sapien
caaactgccttttagtctgggtgtg

SEQ ID NO: 4497133 - DNA, 25 bp, Homo sapien
tctccatagattactgctattttga

SEQ ID NO: 4497134 - DNA, 25 bp, Homo sapien
tgccaaaaactgtactcaggatcca

SEQ ID NO: 4497135 - DNA, 25 bp, Homo sapien
tagcatgagaaccagggtaaaattc

SEQ ID NO: 4497136 - DNA, 25 bp, Homo sapien
gccttcgtgctctgaacagcatctg

SEQ ID NO: 4497137 - DNA, 25 bp, Homo sapien
caacctgggtgcaaggtagcatgag

SEQ ID NO: 4497138 - DNA, 25 bp, Homo sapien
cctttctggtggctaaggacctggg

SEQ ID NO: 4497139 - DNA, 25 bp, Homo sapien
caatttgggctttagggctggtgaa

SEQ ID NO: 4497140 - DNA, 25 bp, Homo sapien
ggaaccaccttctatacagccagat

SEQ ID NO: 4497141 - DNA, 25 bp, Homo sapien
cattgctaacttatatgcaggccca

SEQ ID NO: 4497142 - DNA, 25 bp, Homo sapien
gaaagcctgttccatgcgtgcccat

SEQ ID NO: 4497143 - DNA, 25 bp, Homo sapien
gaggaaagcctgttccatgcgtgcc

SEQ ID NO: 4497144 - DNA, 25 bp, Homo sapien
ggaaagcctgttccatgcgtgccca

SEQ ID NO: 4497145 - DNA, 25 bp, Homo sapien
aggaaagcctgttccatgcgtgccc

SEQ ID NO: 4497146 - DNA, 25 bp, Homo sapien
aggaaaggttggaggcttcagaagc

SEQ ID NO: 4497147 - DNA, 25 bp, Homo sapien
tgggaaatcaccctcaccaatctct

SEQ ID NO: 4497148 - DNA, 25 bp, Homo sapien
gtcagagcacactgcgtcttcctgg

SEQ ID NO: 4497149 - DNA, 25 bp, Homo sapien
cgtcttcctgggaaatcaccctcac

SEQ ID NO: 4497150 - DNA, 25 bp, Homo sapien
cacagaagtcagagcacactgcgtc

SEQ ID NO: 4497151 - DNA, 25 bp, Homo sapien
ggacatccactggtcccgttgctca

SEQ ID NO: 4497152 - DNA, 25 bp, Homo sapien
gacatccactggtcccgttgctcac

SEQ ID NO: 4497153 - DNA, 25 bp, Homo sapien
tggacatccactggtcccgttgctc

SEQ ID NO: 4497154 - DNA, 25 bp, Homo sapien
ctgtgcatgcggtattcatccagca

SEQ ID NO: 4497155 - DNA, 25 bp, Homo sapien
aactggaaatgggtcaactgcgcac

SEQ ID NO: 4497156 - DNA, 25 bp, Homo sapien
tggctgccatattcaaacccaaggc

SEQ ID NO: 4497157 - DNA, 25 bp, Homo sapien
tgggcagtctcataactgaagcaca

SEQ ID NO: 4497158 - DNA, 25 bp, Homo sapien
actcttgccaccggggcttctgctt

SEQ ID NO: 4497159 - DNA, 25 bp, Homo sapien
tcttgccaccggggcttctgcttct

SEQ ID NO: 4497160 - DNA, 25 bp, Homo sapien
agactcttgccaccggggcttctgc

SEQ ID NO: 4497161 - DNA, 25 bp, Homo sapien
cagactcttgccaccggggcttctg

SEQ ID NO: 4497162 - DNA, 25 bp, Homo sapien
aatccacaggctacagtcatccttc

SEQ ID NO: 4497163 - DNA, 25 bp, Homo sapien
gtttcctactgcagtacaatccaca

SEQ ID NO: 4497164 - DNA, 25 bp, Homo sapien
gagccttgctaggacagtttcctac

SEQ ID NO: 4497165 - DNA, 25 bp, Homo sapien
aagtggagccttgctaggacagttt

SEQ ID NO: 4497166 - DNA, 25 bp, Homo sapien
ggtctcagcccttagtcagtattgg

SEQ ID NO: 4497167 - DNA, 25 bp, Homo sapien
cagaaaagcatggaactggtctcag

SEQ ID NO: 4497168 - DNA, 25 bp, Homo sapien
tcccctgcattttgagacgatatac

SEQ ID NO: 4497169 - DNA, 25 bp, Homo sapien
taaaagaaagggtgctcaaaactca

SEQ ID NO: 4497170 - DNA, 25 bp, Homo sapien
ggtgggacctgctgtctcggccatt

SEQ ID NO: 4497171 - DNA, 25 bp, Homo sapien
tgtgcagatcccaactgcagaagag

SEQ ID NO: 4497172 - DNA, 25 bp, Homo sapien
cttcaagcaatgtttcatgttctcc

SEQ ID NO: 4497173 - DNA, 25 bp, Homo sapien
ttcaggcttaaatgtgcagatccca

SEQ ID NO: 4497174 - DNA, 25 bp, Homo sapien
aatcacacccgggacaatgagctca

SEQ ID NO: 4497175 - DNA, 25 bp, Homo sapien
tgggaacaggcccaccgatccctta

SEQ ID NO: 4497176 - DNA, 25 bp, Homo sapien
gcatcagggagtagagaagggtggg

SEQ ID NO: 4497177 - DNA, 25 bp, Homo sapien
gatcccttattcaaatcacacccgg

SEQ ID NO: 4497178 - DNA, 25 bp, Homo sapien
cacaagatcctggtccaaccacagg

SEQ ID NO: 4497179 - DNA, 25 bp, Homo sapien
ggctgtttctgctgcccggtcccga

SEQ ID NO: 4497180 - DNA, 25 bp, Homo sapien
ggaggccgtaatgcgatcagcagac

SEQ ID NO: 4497181 - DNA, 25 bp, Homo sapien
ttctccatcatatcccacacaagat

SEQ ID NO: 4497182 - DNA, 25 bp, Homo sapien
tcaccagattaaggagctcagagct

SEQ ID NO: 4497183 - DNA, 25 bp, Homo sapien
ccagattaaggagctcagagctaca

SEQ ID NO: 4497184 - DNA, 25 bp, Homo sapien
aggatcaccagattaaggagctcag

SEQ ID NO: 4497185 - DNA, 25 bp, Homo sapien
gattaaggagctcagagctacagct

SEQ ID NO: 4497186 - DNA, 25 bp, Homo sapien
gagctgcgctcggaatgtgattctc

SEQ ID NO: 4497187 - DNA, 25 bp, Homo sapien
gattctccagctttgcatgacactc

SEQ ID NO: 4497188 - DNA, 25 bp, Homo sapien
tagcagagtgcgactcccaagatcc

SEQ ID NO: 4497189 - DNA, 25 bp, Homo sapien
gctttgcatgacactctgttagcag

SEQ ID NO: 4497190 - DNA, 25 bp, Homo sapien
agtgtttcccgtgtgcccaagagtc

SEQ ID NO: 4497191 - DNA, 25 bp, Homo sapien
ccatgctaggcctgacttgcttgaa

SEQ ID NO: 4497192 - DNA, 25 bp, Homo sapien
taagtcagtgttggctaagtgcacc

SEQ ID NO: 4497193 - DNA, 25 bp, Homo sapien
catgaacttccccaggctgatgaag

SEQ ID NO: 4497194 - DNA, 25 bp, Homo sapien
gcaaacagagccaccaaggcaaatg

SEQ ID NO: 4497195 - DNA, 25 bp, Homo sapien
tgagcaaacagagccaccaaggcaa

SEQ ID NO: 4497196 - DNA, 25 bp, Homo sapien
aacagagccaccaaggcaaatgcca

SEQ ID NO: 4497197 - DNA, 25 bp, Homo sapien
cttgagggccacctgagcaaacaga

SEQ ID NO: 4497198 - DNA, 25 bp, Homo sapien
gaagagcttccgtttgctggaggcc

SEQ ID NO: 4497199 - DNA, 25 bp, Homo sapien
tcccaggctggaaacacggtgaaga

SEQ ID NO: 4497200 - DNA, 25 bp, Homo sapien
aactttgccagtatgctgcccttgg

SEQ ID NO: 4497201 - DNA, 25 bp, Homo sapien
cataaaagctgaaaagaggctgtcc

SEQ ID NO: 4497202 - DNA, 25 bp, Homo sapien
gagctgagacacgtctgagcccagc

SEQ ID NO: 4497203 - DNA, 25 bp, Homo sapien
caagaacccctgactaatgaatagc

SEQ ID NO: 4497204 - DNA, 25 bp, Homo sapien
ggagggtgtgcagtcctcaccaaag

SEQ ID NO: 4497205 - DNA, 25 bp, Homo sapien
gaactcatccctgggagagacggga

SEQ ID NO: 4497206 - DNA, 25 bp, Homo sapien
tccctaaccgacagtgctggagagt

SEQ ID NO: 4497207 - DNA, 25 bp, Homo sapien
tcctgtccaggcctgtataggctgg

SEQ ID NO: 4497208 - DNA, 25 bp, Homo sapien
aaattagccagccagtcggtacagg

SEQ ID NO: 4497209 - DNA, 25 bp, Homo sapien
gaatggcactggactagcatgttgt

SEQ ID NO: 4497210 - DNA, 25 bp, Homo sapien
tggtgcctctaaaggcctcttcccc

SEQ ID NO: 4497211 - DNA, 25 bp, Homo sapien
accctggtgcctctaaaggcctctt

SEQ ID NO: 4497212 - DNA, 25 bp, Homo sapien
tgcctctaaaggcctcttcccccaa

SEQ ID NO: 4497213 - DNA, 25 bp, Homo sapien
gtgcctctaaaggcctcttccccca

SEQ ID NO: 4497214 - DNA, 25 bp, Homo sapien
gggagcacttcccagttcaccatgt

SEQ ID NO: 4497215 - DNA, 25 bp, Homo sapien
ccagttcaccatgtccaacacctgg

SEQ ID NO: 4497216 - DNA, 25 bp, Homo sapien
gttcaccatgtccaacacctggcat

SEQ ID NO: 4497217 - DNA, 25 bp, Homo sapien
ggagcacttcccagttcaccatgtc

SEQ ID NO: 4497218 - DNA, 25 bp, Homo sapien
tccaggccatttactctttcaggga

SEQ ID NO: 4497219 - DNA, 25 bp, Homo sapien
cttatgcaaataggcccattcacag

SEQ ID NO: 4497220 - DNA, 25 bp, Homo sapien
gctgcttatgcaaataggcccattc

SEQ ID NO: 4497221 - DNA, 25 bp, Homo sapien
gcacccgcactcttctgctctgtga

SEQ ID NO: 4497222 - DNA, 25 bp, Homo sapien
aatgtctctatatgtgggtgccggc

SEQ ID NO: 4497223 - DNA, 25 bp, Homo sapien
tgaggagtcactgcactaaggcatg

SEQ ID NO: 4497224 - DNA, 25 bp, Homo sapien
taaggcatgtgacctgggacctgac

SEQ ID NO: 4497225 - DNA, 25 bp, Homo sapien
ctataagtggccaaacaggatctct

SEQ ID NO: 4497226 - DNA, 25 bp, Homo sapien
gcaggcctcggagcaatcctcattt

SEQ ID NO: 4497227 - DNA, 25 bp, Homo sapien
agccatgggctcctatctgtatgag

SEQ ID NO: 4497228 - DNA, 25 bp, Homo sapien
agctggccctagtactccctcagaa

SEQ ID NO: 4497229 - DNA, 25 bp, Homo sapien
ggtcctggtgattcaagctacctga

SEQ ID NO: 4497230 - DNA, 25 bp, Homo sapien
tgcaaagaaaatttattcgttgtag

SEQ ID NO: 4497231 - DNA, 25 bp, Homo sapien
ttgcaaagaaaatttattcgttgta

SEQ ID NO: 4497232 - DNA, 25 bp, Homo sapien
tcttgcttgcaagtgagagacttca

SEQ ID NO: 4497233 - DNA, 25 bp, Homo sapien
gaaaatctgggtaggcctcctggag

SEQ ID NO: 4497234 - DNA, 25 bp, Homo sapien
tttactaagtactcagatgtgcagc

SEQ ID NO: 4497235 - DNA, 25 bp, Homo sapien
tgtactcaagtaggctggcaattca

SEQ ID NO: 4497236 - DNA, 25 bp, Homo sapien
cctcaagatcatggccggcctcggt

SEQ ID NO: 4497237 - DNA, 25 bp, Homo sapien
cgggcacaagaagcgaacggcatca

SEQ ID NO: 4497238 - DNA, 25 bp, Homo sapien
gtggacagagcgcggcctcccctat

SEQ ID NO: 4497239 - DNA, 25 bp, Homo sapien
tatgccgccctcaagatcatggccg

SEQ ID NO: 4497240 - DNA, 25 bp, Homo sapien
caaggtacttaaatccgggcaggtg

SEQ ID NO: 4497241 - DNA, 25 bp, Homo sapien
ggttggtgtttattcatgagcaggt

SEQ ID NO: 4497242 - DNA, 25 bp, Homo sapien
gcgattagaacagccgcctgcgctg

SEQ ID NO: 4497243 - DNA, 25 bp, Homo sapien
caggtacttggagacggcgattaga

SEQ ID NO: 4497244 - DNA, 25 bp, Homo sapien
gctgtgaatgcctaaaacaaactcg

SEQ ID NO: 4497245 - DNA, 25 bp, Homo sapien
tcaaataaggccgtctaatgacggg

SEQ ID NO: 4497246 - DNA, 25 bp, Homo sapien
ccctgattaggagccgtggctttgc

SEQ ID NO: 4497247 - DNA, 25 bp, Homo sapien
cagctccttccatccgtcaaataag

SEQ ID NO: 4497248 - DNA, 25 bp, Homo sapien
taaaaccgcaccttaatgaggcgcc

SEQ ID NO: 4497249 - DNA, 25 bp, Homo sapien
cttcaacttgggagaaacaggcctg

SEQ ID NO: 4497250 - DNA, 25 bp, Homo sapien
gatgtcaggttaaaaacgactggcc

SEQ ID NO: 4497251 - DNA, 25 bp, Homo sapien
tgccagagtagtaccacagagaaga

SEQ ID NO: 4497252 - DNA, 25 bp, Homo sapien
ttttgtcttatagaagagggcaggt

SEQ ID NO: 4497253 - DNA, 25 bp, Homo sapien
cccctgagacaggtgtgcgtgcaca

SEQ ID NO: 4497254 - DNA, 25 bp, Homo sapien
ggctgcctgccatttattgttactc

SEQ ID NO: 4497255 - DNA, 25 bp, Homo sapien
tctgctcagggtatatgctaggtac

SEQ ID NO: 4497256 - DNA, 25 bp, Homo sapien
gaaacatacgcacagagacactaga

SEQ ID NO: 4497257 - DNA, 25 bp, Homo sapien
tagaccccctcaccaatagatgcag

SEQ ID NO: 4497258 - DNA, 25 bp, Homo sapien
tgttggatctttatcatgggcactg

SEQ ID NO: 4497259 - DNA, 25 bp, Homo sapien
ctgtcacacacaccgctgacatgta

SEQ ID NO: 4497260 - DNA, 25 bp, Homo sapien
aattgcagccgctcttctggataaa

SEQ ID NO: 4497261 - DNA, 25 bp, Homo sapien
gcaggggtggaaagtcagggcccgc

SEQ ID NO: 4497262 - DNA, 25 bp, Homo sapien
aggaaaccggctctcactggccgcc

SEQ ID NO: 4497263 - DNA, 25 bp, Homo sapien
gggctttgtgccctgcacaattgca

SEQ ID NO: 4497264 - DNA, 25 bp, Homo sapien
gactaagtgcagtgatggcggccca

SEQ ID NO: 4497265 - DNA, 25 bp, Homo sapien
tgaatggagcacacggcgtcttcct

SEQ ID NO: 4497266 - DNA, 25 bp, Homo sapien
aaaatactttgcagcgggtgaatgg

SEQ ID NO: 4497267 - DNA, 25 bp, Homo sapien
cagtggtaagcctgggaaccctttg

SEQ ID NO: 4497268 - DNA, 25 bp, Homo sapien
ccaagccctgttctgggaaggagtt

SEQ ID NO: 4497269 - DNA, 25 bp, Homo sapien
ttttccaactcaaatggagatgcca

SEQ ID NO: 4497270 - DNA, 25 bp, Homo sapien
caagctctgagcactcttgggctgg

SEQ ID NO: 4497271 - DNA, 25 bp, Homo sapien
tgccatatgggctagctctggtgct

SEQ ID NO: 4497272 - DNA, 25 bp, Homo sapien
cctgatactctggaggtgcaagaca

SEQ ID NO: 4497273 - DNA, 25 bp, Homo sapien
tactctggaggtgcaagacaaagag

SEQ ID NO: 4497274 - DNA, 25 bp, Homo sapien
ctgcctgatactctggaggtgcaag

SEQ ID NO: 4497275 - DNA, 25 bp, Homo sapien
gatactctggaggtgcaagacaaag

SEQ ID NO: 4497276 - DNA, 25 bp, Homo sapien
cactcctggttttgcgctttcagag

SEQ ID NO: 4497277 - DNA, 25 bp, Homo sapien
gacagaagggcttgtgccatttaga

SEQ ID NO: 4497278 - DNA, 25 bp, Homo sapien
tagagccaccttgggaggagatgac

SEQ ID NO: 4497279 - DNA, 25 bp, Homo sapien
tgaccacactcctggttttgcgctt

SEQ ID NO: 4497280 - DNA, 25 bp, Homo sapien
caaagtgtggtctagaacaggtgaa

SEQ ID NO: 4497281 - DNA, 25 bp, Homo sapien
tggaagtctgcatcgtggacccagc

SEQ ID NO: 4497282 - DNA, 25 bp, Homo sapien
taaatgtaaactcctttgatgggca

SEQ ID NO: 4497283 - DNA, 25 bp, Homo sapien
gcacaagggtcgatctggcttcacc

SEQ ID NO: 4497284 - DNA, 25 bp, Homo sapien
tgaagggtcccaaaggccatagtta

SEQ ID NO: 4497285 - DNA, 25 bp, Homo sapien
gccatagttatgagcagcacatcag

SEQ ID NO: 4497286 - DNA, 25 bp, Homo sapien
accagggatacaccagcggctgtac

SEQ ID NO: 4497287 - DNA, 25 bp, Homo sapien
cacatcagtgcctgatacaccaggg

SEQ ID NO: 4497288 - DNA, 25 bp, Homo sapien
cgtccagcttgtgttgttctctggg

SEQ ID NO: 4497289 - DNA, 25 bp, Homo sapien
caccaattccagcaccgtccagctt

SEQ ID NO: 4497290 - DNA, 25 bp, Homo sapien
ccaattccagcaccgtccagcttgt

SEQ ID NO: 4497291 - DNA, 25 bp, Homo sapien
accgtccagcttgtgttgttctctg

SEQ ID NO: 4497292 - DNA, 25 bp, Homo sapien
ttatgtcaatttgctagccaaattg

SEQ ID NO: 4497293 - DNA, 25 bp, Homo sapien
cccattcatgtggtaatgtgggaac

SEQ ID NO: 4497294 - DNA, 25 bp, Homo sapien
caaattgtttgctcgagtggacagg

SEQ ID NO: 4497295 - DNA, 25 bp, Homo sapien
tcatgtggtaatgtgggaactggcc

SEQ ID NO: 4497296 - DNA, 25 bp, Homo sapien
tactattagcaatttcaccaggtga

SEQ ID NO: 4497297 - DNA, 25 bp, Homo sapien
agtttcccagcataccatactagtg

SEQ ID NO: 4497298 - DNA, 25 bp, Homo sapien
tagtgcccctattttaaccatagta

SEQ ID NO: 4497299 - DNA, 25 bp, Homo sapien
ttttcttgcttgcagcttaattgcg

SEQ ID NO: 4497300 - DNA, 25 bp, Homo sapien
tgcagcataagcgtgaaccacaagg

SEQ ID NO: 4497301 - DNA, 25 bp, Homo sapien
taggagttaagtccctttgatgccc

SEQ ID NO: 4497302 - DNA, 25 bp, Homo sapien
tcgggtaagagcaatgatttcagcc

SEQ ID NO: 4497303 - DNA, 25 bp, Homo sapien
ccctgagggatgtggctttggcttc

SEQ ID NO: 4497304 - DNA, 25 bp, Homo sapien
aatgaagagcctgttaaccatggcc

SEQ ID NO: 4497305 - DNA, 25 bp, Homo sapien
tatgcacataaagtagtggcccgca

SEQ ID NO: 4497306 - DNA, 25 bp, Homo sapien
caattgttgagcaggtgatccctcc

SEQ ID NO: 4497307 - DNA, 25 bp, Homo sapien
tcagcatgcatcgaacttaggttcc

SEQ ID NO: 4497308 - DNA, 25 bp, Homo sapien
ccagacctctctgtgttgtgtgcgt

SEQ ID NO: 4497309 - DNA, 25 bp, Homo sapien
tacaaagtgggcatccaagccgggt

SEQ ID NO: 4497310 - DNA, 25 bp, Homo sapien
gacctggtgggtgaacctgagctct

SEQ ID NO: 4497311 - DNA, 25 bp, Homo sapien
ctagggatgcaagagtgagcaagca

SEQ ID NO: 4497312 - DNA, 25 bp, Homo sapien
tgacagagtgagaccaaaaaggaag

SEQ ID NO: 4497313 - DNA, 25 bp, Homo sapien
aaagaaggaaggaaggcaggcaggc

SEQ ID NO: 4497314 - DNA, 25 bp, Homo sapien
aagaaggaaggaaggcaggcaggca

SEQ ID NO: 4497315 - DNA, 25 bp, Homo sapien
cagagtgagaccaaaaaggaagaaa

SEQ ID NO: 4497316 - DNA, 25 bp, Homo sapien
ggatctcacgtagaaactgcaccct

SEQ ID NO: 4497317 - DNA, 25 bp, Homo sapien
ttcagtggctcagataagaggcacc

SEQ ID NO: 4497318 - DNA, 25 bp, Homo sapien
cctcctcttctacgtttggactctg

SEQ ID NO: 4497319 - DNA, 25 bp, Homo sapien
gaggcaccttagacctctgactcta

SEQ ID NO: 4497320 - DNA, 25 bp, Homo sapien
tctgcgtggcctctgtctgcgtggc

SEQ ID NO: 4497321 - DNA, 25 bp, Homo sapien
tgggtaaagtcagccccattcagct

SEQ ID NO: 4497322 - DNA, 25 bp, Homo sapien
tggcctctgtctgcgtggcctttgg

SEQ ID NO: 4497323 - DNA, 25 bp, Homo sapien
tttggggcagttctgggtaaagtca

SEQ ID NO: 4497324 - DNA, 25 bp, Homo sapien
tacaagaccgctacatcgtcgtggg

SEQ ID NO: 4497325 - DNA, 25 bp, Homo sapien
ccaggacgtgcacgtgatggtcttc

SEQ ID NO: 4497326 - DNA, 25 bp, Homo sapien
tttcctgcagcgctacggcttcagc

SEQ ID NO: 4497327 - DNA, 25 bp, Homo sapien
tgttggcagccttcggcatccagtg

SEQ ID NO: 4497328 - DNA, 25 bp, Homo sapien
cacaagaacttgagcgacatggaga

SEQ ID NO: 4497329 - DNA, 25 bp, Homo sapien
tcagagaggacgcacaagaacttga

SEQ ID NO: 4497330 - DNA, 25 bp, Homo sapien
gcgacatggagaacgaattctacta

SEQ ID NO: 4497331 - DNA, 25 bp, Homo sapien
gaacttgagcgacatggagaacgaa

SEQ ID NO: 4497332 - DNA, 25 bp, Homo sapien
gcatggtctttgagcatcacagcaa

SEQ ID NO: 4497333 - DNA, 25 bp, Homo sapien
gaggcacccatttgcaaatcaagga

SEQ ID NO: 4497334 - DNA, 25 bp, Homo sapien
tatgcattaaggtcatcccaggtac

SEQ ID NO: 4497335 - DNA, 25 bp, Homo sapien
tcaagtacatactaccagtctcggg

SEQ ID NO: 4497336 - DNA, 25 bp, Homo sapien
tgtgacatttttcagtttacaaaag

SEQ ID NO: 4497337 - DNA, 25 bp, Homo sapien
tgacatttttcagtttacaaaagac

SEQ ID NO: 4497338 - DNA, 25 bp, Homo sapien
tttgtgacatttttcagtttacaaa

SEQ ID NO: 4497339 - DNA, 25 bp, Homo sapien
cagtttacaaaagactttcctattg

SEQ ID NO: 4497340 - DNA, 25 bp, Homo sapien
tgagaggagcacctagcataagacc

SEQ ID NO: 4497341 - DNA, 25 bp, Homo sapien
tagacacctctacaggtacagccga

SEQ ID NO: 4497342 - DNA, 25 bp, Homo sapien
tacatgcagaagagaccgcaagggc

SEQ ID NO: 4497343 - DNA, 25 bp, Homo sapien
taacaacccatatagtggctaggtg

SEQ ID NO: 4497344 - DNA, 25 bp, Homo sapien
ccagcagtagtctgtgggtcgtctc

SEQ ID NO: 4497345 - DNA, 25 bp, Homo sapien
tcgtctcttccttgtgagcacatcc

SEQ ID NO: 4497346 - DNA, 25 bp, Homo sapien
gcactgcttcacaggagagagccat

SEQ ID NO: 4497347 - DNA, 25 bp, Homo sapien
aagggtggccagcagtagtctgtgg

SEQ ID NO: 4497348 - DNA, 25 bp, Homo sapien
tcatatttgttataacagggttcct

SEQ ID NO: 4497349 - DNA, 25 bp, Homo sapien
ggttatctctaggatttcaaatcat

SEQ ID NO: 4497350 - DNA, 25 bp, Homo sapien
aacactatgtataatgtgattccac

SEQ ID NO: 4497351 - DNA, 25 bp, Homo sapien
ctggtaagaaaagttcgtaaggcat

SEQ ID NO: 4497352 - DNA, 25 bp, Homo sapien
caggtccacaaccataaggctgtga

SEQ ID NO: 4497353 - DNA, 25 bp, Homo sapien
tcaggtccacaaccataaggctgtg

SEQ ID NO: 4497354 - DNA, 25 bp, Homo sapien
ggtccacaaccataaggctgtgaag

SEQ ID NO: 4497355 - DNA, 25 bp, Homo sapien
ccacaaccataaggctgtgaagagg

SEQ ID NO: 4497356 - DNA, 25 bp, Homo sapien
atccagacccagctcaaggtcatcc

SEQ ID NO: 4497357 - DNA, 25 bp, Homo sapien
agacccagctcaaggtcatccccag

SEQ ID NO: 4497358 - DNA, 25 bp, Homo sapien
ctgcttgctgcacgggcccccttct

SEQ ID NO: 4497359 - DNA, 25 bp, Homo sapien
acccagctcaaggtcatccccagaa

SEQ ID NO: 4497360 - DNA, 25 bp, Homo sapien
actgggtccattcaccgatccggga

SEQ ID NO: 4497361 - DNA, 25 bp, Homo sapien
tcaccgatccgggaacccaaggaca

SEQ ID NO: 4497362 - DNA, 25 bp, Homo sapien
tgggtccattcaccgatccgggaac

SEQ ID NO: 4497363 - DNA, 25 bp, Homo sapien
gaacactgggtccattcaccgatcc

SEQ ID NO: 4497364 - DNA, 25 bp, Homo sapien
gccggacccggctgtggcgggcggc

SEQ ID NO: 4497365 - DNA, 25 bp, Homo sapien
gcagcagcattactttgtgacagca

SEQ ID NO: 4497366 - DNA, 25 bp, Homo sapien
tggccaggccgaatcggcaactcag

SEQ ID NO: 4497367 - DNA, 25 bp, Homo sapien
gaatcggcaactcagataggtgagg

SEQ ID NO: 4497368 - DNA, 25 bp, Homo sapien
ggtagtctagcagcgtctccatcag

SEQ ID NO: 4497369 - DNA, 25 bp, Homo sapien
tgacttcccggactctcttgggcaa

SEQ ID NO: 4497370 - DNA, 25 bp, Homo sapien
cggtggtatccacccagtagaaggt

SEQ ID NO: 4497371 - DNA, 25 bp, Homo sapien
tagaaggtgatttttcgggcgacca

SEQ ID NO: 4497372 - DNA, 25 bp, Homo sapien
tttgggcttcgcatgtgaaagcact

SEQ ID NO: 4497373 - DNA, 25 bp, Homo sapien
taactcactcctgggttagtgacat

SEQ ID NO: 4497374 - DNA, 25 bp, Homo sapien
ttgcatttgccacgccttttttggg

SEQ ID NO: 4497375 - DNA, 25 bp, Homo sapien
tgtgtctaaggcttgactggctgcc

SEQ ID NO: 4497376 - DNA, 25 bp, Homo sapien
caaacagtccagtatccaaggtggt

SEQ ID NO: 4497377 - DNA, 25 bp, Homo sapien
ggaaacgaggcctcatactcaggag

SEQ ID NO: 4497378 - DNA, 25 bp, Homo sapien
taaagtggcatcagttggcagcatt

SEQ ID NO: 4497379 - DNA, 25 bp, Homo sapien
aaagattcagatggcaagacagtgc

SEQ ID NO: 4497380 - DNA, 25 bp, Homo sapien
aactgctgaaataacagcctttgag

SEQ ID NO: 4497381 - DNA, 25 bp, Homo sapien
caaagtgctgctcgttgggagagac

SEQ ID NO: 4497382 - DNA, 25 bp, Homo sapien
tagcatccagctgtcagtgcccaaa

SEQ ID NO: 4497383 - DNA, 25 bp, Homo sapien
ccaagggctctagggtgactgtcca

SEQ ID NO: 4497384 - DNA, 25 bp, Homo sapien
cgttgaaattcagcctccttggtgc

SEQ ID NO: 4497385 - DNA, 25 bp, Homo sapien
cacagtgaggatcatagcactggca

SEQ ID NO: 4497386 - DNA, 25 bp, Homo sapien
tatctgcaagcgaatcatgagtctg

SEQ ID NO: 4497387 - DNA, 25 bp, Homo sapien
caatatactatccacaacatctgag

SEQ ID NO: 4497388 - DNA, 25 bp, Homo sapien
gctacaggcctatgtggtaaataaa

SEQ ID NO: 4497389 - DNA, 25 bp, Homo sapien
ggcaccacaaactgctacaggccta

SEQ ID NO: 4497390 - DNA, 25 bp, Homo sapien
taacatttgttctccggcaccacaa

SEQ ID NO: 4497391 - DNA, 25 bp, Homo sapien
aaagtgcacagttaacatttgttct

SEQ ID NO: 4497392 - DNA, 25 bp, Homo sapien
cggaactggcaccactgatgttaca

SEQ ID NO: 4497393 - DNA, 25 bp, Homo sapien
tgactccatcaaatcggaactggca

SEQ ID NO: 4497394 - DNA, 25 bp, Homo sapien
tccatcaaatcggaactggcaccac

SEQ ID NO: 4497395 - DNA, 25 bp, Homo sapien
caaatcggaactggcaccactgatg

SEQ ID NO: 4497396 - DNA, 25 bp, Homo sapien
taattcgccttcagttttggaagac

SEQ ID NO: 4497397 - DNA, 25 bp, Homo sapien
tctggtagagctcggcaaggcaatg

SEQ ID NO: 4497398 - DNA, 25 bp, Homo sapien
ctgtcttcttgatgagctatagtgg

SEQ ID NO: 4497399 - DNA, 25 bp, Homo sapien
ggattcttcacgagattttctctgg

SEQ ID NO: 4497400 - DNA, 25 bp, Homo sapien
tgttctcccactaggtatcttttgg

SEQ ID NO: 4497401 - DNA, 25 bp, Homo sapien
tcagccttgcgacattcaacatctt

SEQ ID NO: 4497402 - DNA, 25 bp, Homo sapien
tgtctcactggagtacgagggaccc

SEQ ID NO: 4497403 - DNA, 25 bp, Homo sapien
atctttaaggaacggcacatggtat

SEQ ID NO: 4497404 - DNA, 25 bp, Homo sapien
atatatgatagcagctcttcctcag

SEQ ID NO: 4497405 - DNA, 25 bp, Homo sapien
gagatcatgtttcgagcacatgcat

SEQ ID NO: 4497406 - DNA, 25 bp, Homo sapien
taacggttgagatcatgtttcgagc

SEQ ID NO: 4497407 - DNA, 25 bp, Homo sapien
caacatgatttctcctgtggccaca

SEQ ID NO: 4497408 - DNA, 25 bp, Homo sapien
gattctgtcgaagacttttactagt

SEQ ID NO: 4497409 - DNA, 25 bp, Homo sapien
ttttttcctagattctgtcgaagac

SEQ ID NO: 4497410 - DNA, 25 bp, Homo sapien
tttttacttgattcaggcagttcac

SEQ ID NO: 4497411 - DNA, 25 bp, Homo sapien
taagagactactttttacttgattc

SEQ ID NO: 4497412 - DNA, 25 bp, Homo sapien
caaacgaagaaatacctgaagctgg

SEQ ID NO: 4497413 - DNA, 25 bp, Homo sapien
tctccaaacgaagaaatacctgaag

SEQ ID NO: 4497414 - DNA, 25 bp, Homo sapien
atctccaaacgaagaaatacctgaa

SEQ ID NO: 4497415 - DNA, 25 bp, Homo sapien
acgaagaaatacctgaagctggcac

SEQ ID NO: 4497416 - DNA, 25 bp, Homo sapien
ctgtactttcatttattgaagggca

SEQ ID NO: 4497417 - DNA, 25 bp, Homo sapien
tacttgttccatatcatctgtactt

SEQ ID NO: 4497418 - DNA, 25 bp, Homo sapien
ttcatttattgaagggcattgcaga

SEQ ID NO: 4497419 - DNA, 25 bp, Homo sapien
tcctccactacttgttccatatcat

SEQ ID NO: 4497420 - DNA, 25 bp, Homo sapien
gttaaacacaccatgcgcagcaaat

SEQ ID NO: 4497421 - DNA, 25 bp, Homo sapien
tgaatcctcagttaaacacaccatg

SEQ ID NO: 4497422 - DNA, 25 bp, Homo sapien
gctaggtacgctgaatcctcagtta

SEQ ID NO: 4497423 - DNA, 25 bp, Homo sapien
tccagaaactctgctaggtacgctg

SEQ ID NO: 4497424 - DNA, 25 bp, Homo sapien
gaacagattgatcgaatacggaaca

SEQ ID NO: 4497425 - DNA, 25 bp, Homo sapien
gattgatcgaatacggaacagttac

SEQ ID NO: 4497426 - DNA, 25 bp, Homo sapien
tggaacagattgatcgaatacggaa

SEQ ID NO: 4497427 - DNA, 25 bp, Homo sapien
gatcgaatacggaacagttaccatc

SEQ ID NO: 4497428 - DNA, 25 bp, Homo sapien
cctaggctgttgtaaagatttccaa

SEQ ID NO: 4497429 - DNA, 25 bp, Homo sapien
aaaatctgtaggaaggacaccagcc

SEQ ID NO: 4497430 - DNA, 25 bp, Homo sapien
cacagaaagaagtggtgatttgttc

SEQ ID NO: 4497431 - DNA, 25 bp, Homo sapien
tcatggagtcatcactgaaaaaatc

SEQ ID NO: 4497432 - DNA, 25 bp, Homo sapien
ctcttcttggctgatctggtacgaa

SEQ ID NO: 4497433 - DNA, 25 bp, Homo sapien
gatctggtacgaagttcctgcagtt

SEQ ID NO: 4497434 - DNA, 25 bp, Homo sapien
gctgcctgacactgatctacgagca

SEQ ID NO: 4497435 - DNA, 25 bp, Homo sapien
tcttggctgatctggtacgaagttc

SEQ ID NO: 4497436 - DNA, 25 bp, Homo sapien
tatatggacaaagatgactggactg

SEQ ID NO: 4497437 - DNA, 25 bp, Homo sapien
taggttttggtaggcacactctgat

SEQ ID NO: 4497438 - DNA, 25 bp, Homo sapien
cataagggcagctattagttcaaca

SEQ ID NO: 4497439 - DNA, 25 bp, Homo sapien
agattgtcagatgctcctattagga

SEQ ID NO: 4497440 - DNA, 25 bp, Homo sapien
ttgacactttaggaatttcaatttg

SEQ ID NO: 4497441 - DNA, 25 bp, Homo sapien
acctcagcaatgcttttatgtctta

SEQ ID NO: 4497442 - DNA, 25 bp, Homo sapien
gtcgaagattctgtgaaacctcagc

SEQ ID NO: 4497443 - DNA, 25 bp, Homo sapien
caatttgtcgaagattctgtgaaac

SEQ ID NO: 4497444 - DNA, 25 bp, Homo sapien
ttgcactgtatctttcactggctgg

SEQ ID NO: 4497445 - DNA, 25 bp, Homo sapien
cttgcactgtatctttcactggctg

SEQ ID NO: 4497446 - DNA, 25 bp, Homo sapien
agatttcttcgaactttggtcactt

SEQ ID NO: 4497447 - DNA, 25 bp, Homo sapien
aagatttcttcgaactttggtcact

SEQ ID NO: 4497448 - DNA, 25 bp, Homo sapien
ttctaggcaacccccgctttagtga

SEQ ID NO: 4497449 - DNA, 25 bp, Homo sapien
tctaggcaacccccgctttagtgat

SEQ ID NO: 4497450 - DNA, 25 bp, Homo sapien
taggcaacccccgctttagtgatct

SEQ ID NO: 4497451 - DNA, 25 bp, Homo sapien
ctaggcaacccccgctttagtgatc

SEQ ID NO: 4497452 - DNA, 25 bp, Homo sapien
aagttgtcaagtttatcctctagac

SEQ ID NO: 4497453 - DNA, 25 bp, Homo sapien
agttgtcaagtttatcctctagacc

SEQ ID NO: 4497454 - DNA, 25 bp, Homo sapien
gaagttgtcaagtttatcctctaga

SEQ ID NO: 4497455 - DNA, 25 bp, Homo sapien
agatgcagtctacaacaatataaag

SEQ ID NO: 4497456 - DNA, 25 bp, Homo sapien
gaaatacatagtagcagagtgtata

SEQ ID NO: 4497457 - DNA, 25 bp, Homo sapien
gctttattcataaagccaggttctt

SEQ ID NO: 4497458 - DNA, 25 bp, Homo sapien
gcttaagatgctaactgaggtaacc

SEQ ID NO: 4497459 - DNA, 25 bp, Homo sapien
cactcttagtcagcagtttgtgata

SEQ ID NO: 4497460 - DNA, 25 bp, Homo sapien
gtgcagcagccttttggagatctgc

SEQ ID NO: 4497461 - DNA, 25 bp, Homo sapien
gtctcggccacactcttagtcagca

SEQ ID NO: 4497462 - DNA, 25 bp, Homo sapien
tgcttatgcactggagtctcggcca

SEQ ID NO: 4497463 - DNA, 25 bp, Homo sapien
aacacttattaaggagacaggcagc

SEQ ID NO: 4497464 - DNA, 25 bp, Homo sapien
ctcgaggaaccacatgcacaaggat

SEQ ID NO: 4497465 - DNA, 25 bp, Homo sapien
ggattactccataccacttgtaatt

SEQ ID NO: 4497466 - DNA, 25 bp, Homo sapien
tccataccacttgtaattaacactt

SEQ ID NO: 4497467 - DNA, 25 bp, Homo sapien
ggggactcttcaacaacaccaatat

SEQ ID NO: 4497468 - DNA, 25 bp, Homo sapien
tcttcaacaacaccaatatcaggac

SEQ ID NO: 4497469 - DNA, 25 bp, Homo sapien
tcaacaacaccaatatcaggaccag

SEQ ID NO: 4497470 - DNA, 25 bp, Homo sapien
tttttcaggggactcttcaacaaca

SEQ ID NO: 4497471 - DNA, 25 bp, Homo sapien
aagagtggactctttgcacacttcg

SEQ ID NO: 4497472 - DNA, 25 bp, Homo sapien
gacttcggctgagacacagaataga

SEQ ID NO: 4497473 - DNA, 25 bp, Homo sapien
acttatcttgctggaaagagtggac

SEQ ID NO: 4497474 - DNA, 25 bp, Homo sapien
caactgcttgattcgaggacttcgt

SEQ ID NO: 4497475 - DNA, 25 bp, Homo sapien
tcagcacggacttgtgaaggcagag

SEQ ID NO: 4497476 - DNA, 25 bp, Homo sapien
agcacggacttgtgaaggcagaggg

SEQ ID NO: 4497477 - DNA, 25 bp, Homo sapien
agtcagcacggacttgtgaaggcag

SEQ ID NO: 4497478 - DNA, 25 bp, Homo sapien
caagtcagcacggacttgtgaaggc

SEQ ID NO: 4497479 - DNA, 25 bp, Homo sapien
gaccgaatactttggactggagaat

SEQ ID NO: 4497480 - DNA, 25 bp, Homo sapien
tcatctcagacattgccccaaaaag

SEQ ID NO: 4497481 - DNA, 25 bp, Homo sapien
aagaagactcttgggagaccgaata

SEQ ID NO: 4497482 - DNA, 25 bp, Homo sapien
cattcgagctgaacccttttctgag

SEQ ID NO: 4497483 - DNA, 25 bp, Homo sapien
tccttaaaagctgcctgctttgtag

SEQ ID NO: 4497484 - DNA, 25 bp, Homo sapien
cagcctttctggagtatacaacgga

SEQ ID NO: 4497485 - DNA, 25 bp, Homo sapien
tgaatccaatggtgagtcatggccg

SEQ ID NO: 4497486 - DNA, 25 bp, Homo sapien
tatgagagatccttcttggtgtagt

SEQ ID NO: 4497487 - DNA, 25 bp, Homo sapien
tctcctgcctgggtatgtcgttttt

SEQ ID NO: 4497488 - DNA, 25 bp, Homo sapien
tcctgcctgggtatgtcgtttttga

SEQ ID NO: 4497489 - DNA, 25 bp, Homo sapien
cttctcctgcctgggtatgtcgttt

SEQ ID NO: 4497490 - DNA, 25 bp, Homo sapien
ctgcctgggtatgtcgtttttgagg

SEQ ID NO: 4497491 - DNA, 25 bp, Homo sapien
tcttggtgtcttcgtttcaagagag

SEQ ID NO: 4497492 - DNA, 25 bp, Homo sapien
ggtgtcttcgtttcaagagaggtac

SEQ ID NO: 4497493 - DNA, 25 bp, Homo sapien
aggagttcttggtgtcttcgtttca

SEQ ID NO: 4497494 - DNA, 25 bp, Homo sapien
ggagttcttggtgtcttcgtttcaa

SEQ ID NO: 4497495 - DNA, 25 bp, Homo sapien
tgaatgtggccaagtacagtttggc

SEQ ID NO: 4497496 - DNA, 25 bp, Homo sapien
ggtctctgatgggagtgagacactc

SEQ ID NO: 4497497 - DNA, 25 bp, Homo sapien
tgctgctctcggaggtgttctgaga

SEQ ID NO: 4497498 - DNA, 25 bp, Homo sapien
gggctttctggactggaattcactg

SEQ ID NO: 4497499 - DNA, 25 bp, Homo sapien
aacagtttctttggcgtaacaggtg

SEQ ID NO: 4497500 - DNA, 25 bp, Homo sapien
tcctaaatggactcttcttggagac

SEQ ID NO: 4497501 - DNA, 25 bp, Homo sapien
tgtgtttgattctgaggcgtgccca

SEQ ID NO: 4497502 - DNA, 25 bp, Homo sapien
tagctttatcctttagtttctgggc

SEQ ID NO: 4497503 - DNA, 25 bp, Homo sapien
ctggggctctttctgatccagttct

SEQ ID NO: 4497504 - DNA, 25 bp, Homo sapien
tggggctctttctgatccagttctc

SEQ ID NO: 4497505 - DNA, 25 bp, Homo sapien
gagatgcagctacgctgggtgacat

SEQ ID NO: 4497506 - DNA, 25 bp, Homo sapien
ctgtgagagttcagggggagttgag

SEQ ID NO: 4497507 - DNA, 25 bp, Homo sapien
agagatgcagctacgctgggtgaca

SEQ ID NO: 4497508 - DNA, 25 bp, Homo sapien
catggtgttcggcttcactgaggag

SEQ ID NO: 4497509 - DNA, 25 bp, Homo sapien
tacttttcaagtcaccaatgccatg

SEQ ID NO: 4497510 - DNA, 25 bp, Homo sapien
tacagtgcacgtcacgggaaggcat

SEQ ID NO: 4497511 - DNA, 25 bp, Homo sapien
cagaggagaggatgcatgccaatca

SEQ ID NO: 4497512 - DNA, 25 bp, Homo sapien
gcaggttgtctagttgtgccgaagc

SEQ ID NO: 4497513 - DNA, 25 bp, Homo sapien
gctggcaggttgtctagttgtgccg

SEQ ID NO: 4497514 - DNA, 25 bp, Homo sapien
tggcaggttgtctagttgtgccgaa

SEQ ID NO: 4497515 - DNA, 25 bp, Homo sapien
aggttgtctagttgtgccgaagcct

SEQ ID NO: 4497516 - DNA, 25 bp, Homo sapien
tggtgtccaaggaaccccatctgtt

SEQ ID NO: 4497517 - DNA, 25 bp, Homo sapien
tcggccttaggcatgctgttcctgg

SEQ ID NO: 4497518 - DNA, 25 bp, Homo sapien
cctctgactcaagcagtgacaggct

SEQ ID NO: 4497519 - DNA, 25 bp, Homo sapien
gatgctgagttcaaggccgtggtcc

SEQ ID NO: 4497520 - DNA, 25 bp, Homo sapien
aaacacctcttcgtctcccgtggag

SEQ ID NO: 4497521 - DNA, 25 bp, Homo sapien
gatccttttggctccacggtcagct

SEQ ID NO: 4497522 - DNA, 25 bp, Homo sapien
ccctctttactcttactaacttctg

SEQ ID NO: 4497523 - DNA, 25 bp, Homo sapien
cgtggagggtagctgccatgcactc

SEQ ID NO: 4497524 - DNA, 25 bp, Homo sapien
cagagaggcagctccgcacggcaca

SEQ ID NO: 4497525 - DNA, 25 bp, Homo sapien
gctccgcacggcacagctgggaggt

SEQ ID NO: 4497526 - DNA, 25 bp, Homo sapien
aggcagctccgcacggcacagctgg

SEQ ID NO: 4497527 - DNA, 25 bp, Homo sapien
ctccgcacggcacagctgggaggtg

SEQ ID NO: 4497528 - DNA, 25 bp, Homo sapien
gatgagcagcatgttgcggcaagcc

SEQ ID NO: 4497529 - DNA, 25 bp, Homo sapien
taaacaggcctatcactcgtgctgc

SEQ ID NO: 4497530 - DNA, 25 bp, Homo sapien
gggcagttaacaggccaaatccttg

SEQ ID NO: 4497531 - DNA, 25 bp, Homo sapien
tatacagaacatgcggataaacccg

SEQ ID NO: 4497532 - DNA, 25 bp, Homo sapien
aggttcccatgagcttcttccgtgt

SEQ ID NO: 4497533 - DNA, 25 bp, Homo sapien
cgcctcctggagaaagcgcgactga

SEQ ID NO: 4497534 - DNA, 25 bp, Homo sapien
aaaggagagtcttctacagtggagg

SEQ ID NO: 4497535 - DNA, 25 bp, Homo sapien
cagtggagggaagaacatccacatc

SEQ ID NO: 4497536 - DNA, 25 bp, Homo sapien
ttgggaccaggcatccaacttcttt

SEQ ID NO: 4497537 - DNA, 25 bp, Homo sapien
gactccttgatcttttgggctcagt

SEQ ID NO: 4497538 - DNA, 25 bp, Homo sapien
gcttgggaccaggcatccaacttct

SEQ ID NO: 4497539 - DNA, 25 bp, Homo sapien
tgggaccaggcatccaacttcttta

SEQ ID NO: 4497540 - DNA, 25 bp, Homo sapien
cactcttggtggaaacgatgagcca

SEQ ID NO: 4497541 - DNA, 25 bp, Homo sapien
cagtttcacgtatatggcttcacag

SEQ ID NO: 4497542 - DNA, 25 bp, Homo sapien
aatcagatttgggaacacaacaggc

SEQ ID NO: 4497543 - DNA, 25 bp, Homo sapien
ggaccatggtcacagttaacctcag

SEQ ID NO: 4497544 - DNA, 25 bp, Homo sapien
tgtagaagcttacccagcagacacc

SEQ ID NO: 4497545 - DNA, 25 bp, Homo sapien
gcaagtattttgacaaggtgggcca

SEQ ID NO: 4497546 - DNA, 25 bp, Homo sapien
cagaggcttgcagttgagcaggcca

SEQ ID NO: 4497547 - DNA, 25 bp, Homo sapien
tattctgatgtttgcacgacgtcga

SEQ ID NO: 4497548 - DNA, 25 bp, Homo sapien
ggctcctgtgtcctgttattatttt

SEQ ID NO: 4497549 - DNA, 25 bp, Homo sapien
tgtgccttttttaagcccatcggaa

SEQ ID NO: 4497550 - DNA, 25 bp, Homo sapien
aatttcctcccatagctcggaataa

SEQ ID NO: 4497551 - DNA, 25 bp, Homo sapien
ttcctcccatagctcggaataattt

SEQ ID NO: 4497552 - DNA, 25 bp, Homo sapien
ccccgctccctgaaactgactctgt

SEQ ID NO: 4497553 - DNA, 25 bp, Homo sapien
ctggaagccccgctccctgaaactg

SEQ ID NO: 4497554 - DNA, 25 bp, Homo sapien
cgctccctgaaactgactctgtggc

SEQ ID NO: 4497555 - DNA, 25 bp, Homo sapien
tggaagccccgctccctgaaactga

SEQ ID NO: 4497556 - DNA, 25 bp, Homo sapien
caggcctgtgtgctttgtagagcca

SEQ ID NO: 4497557 - DNA, 25 bp, Homo sapien
gagccagtttttaagggacaccaga

SEQ ID NO: 4497558 - DNA, 25 bp, Homo sapien
tctgcctctgcggataaatatttgc

SEQ ID NO: 4497559 - DNA, 25 bp, Homo sapien
tatttgccacgaatgagtaactcct

SEQ ID NO: 4497560 - DNA, 25 bp, Homo sapien
gatgccaaaaatcgaagaagttctt

SEQ ID NO: 4497561 - DNA, 25 bp, Homo sapien
agagcctccacattcatgagggatg

SEQ ID NO: 4497562 - DNA, 25 bp, Homo sapien
gaagttcttcgtagatgtacagccc

SEQ ID NO: 4497563 - DNA, 25 bp, Homo sapien
gatgtacagcccagcacattcacaa

SEQ ID NO: 4497564 - DNA, 25 bp, Homo sapien
aactaaaactgggtggagtgtggtg

SEQ ID NO: 4497565 - DNA, 25 bp, Homo sapien
aagctgacagtgagacaaacaaaaa

SEQ ID NO: 4497566 - DNA, 25 bp, Homo sapien
aaacaaaaaactgaggctagagcct

SEQ ID NO: 4497567 - DNA, 25 bp, Homo sapien
acaaaaaactgaggctagagcctca

SEQ ID NO: 4497568 - DNA, 25 bp, Homo sapien
aaaaactgaggctagagcctcattc

SEQ ID NO: 4497569 - DNA, 25 bp, Homo sapien
tatgccgtcagtcaacattaaggtg

SEQ ID NO: 4497570 - DNA, 25 bp, Homo sapien
taatcaaatgtaacagtccacactc

SEQ ID NO: 4497571 - DNA, 25 bp, Homo sapien
cactcatgattgaccttgcctggag

SEQ ID NO: 4497572 - DNA, 25 bp, Homo sapien
caagagagtattgcatctggagttc

SEQ ID NO: 4497573 - DNA, 25 bp, Homo sapien
gttgcgtcgccttggtaaccacaac

SEQ ID NO: 4497574 - DNA, 25 bp, Homo sapien
gcgtcgccttggtaaccacaacttc

SEQ ID NO: 4497575 - DNA, 25 bp, Homo sapien
gcgttgcgtcgccttggtaaccaca

SEQ ID NO: 4497576 - DNA, 25 bp, Homo sapien
tgcgtcgccttggtaaccacaactt

SEQ ID NO: 4497577 - DNA, 25 bp, Homo sapien
gcactgggaacctctatgaaactga

SEQ ID NO: 4497578 - DNA, 25 bp, Homo sapien
ggtggcactgggaacctctatgaaa

SEQ ID NO: 4497579 - DNA, 25 bp, Homo sapien
tgggaacctctatgaaactgaaaag

SEQ ID NO: 4497580 - DNA, 25 bp, Homo sapien
actgggaacctctatgaaactgaaa

SEQ ID NO: 4497581 - DNA, 25 bp, Homo sapien
cgtgtaccaatggggtgctttattt

SEQ ID NO: 4497582 - DNA, 25 bp, Homo sapien
tgtaccaatggggtgctttattttc

SEQ ID NO: 4497583 - DNA, 25 bp, Homo sapien
ttcgtgtaccaatggggtgctttat

SEQ ID NO: 4497584 - DNA, 25 bp, Homo sapien
ctttcgtgtaccaatggggtgcttt

SEQ ID NO: 4497585 - DNA, 25 bp, Homo sapien
gaaggttcaccagcttgttgatcat

SEQ ID NO: 4497586 - DNA, 25 bp, Homo sapien
catctggatccacgaggacatgatc

SEQ ID NO: 4497587 - DNA, 25 bp, Homo sapien
gatcctgttcatcgtctttaggcca

SEQ ID NO: 4497588 - DNA, 25 bp, Homo sapien
gttgatcattcgataaggctgaggc

SEQ ID NO: 4497589 - DNA, 25 bp, Homo sapien
tctccaagtggagggtagacggtgg

SEQ ID NO: 4497590 - DNA, 25 bp, Homo sapien
agcttccctcagtgcgtttctctct

SEQ ID NO: 4497591 - DNA, 25 bp, Homo sapien
cagtgcgtttctctcttcaataatt

SEQ ID NO: 4497592 - DNA, 25 bp, Homo sapien
gtagacggtgggctggatctggctg

SEQ ID NO: 4497593 - DNA, 25 bp, Homo sapien
tgtttagcactgtacagattataaa

SEQ ID NO: 4497594 - DNA, 25 bp, Homo sapien
gatggaagtgacatcaaccttaagc

SEQ ID NO: 4497595 - DNA, 25 bp, Homo sapien
catttcatccacaggagcaatgagt

SEQ ID NO: 4497596 - DNA, 25 bp, Homo sapien
taagcttctcccacgcatatatttg

SEQ ID NO: 4497597 - DNA, 25 bp, Homo sapien
aaattgacaacagtctacaggtacc

SEQ ID NO: 4497598 - DNA, 25 bp, Homo sapien
gagtaacagctcacctatctaggac

SEQ ID NO: 4497599 - DNA, 25 bp, Homo sapien
tggccccaccaatacctcaaaagga

SEQ ID NO: 4497600 - DNA, 25 bp, Homo sapien
catggaggcctggttcatcctcagg

SEQ ID NO: 4497601 - DNA, 25 bp, Homo sapien
ctgtttcacccaaacataaggacag

SEQ ID NO: 4497602 - DNA, 25 bp, Homo sapien
tgtttcacccaaacataaggacagg

SEQ ID NO: 4497603 - DNA, 25 bp, Homo sapien
aatgctgacatttgccttctcatcc

SEQ ID NO: 4497604 - DNA, 25 bp, Homo sapien
taggaaagctcctcaaatccagagg

SEQ ID NO: 4497605 - DNA, 25 bp, Homo sapien
gctcctcaaatccagaggtaacagt

SEQ ID NO: 4497606 - DNA, 25 bp, Homo sapien
cacaaagtaggaaagctcctcaaat

SEQ ID NO: 4497607 - DNA, 25 bp, Homo sapien
cctgaggtctagagagatgcatgcc

SEQ ID NO: 4497608 - DNA, 25 bp, Homo sapien
aacagcccctgtcttggttcagatg

SEQ ID NO: 4497609 - DNA, 25 bp, Homo sapien
gcatgccttcacagatgatctccaa

SEQ ID NO: 4497610 - DNA, 25 bp, Homo sapien
tctgcctgccacaatatgacacagc

SEQ ID NO: 4497611 - DNA, 25 bp, Homo sapien
cacttcattgatggctttgactagg

SEQ ID NO: 4497612 - DNA, 25 bp, Homo sapien
cattgatggctttgactaggtaaag

SEQ ID NO: 4497613 - DNA, 25 bp, Homo sapien
tgactaggtaaagtccttccttata

SEQ ID NO: 4497614 - DNA, 25 bp, Homo sapien
tggctttgactaggtaaagtccttc

SEQ ID NO: 4497615 - DNA, 25 bp, Homo sapien
ctggccgtcacagccacaatagtgg

SEQ ID NO: 4497616 - DNA, 25 bp, Homo sapien
gattgtgtcactggtccaccttgtt

SEQ ID NO: 4497617 - DNA, 25 bp, Homo sapien
gacggctgcaatagtgtgggcacct

SEQ ID NO: 4497618 - DNA, 25 bp, Homo sapien
tcactgttctgataattcggctggt

SEQ ID NO: 4497619 - DNA, 25 bp, Homo sapien
cctaaaaatgggcttgatgtatcat

SEQ ID NO: 4497620 - DNA, 25 bp, Homo sapien
ctaaaaatgggcttgatgtatcata

SEQ ID NO: 4497621 - DNA, 25 bp, Homo sapien
aatacctaaaaatgggcttgatgta

SEQ ID NO: 4497622 - DNA, 25 bp, Homo sapien
tacctaaaaatgggcttgatgtatc

SEQ ID NO: 4497623 - DNA, 25 bp, Homo sapien
acaggtagtttgcttgctggtatca

SEQ ID NO: 4497624 - DNA, 25 bp, Homo sapien
aggctgcaaagtcccctccttgaga

SEQ ID NO: 4497625 - DNA, 25 bp, Homo sapien
ctccatctttatacaggtagtttgc

SEQ ID NO: 4497626 - DNA, 25 bp, Homo sapien
aagtcccctccttgagagatctcca

SEQ ID NO: 4497627 - DNA, 25 bp, Homo sapien
tgtgtgtcatccttgcagaggggcc

SEQ ID NO: 4497628 - DNA, 25 bp, Homo sapien
atgctaatcgtctctgtatcgttcc

SEQ ID NO: 4497629 - DNA, 25 bp, Homo sapien
aaaaaaaagaaatgcttcatgaatt

SEQ ID NO: 4497630 - DNA, 25 bp, Homo sapien
agttttagtatatgtgctgctgaag

SEQ ID NO: 4497631 - DNA, 25 bp, Homo sapien
ctgcattgggaaaccagagaaccat

SEQ ID NO: 4497632 - DNA, 25 bp, Homo sapien
tgggaaaccagagaaccattgagca

SEQ ID NO: 4497633 - DNA, 25 bp, Homo sapien
cattgggaaaccagagaaccattga

SEQ ID NO: 4497634 - DNA, 25 bp, Homo sapien
gggaaaccagagaaccattgagcaa

SEQ ID NO: 4497635 - DNA, 25 bp, Homo sapien
gggtgctctagtttcttgagccaag

SEQ ID NO: 4497636 - DNA, 25 bp, Homo sapien
cttgggcaatttatacacatccagc

SEQ ID NO: 4497637 - DNA, 25 bp, Homo sapien
cagttgcggctgtctgacttttttc

SEQ ID NO: 4497638 - DNA, 25 bp, Homo sapien
tacacatccagccaaatatctccgg

SEQ ID NO: 4497639 - DNA, 25 bp, Homo sapien
agctgaaagcagagatatttcctac

SEQ ID NO: 4497640 - DNA, 25 bp, Homo sapien
cagctgaaagcagagatatttccta

SEQ ID NO: 4497641 - DNA, 25 bp, Homo sapien
tcagctgaaagcagagatatttcct

SEQ ID NO: 4497642 - DNA, 25 bp, Homo sapien
ctgcagaaatgggaccaagggagtt

SEQ ID NO: 4497643 - DNA, 25 bp, Homo sapien
tctgcagaaatgggaccaagggagt

SEQ ID NO: 4497644 - DNA, 25 bp, Homo sapien
ctggaagactcaatttaatgtctcc

SEQ ID NO: 4497645 - DNA, 25 bp, Homo sapien
tctcctttaaaactaacatttgcat

SEQ ID NO: 4497646 - DNA, 25 bp, Homo sapien
tggaagactcaatttaatgtctcct

SEQ ID NO: 4497647 - DNA, 25 bp, Homo sapien
atgtctcctttaaaactaacatttg

SEQ ID NO: 4497648 - DNA, 25 bp, Homo sapien
ctgtaacaggcttaggtggtttgat

SEQ ID NO: 4497649 - DNA, 25 bp, Homo sapien
caggcttaggtggtttgatcttcat

SEQ ID NO: 4497650 - DNA, 25 bp, Homo sapien
acaggcttaggtggtttgatcttca

SEQ ID NO: 4497651 - DNA, 25 bp, Homo sapien
taacaggcttaggtggtttgatctt

SEQ ID NO: 4497652 - DNA, 25 bp, Homo sapien
actgcttcctcagagacaactgcat

SEQ ID NO: 4497653 - DNA, 25 bp, Homo sapien
gttgcccaggagattccacagtgcc

SEQ ID NO: 4497654 - DNA, 25 bp, Homo sapien
cccttgactgcttcctcagagacaa

SEQ ID NO: 4497655 - DNA, 25 bp, Homo sapien
ctgcgtccctcaagttgcccaggag

SEQ ID NO: 4497656 - DNA, 25 bp, Homo sapien
gatgaaatgattctgcccggagccc

SEQ ID NO: 4497657 - DNA, 25 bp, Homo sapien
tgtaggaagcgttgaagatctcagc

SEQ ID NO: 4497658 - DNA, 25 bp, Homo sapien
ggagcccagtccgtagcagtccttg

SEQ ID NO: 4497659 - DNA, 25 bp, Homo sapien
tatctaggtacttcttgtaggaagc

SEQ ID NO: 4497660 - DNA, 25 bp, Homo sapien
taggaagaaggaaatagaaggtggc

SEQ ID NO: 4497661 - DNA, 25 bp, Homo sapien
ctaggaagaaggaaatagaaggtgg

SEQ ID NO: 4497662 - DNA, 25 bp, Homo sapien
ccttgacttccggtggcattgcaaa

SEQ ID NO: 4497663 - DNA, 25 bp, Homo sapien
ttccggtggcattgcaaataggcag

SEQ ID NO: 4497664 - DNA, 25 bp, Homo sapien
gacttccggtggcattgcaaatagg

SEQ ID NO: 4497665 - DNA, 25 bp, Homo sapien
gggcccttgacttccggtggcattg

SEQ ID NO: 4497666 - DNA, 25 bp, Homo sapien
ggtccagtgtataccaaggacacag

SEQ ID NO: 4497667 - DNA, 25 bp, Homo sapien
cttctggtccagtgtataccaagga

SEQ ID NO: 4497668 - DNA, 25 bp, Homo sapien
tcggtttagtgaatacaggaagaaa

SEQ ID NO: 4497669 - DNA, 25 bp, Homo sapien
tatcctttagagttcggtttagtga

SEQ ID NO: 4497670 - DNA, 25 bp, Homo sapien
gcaatgggcgcagcacagggccaca

SEQ ID NO: 4497671 - DNA, 25 bp, Homo sapien
gcacagggccacacaccctcggggt

SEQ ID NO: 4497672 - DNA, 25 bp, Homo sapien
cagcacagggccacacaccctcggg

SEQ ID NO: 4497673 - DNA, 25 bp, Homo sapien
ctgcaatgggcgcagcacagggcca

SEQ ID NO: 4497674 - DNA, 25 bp, Homo sapien
ccaggtcccacagcgtgagcacacc

SEQ ID NO: 4497675 - DNA, 25 bp, Homo sapien
tttggccaggtcccacagcgtgagc

SEQ ID NO: 4497676 - DNA, 25 bp, Homo sapien
ggccaggtcccacagcgtgagcaca

SEQ ID NO: 4497677 - DNA, 25 bp, Homo sapien
ttggccaggtcccacagcgtgagca

SEQ ID NO: 4497678 - DNA, 25 bp, Homo sapien
tgtgtgagggacttgtaggatgtga

SEQ ID NO: 4497679 - DNA, 25 bp, Homo sapien
aagtgtgtgagggacttgtaggatg

SEQ ID NO: 4497680 - DNA, 25 bp, Homo sapien
tcacacaagccggtcagaaaacggg

SEQ ID NO: 4497681 - DNA, 25 bp, Homo sapien
gcaagtgtgtgagggacttgtagga

SEQ ID NO: 4497682 - DNA, 25 bp, Homo sapien
aagtgaatgctttggcagaaacatc

SEQ ID NO: 4497683 - DNA, 25 bp, Homo sapien
gaagagcagcgaccccaagagggaa

SEQ ID NO: 4497684 - DNA, 25 bp, Homo sapien
ccgagaaatattttaggaagtgaat

SEQ ID NO: 4497685 - DNA, 25 bp, Homo sapien
tattttaggaagtgaatgctttggc

SEQ ID NO: 4497686 - DNA, 25 bp, Homo sapien
tgggatttcacttgaccttcaggat

SEQ ID NO: 4497687 - DNA, 25 bp, Homo sapien
gcacagcaccacacatttcatttgg

SEQ ID NO: 4497688 - DNA, 25 bp, Homo sapien
tgaccttcaggatacatattctgtc

SEQ ID NO: 4497689 - DNA, 25 bp, Homo sapien
tcatttgggatttcacttgaccttc

SEQ ID NO: 4497690 - DNA, 25 bp, Homo sapien
ctctcaacaagcacactgatggtgg

SEQ ID NO: 4497691 - DNA, 25 bp, Homo sapien
ggtcccgctagcctccaccagatgg

SEQ ID NO: 4497692 - DNA, 25 bp, Homo sapien
cttgggtcccgctagcctccaccag

SEQ ID NO: 4497693 - DNA, 25 bp, Homo sapien
ccgctagcctccaccagatggaggg

SEQ ID NO: 4497694 - DNA, 25 bp, Homo sapien
gatggttttatccaggtgctttaca

SEQ ID NO: 4497695 - DNA, 25 bp, Homo sapien
ggttttatccaggtgctttacaggc

SEQ ID NO: 4497696 - DNA, 25 bp, Homo sapien
cacagatggttttatccaggtgctt

SEQ ID NO: 4497697 - DNA, 25 bp, Homo sapien
ccacggcacagatggttttatccag

SEQ ID NO: 4497698 - DNA, 25 bp, Homo sapien
taaggactggggaatcacctctgca

SEQ ID NO: 4497699 - DNA, 25 bp, Homo sapien
aagcgaggatcaaccgcgcacgctt

SEQ ID NO: 4497700 - DNA, 25 bp, Homo sapien
aatcacctctgcaagcgaggatcaa

SEQ ID NO: 4497701 - DNA, 25 bp, Homo sapien
gccctgtaaggactggggaatcacc

SEQ ID NO: 4497702 - DNA, 25 bp, Homo sapien
ccacaccaggaatcacagactttct

SEQ ID NO: 4497703 - DNA, 25 bp, Homo sapien
gtagggccacaccaggaatcacaga

SEQ ID NO: 4497704 - DNA, 25 bp, Homo sapien
ggccacaccaggaatcacagacttt

SEQ ID NO: 4497705 - DNA, 25 bp, Homo sapien
ctccgtagggccacaccaggaatca

SEQ ID NO: 4497706 - DNA, 25 bp, Homo sapien
tggctggtgagcatggaatctacat

SEQ ID NO: 4497707 - DNA, 25 bp, Homo sapien
ttcagcccttggctctcttggagcc

SEQ ID NO: 4497708 - DNA, 25 bp, Homo sapien
tgagcatggaatctacattttcagc

SEQ ID NO: 4497709 - DNA, 25 bp, Homo sapien
tcagcccttggctctcttggagcct

SEQ ID NO: 4497710 - DNA, 25 bp, Homo sapien
ctcccggaggggcaaaggcacagat

SEQ ID NO: 4497711 - DNA, 25 bp, Homo sapien
acatccataaggcacacagagccat

SEQ ID NO: 4497712 - DNA, 25 bp, Homo sapien
acctccagaggaaaggctcccggag

SEQ ID NO: 4497713 - DNA, 25 bp, Homo sapien
gcacagatgatttcacgcttggcca

SEQ ID NO: 4497714 - DNA, 25 bp, Homo sapien
ggaaggccatgttatccaagtccct

SEQ ID NO: 4497715 - DNA, 25 bp, Homo sapien
tattggattccagcatcgtcggtgg

SEQ ID NO: 4497716 - DNA, 25 bp, Homo sapien
tcttctggaggaaacgctcacatct

SEQ ID NO: 4497717 - DNA, 25 bp, Homo sapien
cgtcggtggacgcagtttcatgtga

SEQ ID NO: 4497718 - DNA, 25 bp, Homo sapien
tggagcgacaaggagtacctctgaa

SEQ ID NO: 4497719 - DNA, 25 bp, Homo sapien
ttctctctctggagcgacaaggagt

SEQ ID NO: 4497720 - DNA, 25 bp, Homo sapien
gacaaggagtacctctgaagccggg

SEQ ID NO: 4497721 - DNA, 25 bp, Homo sapien
agtacctctgaagccgggcccagtg

SEQ ID NO: 4497722 - DNA, 25 bp, Homo sapien
gagctgtggctctgttacatttctc

SEQ ID NO: 4497723 - DNA, 25 bp, Homo sapien
ccccagactccgagtgcaggcctgt

SEQ ID NO: 4497724 - DNA, 25 bp, Homo sapien
ctgcctcgtggctgaaacctccttt

SEQ ID NO: 4497725 - DNA, 25 bp, Homo sapien
gacaatatcactgtttatttgggtg

SEQ ID NO: 4497726 - DNA, 25 bp, Homo sapien
tcggccacctgtcggccgtgctagg

SEQ ID NO: 4497727 - DNA, 25 bp, Homo sapien
tgcgcctggctatccgctatatcgg

SEQ ID NO: 4497728 - DNA, 25 bp, Homo sapien
gagcctgaccaagatcgagacgctg

SEQ ID NO: 4497729 - DNA, 25 bp, Homo sapien
cagagcgccagtgagcgggagaaac

SEQ ID NO: 4497730 - DNA, 25 bp, Homo sapien
tgcaagcttccttgcactgtccaca

SEQ ID NO: 4497731 - DNA, 25 bp, Homo sapien
cagactcggcagcttattgaatttg

SEQ ID NO: 4497732 - DNA, 25 bp, Homo sapien
tcggcagcttattgaatttgccggg

SEQ ID NO: 4497733 - DNA, 25 bp, Homo sapien
catgttcttaccagggaagggtcta

SEQ ID NO: 4497734 - DNA, 25 bp, Homo sapien
ggtgtctgcggccttttcgaccagc

SEQ ID NO: 4497735 - DNA, 25 bp, Homo sapien
ataatcctctttaagtggctgaatg

SEQ ID NO: 4497736 - DNA, 25 bp, Homo sapien
tgcggccttttcgaccagctgaaca

SEQ ID NO: 4497737 - DNA, 25 bp, Homo sapien
ccagctgaacaccataatcctcttt

SEQ ID NO: 4497738 - DNA, 25 bp, Homo sapien
gagtactgaacatttgaagagttct

SEQ ID NO: 4497739 - DNA, 25 bp, Homo sapien
ctttgcattggtggaatatggtacc

SEQ ID NO: 4497740 - DNA, 25 bp, Homo sapien
cttcctggcaagctcaagttgtgct

SEQ ID NO: 4497741 - DNA, 25 bp, Homo sapien
caggttcccacgattctttgcattg

SEQ ID NO: 4497742 - DNA, 25 bp, Homo sapien
ggattactggcttgatcccatggtg

SEQ ID NO: 4497743 - DNA, 25 bp, Homo sapien
tctttgtctttcaatgtggccagga

SEQ ID NO: 4497744 - DNA, 25 bp, Homo sapien
ttactggcttgatcccatggtgccc

SEQ ID NO: 4497745 - DNA, 25 bp, Homo sapien
cccagcctcattactgtattttata

SEQ ID NO: 4497746 - DNA, 25 bp, Homo sapien
tgcattgtcagccagctccagaccc

SEQ ID NO: 4497747 - DNA, 25 bp, Homo sapien
cctgcattgtcagccagctccagac

SEQ ID NO: 4497748 - DNA, 25 bp, Homo sapien
ccagctccagacccaccaagacgcg

SEQ ID NO: 4497749 - DNA, 25 bp, Homo sapien
agccagctccagacccaccaagacg

SEQ ID NO: 4497750 - DNA, 25 bp, Homo sapien
gggcaccttggccaaggcacctggc

SEQ ID NO: 4497751 - DNA, 25 bp, Homo sapien
agcagcactgcccacacacctgggg

SEQ ID NO: 4497752 - DNA, 25 bp, Homo sapien
tgcccacacacctggggcaccttgg

SEQ ID NO: 4497753 - DNA, 25 bp, Homo sapien
acacctggggcaccttggccaaggc

SEQ ID NO: 4497754 - DNA, 25 bp, Homo sapien
ggagttcgagaacatcctaggcaac

SEQ ID NO: 4497755 - DNA, 25 bp, Homo sapien
gttcgagaacatcctaggcaacatg

SEQ ID NO: 4497756 - DNA, 25 bp, Homo sapien
caggagttcgagaacatcctaggca

SEQ ID NO: 4497757 - DNA, 25 bp, Homo sapien
tcgagaacatcctaggcaacatggc

SEQ ID NO: 4497758 - DNA, 25 bp, Homo sapien
ccaagtcagcatccgctggccccag

SEQ ID NO: 4497759 - DNA, 25 bp, Homo sapien
cccaagtcagcatccgctggcccca

SEQ ID NO: 4497760 - DNA, 25 bp, Homo sapien
aagtcagcatccgctggccccaggg

SEQ ID NO: 4497761 - DNA, 25 bp, Homo sapien
gtcagcatccgctggccccaggggc

SEQ ID NO: 4497762 - DNA, 25 bp, Homo sapien
tcaggactcctggtaatcccagggc

SEQ ID NO: 4497763 - DNA, 25 bp, Homo sapien
aggaacacaggggagtcctcagggt

SEQ ID NO: 4497764 - DNA, 25 bp, Homo sapien
gggcaggaacacaggggagtcctca

SEQ ID NO: 4497765 - DNA, 25 bp, Homo sapien
tcctggtaatcccagggcaggaaca

SEQ ID NO: 4497766 - DNA, 25 bp, Homo sapien
tccagtggtcgtggccgaggaggct

SEQ ID NO: 4497767 - DNA, 25 bp, Homo sapien
tctgcggaggaggcgactgggccat

SEQ ID NO: 4497768 - DNA, 25 bp, Homo sapien
ccagccctgggcgaagatccagtgg

SEQ ID NO: 4497769 - DNA, 25 bp, Homo sapien
ccctgggcgaagatccagtggtcgt

SEQ ID NO: 4497770 - DNA, 25 bp, Homo sapien
cgataggtggccgatgtagcggatg

SEQ ID NO: 4497771 - DNA, 25 bp, Homo sapien
gtccggtgcgcgctcgtctgggcgt

SEQ ID NO: 4497772 - DNA, 25 bp, Homo sapien
tgtggctgcgggagtccgcgggcgc

SEQ ID NO: 4497773 - DNA, 25 bp, Homo sapien
ctcgctggcgctctgccgctgtccg

SEQ ID NO: 4497774 - DNA, 25 bp, Homo sapien
tccgcctgcgtctgcgcctctgcgg

SEQ ID NO: 4497775 - DNA, 25 bp, Homo sapien
tctgcggggccacggtcggggcaca

SEQ ID NO: 4497776 - DNA, 25 bp, Homo sapien
gcctgcgtctgcgcctctgcggggc

SEQ ID NO: 4497777 - DNA, 25 bp, Homo sapien
ccgcctgcgtctgcgcctctgcggg

SEQ ID NO: 4497778 - DNA, 25 bp, Homo sapien
acgcctcggcgaggacggcggagac

SEQ ID NO: 4497779 - DNA, 25 bp, Homo sapien
gatccccaggacgcctcggcgagga

SEQ ID NO: 4497780 - DNA, 25 bp, Homo sapien
gaggacggcggagaccaggcccggc

SEQ ID NO: 4497781 - DNA, 25 bp, Homo sapien
caggcggacggggatccccaggacg

SEQ ID NO: 4497782 - DNA, 25 bp, Homo sapien
cctccccaggcgctcgggtgcggct

SEQ ID NO: 4497783 - DNA, 25 bp, Homo sapien
aatacgggggcgactgtatcttggg

SEQ ID NO: 4497784 - DNA, 25 bp, Homo sapien
gcccagggatccgtgtcgtggaccc

SEQ ID NO: 4497785 - DNA, 25 bp, Homo sapien
gggtgttgcccagggatccgtgtcg

SEQ ID NO: 4497786 - DNA, 25 bp, Homo sapien
gggtggcgtccaaagagacgcgtcg

SEQ ID NO: 4497787 - DNA, 25 bp, Homo sapien
caaagagacgcgtcggaggttgtcc

SEQ ID NO: 4497788 - DNA, 25 bp, Homo sapien
ggtacactgcggccagctccaaagt

SEQ ID NO: 4497789 - DNA, 25 bp, Homo sapien
gacgactgcgtccagggacagcctt

SEQ ID NO: 4497790 - DNA, 25 bp, Homo sapien
gataagctgggatcgaaaaagtacg

SEQ ID NO: 4497791 - DNA, 25 bp, Homo sapien
gagtagataagctgggatcgaaaaa

SEQ ID NO: 4497792 - DNA, 25 bp, Homo sapien
ctgggatcgaaaaagtacgagattc

SEQ ID NO: 4497793 - DNA, 25 bp, Homo sapien
aaaaagtacgagattctctgcagac

SEQ ID NO: 4497794 - DNA, 25 bp, Homo sapien
tcccagcgacagacagggctctgga

SEQ ID NO: 4497795 - DNA, 25 bp, Homo sapien
atggagctcccagcgacagacaggg

SEQ ID NO: 4497796 - DNA, 25 bp, Homo sapien
aggagagatggagctcccagcgaca

SEQ ID NO: 4497797 - DNA, 25 bp, Homo sapien
agagatggagctcccagcgacagac

SEQ ID NO: 4497798 - DNA, 25 bp, Homo sapien
ctctggggagggcttgcttcactga

SEQ ID NO: 4497799 - DNA, 25 bp, Homo sapien
tctggggagggcttgcttcactgag

SEQ ID NO: 4497800 - DNA, 25 bp, Homo sapien
cttgccaaagttcagggcagccact

SEQ ID NO: 4497801 - DNA, 25 bp, Homo sapien
gaggcacccaagctacaggactgat

SEQ ID NO: 4497802 - DNA, 25 bp, Homo sapien
gggtgtctagcagtggaggacagtg

SEQ ID NO: 4497803 - DNA, 25 bp, Homo sapien
actgattcctggatggaaagaggga

SEQ ID NO: 4497804 - DNA, 25 bp, Homo sapien
aggtacccgctatctatttcaaaca

SEQ ID NO: 4497805 - DNA, 25 bp, Homo sapien
tctggccaactgtcaccaagaagca

SEQ ID NO: 4497806 - DNA, 25 bp, Homo sapien
aatcaaagcatacagggctctggcc

SEQ ID NO: 4497807 - DNA, 25 bp, Homo sapien
gtaaaggagaccccttcttagagca

SEQ ID NO: 4497808 - DNA, 25 bp, Homo sapien
ctgcccagctgcctttagggtaaag

SEQ ID NO: 4497809 - DNA, 25 bp, Homo sapien
catgcttcgatgagccggccatgaa

SEQ ID NO: 4497810 - DNA, 25 bp, Homo sapien
ggctgcagatgcccggaagtccttc

SEQ ID NO: 4497811 - DNA, 25 bp, Homo sapien
gccggccatgaaggccgagttcaac

SEQ ID NO: 4497812 - DNA, 25 bp, Homo sapien
tccttcccatgcttcgatgagccgg

SEQ ID NO: 4497813 - DNA, 25 bp, Homo sapien
aacaggtctgtggagctaatggagc

SEQ ID NO: 4497814 - DNA, 25 bp, Homo sapien
caaagggaaaaccacgctgagttct

SEQ ID NO: 4497815 - DNA, 25 bp, Homo sapien
gcttcgctgcggaagacttgtagga

SEQ ID NO: 4497816 - DNA, 25 bp, Homo sapien
ggactcaagttatcaccacacagat

SEQ ID NO: 4497817 - DNA, 25 bp, Homo sapien
cagcactcatgacaatacacccgaa

SEQ ID NO: 4497818 - DNA, 25 bp, Homo sapien
ggtgggtggttgctatgaaaatctc

SEQ ID NO: 4497819 - DNA, 25 bp, Homo sapien
gaaaatctcacgtttgttctaacaa

SEQ ID NO: 4497820 - DNA, 25 bp, Homo sapien
cagagtgggttaataatttggcaag

SEQ ID NO: 4497821 - DNA, 25 bp, Homo sapien
tcctgcacgatagtcagtggtcctg

SEQ ID NO: 4497822 - DNA, 25 bp, Homo sapien
agcaccagatcctgcacgatagtca

SEQ ID NO: 4497823 - DNA, 25 bp, Homo sapien
cagatcctgcacgatagtcagtggt

SEQ ID NO: 4497824 - DNA, 25 bp, Homo sapien
gcacgatagtcagtggtcctggagc

SEQ ID NO: 4497825 - DNA, 25 bp, Homo sapien
tgtctcccttctcgggagcactgga

SEQ ID NO: 4497826 - DNA, 25 bp, Homo sapien
tgtcctctgggttaagactgtctcc

SEQ ID NO: 4497827 - DNA, 25 bp, Homo sapien
agttggcagatacgaaaacaggccc

SEQ ID NO: 4497828 - DNA, 25 bp, Homo sapien
gagggttctccatctgcgtgtttca

SEQ ID NO: 4497829 - DNA, 25 bp, Homo sapien
ttagcaatagccaaactggagagcc

SEQ ID NO: 4497830 - DNA, 25 bp, Homo sapien
agcttcgccagaaaagacaccaggg

SEQ ID NO: 4497831 - DNA, 25 bp, Homo sapien
ttagtaaaacgctctctgggcccag

SEQ ID NO: 4497832 - DNA, 25 bp, Homo sapien
tgtggaccagtctctagtaagggct

SEQ ID NO: 4497833 - DNA, 25 bp, Homo sapien
caggtgttatgtgcaggacacaatc

SEQ ID NO: 4497834 - DNA, 25 bp, Homo sapien
tagtcccagttgtattctcacaggt

SEQ ID NO: 4497835 - DNA, 25 bp, Homo sapien
tctgctaatagggagagggacccac

SEQ ID NO: 4497836 - DNA, 25 bp, Homo sapien
ggttaccgcctcatgaagaatatgc

SEQ ID NO: 4497837 - DNA, 25 bp, Homo sapien
agtgagtgagtgatccttttattaa

SEQ ID NO: 4497838 - DNA, 25 bp, Homo sapien
tactgcagtcaactatatatattca

SEQ ID NO: 4497839 - DNA, 25 bp, Homo sapien
agcataaaatatgaagccagtgagt

SEQ ID NO: 4497840 - DNA, 25 bp, Homo sapien
tatgtagtgagtatactttactgca

SEQ ID NO: 4497841 - DNA, 25 bp, Homo sapien
actttggaataatcatgacgcaggg

SEQ ID NO: 4497842 - DNA, 25 bp, Homo sapien
tattactaggcctatatcgtggttc

SEQ ID NO: 4497843 - DNA, 25 bp, Homo sapien
taggagaatgatgtcactggctact

SEQ ID NO: 4497844 - DNA, 25 bp, Homo sapien
aaatggccccaagtaggtgttctca

SEQ ID NO: 4497845 - DNA, 25 bp, Homo sapien
gttgtgcctattctgctaaaaacag

SEQ ID NO: 4497846 - DNA, 25 bp, Homo sapien
tctaatcataatgcatgttgctaga

SEQ ID NO: 4497847 - DNA, 25 bp, Homo sapien
tgcatgttgctagatagatatttag

SEQ ID NO: 4497848 - DNA, 25 bp, Homo sapien
acggttgtgcctattctgctaaaaa

SEQ ID NO: 4497849 - DNA, 25 bp, Homo sapien
tggatagttctgtcatggtccaact

SEQ ID NO: 4497850 - DNA, 25 bp, Homo sapien
ccctgtgtggctaacagaattaatg

SEQ ID NO: 4497851 - DNA, 25 bp, Homo sapien
atatttaaaattgatccctgtgtgg

SEQ ID NO: 4497852 - DNA, 25 bp, Homo sapien
ccatttttatgctgcccttgtgaga

SEQ ID NO: 4497853 - DNA, 25 bp, Homo sapien
caaagagcagcagttccttaacttc

SEQ ID NO: 4497854 - DNA, 25 bp, Homo sapien
tgcaaagagcagcagttccttaact

SEQ ID NO: 4497855 - DNA, 25 bp, Homo sapien
agcagttccttaacttcttggccat

SEQ ID NO: 4497856 - DNA, 25 bp, Homo sapien
agagcagcagttccttaacttcttg

SEQ ID NO: 4497857 - DNA, 25 bp, Homo sapien
ggtgaaattgcaggcctatgccctg

SEQ ID NO: 4497858 - DNA, 25 bp, Homo sapien
ttgcaggcctatgccctgcctgaag

SEQ ID NO: 4497859 - DNA, 25 bp, Homo sapien
ctggtgaaattgcaggcctatgccc

SEQ ID NO: 4497860 - DNA, 25 bp, Homo sapien
aattgcaggcctatgccctgcctga

SEQ ID NO: 4497861 - DNA, 25 bp, Homo sapien
ctcttggacgcttggaacatatttg

SEQ ID NO: 4497862 - DNA, 25 bp, Homo sapien
ttcccgagagagcgtaaggtttgga

SEQ ID NO: 4497863 - DNA, 25 bp, Homo sapien
taaggtttggagctatggccaccat

SEQ ID NO: 4497864 - DNA, 25 bp, Homo sapien
cgtaaggtttggagctatggccacc

SEQ ID NO: 4497865 - DNA, 25 bp, Homo sapien
agcgtaaggtttggagctatggcca

SEQ ID NO: 4497866 - DNA, 25 bp, Homo sapien
tgtagagacagagaccaaagccctg

SEQ ID NO: 4497867 - DNA, 25 bp, Homo sapien
ctgtgtagagacagagaccaaagcc

SEQ ID NO: 4497868 - DNA, 25 bp, Homo sapien
agagacagagaccaaagccctgatt

SEQ ID NO: 4497869 - DNA, 25 bp, Homo sapien
gtgtagagacagagaccaaagccct

SEQ ID NO: 4497870 - DNA, 25 bp, Homo sapien
tcagcagagctcttttcctgaatct

SEQ ID NO: 4497871 - DNA, 25 bp, Homo sapien
cagcagagctcttttcctgaatctt

SEQ ID NO: 4497872 - DNA, 25 bp, Homo sapien
cagccgataactggatccttttgcc

SEQ ID NO: 4497873 - DNA, 25 bp, Homo sapien
ctgacagccgataactggatccttt

SEQ ID NO: 4497874 - DNA, 25 bp, Homo sapien
gacagccgataactggatccttttg

SEQ ID NO: 4497875 - DNA, 25 bp, Homo sapien
cgataactggatccttttgccctga

SEQ ID NO: 4497876 - DNA, 25 bp, Homo sapien
tcctagtggctacatgtaagtgcac

SEQ ID NO: 4497877 - DNA, 25 bp, Homo sapien
ttcgaaaacgaaccctatctagaga

SEQ ID NO: 4497878 - DNA, 25 bp, Homo sapien
catatttcggtgtatatccttggac

SEQ ID NO: 4497879 - DNA, 25 bp, Homo sapien
ttcattgtgaaagaattcgaaaacg

SEQ ID NO: 4497880 - DNA, 25 bp, Homo sapien
tccgatcaagatggccaggtggctt

SEQ ID NO: 4497881 - DNA, 25 bp, Homo sapien
catccgatcaagatggccaggtggc

SEQ ID NO: 4497882 - DNA, 25 bp, Homo sapien
tggtgaacaccacatccgatcaaga

SEQ ID NO: 4497883 - DNA, 25 bp, Homo sapien
caccacatccgatcaagatggccag

SEQ ID NO: 4497884 - DNA, 25 bp, Homo sapien
gcggccgtcaggtccctctcggctc

SEQ ID NO: 4497885 - DNA, 25 bp, Homo sapien
agctgctgggatcggcgggctggcg

SEQ ID NO: 4497886 - DNA, 25 bp, Homo sapien
gggcgccgaggcgtggtcgctggca

SEQ ID NO: 4497887 - DNA, 25 bp, Homo sapien
tggtcgctggcagcgcggccgtcag

SEQ ID NO: 4497888 - DNA, 25 bp, Homo sapien
ttaaacagctgttagcagagccctg

SEQ ID NO: 4497889 - DNA, 25 bp, Homo sapien
cagagccctggacggcctgactcga

SEQ ID NO: 4497890 - DNA, 25 bp, Homo sapien
ctggaacaaacatccccgcagagca

SEQ ID NO: 4497891 - DNA, 25 bp, Homo sapien
gatgggcctggaacaaacatccccg

SEQ ID NO: 4497892 - DNA, 25 bp, Homo sapien
gtccgggcgcggctcctgcgctggg

SEQ ID NO: 4497893 - DNA, 25 bp, Homo sapien
cctggctgcccaccgcccgggctgc

SEQ ID NO: 4497894 - DNA, 25 bp, Homo sapien
tgcgctggggccctcggcgggccgg

SEQ ID NO: 4497895 - DNA, 25 bp, Homo sapien
ctgggtccgggcgcggctcctgcgc

SEQ ID NO: 4497896 - DNA, 25 bp, Homo sapien
tacagctacacgtgccaccgactga

SEQ ID NO: 4497897 - DNA, 25 bp, Homo sapien
gctacacgtgccaccgactgattta

SEQ ID NO: 4497898 - DNA, 25 bp, Homo sapien
cgtgccaccgactgatttataaaac

SEQ ID NO: 4497899 - DNA, 25 bp, Homo sapien
agtacactgaggccatcatagctca

SEQ ID NO: 4497900 - DNA, 25 bp, Homo sapien
ggacttggtccttgcgaggacattc

SEQ ID NO: 4497901 - DNA, 25 bp, Homo sapien
cttgcagtcccaccgagaacgggat

SEQ ID NO: 4497902 - DNA, 25 bp, Homo sapien
tagccgttgtcttttaccaaacaca

SEQ ID NO: 4497903 - DNA, 25 bp, Homo sapien
tgtgccccaggttttagccgttgtc

SEQ ID NO: 4497904 - DNA, 25 bp, Homo sapien
acacgccaccacacttagctcattt

SEQ ID NO: 4497905 - DNA, 25 bp, Homo sapien
cacacgccaccacacttagctcatt

SEQ ID NO: 4497906 - DNA, 25 bp, Homo sapien
caggattgtcgcaatctcttgacct

SEQ ID NO: 4497907 - DNA, 25 bp, Homo sapien
gattgtcgcaatctcttgacctcat

SEQ ID NO: 4497908 - DNA, 25 bp, Homo sapien
gaatctgtggtcattggcaggctct

SEQ ID NO: 4497909 - DNA, 25 bp, Homo sapien
gaatccatctgtaggcccttcaggt

SEQ ID NO: 4497910 - DNA, 25 bp, Homo sapien
gggtccgaacgtgtacactcacaga

SEQ ID NO: 4497911 - DNA, 25 bp, Homo sapien
taataggtaatgcaacagtggcctg

SEQ ID NO: 4497912 - DNA, 25 bp, Homo sapien
tggactcatcgcatctgggttcaaa

SEQ ID NO: 4497913 - DNA, 25 bp, Homo sapien
tgtattaagaacatgccccagtgga

SEQ ID NO: 4497914 - DNA, 25 bp, Homo sapien
gaagatgtcatgtactcccgcaaca

SEQ ID NO: 4497915 - DNA, 25 bp, Homo sapien
aaagaatctagatcagtgtccggcc

SEQ ID NO: 4497916 - DNA, 25 bp, Homo sapien
aactctggccaaatacccggtgcag

SEQ ID NO: 4497917 - DNA, 25 bp, Homo sapien
tgttttctgggaatgctcgccgcct

SEQ ID NO: 4497918 - DNA, 25 bp, Homo sapien
ggaagacactcctagaaagtcaggg

SEQ ID NO: 4497919 - DNA, 25 bp, Homo sapien
gaagccacagacagagtagttcctg

SEQ ID NO: 4497920 - DNA, 25 bp, Homo sapien
caatattttggcgaggtttactgca

SEQ ID NO: 4497921 - DNA, 25 bp, Homo sapien
tggtgatcaaaggactccccgactg

SEQ ID NO: 4497922 - DNA, 25 bp, Homo sapien
ttgatgcctgcagacggtggccctg

SEQ ID NO: 4497923 - DNA, 25 bp, Homo sapien
gccagagagtgaaggaagccaccaa

SEQ ID NO: 4497924 - DNA, 25 bp, Homo sapien
aaatccattcccgtttgagttggag

SEQ ID NO: 4497925 - DNA, 25 bp, Homo sapien
gccctggtgatgtcaaatggccaga

SEQ ID NO: 4497926 - DNA, 25 bp, Homo sapien
tgctgggaccttttaggttggacca

SEQ ID NO: 4497927 - DNA, 25 bp, Homo sapien
tttgtatcagcactaactgccctgg

SEQ ID NO: 4497928 - DNA, 25 bp, Homo sapien
catttttgctagaaggcgggtgcag

SEQ ID NO: 4497929 - DNA, 25 bp, Homo sapien
ggctggctccgctgctgatcgctgt

SEQ ID NO: 4497930 - DNA, 25 bp, Homo sapien
gctgctgatcgctgtttgctatcca

SEQ ID NO: 4497931 - DNA, 25 bp, Homo sapien
tttgctatccaaatacacgtcccca

SEQ ID NO: 4497932 - DNA, 25 bp, Homo sapien
tctgtcactagaaataatggagcag

SEQ ID NO: 4497933 - DNA, 25 bp, Homo sapien
tccactgcggccagtaggactgaca

SEQ ID NO: 4497934 - DNA, 25 bp, Homo sapien
cttgggaatgatggccaggtctgtc

SEQ ID NO: 4497935 - DNA, 25 bp, Homo sapien
caggctttctttccactgcggccag

SEQ ID NO: 4497936 - DNA, 25 bp, Homo sapien
tgcctctttagcaacctgggctgcc

SEQ ID NO: 4497937 - DNA, 25 bp, Homo sapien
gagctaaacttaaaaacagcgtgtg

SEQ ID NO: 4497938 - DNA, 25 bp, Homo sapien
tctttgaaatgtgcttgaagtgcct

SEQ ID NO: 4497939 - DNA, 25 bp, Homo sapien
tcgaataactccagtgtgcaccagg

SEQ ID NO: 4497940 - DNA, 25 bp, Homo sapien
tcctgaaagatacctgctgacgtac

SEQ ID NO: 4497941 - DNA, 25 bp, Homo sapien
tgtgtaacacagctggccttcctgg

SEQ ID NO: 4497942 - DNA, 25 bp, Homo sapien
tcaaatgactcagcaaaaccacgtg

SEQ ID NO: 4497943 - DNA, 25 bp, Homo sapien
caacaatgagtgaatctggacgaag

SEQ ID NO: 4497944 - DNA, 25 bp, Homo sapien
tgtggctttaacaaccccatccgga

SEQ ID NO: 4497945 - DNA, 25 bp, Homo sapien
cactaaggacacctccctggagact

SEQ ID NO: 4497946 - DNA, 25 bp, Homo sapien
tcagacacgacttcctcaacaaagg

SEQ ID NO: 4497947 - DNA, 25 bp, Homo sapien
aatctgcggagtgttcacatgtggc

SEQ ID NO: 4497948 - DNA, 25 bp, Homo sapien
tagcgagtcatgacgaaacctgaaa

SEQ ID NO: 4497949 - DNA, 25 bp, Homo sapien
ctagcgagtcatgacgaaacctgaa

SEQ ID NO: 4497950 - DNA, 25 bp, Homo sapien
aatggggtcacctttacgcagcagc

SEQ ID NO: 4497951 - DNA, 25 bp, Homo sapien
tcacctttacgcagcagctcctttt

SEQ ID NO: 4497952 - DNA, 25 bp, Homo sapien
gatgccaaggccatgtctagatcct

SEQ ID NO: 4497953 - DNA, 25 bp, Homo sapien
tctgatgcgtgggacacatgtgtcc

SEQ ID NO: 4497954 - DNA, 25 bp, Homo sapien
aattctctatagctcccaggtgaca

SEQ ID NO: 4497955 - DNA, 25 bp, Homo sapien
tgtgtgacgaacaggtccctacggc

SEQ ID NO: 4497956 - DNA, 25 bp, Homo sapien
tgataaagtattagtctgtgaggcg

SEQ ID NO: 4497957 - DNA, 25 bp, Homo sapien
gaaaagaaacttgtatagcaatgtg

SEQ ID NO: 4497958 - DNA, 25 bp, Homo sapien
tattagtctgtgaggcgtagaaatg

SEQ ID NO: 4497959 - DNA, 25 bp, Homo sapien
gctgtgatatttgagccaggttgat

SEQ ID NO: 4497960 - DNA, 25 bp, Homo sapien
gcagacatcagacacatgcggccgt

SEQ ID NO: 4497961 - DNA, 25 bp, Homo sapien
gagggacagctggtgcaacgtatca

SEQ ID NO: 4497962 - DNA, 25 bp, Homo sapien
tatcagctgatagcgtacacacgca

SEQ ID NO: 4497963 - DNA, 25 bp, Homo sapien
gatgctcgcctcagataagaagttc

SEQ ID NO: 4497964 - DNA, 25 bp, Homo sapien
caaaatattaacaggccatgatggc

SEQ ID NO: 4497965 - DNA, 25 bp, Homo sapien
gtaagccagtgcagaaatcccccat

SEQ ID NO: 4497966 - DNA, 25 bp, Homo sapien
agccggcacccacatcaggatgaag

SEQ ID NO: 4497967 - DNA, 25 bp, Homo sapien
tgaagcaagggcaggacctagagca

SEQ ID NO: 4497968 - DNA, 25 bp, Homo sapien
tcctgcaccaagccctccgccttct

SEQ ID NO: 4497969 - DNA, 25 bp, Homo sapien
cctccgccttctccatcccatcttc

SEQ ID NO: 4497970 - DNA, 25 bp, Homo sapien
agaacttgtctggttggtccctgcc

SEQ ID NO: 4497971 - DNA, 25 bp, Homo sapien
gagctctcaagagttctgccacgca

SEQ ID NO: 4497972 - DNA, 25 bp, Homo sapien
gactgtttgccttctaccgtctggg

SEQ ID NO: 4497973 - DNA, 25 bp, Homo sapien
tttaatagacctcacctgcacacgg

SEQ ID NO: 4497974 - DNA, 25 bp, Homo sapien
gtgggtctgactgccacagggtggc

SEQ ID NO: 4497975 - DNA, 25 bp, Homo sapien
tgcttctataagctgagggctgagg

SEQ ID NO: 4497976 - DNA, 25 bp, Homo sapien
gaggtgggtctgactgccacagggt

SEQ ID NO: 4497977 - DNA, 25 bp, Homo sapien
tgaggtgggtctgactgccacaggg

SEQ ID NO: 4497978 - DNA, 25 bp, Homo sapien
gggaggcccggtatcactctgttct

SEQ ID NO: 4497979 - DNA, 25 bp, Homo sapien
tatcgcacacggaaatgaggagtgg

SEQ ID NO: 4497980 - DNA, 25 bp, Homo sapien
ttctgcctgcctatcgcacacggaa

SEQ ID NO: 4497981 - DNA, 25 bp, Homo sapien
gcgtttcgcatgtgtgttctgcctg

SEQ ID NO: 4497982 - DNA, 25 bp, Homo sapien
gtaaccatggagctgaccgtccaca

SEQ ID NO: 4497983 - DNA, 25 bp, Homo sapien
cagcgaactgcctgtgggagctgaa

SEQ ID NO: 4497984 - DNA, 25 bp, Homo sapien
gggcaaaaacgtcagccagcgaact

SEQ ID NO: 4497985 - DNA, 25 bp, Homo sapien
tgaagtgtggttccctacagcaagg

SEQ ID NO: 4497986 - DNA, 25 bp, Homo sapien
acctgctccgtgagccgtctgtgga

SEQ ID NO: 4497987 - DNA, 25 bp, Homo sapien
tggagcccggtcttttcacccatgg

SEQ ID NO: 4497988 - DNA, 25 bp, Homo sapien
aatagtgccaatgtgcccacgtgcc

SEQ ID NO: 4497989 - DNA, 25 bp, Homo sapien
gccacatatggaggcacctgctccg

SEQ ID NO: 4497990 - DNA, 25 bp, Homo sapien
tgacctccgagtgcagcagcatgtg

SEQ ID NO: 4497991 - DNA, 25 bp, Homo sapien
tcattttcggagaccaggccaagca

SEQ ID NO: 4497992 - DNA, 25 bp, Homo sapien
tcttgtggcgttccacggtcgaacc

SEQ ID NO: 4497993 - DNA, 25 bp, Homo sapien
gaaggacttgtcacactcgaggcac

SEQ ID NO: 4497994 - DNA, 25 bp, Homo sapien
cgcttcatgttcgcctgtagggtga

SEQ ID NO: 4497995 - DNA, 25 bp, Homo sapien
acctcgcacttgaactccttcacgc

SEQ ID NO: 4497996 - DNA, 25 bp, Homo sapien
ttcgcctgtagggtgaactcccggc

SEQ ID NO: 4497997 - DNA, 25 bp, Homo sapien
catgttcgcctgtagggtgaactcc

SEQ ID NO: 4497998 - DNA, 25 bp, Homo sapien
aagcagatgtggcactggtagggcc

SEQ ID NO: 4497999 - DNA, 25 bp, Homo sapien
atttgaatggcttcacgggcgagtg

SEQ ID NO: 4498000 - DNA, 25 bp, Homo sapien
catgtgggtcttgagagtctgcttc

SEQ ID NO: 4498001 - DNA, 25 bp, Homo sapien
gccggacgctggtgtggatcagcat

SEQ ID NO: 4498002 - DNA, 25 bp, Homo sapien
ggctggcgcttggtgggccacagct

SEQ ID NO: 4498003 - DNA, 25 bp, Homo sapien
aggctggcgcttggtgggccacagc

SEQ ID NO: 4498004 - DNA, 25 bp, Homo sapien
ggccaggctggcgcttggtgggcca

SEQ ID NO: 4498005 - DNA, 25 bp, Homo sapien
gctgcaggcatgctgattccagacc

SEQ ID NO: 4498006 - DNA, 25 bp, Homo sapien
gctgtccaggccgatgtccatgacg

SEQ ID NO: 4498007 - DNA, 25 bp, Homo sapien
gccggctcaggttgcccttgagatt

SEQ ID NO: 4498008 - DNA, 25 bp, Homo sapien
ccttgagattaaacttgctggagca

SEQ ID NO: 4498009 - DNA, 25 bp, Homo sapien
tgcttgaccttcatgtgccggctca

SEQ ID NO: 4498010 - DNA, 25 bp, Homo sapien
tgttggtatcattcctgctctgtcc

SEQ ID NO: 4498011 - DNA, 25 bp, Homo sapien
aggctcctgagtgcgtcatgttggt

SEQ ID NO: 4498012 - DNA, 25 bp, Homo sapien
tgctctgtccattgcgcttggccca

SEQ ID NO: 4498013 - DNA, 25 bp, Homo sapien
tgcgtcatgttggtatcattcctgc

SEQ ID NO: 4498014 - DNA, 25 bp, Homo sapien
tgagcccaccccaacgaagtctcag

SEQ ID NO: 4498015 - DNA, 25 bp, Homo sapien
ctgagcccaccccaacgaagtctca

SEQ ID NO: 4498016 - DNA, 25 bp, Homo sapien
cccaacgaagtctcagccttggcca

SEQ ID NO: 4498017 - DNA, 25 bp, Homo sapien
ccaccccaacgaagtctcagccttg

SEQ ID NO: 4498018 - DNA, 25 bp, Homo sapien
gaaacttctacgaactgctgaggca

SEQ ID NO: 4498019 - DNA, 25 bp, Homo sapien
gaaaggctaccgctaacacttggga

SEQ ID NO: 4498020 - DNA, 25 bp, Homo sapien
gctttaagtactgaccactgctgga

SEQ ID NO: 4498021 - DNA, 25 bp, Homo sapien
tgtacttggagttgggacctcacct

SEQ ID NO: 4498022 - DNA, 25 bp, Homo sapien
tcactgttggcaagctgaatcagcc

SEQ ID NO: 4498023 - DNA, 25 bp, Homo sapien
aaacatggccaactgtcacctggaa

SEQ ID NO: 4498024 - DNA, 25 bp, Homo sapien
gaagagggcctagactttgaaccat

SEQ ID NO: 4498025 - DNA, 25 bp, Homo sapien
gaataggcacgtgacccaatcctgt

SEQ ID NO: 4498026 - DNA, 25 bp, Homo sapien
ggcgctgctgtccacgctcgcatag

SEQ ID NO: 4498027 - DNA, 25 bp, Homo sapien
tcctgctggccgtcgagctctgaag

SEQ ID NO: 4498028 - DNA, 25 bp, Homo sapien
tagctgtaggcgttctcctcgaagt

SEQ ID NO: 4498029 - DNA, 25 bp, Homo sapien
tatagcacattgtagtaggccatct

SEQ ID NO: 4498030 - DNA, 25 bp, Homo sapien
tccgggtgccctagagttcctgaat

SEQ ID NO: 4498031 - DNA, 25 bp, Homo sapien
gaagcacgcacagcacattaggaag

SEQ ID NO: 4498032 - DNA, 25 bp, Homo sapien
gaatgtgctatttcactgccctggg

SEQ ID NO: 4498033 - DNA, 25 bp, Homo sapien
gagtttccaagtcacccgagaggct

SEQ ID NO: 4498034 - DNA, 25 bp, Homo sapien
tttcccctcatggtgacgtgaggca

SEQ ID NO: 4498035 - DNA, 25 bp, Homo sapien
cagtcagtatgttttgcatactgta

SEQ ID NO: 4498036 - DNA, 25 bp, Homo sapien
gcgttttacctcagccagtcagtat

SEQ ID NO: 4498037 - DNA, 25 bp, Homo sapien
tactgtaatttatattgcccttgga

SEQ ID NO: 4498038 - DNA, 25 bp, Homo sapien
cctgatcccgctcgcgggtcccggt

SEQ ID NO: 4498039 - DNA, 25 bp, Homo sapien
ctcgcgggtcccggtgggtctcacg

SEQ ID NO: 4498040 - DNA, 25 bp, Homo sapien
aagcggctctgctaatcccccagcc

SEQ ID NO: 4498041 - DNA, 25 bp, Homo sapien
gagggtcagcctcgcaagcggctct

SEQ ID NO: 4498042 - DNA, 25 bp, Homo sapien
ttccccactcaggttattggccttc

SEQ ID NO: 4498043 - DNA, 25 bp, Homo sapien
tccccactcaggttattggccttct

SEQ ID NO: 4498044 - DNA, 25 bp, Homo sapien
aaggtcaagaagaatctacacggac

SEQ ID NO: 4498045 - DNA, 25 bp, Homo sapien
ccccactcaggttattggccttctg

SEQ ID NO: 4498046 - DNA, 25 bp, Homo sapien
gagtcctgccccgtactcagaagga

SEQ ID NO: 4498047 - DNA, 25 bp, Homo sapien
tgccccgtactcagaaggaaggaat

SEQ ID NO: 4498048 - DNA, 25 bp, Homo sapien
ttgcttgcaggtcctaagacccctc

SEQ ID NO: 4498049 - DNA, 25 bp, Homo sapien
ttgtttgcttgcaggtcctaagacc

SEQ ID NO: 4498050 - DNA, 25 bp, Homo sapien
accgcgcccggcctattattatgtt

SEQ ID NO: 4498051 - DNA, 25 bp, Homo sapien
ccgcgcccggcctattattatgttt

SEQ ID NO: 4498052 - DNA, 25 bp, Homo sapien
atgaccagctaagtcagtttaacaa

SEQ ID NO: 4498053 - DNA, 25 bp, Homo sapien
aatgaccagctaagtcagtttaaca

SEQ ID NO: 4498054 - DNA, 25 bp, Homo sapien
caaaacacctggaacttacacattt

SEQ ID NO: 4498055 - DNA, 25 bp, Homo sapien
gaagagtcaatacatgtcaaagagg

SEQ ID NO: 4498056 - DNA, 25 bp, Homo sapien
tgagaccttatgtcaaacaacaaca

SEQ ID NO: 4498057 - DNA, 25 bp, Homo sapien
cacacattggaccaccaaagaagag

SEQ ID NO: 4498058 - DNA, 25 bp, Homo sapien
catagatttcagtggcgctacttgg

SEQ ID NO: 4498059 - DNA, 25 bp, Homo sapien
acatagatttcagtggcgctacttg

SEQ ID NO: 4498060 - DNA, 25 bp, Homo sapien
tagatttcagtggcgctacttggga

SEQ ID NO: 4498061 - DNA, 25 bp, Homo sapien
atttcagtggcgctacttgggaggc

SEQ ID NO: 4498062 - DNA, 25 bp, Homo sapien
ctttaagcaacctgctggtcccccg

SEQ ID NO: 4498063 - DNA, 25 bp, Homo sapien
gcttgagcctcctgtgtagttagga

SEQ ID NO: 4498064 - DNA, 25 bp, Homo sapien
catagtgtggacacccggttggcac

SEQ ID NO: 4498065 - DNA, 25 bp, Homo sapien
cacccggttggcacagtgcactaca

SEQ ID NO: 4498066 - DNA, 25 bp, Homo sapien
tcacgcgcatcaatgtgaagagagt

SEQ ID NO: 4498067 - DNA, 25 bp, Homo sapien
acgcgcatcaatgtgaagagagtcc

SEQ ID NO: 4498068 - DNA, 25 bp, Homo sapien
acagcacaaaatgtcacgcgcatca

SEQ ID NO: 4498069 - DNA, 25 bp, Homo sapien
cacgcgcatcaatgtgaagagagtc

SEQ ID NO: 4498070 - DNA, 25 bp, Homo sapien
gacacactataagcatagagcacta

SEQ ID NO: 4498071 - DNA, 25 bp, Homo sapien
tgctaagttgcgcagtctggagtgc

SEQ ID NO: 4498072 - DNA, 25 bp, Homo sapien
tcttgctaagttgcgcagtctggag

SEQ ID NO: 4498073 - DNA, 25 bp, Homo sapien
acttagtgtggacacactataagca

SEQ ID NO: 4498074 - DNA, 25 bp, Homo sapien
tcagggtcagcgcacggtcatcgcc

SEQ ID NO: 4498075 - DNA, 25 bp, Homo sapien
tggagtgtccactgactcgtccccc

SEQ ID NO: 4498076 - DNA, 25 bp, Homo sapien
gggacccggagtctcgggcgcacag

SEQ ID NO: 4498077 - DNA, 25 bp, Homo sapien
gcacagcctcagtccggcgcggcgt

SEQ ID NO: 4498078 - DNA, 25 bp, Homo sapien
tggccacggccaacttggcagagtt

SEQ ID NO: 4498079 - DNA, 25 bp, Homo sapien
cagagttctagaagtgctcccaggc

SEQ ID NO: 4498080 - DNA, 25 bp, Homo sapien
ttccaacaaaggtagtggccacggc

SEQ ID NO: 4498081 - DNA, 25 bp, Homo sapien
tttagacactttcactcccttatgc

SEQ ID NO: 4498082 - DNA, 25 bp, Homo sapien
taaggtgcgttagtctgcagacaca

SEQ ID NO: 4498083 - DNA, 25 bp, Homo sapien
tgctgactccagaacccatatggat

SEQ ID NO: 4498084 - DNA, 25 bp, Homo sapien
ggcatagagaggttccaggacttac

SEQ ID NO: 4498085 - DNA, 25 bp, Homo sapien
gacaagtcaggactaggaccacaac

SEQ ID NO: 4498086 - DNA, 25 bp, Homo sapien
ccgttagtgtgctgatgtgttctcc

SEQ ID NO: 4498087 - DNA, 25 bp, Homo sapien
agcggttcccaagccaacgatgtgt

SEQ ID NO: 4498088 - DNA, 25 bp, Homo sapien
cagctttggtctttgcgggctcccc

SEQ ID NO: 4498089 - DNA, 25 bp, Homo sapien
cttggccagcaaaatgaagtcatca

SEQ ID NO: 4498090 - DNA, 25 bp, Homo sapien
ccgcagcctcggcttgggcagagct

SEQ ID NO: 4498091 - DNA, 25 bp, Homo sapien
aaacagggtcaagtgggccctggca

SEQ ID NO: 4498092 - DNA, 25 bp, Homo sapien
gggcaccgcagtcctcccgccggcg

SEQ ID NO: 4498093 - DNA, 25 bp, Homo sapien
gtcaagtgggccctggcaaactcag

SEQ ID NO: 4498094 - DNA, 25 bp, Homo sapien
acgggcggcagctccgccccgcggt

SEQ ID NO: 4498095 - DNA, 25 bp, Homo sapien
aggagcgacggtgtcccgcggctcg

SEQ ID NO: 4498096 - DNA, 25 bp, Homo sapien
gcaggagcgacggtgtcccgcggct

SEQ ID NO: 4498097 - DNA, 25 bp, Homo sapien
gagcgacggtgtcccgcggctcggg

SEQ ID NO: 4498098 - DNA, 25 bp, Homo sapien
gaggcaggctgatccgggggctgag

SEQ ID NO: 4498099 - DNA, 25 bp, Homo sapien
tgagcgcccaggtcggaggcggcgg

SEQ ID NO: 4498100 - DNA, 25 bp, Homo sapien
gggctgagcgcccaggtcggaggcg

SEQ ID NO: 4498101 - DNA, 25 bp, Homo sapien
ggctgagcgcccaggtcggaggcgg

SEQ ID NO: 4498102 - DNA, 25 bp, Homo sapien
tgagcctccgtctctgcatgacttg

SEQ ID NO: 4498103 - DNA, 25 bp, Homo sapien
gagccaccaggcttttaattatctt

SEQ ID NO: 4498104 - DNA, 25 bp, Homo sapien
ggtgaagccgaatcttgaacgcaac

SEQ ID NO: 4498105 - DNA, 25 bp, Homo sapien
aatcttgaacgcaactgagcctgag

SEQ ID NO: 4498106 - DNA, 25 bp, Homo sapien
cgtggatgagggctgtcttcaacag

SEQ ID NO: 4498107 - DNA, 25 bp, Homo sapien
aaagcagcattaatgtccattaccc

SEQ ID NO: 4498108 - DNA, 25 bp, Homo sapien
tagctttgcgaattccatgtgctag

SEQ ID NO: 4498109 - DNA, 25 bp, Homo sapien
tacacagtctcatcaccgttggatg

SEQ ID NO: 4498110 - DNA, 25 bp, Homo sapien
cattcccccagtttcttttgtcatc

SEQ ID NO: 4498111 - DNA, 25 bp, Homo sapien
ccattcccccagtttcttttgtcat

SEQ ID NO: 4498112 - DNA, 25 bp, Homo sapien
tcccccagtttcttttgtcatcaac

SEQ ID NO: 4498113 - DNA, 25 bp, Homo sapien
ttcccccagtttcttttgtcatcaa

SEQ ID NO: 4498114 - DNA, 25 bp, Homo sapien
cccctctctgtcaatttgacagaga

SEQ ID NO: 4498115 - DNA, 25 bp, Homo sapien
tttcccctctctgtcaatttgacag

SEQ ID NO: 4498116 - DNA, 25 bp, Homo sapien
ccctctctgtcaatttgacagagac

SEQ ID NO: 4498117 - DNA, 25 bp, Homo sapien
gggtttcccctctctgtcaatttga

SEQ ID NO: 4498118 - DNA, 25 bp, Homo sapien
aagttctctctgatgacatgcttgg

SEQ ID NO: 4498119 - DNA, 25 bp, Homo sapien
gcattagaagttctctctgatgaca

SEQ ID NO: 4498120 - DNA, 25 bp, Homo sapien
tctctctgatgacatgcttggcctg

SEQ ID NO: 4498121 - DNA, 25 bp, Homo sapien
catttcttgcattagaagttctctc

SEQ ID NO: 4498122 - DNA, 25 bp, Homo sapien
tttgcaaacttctgtctgagatgtg

SEQ ID NO: 4498123 - DNA, 25 bp, Homo sapien
gtctgagatgtgtgcctcagtctcc

SEQ ID NO: 4498124 - DNA, 25 bp, Homo sapien
acaaaatgtatctccaggctggctg

SEQ ID NO: 4498125 - DNA, 25 bp, Homo sapien
ggcccactacccttcagtttgcaaa

SEQ ID NO: 4498126 - DNA, 25 bp, Homo sapien
caacgtggaggtcctgaagcatcac

SEQ ID NO: 4498127 - DNA, 25 bp, Homo sapien
catagaagtataacagctgacagga

SEQ ID NO: 4498128 - DNA, 25 bp, Homo sapien
cacagtcccagtgagagtgctccag

SEQ ID NO: 4498129 - DNA, 25 bp, Homo sapien
catatttgtatcaactggtcaggtg

SEQ ID NO: 4498130 - DNA, 25 bp, Homo sapien
tgccaagagcccagggatcgcctcg

SEQ ID NO: 4498131 - DNA, 25 bp, Homo sapien
tcagccagccccacgttcagcagtg

SEQ ID NO: 4498132 - DNA, 25 bp, Homo sapien
cactcactcctccacagaagttggg

SEQ ID NO: 4498133 - DNA, 25 bp, Homo sapien
tcagcagtgccagccctgccaagag

SEQ ID NO: 4498134 - DNA, 25 bp, Homo sapien
gggtattgtgtgccaagggtcctcc

SEQ ID NO: 4498135 - DNA, 25 bp, Homo sapien
cagaggttgggggtattgtgtgcca

SEQ ID NO: 4498136 - DNA, 25 bp, Homo sapien
tattgtgtgccaagggtcctcccat

SEQ ID NO: 4498137 - DNA, 25 bp, Homo sapien
tgggggtattgtgtgccaagggtcc

SEQ ID NO: 4498138 - DNA, 25 bp, Homo sapien
acattctgctgacaccagcccagtg

SEQ ID NO: 4498139 - DNA, 25 bp, Homo sapien
aggagggggccacattctgctgaca

SEQ ID NO: 4498140 - DNA, 25 bp, Homo sapien
cacggcccgtgttgggcagggcagc

SEQ ID NO: 4498141 - DNA, 25 bp, Homo sapien
ggcagccacttcttcctcatggagc

SEQ ID NO: 4498142 - DNA, 25 bp, Homo sapien
cggggccacagtcagcaggaaactg

SEQ ID NO: 4498143 - DNA, 25 bp, Homo sapien
agggcaggagtgctgacggggccac

SEQ ID NO: 4498144 - DNA, 25 bp, Homo sapien
caggagtgctgacggggccacagtc

SEQ ID NO: 4498145 - DNA, 25 bp, Homo sapien
ctgacggggccacagtcagcaggaa

SEQ ID NO: 4498146 - DNA, 25 bp, Homo sapien
tgttgtagcccttcgtccccaggga

SEQ ID NO: 4498147 - DNA, 25 bp, Homo sapien
tcgtccccagggatgtcacgataag

SEQ ID NO: 4498148 - DNA, 25 bp, Homo sapien
tgaaaggctgttgtagcccttcgtc

SEQ ID NO: 4498149 - DNA, 25 bp, Homo sapien
gatgtcacgataagtcaccagaacc

SEQ ID NO: 4498150 - DNA, 25 bp, Homo sapien
gaaggggcctccaatgcaaggaggc

SEQ ID NO: 4498151 - DNA, 25 bp, Homo sapien
aggggcctccaatgcaaggaggcag

SEQ ID NO: 4498152 - DNA, 25 bp, Homo sapien
ggggcctccaatgcaaggaggcagc

SEQ ID NO: 4498153 - DNA, 25 bp, Homo sapien
gatcaggccagaaaacaccagcttc

SEQ ID NO: 4498154 - DNA, 25 bp, Homo sapien
gcaggatcaggccagaaaacaccag

SEQ ID NO: 4498155 - DNA, 25 bp, Homo sapien
tctacaggccccagcaggatcaggc

SEQ ID NO: 4498156 - DNA, 25 bp, Homo sapien
ctctacaggccccagcaggatcagg

SEQ ID NO: 4498157 - DNA, 25 bp, Homo sapien
tcagccccatgtaagggtcctcctt

SEQ ID NO: 4498158 - DNA, 25 bp, Homo sapien
gaagtgatgtgggaatactcagccc

SEQ ID NO: 4498159 - DNA, 25 bp, Homo sapien
tgcagcagcgctgtgactcagaacc

SEQ ID NO: 4498160 - DNA, 25 bp, Homo sapien
ataagagtcacctgcagggtcccca

SEQ ID NO: 4498161 - DNA, 25 bp, Homo sapien
tgtgtcaaagagtgtctcgctcgct

SEQ ID NO: 4498162 - DNA, 25 bp, Homo sapien
tcacacgagggtctcatggccaaag

SEQ ID NO: 4498163 - DNA, 25 bp, Homo sapien
tgtgtacacggtaccgcagggcttg

SEQ ID NO: 4498164 - DNA, 25 bp, Homo sapien
aaacagagacttgcgtgtcacaggc

SEQ ID NO: 4498165 - DNA, 25 bp, Homo sapien
cagggtactgtttatgctttgggta

SEQ ID NO: 4498166 - DNA, 25 bp, Homo sapien
tcgagcacccacgtacagggtcctg

SEQ ID NO: 4498167 - DNA, 25 bp, Homo sapien
gatgtgttcagcttcgaatctgagg

SEQ ID NO: 4498168 - DNA, 25 bp, Homo sapien
gagtgcaaagagggcctctcgagca

SEQ ID NO: 4498169 - DNA, 25 bp, Homo sapien
gaagctgaggttgctactgagtgca

SEQ ID NO: 4498170 - DNA, 25 bp, Homo sapien
tagtggacaaaatggagggtttgct

SEQ ID NO: 4498171 - DNA, 25 bp, Homo sapien
ccttggacccagaaggtcaagcttc

SEQ ID NO: 4498172 - DNA, 25 bp, Homo sapien
ggagggtttgctgagcctccctcct

SEQ ID NO: 4498173 - DNA, 25 bp, Homo sapien
cataggcatcatccttggacccaga

SEQ ID NO: 4498174 - DNA, 25 bp, Homo sapien
ttgaagctgcactgctgtttcttct

SEQ ID NO: 4498175 - DNA, 25 bp, Homo sapien
tctctgcgtctgcaccccaaagcag

SEQ ID NO: 4498176 - DNA, 25 bp, Homo sapien
tttcttctctgcgtctgcaccccaa

SEQ ID NO: 4498177 - DNA, 25 bp, Homo sapien
cccttgaagctgcactgctgtttct

SEQ ID NO: 4498178 - DNA, 25 bp, Homo sapien
tcagatgtgctacatcaggaaccat

SEQ ID NO: 4498179 - DNA, 25 bp, Homo sapien
tgtgctttggccaaaaccacaccag

SEQ ID NO: 4498180 - DNA, 25 bp, Homo sapien
cctgggttgaaccagatttcatcct

SEQ ID NO: 4498181 - DNA, 25 bp, Homo sapien
gcacctgctgcacttaggagcagga

SEQ ID NO: 4498182 - DNA, 25 bp, Homo sapien
tatctaactggcacctgcaaccaag

SEQ ID NO: 4498183 - DNA, 25 bp, Homo sapien
ttgagttgtactattccccagcagc

SEQ ID NO: 4498184 - DNA, 25 bp, Homo sapien
tctggtcctccctaaaacacatgct

SEQ ID NO: 4498185 - DNA, 25 bp, Homo sapien
ggcacagaatcctacccctttgagt

SEQ ID NO: 4498186 - DNA, 25 bp, Homo sapien
gcgtgcacagagtgtgtgtgctgca

SEQ ID NO: 4498187 - DNA, 25 bp, Homo sapien
gcacagtggagcgtgcacagagtgt

SEQ ID NO: 4498188 - DNA, 25 bp, Homo sapien
cccaggggctcagctagttttgtga

SEQ ID NO: 4498189 - DNA, 25 bp, Homo sapien
tcagctagttttgtgactggcaaac

SEQ ID NO: 4498190 - DNA, 25 bp, Homo sapien
gggcactcaagtctaggaacaaaga

SEQ ID NO: 4498191 - DNA, 25 bp, Homo sapien
gatatcagtcccacgcccaagcatg

SEQ ID NO: 4498192 - DNA, 25 bp, Homo sapien
atggggcactcaagtctaggaacaa

SEQ ID NO: 4498193 - DNA, 25 bp, Homo sapien
aaggagcgaggggatatcagtccca

SEQ ID NO: 4498194 - DNA, 25 bp, Homo sapien
tgaacaggtgactgccgctgagcgg

SEQ ID NO: 4498195 - DNA, 25 bp, Homo sapien
gccgctgagcggcaggaggatcttg

SEQ ID NO: 4498196 - DNA, 25 bp, Homo sapien
gcaggaggatcttgatgtagttttg

SEQ ID NO: 4498197 - DNA, 25 bp, Homo sapien
tcttgatgtagttttgacagtcgcg

SEQ ID NO: 4498198 - DNA, 25 bp, Homo sapien
tcaggggtctatgctacagaacagg

SEQ ID NO: 4498199 - DNA, 25 bp, Homo sapien
gctgtcagggctgcgctttgtgcca

SEQ ID NO: 4498200 - DNA, 25 bp, Homo sapien
agtggtacctagaaacctccctctg

SEQ ID NO: 4498201 - DNA, 25 bp, Homo sapien
ggatcttcatgggtaagtgaccgca

SEQ ID NO: 4498202 - DNA, 25 bp, Homo sapien
attatcagacccacctggcggagga

SEQ ID NO: 4498203 - DNA, 25 bp, Homo sapien
gacccgacgcgggacacattatcag

SEQ ID NO: 4498204 - DNA, 25 bp, Homo sapien
cacggtgccgaagggtttgaacctg

SEQ ID NO: 4498205 - DNA, 25 bp, Homo sapien
tgaacctggacagtcggcctcagga

SEQ ID NO: 4498206 - DNA, 25 bp, Homo sapien
tcgaagggacaacggcccttgccat

SEQ ID NO: 4498207 - DNA, 25 bp, Homo sapien
ccttctcgtcccttgccagggtgaa

SEQ ID NO: 4498208 - DNA, 25 bp, Homo sapien
cagtggacttgaaattcgggtcgaa

SEQ ID NO: 4498209 - DNA, 25 bp, Homo sapien
ttctcgtcccttgccagggtgaagt

SEQ ID NO: 4498210 - DNA, 25 bp, Homo sapien
gactgttccagtgtagagctcgcca

SEQ ID NO: 4498211 - DNA, 25 bp, Homo sapien
gatggccgggtcattcccttggaag

SEQ ID NO: 4498212 - DNA, 25 bp, Homo sapien
tcttggtggggcgaaggctttggct

SEQ ID NO: 4498213 - DNA, 25 bp, Homo sapien
ctttggctccgcgagatggccgggt

SEQ ID NO: 4498214 - DNA, 25 bp, Homo sapien
taggctgaggccacaaaagctgggt

SEQ ID NO: 4498215 - DNA, 25 bp, Homo sapien
cagatgcgggcaatgcgggacacaa

SEQ ID NO: 4498216 - DNA, 25 bp, Homo sapien
caatgcgggacacaatggtgttctc

SEQ ID NO: 4498217 - DNA, 25 bp, Homo sapien
tgtcatcatcgccttgcaagctgcc

SEQ ID NO: 4498218 - DNA, 25 bp, Homo sapien
ttgcccaagatcctaggccagcagg

SEQ ID NO: 4498219 - DNA, 25 bp, Homo sapien
agtgaaatctcaccgctgcacacca

SEQ ID NO: 4498220 - DNA, 25 bp, Homo sapien
gagctttgcgtggattaataattca

SEQ ID NO: 4498221 - DNA, 25 bp, Homo sapien
cattctaaaatgataccagtgactc

SEQ ID NO: 4498222 - DNA, 25 bp, Homo sapien
agaaaagggtgtcacgccagtcctg

SEQ ID NO: 4498223 - DNA, 25 bp, Homo sapien
ccttgaggaaggaggtccagcgctg

SEQ ID NO: 4498224 - DNA, 25 bp, Homo sapien
tcgtcgggccgtgagcacagcagct

SEQ ID NO: 4498225 - DNA, 25 bp, Homo sapien
gggctcagcgtgaagacatcctgca

SEQ ID NO: 4498226 - DNA, 25 bp, Homo sapien
acagacggcagagccttctgtagtt

SEQ ID NO: 4498227 - DNA, 25 bp, Homo sapien
gacacagacggcagagccttctgta

SEQ ID NO: 4498228 - DNA, 25 bp, Homo sapien
tgtgaagacacagacggcagagcct

SEQ ID NO: 4498229 - DNA, 25 bp, Homo sapien
tgaagacacagacggcagagccttc

SEQ ID NO: 4498230 - DNA, 25 bp, Homo sapien
cactgctgtgtctcacggttcacct

SEQ ID NO: 4498231 - DNA, 25 bp, Homo sapien
tgtctcacggttcacctccttgtag

SEQ ID NO: 4498232 - DNA, 25 bp, Homo sapien
tgtagaggccgctgaagactctctg

SEQ ID NO: 4498233 - DNA, 25 bp, Homo sapien
tgggtcacggtgtaccactgctgtg

SEQ ID NO: 4498234 - DNA, 25 bp, Homo sapien
tccttgaggaagttcagcacgcggt

SEQ ID NO: 4498235 - DNA, 25 bp, Homo sapien
tcggacctgcccgtccatcaggaag

SEQ ID NO: 4498236 - DNA, 25 bp, Homo sapien
agctgcagggatgagttgatcttcc

SEQ ID NO: 4498237 - DNA, 25 bp, Homo sapien
acagccacgcgctggtagcgagcct

SEQ ID NO: 4498238 - DNA, 25 bp, Homo sapien
agctcctcaatgatgtgcacccggg

SEQ ID NO: 4498239 - DNA, 25 bp, Homo sapien
tccaggagcagattctgcacgggct

SEQ ID NO: 4498240 - DNA, 25 bp, Homo sapien
ggcccacgctcactgccttgtggag

SEQ ID NO: 4498241 - DNA, 25 bp, Homo sapien
tgtcccgatgagaagatctgcagct

SEQ ID NO: 4498242 - DNA, 25 bp, Homo sapien
tgccaggattcctcgttggcctgct

SEQ ID NO: 4498243 - DNA, 25 bp, Homo sapien
cctgccaggattcctcgttggcctg

SEQ ID NO: 4498244 - DNA, 25 bp, Homo sapien
ccaggattcctcgttggcctgctca

SEQ ID NO: 4498245 - DNA, 25 bp, Homo sapien
caggattcctcgttggcctgctcac

SEQ ID NO: 4498246 - DNA, 25 bp, Homo sapien
atgagaagcgggcatgggcagccag

SEQ ID NO: 4498247 - DNA, 25 bp, Homo sapien
ggcgaccccactttctaatagttca

SEQ ID NO: 4498248 - DNA, 25 bp, Homo sapien
cacagccagacacggggatgagaag

SEQ ID NO: 4498249 - DNA, 25 bp, Homo sapien
ccccaagaggcctgttacgtaacag

SEQ ID NO: 4498250 - DNA, 25 bp, Homo sapien
tgcttgcagctggagccgctccaag

SEQ ID NO: 4498251 - DNA, 25 bp, Homo sapien
gcacctggactacgcccgagtgtga

SEQ ID NO: 4498252 - DNA, 25 bp, Homo sapien
agtgtgaggccgcatacagcagccc

SEQ ID NO: 4498253 - DNA, 25 bp, Homo sapien
tccaagcacagtaggggtcccgggc

SEQ ID NO: 4498254 - DNA, 25 bp, Homo sapien
tatatgaatgtttggccagacgcgg

SEQ ID NO: 4498255 - DNA, 25 bp, Homo sapien
gacagataagtcaaccaggcacgaa

SEQ ID NO: 4498256 - DNA, 25 bp, Homo sapien
caggcacgaaggatgaaaacactac

SEQ ID NO: 4498257 - DNA, 25 bp, Homo sapien
taaacagtatgtaccctcagtggcc

SEQ ID NO: 4498258 - DNA, 25 bp, Homo sapien
gggacacaaccgaagacgcgctgca

SEQ ID NO: 4498259 - DNA, 25 bp, Homo sapien
tgttggtacaaaagacggggacaca

SEQ ID NO: 4498260 - DNA, 25 bp, Homo sapien
tggctccctcgatgtcctggatcca

SEQ ID NO: 4498261 - DNA, 25 bp, Homo sapien
gaagacgcgctgcaaaggtccttgg

SEQ ID NO: 4498262 - DNA, 25 bp, Homo sapien
tctcctccaccttttgagggggcac

SEQ ID NO: 4498263 - DNA, 25 bp, Homo sapien
ctccaccttttgagggggcacctca

SEQ ID NO: 4498264 - DNA, 25 bp, Homo sapien
ctctcctccaccttttgagggggca

SEQ ID NO: 4498265 - DNA, 25 bp, Homo sapien
cctgggggagccttccaagcacact

SEQ ID NO: 4498266 - DNA, 25 bp, Homo sapien
tgcctgggggagccttccaagcaca

SEQ ID NO: 4498267 - DNA, 25 bp, Homo sapien
gcctgggggagccttccaagcacac

SEQ ID NO: 4498268 - DNA, 25 bp, Homo sapien
gtgcctgggggagccttccaagcac

SEQ ID NO: 4498269 - DNA, 25 bp, Homo sapien
ccccgttgcgtagccagagtcgggt

SEQ ID NO: 4498270 - DNA, 25 bp, Homo sapien
tgataatgacgggtacactgccacc

SEQ ID NO: 4498271 - DNA, 25 bp, Homo sapien
tctgggcagtagctggctaccagct

SEQ ID NO: 4498272 - DNA, 25 bp, Homo sapien
cagctggtgcactcacacgcgatgt

SEQ ID NO: 4498273 - DNA, 25 bp, Homo sapien
ccggtgccggtagagcaagaataaa

SEQ ID NO: 4498274 - DNA, 25 bp, Homo sapien
ctgactcagtgaagactcgggaccc

SEQ ID NO: 4498275 - DNA, 25 bp, Homo sapien
gggatacctccacgaagctgtcttg

SEQ ID NO: 4498276 - DNA, 25 bp, Homo sapien
gactttcatgctgttccggtgccgg

SEQ ID NO: 4498277 - DNA, 25 bp, Homo sapien
cacggtcgtgttccacgaagagcag

SEQ ID NO: 4498278 - DNA, 25 bp, Homo sapien
gcttcgctacttgactggagagcag

SEQ ID NO: 4498279 - DNA, 25 bp, Homo sapien
agttgaccctctccgagcattcaca

SEQ ID NO: 4498280 - DNA, 25 bp, Homo sapien
caaagggctcagtttacataaggag

SEQ ID NO: 4498281 - DNA, 25 bp, Homo sapien
catgaactggagcagccgtgtgtgc

SEQ ID NO: 4498282 - DNA, 25 bp, Homo sapien
aatctgcagtgagacagggcagccg

SEQ ID NO: 4498283 - DNA, 25 bp, Homo sapien
ggcagcaacaactacatcctcggct

SEQ ID NO: 4498284 - DNA, 25 bp, Homo sapien
tggtgagggccgcagtgccaaccta

SEQ ID NO: 4498285 - DNA, 25 bp, Homo sapien
tgagggaaaggcgtacattgtcacg

SEQ ID NO: 4498286 - DNA, 25 bp, Homo sapien
ggaccagggtgcagttagttcctcg

SEQ ID NO: 4498287 - DNA, 25 bp, Homo sapien
gaaatctctcctgagctcgcgctgt

SEQ ID NO: 4498288 - DNA, 25 bp, Homo sapien
cgggttctcacgcaacaacggagga

SEQ ID NO: 4498289 - DNA, 25 bp, Homo sapien
attaaaaaatgacataaagtgcatc

SEQ ID NO: 4498290 - DNA, 25 bp, Homo sapien
aaatgacataaagtgcatcttatta

SEQ ID NO: 4498291 - DNA, 25 bp, Homo sapien
aaaaaatgacataaagtgcatctta

SEQ ID NO: 4498292 - DNA, 25 bp, Homo sapien
taaaaaatgacataaagtgcatctt

SEQ ID NO: 4498293 - DNA, 25 bp, Homo sapien
cattgcaagaatagactcctaggct

SEQ ID NO: 4498294 - DNA, 25 bp, Homo sapien
aacacacagggagaccgatcgctga

SEQ ID NO: 4498295 - DNA, 25 bp, Homo sapien
ggatctctagaatcagtgccaagca

SEQ ID NO: 4498296 - DNA, 25 bp, Homo sapien
gcttaccgttgcctgatgactcgga

SEQ ID NO: 4498297 - DNA, 25 bp, Homo sapien
tcactgcaggctctgcctccgggtt

SEQ ID NO: 4498298 - DNA, 25 bp, Homo sapien
actgcaggctctgcctccgggttca

SEQ ID NO: 4498299 - DNA, 25 bp, Homo sapien
gctcactgcaggctctgcctccggg

SEQ ID NO: 4498300 - DNA, 25 bp, Homo sapien
ctgcaggctctgcctccgggttcaa

SEQ ID NO: 4498301 - DNA, 25 bp, Homo sapien
aaagttgtctgcgtctcgaggcgag

SEQ ID NO: 4498302 - DNA, 25 bp, Homo sapien
gagatcctcctgtaagtgctgcctt

SEQ ID NO: 4498303 - DNA, 25 bp, Homo sapien
tgccaaacccggctgggaacgcctg

SEQ ID NO: 4498304 - DNA, 25 bp, Homo sapien
ggacttgacgttcctgacgaagcag

SEQ ID NO: 4498305 - DNA, 25 bp, Homo sapien
caagggatgttgcaacaatcgaaga

SEQ ID NO: 4498306 - DNA, 25 bp, Homo sapien
ggatgttgcaacaatcgaagaaaac

SEQ ID NO: 4498307 - DNA, 25 bp, Homo sapien
ctcgcaagggatgttgcaacaatcg

SEQ ID NO: 4498308 - DNA, 25 bp, Homo sapien
ttgcaacaatcgaagaaaactatgc

SEQ ID NO: 4498309 - DNA, 25 bp, Homo sapien
gatttgccgcacaacatcgtgaatg

SEQ ID NO: 4498310 - DNA, 25 bp, Homo sapien
tgaaaacgtcctggagatttgccgc

SEQ ID NO: 4498311 - DNA, 25 bp, Homo sapien
catatcaaaagtcaagctaagttta

SEQ ID NO: 4498312 - DNA, 25 bp, Homo sapien
tgaggcttagtttgcaagatgaaaa

SEQ ID NO: 4498313 - DNA, 25 bp, Homo sapien
tcacttcagtccaagtttgggttcc

SEQ ID NO: 4498314 - DNA, 25 bp, Homo sapien
tccaagtttgggttccttcagctct

SEQ ID NO: 4498315 - DNA, 25 bp, Homo sapien
cttagtagagtcacttcagtccaag

SEQ ID NO: 4498316 - DNA, 25 bp, Homo sapien
tagagtcacttcagtccaagtttgg

SEQ ID NO: 4498317 - DNA, 25 bp, Homo sapien
cactggcccagataggatgtcaaaa

SEQ ID NO: 4498318 - DNA, 25 bp, Homo sapien
tggcccagataggatgtcaaaagga

SEQ ID NO: 4498319 - DNA, 25 bp, Homo sapien
gaggggtctgccactggcccagata

SEQ ID NO: 4498320 - DNA, 25 bp, Homo sapien
ctgccactggcccagataggatgtc

SEQ ID NO: 4498321 - DNA, 25 bp, Homo sapien
cttctgcccataaacaaagtcagga

SEQ ID NO: 4498322 - DNA, 25 bp, Homo sapien
tcatgtggaagagccatagagctga

SEQ ID NO: 4498323 - DNA, 25 bp, Homo sapien
tgggaggcagcaaataggaagtttc

SEQ ID NO: 4498324 - DNA, 25 bp, Homo sapien
caggaatggtttgcctgccccagtc

SEQ ID NO: 4498325 - DNA, 25 bp, Homo sapien
gaattactcggacccctgtgagggc

SEQ ID NO: 4498326 - DNA, 25 bp, Homo sapien
ccgacagtcctgaatgagggccaca

SEQ ID NO: 4498327 - DNA, 25 bp, Homo sapien
gcctgtacgtcttctgcctgggatg

SEQ ID NO: 4498328 - DNA, 25 bp, Homo sapien
tatcaaggactccaagtcaggccct

SEQ ID NO: 4498329 - DNA, 25 bp, Homo sapien
gctcttcctgggacatcagggccac

SEQ ID NO: 4498330 - DNA, 25 bp, Homo sapien
tgctcttcctgggacatcagggcca

SEQ ID NO: 4498331 - DNA, 25 bp, Homo sapien
attgctcttcctgggacatcagggc

SEQ ID NO: 4498332 - DNA, 25 bp, Homo sapien
ttattgctcttcctgggacatcagg

SEQ ID NO: 4498333 - DNA, 25 bp, Homo sapien
gaagtggcagctcaatactggaggc

SEQ ID NO: 4498334 - DNA, 25 bp, Homo sapien
caaaggactatgatggacagtgctc

SEQ ID NO: 4498335 - DNA, 25 bp, Homo sapien
tggaggcacaggcactattaccgtg

SEQ ID NO: 4498336 - DNA, 25 bp, Homo sapien
cagtgctctggaaagggactcatca

SEQ ID NO: 4498337 - DNA, 25 bp, Homo sapien
gctgtaatggtcatccgaactccct

SEQ ID NO: 4498338 - DNA, 25 bp, Homo sapien
caaaattaagtgtgatactggagct

SEQ ID NO: 4498339 - DNA, 25 bp, Homo sapien
ccaaaaatatgagggtggtcaacat

SEQ ID NO: 4498340 - DNA, 25 bp, Homo sapien
taaacatcagtcctacggagaaact

SEQ ID NO: 4498341 - DNA, 25 bp, Homo sapien
tgtatcatgggacttgcagccctcc

SEQ ID NO: 4498342 - DNA, 25 bp, Homo sapien
gacgccagattcttccggtgtatca

SEQ ID NO: 4498343 - DNA, 25 bp, Homo sapien
ggagacagcgtttgccctttggagc

SEQ ID NO: 4498344 - DNA, 25 bp, Homo sapien
agctggccggcctcgacgccagatt

SEQ ID NO: 4498345 - DNA, 25 bp, Homo sapien
cacacccacttgggcgcgggccgag

SEQ ID NO: 4498346 - DNA, 25 bp, Homo sapien
ttgccatggacacgagggcagttcc

SEQ ID NO: 4498347 - DNA, 25 bp, Homo sapien
gggcagttcccattggagaagcgtc

SEQ ID NO: 4498348 - DNA, 25 bp, Homo sapien
cggtggccgtggctgcggctgccgg

SEQ ID NO: 4498349 - DNA, 25 bp, Homo sapien
gccggggcagcgcttcctctagcaa

SEQ ID NO: 4498350 - DNA, 25 bp, Homo sapien
ctccctgggcgtttctgggcgtccg

SEQ ID NO: 4498351 - DNA, 25 bp, Homo sapien
gggatggactcagctggccgctcat

SEQ ID NO: 4498352 - DNA, 25 bp, Homo sapien
ctggctgtccccacgatcgcgaggg

SEQ ID NO: 4498353 - DNA, 25 bp, Homo sapien
ggaaccgcctcctcgtttcacagga

SEQ ID NO: 4498354 - DNA, 25 bp, Homo sapien
tttcctcaacatagtcttcctctga

SEQ ID NO: 4498355 - DNA, 25 bp, Homo sapien
cctgctgtgaagagttagaggggtt

SEQ ID NO: 4498356 - DNA, 25 bp, Homo sapien
tcaacatagtcttcctctgattcca

SEQ ID NO: 4498357 - DNA, 25 bp, Homo sapien
tggtcctacaggtactcggctccat

SEQ ID NO: 4498358 - DNA, 25 bp, Homo sapien
tgactttcttcggaatttttgtggc

SEQ ID NO: 4498359 - DNA, 25 bp, Homo sapien
tcctcccagcttctaagtcgcctgt

SEQ ID NO: 4498360 - DNA, 25 bp, Homo sapien
caactggggctatgactttcttcgg

SEQ ID NO: 4498361 - DNA, 25 bp, Homo sapien
ttctaagtcgcctgtgtcaactggg

SEQ ID NO: 4498362 - DNA, 25 bp, Homo sapien
tctcatacttgcagttggtcaggtt

SEQ ID NO: 4498363 - DNA, 25 bp, Homo sapien
cactctcatacttgcagttggtcag

SEQ ID NO: 4498364 - DNA, 25 bp, Homo sapien
catacttgcagttggtcaggttgat

SEQ ID NO: 4498365 - DNA, 25 bp, Homo sapien
ttgcagttggtcaggttgatggcca

SEQ ID NO: 4498366 - DNA, 25 bp, Homo sapien
tcatgtccatgactcgttccagtga

SEQ ID NO: 4498367 - DNA, 25 bp, Homo sapien
tgagacagcgcagtctgtccagtac

SEQ ID NO: 4498368 - DNA, 25 bp, Homo sapien
ccatgactcgttccagtgagacagc

SEQ ID NO: 4498369 - DNA, 25 bp, Homo sapien
tccagtgagacagcgcagtctgtcc

SEQ ID NO: 4498370 - DNA, 25 bp, Homo sapien
gccagcagatctttgcggcagattt

SEQ ID NO: 4498371 - DNA, 25 bp, Homo sapien
gatgttgtactcagagggatagagt

SEQ ID NO: 4498372 - DNA, 25 bp, Homo sapien
cggcagatttctgtcatgccaggga

SEQ ID NO: 4498373 - DNA, 25 bp, Homo sapien
gtacatgcggttgaggttccgagcc

SEQ ID NO: 4498374 - DNA, 25 bp, Homo sapien
cagagagggcctggtcaaaaggttt

SEQ ID NO: 4498375 - DNA, 25 bp, Homo sapien
tatatgtgcgggcttttcgctgacg

SEQ ID NO: 4498376 - DNA, 25 bp, Homo sapien
tgacgaccgtaggactggaagtccc

SEQ ID NO: 4498377 - DNA, 25 bp, Homo sapien
atgctctcctggcttgatctcccgg

SEQ ID NO: 4498378 - DNA, 25 bp, Homo sapien
ggtaatgaagatgccacgtccctga

SEQ ID NO: 4498379 - DNA, 25 bp, Homo sapien
gaaactgagattcaaccccaggcag

SEQ ID NO: 4498380 - DNA, 25 bp, Homo sapien
tgggaagggtagaagcctaagacca

SEQ ID NO: 4498381 - DNA, 25 bp, Homo sapien
gaaccatggctggatactgcctcca

SEQ ID NO: 4498382 - DNA, 25 bp, Homo sapien
gctggttctgaaccatggctggata

SEQ ID NO: 4498383 - DNA, 25 bp, Homo sapien
agagagactccatcgaaagaaagag

SEQ ID NO: 4498384 - DNA, 25 bp, Homo sapien
gagagactccatcgaaagaaagaga

SEQ ID NO: 4498385 - DNA, 25 bp, Homo sapien
cagagagactccatcgaaagaaaga

SEQ ID NO: 4498386 - DNA, 25 bp, Homo sapien
gtagagagaaagaaggaagaaagga

SEQ ID NO: 4498387 - DNA, 25 bp, Homo sapien
cacaggatgtgatcaggacgtagac

SEQ ID NO: 4498388 - DNA, 25 bp, Homo sapien
catatgtgaagatccggagagggtc

SEQ ID NO: 4498389 - DNA, 25 bp, Homo sapien
gggctaggccctcctcatatgtgaa

SEQ ID NO: 4498390 - DNA, 25 bp, Homo sapien
gacgtagactcgcatatcaaacttg

SEQ ID NO: 4498391 - DNA, 25 bp, Homo sapien
gcgccatcccggacaaaattctcat

SEQ ID NO: 4498392 - DNA, 25 bp, Homo sapien
ttgtgtttgttgatagcatagttgg

SEQ ID NO: 4498393 - DNA, 25 bp, Homo sapien
gttgatagcatagttggtcaggtgc

SEQ ID NO: 4498394 - DNA, 25 bp, Homo sapien
ccacagcgccatcccggacaaaatt

SEQ ID NO: 4498395 - DNA, 25 bp, Homo sapien
tcagaggaaggccagtttctaggcc

SEQ ID NO: 4498396 - DNA, 25 bp, Homo sapien
gaggaaggccagtttctaggccact

SEQ ID NO: 4498397 - DNA, 25 bp, Homo sapien
ggccagtttctaggccactgggcca

SEQ ID NO: 4498398 - DNA, 25 bp, Homo sapien
ctgcgaggcccagtgctcagaggaa

SEQ ID NO: 4498399 - DNA, 25 bp, Homo sapien
cgtagaacagaatgggctgagatga

SEQ ID NO: 4498400 - DNA, 25 bp, Homo sapien
ccagggttgtagctgtgctcttgca

SEQ ID NO: 4498401 - DNA, 25 bp, Homo sapien
ccagatgttgagtgtcgacagcttc

SEQ ID NO: 4498402 - DNA, 25 bp, Homo sapien
ttcggtagttgtggcgtagaacaga

SEQ ID NO: 4498403 - DNA, 25 bp, Homo sapien
tcaaaacaggcacatgtacctccat

SEQ ID NO: 4498404 - DNA, 25 bp, Homo sapien
ctctagcagccagggcttcaacttg

SEQ ID NO: 4498405 - DNA, 25 bp, Homo sapien
ccaaggatttcaaaacaggcacatg

SEQ ID NO: 4498406 - DNA, 25 bp, Homo sapien
cagcaagatgtcaaaaccaaggatt

SEQ ID NO: 4498407 - DNA, 25 bp, Homo sapien
tcttgatcaaggcatgagtccgtgg

SEQ ID NO: 4498408 - DNA, 25 bp, Homo sapien
gattctcgtggctgtcggtagcact

SEQ ID NO: 4498409 - DNA, 25 bp, Homo sapien
gacaagggtcatagcatcacagaga

SEQ ID NO: 4498410 - DNA, 25 bp, Homo sapien
tggaaaagccgttccttgactcgcc

SEQ ID NO: 4498411 - DNA, 25 bp, Homo sapien
gaactaaacacatgccagacaccta

SEQ ID NO: 4498412 - DNA, 25 bp, Homo sapien
agaactaaacacatgccagacacct

SEQ ID NO: 4498413 - DNA, 25 bp, Homo sapien
ggacttttactctcaggaataatga

SEQ ID NO: 4498414 - DNA, 25 bp, Homo sapien
cacattcttcatctaaaggaggact

SEQ ID NO: 4498415 - DNA, 25 bp, Homo sapien
gccacatgggatgactcagtttttt

SEQ ID NO: 4498416 - DNA, 25 bp, Homo sapien
tgccacatgggatgactcagttttt

SEQ ID NO: 4498417 - DNA, 25 bp, Homo sapien
cacatgggatgactcagttttttct

SEQ ID NO: 4498418 - DNA, 25 bp, Homo sapien
catgggatgactcagttttttcttt

SEQ ID NO: 4498419 - DNA, 25 bp, Homo sapien
aagcgggcatacttctctgtgtcag

SEQ ID NO: 4498420 - DNA, 25 bp, Homo sapien
agggagccattgtgcttgaagaagc

SEQ ID NO: 4498421 - DNA, 25 bp, Homo sapien
aatcctcatatcgttcctggtccag

SEQ ID NO: 4498422 - DNA, 25 bp, Homo sapien
aggcccagggtagatccgccggtat

SEQ ID NO: 4498423 - DNA, 25 bp, Homo sapien
tcctgtaagccaagtgggtggaaag

SEQ ID NO: 4498424 - DNA, 25 bp, Homo sapien
tctttctcccagttgcggttcctgt

SEQ ID NO: 4498425 - DNA, 25 bp, Homo sapien
taaggcggatctcctctagttgctg

SEQ ID NO: 4498426 - DNA, 25 bp, Homo sapien
tttgcctcttagtgcccgaggtctc

SEQ ID NO: 4498427 - DNA, 25 bp, Homo sapien
tccacaatttcttgaggcctcatgg

SEQ ID NO: 4498428 - DNA, 25 bp, Homo sapien
atttcttgaggcctcatggtgtcca

SEQ ID NO: 4498429 - DNA, 25 bp, Homo sapien
tctacaatacccaggcttcggatga

SEQ ID NO: 4498430 - DNA, 25 bp, Homo sapien
tgctgcagacgggtgagctgctcta

SEQ ID NO: 4498431 - DNA, 25 bp, Homo sapien
tgttgagaccaacaccatgtcctgg

SEQ ID NO: 4498432 - DNA, 25 bp, Homo sapien
ggaatatagagagcaagtttcctgt

SEQ ID NO: 4498433 - DNA, 25 bp, Homo sapien
aaggtccagctagcgcactctgctt

SEQ ID NO: 4498434 - DNA, 25 bp, Homo sapien
gcaaaaggaatcaacagaccctctc

SEQ ID NO: 4498435 - DNA, 25 bp, Homo sapien
cattagagctggggcactggcagtg

SEQ ID NO: 4498436 - DNA, 25 bp, Homo sapien
tcccattagagctggggcactggca

SEQ ID NO: 4498437 - DNA, 25 bp, Homo sapien
tatctcccattagagctggggcact

SEQ ID NO: 4498438 - DNA, 25 bp, Homo sapien
ttatctcccattagagctggggcac

SEQ ID NO: 4498439 - DNA, 25 bp, Homo sapien
tctaggctagaggagaagagcagcc

SEQ ID NO: 4498440 - DNA, 25 bp, Homo sapien
aaaaatctcttctaggccgcggcca

SEQ ID NO: 4498441 - DNA, 25 bp, Homo sapien
acaggtttgctaccagcccagggaa

SEQ ID NO: 4498442 - DNA, 25 bp, Homo sapien
cactatttaaccagatactcctttg

SEQ ID NO: 4498443 - DNA, 25 bp, Homo sapien
cagtaggaccagactcatagatttc

SEQ ID NO: 4498444 - DNA, 25 bp, Homo sapien
cagcccctcttaggagcaccagtag

SEQ ID NO: 4498445 - DNA, 25 bp, Homo sapien
catagatttcagttcttgactgccc

SEQ ID NO: 4498446 - DNA, 25 bp, Homo sapien
tgcaggaaatgaggagcgccctgct

SEQ ID NO: 4498447 - DNA, 25 bp, Homo sapien
catgtgggattgcagcattcatgct

SEQ ID NO: 4498448 - DNA, 25 bp, Homo sapien
agcattcatgcttggcagtgcccct

SEQ ID NO: 4498449 - DNA, 25 bp, Homo sapien
catgcttggcagtgcccctaagatc

SEQ ID NO: 4498450 - DNA, 25 bp, Homo sapien
aacatgtgggattgcagcattcatg

SEQ ID NO: 4498451 - DNA, 25 bp, Homo sapien
tctggcactggaaaaatagcacctc

SEQ ID NO: 4498452 - DNA, 25 bp, Homo sapien
ctcctgtccagttgaagttcttggg

SEQ ID NO: 4498453 - DNA, 25 bp, Homo sapien
ttcttcattgacaatgaacaggagt

SEQ ID NO: 4498454 - DNA, 25 bp, Homo sapien
ttcattgacaatgaacaggagttga

SEQ ID NO: 4498455 - DNA, 25 bp, Homo sapien
ggatttacatatgtcaaaatgacca

SEQ ID NO: 4498456 - DNA, 25 bp, Homo sapien
caagctctatgcttgctagtgggat

SEQ ID NO: 4498457 - DNA, 25 bp, Homo sapien
tattatattttaggggcatccaagc

SEQ ID NO: 4498458 - DNA, 25 bp, Homo sapien
gctagtgggatttacatatgtcaaa

SEQ ID NO: 4498459 - DNA, 25 bp, Homo sapien
tgttcagagtttaccatggagggca

SEQ ID NO: 4498460 - DNA, 25 bp, Homo sapien
tgctctggaacgctgcagcatgggt

SEQ ID NO: 4498461 - DNA, 25 bp, Homo sapien
gatcctgccaggactcggtttatgg

SEQ ID NO: 4498462 - DNA, 25 bp, Homo sapien
tttccggttgcagaaaatagccctg

SEQ ID NO: 4498463 - DNA, 25 bp, Homo sapien
caaagtggaacttggtggcagtcat

SEQ ID NO: 4498464 - DNA, 25 bp, Homo sapien
tcaaagtggaacttggtggcagtca

SEQ ID NO: 4498465 - DNA, 25 bp, Homo sapien
ttcaaagtggaacttggtggcagtc

SEQ ID NO: 4498466 - DNA, 25 bp, Homo sapien
aagtggaacttggtggcagtcattc

SEQ ID NO: 4498467 - DNA, 25 bp, Homo sapien
caggctaaggcttgatgagcagaaa

SEQ ID NO: 4498468 - DNA, 25 bp, Homo sapien
gccttggcgcctcttcatcttctag

SEQ ID NO: 4498469 - DNA, 25 bp, Homo sapien
tcttctagtctttaccgatccccaa

SEQ ID NO: 4498470 - DNA, 25 bp, Homo sapien
catcacctagcgataaacccaggct

SEQ ID NO: 4498471 - DNA, 25 bp, Homo sapien
tgtctccgccacctcggtgggcagg

SEQ ID NO: 4498472 - DNA, 25 bp, Homo sapien
tcggcagtcttctgacggcgacagc

SEQ ID NO: 4498473 - DNA, 25 bp, Homo sapien
ttctgacggcgacagcccagtgcct

SEQ ID NO: 4498474 - DNA, 25 bp, Homo sapien
tgggcactcggcttctctgggaaag

SEQ ID NO: 4498475 - DNA, 25 bp, Homo sapien
aaccagccttcagcagtcggctacg

SEQ ID NO: 4498476 - DNA, 25 bp, Homo sapien
gccttcagcagtcggctacgaaaca

SEQ ID NO: 4498477 - DNA, 25 bp, Homo sapien
cagccttcagcagtcggctacgaaa

SEQ ID NO: 4498478 - DNA, 25 bp, Homo sapien
ccagccttcagcagtcggctacgaa

SEQ ID NO: 4498479 - DNA, 25 bp, Homo sapien
cacagcgagtgacggcggcgcaaac

SEQ ID NO: 4498480 - DNA, 25 bp, Homo sapien
gtcgcgaacccacagcgagtgacgg

SEQ ID NO: 4498481 - DNA, 25 bp, Homo sapien
tccggctcccggccaatagggcctg

SEQ ID NO: 4498482 - DNA, 25 bp, Homo sapien
ccgggtcgcgaacccacagcgagtg

SEQ ID NO: 4498483 - DNA, 25 bp, Homo sapien
gctgcgcccctaacaacgggtaaga

SEQ ID NO: 4498484 - DNA, 25 bp, Homo sapien
cgtcactaatgaagggaccagtggt

SEQ ID NO: 4498485 - DNA, 25 bp, Homo sapien
ggagctgaacacctgacgctgcgcc

SEQ ID NO: 4498486 - DNA, 25 bp, Homo sapien
aacaagggccgctgcgcaagcagcg

SEQ ID NO: 4498487 - DNA, 25 bp, Homo sapien
gctgctccgtacacccagaaagcta

SEQ ID NO: 4498488 - DNA, 25 bp, Homo sapien
acacctagaacaataactgcctgta

SEQ ID NO: 4498489 - DNA, 25 bp, Homo sapien
catgttgccggcttagagctgctcc

SEQ ID NO: 4498490 - DNA, 25 bp, Homo sapien
gcctgtaagcatgccgaactctcta

SEQ ID NO: 4498491 - DNA, 25 bp, Homo sapien
ggatgtttgaagagcctcaggctaa

SEQ ID NO: 4498492 - DNA, 25 bp, Homo sapien
cagaagccatgcgtggaagcagaat

SEQ ID NO: 4498493 - DNA, 25 bp, Homo sapien
tcaggctaaatcatggagcgcccag

SEQ ID NO: 4498494 - DNA, 25 bp, Homo sapien
gaagcagaatggatgtttgaagagc

SEQ ID NO: 4498495 - DNA, 25 bp, Homo sapien
ttgcctccgaattttctggaatcgg

SEQ ID NO: 4498496 - DNA, 25 bp, Homo sapien
tgcttgtttctgtcgtttcagggtg

SEQ ID NO: 4498497 - DNA, 25 bp, Homo sapien
tctggaatcggattgcttgtttctg

SEQ ID NO: 4498498 - DNA, 25 bp, Homo sapien
tccgaattttctggaatcggattgc

SEQ ID NO: 4498499 - DNA, 25 bp, Homo sapien
catggcttcccacgtcagggtcctg

SEQ ID NO: 4498500 - DNA, 25 bp, Homo sapien
tgggcggggcaccaggcgcctccat

SEQ ID NO: 4498501 - DNA, 25 bp, Homo sapien
ggcttcccacgtcagggtcctgggc

SEQ ID NO: 4498502 - DNA, 25 bp, Homo sapien
gctccatggcttcccacgtcagggt

SEQ ID NO: 4498503 - DNA, 25 bp, Homo sapien
tgtaccttaggttgggaacgtcaca

SEQ ID NO: 4498504 - DNA, 25 bp, Homo sapien
cctatcagaacatctaactcgcaat

SEQ ID NO: 4498505 - DNA, 25 bp, Homo sapien
gagcaggtttgcaagttgtgaagaa

SEQ ID NO: 4498506 - DNA, 25 bp, Homo sapien
ttgcaagttgtgaagaagtctccta

SEQ ID NO: 4498507 - DNA, 25 bp, Homo sapien
tatcagaacatctaactcgcaatac

SEQ ID NO: 4498508 - DNA, 25 bp, Homo sapien
ccttcagccaacctgggaactgacc

SEQ ID NO: 4498509 - DNA, 25 bp, Homo sapien
cagccaacctgggaactgaccagga

SEQ ID NO: 4498510 - DNA, 25 bp, Homo sapien
cttcagccaacctgggaactgacca

SEQ ID NO: 4498511 - DNA, 25 bp, Homo sapien
ttcagccaacctgggaactgaccag

SEQ ID NO: 4498512 - DNA, 25 bp, Homo sapien
ctgtgatttgggtctttagatgagg

SEQ ID NO: 4498513 - DNA, 25 bp, Homo sapien
accacttggcaacgcaccactgcca

SEQ ID NO: 4498514 - DNA, 25 bp, Homo sapien
ctgaccacttggcaacgcaccactg

SEQ ID NO: 4498515 - DNA, 25 bp, Homo sapien
ttctgaccacttggcaacgcaccac

SEQ ID NO: 4498516 - DNA, 25 bp, Homo sapien
acttggcaacgcaccactgccagtt

SEQ ID NO: 4498517 - DNA, 25 bp, Homo sapien
gtacaggaagttcccgttgctgtca

SEQ ID NO: 4498518 - DNA, 25 bp, Homo sapien
caaattctgtacaggaagttcccgt

SEQ ID NO: 4498519 - DNA, 25 bp, Homo sapien
cccgttgctgtcaaagaactctcgg

SEQ ID NO: 4498520 - DNA, 25 bp, Homo sapien
gttgctgtcaaagaactctcggccc

SEQ ID NO: 4498521 - DNA, 25 bp, Homo sapien
tgcccagctgtgtttcacgaggcat

SEQ ID NO: 4498522 - DNA, 25 bp, Homo sapien
aatacttgcccagctgtgtttcacg

SEQ ID NO: 4498523 - DNA, 25 bp, Homo sapien
cagctgtgtttcacgaggcatctcc

SEQ ID NO: 4498524 - DNA, 25 bp, Homo sapien
tccaggctgttccatatacattaat

SEQ ID NO: 4498525 - DNA, 25 bp, Homo sapien
gcctaagcaagaagagtgagtactg

SEQ ID NO: 4498526 - DNA, 25 bp, Homo sapien
gtgagtactgaaggtctacagaggt

SEQ ID NO: 4498527 - DNA, 25 bp, Homo sapien
ccaaggtggcttatccatatgcaga

SEQ ID NO: 4498528 - DNA, 25 bp, Homo sapien
gcaacacgggatggctttcaacaca

SEQ ID NO: 4498529 - DNA, 25 bp, Homo sapien
caattgactaagttgtccccaaaat

SEQ ID NO: 4498530 - DNA, 25 bp, Homo sapien
aattgactaagttgtccccaaaatg

SEQ ID NO: 4498531 - DNA, 25 bp, Homo sapien
attgactaagttgtccccaaaatgt

SEQ ID NO: 4498532 - DNA, 25 bp, Homo sapien
tgtttactgaccagggatccttcct

SEQ ID NO: 4498533 - DNA, 25 bp, Homo sapien
ttactgaccagggatccttcctttc

SEQ ID NO: 4498534 - DNA, 25 bp, Homo sapien
gcagacagtgccatattcccggaat

SEQ ID NO: 4498535 - DNA, 25 bp, Homo sapien
gccctggattaatgatgagacccga

SEQ ID NO: 4498536 - DNA, 25 bp, Homo sapien
tgagacccgagttaagtcccagcac

SEQ ID NO: 4498537 - DNA, 25 bp, Homo sapien
taatccgggattgcctacaccatgg

SEQ ID NO: 4498538 - DNA, 25 bp, Homo sapien
aattttgcttggcatgtgacagggc

SEQ ID NO: 4498539 - DNA, 25 bp, Homo sapien
tagcccactgcgaaaagggtatggc

SEQ ID NO: 4498540 - DNA, 25 bp, Homo sapien
aaggtcctatctgcccactgttgta

SEQ ID NO: 4498541 - DNA, 25 bp, Homo sapien
tacatgatagtgacagggcagtgac

SEQ ID NO: 4498542 - DNA, 25 bp, Homo sapien
gacgcggtcgctcgactgcagccag

SEQ ID NO: 4498543 - DNA, 25 bp, Homo sapien
cgtctggacgcggtcgctcgactgc

SEQ ID NO: 4498544 - DNA, 25 bp, Homo sapien
cgaggacgtctggacgcggtcgctc

SEQ ID NO: 4498545 - DNA, 25 bp, Homo sapien
tctggacgcggtcgctcgactgcag

SEQ ID NO: 4498546 - DNA, 25 bp, Homo sapien
catcttggcagtggcgattttctcc

SEQ ID NO: 4498547 - DNA, 25 bp, Homo sapien
aaaataagttcgaagtagcctagag

SEQ ID NO: 4498548 - DNA, 25 bp, Homo sapien
cccagaaaagcatggcagcgctgct

SEQ ID NO: 4498549 - DNA, 25 bp, Homo sapien
tacacacaggacgaagaaggagagg

SEQ ID NO: 4498550 - DNA, 25 bp, Homo sapien
tactaaccacggcaacaggtttgga

SEQ ID NO: 4498551 - DNA, 25 bp, Homo sapien
gatacatctgaagtttagaaaagca

SEQ ID NO: 4498552 - DNA, 25 bp, Homo sapien
gagtcaacatgaagcttagcaagaa

SEQ ID NO: 4498553 - DNA, 25 bp, Homo sapien
caggtttggaccacaaaacaatact

SEQ ID NO: 4498554 - DNA, 25 bp, Homo sapien
tatattcaccatacatgtaagaaag

SEQ ID NO: 4498555 - DNA, 25 bp, Homo sapien
atattcaccatacatgtaagaaaga

SEQ ID NO: 4498556 - DNA, 25 bp, Homo sapien
tgtaaagatatttattgtcaaaata

SEQ ID NO: 4498557 - DNA, 25 bp, Homo sapien
tattcaccatacatgtaagaaagaa

SEQ ID NO: 4498558 - DNA, 25 bp, Homo sapien
gcctttgattccagctgcagcatat

SEQ ID NO: 4498559 - DNA, 25 bp, Homo sapien
gttttacaatggaccacagatatgg

SEQ ID NO: 4498560 - DNA, 25 bp, Homo sapien
aaagcaagggtactttgaccccatg

SEQ ID NO: 4498561 - DNA, 25 bp, Homo sapien
tggagtcaacgtatcagcggaaagc

SEQ ID NO: 4498562 - DNA, 25 bp, Homo sapien
cactttactttctatcagatatgga

SEQ ID NO: 4498563 - DNA, 25 bp, Homo sapien
gctttctagtcattagtttcctaag

SEQ ID NO: 4498564 - DNA, 25 bp, Homo sapien
ttctagtcattagtttcctaagatt

SEQ ID NO: 4498565 - DNA, 25 bp, Homo sapien
gcactttactttctatcagatatgg

SEQ ID NO: 4498566 - DNA, 25 bp, Homo sapien
agtataaagtagaggcggtggctca

SEQ ID NO: 4498567 - DNA, 25 bp, Homo sapien
cagccggattacttaaactcaggaa

SEQ ID NO: 4498568 - DNA, 25 bp, Homo sapien
gctgcagtcagtcgagatcaccatg

SEQ ID NO: 4498569 - DNA, 25 bp, Homo sapien
gtcagtcgagatcaccatgccactg

SEQ ID NO: 4498570 - DNA, 25 bp, Homo sapien
tcagaactagctttgtcatcaggag

SEQ ID NO: 4498571 - DNA, 25 bp, Homo sapien
tatcacatgcagtctagagagccgg

SEQ ID NO: 4498572 - DNA, 25 bp, Homo sapien
ggcgaagctgccgtatatgtcaaag

SEQ ID NO: 4498573 - DNA, 25 bp, Homo sapien
tcctgtggcctaaatgaaaccctca

SEQ ID NO: 4498574 - DNA, 25 bp, Homo sapien
ggttgggccacatcagtgaaatccc

SEQ ID NO: 4498575 - DNA, 25 bp, Homo sapien
agggaggcggggttgggccacatca

SEQ ID NO: 4498576 - DNA, 25 bp, Homo sapien
gggttgggccacatcagtgaaatcc

SEQ ID NO: 4498577 - DNA, 25 bp, Homo sapien
tgtggagggaggcggggttgggcca

SEQ ID NO: 4498578 - DNA, 25 bp, Homo sapien
ccatttgccctgtcgtgttttttct

SEQ ID NO: 4498579 - DNA, 25 bp, Homo sapien
caactgcagtgcgctcttgttctcg

SEQ ID NO: 4498580 - DNA, 25 bp, Homo sapien
ctgctccaactgcagtgcgctcttg

SEQ ID NO: 4498581 - DNA, 25 bp, Homo sapien
actgcagtgcgctcttgttctcgtt

SEQ ID NO: 4498582 - DNA, 25 bp, Homo sapien
ttgctgctccaactgcagtgcgctc

SEQ ID NO: 4498583 - DNA, 25 bp, Homo sapien
cagctggtggctggcttccagattc

SEQ ID NO: 4498584 - DNA, 25 bp, Homo sapien
agggcagctggtggctggcttccag

SEQ ID NO: 4498585 - DNA, 25 bp, Homo sapien
gagggcagctggtggctggcttcca

SEQ ID NO: 4498586 - DNA, 25 bp, Homo sapien
ggcagctggtggctggcttccagat

SEQ ID NO: 4498587 - DNA, 25 bp, Homo sapien
gtactggcctcgctgctgctgcaga

SEQ ID NO: 4498588 - DNA, 25 bp, Homo sapien
tgcttcaggtgacccaggtactggc

SEQ ID NO: 4498589 - DNA, 25 bp, Homo sapien
ctgctgcagactctgagcctcttgg

SEQ ID NO: 4498590 - DNA, 25 bp, Homo sapien
gagcctcttggctcttcagctccac

SEQ ID NO: 4498591 - DNA, 25 bp, Homo sapien
ctgctgctgataagtggccacgtac

SEQ ID NO: 4498592 - DNA, 25 bp, Homo sapien
ccaatgagccgggtctgcagcagta

SEQ ID NO: 4498593 - DNA, 25 bp, Homo sapien
ctgcagctggtccaatgagccgggt

SEQ ID NO: 4498594 - DNA, 25 bp, Homo sapien
gcagctggtccaatgagccgggtct

SEQ ID NO: 4498595 - DNA, 25 bp, Homo sapien
gctggtccaatgagccgggtctgca

SEQ ID NO: 4498596 - DNA, 25 bp, Homo sapien
actgggcctgtagttgctggttctg

SEQ ID NO: 4498597 - DNA, 25 bp, Homo sapien
gctcaactgggcctgtagttgctgg

SEQ ID NO: 4498598 - DNA, 25 bp, Homo sapien
ggcctgtagttgctggttctgctgg

SEQ ID NO: 4498599 - DNA, 25 bp, Homo sapien
aactgggcctgtagttgctggttct

SEQ ID NO: 4498600 - DNA, 25 bp, Homo sapien
ccactaccgattggtgcaggaattc

SEQ ID NO: 4498601 - DNA, 25 bp, Homo sapien
actaccgattggtgcaggaattctg

SEQ ID NO: 4498602 - DNA, 25 bp, Homo sapien
acagtcccactaccgattggtgcag

SEQ ID NO: 4498603 - DNA, 25 bp, Homo sapien
gtcccactaccgattggtgcaggaa

SEQ ID NO: 4498604 - DNA, 25 bp, Homo sapien
cggctctccaggtcccctgggatgt

SEQ ID NO: 4498605 - DNA, 25 bp, Homo sapien
tgggctgaggcgcctcctcctccat

SEQ ID NO: 4498606 - DNA, 25 bp, Homo sapien
atgggctgaggcgcctcctcctcca

SEQ ID NO: 4498607 - DNA, 25 bp, Homo sapien
tcccctgggatgttcggcatgggct

SEQ ID NO: 4498608 - DNA, 25 bp, Homo sapien
cggaaggagtgaaagtccacagaaa

SEQ ID NO: 4498609 - DNA, 25 bp, Homo sapien
cccggaaggagtgaaagtccacaga

SEQ ID NO: 4498610 - DNA, 25 bp, Homo sapien
ctcccggaaggagtgaaagtccaca

SEQ ID NO: 4498611 - DNA, 25 bp, Homo sapien
ggctcccggaaggagtgaaagtcca

SEQ ID NO: 4498612 - DNA, 25 bp, Homo sapien
acatcctttgctcctcctgggcact

SEQ ID NO: 4498613 - DNA, 25 bp, Homo sapien
ctgcttctggcttcttctgggacga

SEQ ID NO: 4498614 - DNA, 25 bp, Homo sapien
cacatcctttgctcctcctgggcac

SEQ ID NO: 4498615 - DNA, 25 bp, Homo sapien
ctggggctgctgcttctggcttctt

SEQ ID NO: 4498616 - DNA, 25 bp, Homo sapien
gtgggtccccccacacacagactca

SEQ ID NO: 4498617 - DNA, 25 bp, Homo sapien
ctacaacttctccttggccccctgc

SEQ ID NO: 4498618 - DNA, 25 bp, Homo sapien
cttggccccctgcagggcccggtgg

SEQ ID NO: 4498619 - DNA, 25 bp, Homo sapien
cggtgggtccccccacacacagact

SEQ ID NO: 4498620 - DNA, 25 bp, Homo sapien
tggctcccatatggggtgatgtact

SEQ ID NO: 4498621 - DNA, 25 bp, Homo sapien
cctggctcccatatggggtgatgta

SEQ ID NO: 4498622 - DNA, 25 bp, Homo sapien
ccctggctcccatatggggtgatgt

SEQ ID NO: 4498623 - DNA, 25 bp, Homo sapien
ctcccatatggggtgatgtactttc

SEQ ID NO: 4498624 - DNA, 25 bp, Homo sapien
cttgccatgtccctcattgtggtct

SEQ ID NO: 4498625 - DNA, 25 bp, Homo sapien
aggaacttgccatgtccctcattgt

SEQ ID NO: 4498626 - DNA, 25 bp, Homo sapien
aacttgccatgtccctcattgtggt

SEQ ID NO: 4498627 - DNA, 25 bp, Homo sapien
gaacttgccatgtccctcattgtgg

SEQ ID NO: 4498628 - DNA, 25 bp, Homo sapien
actggccatcctgcttgtcagcaca

SEQ ID NO: 4498629 - DNA, 25 bp, Homo sapien
tggccatcctgcttgtcagcacaca

SEQ ID NO: 4498630 - DNA, 25 bp, Homo sapien
ggccatcctgcttgtcagcacacac

SEQ ID NO: 4498631 - DNA, 25 bp, Homo sapien
ctactggccatcctgcttgtcagca

SEQ ID NO: 4498632 - DNA, 25 bp, Homo sapien
aggcatgcagagattgctgcccaag

SEQ ID NO: 4498633 - DNA, 25 bp, Homo sapien
aaggcatgcagagattgctgcccaa

SEQ ID NO: 4498634 - DNA, 25 bp, Homo sapien
gggatcggagcgccatgcgagcctc

SEQ ID NO: 4498635 - DNA, 25 bp, Homo sapien
tcggagcgccatgcgagcctcccct

SEQ ID NO: 4498636 - DNA, 25 bp, Homo sapien
aagaattcctaaattggtaagtcat

SEQ ID NO: 4498637 - DNA, 25 bp, Homo sapien
cctaaattggtaagtcattataaga

SEQ ID NO: 4498638 - DNA, 25 bp, Homo sapien
ttcctaaattggtaagtcattataa

SEQ ID NO: 4498639 - DNA, 25 bp, Homo sapien
gaattcctaaattggtaagtcatta

SEQ ID NO: 4498640 - DNA, 25 bp, Homo sapien
ggaagtcagtgcccgtgggtgctgg

SEQ ID NO: 4498641 - DNA, 25 bp, Homo sapien
acatgtcgaacaggccaccaggtgc

SEQ ID NO: 4498642 - DNA, 25 bp, Homo sapien
gcagtggggcggaaaggaagatgcc

SEQ ID NO: 4498643 - DNA, 25 bp, Homo sapien
gagggacagacatgtcgaacaggcc

SEQ ID NO: 4498644 - DNA, 25 bp, Homo sapien
tgtggacaaccagaatgcctcctga

SEQ ID NO: 4498645 - DNA, 25 bp, Homo sapien
catccagtggaggtgtggacaacca

SEQ ID NO: 4498646 - DNA, 25 bp, Homo sapien
gacaaccagaatgcctcctgattaa

SEQ ID NO: 4498647 - DNA, 25 bp, Homo sapien
tggaggtgtggacaaccagaatgcc

SEQ ID NO: 4498648 - DNA, 25 bp, Homo sapien
gctgagagctggtatctcggatacg

SEQ ID NO: 4498649 - DNA, 25 bp, Homo sapien
gagctggtatctcggatacgggtca

SEQ ID NO: 4498650 - DNA, 25 bp, Homo sapien
agagctggtatctcggatacgggtc

SEQ ID NO: 4498651 - DNA, 25 bp, Homo sapien
tgagagctggtatctcggatacggg

SEQ ID NO: 4498652 - DNA, 25 bp, Homo sapien
tttggatgaaccaatgatggaggtc

SEQ ID NO: 4498653 - DNA, 25 bp, Homo sapien
ctgagccttatctgctgggaagtgg

SEQ ID NO: 4498654 - DNA, 25 bp, Homo sapien
ggtcttaggtgggtgcaggtacttc

SEQ ID NO: 4498655 - DNA, 25 bp, Homo sapien
cattggccctgatcataaccagttg

SEQ ID NO: 4498656 - DNA, 25 bp, Homo sapien
gtggccaacacagctgccgccccag

SEQ ID NO: 4498657 - DNA, 25 bp, Homo sapien
ccatgctgcccagtcagaagggcct

SEQ ID NO: 4498658 - DNA, 25 bp, Homo sapien
agctgccgccccagttccatccttc

SEQ ID NO: 4498659 - DNA, 25 bp, Homo sapien
tccagttgtccaggccttgccatct

SEQ ID NO: 4498660 - DNA, 25 bp, Homo sapien
tatggacgtgggatttcggagactc

SEQ ID NO: 4498661 - DNA, 25 bp, Homo sapien
gacttttgaggtcatggcaaccctg

SEQ ID NO: 4498662 - DNA, 25 bp, Homo sapien
tcggagactcctacccaagtgtgca

SEQ ID NO: 4498663 - DNA, 25 bp, Homo sapien
taggaagtgggcataccaagcagaa

SEQ ID NO: 4498664 - DNA, 25 bp, Homo sapien
aagggaagtggtgttcagacatgcc

SEQ ID NO: 4498665 - DNA, 25 bp, Homo sapien
gaagggaagtggtgttcagacatgc

SEQ ID NO: 4498666 - DNA, 25 bp, Homo sapien
gaagtggtgttcagacatgcctcat

SEQ ID NO: 4498667 - DNA, 25 bp, Homo sapien
cactgcagcctcaatgtttggggct

SEQ ID NO: 4498668 - DNA, 25 bp, Homo sapien
gaagtgcaaaggcatgattatggct

SEQ ID NO: 4498669 - DNA, 25 bp, Homo sapien
gcagcctcaatgtttggggctcaaa

SEQ ID NO: 4498670 - DNA, 25 bp, Homo sapien
tcagcccctagagtggctggggcta

SEQ ID NO: 4498671 - DNA, 25 bp, Homo sapien
gttgggtgctaaagggcgtggccga

SEQ ID NO: 4498672 - DNA, 25 bp, Homo sapien
ggaggcgtagaagagccaggaaaaa

SEQ ID NO: 4498673 - DNA, 25 bp, Homo sapien
tgctaaagggcgtggccgagaggag

SEQ ID NO: 4498674 - DNA, 25 bp, Homo sapien
ccgagaggaggcgtagaagagccag

SEQ ID NO: 4498675 - DNA, 25 bp, Homo sapien
gaaggcatcttcagacccctcggta

SEQ ID NO: 4498676 - DNA, 25 bp, Homo sapien
ggcatcttcagacccctcggtaagt

SEQ ID NO: 4498677 - DNA, 25 bp, Homo sapien
cattttgccattaaggagatcatga

SEQ ID NO: 4498678 - DNA, 25 bp, Homo sapien
gtctttctagcattttgccattaag

SEQ ID NO: 4498679 - DNA, 25 bp, Homo sapien
cgcggagcagcctggtgcccaccat

SEQ ID NO: 4498680 - DNA, 25 bp, Homo sapien
acagccagcggccggaaagtaccgc

SEQ ID NO: 4498681 - DNA, 25 bp, Homo sapien
gcccgcaaccccgaggctgtgcctc

SEQ ID NO: 4498682 - DNA, 25 bp, Homo sapien
gtgggactccggcttcgacagccag

SEQ ID NO: 4498683 - DNA, 25 bp, Homo sapien
cccgaccgggattcgtgacagggct

SEQ ID NO: 4498684 - DNA, 25 bp, Homo sapien
tttgagagcccattcttctaactgt

SEQ ID NO: 4498685 - DNA, 25 bp, Homo sapien
ggattctctaagcagtgtccaggta

SEQ ID NO: 4498686 - DNA, 25 bp, Homo sapien
cctttgagagcccattcttctaact

SEQ ID NO: 4498687 - DNA, 25 bp, Homo sapien
attctctaagcagtgtccaggtaac

SEQ ID NO: 4498688 - DNA, 25 bp, Homo sapien
ttggagtggtaggacccatggctct

SEQ ID NO: 4498689 - DNA, 25 bp, Homo sapien
tgtggctttccctcgggatcttcct

SEQ ID NO: 4498690 - DNA, 25 bp, Homo sapien
gatcttcctcgcctcaaagttttgg

SEQ ID NO: 4498691 - DNA, 25 bp, Homo sapien
tccggctgggagattacactaggcc

SEQ ID NO: 4498692 - DNA, 25 bp, Homo sapien
tgtgacattccaggcacgcgtaggg

SEQ ID NO: 4498693 - DNA, 25 bp, Homo sapien
cctgtgaaaaggactccagctggcc

SEQ ID NO: 4498694 - DNA, 25 bp, Homo sapien
cactcaatgcacgtatagggcctct

SEQ ID NO: 4498695 - DNA, 25 bp, Homo sapien
cattatgaggtgtggcttccgccca

SEQ ID NO: 4498696 - DNA, 25 bp, Homo sapien
tgtgcaagggagcagctgaacacca

SEQ ID NO: 4498697 - DNA, 25 bp, Homo sapien
tagatcagggcccaaattgagccac

SEQ ID NO: 4498698 - DNA, 25 bp, Homo sapien
gcctggcgggcatcaactattaaac

SEQ ID NO: 4498699 - DNA, 25 bp, Homo sapien
cacatttccctaagagtcagtcaca

SEQ ID NO: 4498700 - DNA, 25 bp, Homo sapien
gcaaacctctggtagatacactgcc

SEQ ID NO: 4498701 - DNA, 25 bp, Homo sapien
tatagtcctctaccaggtccctctg

SEQ ID NO: 4498702 - DNA, 25 bp, Homo sapien
caaattaagcgtcagggccaggact

SEQ ID NO: 4498703 - DNA, 25 bp, Homo sapien
gcataacctggatggccctaaaagg

SEQ ID NO: 4498704 - DNA, 25 bp, Homo sapien
tagcattgaaatattccctgctcat

SEQ ID NO: 4498705 - DNA, 25 bp, Homo sapien
tgacctacacacagcggccaaattg

SEQ ID NO: 4498706 - DNA, 25 bp, Homo sapien
tatctttttgttgtggtgcctgccc

SEQ ID NO: 4498707 - DNA, 25 bp, Homo sapien
taacgactcgctggagacctactgc

SEQ ID NO: 4498708 - DNA, 25 bp, Homo sapien
ttgaccttctcaagtgcggatcgcg

SEQ ID NO: 4498709 - DNA, 25 bp, Homo sapien
cacacctggcctctaccaaaaattt

SEQ ID NO: 4498710 - DNA, 25 bp, Homo sapien
ttaaaaggccgggcttggtggcatg

SEQ ID NO: 4498711 - DNA, 25 bp, Homo sapien
ctgtagtcctagctgttactcagga

SEQ ID NO: 4498712 - DNA, 25 bp, Homo sapien
gtagtcctagctgttactcaggagg

SEQ ID NO: 4498713 - DNA, 25 bp, Homo sapien
taccaacttgctcggaggtgcagcc

SEQ ID NO: 4498714 - DNA, 25 bp, Homo sapien
tgtcttagaggacacagtccgagct

SEQ ID NO: 4498715 - DNA, 25 bp, Homo sapien
tggacttttgctcacacttcgggaa

SEQ ID NO: 4498716 - DNA, 25 bp, Homo sapien
gaaaacctgtgtactcggcagccaa

SEQ ID NO: 4498717 - DNA, 25 bp, Homo sapien
ttgagaaaggcagccgcaatggcaa

SEQ ID NO: 4498718 - DNA, 25 bp, Homo sapien
gatcctggtggagtacatggtatag

SEQ ID NO: 4498719 - DNA, 25 bp, Homo sapien
acccgctccttaggccaggcattct

SEQ ID NO: 4498720 - DNA, 25 bp, Homo sapien
gatttatagctaggcccccgatggt

SEQ ID NO: 4498721 - DNA, 25 bp, Homo sapien
gcggacgagcccgagtctctgctga

SEQ ID NO: 4498722 - DNA, 25 bp, Homo sapien
gctgaggaagccgtgaaaccttgga

SEQ ID NO: 4498723 - DNA, 25 bp, Homo sapien
gcggacggcggtagctacagctcct

SEQ ID NO: 4498724 - DNA, 25 bp, Homo sapien
gctcctgccaagtgcgcgggcttgc

SEQ ID NO: 4498725 - DNA, 25 bp, Homo sapien
acgcccagcccgtcaacctcgtctg

SEQ ID NO: 4498726 - DNA, 25 bp, Homo sapien
cccagcccgtcaacctcgtctgcgg

SEQ ID NO: 4498727 - DNA, 25 bp, Homo sapien
cgtcaacctcgtctgcggcggacat

SEQ ID NO: 4498728 - DNA, 25 bp, Homo sapien
agcccgtcaacctcgtctgcggcgg

SEQ ID NO: 4498729 - DNA, 25 bp, Homo sapien
gccacctgtcaaactttctacacag

SEQ ID NO: 4498730 - DNA, 25 bp, Homo sapien
cacctgtcaaactttctacacagca

SEQ ID NO: 4498731 - DNA, 25 bp, Homo sapien
ctggccacctgtcaaactttctaca

SEQ ID NO: 4498732 - DNA, 25 bp, Homo sapien
gcctggccacctgtcaaactttcta

SEQ ID NO: 4498733 - DNA, 25 bp, Homo sapien
ataagccacgttctgacgtctcctt

SEQ ID NO: 4498734 - DNA, 25 bp, Homo sapien
caaatgacaaaggtactcataagcc

SEQ ID NO: 4498735 - DNA, 25 bp, Homo sapien
agccacgttctgacgtctcctttca

SEQ ID NO: 4498736 - DNA, 25 bp, Homo sapien
ccaaatgacaaaggtactcataagc

SEQ ID NO: 4498737 - DNA, 25 bp, Homo sapien
tcacactattatcagttcccttctc

SEQ ID NO: 4498738 - DNA, 25 bp, Homo sapien
gtattcacactattatcagttccct

SEQ ID NO: 4498739 - DNA, 25 bp, Homo sapien
tcagttcccttctcttaatcttctc

SEQ ID NO: 4498740 - DNA, 25 bp, Homo sapien
tatttgtattcacactattatcagt

SEQ ID NO: 4498741 - DNA, 25 bp, Homo sapien
tgccaaacagatggacctacaccaa

SEQ ID NO: 4498742 - DNA, 25 bp, Homo sapien
gttggtaacgcccaaaacatgcaca

SEQ ID NO: 4498743 - DNA, 25 bp, Homo sapien
tgctgactctgaatattgccaaaca

SEQ ID NO: 4498744 - DNA, 25 bp, Homo sapien
acttcacaaagaatgcagaggatgc

SEQ ID NO: 4498745 - DNA, 25 bp, Homo sapien
gacactctaaaattaagaccacaag

SEQ ID NO: 4498746 - DNA, 25 bp, Homo sapien
gctcacttatagaatacatgatcta

SEQ ID NO: 4498747 - DNA, 25 bp, Homo sapien
ttttccaccaaagctcacttataga

SEQ ID NO: 4498748 - DNA, 25 bp, Homo sapien
tcattatccctcacttgacttttcc

SEQ ID NO: 4498749 - DNA, 25 bp, Homo sapien
tcatctgtacaaagagagcttgggt

SEQ ID NO: 4498750 - DNA, 25 bp, Homo sapien
cacttcttatggtggagcctgtcca

SEQ ID NO: 4498751 - DNA, 25 bp, Homo sapien
ggtaaaaagctttcggcagccacat

SEQ ID NO: 4498752 - DNA, 25 bp, Homo sapien
gctatggtcctttagtcacactggg

SEQ ID NO: 4498753 - DNA, 25 bp, Homo sapien
ttcatggccacatctatttcaacac

SEQ ID NO: 4498754 - DNA, 25 bp, Homo sapien
caacagaagccaagccctaggctgg

SEQ ID NO: 4498755 - DNA, 25 bp, Homo sapien
caataatcccaagcaatagtctgac

SEQ ID NO: 4498756 - DNA, 25 bp, Homo sapien
gaaatagagcttttagacaggcctc

SEQ ID NO: 4498757 - DNA, 25 bp, Homo sapien
acagttcttagagcccagtgtgtct

SEQ ID NO: 4498758 - DNA, 25 bp, Homo sapien
gcaacacgggttttcccaaagcagc

SEQ ID NO: 4498759 - DNA, 25 bp, Homo sapien
tccattgtctagttctgttcccctg

SEQ ID NO: 4498760 - DNA, 25 bp, Homo sapien
gctcagacaccgtttggaaatttct

SEQ ID NO: 4498761 - DNA, 25 bp, Homo sapien
cctcctattaagcagatttccattg

SEQ ID NO: 4498762 - DNA, 25 bp, Homo sapien
gaaagactctactgaaagacacaca

SEQ ID NO: 4498763 - DNA, 25 bp, Homo sapien
tgcttagggaccgtattactcctgg

SEQ ID NO: 4498764 - DNA, 25 bp, Homo sapien
ccttgaaagggaaacgcctgaccat

SEQ ID NO: 4498765 - DNA, 25 bp, Homo sapien
tgtcagcttatcctgaaaaacccag

SEQ ID NO: 4498766 - DNA, 25 bp, Homo sapien
agttcctccaggaacagctcctctg

SEQ ID NO: 4498767 - DNA, 25 bp, Homo sapien
acttcaagccactgagattcagttc

SEQ ID NO: 4498768 - DNA, 25 bp, Homo sapien
cacttcaagccactgagattcagtt

SEQ ID NO: 4498769 - DNA, 25 bp, Homo sapien
tccaggaacagctcctctggtacca

SEQ ID NO: 4498770 - DNA, 25 bp, Homo sapien
gcttgaaatgtcaacgggacgtcca

SEQ ID NO: 4498771 - DNA, 25 bp, Homo sapien
tgttgtccagtgtgtcgagaagccc

SEQ ID NO: 4498772 - DNA, 25 bp, Homo sapien
catcttgtaggcagttggaaacaca

SEQ ID NO: 4498773 - DNA, 25 bp, Homo sapien
tcacacaatggcaatcacggaagga

SEQ ID NO: 4498774 - DNA, 25 bp, Homo sapien
ctgaaaagccaaaaggggttgagct

SEQ ID NO: 4498775 - DNA, 25 bp, Homo sapien
tgaaaagccaaaaggggttgagctc

SEQ ID NO: 4498776 - DNA, 25 bp, Homo sapien
gaggcagatcttcccctaggcatgc

SEQ ID NO: 4498777 - DNA, 25 bp, Homo sapien
tggcaaggtagaccccattcctaag

SEQ ID NO: 4498778 - DNA, 25 bp, Homo sapien
cactactttgggagagaagaagttc

SEQ ID NO: 4498779 - DNA, 25 bp, Homo sapien
tatctggtctgttctcgatcataga

SEQ ID NO: 4498780 - DNA, 25 bp, Homo sapien
agtgtgtctaaagtggaggccagtc

SEQ ID NO: 4498781 - DNA, 25 bp, Homo sapien
gaatcacattatcagtgtgtctaaa

SEQ ID NO: 4498782 - DNA, 25 bp, Homo sapien
catccatggcattcaaccactgaat

SEQ ID NO: 4498783 - DNA, 25 bp, Homo sapien
tcaaccactgaatcacattatcagt

SEQ ID NO: 4498784 - DNA, 25 bp, Homo sapien
ggtagaatgagaacaggttgtttga

SEQ ID NO: 4498785 - DNA, 25 bp, Homo sapien
gagggttatgccacaacagctggaa

SEQ ID NO: 4498786 - DNA, 25 bp, Homo sapien
gcctaaactattatctcaggtaagt

SEQ ID NO: 4498787 - DNA, 25 bp, Homo sapien
aagattctgagaataattttacagg

SEQ ID NO: 4498788 - DNA, 25 bp, Homo sapien
gaagcggaattcttacgtcaaagga

SEQ ID NO: 4498789 - DNA, 25 bp, Homo sapien
tctctaagagtgaccatacagtgtg

SEQ ID NO: 4498790 - DNA, 25 bp, Homo sapien
tgcagccatgaccaaaaacagatcc

SEQ ID NO: 4498791 - DNA, 25 bp, Homo sapien
cctgagcagaacacccagaagatgt

SEQ ID NO: 4498792 - DNA, 25 bp, Homo sapien
gccagggtcatggaagctctacatt

SEQ ID NO: 4498793 - DNA, 25 bp, Homo sapien
tagactgggaatagccttgaacttc

SEQ ID NO: 4498794 - DNA, 25 bp, Homo sapien
tataagccacacgaaggcagggcta

SEQ ID NO: 4498795 - DNA, 25 bp, Homo sapien
cagtggttcggagaagcaaaagact

SEQ ID NO: 4498796 - DNA, 25 bp, Homo sapien
tgcctagatggagaaacaactcaac

SEQ ID NO: 4498797 - DNA, 25 bp, Homo sapien
taagtgctttagtttgtgcaacctg

SEQ ID NO: 4498798 - DNA, 25 bp, Homo sapien
tgtgcaacctgctacatttagacat

SEQ ID NO: 4498799 - DNA, 25 bp, Homo sapien
gactgatctgagtatgaggctttca

SEQ ID NO: 4498800 - DNA, 25 bp, Homo sapien
ctgagtgcatggatacagtagatac

SEQ ID NO: 4498801 - DNA, 25 bp, Homo sapien
tacagtagatacatcttggcatgtt

SEQ ID NO: 4498802 - DNA, 25 bp, Homo sapien
atcatagatatctgtagtttctggg

SEQ ID NO: 4498803 - DNA, 25 bp, Homo sapien
gcatgttctttcgatcatagatatc

SEQ ID NO: 4498804 - DNA, 25 bp, Homo sapien
gaatttatacatccacagaagctaa

SEQ ID NO: 4498805 - DNA, 25 bp, Homo sapien
tctcagagaagtgcaagtataagtc

SEQ ID NO: 4498806 - DNA, 25 bp, Homo sapien
gactcaagatggatatataaagcgc

SEQ ID NO: 4498807 - DNA, 25 bp, Homo sapien
tataaagcgcctgtctcagaagatt

SEQ ID NO: 4498808 - DNA, 25 bp, Homo sapien
tgggagaaatcagtaggcacaaatt

SEQ ID NO: 4498809 - DNA, 25 bp, Homo sapien
aagtcccggttctggcacaaactca

SEQ ID NO: 4498810 - DNA, 25 bp, Homo sapien
cataacacaatgcaaagagcactgg

SEQ ID NO: 4498811 - DNA, 25 bp, Homo sapien
gccttcctgtaatcaataagtttta

SEQ ID NO: 4498812 - DNA, 25 bp, Homo sapien
gtgaagtcaacctttccatataggt

SEQ ID NO: 4498813 - DNA, 25 bp, Homo sapien
atataggtcttgaatctgaggggcc

SEQ ID NO: 4498814 - DNA, 25 bp, Homo sapien
caggcctagcttgaacaggtacaaa

SEQ ID NO: 4498815 - DNA, 25 bp, Homo sapien
cctttccatataggtcttgaatctg

SEQ ID NO: 4498816 - DNA, 25 bp, Homo sapien
taaatggaacagctttaacgtgagc

SEQ ID NO: 4498817 - DNA, 25 bp, Homo sapien
aggtctggtgaataacttccctgga

SEQ ID NO: 4498818 - DNA, 25 bp, Homo sapien
catattcctcaactatgcaatggga

SEQ ID NO: 4498819 - DNA, 25 bp, Homo sapien
ctataaagtgagaaggtcctacagg

SEQ ID NO: 4498820 - DNA, 25 bp, Homo sapien
tggatgccatacttctccaactcag

SEQ ID NO: 4498821 - DNA, 25 bp, Homo sapien
aggcatctggatgccatacttctcc

SEQ ID NO: 4498822 - DNA, 25 bp, Homo sapien
agttcattagccaagatgcccccaa

SEQ ID NO: 4498823 - DNA, 25 bp, Homo sapien
ttcattagccaagatgcccccaatc

SEQ ID NO: 4498824 - DNA, 25 bp, Homo sapien
ggcattcggatttttcaaagctgca

SEQ ID NO: 4498825 - DNA, 25 bp, Homo sapien
tcggctggaattctacggtcaatag

SEQ ID NO: 4498826 - DNA, 25 bp, Homo sapien
gcctggtaaagtatatcctggtaag

SEQ ID NO: 4498827 - DNA, 25 bp, Homo sapien
aagatttacaagcatggcattcgga

SEQ ID NO: 4498828 - DNA, 25 bp, Homo sapien
gaatttcagcttgcgtgagcagctc

SEQ ID NO: 4498829 - DNA, 25 bp, Homo sapien
atattgccttgaatttcagcttgcg

SEQ ID NO: 4498830 - DNA, 25 bp, Homo sapien
gagcagctcctcataaacatctctt

SEQ ID NO: 4498831 - DNA, 25 bp, Homo sapien
ccttgaatttcagcttgcgtgagca

SEQ ID NO: 4498832 - DNA, 25 bp, Homo sapien
gagctgcttcaagtaccagtcgcta

SEQ ID NO: 4498833 - DNA, 25 bp, Homo sapien
gccaggtcgatatttgctaatgcag

SEQ ID NO: 4498834 - DNA, 25 bp, Homo sapien
cagagccctgaacaaggccagtgca

SEQ ID NO: 4498835 - DNA, 25 bp, Homo sapien
ggccagtgcatctccttgttctaaa

SEQ ID NO: 4498836 - DNA, 25 bp, Homo sapien
cagcatccactccagactgcagctc

SEQ ID NO: 4498837 - DNA, 25 bp, Homo sapien
gcagcatccactccagactgcagct

SEQ ID NO: 4498838 - DNA, 25 bp, Homo sapien
gcaacacccttctggattgcagcat

SEQ ID NO: 4498839 - DNA, 25 bp, Homo sapien
ggactttgtcgctgcagggtagcca

SEQ ID NO: 4498840 - DNA, 25 bp, Homo sapien
tcggcggcaaatggatacacctggg

SEQ ID NO: 4498841 - DNA, 25 bp, Homo sapien
ggtagccagctccttctgatagaga

SEQ ID NO: 4498842 - DNA, 25 bp, Homo sapien
ttctccaagacccagggagttataa

SEQ ID NO: 4498843 - DNA, 25 bp, Homo sapien
aacagtgaggaaagacattctccaa

SEQ ID NO: 4498844 - DNA, 25 bp, Homo sapien
gtgaggaaagacattctccaagacc

SEQ ID NO: 4498845 - DNA, 25 bp, Homo sapien
ctccaagacccagggagttataagt

SEQ ID NO: 4498846 - DNA, 25 bp, Homo sapien
tgaactgctcaattgcttccacact

SEQ ID NO: 4498847 - DNA, 25 bp, Homo sapien
tcttcctcaatattggtaagaccag

SEQ ID NO: 4498848 - DNA, 25 bp, Homo sapien
agggccaccgatgacaacatctcca

SEQ ID NO: 4498849 - DNA, 25 bp, Homo sapien
ttgatcagggccaccgatgacaaca

SEQ ID NO: 4498850 - DNA, 25 bp, Homo sapien
cagggttaacagctacgtaatggat

SEQ ID NO: 4498851 - DNA, 25 bp, Homo sapien
gaaccaaacaaaagtatgaccatga

SEQ ID NO: 4498852 - DNA, 25 bp, Homo sapien
gataaagtaataatgcctgcaaaga

SEQ ID NO: 4498853 - DNA, 25 bp, Homo sapien
cctgcaaagaaaatcggagcactga

SEQ ID NO: 4498854 - DNA, 25 bp, Homo sapien
taaaataggcaattggtcccatccc

SEQ ID NO: 4498855 - DNA, 25 bp, Homo sapien
tataagtggtctccctaatccaggg

SEQ ID NO: 4498856 - DNA, 25 bp, Homo sapien
gaactgaatcgtgacaagcctagaa

SEQ ID NO: 4498857 - DNA, 25 bp, Homo sapien
tgatgagggaaaagcgtaaatacgc

SEQ ID NO: 4498858 - DNA, 25 bp, Homo sapien
cagtttcatcaactcatcgagatac

SEQ ID NO: 4498859 - DNA, 25 bp, Homo sapien
aattcattattctctgcatgtgcct

SEQ ID NO: 4498860 - DNA, 25 bp, Homo sapien
ccacgcaagcttggatatcattcca

SEQ ID NO: 4498861 - DNA, 25 bp, Homo sapien
ttcacatggtccacgcaagcttgga

SEQ ID NO: 4498862 - DNA, 25 bp, Homo sapien
ggtgatacacgtcaatgtgccagga

SEQ ID NO: 4498863 - DNA, 25 bp, Homo sapien
tagagtcacgtgataccagcctggc

SEQ ID NO: 4498864 - DNA, 25 bp, Homo sapien
gctggccatgctggaaagatcaacc

SEQ ID NO: 4498865 - DNA, 25 bp, Homo sapien
tctggacacccaaaactcaggtgtg

SEQ ID NO: 4498866 - DNA, 25 bp, Homo sapien
tatagctttcaggtacactggaatg

SEQ ID NO: 4498867 - DNA, 25 bp, Homo sapien
tgagtcacaaaggattcacgaagag

SEQ ID NO: 4498868 - DNA, 25 bp, Homo sapien
tatgaaactggccttactgtatagc

SEQ ID NO: 4498869 - DNA, 25 bp, Homo sapien
taccatccgttaagcagcactgttt

SEQ ID NO: 4498870 - DNA, 25 bp, Homo sapien
tctaatcagcgtgtcttggtaatgc

SEQ ID NO: 4498871 - DNA, 25 bp, Homo sapien
gactccctcaagtttagctgcagga

SEQ ID NO: 4498872 - DNA, 25 bp, Homo sapien
gagtcttttgggcatcaccttcatc

SEQ ID NO: 4498873 - DNA, 25 bp, Homo sapien
gctgcaggaatctgtagggcctgca

SEQ ID NO: 4498874 - DNA, 25 bp, Homo sapien
gattagccccaggtagtcactactg

SEQ ID NO: 4498875 - DNA, 25 bp, Homo sapien
caattttcaagaatgtggctgccat

SEQ ID NO: 4498876 - DNA, 25 bp, Homo sapien
gcctggccgttatcttccaattttc

SEQ ID NO: 4498877 - DNA, 25 bp, Homo sapien
ggaagtagcttatggattagcccca

SEQ ID NO: 4498878 - DNA, 25 bp, Homo sapien
ctcttcctaaattcgttaagacaag

SEQ ID NO: 4498879 - DNA, 25 bp, Homo sapien
ttttaaaggcgcttattggtgacca

SEQ ID NO: 4498880 - DNA, 25 bp, Homo sapien
aaggcgcttattggtgaccatttgc

SEQ ID NO: 4498881 - DNA, 25 bp, Homo sapien
tcctcttcctaaattcgttaagaca

SEQ ID NO: 4498882 - DNA, 25 bp, Homo sapien
tggactgccagattccaccttgaat

SEQ ID NO: 4498883 - DNA, 25 bp, Homo sapien
ttgttggactgccagattccacctt

SEQ ID NO: 4498884 - DNA, 25 bp, Homo sapien
gttggactgccagattccaccttga

SEQ ID NO: 4498885 - DNA, 25 bp, Homo sapien
ggactgccagattccaccttgaatt

SEQ ID NO: 4498886 - DNA, 25 bp, Homo sapien
cagaaataaaacaggtgatacatac

SEQ ID NO: 4498887 - DNA, 25 bp, Homo sapien
ccagcctccaccaaaacagaaataa

SEQ ID NO: 4498888 - DNA, 25 bp, Homo sapien
tcaccccagcctccaccaaaacaga

SEQ ID NO: 4498889 - DNA, 25 bp, Homo sapien
acagaaataaaacaggtgatacata

SEQ ID NO: 4498890 - DNA, 25 bp, Homo sapien
ccacactcagggatgactccataca

SEQ ID NO: 4498891 - DNA, 25 bp, Homo sapien
caacatcaggggagcgaagggcact

SEQ ID NO: 4498892 - DNA, 25 bp, Homo sapien
tcagggatgactccatacaagccaa

SEQ ID NO: 4498893 - DNA, 25 bp, Homo sapien
cactcagggatgactccatacaagc

SEQ ID NO: 4498894 - DNA, 25 bp, Homo sapien
taaaatgagcctaagtactgtacat

SEQ ID NO: 4498895 - DNA, 25 bp, Homo sapien
agagctactgctactctgtgaaaga

SEQ ID NO: 4498896 - DNA, 25 bp, Homo sapien
gaaaattggccttattaacacagct

SEQ ID NO: 4498897 - DNA, 25 bp, Homo sapien
tcagggcacatatgtattatcccag

SEQ ID NO: 4498898 - DNA, 25 bp, Homo sapien
tgctccttggatctgtgagagtaaa

SEQ ID NO: 4498899 - DNA, 25 bp, Homo sapien
gatagaagacatccagagccacact

SEQ ID NO: 4498900 - DNA, 25 bp, Homo sapien
tctaaatgaagaccactccaaaagc

SEQ ID NO: 4498901 - DNA, 25 bp, Homo sapien
ccagctgtacgtccagaactgcagg

SEQ ID NO: 4498902 - DNA, 25 bp, Homo sapien
tatccaccttttacccagtgcttca

SEQ ID NO: 4498903 - DNA, 25 bp, Homo sapien
gatctcctcccgagaaagctgcata

SEQ ID NO: 4498904 - DNA, 25 bp, Homo sapien
tgcacaaaatttggaggttcatccc

SEQ ID NO: 4498905 - DNA, 25 bp, Homo sapien
ctggatctcctcccgagaaagctgc

SEQ ID NO: 4498906 - DNA, 25 bp, Homo sapien
tattatagcttgaaaacactttctc

SEQ ID NO: 4498907 - DNA, 25 bp, Homo sapien
tctcagcttcttcttacgtgaagaa

SEQ ID NO: 4498908 - DNA, 25 bp, Homo sapien
gcaaaacagctcattacataacctc

SEQ ID NO: 4498909 - DNA, 25 bp, Homo sapien
tttagtctagggcttctgaccacat

SEQ ID NO: 4498910 - DNA, 25 bp, Homo sapien
gacttcccttattgtgctgtgatta

SEQ ID NO: 4498911 - DNA, 25 bp, Homo sapien
tatctacgctatgttactccaggac

SEQ ID NO: 4498912 - DNA, 25 bp, Homo sapien
tgaaacaatggaaggtagagactct

SEQ ID NO: 4498913 - DNA, 25 bp, Homo sapien
tacagtactcggttttgtgtctgct

SEQ ID NO: 4498914 - DNA, 25 bp, Homo sapien
ggtaatacaccattcgcctctcctt

SEQ ID NO: 4498915 - DNA, 25 bp, Homo sapien
ttaggccctcaagcttcaacctggg

SEQ ID NO: 4498916 - DNA, 25 bp, Homo sapien
cactcctaccacgtgccaggtaata

SEQ ID NO: 4498917 - DNA, 25 bp, Homo sapien
ctccttcagtggtccatgtcctttc

SEQ ID NO: 4498918 - DNA, 25 bp, Homo sapien
cgagtagactaactttcaaggccct

SEQ ID NO: 4498919 - DNA, 25 bp, Homo sapien
caagagtatgaatgtaggtgaggcc

SEQ ID NO: 4498920 - DNA, 25 bp, Homo sapien
agattttctcagacctcgcactaga

SEQ ID NO: 4498921 - DNA, 25 bp, Homo sapien
ggtgaggccagatcagggaaattcc

SEQ ID NO: 4498922 - DNA, 25 bp, Homo sapien
gcacaagggtaagggctagagccac

SEQ ID NO: 4498923 - DNA, 25 bp, Homo sapien
ctgggacagatgataccatgaagcc

SEQ ID NO: 4498924 - DNA, 25 bp, Homo sapien
tgtataattcaagcagaggtcgaga

SEQ ID NO: 4498925 - DNA, 25 bp, Homo sapien
aaagggctaacgtctggaggtacag

SEQ ID NO: 4498926 - DNA, 25 bp, Homo sapien
caagacctttgagaaagctccttga

SEQ ID NO: 4498927 - DNA, 25 bp, Homo sapien
ttgagaaagctccttgagagaaaca

SEQ ID NO: 4498928 - DNA, 25 bp, Homo sapien
cctgcttggactgctaacttgatgg

SEQ ID NO: 4498929 - DNA, 25 bp, Homo sapien
tgctaacttgatggtcaaagctcca

SEQ ID NO: 4498930 - DNA, 25 bp, Homo sapien
catcctggatcggaattcctgtcga

SEQ ID NO: 4498931 - DNA, 25 bp, Homo sapien
gaactaagtatccacggcagcgagc

SEQ ID NO: 4498932 - DNA, 25 bp, Homo sapien
cagctgttctcggttatatgcggca

SEQ ID NO: 4498933 - DNA, 25 bp, Homo sapien
agcctggtgatcaggccttcattgg

SEQ ID NO: 4498934 - DNA, 25 bp, Homo sapien
tctagatgcccgcttgctgtctgtg

SEQ ID NO: 4498935 - DNA, 25 bp, Homo sapien
gtctgtgtgataggttctgaaatac

SEQ ID NO: 4498936 - DNA, 25 bp, Homo sapien
gatgcccgcttgctgtctgtgtgat

SEQ ID NO: 4498937 - DNA, 25 bp, Homo sapien
ctgtctgtgtgataggttctgaaat

SEQ ID NO: 4498938 - DNA, 25 bp, Homo sapien
aggaccacttccagcagtgacaggg

SEQ ID NO: 4498939 - DNA, 25 bp, Homo sapien
atgatccaagtgcaatttcatgatg

SEQ ID NO: 4498940 - DNA, 25 bp, Homo sapien
catattacttcccaagcatcaatgg

SEQ ID NO: 4498941 - DNA, 25 bp, Homo sapien
tcatcttgatacatgatccaagtgc

SEQ ID NO: 4498942 - DNA, 25 bp, Homo sapien
cttcatctttgtgggagcgcaggta

SEQ ID NO: 4498943 - DNA, 25 bp, Homo sapien
gcgcaggtaagctaaccgatcttga

SEQ ID NO: 4498944 - DNA, 25 bp, Homo sapien
tgggagcgcaggtaagctaaccgat

SEQ ID NO: 4498945 - DNA, 25 bp, Homo sapien
gctaaccgatcttgatatgccttct

SEQ ID NO: 4498946 - DNA, 25 bp, Homo sapien
ctgtgcccctcatggagaaaccctg

SEQ ID NO: 4498947 - DNA, 25 bp, Homo sapien
agagtccttcatctcaacacgtgtt

SEQ ID NO: 4498948 - DNA, 25 bp, Homo sapien
catctcaacacgtgttatacctgtg

SEQ ID NO: 4498949 - DNA, 25 bp, Homo sapien
caacacgtgttatacctgtgcccct

SEQ ID NO: 4498950 - DNA, 25 bp, Homo sapien
caggcgatctcgatagcgctttcga

SEQ ID NO: 4498951 - DNA, 25 bp, Homo sapien
atggtcccggaagtactgcaggcga

SEQ ID NO: 4498952 - DNA, 25 bp, Homo sapien
gctttcgagcttggtgcatccttgc

SEQ ID NO: 4498953 - DNA, 25 bp, Homo sapien
ggaagtactgcaggcgatctcgata

SEQ ID NO: 4498954 - DNA, 25 bp, Homo sapien
tgtttgcccgaataaaagcctggat

SEQ ID NO: 4498955 - DNA, 25 bp, Homo sapien
tgagagtcttgtagtcatcccgagc

SEQ ID NO: 4498956 - DNA, 25 bp, Homo sapien
tcccgagctttgtttgcccgaataa

SEQ ID NO: 4498957 - DNA, 25 bp, Homo sapien
gagtcttgtagtcatcccgagcttt

SEQ ID NO: 4498958 - DNA, 25 bp, Homo sapien
gcctcaactcttcatgcggagccag

SEQ ID NO: 4498959 - DNA, 25 bp, Homo sapien
tcaactcttcatgcggagccagtta

SEQ ID NO: 4498960 - DNA, 25 bp, Homo sapien
actcttcatgcggagccagttactc

SEQ ID NO: 4498961 - DNA, 25 bp, Homo sapien
tcttcatgcggagccagttactcac

SEQ ID NO: 4498962 - DNA, 25 bp, Homo sapien
gaatgagggtgataacctcttcccg

SEQ ID NO: 4498963 - DNA, 25 bp, Homo sapien
tccagctgctggttagaacgaatga

SEQ ID NO: 4498964 - DNA, 25 bp, Homo sapien
ttttcggaccacaaccataggagga

SEQ ID NO: 4498965 - DNA, 25 bp, Homo sapien
ccagcaggtggacaaattttcggac

SEQ ID NO: 4498966 - DNA, 25 bp, Homo sapien
gaatgcaggggttacaaagcaggat

SEQ ID NO: 4498967 - DNA, 25 bp, Homo sapien
caaagcaggatgaaccgttccaagg

SEQ ID NO: 4498968 - DNA, 25 bp, Homo sapien
caccagtcagaaaggggaatgcagg

SEQ ID NO: 4498969 - DNA, 25 bp, Homo sapien
gcaggatgaaccgttccaaggcccc

SEQ ID NO: 4498970 - DNA, 25 bp, Homo sapien
acccagtccggagtgcagtcatgca

SEQ ID NO: 4498971 - DNA, 25 bp, Homo sapien
cacccagtccggagtgcagtcatgc

SEQ ID NO: 4498972 - DNA, 25 bp, Homo sapien
cagtcatgcaatcttggctcactgc

SEQ ID NO: 4498973 - DNA, 25 bp, Homo sapien
aataaaacaggtgctggtaagcttc

SEQ ID NO: 4498974 - DNA, 25 bp, Homo sapien
caggtgctggtaagcttccaacttc

SEQ ID NO: 4498975 - DNA, 25 bp, Homo sapien
atcatcatatcagacaactgttcct

SEQ ID NO: 4498976 - DNA, 25 bp, Homo sapien
tcatcatatcagacaactgttcctt

SEQ ID NO: 4498977 - DNA, 25 bp, Homo sapien
tgagcttggccagataggtgggatt

SEQ ID NO: 4498978 - DNA, 25 bp, Homo sapien
tagagtgtgaagattacagagtcca

SEQ ID NO: 4498979 - DNA, 25 bp, Homo sapien
gctgtcttaaagagccgcaggagca

SEQ ID NO: 4498980 - DNA, 25 bp, Homo sapien
cctctcgctggttggacgcgtagtt

SEQ ID NO: 4498981 - DNA, 25 bp, Homo sapien
tataaaacatcagataaaaatttaa

SEQ ID NO: 4498982 - DNA, 25 bp, Homo sapien
ctataaaacatcagataaaaattta

SEQ ID NO: 4498983 - DNA, 25 bp, Homo sapien
ttcctgtcacaatctcttgaatctg

SEQ ID NO: 4498984 - DNA, 25 bp, Homo sapien
gcaccacggttgaaacttacaacca

SEQ ID NO: 4498985 - DNA, 25 bp, Homo sapien
caagatctgtctcagggcattctgg

SEQ ID NO: 4498986 - DNA, 25 bp, Homo sapien
taatttccttcacgactggggccaa

SEQ ID NO: 4498987 - DNA, 25 bp, Homo sapien
tgcacctagctcttagtaaggctgg

SEQ ID NO: 4498988 - DNA, 25 bp, Homo sapien
ggttcatcttagctttagggcctca

SEQ ID NO: 4498989 - DNA, 25 bp, Homo sapien
aactgtatccctagttatgccaggg

SEQ ID NO: 4498990 - DNA, 25 bp, Homo sapien
tgaaattttatcttccgggataggc

SEQ ID NO: 4498991 - DNA, 25 bp, Homo sapien
tgtgggcctcaggtatgcaggcaaa

SEQ ID NO: 4498992 - DNA, 25 bp, Homo sapien
gagtcctgataacagacctacatgg

SEQ ID NO: 4498993 - DNA, 25 bp, Homo sapien
gactgactcatggaccatcagagga

SEQ ID NO: 4498994 - DNA, 25 bp, Homo sapien
tccagcgggctttggatctgaaaat

SEQ ID NO: 4498995 - DNA, 25 bp, Homo sapien
tcttcatgagctagcgcctgctcag

SEQ ID NO: 4498996 - DNA, 25 bp, Homo sapien
ctgatggagctgtctagccgtgtct

SEQ ID NO: 4498997 - DNA, 25 bp, Homo sapien
tggctgagagaaacttgtctgtcac

SEQ ID NO: 4498998 - DNA, 25 bp, Homo sapien
cacagcccgcatgttcctgatggag

SEQ ID NO: 4498999 - DNA, 25 bp, Homo sapien
cagcactttggcaatgaagcgcatc

SEQ ID NO: 4499000 - DNA, 25 bp, Homo sapien
cactttggcaatgaagcgcatccca

SEQ ID NO: 4499001 - DNA, 25 bp, Homo sapien
ttctcatgcaacgagtccttcagca

SEQ ID NO: 4499002 - DNA, 25 bp, Homo sapien
atcagggaacttctcatgcaacgag

SEQ ID NO: 4499003 - DNA, 25 bp, Homo sapien
gaaagatgggtattaaaagacatac

SEQ ID NO: 4499004 - DNA, 25 bp, Homo sapien
ttaaaagacataccaccaaggaagc

SEQ ID NO: 4499005 - DNA, 25 bp, Homo sapien
ctataaatgactttgctagcaaaga

SEQ ID NO: 4499006 - DNA, 25 bp, Homo sapien
ggaacagacgaaacagaaagatggg

SEQ ID NO: 4499007 - DNA, 25 bp, Homo sapien
ggcatcaggagcaacaatggctgga

SEQ ID NO: 4499008 - DNA, 25 bp, Homo sapien
gaagcatttttgcaatggagcccag

SEQ ID NO: 4499009 - DNA, 25 bp, Homo sapien
gttggtctgtggtaagctggcctcc

SEQ ID NO: 4499010 - DNA, 25 bp, Homo sapien
gaaacatcttattggaagcagcatg

SEQ ID NO: 4499011 - DNA, 25 bp, Homo sapien
aagttggcaagaggacatttcacaa

SEQ ID NO: 4499012 - DNA, 25 bp, Homo sapien
aacagaagccagtcaacagttactt

SEQ ID NO: 4499013 - DNA, 25 bp, Homo sapien
gaagccagtcaacagttacttcaag

SEQ ID NO: 4499014 - DNA, 25 bp, Homo sapien
cacaaacctctcacacaatgagtgc

SEQ ID NO: 4499015 - DNA, 25 bp, Homo sapien
tctgggacatcacaagcagtttgga

SEQ ID NO: 4499016 - DNA, 25 bp, Homo sapien
ttggtgagggttactaaatcagagt

SEQ ID NO: 4499017 - DNA, 25 bp, Homo sapien
ggtgttgatgatttcaccaatggaa

SEQ ID NO: 4499018 - DNA, 25 bp, Homo sapien
tcagagtactcatccacattaaatt

SEQ ID NO: 4499019 - DNA, 25 bp, Homo sapien
gcagccagggataataattaaggac

SEQ ID NO: 4499020 - DNA, 25 bp, Homo sapien
tacaggaaggttagacacctggcta

SEQ ID NO: 4499021 - DNA, 25 bp, Homo sapien
cattgtcagttagattacaggaagg

SEQ ID NO: 4499022 - DNA, 25 bp, Homo sapien
gacacctggctaccagagatgataa

SEQ ID NO: 4499023 - DNA, 25 bp, Homo sapien
acctcgccgaggtcgtccagcagtt

SEQ ID NO: 4499024 - DNA, 25 bp, Homo sapien
ccagcagttcgtggattggatcatt

SEQ ID NO: 4499025 - DNA, 25 bp, Homo sapien
gactcgatggtgggcacctcgccga

SEQ ID NO: 4499026 - DNA, 25 bp, Homo sapien
gatcattgtgctccggagcaatggc

SEQ ID NO: 4499027 - DNA, 25 bp, Homo sapien
cagttccttatagatattgatcaca

SEQ ID NO: 4499028 - DNA, 25 bp, Homo sapien
gaaactatcaggatcacatctattt

SEQ ID NO: 4499029 - DNA, 25 bp, Homo sapien
tatccagagtttggtatagtgcaaa

SEQ ID NO: 4499030 - DNA, 25 bp, Homo sapien
acaagctggcagtatgtatctgcgt

SEQ ID NO: 4499031 - DNA, 25 bp, Homo sapien
gttggtcagggtgagagacacttcc

SEQ ID NO: 4499032 - DNA, 25 bp, Homo sapien
gatggttcgagcatccatttctgca

SEQ ID NO: 4499033 - DNA, 25 bp, Homo sapien
ggtcatttaaattgccagagctttc

SEQ ID NO: 4499034 - DNA, 25 bp, Homo sapien
tctccaggcacgtcgaacttgttgg

SEQ ID NO: 4499035 - DNA, 25 bp, Homo sapien
ctcctggctggaaccggatgacatc

SEQ ID NO: 4499036 - DNA, 25 bp, Homo sapien
ggatgacatccacaattaaacgttt

SEQ ID NO: 4499037 - DNA, 25 bp, Homo sapien
tgtttctaggatttcagtcaaggtc

SEQ ID NO: 4499038 - DNA, 25 bp, Homo sapien
tggctggaaccggatgacatccaca

SEQ ID NO: 4499039 - DNA, 25 bp, Homo sapien
ggtgctggaaagaatcgcctgtgga

SEQ ID NO: 4499040 - DNA, 25 bp, Homo sapien
tgggtgctggaaagaatcgcctgtg

SEQ ID NO: 4499041 - DNA, 25 bp, Homo sapien
tgctggaaagaatcgcctgtggata

SEQ ID NO: 4499042 - DNA, 25 bp, Homo sapien
gctggaaagaatcgcctgtggatac

SEQ ID NO: 4499043 - DNA, 25 bp, Homo sapien
tttcatcttgtcaggtgttttggca

SEQ ID NO: 4499044 - DNA, 25 bp, Homo sapien
ctcttgaagagtgaggttgctgtct

SEQ ID NO: 4499045 - DNA, 25 bp, Homo sapien
gggtccacggttccaagctctgtta

SEQ ID NO: 4499046 - DNA, 25 bp, Homo sapien
caatgtcgttgatcagttcctggta

SEQ ID NO: 4499047 - DNA, 25 bp, Homo sapien
ccatgaactgaagctatgctgttat

SEQ ID NO: 4499048 - DNA, 25 bp, Homo sapien
tcgagcctctcagctttgaacaagg

SEQ ID NO: 4499049 - DNA, 25 bp, Homo sapien
gaacagctactgtctctcgagcctc

SEQ ID NO: 4499050 - DNA, 25 bp, Homo sapien
tgttatgtgaacagctactgtctct

SEQ ID NO: 4499051 - DNA, 25 bp, Homo sapien
tgttgcagtttcactagttcggcct

SEQ ID NO: 4499052 - DNA, 25 bp, Homo sapien
ggtacctccgctgattccgaatatc

SEQ ID NO: 4499053 - DNA, 25 bp, Homo sapien
tggccttagagttcagagcagcgta

SEQ ID NO: 4499054 - DNA, 25 bp, Homo sapien
gctggctaagttatccaagcaggtt

SEQ ID NO: 4499055 - DNA, 25 bp, Homo sapien
gacaaatctggcagtgaacacacct

SEQ ID NO: 4499056 - DNA, 25 bp, Homo sapien
taaaagcgtttaagccagcacagca

SEQ ID NO: 4499057 - DNA, 25 bp, Homo sapien
taactaggagagcttcgtatgccag

SEQ ID NO: 4499058 - DNA, 25 bp, Homo sapien
gagaaacagttcattctggccctgg

SEQ ID NO: 4499059 - DNA, 25 bp, Homo sapien
tgattcacttgcaggtcctcaattt

SEQ ID NO: 4499060 - DNA, 25 bp, Homo sapien
gattcacttgcaggtcctcaatttc

SEQ ID NO: 4499061 - DNA, 25 bp, Homo sapien
tcacttgcaggtcctcaatttccag

SEQ ID NO: 4499062 - DNA, 25 bp, Homo sapien
cttgcaggtcctcaatttccagaag

SEQ ID NO: 4499063 - DNA, 25 bp, Homo sapien
gttttctagaaagagtaggtgctgt

SEQ ID NO: 4499064 - DNA, 25 bp, Homo sapien
ttttctagaaagagtaggtgctgtg

SEQ ID NO: 4499065 - DNA, 25 bp, Homo sapien
atgacatcataggaattctcttcac

SEQ ID NO: 4499066 - DNA, 25 bp, Homo sapien
tgaggagttccacaagtggcgtgtg

SEQ ID NO: 4499067 - DNA, 25 bp, Homo sapien
cacaagtggcgtgtgaagggatgac

SEQ ID NO: 4499068 - DNA, 25 bp, Homo sapien
tgacatcataggaattctcttcact

SEQ ID NO: 4499069 - DNA, 25 bp, Homo sapien
ctgttgaaagataacatcgtaaggg

SEQ ID NO: 4499070 - DNA, 25 bp, Homo sapien
catcgtaagggtatggtttttatat

SEQ ID NO: 4499071 - DNA, 25 bp, Homo sapien
gattgccaagcccaagtaccatctg

SEQ ID NO: 4499072 - DNA, 25 bp, Homo sapien
cagattgccaagcccaagtaccatc

SEQ ID NO: 4499073 - DNA, 25 bp, Homo sapien
cttctgttggactgatttcaaatat

SEQ ID NO: 4499074 - DNA, 25 bp, Homo sapien
ttctgttggactgatttcaaatata

SEQ ID NO: 4499075 - DNA, 25 bp, Homo sapien
tcttctgttggactgatttcaaata

SEQ ID NO: 4499076 - DNA, 25 bp, Homo sapien
gaaaccacctattatggcttggctg

SEQ ID NO: 4499077 - DNA, 25 bp, Homo sapien
caaatgtacattgacaggaaggcac

SEQ ID NO: 4499078 - DNA, 25 bp, Homo sapien
taaacagaggatgtctgcaagggct

SEQ ID NO: 4499079 - DNA, 25 bp, Homo sapien
gcagcatgagcagaagcccaaatgt

SEQ ID NO: 4499080 - DNA, 25 bp, Homo sapien
acaaggaaaaaggacacaatgtagg

SEQ ID NO: 4499081 - DNA, 25 bp, Homo sapien
aaaggacacaatgtagggagggatc

SEQ ID NO: 4499082 - DNA, 25 bp, Homo sapien
aggaaaaaggacacaatgtagggag

SEQ ID NO: 4499083 - DNA, 25 bp, Homo sapien
ctgtggaacaaggaaaaaggacaca

SEQ ID NO: 4499084 - DNA, 25 bp, Homo sapien
gaaggaagatcaggaggttgacatt

SEQ ID NO: 4499085 - DNA, 25 bp, Homo sapien
aataatttcatgactgcaactcctt

SEQ ID NO: 4499086 - DNA, 25 bp, Homo sapien
tactttagctctatcaaataatttc

SEQ ID NO: 4499087 - DNA, 25 bp, Homo sapien
atttactttagctctatcaaataat

SEQ ID NO: 4499088 - DNA, 25 bp, Homo sapien
tagaaaggagctgtgaggtgcttct

SEQ ID NO: 4499089 - DNA, 25 bp, Homo sapien
ctagaaaggagctgtgaggtgcttc

SEQ ID NO: 4499090 - DNA, 25 bp, Homo sapien
caaatgtcccatcagagcgagagga

SEQ ID NO: 4499091 - DNA, 25 bp, Homo sapien
gaatcaagtcaatctctgtgcacca

SEQ ID NO: 4499092 - DNA, 25 bp, Homo sapien
gaattttagcaatgggactctccca

SEQ ID NO: 4499093 - DNA, 25 bp, Homo sapien
tctcacgtgtaacataggttggctg

SEQ ID NO: 4499094 - DNA, 25 bp, Homo sapien
gaactgtgtggtttcaacgccatga

SEQ ID NO: 4499095 - DNA, 25 bp, Homo sapien
tctgacgggcagtccaaactcttgg

SEQ ID NO: 4499096 - DNA, 25 bp, Homo sapien
aacaaggtctgggtagtggcgaatc

SEQ ID NO: 4499097 - DNA, 25 bp, Homo sapien
tgtgggctgtaaccatgcacctgag

SEQ ID NO: 4499098 - DNA, 25 bp, Homo sapien
cggccgggagcgcgccgaggtccgc

SEQ ID NO: 4499099 - DNA, 25 bp, Homo sapien
gagcgcgccgaggtccgcccccgtg

SEQ ID NO: 4499100 - DNA, 25 bp, Homo sapien
ggccgggagcgcgccgaggtccgcc

SEQ ID NO: 4499101 - DNA, 25 bp, Homo sapien
gccgggagcgcgccgaggtccgccc

SEQ ID NO: 4499102 - DNA, 25 bp, Homo sapien
cctcggcccacccgtccgtccacag

SEQ ID NO: 4499103 - DNA, 25 bp, Homo sapien
cccgaagccagtcgtccggcgcgac

SEQ ID NO: 4499104 - DNA, 25 bp, Homo sapien
gccgcccgaagccagtcgtccggcg

SEQ ID NO: 4499105 - DNA, 25 bp, Homo sapien
gggccgccgcccgaagccagtcgtc

SEQ ID NO: 4499106 - DNA, 25 bp, Homo sapien
tgaacttccgcgggttggcgctgcc

SEQ ID NO: 4499107 - DNA, 25 bp, Homo sapien
tgaggtcggtcatgagctgctcgaa

SEQ ID NO: 4499108 - DNA, 25 bp, Homo sapien
agggtgaggtcggtcatgagctgct

SEQ ID NO: 4499109 - DNA, 25 bp, Homo sapien
ctcggcctgtctctgcgtgtgcagc

SEQ ID NO: 4499110 - DNA, 25 bp, Homo sapien
tgtctctgcgtgtgcagcgcgatct

SEQ ID NO: 4499111 - DNA, 25 bp, Homo sapien
tctagatagatcagtaatgtctgcc

SEQ ID NO: 4499112 - DNA, 25 bp, Homo sapien
aatgtctgccctatcgattagcatg

SEQ ID NO: 4499113 - DNA, 25 bp, Homo sapien
ctaggtgaataggataagtaacgcc

SEQ ID NO: 4499114 - DNA, 25 bp, Homo sapien
agtaaggccaactctgaaggattgc

SEQ ID NO: 4499115 - DNA, 25 bp, Homo sapien
tacagtgcctcgcaaaaggaaagtc

SEQ ID NO: 4499116 - DNA, 25 bp, Homo sapien
gagtctgcgcaaatattcaagtcca

SEQ ID NO: 4499117 - DNA, 25 bp, Homo sapien
tcaagtccaatcaacactccagggt

SEQ ID NO: 4499118 - DNA, 25 bp, Homo sapien
cctgagagctcgctaatctatgaca

SEQ ID NO: 4499119 - DNA, 25 bp, Homo sapien
gctataatatacagacagtgtgcta

SEQ ID NO: 4499120 - DNA, 25 bp, Homo sapien
gagctaagttagaggacttaaatta

SEQ ID NO: 4499121 - DNA, 25 bp, Homo sapien
cagtgtgctattgtcaaaaagacag

SEQ ID NO: 4499122 - DNA, 25 bp, Homo sapien
accaacacttatatggccaactgat

SEQ ID NO: 4499123 - DNA, 25 bp, Homo sapien
cagagagttctcacaaaggcttcaa

SEQ ID NO: 4499124 - DNA, 25 bp, Homo sapien
tataaatccagatagggacctgccc

SEQ ID NO: 4499125 - DNA, 25 bp, Homo sapien
aaaagaacacggctagcctggccaa

SEQ ID NO: 4499126 - DNA, 25 bp, Homo sapien
tcttaaatgtactgcacagggagac

SEQ ID NO: 4499127 - DNA, 25 bp, Homo sapien
gaaaaactaagctactatccacaac

SEQ ID NO: 4499128 - DNA, 25 bp, Homo sapien
acatttatggtaagaactgcatagc

SEQ ID NO: 4499129 - DNA, 25 bp, Homo sapien
tccacaaccctaacacattagctgt

SEQ ID NO: 4499130 - DNA, 25 bp, Homo sapien
ccagcctccgtttacatttatggta

SEQ ID NO: 4499131 - DNA, 25 bp, Homo sapien
tgtgtatgtttggatacactggcat

SEQ ID NO: 4499132 - DNA, 25 bp, Homo sapien
tagtaacgtcctcttgcaaggtctt

SEQ ID NO: 4499133 - DNA, 25 bp, Homo sapien
ttgcaaggtctttgagtgtgtatgt

SEQ ID NO: 4499134 - DNA, 25 bp, Homo sapien
gtatgtttggatacactggcataat

SEQ ID NO: 4499135 - DNA, 25 bp, Homo sapien
gacgtaagtgatcacaccctcaagg

SEQ ID NO: 4499136 - DNA, 25 bp, Homo sapien
ccctcaaggtttccggtgctttctg

SEQ ID NO: 4499137 - DNA, 25 bp, Homo sapien
aaagtgatttaagaacgctgagagg

SEQ ID NO: 4499138 - DNA, 25 bp, Homo sapien
cgctgagaggtaacagcaaagatct

SEQ ID NO: 4499139 - DNA, 25 bp, Homo sapien
tgctccgcagctggctcacatttgg

SEQ ID NO: 4499140 - DNA, 25 bp, Homo sapien
gaaactctgacgcactgctccgcag

SEQ ID NO: 4499141 - DNA, 25 bp, Homo sapien
taaggatcctccatggtactgtgta

SEQ ID NO: 4499142 - DNA, 25 bp, Homo sapien
tgtgtaaggcgcagttgctgaagct

SEQ ID NO: 4499143 - DNA, 25 bp, Homo sapien
tatcgtatgctgtagaaactatgag

SEQ ID NO: 4499144 - DNA, 25 bp, Homo sapien
aaagaagactgaactgtacctaggc

SEQ ID NO: 4499145 - DNA, 25 bp, Homo sapien
caagaaagtacatatctggaggtac

SEQ ID NO: 4499146 - DNA, 25 bp, Homo sapien
gtacctaggcccagcttatccttca

SEQ ID NO: 4499147 - DNA, 25 bp, Homo sapien
tgtgaacgatgaaagcacccgagga

SEQ ID NO: 4499148 - DNA, 25 bp, Homo sapien
ggctttccactgatgtgaacgatga

SEQ ID NO: 4499149 - DNA, 25 bp, Homo sapien
caatagtgccatataccattgtctg

SEQ ID NO: 4499150 - DNA, 25 bp, Homo sapien
tccacattggtttgaacaaggcttt

SEQ ID NO: 4499151 - DNA, 25 bp, Homo sapien
gaaggagactgcaggcaataactgc

SEQ ID NO: 4499152 - DNA, 25 bp, Homo sapien
cctaatgtgataccataacagcctc

SEQ ID NO: 4499153 - DNA, 25 bp, Homo sapien
tacattaggcagaccccaattgagg

SEQ ID NO: 4499154 - DNA, 25 bp, Homo sapien
tgacaggatcacaaacgttaagagt

SEQ ID NO: 4499155 - DNA, 25 bp, Homo sapien
agctccttggcattattaggagtgc

SEQ ID NO: 4499156 - DNA, 25 bp, Homo sapien
tggaattgagctccttggcattatt

SEQ ID NO: 4499157 - DNA, 25 bp, Homo sapien
aattgagctccttggcattattagg

SEQ ID NO: 4499158 - DNA, 25 bp, Homo sapien
tgagctccttggcattattaggagt

SEQ ID NO: 4499159 - DNA, 25 bp, Homo sapien
acttggagctaagcccacaaattcc

SEQ ID NO: 4499160 - DNA, 25 bp, Homo sapien
gattatgtggccaaagtctgggaaa

SEQ ID NO: 4499161 - DNA, 25 bp, Homo sapien
ttctgattatgtggccaaagtctgg

SEQ ID NO: 4499162 - DNA, 25 bp, Homo sapien
gggaagacaacggatgcctggtaac

SEQ ID NO: 4499163 - DNA, 25 bp, Homo sapien
gaattagtaggatgcaactagcctg

SEQ ID NO: 4499164 - DNA, 25 bp, Homo sapien
caaaatgcgagggaatatagagacc

SEQ ID NO: 4499165 - DNA, 25 bp, Homo sapien
tacaatgtctggcatcaaggcctgt

SEQ ID NO: 4499166 - DNA, 25 bp, Homo sapien
caggacaggccgattaagacttcag

SEQ ID NO: 4499167 - DNA, 25 bp, Homo sapien
atggcggggatgataagttccacaa

SEQ ID NO: 4499168 - DNA, 25 bp, Homo sapien
gatggcggggatgataagttccaca

SEQ ID NO: 4499169 - DNA, 25 bp, Homo sapien
tggcggggatgataagttccacaag

SEQ ID NO: 4499170 - DNA, 25 bp, Homo sapien
gaaccatgatttgtttacagccggc

SEQ ID NO: 4499171 - DNA, 25 bp, Homo sapien
catcaagcattgtgtctgacacgca

SEQ ID NO: 4499172 - DNA, 25 bp, Homo sapien
gaagcacgagccttttgtaagccaa

SEQ ID NO: 4499173 - DNA, 25 bp, Homo sapien
gcattactgttatccggacctcagg

SEQ ID NO: 4499174 - DNA, 25 bp, Homo sapien
tgtacaacttctagggagggtgaac

SEQ ID NO: 4499175 - DNA, 25 bp, Homo sapien
taaacgtgacaacagtggttgcacc

SEQ ID NO: 4499176 - DNA, 25 bp, Homo sapien
tggagaggatactgttcactgcact

SEQ ID NO: 4499177 - DNA, 25 bp, Homo sapien
ggcactttcatatacagcagagagg

SEQ ID NO: 4499178 - DNA, 25 bp, Homo sapien
gtcctaactaaactggagagtctcc

SEQ ID NO: 4499179 - DNA, 25 bp, Homo sapien
ataacatatatagttcatttgagga

SEQ ID NO: 4499180 - DNA, 25 bp, Homo sapien
catttgaggatttatgggaactcag

SEQ ID NO: 4499181 - DNA, 25 bp, Homo sapien
tgggaactcagattaggcatagtcc

SEQ ID NO: 4499182 - DNA, 25 bp, Homo sapien
ggaagaactggtccctgaaaccaga

SEQ ID NO: 4499183 - DNA, 25 bp, Homo sapien
cagaaaaaccagtgggccgggtgca

SEQ ID NO: 4499184 - DNA, 25 bp, Homo sapien
gttaaagccataactggatctgggc

SEQ ID NO: 4499185 - DNA, 25 bp, Homo sapien
ggtctggcattccttttgtcaaaca

SEQ ID NO: 4499186 - DNA, 25 bp, Homo sapien
ggtgaatgcagacccaagcctctaa

SEQ ID NO: 4499187 - DNA, 25 bp, Homo sapien
aaactctttttactactaggctgca

SEQ ID NO: 4499188 - DNA, 25 bp, Homo sapien
tttactgtctttccacagagcgcca

SEQ ID NO: 4499189 - DNA, 25 bp, Homo sapien
taaaaactggtgagggctatatggg

SEQ ID NO: 4499190 - DNA, 25 bp, Homo sapien
tgccttttttgaccagctgatctgg

SEQ ID NO: 4499191 - DNA, 25 bp, Homo sapien
tctccaaaggaccaaataagtcttg

SEQ ID NO: 4499192 - DNA, 25 bp, Homo sapien
ggaggctatgccttttttgaccagc

SEQ ID NO: 4499193 - DNA, 25 bp, Homo sapien
tgatctggggatccaatcttctcca

SEQ ID NO: 4499194 - DNA, 25 bp, Homo sapien
gcagagctagtttgtagcagcctaa

SEQ ID NO: 4499195 - DNA, 25 bp, Homo sapien
aactaaaactcaggatcccgagcct

SEQ ID NO: 4499196 - DNA, 25 bp, Homo sapien
gaggacagcagttagaaaggaaccc

SEQ ID NO: 4499197 - DNA, 25 bp, Homo sapien
cattttccagcttgcagtaggtgaa

SEQ ID NO: 4499198 - DNA, 25 bp, Homo sapien
cagagtcctttcgtggtcaggagca

SEQ ID NO: 4499199 - DNA, 25 bp, Homo sapien
gagtcctttcgtggtcaggagcagc

SEQ ID NO: 4499200 - DNA, 25 bp, Homo sapien
ctgcagagtcctttcgtggtcagga

SEQ ID NO: 4499201 - DNA, 25 bp, Homo sapien
tgcagagtcctttcgtggtcaggag

SEQ ID NO: 4499202 - DNA, 25 bp, Homo sapien
gaaagaaactggcaagccacgaggc

SEQ ID NO: 4499203 - DNA, 25 bp, Homo sapien
gacggtgaactcatatactaaatcc

SEQ ID NO: 4499204 - DNA, 25 bp, Homo sapien
tcagaagacggtgaactcatatact

SEQ ID NO: 4499205 - DNA, 25 bp, Homo sapien
acttgaggattctagggaaaagtca

SEQ ID NO: 4499206 - DNA, 25 bp, Homo sapien
ccgtgatggcgggttccccgaacat

SEQ ID NO: 4499207 - DNA, 25 bp, Homo sapien
atggcctctccaccagcccgtgatg

SEQ ID NO: 4499208 - DNA, 25 bp, Homo sapien
tccccgaacattatcagcttggtga

SEQ ID NO: 4499209 - DNA, 25 bp, Homo sapien
tccaccagcccgtgatggcgggttc

SEQ ID NO: 4499210 - DNA, 25 bp, Homo sapien
ttgtcgccctggcttgtccccagac

SEQ ID NO: 4499211 - DNA, 25 bp, Homo sapien
tgtacaaggtcctcatcactgcgaa

SEQ ID NO: 4499212 - DNA, 25 bp, Homo sapien
taactctaacgtggccaatttctgg

SEQ ID NO: 4499213 - DNA, 25 bp, Homo sapien
cagaacaccctgcaatgggaccgaa

SEQ ID NO: 4499214 - DNA, 25 bp, Homo sapien
cctgcgcccgagtactgagaagaat

SEQ ID NO: 4499215 - DNA, 25 bp, Homo sapien
tctgtggaccaaatgtggtgtgttc

SEQ ID NO: 4499216 - DNA, 25 bp, Homo sapien
actttccttgataacagccacataa

SEQ ID NO: 4499217 - DNA, 25 bp, Homo sapien
ctttccttgataacagccacataat

SEQ ID NO: 4499218 - DNA, 25 bp, Homo sapien
ttctgtggaccaaatgtggtgtgtt

SEQ ID NO: 4499219 - DNA, 25 bp, Homo sapien
gacaacggtttgatgtaccactcca

SEQ ID NO: 4499220 - DNA, 25 bp, Homo sapien
ttggcaatttggacaacggtttgat

SEQ ID NO: 4499221 - DNA, 25 bp, Homo sapien
cacattccagaatagattctcaaga

SEQ ID NO: 4499222 - DNA, 25 bp, Homo sapien
taccactccatcctgacatgtacaa

SEQ ID NO: 4499223 - DNA, 25 bp, Homo sapien
ctctcctgctctggaactctgtgtt

SEQ ID NO: 4499224 - DNA, 25 bp, Homo sapien
tctctcctgctctggaactctgtgt

SEQ ID NO: 4499225 - DNA, 25 bp, Homo sapien
ttctctcctgctctggaactctgtg

SEQ ID NO: 4499226 - DNA, 25 bp, Homo sapien
gctcaggaactgccttgtcggggca

SEQ ID NO: 4499227 - DNA, 25 bp, Homo sapien
ggctcaggaactgccttgtcggggc

SEQ ID NO: 4499228 - DNA, 25 bp, Homo sapien
tctcagagtcatcccagtgtgttct

SEQ ID NO: 4499229 - DNA, 25 bp, Homo sapien
gtaactcataaatcgacacctccag

SEQ ID NO: 4499230 - DNA, 25 bp, Homo sapien
gagttactgcctcaatccatcaaca

SEQ ID NO: 4499231 - DNA, 25 bp, Homo sapien
atttagtgaggccaccgtccaccaa

SEQ ID NO: 4499232 - DNA, 25 bp, Homo sapien
acacctgcctgcattgctctgagag

SEQ ID NO: 4499233 - DNA, 25 bp, Homo sapien
ttcttatccctctgtgcactccttt

SEQ ID NO: 4499234 - DNA, 25 bp, Homo sapien
tttgccttccgtcctgatgttccct

SEQ ID NO: 4499235 - DNA, 25 bp, Homo sapien
gggtcctgtggcctcgcagcctcag

SEQ ID NO: 4499236 - DNA, 25 bp, Homo sapien
ggtggctgcaatggatggaaacaaa

SEQ ID NO: 4499237 - DNA, 25 bp, Homo sapien
gggcttttaacaaccacatcagcgc

SEQ ID NO: 4499238 - DNA, 25 bp, Homo sapien
gctttaaactactccacaacactga

SEQ ID NO: 4499239 - DNA, 25 bp, Homo sapien
tgacatgccctaagtaacaacctcg

SEQ ID NO: 4499240 - DNA, 25 bp, Homo sapien
taccacagaggtaggtctcaatgac

SEQ ID NO: 4499241 - DNA, 25 bp, Homo sapien
tcacgacgcaaacagaaccaaggag

SEQ ID NO: 4499242 - DNA, 25 bp, Homo sapien
tatgaccccttggatctagcccttg

SEQ ID NO: 4499243 - DNA, 25 bp, Homo sapien
gtttggctcagggatcggctcacga

SEQ ID NO: 4499244 - DNA, 25 bp, Homo sapien
tatctccctccttgaggacaagtct

SEQ ID NO: 4499245 - DNA, 25 bp, Homo sapien
tattctgctgtcttctaaccggtgt

SEQ ID NO: 4499246 - DNA, 25 bp, Homo sapien
tgaggacaagtctattctgctgtct

SEQ ID NO: 4499247 - DNA, 25 bp, Homo sapien
tcttctaaccggtgttttctttgca

SEQ ID NO: 4499248 - DNA, 25 bp, Homo sapien
ctgtgaggaataattggctccaaaa

SEQ ID NO: 4499249 - DNA, 25 bp, Homo sapien
tgaggaataattggctccaaaagca

SEQ ID NO: 4499250 - DNA, 25 bp, Homo sapien
gtgaggaataattggctccaaaagc

SEQ ID NO: 4499251 - DNA, 25 bp, Homo sapien
tgtgaggaataattggctccaaaag

SEQ ID NO: 4499252 - DNA, 25 bp, Homo sapien
tattctacaaccctggatcccaaga

SEQ ID NO: 4499253 - DNA, 25 bp, Homo sapien
gaaaatgatactaggcacacaacag

SEQ ID NO: 4499254 - DNA, 25 bp, Homo sapien
aagttctcagtcagtatttgcccag

SEQ ID NO: 4499255 - DNA, 25 bp, Homo sapien
gagagtagacttcaatccggagagc

SEQ ID NO: 4499256 - DNA, 25 bp, Homo sapien
gatgcttttcgtctttccaaggagg

SEQ ID NO: 4499257 - DNA, 25 bp, Homo sapien
gatgtcagcctgaacccaggatgct

SEQ ID NO: 4499258 - DNA, 25 bp, Homo sapien
tgaacccaggatgcttttcgtcttt

SEQ ID NO: 4499259 - DNA, 25 bp, Homo sapien
ctgttaagtgcagatgtcagcctga

SEQ ID NO: 4499260 - DNA, 25 bp, Homo sapien
tgctggactcacacgatcctctggc

SEQ ID NO: 4499261 - DNA, 25 bp, Homo sapien
tattcagcacatatgcttcccaggt

SEQ ID NO: 4499262 - DNA, 25 bp, Homo sapien
catacagcaagatgcaaaccctggg

SEQ ID NO: 4499263 - DNA, 25 bp, Homo sapien
tgaggtagaactcttactcctggag

SEQ ID NO: 4499264 - DNA, 25 bp, Homo sapien
caatactatactagccagtcacggg

SEQ ID NO: 4499265 - DNA, 25 bp, Homo sapien
ggcaccacaggccttttataactct

SEQ ID NO: 4499266 - DNA, 25 bp, Homo sapien
gtgggaggtaggtttggagagactg

SEQ ID NO: 4499267 - DNA, 25 bp, Homo sapien
tactagccagtcacgggactgaggt

SEQ ID NO: 4499268 - DNA, 25 bp, Homo sapien
tattcttcccagctcggaagctggc

SEQ ID NO: 4499269 - DNA, 25 bp, Homo sapien
tcatggcttccgtctaagagcttcc

SEQ ID NO: 4499270 - DNA, 25 bp, Homo sapien
caaggtgggcctcggattcatggct

SEQ ID NO: 4499271 - DNA, 25 bp, Homo sapien
tgatggcatggcgatcaagttcaac

SEQ ID NO: 4499272 - DNA, 25 bp, Homo sapien
cagagcactcgtgtgaagagcagaa

SEQ ID NO: 4499273 - DNA, 25 bp, Homo sapien
gtcctggggcttggtactcagagca

SEQ ID NO: 4499274 - DNA, 25 bp, Homo sapien
tggtactcagagcactcgtgtgaag

SEQ ID NO: 4499275 - DNA, 25 bp, Homo sapien
gggcttggtactcagagcactcgtg

SEQ ID NO: 4499276 - DNA, 25 bp, Homo sapien
gtccattattctcaccatcacagaa

SEQ ID NO: 4499277 - DNA, 25 bp, Homo sapien
tccccatgtccattattctcaccat

SEQ ID NO: 4499278 - DNA, 25 bp, Homo sapien
cttccccatgtccattattctcacc

SEQ ID NO: 4499279 - DNA, 25 bp, Homo sapien
ccattattctcaccatcacagaaac

SEQ ID NO: 4499280 - DNA, 25 bp, Homo sapien
gcagcagtcatttctgctaaaccag

SEQ ID NO: 4499281 - DNA, 25 bp, Homo sapien
caccagggcagcagtcatttctgct

SEQ ID NO: 4499282 - DNA, 25 bp, Homo sapien
gcagtcatttctgctaaaccaggcc

SEQ ID NO: 4499283 - DNA, 25 bp, Homo sapien
cagtcatttctgctaaaccaggcca

SEQ ID NO: 4499284 - DNA, 25 bp, Homo sapien
tggcagtggcttcggaacatttaac

SEQ ID NO: 4499285 - DNA, 25 bp, Homo sapien
gcagtggcttcggaacatttaacag

SEQ ID NO: 4499286 - DNA, 25 bp, Homo sapien
ttttggcagtggcttcggaacattt

SEQ ID NO: 4499287 - DNA, 25 bp, Homo sapien
cagtggcttcggaacatttaacaga

SEQ ID NO: 4499288 - DNA, 25 bp, Homo sapien
gctaattcattgacacaagcgcgat

SEQ ID NO: 4499289 - DNA, 25 bp, Homo sapien
agtgacaacaaacatagctgagtac

SEQ ID NO: 4499290 - DNA, 25 bp, Homo sapien
gacctctaagtacaaacattcagtg

SEQ ID NO: 4499291 - DNA, 25 bp, Homo sapien
tagtaagccaagagatcaatgtgct

SEQ ID NO: 4499292 - DNA, 25 bp, Homo sapien
agtgtcttcgtaaggaccttgaggc

SEQ ID NO: 4499293 - DNA, 25 bp, Homo sapien
cttactcgctgtaaagccaaattca

SEQ ID NO: 4499294 - DNA, 25 bp, Homo sapien
gagacaatgaaagctgggcttactc

SEQ ID NO: 4499295 - DNA, 25 bp, Homo sapien
aaagtgtcttcgtaaggaccttgag

SEQ ID NO: 4499296 - DNA, 25 bp, Homo sapien
tccaacatcacaggatcgagggcgt

SEQ ID NO: 4499297 - DNA, 25 bp, Homo sapien
caacatcacaggatcgagggcgtcc

SEQ ID NO: 4499298 - DNA, 25 bp, Homo sapien
cctccaacatcacaggatcgagggc

SEQ ID NO: 4499299 - DNA, 25 bp, Homo sapien
gagggcgtcctgacagggactgaat

SEQ ID NO: 4499300 - DNA, 25 bp, Homo sapien
cacagctcggggctggtaggctcct

SEQ ID NO: 4499301 - DNA, 25 bp, Homo sapien
tcgattcctgcacgtttctgcttct

SEQ ID NO: 4499302 - DNA, 25 bp, Homo sapien
taggctcctctcgattcctgcacgt

SEQ ID NO: 4499303 - DNA, 25 bp, Homo sapien
tctgtgccattaagctgccaggtga

SEQ ID NO: 4499304 - DNA, 25 bp, Homo sapien
tgccacagttgcgtctccttcagtg

SEQ ID NO: 4499305 - DNA, 25 bp, Homo sapien
tctctgcgtcgcttcacactatcag

SEQ ID NO: 4499306 - DNA, 25 bp, Homo sapien
agaaaggtttcctcaacgcccgctg

SEQ ID NO: 4499307 - DNA, 25 bp, Homo sapien
tacccacacatgacttttgctgtgc

SEQ ID NO: 4499308 - DNA, 25 bp, Homo sapien
taacgttcacacaattcctctgcag

SEQ ID NO: 4499309 - DNA, 25 bp, Homo sapien
tatagttactacctaacggagtcac

SEQ ID NO: 4499310 - DNA, 25 bp, Homo sapien
gaaacaggtcattagtaacgttcac

SEQ ID NO: 4499311 - DNA, 25 bp, Homo sapien
tgatctaaggaaagtaatgcgcccc

SEQ ID NO: 4499312 - DNA, 25 bp, Homo sapien
agaagaaagatccatgggtgatcag

SEQ ID NO: 4499313 - DNA, 25 bp, Homo sapien
catgggtgatcaggtgggagtgaag

SEQ ID NO: 4499314 - DNA, 25 bp, Homo sapien
ccatgggtgatcaggtgggagtgaa

SEQ ID NO: 4499315 - DNA, 25 bp, Homo sapien
gaactgtttatagggttaaagatca

SEQ ID NO: 4499316 - DNA, 25 bp, Homo sapien
ctggaagtatggaactgtttatagg

SEQ ID NO: 4499317 - DNA, 25 bp, Homo sapien
tggaagtatggaactgtttataggg

SEQ ID NO: 4499318 - DNA, 25 bp, Homo sapien
tatagggttaaagatcaaggactag

SEQ ID NO: 4499319 - DNA, 25 bp, Homo sapien
ggaggcaaccgacattctcaaggtt

SEQ ID NO: 4499320 - DNA, 25 bp, Homo sapien
gaggcaaccgacattctcaaggttc

SEQ ID NO: 4499321 - DNA, 25 bp, Homo sapien
aggaggcaaccgacattctcaaggt

SEQ ID NO: 4499322 - DNA, 25 bp, Homo sapien
gatctggcaatgaccctccagtgtt

SEQ ID NO: 4499323 - DNA, 25 bp, Homo sapien
tccccaagaagggtgagaggcctag

SEQ ID NO: 4499324 - DNA, 25 bp, Homo sapien
tcgagtagtggaggttggttagatc

SEQ ID NO: 4499325 - DNA, 25 bp, Homo sapien
gcctaggttttgaccattatgtgga

SEQ ID NO: 4499326 - DNA, 25 bp, Homo sapien
tgccaaagtggtggtcggtggtgtc

SEQ ID NO: 4499327 - DNA, 25 bp, Homo sapien
actgccaaagtggtggtcggtggtg

SEQ ID NO: 4499328 - DNA, 25 bp, Homo sapien
ccaaagtggtggtcggtggtgtcca

SEQ ID NO: 4499329 - DNA, 25 bp, Homo sapien
caaagtggtggtcggtggtgtccag

SEQ ID NO: 4499330 - DNA, 25 bp, Homo sapien
atacccaggtgggtcatagcagctg

SEQ ID NO: 4499331 - DNA, 25 bp, Homo sapien
ttatacccaggtgggtcatagcagc

SEQ ID NO: 4499332 - DNA, 25 bp, Homo sapien
gggatgttgttcacactattcccca

SEQ ID NO: 4499333 - DNA, 25 bp, Homo sapien
cttcttatacccaggtgggtcatag

SEQ ID NO: 4499334 - DNA, 25 bp, Homo sapien
gaaaacagacggagcgaagggtgaa

SEQ ID NO: 4499335 - DNA, 25 bp, Homo sapien
ttatttaaggaagaggaaagcacag

SEQ ID NO: 4499336 - DNA, 25 bp, Homo sapien
aagagcagatgcgttgggaacagat

SEQ ID NO: 4499337 - DNA, 25 bp, Homo sapien
gccgctcaggtttgtggtggaaaga

SEQ ID NO: 4499338 - DNA, 25 bp, Homo sapien
tggttggtctgtctgtgtgtgttta

SEQ ID NO: 4499339 - DNA, 25 bp, Homo sapien
ggttggtctgtctgtgtgtgtttac

SEQ ID NO: 4499340 - DNA, 25 bp, Homo sapien
tgtagtggttggtctgtctgtgtgt

SEQ ID NO: 4499341 - DNA, 25 bp, Homo sapien
tagtggttggtctgtctgtgtgtgt

SEQ ID NO: 4499342 - DNA, 25 bp, Homo sapien
ctcagtcagagagtggaaaaaactt

SEQ ID NO: 4499343 - DNA, 25 bp, Homo sapien
cagagagtggaaaaaactttctaca

SEQ ID NO: 4499344 - DNA, 25 bp, Homo sapien
aaaactttctacacgcttgtcctgc

SEQ ID NO: 4499345 - DNA, 25 bp, Homo sapien
aaaaactttctacacgcttgtcctg

SEQ ID NO: 4499346 - DNA, 25 bp, Homo sapien
ttttagcagcgctccttccaaccaa

SEQ ID NO: 4499347 - DNA, 25 bp, Homo sapien
tttagcagcgctccttccaaccaat

SEQ ID NO: 4499348 - DNA, 25 bp, Homo sapien
ttagcagcgctccttccaaccaata

SEQ ID NO: 4499349 - DNA, 25 bp, Homo sapien
gtgactactgttgcttgcaatactt

SEQ ID NO: 4499350 - DNA, 25 bp, Homo sapien
tgactactgttgcttgcaatacttt

SEQ ID NO: 4499351 - DNA, 25 bp, Homo sapien
ctttagaacccgatccaacagtgac

SEQ ID NO: 4499352 - DNA, 25 bp, Homo sapien
gaacccgatccaacagtgactactg

SEQ ID NO: 4499353 - DNA, 25 bp, Homo sapien
ctttcacgctaactggttgaatctc

SEQ ID NO: 4499354 - DNA, 25 bp, Homo sapien
ctaaataggaaataatccttgtcat

SEQ ID NO: 4499355 - DNA, 25 bp, Homo sapien
actttatctccaactttcacgctaa

SEQ ID NO: 4499356 - DNA, 25 bp, Homo sapien
actggttgaatctctccagccttac

SEQ ID NO: 4499357 - DNA, 25 bp, Homo sapien
ggaaacaattttggagacactggat

SEQ ID NO: 4499358 - DNA, 25 bp, Homo sapien
gggcagcttcacactgatgccattt

SEQ ID NO: 4499359 - DNA, 25 bp, Homo sapien
gaaatgtttatatcagtacaaggaa

SEQ ID NO: 4499360 - DNA, 25 bp, Homo sapien
acactgatgccatttcagtagtgac

SEQ ID NO: 4499361 - DNA, 25 bp, Homo sapien
aaaggaaagttggcttcggtctgag

SEQ ID NO: 4499362 - DNA, 25 bp, Homo sapien
gaaaggaaagttggcttcggtctga

SEQ ID NO: 4499363 - DNA, 25 bp, Homo sapien
cagaaaggaaagttggcttcggtct

SEQ ID NO: 4499364 - DNA, 25 bp, Homo sapien
agaaaggaaagttggcttcggtctg

SEQ ID NO: 4499365 - DNA, 25 bp, Homo sapien
gctgaaagtctgactgtggcagtga

SEQ ID NO: 4499366 - DNA, 25 bp, Homo sapien
ctgaaagtctgactgtggcagtgag

SEQ ID NO: 4499367 - DNA, 25 bp, Homo sapien
gggtggcggcgacacctgggcttga

SEQ ID NO: 4499368 - DNA, 25 bp, Homo sapien
aagctgaaagtctgactgtggcagt

SEQ ID NO: 4499369 - DNA, 25 bp, Homo sapien
tgggaagaagttggtcaaagatgag

SEQ ID NO: 4499370 - DNA, 25 bp, Homo sapien
gggaagaagttggtcaaagatgagc

SEQ ID NO: 4499371 - DNA, 25 bp, Homo sapien
ctgggaagaagttggtcaaagatga

SEQ ID NO: 4499372 - DNA, 25 bp, Homo sapien
ggaagaagttggtcaaagatgagcc

SEQ ID NO: 4499373 - DNA, 25 bp, Homo sapien
ctcatggactgctggtcaaaaccca

SEQ ID NO: 4499374 - DNA, 25 bp, Homo sapien
ggcctcatggactgctggtcaaaac

SEQ ID NO: 4499375 - DNA, 25 bp, Homo sapien
gcagggcctggcctcatggactgct

SEQ ID NO: 4499376 - DNA, 25 bp, Homo sapien
catggactgctggtcaaaacccaca

SEQ ID NO: 4499377 - DNA, 25 bp, Homo sapien
cgcagttggaatacgggcttggtct

SEQ ID NO: 4499378 - DNA, 25 bp, Homo sapien
aatacgggcttggtctcaaatgaaa

SEQ ID NO: 4499379 - DNA, 25 bp, Homo sapien
ctcgggaaccttgttgcaccagagg

SEQ ID NO: 4499380 - DNA, 25 bp, Homo sapien
gactcccgcagttggaatacgggct

SEQ ID NO: 4499381 - DNA, 25 bp, Homo sapien
cagtctgtcagctcgaaacgtctct

SEQ ID NO: 4499382 - DNA, 25 bp, Homo sapien
tgaggtctttgaacaggctggtgct

SEQ ID NO: 4499383 - DNA, 25 bp, Homo sapien
ttaacatgttgagtccgtccaggct

SEQ ID NO: 4499384 - DNA, 25 bp, Homo sapien
gaaatggagtgtccacgttcaggct

SEQ ID NO: 4499385 - DNA, 25 bp, Homo sapien
tctgattagttgctgggatggtccc

SEQ ID NO: 4499386 - DNA, 25 bp, Homo sapien
aaaacttcatgtcgtaatccaggcg

SEQ ID NO: 4499387 - DNA, 25 bp, Homo sapien
tactcttacacatcggctgactgga

SEQ ID NO: 4499388 - DNA, 25 bp, Homo sapien
tgtcaagataacgaaagcccgtggt

SEQ ID NO: 4499389 - DNA, 25 bp, Homo sapien
tccatccatgtttcctgggtgtcag

SEQ ID NO: 4499390 - DNA, 25 bp, Homo sapien
aatatgtgcgtagagagatgtctcc

SEQ ID NO: 4499391 - DNA, 25 bp, Homo sapien
ggtgctggatttccggaccacttga

SEQ ID NO: 4499392 - DNA, 25 bp, Homo sapien
tcgtaggttgtcaagagatgccatc

SEQ ID NO: 4499393 - DNA, 25 bp, Homo sapien
acatgacgcattagcacccaggagg

SEQ ID NO: 4499394 - DNA, 25 bp, Homo sapien
ctttggcctccaaggtgggataggg

SEQ ID NO: 4499395 - DNA, 25 bp, Homo sapien
tataccatagggttatgataacata

SEQ ID NO: 4499396 - DNA, 25 bp, Homo sapien
ccagggcatatataccatagggtta

SEQ ID NO: 4499397 - DNA, 25 bp, Homo sapien
cagtcagactacacaccagctggga

SEQ ID NO: 4499398 - DNA, 25 bp, Homo sapien
catacagacttaggaacccgggaga

SEQ ID NO: 4499399 - DNA, 25 bp, Homo sapien
tgtcagcatgtcagagttggaacca

SEQ ID NO: 4499400 - DNA, 25 bp, Homo sapien
ggtgtctcattcacaaggctgtcgg

SEQ ID NO: 4499401 - DNA, 25 bp, Homo sapien
ctatttttagatggtggttgaccgc

SEQ ID NO: 4499402 - DNA, 25 bp, Homo sapien
gcaaaactgcaatgtgggggggctg

SEQ ID NO: 4499403 - DNA, 25 bp, Homo sapien
tttttagatggtggttgaccgcagg

SEQ ID NO: 4499404 - DNA, 25 bp, Homo sapien
tagatggtggttgaccgcaggtaac

SEQ ID NO: 4499405 - DNA, 25 bp, Homo sapien
cattgtctcaggcattgacggttgc

SEQ ID NO: 4499406 - DNA, 25 bp, Homo sapien
gtcttttcccgtggccaacatcagg

SEQ ID NO: 4499407 - DNA, 25 bp, Homo sapien
taaggatctggtagctttcactcca

SEQ ID NO: 4499408 - DNA, 25 bp, Homo sapien
caccgaaggtcggagattttccttg

SEQ ID NO: 4499409 - DNA, 25 bp, Homo sapien
tgcaccacggaacgccctcctctct

SEQ ID NO: 4499410 - DNA, 25 bp, Homo sapien
cactgcaccacggaacgccctcctc

SEQ ID NO: 4499411 - DNA, 25 bp, Homo sapien
actgcaccacggaacgccctcctct

SEQ ID NO: 4499412 - DNA, 25 bp, Homo sapien
tgcactgcaccacggaacgccctcc

SEQ ID NO: 4499413 - DNA, 25 bp, Homo sapien
ccctttgtcattatcctgtggtttg

SEQ ID NO: 4499414 - DNA, 25 bp, Homo sapien
ggtttgttcactgacaggtttctgt

SEQ ID NO: 4499415 - DNA, 25 bp, Homo sapien
ccttggctaggaacagcttggaggc

SEQ ID NO: 4499416 - DNA, 25 bp, Homo sapien
tggaggcgtcagtcctagtccaggc

SEQ ID NO: 4499417 - DNA, 25 bp, Homo sapien
aaataaaccatgactacgcacatac

SEQ ID NO: 4499418 - DNA, 25 bp, Homo sapien
catcaaataaaccatgactacgcac

SEQ ID NO: 4499419 - DNA, 25 bp, Homo sapien
tcaaataaaccatgactacgcacat

SEQ ID NO: 4499420 - DNA, 25 bp, Homo sapien
caaataaaccatgactacgcacata

SEQ ID NO: 4499421 - DNA, 25 bp, Homo sapien
tcccagaagaccctccacagttccc

SEQ ID NO: 4499422 - DNA, 25 bp, Homo sapien
cttcatccataatgagggtgacaaa

SEQ ID NO: 4499423 - DNA, 25 bp, Homo sapien
tctctgagtcacagacagctttgag

SEQ ID NO: 4499424 - DNA, 25 bp, Homo sapien
ccaagagcctcttcatccataatga

SEQ ID NO: 4499425 - DNA, 25 bp, Homo sapien
tgtggttccagctccgcatgttcct

SEQ ID NO: 4499426 - DNA, 25 bp, Homo sapien
ggtgccatcgagtgtggttccagct

SEQ ID NO: 4499427 - DNA, 25 bp, Homo sapien
cttctgacttgacctcgtgggtgcc

SEQ ID NO: 4499428 - DNA, 25 bp, Homo sapien
tactcctgcacaagtctgggaggtg

SEQ ID NO: 4499429 - DNA, 25 bp, Homo sapien
tgcaagagctcgggcatgacagagt

SEQ ID NO: 4499430 - DNA, 25 bp, Homo sapien
catgcaagagctcgggcatgacaga

SEQ ID NO: 4499431 - DNA, 25 bp, Homo sapien
acatgcaagagctcgggcatgacag

SEQ ID NO: 4499432 - DNA, 25 bp, Homo sapien
gcaagagctcgggcatgacagagtc

SEQ ID NO: 4499433 - DNA, 25 bp, Homo sapien
gctgtcttggtagaggcttcttgtg

SEQ ID NO: 4499434 - DNA, 25 bp, Homo sapien
ggtagaggcttcttgtgttttcatc

SEQ ID NO: 4499435 - DNA, 25 bp, Homo sapien
ggacagctgtcttggtagaggcttc

SEQ ID NO: 4499436 - DNA, 25 bp, Homo sapien
gtgtccctctttatggggctgctcc

SEQ ID NO: 4499437 - DNA, 25 bp, Homo sapien
gccaagatgtgagttggagggcaat

SEQ ID NO: 4499438 - DNA, 25 bp, Homo sapien
gtgccaagatgtgagttggagggca

SEQ ID NO: 4499439 - DNA, 25 bp, Homo sapien
agatgtgagttggagggcaattttt

SEQ ID NO: 4499440 - DNA, 25 bp, Homo sapien
caagatgtgagttggagggcaattt

SEQ ID NO: 4499441 - DNA, 25 bp, Homo sapien
taatcatgaatacctgttgggagtg

SEQ ID NO: 4499442 - DNA, 25 bp, Homo sapien
tgattcggatatgtgtcagctagca

SEQ ID NO: 4499443 - DNA, 25 bp, Homo sapien
gcatgcgcctctagtccaaggctga

SEQ ID NO: 4499444 - DNA, 25 bp, Homo sapien
gactttgcagtcatataagccaatt

SEQ ID NO: 4499445 - DNA, 25 bp, Homo sapien
tttgcacctgctcgtgtagagaggt

SEQ ID NO: 4499446 - DNA, 25 bp, Homo sapien
aatttgcacctgctcgtgtagagag

SEQ ID NO: 4499447 - DNA, 25 bp, Homo sapien
caatttgcacctgctcgtgtagaga

SEQ ID NO: 4499448 - DNA, 25 bp, Homo sapien
tgcacctgctcgtgtagagaggtac

SEQ ID NO: 4499449 - DNA, 25 bp, Homo sapien
cacatgctacaacattctgagtcaa

SEQ ID NO: 4499450 - DNA, 25 bp, Homo sapien
gaattattgcttactgggttcatag

SEQ ID NO: 4499451 - DNA, 25 bp, Homo sapien
aattaatgccattgagttctactca

SEQ ID NO: 4499452 - DNA, 25 bp, Homo sapien
tggctgtacagcattttgaatgtaa

SEQ ID NO: 4499453 - DNA, 25 bp, Homo sapien
cttcagggcctaccacaatggctgg

SEQ ID NO: 4499454 - DNA, 25 bp, Homo sapien
ttcagggcctaccacaatggctggc

SEQ ID NO: 4499455 - DNA, 25 bp, Homo sapien
tcagggcctaccacaatggctggca

SEQ ID NO: 4499456 - DNA, 25 bp, Homo sapien
tcttcagggcctaccacaatggctg

SEQ ID NO: 4499457 - DNA, 25 bp, Homo sapien
gactacggttacatctcgggcttcc

SEQ ID NO: 4499458 - DNA, 25 bp, Homo sapien
aaaggaagtaggcagctggaacccg

SEQ ID NO: 4499459 - DNA, 25 bp, Homo sapien
cttccggagctagttgggtctttgt

SEQ ID NO: 4499460 - DNA, 25 bp, Homo sapien
tagagtcggtgaaggctttaaagga

SEQ ID NO: 4499461 - DNA, 25 bp, Homo sapien
tcgcacgcagactcctagcggacgg

SEQ ID NO: 4499462 - DNA, 25 bp, Homo sapien
aggatccaaacttcccgcgccgcaa

SEQ ID NO: 4499463 - DNA, 25 bp, Homo sapien
gactcctagcggacggaaccaggat

SEQ ID NO: 4499464 - DNA, 25 bp, Homo sapien
cctagcggacggaaccaggatccaa

SEQ ID NO: 4499465 - DNA, 25 bp, Homo sapien
ccttcctgctcataggtaataccac

SEQ ID NO: 4499466 - DNA, 25 bp, Homo sapien
cctgctcataggtaataccacctgt

SEQ ID NO: 4499467 - DNA, 25 bp, Homo sapien
tcccttcctgctcataggtaatacc

SEQ ID NO: 4499468 - DNA, 25 bp, Homo sapien
ttcctgctcataggtaataccacct

SEQ ID NO: 4499469 - DNA, 25 bp, Homo sapien
tatcaagggatagactgccaaaaag

SEQ ID NO: 4499470 - DNA, 25 bp, Homo sapien
gactactccaagacattcagtgcca

SEQ ID NO: 4499471 - DNA, 25 bp, Homo sapien
ccagtcttctgctaaaagtggagat

SEQ ID NO: 4499472 - DNA, 25 bp, Homo sapien
gatggctatttcagtctatcaaggg

SEQ ID NO: 4499473 - DNA, 25 bp, Homo sapien
tctttgaaataagtgacactaaagt

SEQ ID NO: 4499474 - DNA, 25 bp, Homo sapien
ttttctttgaaataagtgacactaa

SEQ ID NO: 4499475 - DNA, 25 bp, Homo sapien
tactggttggggatctatcaaaatt

SEQ ID NO: 4499476 - DNA, 25 bp, Homo sapien
cactaaagttactggttggggatct

SEQ ID NO: 4499477 - DNA, 25 bp, Homo sapien
gacgttctagttgctcctgtagatt

SEQ ID NO: 4499478 - DNA, 25 bp, Homo sapien
gtagattattttgaggaacagcagc

SEQ ID NO: 4499479 - DNA, 25 bp, Homo sapien
tattattaagtgttctggctgagtg

SEQ ID NO: 4499480 - DNA, 25 bp, Homo sapien
cctgtagattattttgaggaacagc

SEQ ID NO: 4499481 - DNA, 25 bp, Homo sapien
caaagtgggaaaatcaatgaatctc

SEQ ID NO: 4499482 - DNA, 25 bp, Homo sapien
ctggtgctgctaaaacatactctac

SEQ ID NO: 4499483 - DNA, 25 bp, Homo sapien
taagttagtgcctatgtgacagcaa

SEQ ID NO: 4499484 - DNA, 25 bp, Homo sapien
ctctaccattaattggcaaagtggg

SEQ ID NO: 4499485 - DNA, 25 bp, Homo sapien
gaaaaactagattagatggatccat

SEQ ID NO: 4499486 - DNA, 25 bp, Homo sapien
ttccttcggagtctgcaagaaatct

SEQ ID NO: 4499487 - DNA, 25 bp, Homo sapien
gtctcagaagtatcaaagtcatcca

SEQ ID NO: 4499488 - DNA, 25 bp, Homo sapien
ggtagtgcatacaacttccttcgga

SEQ ID NO: 4499489 - DNA, 25 bp, Homo sapien
tttcttgagagcagtatcccgggat

SEQ ID NO: 4499490 - DNA, 25 bp, Homo sapien
ttcagaggagggtggaggcaaatca

SEQ ID NO: 4499491 - DNA, 25 bp, Homo sapien
cagaggagggtggaggcaaatcagt

SEQ ID NO: 4499492 - DNA, 25 bp, Homo sapien
tttcagaggagggtggaggcaaatc

SEQ ID NO: 4499493 - DNA, 25 bp, Homo sapien
ctttcagaggagggtggaggcaaat

SEQ ID NO: 4499494 - DNA, 25 bp, Homo sapien
tgcttaaccattctgagtcatcctt

SEQ ID NO: 4499495 - DNA, 25 bp, Homo sapien
atcgctgcttaaccattctgagtca

SEQ ID NO: 4499496 - DNA, 25 bp, Homo sapien
aaccattctgagtcatccttctgtt

SEQ ID NO: 4499497 - DNA, 25 bp, Homo sapien
ttcctcagtcaaatctatttgctcg

SEQ ID NO: 4499498 - DNA, 25 bp, Homo sapien
ccaaatgagttttcagagagtcact

SEQ ID NO: 4499499 - DNA, 25 bp, Homo sapien
tggggccatcatcgatgcaaatcac

SEQ ID NO: 4499500 - DNA, 25 bp, Homo sapien
caaatgagttttcagagagtcactt

SEQ ID NO: 4499501 - DNA, 25 bp, Homo sapien
ttatatgcacttcagcaatggggcc

SEQ ID NO: 4499502 - DNA, 25 bp, Homo sapien
ttgataaacatagatttgttaacca

SEQ ID NO: 4499503 - DNA, 25 bp, Homo sapien
gaaggtggaacaaaatccgtatcat

SEQ ID NO: 4499504 - DNA, 25 bp, Homo sapien
caaattcaatacatggaactttctc

SEQ ID NO: 4499505 - DNA, 25 bp, Homo sapien
ggaacaaaatccgtatcataatcat

SEQ ID NO: 4499506 - DNA, 25 bp, Homo sapien
gttgaatgtaattcagcttcttcca

SEQ ID NO: 4499507 - DNA, 25 bp, Homo sapien
tctggattcagctcctgcatactca

SEQ ID NO: 4499508 - DNA, 25 bp, Homo sapien
gtcagaggtgtcaaggtcctttaac

SEQ ID NO: 4499509 - DNA, 25 bp, Homo sapien
ttctcaggttttgacaaaagatctt

SEQ ID NO: 4499510 - DNA, 25 bp, Homo sapien
ctcctgcatactcattttctcaggt

SEQ ID NO: 4499511 - DNA, 25 bp, Homo sapien
atggtatgtctaaaatattgcttgt

SEQ ID NO: 4499512 - DNA, 25 bp, Homo sapien
tggtatgtctaaaatattgcttgta

SEQ ID NO: 4499513 - DNA, 25 bp, Homo sapien
ggtatgtctaaaatattgcttgtac

SEQ ID NO: 4499514 - DNA, 25 bp, Homo sapien
taagcaaggtcattggctggaacaa

SEQ ID NO: 4499515 - DNA, 25 bp, Homo sapien
tgttaagcgttggacaggcaagagc

SEQ ID NO: 4499516 - DNA, 25 bp, Homo sapien
aactctggaaatacttagggctgac

SEQ ID NO: 4499517 - DNA, 25 bp, Homo sapien
caagcttaatatgattctggtggcc

SEQ ID NO: 4499518 - DNA, 25 bp, Homo sapien
cacctgaggtcaggagttcgagacc

SEQ ID NO: 4499519 - DNA, 25 bp, Homo sapien
aggccaagaagggtagatcacctga

SEQ ID NO: 4499520 - DNA, 25 bp, Homo sapien
cctgaggtcaggagttcgagaccag

SEQ ID NO: 4499521 - DNA, 25 bp, Homo sapien
ggaggccaagaagggtagatcacct

SEQ ID NO: 4499522 - DNA, 25 bp, Homo sapien
cagtttatcatcaggaatagtatca

SEQ ID NO: 4499523 - DNA, 25 bp, Homo sapien
cagatgtgctccatcacatgaataa

SEQ ID NO: 4499524 - DNA, 25 bp, Homo sapien
tccgctgctgaagcagttcgttccc

SEQ ID NO: 4499525 - DNA, 25 bp, Homo sapien
cgttcccacaatccaaaagtttcag

SEQ ID NO: 4499526 - DNA, 25 bp, Homo sapien
aatatattcgcttttttcccaatct

SEQ ID NO: 4499527 - DNA, 25 bp, Homo sapien
catgaatacgaatgttaaaggagtg

SEQ ID NO: 4499528 - DNA, 25 bp, Homo sapien
atataagtagtttactctggtaggc

SEQ ID NO: 4499529 - DNA, 25 bp, Homo sapien
gagaacaacgtattaaatataagta

SEQ ID NO: 4499530 - DNA, 25 bp, Homo sapien
gaagactggcatcacttttattaaa

SEQ ID NO: 4499531 - DNA, 25 bp, Homo sapien
gcctgtatctccacaatgagccaag

SEQ ID NO: 4499532 - DNA, 25 bp, Homo sapien
cctccatagggccatcaagtgaatc

SEQ ID NO: 4499533 - DNA, 25 bp, Homo sapien
tcaagtgaatcaggcctgtatctcc

SEQ ID NO: 4499534 - DNA, 25 bp, Homo sapien
gttgctacttacaaaggacttctgt

SEQ ID NO: 4499535 - DNA, 25 bp, Homo sapien
ggcagagaatcctgtctttcctagg

SEQ ID NO: 4499536 - DNA, 25 bp, Homo sapien
cttggtgtttcagcccagttgctac

SEQ ID NO: 4499537 - DNA, 25 bp, Homo sapien
ggtagtcagtaaacagtccccagga

SEQ ID NO: 4499538 - DNA, 25 bp, Homo sapien
actgatttaattggccgaccttcct

SEQ ID NO: 4499539 - DNA, 25 bp, Homo sapien
ctgtcttggctgaggaaagtctttc

SEQ ID NO: 4499540 - DNA, 25 bp, Homo sapien
gagaagtttatattttgagcagtag

SEQ ID NO: 4499541 - DNA, 25 bp, Homo sapien
tttgctggctgctaaattatgcatt

SEQ ID NO: 4499542 - DNA, 25 bp, Homo sapien
gtctcaaagccaccaaaaacttgcc

SEQ ID NO: 4499543 - DNA, 25 bp, Homo sapien
gactttttctacagcacctaccact

SEQ ID NO: 4499544 - DNA, 25 bp, Homo sapien
ttcccttgccctgcagaatcactgg

SEQ ID NO: 4499545 - DNA, 25 bp, Homo sapien
tacatgaatacagtgaaagtacagc

SEQ ID NO: 4499546 - DNA, 25 bp, Homo sapien
ctaagactttggaaacgctcatgtt

SEQ ID NO: 4499547 - DNA, 25 bp, Homo sapien
cagtcggcatcaggataaaacagtc

SEQ ID NO: 4499548 - DNA, 25 bp, Homo sapien
ggatgctaaattttgtgctgacttg

SEQ ID NO: 4499549 - DNA, 25 bp, Homo sapien
ccaagcagtgcagcattgatcgcct

SEQ ID NO: 4499550 - DNA, 25 bp, Homo sapien
gggagctggtaacacaaactcttac

SEQ ID NO: 4499551 - DNA, 25 bp, Homo sapien
tggacttgatctacgataagtgatc

SEQ ID NO: 4499552 - DNA, 25 bp, Homo sapien
tacgataagtgatctcaagggagaa

SEQ ID NO: 4499553 - DNA, 25 bp, Homo sapien
aagtcagcttttggacttgatctac

SEQ ID NO: 4499554 - DNA, 25 bp, Homo sapien
gaactatgccgacctggcagtactg

SEQ ID NO: 4499555 - DNA, 25 bp, Homo sapien
aagggaaagagaactatgccgacct

SEQ ID NO: 4499556 - DNA, 25 bp, Homo sapien
gaaagagaactatgccgacctggca

SEQ ID NO: 4499557 - DNA, 25 bp, Homo sapien
gccgacctggcagtactgaaaaaag

SEQ ID NO: 4499558 - DNA, 25 bp, Homo sapien
catatagaagttttatgattgggtc

SEQ ID NO: 4499559 - DNA, 25 bp, Homo sapien
gcttctgagtcagtcttatcacctg

SEQ ID NO: 4499560 - DNA, 25 bp, Homo sapien
tatcacctgtcagatatgtagctgg

SEQ ID NO: 4499561 - DNA, 25 bp, Homo sapien
cttttctggagtgacatatagaagt

SEQ ID NO: 4499562 - DNA, 25 bp, Homo sapien
gaaatgagtctgttacttgcacaga

SEQ ID NO: 4499563 - DNA, 25 bp, Homo sapien
tgccaagagcttcctctcatagaga

SEQ ID NO: 4499564 - DNA, 25 bp, Homo sapien
catcaataacaaaacgtgccaagag

SEQ ID NO: 4499565 - DNA, 25 bp, Homo sapien
agattctccagagtagaaatgagtc

SEQ ID NO: 4499566 - DNA, 25 bp, Homo sapien
tttgtaatcttgacgaaaatcatgt

SEQ ID NO: 4499567 - DNA, 25 bp, Homo sapien
tcttttgtaatcttgacgaaaatca

SEQ ID NO: 4499568 - DNA, 25 bp, Homo sapien
tgtaatcttgacgaaaatcatgtcc

SEQ ID NO: 4499569 - DNA, 25 bp, Homo sapien
aatcttgacgaaaatcatgtcccca

SEQ ID NO: 4499570 - DNA, 25 bp, Homo sapien
cggaacagaaggaaacttctggcga

SEQ ID NO: 4499571 - DNA, 25 bp, Homo sapien
aacagaaggaaacttctggcgaagc

SEQ ID NO: 4499572 - DNA, 25 bp, Homo sapien
caccggaacagaaggaaacttctgg

SEQ ID NO: 4499573 - DNA, 25 bp, Homo sapien
cagaaggaaacttctggcgaagcat

SEQ ID NO: 4499574 - DNA, 25 bp, Homo sapien
tgtaccctgggattagctgtggccg

SEQ ID NO: 4499575 - DNA, 25 bp, Homo sapien
cctgggattagctgtggccgtaaga

SEQ ID NO: 4499576 - DNA, 25 bp, Homo sapien
cttctgtaccctgggattagctgtg

SEQ ID NO: 4499577 - DNA, 25 bp, Homo sapien
taccctgggattagctgtggccgta

SEQ ID NO: 4499578 - DNA, 25 bp, Homo sapien
ttcgccagggccacgacatagcagc

SEQ ID NO: 4499579 - DNA, 25 bp, Homo sapien
ctgacttcgccagggccacgacata

SEQ ID NO: 4499580 - DNA, 25 bp, Homo sapien
ggccacgacatagcagcagttgagc

SEQ ID NO: 4499581 - DNA, 25 bp, Homo sapien
ccagggccacgacatagcagcagtt

SEQ ID NO: 4499582 - DNA, 25 bp, Homo sapien
tggaataaagccttttttgtgtgcc

SEQ ID NO: 4499583 - DNA, 25 bp, Homo sapien
tattattacagactggcgggaggag

SEQ ID NO: 4499584 - DNA, 25 bp, Homo sapien
tgtgccttatatttcccaaagagga

SEQ ID NO: 4499585 - DNA, 25 bp, Homo sapien
ggaagaatattattacagactggcg

SEQ ID NO: 4499586 - DNA, 25 bp, Homo sapien
tatttcagattatgtctgttaaagc

SEQ ID NO: 4499587 - DNA, 25 bp, Homo sapien
taggctttttcggtaatacatagta

SEQ ID NO: 4499588 - DNA, 25 bp, Homo sapien
ttctaggcaatcaaatgccaccttt

SEQ ID NO: 4499589 - DNA, 25 bp, Homo sapien
tgggtggtgctttctgatccattct

SEQ ID NO: 4499590 - DNA, 25 bp, Homo sapien
cacattctcgcctggagaggcagta

SEQ ID NO: 4499591 - DNA, 25 bp, Homo sapien
agaggcagtaaattatccctgaatc

SEQ ID NO: 4499592 - DNA, 25 bp, Homo sapien
ggtgtcacattctcgcctggagagg

SEQ ID NO: 4499593 - DNA, 25 bp, Homo sapien
ggagaggcagtaaattatccctgaa

SEQ ID NO: 4499594 - DNA, 25 bp, Homo sapien
ctgacagccatcctgattaatccac

SEQ ID NO: 4499595 - DNA, 25 bp, Homo sapien
catctctctgtaacgtgtcagccat

SEQ ID NO: 4499596 - DNA, 25 bp, Homo sapien
agcatggtaagcaagagcagcgagc

SEQ ID NO: 4499597 - DNA, 25 bp, Homo sapien
cagccatcctgattaatccacttct

SEQ ID NO: 4499598 - DNA, 25 bp, Homo sapien
taagagagccagaatcaactgcagt

SEQ ID NO: 4499599 - DNA, 25 bp, Homo sapien
tgcagtcagcccacgatgtgctgcc

SEQ ID NO: 4499600 - DNA, 25 bp, Homo sapien
ggcactttcttgtatgacttggcat

SEQ ID NO: 4499601 - DNA, 25 bp, Homo sapien
gcaatgccattaaaacccaagaagg

SEQ ID NO: 4499602 - DNA, 25 bp, Homo sapien
tccacagatttagggagagatgcat

SEQ ID NO: 4499603 - DNA, 25 bp, Homo sapien
aagcaggcagtgagatatttcccca

SEQ ID NO: 4499604 - DNA, 25 bp, Homo sapien
gattcttggtagtaaccctccacag

SEQ ID NO: 4499605 - DNA, 25 bp, Homo sapien
catgaatcacaaatcgcacgtccgg

SEQ ID NO: 4499606 - DNA, 25 bp, Homo sapien
gttaacagcattgtcaacatggcat

SEQ ID NO: 4499607 - DNA, 25 bp, Homo sapien
caccgaactgaacatcctgaggaag

SEQ ID NO: 4499608 - DNA, 25 bp, Homo sapien
tatttatcagtcgagcatccaccga

SEQ ID NO: 4499609 - DNA, 25 bp, Homo sapien
cagagcctgagattacggcagtggc

SEQ ID NO: 4499610 - DNA, 25 bp, Homo sapien
tacagcaattatcacaagaaacatc

SEQ ID NO: 4499611 - DNA, 25 bp, Homo sapien
tgggtgtttcttacaaaaatcagga

SEQ ID NO: 4499612 - DNA, 25 bp, Homo sapien
cacagtaatgtaccatgctatacaa

SEQ ID NO: 4499613 - DNA, 25 bp, Homo sapien
aaaagctgtattctcctgcattccg

SEQ ID NO: 4499614 - DNA, 25 bp, Homo sapien
ccaagaaaatgtcgaccagcatatt

SEQ ID NO: 4499615 - DNA, 25 bp, Homo sapien
cttacaatacttttcacatcgtcag

SEQ ID NO: 4499616 - DNA, 25 bp, Homo sapien
tgttcttgaacaaatcttacaatac

SEQ ID NO: 4499617 - DNA, 25 bp, Homo sapien
ttttcacatcgtcagtcacatctct

SEQ ID NO: 4499618 - DNA, 25 bp, Homo sapien
tatttccgagcatcacataagcgat

SEQ ID NO: 4499619 - DNA, 25 bp, Homo sapien
cattggcattgatatataagtcttc

SEQ ID NO: 4499620 - DNA, 25 bp, Homo sapien
taagcgatcgcctggtcattggcat

SEQ ID NO: 4499621 - DNA, 25 bp, Homo sapien
taaaaagtctttcggcattgtgtcg

SEQ ID NO: 4499622 - DNA, 25 bp, Homo sapien
gcttcttgagagtgacggtattaaa

SEQ ID NO: 4499623 - DNA, 25 bp, Homo sapien
ctctgagacacttttgctactaacg

SEQ ID NO: 4499624 - DNA, 25 bp, Homo sapien
aaaatattgaagtaatggacaccaa

SEQ ID NO: 4499625 - DNA, 25 bp, Homo sapien
cacttttgctactaacgctttttgt

SEQ ID NO: 4499626 - DNA, 25 bp, Homo sapien
tggagtggagcagatctgctcttgc

SEQ ID NO: 4499627 - DNA, 25 bp, Homo sapien
ttccagcggcataggccagggcaga

SEQ ID NO: 4499628 - DNA, 25 bp, Homo sapien
tgggacctgtgccatgtgcgtggag

SEQ ID NO: 4499629 - DNA, 25 bp, Homo sapien
gcagatctgctcttgcccactgttc

SEQ ID NO: 4499630 - DNA, 25 bp, Homo sapien
atcacttccgcaccatatttttcca

SEQ ID NO: 4499631 - DNA, 25 bp, Homo sapien
aatcacttccgcaccatatttttcc

SEQ ID NO: 4499632 - DNA, 25 bp, Homo sapien
tactgaaatcacttccgcaccatat

SEQ ID NO: 4499633 - DNA, 25 bp, Homo sapien
taatactgaaatcacttccgcacca

SEQ ID NO: 4499634 - DNA, 25 bp, Homo sapien
ttctgtgctctcaatatttcctaca

SEQ ID NO: 4499635 - DNA, 25 bp, Homo sapien
tctgtgctctcaatatttcctacaa

SEQ ID NO: 4499636 - DNA, 25 bp, Homo sapien
tacaggtgatgtcgcactggtccac

SEQ ID NO: 4499637 - DNA, 25 bp, Homo sapien
gaggtttagctcatactgtcgcata

SEQ ID NO: 4499638 - DNA, 25 bp, Homo sapien
gggcccattttagcagatacctagc

SEQ ID NO: 4499639 - DNA, 25 bp, Homo sapien
cagttagttctggtaggcaattcaa

SEQ ID NO: 4499640 - DNA, 25 bp, Homo sapien
tatttcctcgtcgagctcctcagcg

SEQ ID NO: 4499641 - DNA, 25 bp, Homo sapien
gctcctcagcggcacttcttccggg

SEQ ID NO: 4499642 - DNA, 25 bp, Homo sapien
caaagtagtgggaagatacgggtat

SEQ ID NO: 4499643 - DNA, 25 bp, Homo sapien
tgctgctggacaggcttatccctgg

SEQ ID NO: 4499644 - DNA, 25 bp, Homo sapien
tgggaggctggcatctttttcctct

SEQ ID NO: 4499645 - DNA, 25 bp, Homo sapien
ccctttgccttggaaccactggaag

SEQ ID NO: 4499646 - DNA, 25 bp, Homo sapien
ttctcctcttagacctttgggaggc

SEQ ID NO: 4499647 - DNA, 25 bp, Homo sapien
ggaaccactggaagcagtttttctc

SEQ ID NO: 4499648 - DNA, 25 bp, Homo sapien
ccttgttccctatattgaaaaagat

SEQ ID NO: 4499649 - DNA, 25 bp, Homo sapien
cttgttccctatattgaaaaagatg

SEQ ID NO: 4499650 - DNA, 25 bp, Homo sapien
tactcagaaggacaagaggtagaaa

SEQ ID NO: 4499651 - DNA, 25 bp, Homo sapien
ctcagaaggacaagaggtagaaaaa

SEQ ID NO: 4499652 - DNA, 25 bp, Homo sapien
actcagaaggacaagaggtagaaaa

SEQ ID NO: 4499653 - DNA, 25 bp, Homo sapien
ttactcagaaggacaagaggtagaa

SEQ ID NO: 4499654 - DNA, 25 bp, Homo sapien
gaccgcggcccttcatataaatttg

SEQ ID NO: 4499655 - DNA, 25 bp, Homo sapien
tgtgcattttctgcctacgagcccc

SEQ ID NO: 4499656 - DNA, 25 bp, Homo sapien
gagctacaataccacttccctgggc

SEQ ID NO: 4499657 - DNA, 25 bp, Homo sapien
tacttatggaataaaggaccgcggc

SEQ ID NO: 4499658 - DNA, 25 bp, Homo sapien
ggtggagccataatccccaatttgc

SEQ ID NO: 4499659 - DNA, 25 bp, Homo sapien
tatctttctacatgtggcagacccc

SEQ ID NO: 4499660 - DNA, 25 bp, Homo sapien
catatgaaggcttaagaaacggtct

SEQ ID NO: 4499661 - DNA, 25 bp, Homo sapien
tattggctcctgatgtcgcttgaga

SEQ ID NO: 4499662 - DNA, 25 bp, Homo sapien
gaaagagggtctatgtacattgaga

SEQ ID NO: 4499663 - DNA, 25 bp, Homo sapien
ggtcagatgctgacaaacaagaaag

SEQ ID NO: 4499664 - DNA, 25 bp, Homo sapien
caaatggtataacaagaataacagc

SEQ ID NO: 4499665 - DNA, 25 bp, Homo sapien
aacagctttatagtcacagatggtc

SEQ ID NO: 4499666 - DNA, 25 bp, Homo sapien
tgctggggccaattggcccattatg

SEQ ID NO: 4499667 - DNA, 25 bp, Homo sapien
ctggggccaattggcccattatgga

SEQ ID NO: 4499668 - DNA, 25 bp, Homo sapien
gatgctggggccaattggcccatta

SEQ ID NO: 4499669 - DNA, 25 bp, Homo sapien
agatgctggggccaattggcccatt

SEQ ID NO: 4499670 - DNA, 25 bp, Homo sapien
caacctgagaaagatggtggtccct

SEQ ID NO: 4499671 - DNA, 25 bp, Homo sapien
gaaagatggtggtccctttcccaga

SEQ ID NO: 4499672 - DNA, 25 bp, Homo sapien
caactttcgggggttgctggctcct

SEQ ID NO: 4499673 - DNA, 25 bp, Homo sapien
gctggctcctttgacaacctgagaa

SEQ ID NO: 4499674 - DNA, 25 bp, Homo sapien
ctgggtgtcatcaacccctggcgct

SEQ ID NO: 4499675 - DNA, 25 bp, Homo sapien
ggcagttgggccaggatgtcctgct

SEQ ID NO: 4499676 - DNA, 25 bp, Homo sapien
gggcgccctgggtgtcatcaacccc

SEQ ID NO: 4499677 - DNA, 25 bp, Homo sapien
tgtcatcaacccctggcgctgttct

SEQ ID NO: 4499678 - DNA, 25 bp, Homo sapien
gttctgctacgggaaccttcctgtc

SEQ ID NO: 4499679 - DNA, 25 bp, Homo sapien
cctgacgttttacttgttctgctac

SEQ ID NO: 4499680 - DNA, 25 bp, Homo sapien
gctcggttagctaactcctgacgtt

SEQ ID NO: 4499681 - DNA, 25 bp, Homo sapien
cagttttgaggctgcattgttttca

SEQ ID NO: 4499682 - DNA, 25 bp, Homo sapien
ccaacgaggcaggggcttaggatca

SEQ ID NO: 4499683 - DNA, 25 bp, Homo sapien
gaggcaggggcttaggatcaggact

SEQ ID NO: 4499684 - DNA, 25 bp, Homo sapien
ttaggatcaggactgggacaagcat

SEQ ID NO: 4499685 - DNA, 25 bp, Homo sapien
gggcttaggatcaggactgggacaa

SEQ ID NO: 4499686 - DNA, 25 bp, Homo sapien
agctgcttttgctgcggtgcctaga

SEQ ID NO: 4499687 - DNA, 25 bp, Homo sapien
gggattgccctgaagctgcttttgc

SEQ ID NO: 4499688 - DNA, 25 bp, Homo sapien
ctgcggtgcctagagggtatgattt

SEQ ID NO: 4499689 - DNA, 25 bp, Homo sapien
gtgtggggtgacacttcccaaggct

SEQ ID NO: 4499690 - DNA, 25 bp, Homo sapien
tgggggcctgagccgccttcacagc

SEQ ID NO: 4499691 - DNA, 25 bp, Homo sapien
ttgggggcctgagccgccttcacag

SEQ ID NO: 4499692 - DNA, 25 bp, Homo sapien
tttcctgaacgccaggcctcttgca

SEQ ID NO: 4499693 - DNA, 25 bp, Homo sapien
gccagagctggactcctttccctgc

SEQ ID NO: 4499694 - DNA, 25 bp, Homo sapien
gatggtcagcgggccctttcctgaa

SEQ ID NO: 4499695 - DNA, 25 bp, Homo sapien
cagagctggactcctttccctgcac

SEQ ID NO: 4499696 - DNA, 25 bp, Homo sapien
tgttgggaccggttctgagctccca

SEQ ID NO: 4499697 - DNA, 25 bp, Homo sapien
gttgggaccggttctgagctcccat

SEQ ID NO: 4499698 - DNA, 25 bp, Homo sapien
acgatagtgagaggctcaccgggca

SEQ ID NO: 4499699 - DNA, 25 bp, Homo sapien
tagccagtagcctgacgcaaatcct

SEQ ID NO: 4499700 - DNA, 25 bp, Homo sapien
tcaccgggcagaaggcacgcgtgca

SEQ ID NO: 4499701 - DNA, 25 bp, Homo sapien
tccttatcagagcagaccacatttt

SEQ ID NO: 4499702 - DNA, 25 bp, Homo sapien
acctggtccaagaattctgaccact

SEQ ID NO: 4499703 - DNA, 25 bp, Homo sapien
tctgaccacttgccggctgcaagga

SEQ ID NO: 4499704 - DNA, 25 bp, Homo sapien
ctggtccaagaattctgaccacttg

SEQ ID NO: 4499705 - DNA, 25 bp, Homo sapien
ttctgaccacttgccggctgcaagg

SEQ ID NO: 4499706 - DNA, 25 bp, Homo sapien
agctggagcagcatttttttcgacc

SEQ ID NO: 4499707 - DNA, 25 bp, Homo sapien
gcatttttttcgaccaggcctggag

SEQ ID NO: 4499708 - DNA, 25 bp, Homo sapien
gaagttgcatctgagtgctcaggct

SEQ ID NO: 4499709 - DNA, 25 bp, Homo sapien
tggaagttgcatctgagtgctcagg

SEQ ID NO: 4499710 - DNA, 25 bp, Homo sapien
ggtgatgcttctctgtcatacggca

SEQ ID NO: 4499711 - DNA, 25 bp, Homo sapien
tgtaagtcctgaatccacctggagt

SEQ ID NO: 4499712 - DNA, 25 bp, Homo sapien
tatgcaaggttctgtctccgggact

SEQ ID NO: 4499713 - DNA, 25 bp, Homo sapien
tatggatcaccacttgtcccaacgc

SEQ ID NO: 4499714 - DNA, 25 bp, Homo sapien
cagatggacgtggtgatgagccaca

SEQ ID NO: 4499715 - DNA, 25 bp, Homo sapien
gatgtactatgatgcactgggcagc

SEQ ID NO: 4499716 - DNA, 25 bp, Homo sapien
gagccaccgtgggatgtactatgat

SEQ ID NO: 4499717 - DNA, 25 bp, Homo sapien
gaggaatacacccatcagggccgac

SEQ ID NO: 4499718 - DNA, 25 bp, Homo sapien
acttttctcacttgtcccgccatgg

SEQ ID NO: 4499719 - DNA, 25 bp, Homo sapien
cctgttccccaatcttagaggtggc

SEQ ID NO: 4499720 - DNA, 25 bp, Homo sapien
gaaacctgtggtttgggctccagcg

SEQ ID NO: 4499721 - DNA, 25 bp, Homo sapien
tacaccagccaactagagtgattgt

SEQ ID NO: 4499722 - DNA, 25 bp, Homo sapien
gctccagagcacctgggattcatcc

SEQ ID NO: 4499723 - DNA, 25 bp, Homo sapien
gcacctgggattcatcctggccgct

SEQ ID NO: 4499724 - DNA, 25 bp, Homo sapien
tgcttccccgccactcactgcagct

SEQ ID NO: 4499725 - DNA, 25 bp, Homo sapien
agagcacctgggattcatcctggcc

SEQ ID NO: 4499726 - DNA, 25 bp, Homo sapien
gttattccaaggtcgcagagtagcc

SEQ ID NO: 4499727 - DNA, 25 bp, Homo sapien
gataagtccagttggccttgtccca

SEQ ID NO: 4499728 - DNA, 25 bp, Homo sapien
gattcgggcacctttacaaacactg

SEQ ID NO: 4499729 - DNA, 25 bp, Homo sapien
tcgctccctgtgagataacctggct

SEQ ID NO: 4499730 - DNA, 25 bp, Homo sapien
cttttccaggcgaccgccgcggcgg

SEQ ID NO: 4499731 - DNA, 25 bp, Homo sapien
ttttccaggcgaccgccgcggcggc

SEQ ID NO: 4499732 - DNA, 25 bp, Homo sapien
aggaccgactgctgtttcccagaca

SEQ ID NO: 4499733 - DNA, 25 bp, Homo sapien
tggtaaaaactgctggaccagcggc

SEQ ID NO: 4499734 - DNA, 25 bp, Homo sapien
cagtccctgcccactatttgctgga

SEQ ID NO: 4499735 - DNA, 25 bp, Homo sapien
gtgaatttatcgctcccagtccctg

SEQ ID NO: 4499736 - DNA, 25 bp, Homo sapien
gcaaagcagattcagccatagggag

SEQ ID NO: 4499737 - DNA, 25 bp, Homo sapien
gagatggccgctatcagcaaagtca

SEQ ID NO: 4499738 - DNA, 25 bp, Homo sapien
catagggagttattcgcaaagcccc

SEQ ID NO: 4499739 - DNA, 25 bp, Homo sapien
cagggccccagactcgtttttacag

SEQ ID NO: 4499740 - DNA, 25 bp, Homo sapien
ggcctggtcacagggcctcggctcc

SEQ ID NO: 4499741 - DNA, 25 bp, Homo sapien
gtcacagggcctcggctcccaggtg

SEQ ID NO: 4499742 - DNA, 25 bp, Homo sapien
cccggggctgactggtgggggcatg

SEQ ID NO: 4499743 - DNA, 25 bp, Homo sapien
cctggagcgcccgtctccttggcct

SEQ ID NO: 4499744 - DNA, 25 bp, Homo sapien
taccacccatagcaaccagggcctc

SEQ ID NO: 4499745 - DNA, 25 bp, Homo sapien
acccatagcaaccagggcctcagct

SEQ ID NO: 4499746 - DNA, 25 bp, Homo sapien
accacccatagcaaccagggcctca

SEQ ID NO: 4499747 - DNA, 25 bp, Homo sapien
tgaggaacccatgcttccgtgccac

SEQ ID NO: 4499748 - DNA, 25 bp, Homo sapien
cccaggttgaggaacccatgcttcc

SEQ ID NO: 4499749 - DNA, 25 bp, Homo sapien
tgcttccgtgccacactgttggcca

SEQ ID NO: 4499750 - DNA, 25 bp, Homo sapien
tgcgcacagcccacgtgttggtgaa

SEQ ID NO: 4499751 - DNA, 25 bp, Homo sapien
tcctcgatgccagaagtggtaatag

SEQ ID NO: 4499752 - DNA, 25 bp, Homo sapien
cagaagtggtaatagtccccgaaga

SEQ ID NO: 4499753 - DNA, 25 bp, Homo sapien
gtgccgcgggcggtgaggcgacagg

SEQ ID NO: 4499754 - DNA, 25 bp, Homo sapien
gggaccgcttcgtcactcctcgatg

SEQ ID NO: 4499755 - DNA, 25 bp, Homo sapien
tcccgtttagtccgtcgctttgcca

SEQ ID NO: 4499756 - DNA, 25 bp, Homo sapien
tgtgggctcctggtacacgtcccgt

SEQ ID NO: 4499757 - DNA, 25 bp, Homo sapien
ttagtccgtcgctttgccacctgct

SEQ ID NO: 4499758 - DNA, 25 bp, Homo sapien
ctgtgggctcctggtacacgtcccg

SEQ ID NO: 4499759 - DNA, 25 bp, Homo sapien
gatgccatcgtccagaatggagacc

SEQ ID NO: 4499760 - DNA, 25 bp, Homo sapien
taattgcctgccaagtccgggtggt

SEQ ID NO: 4499761 - DNA, 25 bp, Homo sapien
ttcaggtcccgctgagtgacaccag

SEQ ID NO: 4499762 - DNA, 25 bp, Homo sapien
aatggagaccacaatgccgtgccct

SEQ ID NO: 4499763 - DNA, 25 bp, Homo sapien
ctcagcagggatcacggcctccctc

SEQ ID NO: 4499764 - DNA, 25 bp, Homo sapien
tcagcagggatcacggcctccctcc

SEQ ID NO: 4499765 - DNA, 25 bp, Homo sapien
tcattgacatcaaaactggccccag

SEQ ID NO: 4499766 - DNA, 25 bp, Homo sapien
ggtcattgacatcaaaactggcccc

SEQ ID NO: 4499767 - DNA, 25 bp, Homo sapien
tgtgtgtaccgaggctgggggtcag

SEQ ID NO: 4499768 - DNA, 25 bp, Homo sapien
tctgtgtgtaccgaggctgggggtc

SEQ ID NO: 4499769 - DNA, 25 bp, Homo sapien
ctccaatgcgggcgttgtaggccac

SEQ ID NO: 4499770 - DNA, 25 bp, Homo sapien
caatgcgggcgttgtaggccacacc

SEQ ID NO: 4499771 - DNA, 25 bp, Homo sapien
acagacaccgttgttggccaccgca

SEQ ID NO: 4499772 - DNA, 25 bp, Homo sapien
cttcccccgcacaccgtgtgccgtg

SEQ ID NO: 4499773 - DNA, 25 bp, Homo sapien
acggaagaaggcctcctcggcgagg

SEQ ID NO: 4499774 - DNA, 25 bp, Homo sapien
gtcacctcgccatccagcatgcgca

SEQ ID NO: 4499775 - DNA, 25 bp, Homo sapien
ccactgtcttgccgtcatcctcggg

SEQ ID NO: 4499776 - DNA, 25 bp, Homo sapien
ggttcaggcccagcgagcgtgcctc

SEQ ID NO: 4499777 - DNA, 25 bp, Homo sapien
cagttgcagctgtcatgttcccggc

SEQ ID NO: 4499778 - DNA, 25 bp, Homo sapien
tgtaccacggcacgttgccaaactg

SEQ ID NO: 4499779 - DNA, 25 bp, Homo sapien
tgccaaactgcgtggcgctgctgat

SEQ ID NO: 4499780 - DNA, 25 bp, Homo sapien
cccgaggcccagacaaagatggagc

SEQ ID NO: 4499781 - DNA, 25 bp, Homo sapien
ctgaggtgcccgtgtgagactccgt

SEQ ID NO: 4499782 - DNA, 25 bp, Homo sapien
gactccgtgcacttctgccgcaagt

SEQ ID NO: 4499783 - DNA, 25 bp, Homo sapien
tgtgagactccgtgcacttctgccg

SEQ ID NO: 4499784 - DNA, 25 bp, Homo sapien
gagagcaatgatgccggctgctaag

SEQ ID NO: 4499785 - DNA, 25 bp, Homo sapien
ctggggatcagtcttttttgggagc

SEQ ID NO: 4499786 - DNA, 25 bp, Homo sapien
gatcagtcttttttgggagcagctc

SEQ ID NO: 4499787 - DNA, 25 bp, Homo sapien
gggatcagtcttttttgggagcagc

SEQ ID NO: 4499788 - DNA, 25 bp, Homo sapien
tcagtcttttttgggagcagctctc

SEQ ID NO: 4499789 - DNA, 25 bp, Homo sapien
tgcatgtcccgccatgtgaggttct

SEQ ID NO: 4499790 - DNA, 25 bp, Homo sapien
cattgaggtgggctggcttcgaggt

SEQ ID NO: 4499791 - DNA, 25 bp, Homo sapien
cacaccattggtggcccagtcgttg

SEQ ID NO: 4499792 - DNA, 25 bp, Homo sapien
cttcgaggtctgtaccaccaggtgt

SEQ ID NO: 4499793 - DNA, 25 bp, Homo sapien
tgtggtccaattctgggccagggcc

SEQ ID NO: 4499794 - DNA, 25 bp, Homo sapien
caaaagcccgtagccatatgagtgg

SEQ ID NO: 4499795 - DNA, 25 bp, Homo sapien
gatgtcgatgatgcacttccgctgg

SEQ ID NO: 4499796 - DNA, 25 bp, Homo sapien
atggcgcctgcgtccaaaagcccgt

SEQ ID NO: 4499797 - DNA, 25 bp, Homo sapien
gggaccagcgggcaccccctgcgac

SEQ ID NO: 4499798 - DNA, 25 bp, Homo sapien
agcgggcaccccctgcgactctcag

SEQ ID NO: 4499799 - DNA, 25 bp, Homo sapien
ggaccagcgggcaccccctgcgact

SEQ ID NO: 4499800 - DNA, 25 bp, Homo sapien
ggcaccccctgcgactctcaggtcc

SEQ ID NO: 4499801 - DNA, 25 bp, Homo sapien
tggccaggtcgccacggcgattata

SEQ ID NO: 4499802 - DNA, 25 bp, Homo sapien
ttataggacagggtgagccgcgcct

SEQ ID NO: 4499803 - DNA, 25 bp, Homo sapien
aggcacgcggtcacggtcttccgca

SEQ ID NO: 4499804 - DNA, 25 bp, Homo sapien
tgagcgtgctccagccgagtgatgt

SEQ ID NO: 4499805 - DNA, 25 bp, Homo sapien
ggaatgagttgtcatgaaggcccag

SEQ ID NO: 4499806 - DNA, 25 bp, Homo sapien
gaaggcccagtcattaaacccatct

SEQ ID NO: 4499807 - DNA, 25 bp, Homo sapien
acccactcgccagagggatcctcat

SEQ ID NO: 4499808 - DNA, 25 bp, Homo sapien
agttgttggcttcgctggtgttttc

SEQ ID NO: 4499809 - DNA, 25 bp, Homo sapien
tgccatagagtacgagggtgaactt

SEQ ID NO: 4499810 - DNA, 25 bp, Homo sapien
ccacacaggcctgactggacgtgag

SEQ ID NO: 4499811 - DNA, 25 bp, Homo sapien
tttctggaggtacgggcagcccctc

SEQ ID NO: 4499812 - DNA, 25 bp, Homo sapien
tggacgtgagggtcttgcagccact

SEQ ID NO: 4499813 - DNA, 25 bp, Homo sapien
cattctcggtgctatagtgcgtatc

SEQ ID NO: 4499814 - DNA, 25 bp, Homo sapien
caggaagacagtgacgaagaccagc

SEQ ID NO: 4499815 - DNA, 25 bp, Homo sapien
tgctccacagggtccaaggaggcgt

SEQ ID NO: 4499816 - DNA, 25 bp, Homo sapien
tcttctgagtcagacgggcactcct

SEQ ID NO: 4499817 - DNA, 25 bp, Homo sapien
ggttcagccagagcttcggccttgg

SEQ ID NO: 4499818 - DNA, 25 bp, Homo sapien
gcgagccccacttgaaacacagatg

SEQ ID NO: 4499819 - DNA, 25 bp, Homo sapien
aggtctgtgagtgccaacagcccag

SEQ ID NO: 4499820 - DNA, 25 bp, Homo sapien
cattattgctttagagggacaggga

SEQ ID NO: 4499821 - DNA, 25 bp, Homo sapien
tggcacttggagagccagtgaccta

SEQ ID NO: 4499822 - DNA, 25 bp, Homo sapien
cacttggagagccagtgacctatga

SEQ ID NO: 4499823 - DNA, 25 bp, Homo sapien
ggagagccagtgacctatgaacccc

SEQ ID NO: 4499824 - DNA, 25 bp, Homo sapien
ctctggcacttggagagccagtgac

SEQ ID NO: 4499825 - DNA, 25 bp, Homo sapien
cattaaatagaaccagcaatgctgg

SEQ ID NO: 4499826 - DNA, 25 bp, Homo sapien
caatgctgggcctgtttaaattaca

SEQ ID NO: 4499827 - DNA, 25 bp, Homo sapien
gcatagtctgcacgtttaatcactt

SEQ ID NO: 4499828 - DNA, 25 bp, Homo sapien
gtgcaaaaggcacgtcagaagagga

SEQ ID NO: 4499829 - DNA, 25 bp, Homo sapien
tcccgcggtttcagttggcccaggc

SEQ ID NO: 4499830 - DNA, 25 bp, Homo sapien
gccagttcctgattccgcgcttcct

SEQ ID NO: 4499831 - DNA, 25 bp, Homo sapien
cagttcctgattccgcgcttcctcc

SEQ ID NO: 4499832 - DNA, 25 bp, Homo sapien
cttcctcctcccgcggtttcagttg

SEQ ID NO: 4499833 - DNA, 25 bp, Homo sapien
ggcagctgctcctgggacggcctcg

SEQ ID NO: 4499834 - DNA, 25 bp, Homo sapien
agctgctcctgggacggcctcggac

SEQ ID NO: 4499835 - DNA, 25 bp, Homo sapien
cgggcagctgctcctgggacggcct

SEQ ID NO: 4499836 - DNA, 25 bp, Homo sapien
cagctgctcctgggacggcctcgga

SEQ ID NO: 4499837 - DNA, 25 bp, Homo sapien
gccctcggaacgcctgctctgcccc

SEQ ID NO: 4499838 - DNA, 25 bp, Homo sapien
tctggccctcggaacgcctgctctg

SEQ ID NO: 4499839 - DNA, 25 bp, Homo sapien
tggccctcggaacgcctgctctgcc

SEQ ID NO: 4499840 - DNA, 25 bp, Homo sapien
ctctggccctcggaacgcctgctct

SEQ ID NO: 4499841 - DNA, 25 bp, Homo sapien
aaggggccatccctggaggcaaggc

SEQ ID NO: 4499842 - DNA, 25 bp, Homo sapien
gacagaaaaggggccatccctggag

SEQ ID NO: 4499843 - DNA, 25 bp, Homo sapien
ggacagaaaaggggccatccctgga

SEQ ID NO: 4499844 - DNA, 25 bp, Homo sapien
gaaaaggggccatccctggaggcaa

SEQ ID NO: 4499845 - DNA, 25 bp, Homo sapien
gcagggacatgtggtgaagcagtcc

SEQ ID NO: 4499846 - DNA, 25 bp, Homo sapien
tgccctccagtagacgaagctcggc

SEQ ID NO: 4499847 - DNA, 25 bp, Homo sapien
tgtcactcttgacccgctgggccat

SEQ ID NO: 4499848 - DNA, 25 bp, Homo sapien
gaagcagtcctgcatactccctgtc

SEQ ID NO: 4499849 - DNA, 25 bp, Homo sapien
gctcccaagcattggcctgccagat

SEQ ID NO: 4499850 - DNA, 25 bp, Homo sapien
ggcacaatggctcccaagcattggc

SEQ ID NO: 4499851 - DNA, 25 bp, Homo sapien
aatggctcccaagcattggcctgcc

SEQ ID NO: 4499852 - DNA, 25 bp, Homo sapien
ccaccagagtcccatagagacccac

SEQ ID NO: 4499853 - DNA, 25 bp, Homo sapien
agcaagcggctcaggccctcagttt

SEQ ID NO: 4499854 - DNA, 25 bp, Homo sapien
tctgcgtgctgccgcagcaagcggc

SEQ ID NO: 4499855 - DNA, 25 bp, Homo sapien
cgttcccggatgagcaggctcagct

SEQ ID NO: 4499856 - DNA, 25 bp, Homo sapien
tgtaggtcttgcgaagctgctgccg

SEQ ID NO: 4499857 - DNA, 25 bp, Homo sapien
ctggtacttgcgcttggcttgggca

SEQ ID NO: 4499858 - DNA, 25 bp, Homo sapien
tgtcccgtgccagagctcggtactg

SEQ ID NO: 4499859 - DNA, 25 bp, Homo sapien
ggcttgggcactgtcccgtgccaga

SEQ ID NO: 4499860 - DNA, 25 bp, Homo sapien
gagctcggtactggctcttcagctt

SEQ ID NO: 4499861 - DNA, 25 bp, Homo sapien
caggctgcgcacatacttgtcctta

SEQ ID NO: 4499862 - DNA, 25 bp, Homo sapien
acatagcggttgtggtgagcaaaga

SEQ ID NO: 4499863 - DNA, 25 bp, Homo sapien
tccttagccttgtcacggtccttgt

SEQ ID NO: 4499864 - DNA, 25 bp, Homo sapien
gatgcaagccatctcctcgtgcagg

SEQ ID NO: 4499865 - DNA, 25 bp, Homo sapien
ggctgctaatctccaggtattcctg

SEQ ID NO: 4499866 - DNA, 25 bp, Homo sapien
gccatctcccggtgaatggccacca

SEQ ID NO: 4499867 - DNA, 25 bp, Homo sapien
catactgtcgcaggaagccttggta

SEQ ID NO: 4499868 - DNA, 25 bp, Homo sapien
ggaagccttggtactcagcctcagg

SEQ ID NO: 4499869 - DNA, 25 bp, Homo sapien
tccacagtcagctcgttcagctgga

SEQ ID NO: 4499870 - DNA, 25 bp, Homo sapien
catcgaacgtgacacagggtgggac

SEQ ID NO: 4499871 - DNA, 25 bp, Homo sapien
gtcagctcgttcagctggagctccc

SEQ ID NO: 4499872 - DNA, 25 bp, Homo sapien
ctcaagcagtgactcatcgaacgtg

SEQ ID NO: 4499873 - DNA, 25 bp, Homo sapien
gcctacataaacactcgtggtctgc

SEQ ID NO: 4499874 - DNA, 25 bp, Homo sapien
tagccctgcctacataaacactcgt

SEQ ID NO: 4499875 - DNA, 25 bp, Homo sapien
aaacactcgtggtctgctgggagcc

SEQ ID NO: 4499876 - DNA, 25 bp, Homo sapien
cataaacactcgtggtctgctggga

SEQ ID NO: 4499877 - DNA, 25 bp, Homo sapien
ggcagcattagaaccgagccctcct

SEQ ID NO: 4499878 - DNA, 25 bp, Homo sapien
cccaggtccagtgcatccctgtaga

SEQ ID NO: 4499879 - DNA, 25 bp, Homo sapien
tccctgtagagccaagcaagcccgg

SEQ ID NO: 4499880 - DNA, 25 bp, Homo sapien
gagaagggcagcattagaaccgagc

SEQ ID NO: 4499881 - DNA, 25 bp, Homo sapien
tgccgcctgaacaccatctcggtgg

SEQ ID NO: 4499882 - DNA, 25 bp, Homo sapien
gttgcagctgcgtaaccatctcctg

SEQ ID NO: 4499883 - DNA, 25 bp, Homo sapien
ctcttcattccggagctcctgttgc

SEQ ID NO: 4499884 - DNA, 25 bp, Homo sapien
tcctgttgcagctgcgtaaccatct

SEQ ID NO: 4499885 - DNA, 25 bp, Homo sapien
ctgcacagcgctacctgcagcccct

SEQ ID NO: 4499886 - DNA, 25 bp, Homo sapien
acgacgtggagtggcggtcatcctg

SEQ ID NO: 4499887 - DNA, 25 bp, Homo sapien
ggcctggctgcacagcgctacctgc

SEQ ID NO: 4499888 - DNA, 25 bp, Homo sapien
cgaggacgacgtggagtggcggtca

SEQ ID NO: 4499889 - DNA, 25 bp, Homo sapien
attcctgagatgtggctcttaagga

SEQ ID NO: 4499890 - DNA, 25 bp, Homo sapien
cgagaacttggggcggaagattcct

SEQ ID NO: 4499891 - DNA, 25 bp, Homo sapien
tcctgagatgtggctcttaaggatc

SEQ ID NO: 4499892 - DNA, 25 bp, Homo sapien
ttcctgagatgtggctcttaaggat

SEQ ID NO: 4499893 - DNA, 25 bp, Homo sapien
gccccgtggtaccacagctgctcat

SEQ ID NO: 4499894 - DNA, 25 bp, Homo sapien
gacagcacgtactcctgcttgccct

SEQ ID NO: 4499895 - DNA, 25 bp, Homo sapien
ggcttctgcacctccggaatgagct

SEQ ID NO: 4499896 - DNA, 25 bp, Homo sapien
cagctgctcatgcaggggcttctgc

SEQ ID NO: 4499897 - DNA, 25 bp, Homo sapien
cagcaggggagaaagggcctgccca

SEQ ID NO: 4499898 - DNA, 25 bp, Homo sapien
gcaggggagaaagggcctgcccagg

SEQ ID NO: 4499899 - DNA, 25 bp, Homo sapien
gagcagcaggggagaaagggcctgc

SEQ ID NO: 4499900 - DNA, 25 bp, Homo sapien
caggggagaaagggcctgcccagga

SEQ ID NO: 4499901 - DNA, 25 bp, Homo sapien
ggacccggggtcagcagcctccatt

SEQ ID NO: 4499902 - DNA, 25 bp, Homo sapien
cctccattctgagggggcgtgagcc

SEQ ID NO: 4499903 - DNA, 25 bp, Homo sapien
cagcctccattctgagggggcgtga

SEQ ID NO: 4499904 - DNA, 25 bp, Homo sapien
cagggcaggggacccggggtcagca

SEQ ID NO: 4499905 - DNA, 25 bp, Homo sapien
gcaaaggaatgctaggaaagccttc

SEQ ID NO: 4499906 - DNA, 25 bp, Homo sapien
tgagcaaaggaatgctaggaaagcc

SEQ ID NO: 4499907 - DNA, 25 bp, Homo sapien
aggaatgctaggaaagccttcccct

SEQ ID NO: 4499908 - DNA, 25 bp, Homo sapien
caaaggaatgctaggaaagccttcc

SEQ ID NO: 4499909 - DNA, 25 bp, Homo sapien
gtccaatctgctcacccaacaccag

SEQ ID NO: 4499910 - DNA, 25 bp, Homo sapien
ccaatctgctcacccaacaccaggt

SEQ ID NO: 4499911 - DNA, 25 bp, Homo sapien
tccaatctgctcacccaacaccagg

SEQ ID NO: 4499912 - DNA, 25 bp, Homo sapien
aatctgctcacccaacaccaggtcc

SEQ ID NO: 4499913 - DNA, 25 bp, Homo sapien
gtctgctgggagttttcagggtagg

SEQ ID NO: 4499914 - DNA, 25 bp, Homo sapien
caggcgcgactcaggagaagtcgcc

SEQ ID NO: 4499915 - DNA, 25 bp, Homo sapien
actcaggagaagtcgccagcgacaa

SEQ ID NO: 4499916 - DNA, 25 bp, Homo sapien
tactgtcccgtttcctggaggatgg

SEQ ID NO: 4499917 - DNA, 25 bp, Homo sapien
cctgagagaagtgacatggaaatcc

SEQ ID NO: 4499918 - DNA, 25 bp, Homo sapien
tcactctcccttgggtttgaaaagc

SEQ ID NO: 4499919 - DNA, 25 bp, Homo sapien
agggaaagttgcctccgatgtgcca

SEQ ID NO: 4499920 - DNA, 25 bp, Homo sapien
gacagtgacttcttccctaaacagg

SEQ ID NO: 4499921 - DNA, 25 bp, Homo sapien
agtcccgcagttctcttctccgctt

SEQ ID NO: 4499922 - DNA, 25 bp, Homo sapien
tgaaacggtcttgggctcctaccac

SEQ ID NO: 4499923 - DNA, 25 bp, Homo sapien
tctccgcttcctacccattctgctt

SEQ ID NO: 4499924 - DNA, 25 bp, Homo sapien
tctctgggagtttgaccctcgctgg

SEQ ID NO: 4499925 - DNA, 25 bp, Homo sapien
cttcctgtagaaacttggccttgag

SEQ ID NO: 4499926 - DNA, 25 bp, Homo sapien
gtccgctgaacacttcgccaaagtt

SEQ ID NO: 4499927 - DNA, 25 bp, Homo sapien
ttgtcggctcgcaggcgtccgctga

SEQ ID NO: 4499928 - DNA, 25 bp, Homo sapien
tcaggtgggagcgtctctcgacaag

SEQ ID NO: 4499929 - DNA, 25 bp, Homo sapien
caccacggtggtcaagcacttcaca

SEQ ID NO: 4499930 - DNA, 25 bp, Homo sapien
ctcgaggactaaacaccaccacggt

SEQ ID NO: 4499931 - DNA, 25 bp, Homo sapien
tggtcaagcacttcacactgtgcca

SEQ ID NO: 4499932 - DNA, 25 bp, Homo sapien
actacccgcaatggggggcctcgag

SEQ ID NO: 4499933 - DNA, 25 bp, Homo sapien
gggtgcagacaccaatgagacgcac

SEQ ID NO: 4499934 - DNA, 25 bp, Homo sapien
tgcagacaccaatgagacgcacgat

SEQ ID NO: 4499935 - DNA, 25 bp, Homo sapien
cgatgttggggtggctgtactgctt

SEQ ID NO: 4499936 - DNA, 25 bp, Homo sapien
agacaccaatgagacgcacgatgtt

SEQ ID NO: 4499937 - DNA, 25 bp, Homo sapien
gcacaagctccatgacgatgtagat

SEQ ID NO: 4499938 - DNA, 25 bp, Homo sapien
cctgcacaagctccatgacgatgta

SEQ ID NO: 4499939 - DNA, 25 bp, Homo sapien
acaagctccatgacgatgtagatgg

SEQ ID NO: 4499940 - DNA, 25 bp, Homo sapien
aagctccatgacgatgtagatgggc

SEQ ID NO: 4499941 - DNA, 25 bp, Homo sapien
tctgcagcagagtcttcacccgcag

SEQ ID NO: 4499942 - DNA, 25 bp, Homo sapien
gatgcagcacttgctctccaggtac

SEQ ID NO: 4499943 - DNA, 25 bp, Homo sapien
ccctccgtgcggaggaaggtcagga

SEQ ID NO: 4499944 - DNA, 25 bp, Homo sapien
ggtactccatgccagcagctgcatc

SEQ ID NO: 4499945 - DNA, 25 bp, Homo sapien
ttaagggcctcaggtgcggtccact

SEQ ID NO: 4499946 - DNA, 25 bp, Homo sapien
tcaccaggcagttccgagcagccag

SEQ ID NO: 4499947 - DNA, 25 bp, Homo sapien
cttcacggggacttgtctgaggccc

SEQ ID NO: 4499948 - DNA, 25 bp, Homo sapien
aggctgcatagaccccatcggcttc

SEQ ID NO: 4499949 - DNA, 25 bp, Homo sapien
gctccacacgtcgctttcggaggag

SEQ ID NO: 4499950 - DNA, 25 bp, Homo sapien
tccacacgtcgctttcggaggagta

SEQ ID NO: 4499951 - DNA, 25 bp, Homo sapien
cacacgtcgctttcggaggagtagc

SEQ ID NO: 4499952 - DNA, 25 bp, Homo sapien
acacgtcgctttcggaggagtagcg

SEQ ID NO: 4499953 - DNA, 25 bp, Homo sapien
gctgcccaggctcataggcccagca

SEQ ID NO: 4499954 - DNA, 25 bp, Homo sapien
tgagcctgaacacggcatcaggaca

SEQ ID NO: 4499955 - DNA, 25 bp, Homo sapien
cagcactgctccatgagcctgaaca

SEQ ID NO: 4499956 - DNA, 25 bp, Homo sapien
acacggcatcaggacacagctctgg

SEQ ID NO: 4499957 - DNA, 25 bp, Homo sapien
ctgcagaggccaccagcttgagaag

SEQ ID NO: 4499958 - DNA, 25 bp, Homo sapien
accagcttgagaagggggtcccagc

SEQ ID NO: 4499959 - DNA, 25 bp, Homo sapien
gccaccagcttgagaagggggtccc

SEQ ID NO: 4499960 - DNA, 25 bp, Homo sapien
tgcagaggccaccagcttgagaagg

SEQ ID NO: 4499961 - DNA, 25 bp, Homo sapien
gagctgtcagcatatgagctggagc

SEQ ID NO: 4499962 - DNA, 25 bp, Homo sapien
ctgtcagcatatgagctggagccgc

SEQ ID NO: 4499963 - DNA, 25 bp, Homo sapien
gctgtcagcatatgagctggagccg

SEQ ID NO: 4499964 - DNA, 25 bp, Homo sapien
tgtcagcatatgagctggagccgct

SEQ ID NO: 4499965 - DNA, 25 bp, Homo sapien
cggcgctgcatcctgccggcagtgt

SEQ ID NO: 4499966 - DNA, 25 bp, Homo sapien
gaggacacggcgctgcatcctgccg

SEQ ID NO: 4499967 - DNA, 25 bp, Homo sapien
agtgggcacaagtggttttattgtt

SEQ ID NO: 4499968 - DNA, 25 bp, Homo sapien
gcatcctgccggcagtgtggatgct

SEQ ID NO: 4499969 - DNA, 25 bp, Homo sapien
tgagacctgccttccagaggagtgc

SEQ ID NO: 4499970 - DNA, 25 bp, Homo sapien
gacctgccttccagaggagtgcaca

SEQ ID NO: 4499971 - DNA, 25 bp, Homo sapien
gccttctgagacctgccttccagag

SEQ ID NO: 4499972 - DNA, 25 bp, Homo sapien
gccttccagaggagtgcacatgcca

SEQ ID NO: 4499973 - DNA, 25 bp, Homo sapien
tattgctgtatatacgtttgggtca

SEQ ID NO: 4499974 - DNA, 25 bp, Homo sapien
cattcatcaatgtcggtgcatatat

SEQ ID NO: 4499975 - DNA, 25 bp, Homo sapien
tatgaaatccatccaatgagtttgt

SEQ ID NO: 4499976 - DNA, 25 bp, Homo sapien
actgtgcccaaccacgtctttgaca

SEQ ID NO: 4499977 - DNA, 25 bp, Homo sapien
tcggtacagcgcattcctcgagtcc

SEQ ID NO: 4499978 - DNA, 25 bp, Homo sapien
ggcccaggtagccttaggtctctgt

SEQ ID NO: 4499979 - DNA, 25 bp, Homo sapien
tcctttccgtgcctgctctatgttt

SEQ ID NO: 4499980 - DNA, 25 bp, Homo sapien
ggtctctgtcgttgcgcccctcggg

SEQ ID NO: 4499981 - DNA, 25 bp, Homo sapien
cgggcagtggtcgaaacgcccgcct

SEQ ID NO: 4499982 - DNA, 25 bp, Homo sapien
ctccgtctcggcagacgcgtagcgg

SEQ ID NO: 4499983 - DNA, 25 bp, Homo sapien
agtaagcgcatgatcgggcagtggt

SEQ ID NO: 4499984 - DNA, 25 bp, Homo sapien
cgcatgatcgggcagtggtcgaaac

SEQ ID NO: 4499985 - DNA, 25 bp, Homo sapien
gagggacgcgcgactgaattttttc

SEQ ID NO: 4499986 - DNA, 25 bp, Homo sapien
gcgactgaattttttcggaatccta

SEQ ID NO: 4499987 - DNA, 25 bp, Homo sapien
ccagctgcggaacctcaggagggac

SEQ ID NO: 4499988 - DNA, 25 bp, Homo sapien
aacctcaggagggacgcgcgactga

SEQ ID NO: 4499989 - DNA, 25 bp, Homo sapien
agctgccggctctcacacgcccggg

SEQ ID NO: 4499990 - DNA, 25 bp, Homo sapien
ctccgggcccagtcggccgagctgc

SEQ ID NO: 4499991 - DNA, 25 bp, Homo sapien
gtcggccgagctgccggctctcaca

SEQ ID NO: 4499992 - DNA, 25 bp, Homo sapien
caggcagcgacgcaggcgaaggcgg

SEQ ID NO: 4499993 - DNA, 25 bp, Homo sapien
ttttcagcccttagagactgggtct

SEQ ID NO: 4499994 - DNA, 25 bp, Homo sapien
gattctgctcgggagcttccgggca

SEQ ID NO: 4499995 - DNA, 25 bp, Homo sapien
cgcctctgcgttgtgccctacttag

SEQ ID NO: 4499996 - DNA, 25 bp, Homo sapien
cctacttagcgcgatctgattctgc

SEQ ID NO: 4499997 - DNA, 25 bp, Homo sapien
ttctcagaaacacagaatgagtttc

SEQ ID NO: 4499998 - DNA, 25 bp, Homo sapien
ctggcacgatcctttctcagaaaca

SEQ ID NO: 4499999 - DNA, 25 bp, Homo sapien
ctttctcagaaacacagaatgagtt

SEQ ID NO: 4500000 - DNA, 25 bp, Homo sapien
tcagaaacacagaatgagtttcttt

SEQ ID NO: 4500001 - DNA, 25 bp, Homo sapien
ctggtgtcgggtgggatcgtgttgc

SEQ ID NO: 4500002 - DNA, 25 bp, Homo sapien
cactcggtccagcatgaggtagagc

SEQ ID NO: 4500003 - DNA, 25 bp, Homo sapien
gaagttcccaccattctggtgtcgg

SEQ ID NO: 4500004 - DNA, 25 bp, Homo sapien
gtgggatcgtgttgcactcggtcca

SEQ ID NO: 4500005 - DNA, 25 bp, Homo sapien
caaagcaaactggcagtcctgcggg

SEQ ID NO: 4500006 - DNA, 25 bp, Homo sapien
cacggagtccttgatatggctgata

SEQ ID NO: 4500007 - DNA, 25 bp, Homo sapien
gggccctctgcgttggctgtcagct

SEQ ID NO: 4500008 - DNA, 25 bp, Homo sapien
gagccattgaccgtgtagtagggca

SEQ ID NO: 4500009 - DNA, 25 bp, Homo sapien
catcccagtcgtgcgggtcgtagga

SEQ ID NO: 4500010 - DNA, 25 bp, Homo sapien
gggcaccacaaacacctgcaggtct

SEQ ID NO: 4500011 - DNA, 25 bp, Homo sapien
tccacgttgtcaaacggcagctcct

SEQ ID NO: 4500012 - DNA, 25 bp, Homo sapien
tcgtaggagatgtcgaagccttgcc

SEQ ID NO: 4500013 - DNA, 25 bp, Homo sapien
ggagccaatgtagggtcccctgagg

SEQ ID NO: 4500014 - DNA, 25 bp, Homo sapien
tagggagccaatgtagggtcccctg

SEQ ID NO: 4500015 - DNA, 25 bp, Homo sapien
ctagggagccaatgtagggtcccct

SEQ ID NO: 4500016 - DNA, 25 bp, Homo sapien
agggagccaatgtagggtcccctga

SEQ ID NO: 4500017 - DNA, 25 bp, Homo sapien
tggcgaagaaggagacctctgccca

SEQ ID NO: 4500018 - DNA, 25 bp, Homo sapien
ttgggtctgctctgtgtagtacttg

SEQ ID NO: 4500019 - DNA, 25 bp, Homo sapien
caccatgctattgaggatgtgttgg

SEQ ID NO: 4500020 - DNA, 25 bp, Homo sapien
ctcctgcagcttagacaccatgcta

SEQ ID NO: 4500021 - DNA, 25 bp, Homo sapien
tgccgctctcttttggacattgatg

SEQ ID NO: 4500022 - DNA, 25 bp, Homo sapien
cttttggacattgatgttgtcccac

SEQ ID NO: 4500023 - DNA, 25 bp, Homo sapien
tctcttttggacattgatgttgtcc

SEQ ID NO: 4500024 - DNA, 25 bp, Homo sapien
gccgctctcttttggacattgatgt

SEQ ID NO: 4500025 - DNA, 25 bp, Homo sapien
ccagcctcctgtcgcaatctccagc

SEQ ID NO: 4500026 - DNA, 25 bp, Homo sapien
tcctgtcgcaatctccagctgcccg

SEQ ID NO: 4500027 - DNA, 25 bp, Homo sapien
agcctcctgtcgcaatctccagctg

SEQ ID NO: 4500028 - DNA, 25 bp, Homo sapien
tgtcgcaatctccagctgcccgttt

SEQ ID NO: 4500029 - DNA, 25 bp, Homo sapien
gtgtccttcgatgagctggtcaatc

SEQ ID NO: 4500030 - DNA, 25 bp, Homo sapien
gcaaagtagtgggaattggcctcat

SEQ ID NO: 4500031 - DNA, 25 bp, Homo sapien
gtgggaattggcctcatctggcatc

SEQ ID NO: 4500032 - DNA, 25 bp, Homo sapien
ccactggtgtccttcgatgagctgg

SEQ ID NO: 4500033 - DNA, 25 bp, Homo sapien
tgcccagccagagcggggggttgca

SEQ ID NO: 4500034 - DNA, 25 bp, Homo sapien
gcccagccagagcggggggttgcac

SEQ ID NO: 4500035 - DNA, 25 bp, Homo sapien
gtggagctgtatccaaaggggtcca

SEQ ID NO: 4500036 - DNA, 25 bp, Homo sapien
tctgaatcagcatgctggtgaggtt

SEQ ID NO: 4500037 - DNA, 25 bp, Homo sapien
ctctctgaatcagcatgctggtgag

SEQ ID NO: 4500038 - DNA, 25 bp, Homo sapien
tcttgatggcatagtgcactctctg

SEQ ID NO: 4500039 - DNA, 25 bp, Homo sapien
agaggtcaatatggccctcccctaa

SEQ ID NO: 4500040 - DNA, 25 bp, Homo sapien
tagaggccagaggtcaatatggccc

SEQ ID NO: 4500041 - DNA, 25 bp, Homo sapien
acacagggcacgctgaagcccttgg

SEQ ID NO: 4500042 - DNA, 25 bp, Homo sapien
cacagggcacgctgaagcccttggg

SEQ ID NO: 4500043 - DNA, 25 bp, Homo sapien
agccctgatagaccgcgaggctgta

SEQ ID NO: 4500044 - DNA, 25 bp, Homo sapien
tctgttcaggctaaaggcagccctg

SEQ ID NO: 4500045 - DNA, 25 bp, Homo sapien
accgcgaggctgtaactggacctag

SEQ ID NO: 4500046 - DNA, 25 bp, Homo sapien
gggcaaggatctgttcaggctaaag

SEQ ID NO: 4500047 - DNA, 25 bp, Homo sapien
gatcttgggatctgggccacaggta

SEQ ID NO: 4500048 - DNA, 25 bp, Homo sapien
tctgccacgttggcctctgtgatgg

SEQ ID NO: 4500049 - DNA, 25 bp, Homo sapien
ggtggcaccttccaagggcagttga

SEQ ID NO: 4500050 - DNA, 25 bp, Homo sapien
caggcgtttgaaatcaaattggcag

SEQ ID NO: 4500051 - DNA, 25 bp, Homo sapien
aactaatctacttagcggcgctggc

SEQ ID NO: 4500052 - DNA, 25 bp, Homo sapien
ggaatcgccatttagacttctggaa

SEQ ID NO: 4500053 - DNA, 25 bp, Homo sapien
gctttaagaaaagtcacgccctcat

SEQ ID NO: 4500054 - DNA, 25 bp, Homo sapien
cgtttcaactcttggacatcaggga

SEQ ID NO: 4500055 - DNA, 25 bp, Homo sapien
gacttcttccggtattggtccagaa

SEQ ID NO: 4500056 - DNA, 25 bp, Homo sapien
gggcttgtcatatcggaagtcatct

SEQ ID NO: 4500057 - DNA, 25 bp, Homo sapien
tggtagttgaagaactgggcatccc

SEQ ID NO: 4500058 - DNA, 25 bp, Homo sapien
caccaggaggacgttgcttcggaac

SEQ ID NO: 4500059 - DNA, 25 bp, Homo sapien
taggagaagaaatccccgctcagca

SEQ ID NO: 4500060 - DNA, 25 bp, Homo sapien
taagctcttgtagaagggccgggaa

SEQ ID NO: 4500061 - DNA, 25 bp, Homo sapien
agtcagaaagagtgccaaactgggc

SEQ ID NO: 4500062 - DNA, 25 bp, Homo sapien
gatcctcccggtccgcataggagaa

SEQ ID NO: 4500063 - DNA, 25 bp, Homo sapien
accagagcggcgagcgtgagctgca

SEQ ID NO: 4500064 - DNA, 25 bp, Homo sapien
ctggaagagccccaatgtgcgccga

SEQ ID NO: 4500065 - DNA, 25 bp, Homo sapien
tgggtaccggccagccagaccagag

SEQ ID NO: 4500066 - DNA, 25 bp, Homo sapien
tccgtcaggagggtgaaatcagaca

SEQ ID NO: 4500067 - DNA, 25 bp, Homo sapien
ccccagcaccagatagtgggctgca

SEQ ID NO: 4500068 - DNA, 25 bp, Homo sapien
tcaggttgacaagggagcgcagaag

SEQ ID NO: 4500069 - DNA, 25 bp, Homo sapien
gaggaagggcgcctcagggtcaaag

SEQ ID NO: 4500070 - DNA, 25 bp, Homo sapien
ggtcaaagtggtaggtctccttgtc

SEQ ID NO: 4500071 - DNA, 25 bp, Homo sapien
agggaagaaccatcatgggctcagc

SEQ ID NO: 4500072 - DNA, 25 bp, Homo sapien
aagaaccatcatgggctcagcctcc

SEQ ID NO: 4500073 - DNA, 25 bp, Homo sapien
ggaattcagtgagccggaagggaag

SEQ ID NO: 4500074 - DNA, 25 bp, Homo sapien
ctggaattcagtgagccggaaggga

SEQ ID NO: 4500075 - DNA, 25 bp, Homo sapien
agctggatcaccgtgcgctctggga

SEQ ID NO: 4500076 - DNA, 25 bp, Homo sapien
gaatccagctggatcaccgtgcgct

SEQ ID NO: 4500077 - DNA, 25 bp, Homo sapien
cgtcgtgacttaagcgagtgtcatc

SEQ ID NO: 4500078 - DNA, 25 bp, Homo sapien
tctgggagggcgtcgtgacttaagc

SEQ ID NO: 4500079 - DNA, 25 bp, Homo sapien
gggacaccatgctgaatcgctcctg

SEQ ID NO: 4500080 - DNA, 25 bp, Homo sapien
ccagtgggttgaataggaccacaaa

SEQ ID NO: 4500081 - DNA, 25 bp, Homo sapien
ctggtagacgtcagggaccgcctcg

SEQ ID NO: 4500082 - DNA, 25 bp, Homo sapien
gagctccagtgtgcgctgatctgca

SEQ ID NO: 4500083 - DNA, 25 bp, Homo sapien
tgaggagcccagtaaggcctgagaa

SEQ ID NO: 4500084 - DNA, 25 bp, Homo sapien
tggtgccagagtcaatgacacggag

SEQ ID NO: 4500085 - DNA, 25 bp, Homo sapien
aggaaacgcttcgtgcctgctgacg

SEQ ID NO: 4500086 - DNA, 25 bp, Homo sapien
gagaaccagacctgcatgtagcggt

SEQ ID NO: 4500087 - DNA, 25 bp, Homo sapien
ggccccacaccagcatgtcaggcct

SEQ ID NO: 4500088 - DNA, 25 bp, Homo sapien
ccacaccagcatgtcaggcctgcct

SEQ ID NO: 4500089 - DNA, 25 bp, Homo sapien
ctggccccacaccagcatgtcaggc

SEQ ID NO: 4500090 - DNA, 25 bp, Homo sapien
ccccacaccagcatgtcaggcctgc

SEQ ID NO: 4500091 - DNA, 25 bp, Homo sapien
ctgccaaaaaacacagccctgaccc

SEQ ID NO: 4500092 - DNA, 25 bp, Homo sapien
ggtgccatagacaaggacctgcatg

SEQ ID NO: 4500093 - DNA, 25 bp, Homo sapien
ccactcttgtctttggacgtacggg

SEQ ID NO: 4500094 - DNA, 25 bp, Homo sapien
tgtctttggacgtacgggtgccata

SEQ ID NO: 4500095 - DNA, 25 bp, Homo sapien
cgtacgggtgccatagacaaggacc

SEQ ID NO: 4500096 - DNA, 25 bp, Homo sapien
ggccttcagtgacacgcagcacggg

SEQ ID NO: 4500097 - DNA, 25 bp, Homo sapien
tagtacgcaaccacctctgagaaga

SEQ ID NO: 4500098 - DNA, 25 bp, Homo sapien
ctggcagattgtaaagccggaccgc

SEQ ID NO: 4500099 - DNA, 25 bp, Homo sapien
aagccggaccgcctggtgaatgtgc

SEQ ID NO: 4500100 - DNA, 25 bp, Homo sapien
cagggatgatatgtccagagacagc

SEQ ID NO: 4500101 - DNA, 25 bp, Homo sapien
gcagggccagctccttgttgacgta

SEQ ID NO: 4500102 - DNA, 25 bp, Homo sapien
gacgtagtcccggatgtccaccagg

SEQ ID NO: 4500103 - DNA, 25 bp, Homo sapien
ctgtcgatgtctgtatggatgtgca

SEQ ID NO: 4500104 - DNA, 25 bp, Homo sapien
ctgaaagccattgaggtctgtgaag

SEQ ID NO: 4500105 - DNA, 25 bp, Homo sapien
ggcaaggccagcagatcaagggcac

SEQ ID NO: 4500106 - DNA, 25 bp, Homo sapien
aggccagcagatcaagggcacccgg

SEQ ID NO: 4500107 - DNA, 25 bp, Homo sapien
gggggcaaggccagcagatcaaggg

SEQ ID NO: 4500108 - DNA, 25 bp, Homo sapien
ctgtgggggcaaggccagcagatca

SEQ ID NO: 4500109 - DNA, 25 bp, Homo sapien
gagggggagcttcttcagataccgt

SEQ ID NO: 4500110 - DNA, 25 bp, Homo sapien
gcttctgtgcgtcctggatataggc

SEQ ID NO: 4500111 - DNA, 25 bp, Homo sapien
cagtgtgcagcgtgaggcgcttctg

SEQ ID NO: 4500112 - DNA, 25 bp, Homo sapien
gggagcttcttcagataccgtcggg

SEQ ID NO: 4500113 - DNA, 25 bp, Homo sapien
agaaagaggcaagggaggccaacag

SEQ ID NO: 4500114 - DNA, 25 bp, Homo sapien
gggcatccagtaggacactccaccc

SEQ ID NO: 4500115 - DNA, 25 bp, Homo sapien
cacccagttgcctacactgctgcct

SEQ ID NO: 4500116 - DNA, 25 bp, Homo sapien
gtaaccctgacggttcttcagggca

SEQ ID NO: 4500117 - DNA, 25 bp, Homo sapien
caagagaatcgcttcaaatcggaag

SEQ ID NO: 4500118 - DNA, 25 bp, Homo sapien
gcaagagaatcgcttcaaatcggaa

SEQ ID NO: 4500119 - DNA, 25 bp, Homo sapien
aagagaatcgcttcaaatcggaagg

SEQ ID NO: 4500120 - DNA, 25 bp, Homo sapien
ccacggttcgccgctctagcaggag

SEQ ID NO: 4500121 - DNA, 25 bp, Homo sapien
tcttgttgtccttgagcccttggcc

SEQ ID NO: 4500122 - DNA, 25 bp, Homo sapien
ctaggccccggttgtcatcctgcat

SEQ ID NO: 4500123 - DNA, 25 bp, Homo sapien
gaggcggaaacggttgcaggttctc

SEQ ID NO: 4500124 - DNA, 25 bp, Homo sapien
aaagccatgagatgagcggggttgg

SEQ ID NO: 4500125 - DNA, 25 bp, Homo sapien
gctgtgaaagatcaagcccctaaac

SEQ ID NO: 4500126 - DNA, 25 bp, Homo sapien
gaaagatcaagcccctaaacatggc

SEQ ID NO: 4500127 - DNA, 25 bp, Homo sapien
gtgaaagatcaagcccctaaacatg

SEQ ID NO: 4500128 - DNA, 25 bp, Homo sapien
tgtgaaagatcaagcccctaaacat

SEQ ID NO: 4500129 - DNA, 25 bp, Homo sapien
tctgggtcctcacagtaaagcaggt

SEQ ID NO: 4500130 - DNA, 25 bp, Homo sapien
tatctatctgatgcacgagtgactg

SEQ ID NO: 4500131 - DNA, 25 bp, Homo sapien
tgtctgcacttatgtccctctgggt

SEQ ID NO: 4500132 - DNA, 25 bp, Homo sapien
tcaggatcagtgagacaaagccctt

SEQ ID NO: 4500133 - DNA, 25 bp, Homo sapien
aattgacccgagatattggtgaggg

SEQ ID NO: 4500134 - DNA, 25 bp, Homo sapien
ctgcaaaattgacccgagatattgg

SEQ ID NO: 4500135 - DNA, 25 bp, Homo sapien
caaaattgacccgagatattggtga

SEQ ID NO: 4500136 - DNA, 25 bp, Homo sapien
gacccgagatattggtgagggacca

SEQ ID NO: 4500137 - DNA, 25 bp, Homo sapien
tgggtagctggtagagtggctatct

SEQ ID NO: 4500138 - DNA, 25 bp, Homo sapien
atgggtagctggtagagtggctatc

SEQ ID NO: 4500139 - DNA, 25 bp, Homo sapien
gatgggtagctggtagagtggctat

SEQ ID NO: 4500140 - DNA, 25 bp, Homo sapien
ggtagctggtagagtggctatcttg

SEQ ID NO: 4500141 - DNA, 25 bp, Homo sapien
gcgttcaggtacatggaggtcaggt

SEQ ID NO: 4500142 - DNA, 25 bp, Homo sapien
gggcgttcaggtacatggaggtcag

SEQ ID NO: 4500143 - DNA, 25 bp, Homo sapien
gttcaggtacatggaggtcaggtgg

SEQ ID NO: 4500144 - DNA, 25 bp, Homo sapien
agcgccggggcgttcaggtacatgg

SEQ ID NO: 4500145 - DNA, 25 bp, Homo sapien
gaggatgaaatgagcgcagaccagg

SEQ ID NO: 4500146 - DNA, 25 bp, Homo sapien
agcgtacgtaggttgagcaggtgga

SEQ ID NO: 4500147 - DNA, 25 bp, Homo sapien
ctcagcctggagcgtacgtaggttg

SEQ ID NO: 4500148 - DNA, 25 bp, Homo sapien
tgaaatgagcgcagaccagggcctg

SEQ ID NO: 4500149 - DNA, 25 bp, Homo sapien
tcctggaggtttggagccgaatacc

SEQ ID NO: 4500150 - DNA, 25 bp, Homo sapien
actctgctctcagcatgtcacgctg

SEQ ID NO: 4500151 - DNA, 25 bp, Homo sapien
gcatgtcacgctgagggacactcac

SEQ ID NO: 4500152 - DNA, 25 bp, Homo sapien
ggagggacaccatcagaactctgct

SEQ ID NO: 4500153 - DNA, 25 bp, Homo sapien
ggctttcagagatcggagatgcagc

SEQ ID NO: 4500154 - DNA, 25 bp, Homo sapien
agggctttcagagatcggagatgca

SEQ ID NO: 4500155 - DNA, 25 bp, Homo sapien
ggaagtgggcgcagggctttcagag

SEQ ID NO: 4500156 - DNA, 25 bp, Homo sapien
cagggctttcagagatcggagatgc

SEQ ID NO: 4500157 - DNA, 25 bp, Homo sapien
tgtaagatgagtgcggtctccgccg

SEQ ID NO: 4500158 - DNA, 25 bp, Homo sapien
ttggcttgtggtgcagttgaagccc

SEQ ID NO: 4500159 - DNA, 25 bp, Homo sapien
caggccgcagtcaaaacccttgcgg

SEQ ID NO: 4500160 - DNA, 25 bp, Homo sapien
gcagttgaagcccaagttcttggcc

SEQ ID NO: 4500161 - DNA, 25 bp, Homo sapien
tacagtaacgtcaaggaggttggct

SEQ ID NO: 4500162 - DNA, 25 bp, Homo sapien
caagcggaggcgaaaggtagcaatc

SEQ ID NO: 4500163 - DNA, 25 bp, Homo sapien
gaggttggctgaaggaataccacat

SEQ ID NO: 4500164 - DNA, 25 bp, Homo sapien
tccatgggctccaaatagacgtcag

SEQ ID NO: 4500165 - DNA, 25 bp, Homo sapien
ccatcacagaaagcagcgaggcctt

SEQ ID NO: 4500166 - DNA, 25 bp, Homo sapien
catcactgggtttgtgggttgcgcc

SEQ ID NO: 4500167 - DNA, 25 bp, Homo sapien
gaggccttcagactcctaggagaaa

SEQ ID NO: 4500168 - DNA, 25 bp, Homo sapien
tacctgaagtgacctatgatctctg

SEQ ID NO: 4500169 - DNA, 25 bp, Homo sapien
taatggtggcgtgagaatcctctgg

SEQ ID NO: 4500170 - DNA, 25 bp, Homo sapien
cagagtggtcttagtgttctcacac

SEQ ID NO: 4500171 - DNA, 25 bp, Homo sapien
cattgggttgacttacagaatactc

SEQ ID NO: 4500172 - DNA, 25 bp, Homo sapien
tcacactgagtgaggtaatggtggc

SEQ ID NO: 4500173 - DNA, 25 bp, Homo sapien
cactgtgtggcctaatacgggcagc

SEQ ID NO: 4500174 - DNA, 25 bp, Homo sapien
ttttctaggcgttcacagattcccc

SEQ ID NO: 4500175 - DNA, 25 bp, Homo sapien
tgtggagctctcgtatataccaggc

SEQ ID NO: 4500176 - DNA, 25 bp, Homo sapien
tacgggcagcaacaactctgatgac

SEQ ID NO: 4500177 - DNA, 25 bp, Homo sapien
tcgcccttccgcattgcgggttact

SEQ ID NO: 4500178 - DNA, 25 bp, Homo sapien
gcgcgggaaactcggtgactcgcaa

SEQ ID NO: 4500179 - DNA, 25 bp, Homo sapien
gaaactcggtgactcgcaatcccct

SEQ ID NO: 4500180 - DNA, 25 bp, Homo sapien
caagccgcgcgggaaactcggtgac

SEQ ID NO: 4500181 - DNA, 25 bp, Homo sapien
tcgttcaggccggacaggattcata

SEQ ID NO: 4500182 - DNA, 25 bp, Homo sapien
gccttgaaccaagcttgccaggaag

SEQ ID NO: 4500183 - DNA, 25 bp, Homo sapien
tccaggaatacttcgagtgggcagc

SEQ ID NO: 4500184 - DNA, 25 bp, Homo sapien
caaaccggcaactggaagaggctct

SEQ ID NO: 4500185 - DNA, 25 bp, Homo sapien
agggacctgaatcgctgcaccccag

SEQ ID NO: 4500186 - DNA, 25 bp, Homo sapien
ccccggggccaaactggtgaagctg

SEQ ID NO: 4500187 - DNA, 25 bp, Homo sapien
tgagggacctgaatcgctgcacccc

SEQ ID NO: 4500188 - DNA, 25 bp, Homo sapien
gacctgaatcgctgcaccccagagg

SEQ ID NO: 4500189 - DNA, 25 bp, Homo sapien
tcccagagggtaaggtacttgacca

SEQ ID NO: 4500190 - DNA, 25 bp, Homo sapien
taagcctcataacaattggaacggt

SEQ ID NO: 4500191 - DNA, 25 bp, Homo sapien
taggcatgatcgttccctttgtcgg

SEQ ID NO: 4500192 - DNA, 25 bp, Homo sapien
tcccaagcttagtgcgatataccgt

SEQ ID NO: 4500193 - DNA, 25 bp, Homo sapien
gccccacagataggcctgtcagcaa

SEQ ID NO: 4500194 - DNA, 25 bp, Homo sapien
cctgggaaccccaacatctctcttt

SEQ ID NO: 4500195 - DNA, 25 bp, Homo sapien
aggttggctggacaagggtcaccca

SEQ ID NO: 4500196 - DNA, 25 bp, Homo sapien
tctggatgcccatgagagttcacta

SEQ ID NO: 4500197 - DNA, 25 bp, Homo sapien
aaccagggtagtgacggccatggac

SEQ ID NO: 4500198 - DNA, 25 bp, Homo sapien
gtctggcacaagtgagggtggtgga

SEQ ID NO: 4500199 - DNA, 25 bp, Homo sapien
tcccgggtggtctggcacaagtgag

SEQ ID NO: 4500200 - DNA, 25 bp, Homo sapien
aagaaaccagggtagtgacggccat

SEQ ID NO: 4500201 - DNA, 25 bp, Homo sapien
ggcctcaaattcagcccgggtgcag

SEQ ID NO: 4500202 - DNA, 25 bp, Homo sapien
ggcggaagagcggacagattgactt

SEQ ID NO: 4500203 - DNA, 25 bp, Homo sapien
ttggtacagggcctcaaattcagcc

SEQ ID NO: 4500204 - DNA, 25 bp, Homo sapien
agattgacttggtacagggcctcaa

SEQ ID NO: 4500205 - DNA, 25 bp, Homo sapien
tcagggtcacaaccagtaggttgta

SEQ ID NO: 4500206 - DNA, 25 bp, Homo sapien
gtcatcagggtcacaaccagtaggt

SEQ ID NO: 4500207 - DNA, 25 bp, Homo sapien
ccagcactaggagcgggcctgggcc

SEQ ID NO: 4500208 - DNA, 25 bp, Homo sapien
gtaggttgtagaggcccagcactag

SEQ ID NO: 4500209 - DNA, 25 bp, Homo sapien
cgcagcagaagtgcacgaggtctac

SEQ ID NO: 4500210 - DNA, 25 bp, Homo sapien
gagctcgcggcggaggacccagagg

SEQ ID NO: 4500211 - DNA, 25 bp, Homo sapien
agctcgcggcggaggacccagaggg

SEQ ID NO: 4500212 - DNA, 25 bp, Homo sapien
ggcgagtctgggttcgggacgccac

SEQ ID NO: 4500213 - DNA, 25 bp, Homo sapien
cgcttggctctggatcgcaggtgca

SEQ ID NO: 4500214 - DNA, 25 bp, Homo sapien
aagctccgggcgcacctaagctgtc

SEQ ID NO: 4500215 - DNA, 25 bp, Homo sapien
ggagaggttgtctcgtgcccgcgca

SEQ ID NO: 4500216 - DNA, 25 bp, Homo sapien
ggctcgggggtccctggaccactca

SEQ ID NO: 4500217 - DNA, 25 bp, Homo sapien
gctcgggggtccctggaccactcac

SEQ ID NO: 4500218 - DNA, 25 bp, Homo sapien
ctccttccgcagctgctccactgag

SEQ ID NO: 4500219 - DNA, 25 bp, Homo sapien
tgccctccttccgcagctgctccac

SEQ ID NO: 4500220 - DNA, 25 bp, Homo sapien
ttccgcagctgctccactgagctgg

SEQ ID NO: 4500221 - DNA, 25 bp, Homo sapien
tccgcagctgctccactgagctggc

SEQ ID NO: 4500222 - DNA, 25 bp, Homo sapien
ggcgcccccgtagtctccacatttg

SEQ ID NO: 4500223 - DNA, 25 bp, Homo sapien
gcctgagtgtaggccgccagggcgc

SEQ ID NO: 4500224 - DNA, 25 bp, Homo sapien
cggttccggtgcagaacggcctggt

SEQ ID NO: 4500225 - DNA, 25 bp, Homo sapien
tgaggtggcaggcggcccggttccg

SEQ ID NO: 4500226 - DNA, 25 bp, Homo sapien
tggatgcctctgtttctgctttgtc

SEQ ID NO: 4500227 - DNA, 25 bp, Homo sapien
ctgtttctgctttgtcgtaatcttc

SEQ ID NO: 4500228 - DNA, 25 bp, Homo sapien
ctttggatgcctctgtttctgcttt

SEQ ID NO: 4500229 - DNA, 25 bp, Homo sapien
gcctctgtttctgctttgtcgtaat

SEQ ID NO: 4500230 - DNA, 25 bp, Homo sapien
tgacggtgcagcggtcccagagtcc

SEQ ID NO: 4500231 - DNA, 25 bp, Homo sapien
aatgtgacggtgcagcggtcccaga

SEQ ID NO: 4500232 - DNA, 25 bp, Homo sapien
gaaaggcccgaggcagtgggaaaga

SEQ ID NO: 4500233 - DNA, 25 bp, Homo sapien
agaatgtgacggtgcagcggtccca

SEQ ID NO: 4500234 - DNA, 25 bp, Homo sapien
agcacaaacaggagcgctgtcagca

SEQ ID NO: 4500235 - DNA, 25 bp, Homo sapien
gaaagatctcgaggaaaggccagaa

SEQ ID NO: 4500236 - DNA, 25 bp, Homo sapien
ctgagcacaaacaggagcgctgtca

SEQ ID NO: 4500237 - DNA, 25 bp, Homo sapien
tctccaggcaagagcagtagggaaa

SEQ ID NO: 4500238 - DNA, 25 bp, Homo sapien
tctagggcttggctccgccggtaga

SEQ ID NO: 4500239 - DNA, 25 bp, Homo sapien
aggacagcctggtccaggcggccca

SEQ ID NO: 4500240 - DNA, 25 bp, Homo sapien
tagagtgctttgacatccccaccat

SEQ ID NO: 4500241 - DNA, 25 bp, Homo sapien
aggtcaaggacagcctggtccaggc

SEQ ID NO: 4500242 - DNA, 25 bp, Homo sapien
tcctctatggctgggcattcaggca

SEQ ID NO: 4500243 - DNA, 25 bp, Homo sapien
agccattcctctatggctgggcatt

SEQ ID NO: 4500244 - DNA, 25 bp, Homo sapien
tatggctgggcattcaggcaagttc

SEQ ID NO: 4500245 - DNA, 25 bp, Homo sapien
gctgggcattcaggcaagttccaag

SEQ ID NO: 4500246 - DNA, 25 bp, Homo sapien
gcagcaggggctgcgccgatgctgg

SEQ ID NO: 4500247 - DNA, 25 bp, Homo sapien
ctgagctatttcctgcttgggcagc

SEQ ID NO: 4500248 - DNA, 25 bp, Homo sapien
aggggctgcgccgatgctggagtgc

SEQ ID NO: 4500249 - DNA, 25 bp, Homo sapien
gctatttcctgcttgggcagcaggg

SEQ ID NO: 4500250 - DNA, 25 bp, Homo sapien
gaaacatctgttccactttggcatc

SEQ ID NO: 4500251 - DNA, 25 bp, Homo sapien
catccgtcgaggacatgtatcgcac

SEQ ID NO: 4500252 - DNA, 25 bp, Homo sapien
tctgttccactttggcatccgtcga

SEQ ID NO: 4500253 - DNA, 25 bp, Homo sapien
ctttggcatccgtcgaggacatgta

SEQ ID NO: 4500254 - DNA, 25 bp, Homo sapien
catgtccagtaaacgttgcaagagc

SEQ ID NO: 4500255 - DNA, 25 bp, Homo sapien
agagccgccagcatgaggtcagtct

SEQ ID NO: 4500256 - DNA, 25 bp, Homo sapien
tgaaccccattactccggaagatct

SEQ ID NO: 4500257 - DNA, 25 bp, Homo sapien
caaatgccaaccagcgtacgcagag

SEQ ID NO: 4500258 - DNA, 25 bp, Homo sapien
aagggactgaagctgtaaccagcct

SEQ ID NO: 4500259 - DNA, 25 bp, Homo sapien
ggtgtgaggcaccataacctaccta

SEQ ID NO: 4500260 - DNA, 25 bp, Homo sapien
agggactgaagctgtaaccagcctc

SEQ ID NO: 4500261 - DNA, 25 bp, Homo sapien
gaggcaccataacctacctaagttc

SEQ ID NO: 4500262 - DNA, 25 bp, Homo sapien
caggagggaacagaatgcacatgct

SEQ ID NO: 4500263 - DNA, 25 bp, Homo sapien
tgagaatcatgtcgggatcaagccc

SEQ ID NO: 4500264 - DNA, 25 bp, Homo sapien
cagtcttagccttgggagacccaga

SEQ ID NO: 4500265 - DNA, 25 bp, Homo sapien
tattgctgcactgtccatgctgggc

SEQ ID NO: 4500266 - DNA, 25 bp, Homo sapien
gtgggagaggtaaacagaaggaagc

SEQ ID NO: 4500267 - DNA, 25 bp, Homo sapien
agaaggaagcttccagttgttgaag

SEQ ID NO: 4500268 - DNA, 25 bp, Homo sapien
gaggtaaacagaaggaagcttccag

SEQ ID NO: 4500269 - DNA, 25 bp, Homo sapien
ttgttgaagggcagccacagagatc

SEQ ID NO: 4500270 - DNA, 25 bp, Homo sapien
acgcccaggatggagactactcgcc

SEQ ID NO: 4500271 - DNA, 25 bp, Homo sapien
gatggcaccttctttgcctcggaag

SEQ ID NO: 4500272 - DNA, 25 bp, Homo sapien
gactactcgccgagttcccagtatg

SEQ ID NO: 4500273 - DNA, 25 bp, Homo sapien
cttccttgagggcatcaaacataac

SEQ ID NO: 4500274 - DNA, 25 bp, Homo sapien
aaaccgtattccaaacaacctgcag

SEQ ID NO: 4500275 - DNA, 25 bp, Homo sapien
tccccaaaaaactggcctggctggc

SEQ ID NO: 4500276 - DNA, 25 bp, Homo sapien
tgacagtaacgtccaaaagacccca

SEQ ID NO: 4500277 - DNA, 25 bp, Homo sapien
caccttggttgctgagaatctagag

SEQ ID NO: 4500278 - DNA, 25 bp, Homo sapien
tcagcagatctaagaggttactgat

SEQ ID NO: 4500279 - DNA, 25 bp, Homo sapien
gcaccgctttaatcaggagggtcag

SEQ ID NO: 4500280 - DNA, 25 bp, Homo sapien
cttggtcgatgacccagagggtgag

SEQ ID NO: 4500281 - DNA, 25 bp, Homo sapien
agggtcagggcattgtctcggcctt

SEQ ID NO: 4500282 - DNA, 25 bp, Homo sapien
tcacaacttttcttattactcctaa

SEQ ID NO: 4500283 - DNA, 25 bp, Homo sapien
tcaaagtgtgtcatccaccatgcct

SEQ ID NO: 4500284 - DNA, 25 bp, Homo sapien
cacaacttttcttattactcctaag

SEQ ID NO: 4500285 - DNA, 25 bp, Homo sapien
tgtaaagacaccccgcttagacagt

SEQ ID NO: 4500286 - DNA, 25 bp, Homo sapien
tagacagtagaacactagttccaac

SEQ ID NO: 4500287 - DNA, 25 bp, Homo sapien
gacaccccgcttagacagtagaaca

SEQ ID NO: 4500288 - DNA, 25 bp, Homo sapien
cccgcttagacagtagaacactagt

SEQ ID NO: 4500289 - DNA, 25 bp, Homo sapien
ttgatgtagttttcacaaagtctgt

SEQ ID NO: 4500290 - DNA, 25 bp, Homo sapien
gctcatgcggctgtttgcggtcact

SEQ ID NO: 4500291 - DNA, 25 bp, Homo sapien
gtcactgcgagctccccaggagggt

SEQ ID NO: 4500292 - DNA, 25 bp, Homo sapien
ctgaggagaatagaggcgctcatgc

SEQ ID NO: 4500293 - DNA, 25 bp, Homo sapien
tccatgacaccgctcagctccaagg

SEQ ID NO: 4500294 - DNA, 25 bp, Homo sapien
tgccagcgtcacatgggccctgcag

SEQ ID NO: 4500295 - DNA, 25 bp, Homo sapien
tggatggcccgtagcttcccggcca

SEQ ID NO: 4500296 - DNA, 25 bp, Homo sapien
caaggcccggttgccagcgtcacat

SEQ ID NO: 4500297 - DNA, 25 bp, Homo sapien
cagtgatgaatgaggcccgcttagc

SEQ ID NO: 4500298 - DNA, 25 bp, Homo sapien
actagcgcccggatgcggatgctgt

SEQ ID NO: 4500299 - DNA, 25 bp, Homo sapien
ggtccttcagcagcgagacaccatt

SEQ ID NO: 4500300 - DNA, 25 bp, Homo sapien
agccttgccggctgcatggatcaga

SEQ ID NO: 4500301 - DNA, 25 bp, Homo sapien
gagaaatccaggactgagtgcccca

SEQ ID NO: 4500302 - DNA, 25 bp, Homo sapien
gcccagtcttaagccccatggaggg

SEQ ID NO: 4500303 - DNA, 25 bp, Homo sapien
tggaagctacacagacaaatcagca

SEQ ID NO: 4500304 - DNA, 25 bp, Homo sapien
ttccatgtcgcacaaagaagccctc

SEQ ID NO: 4500305 - DNA, 25 bp, Homo sapien
gtcagtccctccagccgaaccgagc

SEQ ID NO: 4500306 - DNA, 25 bp, Homo sapien
acactgcttagccagtttgagagtg

SEQ ID NO: 4500307 - DNA, 25 bp, Homo sapien
cttagccagtttgagagtggagcct

SEQ ID NO: 4500308 - DNA, 25 bp, Homo sapien
tccagccgaaccgagcttacagagt

SEQ ID NO: 4500309 - DNA, 25 bp, Homo sapien
cgtcgatctggtcattgcacagcca

SEQ ID NO: 4500310 - DNA, 25 bp, Homo sapien
tcaaaggtcaggtaagccaggccct

SEQ ID NO: 4500311 - DNA, 25 bp, Homo sapien
actcttccttcacgtcggcatcaaa

SEQ ID NO: 4500312 - DNA, 25 bp, Homo sapien
agcgccgagtgcctgcgtcgatctg

SEQ ID NO: 4500313 - DNA, 25 bp, Homo sapien
agaacgtccttgctaacaccactgg

SEQ ID NO: 4500314 - DNA, 25 bp, Homo sapien
ctgccaggacacagaggaattcaca

SEQ ID NO: 4500315 - DNA, 25 bp, Homo sapien
gccgagaaagcctggtaaggtctaa

SEQ ID NO: 4500316 - DNA, 25 bp, Homo sapien
gatgaattcgggaaactcccaggcc

SEQ ID NO: 4500317 - DNA, 25 bp, Homo sapien
tgctgctcgggcacatgctgcttgg

SEQ ID NO: 4500318 - DNA, 25 bp, Homo sapien
aggccaccgcaaagagcactgacct

SEQ ID NO: 4500319 - DNA, 25 bp, Homo sapien
ggtcgggctcctcgtagtcatagct

SEQ ID NO: 4500320 - DNA, 25 bp, Homo sapien
gtcatagctgttggtgcagttcacc

SEQ ID NO: 4500321 - DNA, 25 bp, Homo sapien
ccttctcacagcagtaattgaggaa

SEQ ID NO: 4500322 - DNA, 25 bp, Homo sapien
gacccttctcacagcagtaattgag

SEQ ID NO: 4500323 - DNA, 25 bp, Homo sapien
cccttctcacagcagtaattgagga

SEQ ID NO: 4500324 - DNA, 25 bp, Homo sapien
ggacccttctcacagcagtaattga

SEQ ID NO: 4500325 - DNA, 25 bp, Homo sapien
gtcagcacagggctctccgtcttca

SEQ ID NO: 4500326 - DNA, 25 bp, Homo sapien
accatgcacaccatggccgacacca

SEQ ID NO: 4500327 - DNA, 25 bp, Homo sapien
gagcccgcacgaagcttggcttgtc

SEQ ID NO: 4500328 - DNA, 25 bp, Homo sapien
agcagcttcttcacccgagcccgca

SEQ ID NO: 4500329 - DNA, 25 bp, Homo sapien
ccacagtgcctcggtcctctacctc

SEQ ID NO: 4500330 - DNA, 25 bp, Homo sapien
aaccacagtgcctcggtcctctacc

SEQ ID NO: 4500331 - DNA, 25 bp, Homo sapien
accacagtgcctcggtcctctacct

SEQ ID NO: 4500332 - DNA, 25 bp, Homo sapien
cacagtgcctcggtcctctacctct

SEQ ID NO: 4500333 - DNA, 25 bp, Homo sapien
aatgagacaaaggaacagtagagcc

SEQ ID NO: 4500334 - DNA, 25 bp, Homo sapien
ctgtaggaacaagcccgtcactgct

SEQ ID NO: 4500335 - DNA, 25 bp, Homo sapien
tctctcagcgggacggtgttcctct

SEQ ID NO: 4500336 - DNA, 25 bp, Homo sapien
tcctgaaacacctaataagggctgg

SEQ ID NO: 4500337 - DNA, 25 bp, Homo sapien
catctccgggttggaggtgatggtg

SEQ ID NO: 4500338 - DNA, 25 bp, Homo sapien
ggtcatctccgggttggaggtgatg

SEQ ID NO: 4500339 - DNA, 25 bp, Homo sapien
agggaaggtcatctccgggttggag

SEQ ID NO: 4500340 - DNA, 25 bp, Homo sapien
aaggtcatctccgggttggaggtga

SEQ ID NO: 4500341 - DNA, 25 bp, Homo sapien
ttgaggtgcaacagggagacgaggg

SEQ ID NO: 4500342 - DNA, 25 bp, Homo sapien
tgatcccagccaggtttgttagggc

SEQ ID NO: 4500343 - DNA, 25 bp, Homo sapien
caggcctgagcagttgaggtgcaac

SEQ ID NO: 4500344 - DNA, 25 bp, Homo sapien
ccatgagcgcctcgaagttctgcag

SEQ ID NO: 4500345 - DNA, 25 bp, Homo sapien
tttgagtatttaccctgaccaggca

SEQ ID NO: 4500346 - DNA, 25 bp, Homo sapien
gaccaggcacctggatcatcttact

SEQ ID NO: 4500347 - DNA, 25 bp, Homo sapien
cgaggtattgctacactgctcaggc

SEQ ID NO: 4500348 - DNA, 25 bp, Homo sapien
ccatgtgccgttgtggtttaccgca

SEQ ID NO: 4500349 - DNA, 25 bp, Homo sapien
tgctcctcaaacatgtagccttcta

SEQ ID NO: 4500350 - DNA, 25 bp, Homo sapien
ggctgcccggcggatcatctcatgc

SEQ ID NO: 4500351 - DNA, 25 bp, Homo sapien
tagccttctatcatgggcacagcct

SEQ ID NO: 4500352 - DNA, 25 bp, Homo sapien
tggccaagttacacatgcactccgt

SEQ ID NO: 4500353 - DNA, 25 bp, Homo sapien
gcatggaggtaagcatggccaagcc

SEQ ID NO: 4500354 - DNA, 25 bp, Homo sapien
cacttggggaatgcggctgcagagc

SEQ ID NO: 4500355 - DNA, 25 bp, Homo sapien
caccagcagcttcagtcggtcattg

SEQ ID NO: 4500356 - DNA, 25 bp, Homo sapien
gaatgcggctgcagagcgtgggccg

SEQ ID NO: 4500357 - DNA, 25 bp, Homo sapien
ctggttggagctcagaagcagggcc

SEQ ID NO: 4500358 - DNA, 25 bp, Homo sapien
tgacaagatctccatcatctcactc

SEQ ID NO: 4500359 - DNA, 25 bp, Homo sapien
gttggataagcccatattccactgc

SEQ ID NO: 4500360 - DNA, 25 bp, Homo sapien
agggctgtggtcacccttagctagc

SEQ ID NO: 4500361 - DNA, 25 bp, Homo sapien
tctccgtgccacaataggtagcgtg

SEQ ID NO: 4500362 - DNA, 25 bp, Homo sapien
aagagtattgggcatgccagccacc

SEQ ID NO: 4500363 - DNA, 25 bp, Homo sapien
gaacgtggccgctgactcagaacag

SEQ ID NO: 4500364 - DNA, 25 bp, Homo sapien
tagcgtgtgcatgagccttgggccc

SEQ ID NO: 4500365 - DNA, 25 bp, Homo sapien
gtgttgggatgcaccttccccattc

SEQ ID NO: 4500366 - DNA, 25 bp, Homo sapien
tgttgggatgcaccttccccattcc

SEQ ID NO: 4500367 - DNA, 25 bp, Homo sapien
cagaaaaagggcccctctgagtgag

SEQ ID NO: 4500368 - DNA, 25 bp, Homo sapien
ccattcccagctgactacagtagta

SEQ ID NO: 4500369 - DNA, 25 bp, Homo sapien
ctacacacttttattggaggggcag

SEQ ID NO: 4500370 - DNA, 25 bp, Homo sapien
cacacttttattggaggggcaggcc

SEQ ID NO: 4500371 - DNA, 25 bp, Homo sapien
ggcaggcctgatagcaggctcacag

SEQ ID NO: 4500372 - DNA, 25 bp, Homo sapien
gggcaggcctgatagcaggctcaca

SEQ ID NO: 4500373 - DNA, 25 bp, Homo sapien
gaagcagcttttaccttccacggat

SEQ ID NO: 4500374 - DNA, 25 bp, Homo sapien
attggctcaggacccgtcacgtgcc

SEQ ID NO: 4500375 - DNA, 25 bp, Homo sapien
caacgagcctcacgctgggcttagc

SEQ ID NO: 4500376 - DNA, 25 bp, Homo sapien
gtgcctctgtcgagccaacgagcct

SEQ ID NO: 4500377 - DNA, 25 bp, Homo sapien
ttaagacttgagctaaaggtttggc

SEQ ID NO: 4500378 - DNA, 25 bp, Homo sapien
ggctggagctcggattagaaccaca

SEQ ID NO: 4500379 - DNA, 25 bp, Homo sapien
cagagaggacattcattaagacttg

SEQ ID NO: 4500380 - DNA, 25 bp, Homo sapien
tttggcgaggagtgacgcccaagac

SEQ ID NO: 4500381 - DNA, 25 bp, Homo sapien
cctctaccctctcgggcaggtcctt

SEQ ID NO: 4500382 - DNA, 25 bp, Homo sapien
ctctaccctctcgggcaggtccttc

SEQ ID NO: 4500383 - DNA, 25 bp, Homo sapien
cttaagtcagatcctgggtctctcc

SEQ ID NO: 4500384 - DNA, 25 bp, Homo sapien
ctgaagcagaattgcatgggcattt

SEQ ID NO: 4500385 - DNA, 25 bp, Homo sapien
gcatgggcattttcaggcctcttaa

SEQ ID NO: 4500386 - DNA, 25 bp, Homo sapien
ttttcaggcctcttaagtcagatcc

SEQ ID NO: 4500387 - DNA, 25 bp, Homo sapien
cttatctagccatttattcgtccag

SEQ ID NO: 4500388 - DNA, 25 bp, Homo sapien
tattcgtccagcgagcatttactga

SEQ ID NO: 4500389 - DNA, 25 bp, Homo sapien
tttattcgtccagcgagcatttact

SEQ ID NO: 4500390 - DNA, 25 bp, Homo sapien
atttattcgtccagcgagcatttac

SEQ ID NO: 4500391 - DNA, 25 bp, Homo sapien
tgggacactggcaagtctctggcct

SEQ ID NO: 4500392 - DNA, 25 bp, Homo sapien
gggattcttgcgaagagcccgctag

SEQ ID NO: 4500393 - DNA, 25 bp, Homo sapien
agagcccgctagtgggacactggca

SEQ ID NO: 4500394 - DNA, 25 bp, Homo sapien
ggacactggcaagtctctggccttc

SEQ ID NO: 4500395 - DNA, 25 bp, Homo sapien
gtcacgaaagcggtgtagctccagc

SEQ ID NO: 4500396 - DNA, 25 bp, Homo sapien
gcgctcacgcggcagatgtcgacgc

SEQ ID NO: 4500397 - DNA, 25 bp, Homo sapien
tgcccgaagccgcagaaaccgaagc

SEQ ID NO: 4500398 - DNA, 25 bp, Homo sapien
agctcgcgctcacgcggcagatgtc

SEQ ID NO: 4500399 - DNA, 25 bp, Homo sapien
ggggagacaaactggactggccaca

SEQ ID NO: 4500400 - DNA, 25 bp, Homo sapien
gctggcggcctgaacgggggagaca

SEQ ID NO: 4500401 - DNA, 25 bp, Homo sapien
gagcgcggctggaataagtggggac

SEQ ID NO: 4500402 - DNA, 25 bp, Homo sapien
attggggaccaacccagaatgtggg

SEQ ID NO: 4500403 - DNA, 25 bp, Homo sapien
agccagaggccggtagaagggcgcc

SEQ ID NO: 4500404 - DNA, 25 bp, Homo sapien
tggctgagcccgacagctccaagcg

SEQ ID NO: 4500405 - DNA, 25 bp, Homo sapien
tgggcctcaccggccggatcgtctt

SEQ ID NO: 4500406 - DNA, 25 bp, Homo sapien
ggctcacgtaggcacgggcgcaggg

SEQ ID NO: 4500407 - DNA, 25 bp, Homo sapien
ggccacctcagccatgactaggccc

SEQ ID NO: 4500408 - DNA, 25 bp, Homo sapien
acgcctccaacagccgtggctccag

SEQ ID NO: 4500409 - DNA, 25 bp, Homo sapien
tcagccatgactaggccctgcaacg

SEQ ID NO: 4500410 - DNA, 25 bp, Homo sapien
ccctgcaacgcctccaacagccgtg

SEQ ID NO: 4500411 - DNA, 25 bp, Homo sapien
ccagccccagatataaatatcccca

SEQ ID NO: 4500412 - DNA, 25 bp, Homo sapien
ttccagccccagatataaatatccc

SEQ ID NO: 4500413 - DNA, 25 bp, Homo sapien
tcccttgcgacagtctctccatcct

SEQ ID NO: 4500414 - DNA, 25 bp, Homo sapien
cattccagccccagatataaatatc

SEQ ID NO: 4500415 - DNA, 25 bp, Homo sapien
gccccacccgttctcttcacctgag

SEQ ID NO: 4500416 - DNA, 25 bp, Homo sapien
cccacccgttctcttcacctgagaa

SEQ ID NO: 4500417 - DNA, 25 bp, Homo sapien
cacccgttctcttcacctgagaacc

SEQ ID NO: 4500418 - DNA, 25 bp, Homo sapien
tcagccccacccgttctcttcacct

SEQ ID NO: 4500419 - DNA, 25 bp, Homo sapien
ggccttgactgcatctgagcccatg

SEQ ID NO: 4500420 - DNA, 25 bp, Homo sapien
agatccagtaatgccgggaagggct

SEQ ID NO: 4500421 - DNA, 25 bp, Homo sapien
ctggccttgactgcatctgagccca

SEQ ID NO: 4500422 - DNA, 25 bp, Homo sapien
gcccatggggagatccagtaatgcc

SEQ ID NO: 4500423 - DNA, 25 bp, Homo sapien
cttatccactgagcaaggtagctgc

SEQ ID NO: 4500424 - DNA, 25 bp, Homo sapien
tagctgctctgtatgagccacagaa

SEQ ID NO: 4500425 - DNA, 25 bp, Homo sapien
ctgtgtgccatgctaccgagcgccg

SEQ ID NO: 4500426 - DNA, 25 bp, Homo sapien
gaaaaagtggcggatcttcctgtgt

SEQ ID NO: 4500427 - DNA, 25 bp, Homo sapien
ccccaggtgtagagctcccctgttc

SEQ ID NO: 4500428 - DNA, 25 bp, Homo sapien
ggatccccaagaggctagtggcgac

SEQ ID NO: 4500429 - DNA, 25 bp, Homo sapien
tgagcgcgcctatgtctgttccaac

SEQ ID NO: 4500430 - DNA, 25 bp, Homo sapien
tgtaagtgctggttggatactccct

SEQ ID NO: 4500431 - DNA, 25 bp, Homo sapien
taggcgggtggtaccgatatcctct

SEQ ID NO: 4500432 - DNA, 25 bp, Homo sapien
tgccatcgtctccactgggtcttgc

SEQ ID NO: 4500433 - DNA, 25 bp, Homo sapien
ccatcgtctccactgggtcttgctg

SEQ ID NO: 4500434 - DNA, 25 bp, Homo sapien
gccatcgtctccactgggtcttgct

SEQ ID NO: 4500435 - DNA, 25 bp, Homo sapien
ttgccatcgtctccactgggtcttg

SEQ ID NO: 4500436 - DNA, 25 bp, Homo sapien
tacaaagtattccacacggcgaggc

SEQ ID NO: 4500437 - DNA, 25 bp, Homo sapien
cacggcgaggccgatccaagctggt

SEQ ID NO: 4500438 - DNA, 25 bp, Homo sapien
ccacaggtgacagcctttacttgga

SEQ ID NO: 4500439 - DNA, 25 bp, Homo sapien
catacacgtaggtgttccacggccc

SEQ ID NO: 4500440 - DNA, 25 bp, Homo sapien
taaagcactttgagccttacctggc

SEQ ID NO: 4500441 - DNA, 25 bp, Homo sapien
gatgacctggaatgtgccccaatct

SEQ ID NO: 4500442 - DNA, 25 bp, Homo sapien
tgactgacagaagacgatgacctgg

SEQ ID NO: 4500443 - DNA, 25 bp, Homo sapien
tccaggtgtttctaaagtgcagaca

SEQ ID NO: 4500444 - DNA, 25 bp, Homo sapien
ccaccgatttgttactacagattag

SEQ ID NO: 4500445 - DNA, 25 bp, Homo sapien
ctgtacctggcccaccgatttgtta

SEQ ID NO: 4500446 - DNA, 25 bp, Homo sapien
tacagattagtttgcgttttctaca

SEQ ID NO: 4500447 - DNA, 25 bp, Homo sapien
ctacagttcgatgtaagtagaatca

SEQ ID NO: 4500448 - DNA, 25 bp, Homo sapien
actttttagttggttggtctgtgtg

SEQ ID NO: 4500449 - DNA, 25 bp, Homo sapien
ctcctggaaatttttagtcaggagt

SEQ ID NO: 4500450 - DNA, 25 bp, Homo sapien
tttagttggttggtctgtgtgtgaa

SEQ ID NO: 4500451 - DNA, 25 bp, Homo sapien
tcctggaaatttttagtcaggagtg

SEQ ID NO: 4500452 - DNA, 25 bp, Homo sapien
gtttactcatacagtacgtgtcctg

SEQ ID NO: 4500453 - DNA, 25 bp, Homo sapien
caaaagcttaccagtgtggacttgg

SEQ ID NO: 4500454 - DNA, 25 bp, Homo sapien
tggtgttagccacgctgtttactca

SEQ ID NO: 4500455 - DNA, 25 bp, Homo sapien
gttctcaaaagcttaccagtgtgga

SEQ ID NO: 4500456 - DNA, 25 bp, Homo sapien
gagctgtctttgtcgtggagatctg

SEQ ID NO: 4500457 - DNA, 25 bp, Homo sapien
gagatctggaactttgcacatgtca

SEQ ID NO: 4500458 - DNA, 25 bp, Homo sapien
cacattgggagtctgtttgttccaa

SEQ ID NO: 4500459 - DNA, 25 bp, Homo sapien
tgctctagcttccacgatgaggcgc

SEQ ID NO: 4500460 - DNA, 25 bp, Homo sapien
tacacagtgcattgccctttgttgg

SEQ ID NO: 4500461 - DNA, 25 bp, Homo sapien
tgaacacacatgcttgtcggaacgc

SEQ ID NO: 4500462 - DNA, 25 bp, Homo sapien
ctcggcgtttgtcccttggctctca

SEQ ID NO: 4500463 - DNA, 25 bp, Homo sapien
tgtccgaagttgagatggcctgccc

SEQ ID NO: 4500464 - DNA, 25 bp, Homo sapien
cttctggaatcctcaattcaaccaa

SEQ ID NO: 4500465 - DNA, 25 bp, Homo sapien
acttctggaatcctcaattcaacca

SEQ ID NO: 4500466 - DNA, 25 bp, Homo sapien
ttcaaattacgtggctggtggtgct

SEQ ID NO: 4500467 - DNA, 25 bp, Homo sapien
caaagccggtaaactaacctctgct

SEQ ID NO: 4500468 - DNA, 25 bp, Homo sapien
aaccaaggcccattttatctgaggc

SEQ ID NO: 4500469 - DNA, 25 bp, Homo sapien
tatggctgatagactccaccaggca

SEQ ID NO: 4500470 - DNA, 25 bp, Homo sapien
ctggtaacgatgaaaagaaagcttc

SEQ ID NO: 4500471 - DNA, 25 bp, Homo sapien
tgacagtcacggagtggccagcttt

SEQ ID NO: 4500472 - DNA, 25 bp, Homo sapien
gttgcgtccttgcattaaattcggg

SEQ ID NO: 4500473 - DNA, 25 bp, Homo sapien
ctttggtgtctgtgcttgttgcgtc

SEQ ID NO: 4500474 - DNA, 25 bp, Homo sapien
gagtaagtgtgaacgtgaacgcaaa

SEQ ID NO: 4500475 - DNA, 25 bp, Homo sapien
aaattcatggagtatgtggcagaac

SEQ ID NO: 4500476 - DNA, 25 bp, Homo sapien
cgaagaaagtaatctgagcagccca

SEQ ID NO: 4500477 - DNA, 25 bp, Homo sapien
tgcatcgattggagaaagagagagc

SEQ ID NO: 4500478 - DNA, 25 bp, Homo sapien
cttggaatcttataacagtggtacg

SEQ ID NO: 4500479 - DNA, 25 bp, Homo sapien
agaaggagagacgaccatcttgcaa

SEQ ID NO: 4500480 - DNA, 25 bp, Homo sapien
tgaaagtctgtcatccacgccttct

SEQ ID NO: 4500481 - DNA, 25 bp, Homo sapien
cagtggtacgttgtcttattcagga

SEQ ID NO: 4500482 - DNA, 25 bp, Homo sapien
tagatatgagctaggcatgccaccc

SEQ ID NO: 4500483 - DNA, 25 bp, Homo sapien
gacgatgttcataggattagcagga

SEQ ID NO: 4500484 - DNA, 25 bp, Homo sapien
tgaggtgtacaacgatcatctccct

SEQ ID NO: 4500485 - DNA, 25 bp, Homo sapien
ccagttaggagtagagcagggacta

SEQ ID NO: 4500486 - DNA, 25 bp, Homo sapien
ttgctttgtagggaatatgaatttt

SEQ ID NO: 4500487 - DNA, 25 bp, Homo sapien
tttgctttgtagggaatatgaattt

SEQ ID NO: 4500488 - DNA, 25 bp, Homo sapien
aaggtaggcatagatggtgctgcag

SEQ ID NO: 4500489 - DNA, 25 bp, Homo sapien
aggtaggcatagatggtgctgcagt

SEQ ID NO: 4500490 - DNA, 25 bp, Homo sapien
gcctgatcaacatggtgaacctccg

SEQ ID NO: 4500491 - DNA, 25 bp, Homo sapien
caggagttcaagaccagcctgatca

SEQ ID NO: 4500492 - DNA, 25 bp, Homo sapien
aaaattagccgggcatggtggtgag

SEQ ID NO: 4500493 - DNA, 25 bp, Homo sapien
gaggccgaggcgcatggattgcttg

SEQ ID NO: 4500494 - DNA, 25 bp, Homo sapien
tgatttgctgcaggcttctcggccg

SEQ ID NO: 4500495 - DNA, 25 bp, Homo sapien
cttgtagaaccaccgaaagctctga

SEQ ID NO: 4500496 - DNA, 25 bp, Homo sapien
tggatggcacacaaagaccttaagt

SEQ ID NO: 4500497 - DNA, 25 bp, Homo sapien
gagacacattgttagagatccaggc

SEQ ID NO: 4500498 - DNA, 25 bp, Homo sapien
tatggccatctggtataggcaacag

SEQ ID NO: 4500499 - DNA, 25 bp, Homo sapien
gagagattagcagacagactcggag

SEQ ID NO: 4500500 - DNA, 25 bp, Homo sapien
ggttgaactatttcctgagggcagt

SEQ ID NO: 4500501 - DNA, 25 bp, Homo sapien
tcttcaacaaggacgggcaacctct

SEQ ID NO: 4500502 - DNA, 25 bp, Homo sapien
gatgactcgttgtaaaccttctgtg

SEQ ID NO: 4500503 - DNA, 25 bp, Homo sapien
cttctgtggtcgtggcttttcttta

SEQ ID NO: 4500504 - DNA, 25 bp, Homo sapien
tgtggaaacgcggtctatgttggcc

SEQ ID NO: 4500505 - DNA, 25 bp, Homo sapien
agcgtctcaggtgccgctgcttggc

SEQ ID NO: 4500506 - DNA, 25 bp, Homo sapien
tacacaccaggattcatgccaccat

SEQ ID NO: 4500507 - DNA, 25 bp, Homo sapien
gaatcagccgtacgaaaatgcagga

SEQ ID NO: 4500508 - DNA, 25 bp, Homo sapien
tacttttccggtgaggctttgtgca

SEQ ID NO: 4500509 - DNA, 25 bp, Homo sapien
tgtatgaagatattcagcccagcct

SEQ ID NO: 4500510 - DNA, 25 bp, Homo sapien
cattttagcaccgtgtgaggcattg

SEQ ID NO: 4500511 - DNA, 25 bp, Homo sapien
cactgacggcgcatggccagtgctg

SEQ ID NO: 4500512 - DNA, 25 bp, Homo sapien
tagggagagtcacctttcagcacgc

SEQ ID NO: 4500513 - DNA, 25 bp, Homo sapien
ggattaccgatctctgaaaacacag

SEQ ID NO: 4500514 - DNA, 25 bp, Homo sapien
taaaagcaggcctgaagatttcagt

SEQ ID NO: 4500515 - DNA, 25 bp, Homo sapien
tccgttgtcaaatccactggtgtct

SEQ ID NO: 4500516 - DNA, 25 bp, Homo sapien
taaggagcacgtagcattgatctac

SEQ ID NO: 4500517 - DNA, 25 bp, Homo sapien
ggaagagatcgtggccttttccctc

SEQ ID NO: 4500518 - DNA, 25 bp, Homo sapien
tggaattgtgcgaagaggcctctac

SEQ ID NO: 4500519 - DNA, 25 bp, Homo sapien
gaagccagcacatgagaccaagaga

SEQ ID NO: 4500520 - DNA, 25 bp, Homo sapien
ggtgcacaatgttacggctttccag

SEQ ID NO: 4500521 - DNA, 25 bp, Homo sapien
ttcacgcttgcgaggtagaacctgc

SEQ ID NO: 4500522 - DNA, 25 bp, Homo sapien
tgatctaggagcttcaaggaagtga

SEQ ID NO: 4500523 - DNA, 25 bp, Homo sapien
ttggggtgatgatctaggagcttca

SEQ ID NO: 4500524 - DNA, 25 bp, Homo sapien
tctaggagcttcaaggaagtgagtg

SEQ ID NO: 4500525 - DNA, 25 bp, Homo sapien
ggtgatgatctaggagcttcaagga

SEQ ID NO: 4500526 - DNA, 25 bp, Homo sapien
tagagctagtgtacccgaagagttc

SEQ ID NO: 4500527 - DNA, 25 bp, Homo sapien
gagtgatagagctagtgtacccgaa

SEQ ID NO: 4500528 - DNA, 25 bp, Homo sapien
tacccgaagagttcacagtaagtga

SEQ ID NO: 4500529 - DNA, 25 bp, Homo sapien
caggtggtaaatgagtgatagagct

SEQ ID NO: 4500530 - DNA, 25 bp, Homo sapien
gacaaggctgctccgaggtagtagc

SEQ ID NO: 4500531 - DNA, 25 bp, Homo sapien
gggagggtcgagacacggtggctgc

SEQ ID NO: 4500532 - DNA, 25 bp, Homo sapien
caggtgaccgctgccatggcttttc

SEQ ID NO: 4500533 - DNA, 25 bp, Homo sapien
tcagaacgaagggcgtccttccacc

SEQ ID NO: 4500534 - DNA, 25 bp, Homo sapien
gggttctcctcgtacgctgcggagt

SEQ ID NO: 4500535 - DNA, 25 bp, Homo sapien
cccttcctggtacgcgaagcgctgg

SEQ ID NO: 4500536 - DNA, 25 bp, Homo sapien
gcgaaagggacttccgggagatcta

SEQ ID NO: 4500537 - DNA, 25 bp, Homo sapien
tctaggaagtcgcttctttttctgg

SEQ ID NO: 4500538 - DNA, 25 bp, Homo sapien
tagctagcctgatgcattcattatg

SEQ ID NO: 4500539 - DNA, 25 bp, Homo sapien
gaagacgacagatcatttgtcccat

SEQ ID NO: 4500540 - DNA, 25 bp, Homo sapien
caatttttggcaataggtgatgctc

SEQ ID NO: 4500541 - DNA, 25 bp, Homo sapien
gtatttcctatgcatctcaccagga

SEQ ID NO: 4500542 - DNA, 25 bp, Homo sapien
tagggagaagttcagcaaagtggca

SEQ ID NO: 4500543 - DNA, 25 bp, Homo sapien
catatgagctctcaaagtccagtgt

SEQ ID NO: 4500544 - DNA, 25 bp, Homo sapien
cagtgtgagcatagcgtgttttttg

SEQ ID NO: 4500545 - DNA, 25 bp, Homo sapien
ccaagattcaatctaagggcgttag

SEQ ID NO: 4500546 - DNA, 25 bp, Homo sapien
aatgtccctgctgcagtagcgctcc

SEQ ID NO: 4500547 - DNA, 25 bp, Homo sapien
atgtccctgctgcagtagcgctcca

SEQ ID NO: 4500548 - DNA, 25 bp, Homo sapien
tgtccctgctgcagtagcgctccat

SEQ ID NO: 4500549 - DNA, 25 bp, Homo sapien
gttaggacaagcaacaacagccaaa

SEQ ID NO: 4500550 - DNA, 25 bp, Homo sapien
cctgtttcaacagtgccatcgtgtg

SEQ ID NO: 4500551 - DNA, 25 bp, Homo sapien
ggatggcacccaatggcaagattgc

SEQ ID NO: 4500552 - DNA, 25 bp, Homo sapien
aacagccaaaactctgggacaccct

SEQ ID NO: 4500553 - DNA, 25 bp, Homo sapien
aattacttgagtatgacggtagctg

SEQ ID NO: 4500554 - DNA, 25 bp, Homo sapien
ccagagaggagaatgcgaattactt

SEQ ID NO: 4500555 - DNA, 25 bp, Homo sapien
ggcgtctttgtggcaggaacctgca

SEQ ID NO: 4500556 - DNA, 25 bp, Homo sapien
ctgcacgtgaatactgccagagagg

SEQ ID NO: 4500557 - DNA, 25 bp, Homo sapien
aatcttcaatttgtcagccaaaacc

SEQ ID NO: 4500558 - DNA, 25 bp, Homo sapien
gagcaatcttcaatttgtcagccaa

SEQ ID NO: 4500559 - DNA, 25 bp, Homo sapien
cttgagcaatcttcaatttgtcagc

SEQ ID NO: 4500560 - DNA, 25 bp, Homo sapien
cttcaatttgtcagccaaaaccaca

SEQ ID NO: 4500561 - DNA, 25 bp, Homo sapien
agtgactgccacatcttggcacaga

SEQ ID NO: 4500562 - DNA, 25 bp, Homo sapien
tgactgccacatcttggcacagaga

SEQ ID NO: 4500563 - DNA, 25 bp, Homo sapien
ggcagtgactgccacatcttggcac

SEQ ID NO: 4500564 - DNA, 25 bp, Homo sapien
gactgccacatcttggcacagagaa

SEQ ID NO: 4500565 - DNA, 25 bp, Homo sapien
aatctccttctgatcgaaggctggg

SEQ ID NO: 4500566 - DNA, 25 bp, Homo sapien
tgaggccgcaaggtctccggatttg

SEQ ID NO: 4500567 - DNA, 25 bp, Homo sapien
cattaaaagtattcgctgcgggcag

SEQ ID NO: 4500568 - DNA, 25 bp, Homo sapien
gggtcctctactcagcgggatcaga

SEQ ID NO: 4500569 - DNA, 25 bp, Homo sapien
ccgggaggagcaaccaagagagcca

SEQ ID NO: 4500570 - DNA, 25 bp, Homo sapien
tgatctcttgcccaggccgggagga

SEQ ID NO: 4500571 - DNA, 25 bp, Homo sapien
agccacagccaacagagaaaacaca

SEQ ID NO: 4500572 - DNA, 25 bp, Homo sapien
ctgctgatctcttgcccaggccggg

SEQ ID NO: 4500573 - DNA, 25 bp, Homo sapien
gcaccccagatcaggcgagaggcca

SEQ ID NO: 4500574 - DNA, 25 bp, Homo sapien
tcaggcgagaggccacggtcagatt

SEQ ID NO: 4500575 - DNA, 25 bp, Homo sapien
attcctcggcgccatctgctgcacc

SEQ ID NO: 4500576 - DNA, 25 bp, Homo sapien
tgggctccattcctcggcgccatct

SEQ ID NO: 4500577 - DNA, 25 bp, Homo sapien
caaataacgtgacaatagcaaagca

SEQ ID NO: 4500578 - DNA, 25 bp, Homo sapien
tgaccggtgttcaaacaccaacaca

SEQ ID NO: 4500579 - DNA, 25 bp, Homo sapien
ttatacaaataacgtgacaatagca

SEQ ID NO: 4500580 - DNA, 25 bp, Homo sapien
aagcaatatgctgaccggtgttcaa

SEQ ID NO: 4500581 - DNA, 25 bp, Homo sapien
cctctctggactgagagtcttagga

SEQ ID NO: 4500582 - DNA, 25 bp, Homo sapien
ctctctggactgagagtcttaggac

SEQ ID NO: 4500583 - DNA, 25 bp, Homo sapien
cattggatgattgtgaagcacagcc

SEQ ID NO: 4500584 - DNA, 25 bp, Homo sapien
gattttagccatacgcacatcagta

SEQ ID NO: 4500585 - DNA, 25 bp, Homo sapien
taatgaactaccatgtacccaccag

SEQ ID NO: 4500586 - DNA, 25 bp, Homo sapien
ttcccttcacaccaccattggatga

SEQ ID NO: 4500587 - DNA, 25 bp, Homo sapien
tttccaatgcccatagagagcccag

SEQ ID NO: 4500588 - DNA, 25 bp, Homo sapien
gatacgttcacattcctttagggac

SEQ ID NO: 4500589 - DNA, 25 bp, Homo sapien
taaatgcttacagccaacgtgtagg

SEQ ID NO: 4500590 - DNA, 25 bp, Homo sapien
tatagtgtggtgttcagattcagac

SEQ ID NO: 4500591 - DNA, 25 bp, Homo sapien
aaagcctatggccttcgggaatgag

SEQ ID NO: 4500592 - DNA, 25 bp, Homo sapien
cagactaaaaagagattcccctggg

SEQ ID NO: 4500593 - DNA, 25 bp, Homo sapien
cccggattcaggcaagtaatgagtc

SEQ ID NO: 4500594 - DNA, 25 bp, Homo sapien
tatccagcagacgtttaggcagagc

SEQ ID NO: 4500595 - DNA, 25 bp, Homo sapien
catctgccatccctgataagaccag

SEQ ID NO: 4500596 - DNA, 25 bp, Homo sapien
taaagtcctgtaacatctgccatcc

SEQ ID NO: 4500597 - DNA, 25 bp, Homo sapien
caatgatacctggagtttcaccatc

SEQ ID NO: 4500598 - DNA, 25 bp, Homo sapien
ctttttcctgtcttaaatgctgcaa

SEQ ID NO: 4500599 - DNA, 25 bp, Homo sapien
ggtgcatgacacaagcttatctcag

SEQ ID NO: 4500600 - DNA, 25 bp, Homo sapien
tgtgacccagatgtgacctctaaaa

SEQ ID NO: 4500601 - DNA, 25 bp, Homo sapien
tggatggacatcctttgtgacccag

SEQ ID NO: 4500602 - DNA, 25 bp, Homo sapien
tgacacaataggaactgaccctcag

SEQ ID NO: 4500603 - DNA, 25 bp, Homo sapien
acgctacacagccaagtggggtcca

SEQ ID NO: 4500604 - DNA, 25 bp, Homo sapien
tgacgctacacagccaagtggggtc

SEQ ID NO: 4500605 - DNA, 25 bp, Homo sapien
gacgctacacagccaagtggggtcc

SEQ ID NO: 4500606 - DNA, 25 bp, Homo sapien
ctgacgctacacagccaagtggggt

SEQ ID NO: 4500607 - DNA, 25 bp, Homo sapien
ctgcaggttactcctcctaccttaa

SEQ ID NO: 4500608 - DNA, 25 bp, Homo sapien
ggtctgctcttgactctgcagaaaa

SEQ ID NO: 4500609 - DNA, 25 bp, Homo sapien
cctcccctgcaggttactcctccta

SEQ ID NO: 4500610 - DNA, 25 bp, Homo sapien
gcagaaaaggattccattccttaca

SEQ ID NO: 4500611 - DNA, 25 bp, Homo sapien
tcttttcataaaggctactgtgagg

SEQ ID NO: 4500612 - DNA, 25 bp, Homo sapien
tttcataaaggctactgtgagggag

SEQ ID NO: 4500613 - DNA, 25 bp, Homo sapien
cataaaggctactgtgagggagtag

SEQ ID NO: 4500614 - DNA, 25 bp, Homo sapien
tttcttttcataaaggctactgtga

SEQ ID NO: 4500615 - DNA, 25 bp, Homo sapien
ttctgagctttcacgaatctggtgc

SEQ ID NO: 4500616 - DNA, 25 bp, Homo sapien
cttattagcctttttgaggtgcacg

SEQ ID NO: 4500617 - DNA, 25 bp, Homo sapien
aaatgttttcggttggctgagtcac

SEQ ID NO: 4500618 - DNA, 25 bp, Homo sapien
gaggtgcacgtgttcatcaagtggc

SEQ ID NO: 4500619 - DNA, 25 bp, Homo sapien
atgtgttgggggaggacgggagact

SEQ ID NO: 4500620 - DNA, 25 bp, Homo sapien
ctatgtgttgggggaggacgggaga

SEQ ID NO: 4500621 - DNA, 25 bp, Homo sapien
tatgtgttgggggaggacgggagac

SEQ ID NO: 4500622 - DNA, 25 bp, Homo sapien
accaggctcagaaggctcaatgctg

SEQ ID NO: 4500623 - DNA, 25 bp, Homo sapien
tccagctgaatcccactggggatgc

SEQ ID NO: 4500624 - DNA, 25 bp, Homo sapien
tgcagtgtaccgagatcaccactgt

SEQ ID NO: 4500625 - DNA, 25 bp, Homo sapien
aggctgcagtgtaccgagatcacca

SEQ ID NO: 4500626 - DNA, 25 bp, Homo sapien
cagtgtaccgagatcaccactgtac

SEQ ID NO: 4500627 - DNA, 25 bp, Homo sapien
ggctgcagtgtaccgagatcaccac

SEQ ID NO: 4500628 - DNA, 25 bp, Homo sapien
tggttcgtttgaacctttggaggca

SEQ ID NO: 4500629 - DNA, 25 bp, Homo sapien
ttcacacataagatattctctagct

SEQ ID NO: 4500630 - DNA, 25 bp, Homo sapien
ggcatatcaaaaccagtaaaaactc

SEQ ID NO: 4500631 - DNA, 25 bp, Homo sapien
agtaaaaactcaaagctggcatgaa

SEQ ID NO: 4500632 - DNA, 25 bp, Homo sapien
caaacatgtcctgggatcttgatgc

SEQ ID NO: 4500633 - DNA, 25 bp, Homo sapien
aaacatgtcctgggatcttgatgct

SEQ ID NO: 4500634 - DNA, 25 bp, Homo sapien
cttaggtgaaagtcacactggttcc

SEQ ID NO: 4500635 - DNA, 25 bp, Homo sapien
tttgtcctgccaccgaaggttatgc

SEQ ID NO: 4500636 - DNA, 25 bp, Homo sapien
gtttttcttgacagggagcgagcag

SEQ ID NO: 4500637 - DNA, 25 bp, Homo sapien
cactcgatgtctgttggaagtctgg

SEQ ID NO: 4500638 - DNA, 25 bp, Homo sapien
tgcgactgcctggttgccccttgag

SEQ ID NO: 4500639 - DNA, 25 bp, Homo sapien
ctgcgactgcctggttgccccttga

SEQ ID NO: 4500640 - DNA, 25 bp, Homo sapien
gcgactgcctggttgccccttgagc

SEQ ID NO: 4500641 - DNA, 25 bp, Homo sapien
tctgggttggactcattgccgcggt

SEQ ID NO: 4500642 - DNA, 25 bp, Homo sapien
tgtccattctggagggcgccatctt

SEQ ID NO: 4500643 - DNA, 25 bp, Homo sapien
tctcgtactggtgggccaactgctc

SEQ ID NO: 4500644 - DNA, 25 bp, Homo sapien
ttgccgcggtaatagccatcactgg

SEQ ID NO: 4500645 - DNA, 25 bp, Homo sapien
ggagggatcattggaaatttccact

SEQ ID NO: 4500646 - DNA, 25 bp, Homo sapien
cattggagggatcattggaaatttc

SEQ ID NO: 4500647 - DNA, 25 bp, Homo sapien
cctttcattggagggatcattggaa

SEQ ID NO: 4500648 - DNA, 25 bp, Homo sapien
ccttccctttcattggagggatcat

SEQ ID NO: 4500649 - DNA, 25 bp, Homo sapien
caggtcttccagaagggtgcactta

SEQ ID NO: 4500650 - DNA, 25 bp, Homo sapien
aggtcttccagaagggtgcacttaa

SEQ ID NO: 4500651 - DNA, 25 bp, Homo sapien
tgaatgtgtccaataggcccagagg

SEQ ID NO: 4500652 - DNA, 25 bp, Homo sapien
atgtgtccaataggcccagaggtga

SEQ ID NO: 4500653 - DNA, 25 bp, Homo sapien
ggaagttctaggttctgaatgtgtc

SEQ ID NO: 4500654 - DNA, 25 bp, Homo sapien
acagcagaagagcagaaccgcccct

SEQ ID NO: 4500655 - DNA, 25 bp, Homo sapien
ggagagaatagagagaaaagacaaa

SEQ ID NO: 4500656 - DNA, 25 bp, Homo sapien
agaggagagaatagagagaaaagac

SEQ ID NO: 4500657 - DNA, 25 bp, Homo sapien
agagaatagagagaaaagacaaaag

SEQ ID NO: 4500658 - DNA, 25 bp, Homo sapien
gaggagaggagagaatagagagaaa

SEQ ID NO: 4500659 - DNA, 25 bp, Homo sapien
ccgatgcctgagatgagtcggcaga

SEQ ID NO: 4500660 - DNA, 25 bp, Homo sapien
aagaggaaggctccatatccctgca

SEQ ID NO: 4500661 - DNA, 25 bp, Homo sapien
tatccctgcacgaaggaagagaggg

SEQ ID NO: 4500662 - DNA, 25 bp, Homo sapien
aaggaggcattgacggccagagaca

SEQ ID NO: 4500663 - DNA, 25 bp, Homo sapien
tggagctagaataccagaatggatg

SEQ ID NO: 4500664 - DNA, 25 bp, Homo sapien
aataccagaatggatgggccattgg

SEQ ID NO: 4500665 - DNA, 25 bp, Homo sapien
gctagaataccagaatggatgggcc

SEQ ID NO: 4500666 - DNA, 25 bp, Homo sapien
ctcttggagctagaataccagaatg

SEQ ID NO: 4500667 - DNA, 25 bp, Homo sapien
taggcaaaaacaatcggtagagcac

SEQ ID NO: 4500668 - DNA, 25 bp, Homo sapien
tcgcttctcccgagacaagaattca

SEQ ID NO: 4500669 - DNA, 25 bp, Homo sapien
catggcagatgcgtacaggccccca

SEQ ID NO: 4500670 - DNA, 25 bp, Homo sapien
ccagccaactgaggtgttctcctcg

SEQ ID NO: 4500671 - DNA, 25 bp, Homo sapien
tccagctatggaagtggtaattggt

SEQ ID NO: 4500672 - DNA, 25 bp, Homo sapien
ccttgggctctctggcatgaacttc

SEQ ID NO: 4500673 - DNA, 25 bp, Homo sapien
gctctctggcatgaacttcagggcc

SEQ ID NO: 4500674 - DNA, 25 bp, Homo sapien
tctccagctatggaagtggtaattg

SEQ ID NO: 4500675 - DNA, 25 bp, Homo sapien
catggacttgcttgagaatcatcca

SEQ ID NO: 4500676 - DNA, 25 bp, Homo sapien
tgcttgagaatcatccaggcttcat

SEQ ID NO: 4500677 - DNA, 25 bp, Homo sapien
gacttgcttgagaatcatccaggct

SEQ ID NO: 4500678 - DNA, 25 bp, Homo sapien
catgttggtgtcatggacttgcttg

SEQ ID NO: 4500679 - DNA, 25 bp, Homo sapien
aggttcctgttgaactttggatctc

SEQ ID NO: 4500680 - DNA, 25 bp, Homo sapien
tgttgaactttggatctcaatgaat

SEQ ID NO: 4500681 - DNA, 25 bp, Homo sapien
gttcctgttgaactttggatctcaa

SEQ ID NO: 4500682 - DNA, 25 bp, Homo sapien
cctgttgaactttggatctcaatga

SEQ ID NO: 4500683 - DNA, 25 bp, Homo sapien
ccatcacacagtacagggcattatc

SEQ ID NO: 4500684 - DNA, 25 bp, Homo sapien
cacagtacagggcattatcccagac

SEQ ID NO: 4500685 - DNA, 25 bp, Homo sapien
accacggccagaatcagtgtattca

SEQ ID NO: 4500686 - DNA, 25 bp, Homo sapien
tgtattcattctgtagggccccatc

SEQ ID NO: 4500687 - DNA, 25 bp, Homo sapien
cccatgttggtggatctgattttcc

SEQ ID NO: 4500688 - DNA, 25 bp, Homo sapien
aaatagcggatcatatcaggaaacc

SEQ ID NO: 4500689 - DNA, 25 bp, Homo sapien
gcgccgtacacatgctcaccaaaaa

SEQ ID NO: 4500690 - DNA, 25 bp, Homo sapien
tccatcgtgaagttgattgtggcgc

SEQ ID NO: 4500691 - DNA, 25 bp, Homo sapien
cagcagtttgctgaaagcccggaga

SEQ ID NO: 4500692 - DNA, 25 bp, Homo sapien
cacccagcagtttgctgaaagcccg

SEQ ID NO: 4500693 - DNA, 25 bp, Homo sapien
ctcccacccagcagtttgctgaaag

SEQ ID NO: 4500694 - DNA, 25 bp, Homo sapien
gcagtttgctgaaagcccggagaag

SEQ ID NO: 4500695 - DNA, 25 bp, Homo sapien
agcaaaagcttcatgggtactcaga

SEQ ID NO: 4500696 - DNA, 25 bp, Homo sapien
gaagcaaaagcttcatgggtactca

SEQ ID NO: 4500697 - DNA, 25 bp, Homo sapien
aagcttcatgggtactcagagcccc

SEQ ID NO: 4500698 - DNA, 25 bp, Homo sapien
caaaagcttcatgggtactcagagc

SEQ ID NO: 4500699 - DNA, 25 bp, Homo sapien
gcatcagctttgaggaaccgccagg

SEQ ID NO: 4500700 - DNA, 25 bp, Homo sapien
tgagtaagaacacagcatcagcttt

SEQ ID NO: 4500701 - DNA, 25 bp, Homo sapien
gagtaagaacacagcatcagctttg

SEQ ID NO: 4500702 - DNA, 25 bp, Homo sapien
gtaagaacacagcatcagctttgag

SEQ ID NO: 4500703 - DNA, 25 bp, Homo sapien
ttcagaacttaaccaccaggagccc

SEQ ID NO: 4500704 - DNA, 25 bp, Homo sapien
atgaagagtctaactttcagaactt

SEQ ID NO: 4500705 - DNA, 25 bp, Homo sapien
aacctgtgatgccaccctccaaaaa

SEQ ID NO: 4500706 - DNA, 25 bp, Homo sapien
ttacaggcgtgatgtgtaacttctt

SEQ ID NO: 4500707 - DNA, 25 bp, Homo sapien
gtcttcaaaatagcactcgtcaaag

SEQ ID NO: 4500708 - DNA, 25 bp, Homo sapien
aaaagatggttgattcaatggtaca

SEQ ID NO: 4500709 - DNA, 25 bp, Homo sapien
ggtatctgttgatgttacgtcttca

SEQ ID NO: 4500710 - DNA, 25 bp, Homo sapien
actcgtcaaagaatgtgtcctcaaa

SEQ ID NO: 4500711 - DNA, 25 bp, Homo sapien
cccaggaagctgacgaggtaaatca

SEQ ID NO: 4500712 - DNA, 25 bp, Homo sapien
tgttcccgggtaagacagacaggct

SEQ ID NO: 4500713 - DNA, 25 bp, Homo sapien
tggagttgataaaccgacagttgat

SEQ ID NO: 4500714 - DNA, 25 bp, Homo sapien
cagttgatgaacttgtgctcgtaga

SEQ ID NO: 4500715 - DNA, 25 bp, Homo sapien
ttccgttctgatcagttcagcagca

SEQ ID NO: 4500716 - DNA, 25 bp, Homo sapien
agcttggtgtttggggctaacctag

SEQ ID NO: 4500717 - DNA, 25 bp, Homo sapien
gctaacctaggaaagaggccatctt

SEQ ID NO: 4500718 - DNA, 25 bp, Homo sapien
cattgctgagtgtcaactctactgc

SEQ ID NO: 4500719 - DNA, 25 bp, Homo sapien
caggctgcaatgcttgtcccacaga

SEQ ID NO: 4500720 - DNA, 25 bp, Homo sapien
gcagactcactgttgccaaaaaaca

SEQ ID NO: 4500721 - DNA, 25 bp, Homo sapien
aacaggcactgccagccgatcattg

SEQ ID NO: 4500722 - DNA, 25 bp, Homo sapien
gctgcaatgcttgtcccacagaaca

SEQ ID NO: 4500723 - DNA, 25 bp, Homo sapien
tctctggcagtcgaagggcaatcag

SEQ ID NO: 4500724 - DNA, 25 bp, Homo sapien
ttggttatcccaacaaaagaagcaa

SEQ ID NO: 4500725 - DNA, 25 bp, Homo sapien
tccattgagaatgccgaaggctgtt

SEQ ID NO: 4500726 - DNA, 25 bp, Homo sapien
gaagcaaagatggtgtttcccagga

SEQ ID NO: 4500727 - DNA, 25 bp, Homo sapien
tcctccggaccgtgataggcaggaa

SEQ ID NO: 4500728 - DNA, 25 bp, Homo sapien
gcttgctcctcgcatagtgtgtgca

SEQ ID NO: 4500729 - DNA, 25 bp, Homo sapien
cgtgctatccaaggtgtcctccgga

SEQ ID NO: 4500730 - DNA, 25 bp, Homo sapien
ttgaagttaaacacgcagctctgtg

SEQ ID NO: 4500731 - DNA, 25 bp, Homo sapien
tcttgcctgcaaagagtaccagagg

SEQ ID NO: 4500732 - DNA, 25 bp, Homo sapien
tgcaagttcacctccgctggcagtt

SEQ ID NO: 4500733 - DNA, 25 bp, Homo sapien
taaaactgatctcaaatcgacggtg

SEQ ID NO: 4500734 - DNA, 25 bp, Homo sapien
tacagaaagatgtcccgaagctatc

SEQ ID NO: 4500735 - DNA, 25 bp, Homo sapien
ggtactcaggctagacaatcctgca

SEQ ID NO: 4500736 - DNA, 25 bp, Homo sapien
catttatctcagcaggagtgacggc

SEQ ID NO: 4500737 - DNA, 25 bp, Homo sapien
ccaagctgggcatcataaaatacat

SEQ ID NO: 4500738 - DNA, 25 bp, Homo sapien
gcatttaagaagtagcccggtactc

SEQ ID NO: 4500739 - DNA, 25 bp, Homo sapien
taatgaactaacacaacgtaggagg

SEQ ID NO: 4500740 - DNA, 25 bp, Homo sapien
taacacaacgtaggagggaacgctg

SEQ ID NO: 4500741 - DNA, 25 bp, Homo sapien
tacttgttacatgacctcaggatga

SEQ ID NO: 4500742 - DNA, 25 bp, Homo sapien
gatgtactacaaacttcacagatag

SEQ ID NO: 4500743 - DNA, 25 bp, Homo sapien
gagtgtgctcccatgatcaaaggca

SEQ ID NO: 4500744 - DNA, 25 bp, Homo sapien
aacgtgcgcccatgatcaggcagga

SEQ ID NO: 4500745 - DNA, 25 bp, Homo sapien
tcccaggtcagttagcacagatgcc

SEQ ID NO: 4500746 - DNA, 25 bp, Homo sapien
gatgtggaagtggagacacctttcc

SEQ ID NO: 4500747 - DNA, 25 bp, Homo sapien
cgtgcgcccaacgatcaggcagaag

SEQ ID NO: 4500748 - DNA, 25 bp, Homo sapien
caacgatcgggcagaaggagcgtgc

SEQ ID NO: 4500749 - DNA, 25 bp, Homo sapien
gcagaaggagcgtgtgcccatgatc

SEQ ID NO: 4500750 - DNA, 25 bp, Homo sapien
gcgtgcgcccaacgatcaggcagaa

SEQ ID NO: 4500751 - DNA, 25 bp, Homo sapien
tgatgccatctatgtcacctgggag

SEQ ID NO: 4500752 - DNA, 25 bp, Homo sapien
gacatttccaggcacgttcaggtgg

SEQ ID NO: 4500753 - DNA, 25 bp, Homo sapien
tctcggagctctaggaaaatggtga

SEQ ID NO: 4500754 - DNA, 25 bp, Homo sapien
caaacggttcttagagctgggccta

SEQ ID NO: 4500755 - DNA, 25 bp, Homo sapien
gcgttacagaaagatggcaggcttc

SEQ ID NO: 4500756 - DNA, 25 bp, Homo sapien
tgagcaactctacatggacatacgg

SEQ ID NO: 4500757 - DNA, 25 bp, Homo sapien
tgggactgggaaacgtaatgactct

SEQ ID NO: 4500758 - DNA, 25 bp, Homo sapien
gagacacccttttggtctggtagag

SEQ ID NO: 4500759 - DNA, 25 bp, Homo sapien
ccaaaggacgtggactcagcttgca

SEQ ID NO: 4500760 - DNA, 25 bp, Homo sapien
taggtgacagctatccccaaaggac

SEQ ID NO: 4500761 - DNA, 25 bp, Homo sapien
tccaccatgatgactatactatagg

SEQ ID NO: 4500762 - DNA, 25 bp, Homo sapien
agcttgcagagggaatccagcactg

SEQ ID NO: 4500763 - DNA, 25 bp, Homo sapien
tcaggacgagcttgccacagtacat

SEQ ID NO: 4500764 - DNA, 25 bp, Homo sapien
gcatttctaggcatccatggagtcg

SEQ ID NO: 4500765 - DNA, 25 bp, Homo sapien
gctgtcgttttttcagaccccagga

SEQ ID NO: 4500766 - DNA, 25 bp, Homo sapien
cagtcttggcaccatggagcattcc

SEQ ID NO: 4500767 - DNA, 25 bp, Homo sapien
tttgatctttgtccactgagtggga

SEQ ID NO: 4500768 - DNA, 25 bp, Homo sapien
acactggggttcctatttgtccact

SEQ ID NO: 4500769 - DNA, 25 bp, Homo sapien
gggatgaatcctactgtatgatttt

SEQ ID NO: 4500770 - DNA, 25 bp, Homo sapien
ttgggttcctatttgtgagagagca

SEQ ID NO: 4500771 - DNA, 25 bp, Homo sapien
cagtcgattcctcggatccaagtcc

SEQ ID NO: 4500772 - DNA, 25 bp, Homo sapien
gtcgattcctcggatccaagtccat

SEQ ID NO: 4500773 - DNA, 25 bp, Homo sapien
agtcgattcctcggatccaagtcca

SEQ ID NO: 4500774 - DNA, 25 bp, Homo sapien
tcatagctaagaacgtgagtctggg

SEQ ID NO: 4500775 - DNA, 25 bp, Homo sapien
cagatggcgaagtgattaaacaggc

SEQ ID NO: 4500776 - DNA, 25 bp, Homo sapien
tcatcttagttagggcatagcttaa

SEQ ID NO: 4500777 - DNA, 25 bp, Homo sapien
gcaatggaaactgccaaatacactg

SEQ ID NO: 4500778 - DNA, 25 bp, Homo sapien
gtgtggttagcagacagacaaccat

SEQ ID NO: 4500779 - DNA, 25 bp, Homo sapien
cactttgtacagctataatgtcagg

SEQ ID NO: 4500780 - DNA, 25 bp, Homo sapien
tatggtttggcgtctcatcactttg

SEQ ID NO: 4500781 - DNA, 25 bp, Homo sapien
aatgtcaggtgtggttagcagacag

SEQ ID NO: 4500782 - DNA, 25 bp, Homo sapien
tcaaacatgtaccagtagaacccag

SEQ ID NO: 4500783 - DNA, 25 bp, Homo sapien
tgagaggatactgacaggtactgcc

SEQ ID NO: 4500784 - DNA, 25 bp, Homo sapien
gacggctgcatctgagaggatactg

SEQ ID NO: 4500785 - DNA, 25 bp, Homo sapien
tagaagccacaagacggctgcatct

SEQ ID NO: 4500786 - DNA, 25 bp, Homo sapien
tcaaacgaccagatcgagtgagaat

SEQ ID NO: 4500787 - DNA, 25 bp, Homo sapien
cgagtgagaattcactgaactatca

SEQ ID NO: 4500788 - DNA, 25 bp, Homo sapien
tagaggcttgatgttggcatctact

SEQ ID NO: 4500789 - DNA, 25 bp, Homo sapien
tctgcaggctgtattagaggcttga

SEQ ID NO: 4500790 - DNA, 25 bp, Homo sapien
tggcggaaggtgaagcaggcacatc

SEQ ID NO: 4500791 - DNA, 25 bp, Homo sapien
ggcggaaggtgaagcaggcacatct

SEQ ID NO: 4500792 - DNA, 25 bp, Homo sapien
acatggcagcaggtgagagagggca

SEQ ID NO: 4500793 - DNA, 25 bp, Homo sapien
tggcagcaggtgagagagggcaagc

SEQ ID NO: 4500794 - DNA, 25 bp, Homo sapien
aaaggctgcctatcgtgtgattcca

SEQ ID NO: 4500795 - DNA, 25 bp, Homo sapien
tcaaaaggctgcctatcgtgtgatt

SEQ ID NO: 4500796 - DNA, 25 bp, Homo sapien
ggctgcctatcgtgtgattccattt

SEQ ID NO: 4500797 - DNA, 25 bp, Homo sapien
tgcattctgttcagtcaaagaagcc

SEQ ID NO: 4500798 - DNA, 25 bp, Homo sapien
gaaagccccgaactagacctacata

SEQ ID NO: 4500799 - DNA, 25 bp, Homo sapien
gaaacccaccaaaatgctcctagaa

SEQ ID NO: 4500800 - DNA, 25 bp, Homo sapien
taaattctaacaaaacgtgctcagg

SEQ ID NO: 4500801 - DNA, 25 bp, Homo sapien
ccagcaagcattgggtagatatcaa

SEQ ID NO: 4500802 - DNA, 25 bp, Homo sapien
gccccaacagctgaatcggaatctg

SEQ ID NO: 4500803 - DNA, 25 bp, Homo sapien
gatttctggtttattcattccaaac

SEQ ID NO: 4500804 - DNA, 25 bp, Homo sapien
acagcattgatattccactcagagc

SEQ ID NO: 4500805 - DNA, 25 bp, Homo sapien
caggtgatgtgtatgcacattaaac

SEQ ID NO: 4500806 - DNA, 25 bp, Homo sapien
ttcaaatgacttgagcagtttgcac

SEQ ID NO: 4500807 - DNA, 25 bp, Homo sapien
agtttgcacatagtggagagctcat

SEQ ID NO: 4500808 - DNA, 25 bp, Homo sapien
tttctctatatatgaaggagaacat

SEQ ID NO: 4500809 - DNA, 25 bp, Homo sapien
gtttgcacatagtggagagctcatc

SEQ ID NO: 4500810 - DNA, 25 bp, Homo sapien
ctggttcttggtgaaatagtgatag

SEQ ID NO: 4500811 - DNA, 25 bp, Homo sapien
cctggttcttggtgaaatagtgata

SEQ ID NO: 4500812 - DNA, 25 bp, Homo sapien
tgagaaaattatcctggttcttggt

SEQ ID NO: 4500813 - DNA, 25 bp, Homo sapien
tggtgagaaaattatcctggttctt

SEQ ID NO: 4500814 - DNA, 25 bp, Homo sapien
cacactttccaaaagcgtgggcgcc

SEQ ID NO: 4500815 - DNA, 25 bp, Homo sapien
gggcgcctttagaatggtcatttcc

SEQ ID NO: 4500816 - DNA, 25 bp, Homo sapien
gggttgcgatgccatcagacatcag

SEQ ID NO: 4500817 - DNA, 25 bp, Homo sapien
gacatcaggcagaatagggcccaga

SEQ ID NO: 4500818 - DNA, 25 bp, Homo sapien
taaagtggcctatatcctcagatgg

SEQ ID NO: 4500819 - DNA, 25 bp, Homo sapien
cagatggctgcggtttcttagagaa

SEQ ID NO: 4500820 - DNA, 25 bp, Homo sapien
gaatcaggcccaccttcttaagttg

SEQ ID NO: 4500821 - DNA, 25 bp, Homo sapien
gcccctcctcatgagaaacgaagag

SEQ ID NO: 4500822 - DNA, 25 bp, Homo sapien
tcctaacctagtcctgagtcagtag

SEQ ID NO: 4500823 - DNA, 25 bp, Homo sapien
taatcacccagtgtcgatgctaccc

SEQ ID NO: 4500824 - DNA, 25 bp, Homo sapien
tcagtaggccctttaggtatcaacc

SEQ ID NO: 4500825 - DNA, 25 bp, Homo sapien
cactccatcagtgagccaatgacca

SEQ ID NO: 4500826 - DNA, 25 bp, Homo sapien
aagaggatgaggttcccgggcttcg

SEQ ID NO: 4500827 - DNA, 25 bp, Homo sapien
ctaactccccacctcttacctgact

SEQ ID NO: 4500828 - DNA, 25 bp, Homo sapien
ttgcctgtgatgtgaccgggagtct

SEQ ID NO: 4500829 - DNA, 25 bp, Homo sapien
gatgaggttcccgggcttcgcttct

SEQ ID NO: 4500830 - DNA, 25 bp, Homo sapien
tactaggtgccgtcacttcagcaga

SEQ ID NO: 4500831 - DNA, 25 bp, Homo sapien
ccaatggaatacacggtacgaagcc

SEQ ID NO: 4500832 - DNA, 25 bp, Homo sapien
gcaattcaattacggaggagccaga

SEQ ID NO: 4500833 - DNA, 25 bp, Homo sapien
tatggatgcacacaaattagcagga

SEQ ID NO: 4500834 - DNA, 25 bp, Homo sapien
gctgataagaatcaattgcttacat

SEQ ID NO: 4500835 - DNA, 25 bp, Homo sapien
attgtatgaaggaggctgataagaa

SEQ ID NO: 4500836 - DNA, 25 bp, Homo sapien
gtattgtatgaaggaggctgataag

SEQ ID NO: 4500837 - DNA, 25 bp, Homo sapien
aggctgataagaatcaattgcttac

SEQ ID NO: 4500838 - DNA, 25 bp, Homo sapien
ttcacttcaggcgaccatgctatgc

SEQ ID NO: 4500839 - DNA, 25 bp, Homo sapien
ctgtttgagacaccactaggagtat

SEQ ID NO: 4500840 - DNA, 25 bp, Homo sapien
tgttaagccctaagctatgcccagt

SEQ ID NO: 4500841 - DNA, 25 bp, Homo sapien
tatgccgaccaatccaaaaagctgt

SEQ ID NO: 4500842 - DNA, 25 bp, Homo sapien
tttgatctgcctataggaatgggaa

SEQ ID NO: 4500843 - DNA, 25 bp, Homo sapien
gaaggtttgatctgcctataggaat

SEQ ID NO: 4500844 - DNA, 25 bp, Homo sapien
taagaaggtttgatctgcctatagg

SEQ ID NO: 4500845 - DNA, 25 bp, Homo sapien
ctcctaagaaggtttgatctgccta

SEQ ID NO: 4500846 - DNA, 25 bp, Homo sapien
aagttctttgagtggtgagctgcat

SEQ ID NO: 4500847 - DNA, 25 bp, Homo sapien
gagaagtgggatggaagttctttga

SEQ ID NO: 4500848 - DNA, 25 bp, Homo sapien
tcagtgagaaggttttcttgacaat

SEQ ID NO: 4500849 - DNA, 25 bp, Homo sapien
gagaaggttttcttgacaattccat

SEQ ID NO: 4500850 - DNA, 25 bp, Homo sapien
tagacttgataactgccgtccatgg

SEQ ID NO: 4500851 - DNA, 25 bp, Homo sapien
actgccgtccatggatggttcaggg

SEQ ID NO: 4500852 - DNA, 25 bp, Homo sapien
gatgtttctgtagacttgataactg

SEQ ID NO: 4500853 - DNA, 25 bp, Homo sapien
tctgtagacttgataactgccgtcc

SEQ ID NO: 4500854 - DNA, 25 bp, Homo sapien
ttttcaacatatcgccaaagccagg

SEQ ID NO: 4500855 - DNA, 25 bp, Homo sapien
ggcagaaattcgctttgaaacgctg

SEQ ID NO: 4500856 - DNA, 25 bp, Homo sapien
gggtcaatgagaggagctgtcacca

SEQ ID NO: 4500857 - DNA, 25 bp, Homo sapien
tctgagaaacacgttgagcgccttc

SEQ ID NO: 4500858 - DNA, 25 bp, Homo sapien
agccttcagctttggcagtgtggcc

SEQ ID NO: 4500859 - DNA, 25 bp, Homo sapien
gcagtgtggccactggagcttttta

SEQ ID NO: 4500860 - DNA, 25 bp, Homo sapien
tggagctttttaaagctgtgcacat

SEQ ID NO: 4500861 - DNA, 25 bp, Homo sapien
ctggagccttcagctttggcagtgt

SEQ ID NO: 4500862 - DNA, 25 bp, Homo sapien
tgaacaccgaccagtcctcaaatac

SEQ ID NO: 4500863 - DNA, 25 bp, Homo sapien
ttctccatcctatcccgtcttgggt

SEQ ID NO: 4500864 - DNA, 25 bp, Homo sapien
tcaaatactgctgggaatggtagag

SEQ ID NO: 4500865 - DNA, 25 bp, Homo sapien
gcttcacctggacatgattctttct

SEQ ID NO: 4500866 - DNA, 25 bp, Homo sapien
tccaagagccagtacgtgaagcctc

SEQ ID NO: 4500867 - DNA, 25 bp, Homo sapien
taataggtgctctacacagacttgc

SEQ ID NO: 4500868 - DNA, 25 bp, Homo sapien
gaaagggcgtttcaagcataatagg

SEQ ID NO: 4500869 - DNA, 25 bp, Homo sapien
tatgcctatgaattttccaagagcc

SEQ ID NO: 4500870 - DNA, 25 bp, Homo sapien
tatggccacaaaaacgaagcactgg

SEQ ID NO: 4500871 - DNA, 25 bp, Homo sapien
gcacattaccaggttctcctatggc

SEQ ID NO: 4500872 - DNA, 25 bp, Homo sapien
aattaagggagtctgcctgcacacc

SEQ ID NO: 4500873 - DNA, 25 bp, Homo sapien
gcactggaaataattaagggagtct

SEQ ID NO: 4500874 - DNA, 25 bp, Homo sapien
gcgaacctatgaagccatcgtttat

SEQ ID NO: 4500875 - DNA, 25 bp, Homo sapien
tccagcgaacctatgaagccatcgt

SEQ ID NO: 4500876 - DNA, 25 bp, Homo sapien
cttccagcgaacctatgaagccatc

SEQ ID NO: 4500877 - DNA, 25 bp, Homo sapien
ctatgaagccatcgtttatctgctc

SEQ ID NO: 4500878 - DNA, 25 bp, Homo sapien
tttacatatgaaagcaccaatcaca

SEQ ID NO: 4500879 - DNA, 25 bp, Homo sapien
tacatatgaaagcaccaatcacatc

SEQ ID NO: 4500880 - DNA, 25 bp, Homo sapien
gaccaatgttatcaataaagtcagt

SEQ ID NO: 4500881 - DNA, 25 bp, Homo sapien
tctgctgtttgaccaatgttatcaa

SEQ ID NO: 4500882 - DNA, 25 bp, Homo sapien
tggcatggagtcatcgacagtctgg

SEQ ID NO: 4500883 - DNA, 25 bp, Homo sapien
ggtggcatggagtcatcgacagtct

SEQ ID NO: 4500884 - DNA, 25 bp, Homo sapien
catggagtcatcgacagtctggccc

SEQ ID NO: 4500885 - DNA, 25 bp, Homo sapien
aaggtggcatggagtcatcgacagt

SEQ ID NO: 4500886 - DNA, 25 bp, Homo sapien
aaaccaggtccctctttgtgctctc

SEQ ID NO: 4500887 - DNA, 25 bp, Homo sapien
tctccagagctgcatcatagaggac

SEQ ID NO: 4500888 - DNA, 25 bp, Homo sapien
catcatagaggacatagtgacagtc

SEQ ID NO: 4500889 - DNA, 25 bp, Homo sapien
gctgcatcatagaggacatagtgac

SEQ ID NO: 4500890 - DNA, 25 bp, Homo sapien
accaaaagtggtttgagaaggccag

SEQ ID NO: 4500891 - DNA, 25 bp, Homo sapien
ctgggggaaattgatcagcttcaac

SEQ ID NO: 4500892 - DNA, 25 bp, Homo sapien
gggaaattgatcagcttcaacccaa

SEQ ID NO: 4500893 - DNA, 25 bp, Homo sapien
aatcaagaccaaaagtggtttgaga

SEQ ID NO: 4500894 - DNA, 25 bp, Homo sapien
taaggctgcattgcaagggagctgc

SEQ ID NO: 4500895 - DNA, 25 bp, Homo sapien
caagtcaccgttctcctgttccaca

SEQ ID NO: 4500896 - DNA, 25 bp, Homo sapien
tttggtaattgagggtaaggctgca

SEQ ID NO: 4500897 - DNA, 25 bp, Homo sapien
tggagcccacttggagagggagtgt

SEQ ID NO: 4500898 - DNA, 25 bp, Homo sapien
ttcctttgatgcagagtagttcaag

SEQ ID NO: 4500899 - DNA, 25 bp, Homo sapien
tgatgcagagtagttcaaggaccat

SEQ ID NO: 4500900 - DNA, 25 bp, Homo sapien
ctttgatgcagagtagttcaaggac

SEQ ID NO: 4500901 - DNA, 25 bp, Homo sapien
ttgatgcagagtagttcaaggacca

SEQ ID NO: 4500902 - DNA, 25 bp, Homo sapien
tggaacaggagctggcgtcgcgtgt

SEQ ID NO: 4500903 - DNA, 25 bp, Homo sapien
agctggcgtcgcgtgtctgacaggg

SEQ ID NO: 4500904 - DNA, 25 bp, Homo sapien
gaggagttctgacagggactgtttc

SEQ ID NO: 4500905 - DNA, 25 bp, Homo sapien
gacagggactgtttcaatacccaga

SEQ ID NO: 4500906 - DNA, 25 bp, Homo sapien
gcagccagggtgagtatcaaggcag

SEQ ID NO: 4500907 - DNA, 25 bp, Homo sapien
gagaggaagtccagcgcagcagcca

SEQ ID NO: 4500908 - DNA, 25 bp, Homo sapien
agaggaagtccagcgcagcagccag

SEQ ID NO: 4500909 - DNA, 25 bp, Homo sapien
gccagggtgagtatcaaggcagcac

SEQ ID NO: 4500910 - DNA, 25 bp, Homo sapien
tctttggcctaggaagacctatgat

SEQ ID NO: 4500911 - DNA, 25 bp, Homo sapien
tggcctaggaagacctatgatggct

SEQ ID NO: 4500912 - DNA, 25 bp, Homo sapien
taggaagacctatgatggctcttgt

SEQ ID NO: 4500913 - DNA, 25 bp, Homo sapien
gaagacctatgatggctcttgtctc

SEQ ID NO: 4500914 - DNA, 25 bp, Homo sapien
ttggaggagtgatgtcttgcagcat

SEQ ID NO: 4500915 - DNA, 25 bp, Homo sapien
agatgaaatagttggcttgacttca

SEQ ID NO: 4500916 - DNA, 25 bp, Homo sapien
cattttcaaatactagagtcagctt

SEQ ID NO: 4500917 - DNA, 25 bp, Homo sapien
cagatgaaatagttggcttgacttc

SEQ ID NO: 4500918 - DNA, 25 bp, Homo sapien
ttttcaaatactagagtcagcttcc

SEQ ID NO: 4500919 - DNA, 25 bp, Homo sapien
gactttcaggcgactaactacattc

SEQ ID NO: 4500920 - DNA, 25 bp, Homo sapien
taagcataggtaagtggttagtggc

SEQ ID NO: 4500921 - DNA, 25 bp, Homo sapien
tattcttcataatcaagactaagca

SEQ ID NO: 4500922 - DNA, 25 bp, Homo sapien
caggcgactaactacattcccatat

SEQ ID NO: 4500923 - DNA, 25 bp, Homo sapien
tgttcttttagagaaattccaccca

SEQ ID NO: 4500924 - DNA, 25 bp, Homo sapien
ccttggttagactttggctctgttc

SEQ ID NO: 4500925 - DNA, 25 bp, Homo sapien
cttttagagaaattccacccattct

SEQ ID NO: 4500926 - DNA, 25 bp, Homo sapien
tccttggttagactttggctctgtt

SEQ ID NO: 4500927 - DNA, 25 bp, Homo sapien
ttgtgaactaacaagcacgtcaagc

SEQ ID NO: 4500928 - DNA, 25 bp, Homo sapien
cattcacatactttgtaacgctttg

SEQ ID NO: 4500929 - DNA, 25 bp, Homo sapien
gtgaactaacaagcacgtcaagcat

SEQ ID NO: 4500930 - DNA, 25 bp, Homo sapien
catactttgtaacgctttgtgaact

SEQ ID NO: 4500931 - DNA, 25 bp, Homo sapien
tagctgagtttgataggacactggc

SEQ ID NO: 4500932 - DNA, 25 bp, Homo sapien
caagtgatggcgaggatatctcctc

SEQ ID NO: 4500933 - DNA, 25 bp, Homo sapien
cacctctaaggagtgggaagtagct

SEQ ID NO: 4500934 - DNA, 25 bp, Homo sapien
tgtgctcaggcttgcagagtcctgt

SEQ ID NO: 4500935 - DNA, 25 bp, Homo sapien
tccagccattggaaatgctggctct

SEQ ID NO: 4500936 - DNA, 25 bp, Homo sapien
ttagagagctgacaaaggtccagcc

SEQ ID NO: 4500937 - DNA, 25 bp, Homo sapien
tcagaggccctttctgtggtccatc

SEQ ID NO: 4500938 - DNA, 25 bp, Homo sapien
tctttcaacatttgggtccttagag

SEQ ID NO: 4500939 - DNA, 25 bp, Homo sapien
cttctgattgtctcaaatgatttat

SEQ ID NO: 4500940 - DNA, 25 bp, Homo sapien
gattgtctcaaatgatttataccag

SEQ ID NO: 4500941 - DNA, 25 bp, Homo sapien
gtctcaaatgatttataccagtgac

SEQ ID NO: 4500942 - DNA, 25 bp, Homo sapien
aatgatttataccagtgactattca

SEQ ID NO: 4500943 - DNA, 25 bp, Homo sapien
ggaccttgcatgacccagtggattt

SEQ ID NO: 4500944 - DNA, 25 bp, Homo sapien
gatttttggctcaggaacacaagct

SEQ ID NO: 4500945 - DNA, 25 bp, Homo sapien
taaatacctaaaccgagcaggatgc

SEQ ID NO: 4500946 - DNA, 25 bp, Homo sapien
tgcccagcagatagtgacccttgtt

SEQ ID NO: 4500947 - DNA, 25 bp, Homo sapien
cttgtacttgaagttgagcatgtag

SEQ ID NO: 4500948 - DNA, 25 bp, Homo sapien
tgaagttgagcatgtagatctccat

SEQ ID NO: 4500949 - DNA, 25 bp, Homo sapien
ttgtacttgaagttgagcatgtaga

SEQ ID NO: 4500950 - DNA, 25 bp, Homo sapien
acttgaagttgagcatgtagatctc

SEQ ID NO: 4500951 - DNA, 25 bp, Homo sapien
ctgcaatcgtctctccacccacagg

SEQ ID NO: 4500952 - DNA, 25 bp, Homo sapien
aatcgtctctccacccacaggcgac

SEQ ID NO: 4500953 - DNA, 25 bp, Homo sapien
ccacccacaggcgaccatcactgct

SEQ ID NO: 4500954 - DNA, 25 bp, Homo sapien
tctccacccacaggcgaccatcact

SEQ ID NO: 4500955 - DNA, 25 bp, Homo sapien
attcagcattttcttctcctatgtc

SEQ ID NO: 4500956 - DNA, 25 bp, Homo sapien
cagcattttcttctcctatgtctac

SEQ ID NO: 4500957 - DNA, 25 bp, Homo sapien
tcagcattttcttctcctatgtcta

SEQ ID NO: 4500958 - DNA, 25 bp, Homo sapien
tcattcagcattttcttctcctatg

SEQ ID NO: 4500959 - DNA, 25 bp, Homo sapien
tgtcactggatatctcagagaaacc

SEQ ID NO: 4500960 - DNA, 25 bp, Homo sapien
ggcaacggtctctttcccttgtgct

SEQ ID NO: 4500961 - DNA, 25 bp, Homo sapien
ttgaaggctgtcactggatatctca

SEQ ID NO: 4500962 - DNA, 25 bp, Homo sapien
cctggggcttggcaacggtctcttt

SEQ ID NO: 4500963 - DNA, 25 bp, Homo sapien
gatgaccgcaagtgcaaaaatttga

SEQ ID NO: 4500964 - DNA, 25 bp, Homo sapien
tcatatataaagatgaccgcaagtg

SEQ ID NO: 4500965 - DNA, 25 bp, Homo sapien
cagagaatttctagctggttggatt

SEQ ID NO: 4500966 - DNA, 25 bp, Homo sapien
tgctacaattaaatagatattggca

SEQ ID NO: 4500967 - DNA, 25 bp, Homo sapien
ggcattggatttgggcagatgccaa

SEQ ID NO: 4500968 - DNA, 25 bp, Homo sapien
ctaggcattggatttgggcagatgc

SEQ ID NO: 4500969 - DNA, 25 bp, Homo sapien
tggatttgggcagatgccaactctg

SEQ ID NO: 4500970 - DNA, 25 bp, Homo sapien
attggatttgggcagatgccaactc

SEQ ID NO: 4500971 - DNA, 25 bp, Homo sapien
gacttgtcataagacccagggcttg

SEQ ID NO: 4500972 - DNA, 25 bp, Homo sapien
agttggttacttcgcactgggagaa

SEQ ID NO: 4500973 - DNA, 25 bp, Homo sapien
tgattcctgctggtagaagagctct

SEQ ID NO: 4500974 - DNA, 25 bp, Homo sapien
ttcaactggaaaggaactgatttgt

SEQ ID NO: 4500975 - DNA, 25 bp, Homo sapien
tttctctttccatgcaagcctgatc

SEQ ID NO: 4500976 - DNA, 25 bp, Homo sapien
gatcaggctcttgggcaatgactca

SEQ ID NO: 4500977 - DNA, 25 bp, Homo sapien
ttccatgcaagcctgatcaggctct

SEQ ID NO: 4500978 - DNA, 25 bp, Homo sapien
caagcctgatcaggctcttgggcaa

SEQ ID NO: 4500979 - DNA, 25 bp, Homo sapien
cttgagcgctggtgtttgagtctgt

SEQ ID NO: 4500980 - DNA, 25 bp, Homo sapien
tctggcttccgatcttcatgctcat

SEQ ID NO: 4500981 - DNA, 25 bp, Homo sapien
ttcttccactttgagcctcatcttg

SEQ ID NO: 4500982 - DNA, 25 bp, Homo sapien
tcatcttgcccttgagcgctggtgt

SEQ ID NO: 4500983 - DNA, 25 bp, Homo sapien
cttcaaccagcttccttcattcttc

SEQ ID NO: 4500984 - DNA, 25 bp, Homo sapien
cattcttctctgctacccttgttcc

SEQ ID NO: 4500985 - DNA, 25 bp, Homo sapien
tgtggacttagaaacacatctattc

SEQ ID NO: 4500986 - DNA, 25 bp, Homo sapien
cactcttcagatgatttggtgatcc

SEQ ID NO: 4500987 - DNA, 25 bp, Homo sapien
gataccgtgtctccagctgattgca

SEQ ID NO: 4500988 - DNA, 25 bp, Homo sapien
ccatggtcagagttctaagtctcga

SEQ ID NO: 4500989 - DNA, 25 bp, Homo sapien
ctttcccgcagaagcataagctggc

SEQ ID NO: 4500990 - DNA, 25 bp, Homo sapien
tctcgagagctgcagggataccgtg

SEQ ID NO: 4500991 - DNA, 25 bp, Homo sapien
gggaagcccgtgcttggccatcatc

SEQ ID NO: 4500992 - DNA, 25 bp, Homo sapien
cgggtcaaccgtacaaaatatagct

SEQ ID NO: 4500993 - DNA, 25 bp, Homo sapien
gctgcatgtgcatacagactattaa

SEQ ID NO: 4500994 - DNA, 25 bp, Homo sapien
atctgttcctttcttgagccaggct

SEQ ID NO: 4500995 - DNA, 25 bp, Homo sapien
gaatctatctgtgcaattgcaactc

SEQ ID NO: 4500996 - DNA, 25 bp, Homo sapien
tatctgtgcaattgcaactcccaga

SEQ ID NO: 4500997 - DNA, 25 bp, Homo sapien
ccagaaaggcgcagtgggcctccgt

SEQ ID NO: 4500998 - DNA, 25 bp, Homo sapien
cttgctgaatctatctgtgcaattg

SEQ ID NO: 4500999 - DNA, 25 bp, Homo sapien
gagggtccggctgccgggagaactg

SEQ ID NO: 4501000 - DNA, 25 bp, Homo sapien
gaacccgggtgcccaggcctcagag

SEQ ID NO: 4501001 - DNA, 25 bp, Homo sapien
gaatactgagtacccaggaagggct

SEQ ID NO: 4501002 - DNA, 25 bp, Homo sapien
cgcggcggagactggcggctctgcg

SEQ ID NO: 4501003 - DNA, 25 bp, Homo sapien
gccgctgccgctttcccgctcgccc

SEQ ID NO: 4501004 - DNA, 25 bp, Homo sapien
gggtgcgcgcctcgaggctgcgtgc

SEQ ID NO: 4501005 - DNA, 25 bp, Homo sapien
gcgcctcgaggctgcgtgctgtccc

SEQ ID NO: 4501006 - DNA, 25 bp, Homo sapien
tgcgcgcctcgaggctgcgtgctgt

SEQ ID NO: 4501007 - DNA, 25 bp, Homo sapien
tgcgccagcatcagggcgcactcgg

SEQ ID NO: 4501008 - DNA, 25 bp, Homo sapien
agcatcagggcgcactcggacacca

SEQ ID NO: 4501009 - DNA, 25 bp, Homo sapien
cgcactcggacaccaggaagatctt

SEQ ID NO: 4501010 - DNA, 25 bp, Homo sapien
tttcttgttcctctgcgcctcgtcc

SEQ ID NO: 4501011 - DNA, 25 bp, Homo sapien
gggccaggcggccgctcgagagccg

SEQ ID NO: 4501012 - DNA, 25 bp, Homo sapien
gtcgggccaggcggccgctcgagag

SEQ ID NO: 4501013 - DNA, 25 bp, Homo sapien
ctcgtcgggccaggcggccgctcga

SEQ ID NO: 4501014 - DNA, 25 bp, Homo sapien
tcgggccaggcggccgctcgagagc

SEQ ID NO: 4501015 - DNA, 25 bp, Homo sapien
accactcgccaacctccacgccggg

SEQ ID NO: 4501016 - DNA, 25 bp, Homo sapien
tgcaccactcgccaacctccacgcc

SEQ ID NO: 4501017 - DNA, 25 bp, Homo sapien
gcctctgcaccactcgccaacctcc

SEQ ID NO: 4501018 - DNA, 25 bp, Homo sapien
ggcggccgcctctgcaccactcgcc

SEQ ID NO: 4501019 - DNA, 25 bp, Homo sapien
cggcatcaacggtcccgcccgctac

SEQ ID NO: 4501020 - DNA, 25 bp, Homo sapien
cccagccggacgcgcgcgagctgct

SEQ ID NO: 4501021 - DNA, 25 bp, Homo sapien
gccccagccggacgcgcgcgagctg

SEQ ID NO: 4501022 - DNA, 25 bp, Homo sapien
ctgccccagccggacgcgcgcgagc

SEQ ID NO: 4501023 - DNA, 25 bp, Homo sapien
cagccggacgcgcgcgagctgctac

SEQ ID NO: 4501024 - DNA, 25 bp, Homo sapien
gcccgccgcctctcctcccccggca

SEQ ID NO: 4501025 - DNA, 25 bp, Homo sapien
tgcccgccgcctctcctcccccggc

SEQ ID NO: 4501026 - DNA, 25 bp, Homo sapien
ctgcccgccgcctctcctcccccgg

SEQ ID NO: 4501027 - DNA, 25 bp, Homo sapien
ggggagaggaatagtttcacgccca

SEQ ID NO: 4501028 - DNA, 25 bp, Homo sapien
cgtctcgctccgctcttatgggggg

SEQ ID NO: 4501029 - DNA, 25 bp, Homo sapien
gggagaggaatagtttcacgcccac

SEQ ID NO: 4501030 - DNA, 25 bp, Homo sapien
ctcgctccgctcttatggggggaga

SEQ ID NO: 4501031 - DNA, 25 bp, Homo sapien
gcagctgctctctaggtaccgtaac

SEQ ID NO: 4501032 - DNA, 25 bp, Homo sapien
ctttatcccagacgctcaaagaggg

SEQ ID NO: 4501033 - DNA, 25 bp, Homo sapien
ggaactacacaaactcgcagctgct

SEQ ID NO: 4501034 - DNA, 25 bp, Homo sapien
taagagtggatagcaggaactacac

SEQ ID NO: 4501035 - DNA, 25 bp, Homo sapien
atgttacgcacccatgggccctctg

SEQ ID NO: 4501036 - DNA, 25 bp, Homo sapien
tcctctgaaatgttacgcacccatg

SEQ ID NO: 4501037 - DNA, 25 bp, Homo sapien
tgggccctctgagcattaacatccc

SEQ ID NO: 4501038 - DNA, 25 bp, Homo sapien
catgggccctctgagcattaacatc

SEQ ID NO: 4501039 - DNA, 25 bp, Homo sapien
gacaggactgtacttaggtgtggaa

SEQ ID NO: 4501040 - DNA, 25 bp, Homo sapien
gactgtacttaggtgtggaagcacg

SEQ ID NO: 4501041 - DNA, 25 bp, Homo sapien
acttaggtgtggaagcacgctctct

SEQ ID NO: 4501042 - DNA, 25 bp, Homo sapien
ttagacaggactgtacttaggtgtg

SEQ ID NO: 4501043 - DNA, 25 bp, Homo sapien
gagcaacctcgaaagccaaccttaa

SEQ ID NO: 4501044 - DNA, 25 bp, Homo sapien
ggctctgtggatctactttaaacaa

SEQ ID NO: 4501045 - DNA, 25 bp, Homo sapien
aataaacacatatgggtccatgctg

SEQ ID NO: 4501046 - DNA, 25 bp, Homo sapien
caaagagattaatcagccccactgt

SEQ ID NO: 4501047 - DNA, 25 bp, Homo sapien
ttggcctcagcatgcgaggaagctg

SEQ ID NO: 4501048 - DNA, 25 bp, Homo sapien
ggtgagcacagcattccagtacaag

SEQ ID NO: 4501049 - DNA, 25 bp, Homo sapien
tctagctgagtctgagcatgccctg

SEQ ID NO: 4501050 - DNA, 25 bp, Homo sapien
atgaaggtccctccacaggctagca

SEQ ID NO: 4501051 - DNA, 25 bp, Homo sapien
caaagtagtgaaaagaagcctgaat

SEQ ID NO: 4501052 - DNA, 25 bp, Homo sapien
acaaagtagtgaaaagaagcctgaa

SEQ ID NO: 4501053 - DNA, 25 bp, Homo sapien
agaacaaagtagtgaaaagaagcct

SEQ ID NO: 4501054 - DNA, 25 bp, Homo sapien
ctgagaacaaagtagtgaaaagaag

SEQ ID NO: 4501055 - DNA, 25 bp, Homo sapien
ctgcagttctgccttggaagagttt

SEQ ID NO: 4501056 - DNA, 25 bp, Homo sapien
tagtactatccaaggttccaggcat

SEQ ID NO: 4501057 - DNA, 25 bp, Homo sapien
tacaccactgagttcactgtacact

SEQ ID NO: 4501058 - DNA, 25 bp, Homo sapien
gcaagggggactactacaccactga

SEQ ID NO: 4501059 - DNA, 25 bp, Homo sapien
catatatagcatttagtactatcca

SEQ ID NO: 4501060 - DNA, 25 bp, Homo sapien
taactaatgtgcttcaaagtagaaa

SEQ ID NO: 4501061 - DNA, 25 bp, Homo sapien
gtaactaatgtgcttcaaagtagaa

SEQ ID NO: 4501062 - DNA, 25 bp, Homo sapien
aaaaacctgtcccatgacagtatct

SEQ ID NO: 4501063 - DNA, 25 bp, Homo sapien
ttcaggaatctcgttaagagcttgg

SEQ ID NO: 4501064 - DNA, 25 bp, Homo sapien
cggagaccatgggatcctcttcagg

SEQ ID NO: 4501065 - DNA, 25 bp, Homo sapien
aaatctctgtctggagcttcggaga

SEQ ID NO: 4501066 - DNA, 25 bp, Homo sapien
tgtggcccactctggattaactctg

SEQ ID NO: 4501067 - DNA, 25 bp, Homo sapien
ggcattcacacgtcagtcccctgtg

SEQ ID NO: 4501068 - DNA, 25 bp, Homo sapien
ggtctcgacatcaaaactcaggcag

SEQ ID NO: 4501069 - DNA, 25 bp, Homo sapien
cttgacagtgataatgacacctggc

SEQ ID NO: 4501070 - DNA, 25 bp, Homo sapien
tcaggatgtaataagagagccggca

SEQ ID NO: 4501071 - DNA, 25 bp, Homo sapien
tatgcctaggactattctgaacctg

SEQ ID NO: 4501072 - DNA, 25 bp, Homo sapien
tgtaagggcccaagacacacatgct

SEQ ID NO: 4501073 - DNA, 25 bp, Homo sapien
gagccggcagcccatactgattcga

SEQ ID NO: 4501074 - DNA, 25 bp, Homo sapien
gcagaaaaccatccacgtccactta

SEQ ID NO: 4501075 - DNA, 25 bp, Homo sapien
gtcaaggaacaataagagtttatgc

SEQ ID NO: 4501076 - DNA, 25 bp, Homo sapien
tcatctaaggagcatgcatctccag

SEQ ID NO: 4501077 - DNA, 25 bp, Homo sapien
ccagtgttatgacatcagtcaagga

SEQ ID NO: 4501078 - DNA, 25 bp, Homo sapien
tcttcagttactctgagagctgtcc

SEQ ID NO: 4501079 - DNA, 25 bp, Homo sapien
tcctcgcatcttcagttactctgag

SEQ ID NO: 4501080 - DNA, 25 bp, Homo sapien
aggcaccaggccatctgttcctcag

SEQ ID NO: 4501081 - DNA, 25 bp, Homo sapien
ctttggcctcaacgaggcaccaggc

SEQ ID NO: 4501082 - DNA, 25 bp, Homo sapien
tgcccgaaacaagagagcttctgaa

SEQ ID NO: 4501083 - DNA, 25 bp, Homo sapien
tgtccgttcctgaagtgcccgaaac

SEQ ID NO: 4501084 - DNA, 25 bp, Homo sapien
taaaaatcagcatcctcgccacact

SEQ ID NO: 4501085 - DNA, 25 bp, Homo sapien
caattgtgctaattaacttcttgga

SEQ ID NO: 4501086 - DNA, 25 bp, Homo sapien
cagtgttctgtctgatgtgccaagg

SEQ ID NO: 4501087 - DNA, 25 bp, Homo sapien
tacagttctagggaaatggcacaca

SEQ ID NO: 4501088 - DNA, 25 bp, Homo sapien
ttctcatctagacagcagctccttg

SEQ ID NO: 4501089 - DNA, 25 bp, Homo sapien
cagaagtcatttccccatgatgaag

SEQ ID NO: 4501090 - DNA, 25 bp, Homo sapien
ctggagcgcttgtgaagggtgagag

SEQ ID NO: 4501091 - DNA, 25 bp, Homo sapien
ctggctcagtctggagcgcttgtga

SEQ ID NO: 4501092 - DNA, 25 bp, Homo sapien
cagtctggagcgcttgtgaagggtg

SEQ ID NO: 4501093 - DNA, 25 bp, Homo sapien
tggctcagtctggagcgcttgtgaa

SEQ ID NO: 4501094 - DNA, 25 bp, Homo sapien
cttcagctttaggacccaccatgag

SEQ ID NO: 4501095 - DNA, 25 bp, Homo sapien
ttcagctttaggacccaccatgagg

SEQ ID NO: 4501096 - DNA, 25 bp, Homo sapien
ggcctccggtgccaggtgcaaaaag

SEQ ID NO: 4501097 - DNA, 25 bp, Homo sapien
cctccggtgccaggtgcaaaaaggc

SEQ ID NO: 4501098 - DNA, 25 bp, Homo sapien
ctggcctccggtgccaggtgcaaaa

SEQ ID NO: 4501099 - DNA, 25 bp, Homo sapien
gcctccggtgccaggtgcaaaaagg

SEQ ID NO: 4501100 - DNA, 25 bp, Homo sapien
gcaggttgaacctacgctccagggt

SEQ ID NO: 4501101 - DNA, 25 bp, Homo sapien
ctatatagagcgaggagtccttcct

SEQ ID NO: 4501102 - DNA, 25 bp, Homo sapien
ccacgtcagcgctctgcaggttgaa

SEQ ID NO: 4501103 - DNA, 25 bp, Homo sapien
tgccccgaagtagctcacgaagagg

SEQ ID NO: 4501104 - DNA, 25 bp, Homo sapien
cctggtctcttgctaatacggctgg

SEQ ID NO: 4501105 - DNA, 25 bp, Homo sapien
ggtctcttgctaatacggctggggc

SEQ ID NO: 4501106 - DNA, 25 bp, Homo sapien
ctcttgctaatacggctggggcagc

SEQ ID NO: 4501107 - DNA, 25 bp, Homo sapien
ctggtctcttgctaatacggctggg

SEQ ID NO: 4501108 - DNA, 25 bp, Homo sapien
tcaccaacttcgaatgatgccaaat

SEQ ID NO: 4501109 - DNA, 25 bp, Homo sapien
acttcgaatgatgccaaatgctggc

SEQ ID NO: 4501110 - DNA, 25 bp, Homo sapien
aacttcgaatgatgccaaatgctgg

SEQ ID NO: 4501111 - DNA, 25 bp, Homo sapien
ccaacttcgaatgatgccaaatgct

SEQ ID NO: 4501112 - DNA, 25 bp, Homo sapien
aattgcagtcaagtaaaagagccag

SEQ ID NO: 4501113 - DNA, 25 bp, Homo sapien
taacgaaatgaagagctaagccaac

SEQ ID NO: 4501114 - DNA, 25 bp, Homo sapien
taaggtacctttggcaattgcagtc

SEQ ID NO: 4501115 - DNA, 25 bp, Homo sapien
taagccaacgctttcaagctagccc

SEQ ID NO: 4501116 - DNA, 25 bp, Homo sapien
cagaatcacaggtattaacatgttc

SEQ ID NO: 4501117 - DNA, 25 bp, Homo sapien
aacatgttcttcaatcaatatggta

SEQ ID NO: 4501118 - DNA, 25 bp, Homo sapien
atcacaggtattaacatgttcttca

SEQ ID NO: 4501119 - DNA, 25 bp, Homo sapien
tcttcaatcaatatggtagatctac

SEQ ID NO: 4501120 - DNA, 25 bp, Homo sapien
gtggtccagttgagaggtgctgaga

SEQ ID NO: 4501121 - DNA, 25 bp, Homo sapien
tgcagtggtccagttgagaggtgct

SEQ ID NO: 4501122 - DNA, 25 bp, Homo sapien
gatgcagtggtccagttgagaggtg

SEQ ID NO: 4501123 - DNA, 25 bp, Homo sapien
cagtggtccagttgagaggtgctga

SEQ ID NO: 4501124 - DNA, 25 bp, Homo sapien
atttgtggaacccaaattgggacat

SEQ ID NO: 4501125 - DNA, 25 bp, Homo sapien
ggaacccaaattgggacatatggtg

SEQ ID NO: 4501126 - DNA, 25 bp, Homo sapien
taaatggaaagccttatgtgcccca

SEQ ID NO: 4501127 - DNA, 25 bp, Homo sapien
gaaagccttatgtgccccataatca

SEQ ID NO: 4501128 - DNA, 25 bp, Homo sapien
aaatgcagctcagaaatccccttgc

SEQ ID NO: 4501129 - DNA, 25 bp, Homo sapien
gcagaacagtcaaagcttctgcctc

SEQ ID NO: 4501130 - DNA, 25 bp, Homo sapien
tcccagagacccttcatgctttgcg

SEQ ID NO: 4501131 - DNA, 25 bp, Homo sapien
ccttcatgctttgcgggcagaacag

SEQ ID NO: 4501132 - DNA, 25 bp, Homo sapien
gagtagcctgacacatggaaaaagc

SEQ ID NO: 4501133 - DNA, 25 bp, Homo sapien
taccttctctatactgggccctgca

SEQ ID NO: 4501134 - DNA, 25 bp, Homo sapien
gcactgttgcacatgagctaatcca

SEQ ID NO: 4501135 - DNA, 25 bp, Homo sapien
ccctgcactgggattttctagacaa

SEQ ID NO: 4501136 - DNA, 25 bp, Homo sapien
aacacttcattaggaggtgctggag

SEQ ID NO: 4501137 - DNA, 25 bp, Homo sapien
acacttcattaggaggtgctggagc

SEQ ID NO: 4501138 - DNA, 25 bp, Homo sapien
gaaacacttcattaggaggtgctgg

SEQ ID NO: 4501139 - DNA, 25 bp, Homo sapien
atgaaacacttcattaggaggtgct

SEQ ID NO: 4501140 - DNA, 25 bp, Homo sapien
gctacgggggctgctgatgtcttta

SEQ ID NO: 4501141 - DNA, 25 bp, Homo sapien
gaagcagcaccctgtgagctacggg

SEQ ID NO: 4501142 - DNA, 25 bp, Homo sapien
gcatggctcgaagcagcaccctgtg

SEQ ID NO: 4501143 - DNA, 25 bp, Homo sapien
ggctggcatggctcgaagcagcacc

SEQ ID NO: 4501144 - DNA, 25 bp, Homo sapien
tgaagtttgtccttccctaaggcca

SEQ ID NO: 4501145 - DNA, 25 bp, Homo sapien
cgtgacacagatctgctgggtggca

SEQ ID NO: 4501146 - DNA, 25 bp, Homo sapien
caggtctttgggctcagtcctagct

SEQ ID NO: 4501147 - DNA, 25 bp, Homo sapien
caaggtcactcaatcaaggctcaga

SEQ ID NO: 4501148 - DNA, 25 bp, Homo sapien
tatcagagatgcaaaccctccagga

SEQ ID NO: 4501149 - DNA, 25 bp, Homo sapien
gcagcttacatcttaggagggacct

SEQ ID NO: 4501150 - DNA, 25 bp, Homo sapien
ggtactgagaagagggttcacccaa

SEQ ID NO: 4501151 - DNA, 25 bp, Homo sapien
acatacatcagcaaccctagggagg

SEQ ID NO: 4501152 - DNA, 25 bp, Homo sapien
taaacaagtgacaaaggccgaaggc

SEQ ID NO: 4501153 - DNA, 25 bp, Homo sapien
tactaacgaggaaagcagtctggga

SEQ ID NO: 4501154 - DNA, 25 bp, Homo sapien
gcctagatccagagtgaatgtcggg

SEQ ID NO: 4501155 - DNA, 25 bp, Homo sapien
tgtgtcaataagagccccaggatcc

SEQ ID NO: 4501156 - DNA, 25 bp, Homo sapien
aaaattccgcttactccactcacaa

SEQ ID NO: 4501157 - DNA, 25 bp, Homo sapien
gcttctctttgaaaaattccgctta

SEQ ID NO: 4501158 - DNA, 25 bp, Homo sapien
aataaatatgcctgcagatctgcaa

SEQ ID NO: 4501159 - DNA, 25 bp, Homo sapien
cacaaataaatatgcctgcagatct

SEQ ID NO: 4501160 - DNA, 25 bp, Homo sapien
tggaataacacaggcgacagggtca

SEQ ID NO: 4501161 - DNA, 25 bp, Homo sapien
aatagtgataattggaagcctcacc

SEQ ID NO: 4501162 - DNA, 25 bp, Homo sapien
caaaatgaagtacggttgatcctgg

SEQ ID NO: 4501163 - DNA, 25 bp, Homo sapien
aaaaatctgcatagaggcgggtcca

SEQ ID NO: 4501164 - DNA, 25 bp, Homo sapien
catgggcactgtctaaccaaagcag

SEQ ID NO: 4501165 - DNA, 25 bp, Homo sapien
cagacgccccttgtacacaggtgga

SEQ ID NO: 4501166 - DNA, 25 bp, Homo sapien
gaagactgccgcctgtcagaaggaa

SEQ ID NO: 4501167 - DNA, 25 bp, Homo sapien
cattagtagcatgaggacggcagac

SEQ ID NO: 4501168 - DNA, 25 bp, Homo sapien
ccaagatggtgagccccttaacgaa

SEQ ID NO: 4501169 - DNA, 25 bp, Homo sapien
tgctccgtgcccaataatagctgca

SEQ ID NO: 4501170 - DNA, 25 bp, Homo sapien
cagccagggctacgcttcttatgga

SEQ ID NO: 4501171 - DNA, 25 bp, Homo sapien
cagctgaggccgagaggacttgtta

SEQ ID NO: 4501172 - DNA, 25 bp, Homo sapien
ggtccatgggcatcaactttgggca

SEQ ID NO: 4501173 - DNA, 25 bp, Homo sapien
caactttgggcaacgggttgtacat

SEQ ID NO: 4501174 - DNA, 25 bp, Homo sapien
cagctgctttgagggtccatgggca

SEQ ID NO: 4501175 - DNA, 25 bp, Homo sapien
tgggcatcaactttgggcaacgggt

SEQ ID NO: 4501176 - DNA, 25 bp, Homo sapien
gcaagagctctttgggcagctgcct

SEQ ID NO: 4501177 - DNA, 25 bp, Homo sapien
gatgtgcataacttcaacaagtggt

SEQ ID NO: 4501178 - DNA, 25 bp, Homo sapien
caagagccacggcattggcaagagc

SEQ ID NO: 4501179 - DNA, 25 bp, Homo sapien
tggcatgctggctgaagcagagtcc

SEQ ID NO: 4501180 - DNA, 25 bp, Homo sapien
caaagaggtggaccctgcaactcat

SEQ ID NO: 4501181 - DNA, 25 bp, Homo sapien
gcaactcatggcttggccagacaag

SEQ ID NO: 4501182 - DNA, 25 bp, Homo sapien
gattagcctagttaccatagacgga

SEQ ID NO: 4501183 - DNA, 25 bp, Homo sapien
gggaataaccgactgcaaatctgac

SEQ ID NO: 4501184 - DNA, 25 bp, Homo sapien
cgaggaaagggcaaatataggccga

SEQ ID NO: 4501185 - DNA, 25 bp, Homo sapien
aggaaagggcaaatataggccgagc

SEQ ID NO: 4501186 - DNA, 25 bp, Homo sapien
gaggaaagggcaaatataggccgag

SEQ ID NO: 4501187 - DNA, 25 bp, Homo sapien
ccgaggaaagggcaaatataggccg

SEQ ID NO: 4501188 - DNA, 25 bp, Homo sapien
tgacacctgtcactcatactacctt

SEQ ID NO: 4501189 - DNA, 25 bp, Homo sapien
tctttgggacagtgagctctaggag

SEQ ID NO: 4501190 - DNA, 25 bp, Homo sapien
catggggtgaacacccaccttttgt

SEQ ID NO: 4501191 - DNA, 25 bp, Homo sapien
tcttatctccccggaatcccatggg

SEQ ID NO: 4501192 - DNA, 25 bp, Homo sapien
gatggacagcatctgaccatggcca

SEQ ID NO: 4501193 - DNA, 25 bp, Homo sapien
gccactcttctcaactatacggttt

SEQ ID NO: 4501194 - DNA, 25 bp, Homo sapien
caacttctgctcaggttgcaaagaa

SEQ ID NO: 4501195 - DNA, 25 bp, Homo sapien
gtaagcgataaaaagcaacttctgc

SEQ ID NO: 4501196 - DNA, 25 bp, Homo sapien
tatccccagagcataatacatcact

SEQ ID NO: 4501197 - DNA, 25 bp, Homo sapien
gacaacacaacgtagctgctgaggg

SEQ ID NO: 4501198 - DNA, 25 bp, Homo sapien
gctagagggctttcatgcattatct

SEQ ID NO: 4501199 - DNA, 25 bp, Homo sapien
tgtacagaagctccaataagtgatt

SEQ ID NO: 4501200 - DNA, 25 bp, Homo sapien
caggtgtactgatgcccaagctaga

SEQ ID NO: 4501201 - DNA, 25 bp, Homo sapien
gtgctgcgatgccaggcacaactct

SEQ ID NO: 4501202 - DNA, 25 bp, Homo sapien
acaactctcctaggctccgacagca

SEQ ID NO: 4501203 - DNA, 25 bp, Homo sapien
tgcgatgccaggcacaactctccta

SEQ ID NO: 4501204 - DNA, 25 bp, Homo sapien
gatgccaggcacaactctcctaggc

SEQ ID NO: 4501205 - DNA, 25 bp, Homo sapien
ccagacaggagtctccttctgagag

SEQ ID NO: 4501206 - DNA, 25 bp, Homo sapien
tcccagacaggagtctccttctgag

SEQ ID NO: 4501207 - DNA, 25 bp, Homo sapien
ggcagggtcccagacaggagtctcc

SEQ ID NO: 4501208 - DNA, 25 bp, Homo sapien
gggtcccagacaggagtctccttct

SEQ ID NO: 4501209 - DNA, 25 bp, Homo sapien
gcagagccgctccacttcgtaaatt

SEQ ID NO: 4501210 - DNA, 25 bp, Homo sapien
caaactaggtctgagcatccaaggc

SEQ ID NO: 4501211 - DNA, 25 bp, Homo sapien
tcacgtcagatagcactggcagtgg

SEQ ID NO: 4501212 - DNA, 25 bp, Homo sapien
gatactgatgcatggtaccccacat

SEQ ID NO: 4501213 - DNA, 25 bp, Homo sapien
tcattcctattataaaggttcacaa

SEQ ID NO: 4501214 - DNA, 25 bp, Homo sapien
ggtaaaagagagcatccttaaatca

SEQ ID NO: 4501215 - DNA, 25 bp, Homo sapien
tgcctaagtatagctagaacatcca

SEQ ID NO: 4501216 - DNA, 25 bp, Homo sapien
agtatgatattaaccatgtgtttgg

SEQ ID NO: 4501217 - DNA, 25 bp, Homo sapien
gacacacatgctcccttggcttcaa

SEQ ID NO: 4501218 - DNA, 25 bp, Homo sapien
aagtgcctgctattctgagtcatga

SEQ ID NO: 4501219 - DNA, 25 bp, Homo sapien
gcttcaaggtgactaaattcccaga

SEQ ID NO: 4501220 - DNA, 25 bp, Homo sapien
ccatgtacctgtacaaggttcttca

SEQ ID NO: 4501221 - DNA, 25 bp, Homo sapien
cctcaatgcctactctgtctccttg

SEQ ID NO: 4501222 - DNA, 25 bp, Homo sapien
cacaggcccgaagttcatcttccat

SEQ ID NO: 4501223 - DNA, 25 bp, Homo sapien
tgagtagctgatcctctgtatcctt

SEQ ID NO: 4501224 - DNA, 25 bp, Homo sapien
tcctttgcaaatggtatctagtcgc

SEQ ID NO: 4501225 - DNA, 25 bp, Homo sapien
catcaaaagtgggtgttgagtagct

SEQ ID NO: 4501226 - DNA, 25 bp, Homo sapien
tatggtgcctcttaaccttggagtc

SEQ ID NO: 4501227 - DNA, 25 bp, Homo sapien
gaggggactgaatgaaacctggctc

SEQ ID NO: 4501228 - DNA, 25 bp, Homo sapien
cttatctgccagacctgaggtcagg

SEQ ID NO: 4501229 - DNA, 25 bp, Homo sapien
tgaggggactgaatgaaacctggct

SEQ ID NO: 4501230 - DNA, 25 bp, Homo sapien
tatctgccagacctgaggtcaggct

SEQ ID NO: 4501231 - DNA, 25 bp, Homo sapien
ctgcctcgttaatgacgcacacact

SEQ ID NO: 4501232 - DNA, 25 bp, Homo sapien
agttcagctggagcactctaaaaat

SEQ ID NO: 4501233 - DNA, 25 bp, Homo sapien
cagctggagcactctaaaaatagcc

SEQ ID NO: 4501234 - DNA, 25 bp, Homo sapien
ctagttaagacatagagttcacagc

SEQ ID NO: 4501235 - DNA, 25 bp, Homo sapien
tcttccgtatctgggcaggttgcca

SEQ ID NO: 4501236 - DNA, 25 bp, Homo sapien
ccacatggttccacgagccttgggc

SEQ ID NO: 4501237 - DNA, 25 bp, Homo sapien
cagcagttctttggaagcgccctct

SEQ ID NO: 4501238 - DNA, 25 bp, Homo sapien
tcagggctctgtatccatgtcgctt

SEQ ID NO: 4501239 - DNA, 25 bp, Homo sapien
cacatcgcatatacactgaagctac

SEQ ID NO: 4501240 - DNA, 25 bp, Homo sapien
cacacatcgcatatacactgaagct

SEQ ID NO: 4501241 - DNA, 25 bp, Homo sapien
atcgcatatacactgaagctacaag

SEQ ID NO: 4501242 - DNA, 25 bp, Homo sapien
tgcacacatcgcatatacactgaag

SEQ ID NO: 4501243 - DNA, 25 bp, Homo sapien
cattgtgtctgccttcttgcaaaat

SEQ ID NO: 4501244 - DNA, 25 bp, Homo sapien
tcaaaatgcattgtgtctgccttct

SEQ ID NO: 4501245 - DNA, 25 bp, Homo sapien
ttgtgtctgccttcttgcaaaatgt

SEQ ID NO: 4501246 - DNA, 25 bp, Homo sapien
tgcattgtgtctgccttcttgcaaa

SEQ ID NO: 4501247 - DNA, 25 bp, Homo sapien
cattagtgtcatcgctgttgctgca

SEQ ID NO: 4501248 - DNA, 25 bp, Homo sapien
tagcttttgtgcctatggtgtcccc

SEQ ID NO: 4501249 - DNA, 25 bp, Homo sapien
gatgccactgatatgtttgctagcc

SEQ ID NO: 4501250 - DNA, 25 bp, Homo sapien
cacatgtggaataggatatacctgc

SEQ ID NO: 4501251 - DNA, 25 bp, Homo sapien
ggtgctaacaccttcgaagcagaga

SEQ ID NO: 4501252 - DNA, 25 bp, Homo sapien
tccacaagaccagaagctaaaggcc

SEQ ID NO: 4501253 - DNA, 25 bp, Homo sapien
taacaccttcgaagcagagagcaga

SEQ ID NO: 4501254 - DNA, 25 bp, Homo sapien
agtccacaagaccagaagctaaagg

SEQ ID NO: 4501255 - DNA, 25 bp, Homo sapien
ttagagccccagaccaaccacacaa

SEQ ID NO: 4501256 - DNA, 25 bp, Homo sapien
agaccaaccacacaagttctgtgca

SEQ ID NO: 4501257 - DNA, 25 bp, Homo sapien
cagggacacgggcagtgtggagtac

SEQ ID NO: 4501258 - DNA, 25 bp, Homo sapien
ggttggggatatggcgatgagcagg

SEQ ID NO: 4501259 - DNA, 25 bp, Homo sapien
gtgaatggggtgatgggccacattt

SEQ ID NO: 4501260 - DNA, 25 bp, Homo sapien
gccacatttgcctgttcttctcttc

SEQ ID NO: 4501261 - DNA, 25 bp, Homo sapien
tctcttccatgggatagcaggtggg

SEQ ID NO: 4501262 - DNA, 25 bp, Homo sapien
tcatccagtggggtgtagccatacc

SEQ ID NO: 4501263 - DNA, 25 bp, Homo sapien
cagccgctgctcacaggcgggataa

SEQ ID NO: 4501264 - DNA, 25 bp, Homo sapien
acagagctcacggtgggcacactgc

SEQ ID NO: 4501265 - DNA, 25 bp, Homo sapien
cgggataatgagtgaagtgacaagc

SEQ ID NO: 4501266 - DNA, 25 bp, Homo sapien
tgggctcctcgtgtgccatctggtc

SEQ ID NO: 4501267 - DNA, 25 bp, Homo sapien
tctgacttactgagagggacctgca

SEQ ID NO: 4501268 - DNA, 25 bp, Homo sapien
ggcgggcaggccctgattcagaagc

SEQ ID NO: 4501269 - DNA, 25 bp, Homo sapien
gagctgtaccttctgacttactgag

SEQ ID NO: 4501270 - DNA, 25 bp, Homo sapien
gaaatgctgaggttccaaaggtctg

SEQ ID NO: 4501271 - DNA, 25 bp, Homo sapien
gggaagagacaaattgtgcacagca

SEQ ID NO: 4501272 - DNA, 25 bp, Homo sapien
gaagcaaagtcagcctctgactgca

SEQ ID NO: 4501273 - DNA, 25 bp, Homo sapien
agggaagcaaagtcagcctctgact

SEQ ID NO: 4501274 - DNA, 25 bp, Homo sapien
gcagggaagcaaagtcagcctctga

SEQ ID NO: 4501275 - DNA, 25 bp, Homo sapien
tggagaaacgatcctcataattgga

SEQ ID NO: 4501276 - DNA, 25 bp, Homo sapien
ggaacaaacaatatgagctttattc

SEQ ID NO: 4501277 - DNA, 25 bp, Homo sapien
aattggaacaaacaatatgagcttt

SEQ ID NO: 4501278 - DNA, 25 bp, Homo sapien
cagaactggagaaacgatcctcata

SEQ ID NO: 4501279 - DNA, 25 bp, Homo sapien
tcactgttggctctatgccacgggt

SEQ ID NO: 4501280 - DNA, 25 bp, Homo sapien
agaggacccggaatccacctcactg

SEQ ID NO: 4501281 - DNA, 25 bp, Homo sapien
ggaatccacctcactgttggctcta

SEQ ID NO: 4501282 - DNA, 25 bp, Homo sapien
tatgccacgggtgtgaagtactttc

SEQ ID NO: 4501283 - DNA, 25 bp, Homo sapien
gcaacgcgttctcgaacctttttca

SEQ ID NO: 4501284 - DNA, 25 bp, Homo sapien
aaggacagtccggtggtgggacgtg

SEQ ID NO: 4501285 - DNA, 25 bp, Homo sapien
ttcaaaggacagtccggtggtggga

SEQ ID NO: 4501286 - DNA, 25 bp, Homo sapien
ctgcaacgcgttctcgaaccttttt

SEQ ID NO: 4501287 - DNA, 25 bp, Homo sapien
agaaagagcccaggataaacccgca

SEQ ID NO: 4501288 - DNA, 25 bp, Homo sapien
tagattttggtacagaaagagccca

SEQ ID NO: 4501289 - DNA, 25 bp, Homo sapien
tgtgtcaatgaagaccgcatccacg

SEQ ID NO: 4501290 - DNA, 25 bp, Homo sapien
ccaaataccagcatcgtgaacagga

SEQ ID NO: 4501291 - DNA, 25 bp, Homo sapien
tttcctggaccccaatctcagtggg

SEQ ID NO: 4501292 - DNA, 25 bp, Homo sapien
tcaatgctggcaccaggctatgtgg

SEQ ID NO: 4501293 - DNA, 25 bp, Homo sapien
catacattggacagccctacagaag

SEQ ID NO: 4501294 - DNA, 25 bp, Homo sapien
gacttcagaaacatgtgtccacgtg

SEQ ID NO: 4501295 - DNA, 25 bp, Homo sapien
accatattggctggtctgatctcaa

SEQ ID NO: 4501296 - DNA, 25 bp, Homo sapien
ttcaccatattggctggtctgatct

SEQ ID NO: 4501297 - DNA, 25 bp, Homo sapien
caccatattggctggtctgatctca

SEQ ID NO: 4501298 - DNA, 25 bp, Homo sapien
ccatattggctggtctgatctcaaa

SEQ ID NO: 4501299 - DNA, 25 bp, Homo sapien
ccagcgggggtcgtccggagtgatg

SEQ ID NO: 4501300 - DNA, 25 bp, Homo sapien
gggtcgtccggagtgatgtccaggt

SEQ ID NO: 4501301 - DNA, 25 bp, Homo sapien
gatccagcgggggtcgtccggagtg

SEQ ID NO: 4501302 - DNA, 25 bp, Homo sapien
tcgtccggagtgatgtccaggttac

SEQ ID NO: 4501303 - DNA, 25 bp, Homo sapien
gtaaggcaccgcagagcagaaagcc

SEQ ID NO: 4501304 - DNA, 25 bp, Homo sapien
gagagcatggcctgctcgctttcca

SEQ ID NO: 4501305 - DNA, 25 bp, Homo sapien
tgtggaaacccaaacatcaagaggg

SEQ ID NO: 4501306 - DNA, 25 bp, Homo sapien
tgggcttgggtctctcgtattctct

SEQ ID NO: 4501307 - DNA, 25 bp, Homo sapien
tgagcagaggcagatgaggccacct

SEQ ID NO: 4501308 - DNA, 25 bp, Homo sapien
gagcagaggcagatgaggccacctt

SEQ ID NO: 4501309 - DNA, 25 bp, Homo sapien
cagaggcagatgaggccacctttac

SEQ ID NO: 4501310 - DNA, 25 bp, Homo sapien
ctactgttctgagcagaggcagatg

SEQ ID NO: 4501311 - DNA, 25 bp, Homo sapien
aaggattgtgccgaagatggaaaca

SEQ ID NO: 4501312 - DNA, 25 bp, Homo sapien
ccgaagatggaaacaacttgggcgg

SEQ ID NO: 4501313 - DNA, 25 bp, Homo sapien
tgtgccgaagatggaaacaacttgg

SEQ ID NO: 4501314 - DNA, 25 bp, Homo sapien
ctttaaaggattgtgccgaagatgg

SEQ ID NO: 4501315 - DNA, 25 bp, Homo sapien
ctcgcctgatagtcgccgagcagct

SEQ ID NO: 4501316 - DNA, 25 bp, Homo sapien
tcgcctgatagtcgccgagcagctt

SEQ ID NO: 4501317 - DNA, 25 bp, Homo sapien
gatagtcgccgagcagcttctgaga

SEQ ID NO: 4501318 - DNA, 25 bp, Homo sapien
cctgatagtcgccgagcagcttctg

SEQ ID NO: 4501319 - DNA, 25 bp, Homo sapien
ttaacagacagtcttctgcagcagt

SEQ ID NO: 4501320 - DNA, 25 bp, Homo sapien
aagcagggggcagttaatgatcgca

SEQ ID NO: 4501321 - DNA, 25 bp, Homo sapien
ttacattcgtggaaaagaagcaggg

SEQ ID NO: 4501322 - DNA, 25 bp, Homo sapien
gtgctttcattcttgagacagcact

SEQ ID NO: 4501323 - DNA, 25 bp, Homo sapien
ttggcagtcagcatgaagcgctcag

SEQ ID NO: 4501324 - DNA, 25 bp, Homo sapien
taaacctctggtgcggttacactca

SEQ ID NO: 4501325 - DNA, 25 bp, Homo sapien
tcagtgatcaaaggcaggactctcc

SEQ ID NO: 4501326 - DNA, 25 bp, Homo sapien
tcagtgacaagagtgctcagctttt

SEQ ID NO: 4501327 - DNA, 25 bp, Homo sapien
acaaggactctcagatcaacagaga

SEQ ID NO: 4501328 - DNA, 25 bp, Homo sapien
taatgttaacaaggactctcagatc

SEQ ID NO: 4501329 - DNA, 25 bp, Homo sapien
tcaacagagatcaagggcaggctgg

SEQ ID NO: 4501330 - DNA, 25 bp, Homo sapien
gagagagacttgggtggcaaaatca

SEQ ID NO: 4501331 - DNA, 25 bp, Homo sapien
caacacaggtagtcacatgtgggct

SEQ ID NO: 4501332 - DNA, 25 bp, Homo sapien
tctccaacacaggtagtcacatgtg

SEQ ID NO: 4501333 - DNA, 25 bp, Homo sapien
agccagggtgccagaagcagaccct

SEQ ID NO: 4501334 - DNA, 25 bp, Homo sapien
caagtctatggattggtcaaacaca

SEQ ID NO: 4501335 - DNA, 25 bp, Homo sapien
gccatggggatacacgacttgctgc

SEQ ID NO: 4501336 - DNA, 25 bp, Homo sapien
ggggatacacgacttgctgcagatg

SEQ ID NO: 4501337 - DNA, 25 bp, Homo sapien
gatgtatctgtgtgcgctgcttggt

SEQ ID NO: 4501338 - DNA, 25 bp, Homo sapien
tcatgtgtagtgttcctcagagcca

SEQ ID NO: 4501339 - DNA, 25 bp, Homo sapien
taccgatttagcctcagaacttggg

SEQ ID NO: 4501340 - DNA, 25 bp, Homo sapien
tcattaggagcttggtactgtcacc

SEQ ID NO: 4501341 - DNA, 25 bp, Homo sapien
tattaattagtttgctcctagggcc

SEQ ID NO: 4501342 - DNA, 25 bp, Homo sapien
cagaaactggtgaaccaaggccaca

SEQ ID NO: 4501343 - DNA, 25 bp, Homo sapien
ctgtggcaggagacctgtcggccat

SEQ ID NO: 4501344 - DNA, 25 bp, Homo sapien
ctgcaatctccatgcaggcggccag

SEQ ID NO: 4501345 - DNA, 25 bp, Homo sapien
tgagagcaggtgcttggtgaccttc

SEQ ID NO: 4501346 - DNA, 25 bp, Homo sapien
aggtgcttggtgaccttcgggatca

SEQ ID NO: 4501347 - DNA, 25 bp, Homo sapien
tccccaaaaaggcagcgaagccagc

SEQ ID NO: 4501348 - DNA, 25 bp, Homo sapien
gtggtgaggttaaactgctgctcca

SEQ ID NO: 4501349 - DNA, 25 bp, Homo sapien
aggtggtgaggttaaactgctgctc

SEQ ID NO: 4501350 - DNA, 25 bp, Homo sapien
agaggtggtgaggttaaactgctgc

SEQ ID NO: 4501351 - DNA, 25 bp, Homo sapien
ggtggtgaggttaaactgctgctcc

SEQ ID NO: 4501352 - DNA, 25 bp, Homo sapien
ttccatagggaacagtaaccccagc

SEQ ID NO: 4501353 - DNA, 25 bp, Homo sapien
gaagatacccagacaagcacacggg

SEQ ID NO: 4501354 - DNA, 25 bp, Homo sapien
aaggagacgtagcaagcagtggaca

SEQ ID NO: 4501355 - DNA, 25 bp, Homo sapien
tggacaccaggttgacgagcatggc

SEQ ID NO: 4501356 - DNA, 25 bp, Homo sapien
actggagtgaaggaatcggtttggc

SEQ ID NO: 4501357 - DNA, 25 bp, Homo sapien
aagcaggcagacaggtaggtgatgc

SEQ ID NO: 4501358 - DNA, 25 bp, Homo sapien
gaaggaatcggtttggcattcacag

SEQ ID NO: 4501359 - DNA, 25 bp, Homo sapien
tcacagttattattgcagggcgagt

SEQ ID NO: 4501360 - DNA, 25 bp, Homo sapien
cagcaaggcaacagctaagaaaaag

SEQ ID NO: 4501361 - DNA, 25 bp, Homo sapien
cagggaaggcgaacaacctgggcaa

SEQ ID NO: 4501362 - DNA, 25 bp, Homo sapien
ctacagcaaggcaacagctaagaaa

SEQ ID NO: 4501363 - DNA, 25 bp, Homo sapien
taagccactttagctgcctgaatcc

SEQ ID NO: 4501364 - DNA, 25 bp, Homo sapien
atgagacttcctacaaacccacttg

SEQ ID NO: 4501365 - DNA, 25 bp, Homo sapien
aacccacttgatttagcaagaagac

SEQ ID NO: 4501366 - DNA, 25 bp, Homo sapien
tttttactttcagttgcacaatgag

SEQ ID NO: 4501367 - DNA, 25 bp, Homo sapien
tagcaagaagacctgaatcagtcct

SEQ ID NO: 4501368 - DNA, 25 bp, Homo sapien
aattgtaaaatccacgctaagcagg

SEQ ID NO: 4501369 - DNA, 25 bp, Homo sapien
acctcctcccaaaaatgtgtcagga

SEQ ID NO: 4501370 - DNA, 25 bp, Homo sapien
tcagcaccaatggatgacccgtcac

SEQ ID NO: 4501371 - DNA, 25 bp, Homo sapien
ccgtcacttagcatcaggttttcag

SEQ ID NO: 4501372 - DNA, 25 bp, Homo sapien
cagacaatgtgaggcctcgagtaac

SEQ ID NO: 4501373 - DNA, 25 bp, Homo sapien
caatgtgaggcctcgagtaacctga

SEQ ID NO: 4501374 - DNA, 25 bp, Homo sapien
gaggcctcgagtaacctgaataaaa

SEQ ID NO: 4501375 - DNA, 25 bp, Homo sapien
cccagcagacaatgtgaggcctcga

SEQ ID NO: 4501376 - DNA, 25 bp, Homo sapien
cagggcatctagagatctgcctctg

SEQ ID NO: 4501377 - DNA, 25 bp, Homo sapien
ccagggcatctagagatctgcctct

SEQ ID NO: 4501378 - DNA, 25 bp, Homo sapien
gtcacaagggtccctttccaggata

SEQ ID NO: 4501379 - DNA, 25 bp, Homo sapien
ccacttgttggaagccagggcatct

SEQ ID NO: 4501380 - DNA, 25 bp, Homo sapien
gaccttaataggctctcgacaaagc

SEQ ID NO: 4501381 - DNA, 25 bp, Homo sapien
ataggctctcgacaaagcctgctgc

SEQ ID NO: 4501382 - DNA, 25 bp, Homo sapien
ttaataggctctcgacaaagcctgc

SEQ ID NO: 4501383 - DNA, 25 bp, Homo sapien
ctggaccttaataggctctcgacaa

SEQ ID NO: 4501384 - DNA, 25 bp, Homo sapien
agtgacacacggaaggccccattac

SEQ ID NO: 4501385 - DNA, 25 bp, Homo sapien
ggtcacgagtgacacacggaaggcc

SEQ ID NO: 4501386 - DNA, 25 bp, Homo sapien
tttggatgttggcctgagatttctc

SEQ ID NO: 4501387 - DNA, 25 bp, Homo sapien
ggccaagctgccatgggtcacgagt

SEQ ID NO: 4501388 - DNA, 25 bp, Homo sapien
agatctcatcacaaagggcgccaat

SEQ ID NO: 4501389 - DNA, 25 bp, Homo sapien
tctcatcacaaagggcgccaatggc

SEQ ID NO: 4501390 - DNA, 25 bp, Homo sapien
catcacaaagggcgccaatggcaac

SEQ ID NO: 4501391 - DNA, 25 bp, Homo sapien
gatctcatcacaaagggcgccaatg

SEQ ID NO: 4501392 - DNA, 25 bp, Homo sapien
cctgcttttgcctgtgagatctttg

SEQ ID NO: 4501393 - DNA, 25 bp, Homo sapien
gagtaccaccacaggccatgctctt

SEQ ID NO: 4501394 - DNA, 25 bp, Homo sapien
aaagaacgtgggacaccaccacaat

SEQ ID NO: 4501395 - DNA, 25 bp, Homo sapien
cctgatgttctaatagctgagatat

SEQ ID NO: 4501396 - DNA, 25 bp, Homo sapien
gaacaagatactgctcagcagtgtt

SEQ ID NO: 4501397 - DNA, 25 bp, Homo sapien
cagtcggcatgctattttgacagcc

SEQ ID NO: 4501398 - DNA, 25 bp, Homo sapien
tgacagccggtattacaagaacaag

SEQ ID NO: 4501399 - DNA, 25 bp, Homo sapien
taattacaagaaggctagagaccac

SEQ ID NO: 4501400 - DNA, 25 bp, Homo sapien
gcaccgatcaggctgcagatacaca

SEQ ID NO: 4501401 - DNA, 25 bp, Homo sapien
agcagggacggtggtgaggcacgca

SEQ ID NO: 4501402 - DNA, 25 bp, Homo sapien
cacggttgcgttctcagcagggacg

SEQ ID NO: 4501403 - DNA, 25 bp, Homo sapien
ttccaggaaccacggttgcgttctc

SEQ ID NO: 4501404 - DNA, 25 bp, Homo sapien
gatgaggatgatgactgagggtgtc

SEQ ID NO: 4501405 - DNA, 25 bp, Homo sapien
ctgatgaggatgatgactgagggtg

SEQ ID NO: 4501406 - DNA, 25 bp, Homo sapien
tgaggatgatgactgagggtgtctg

SEQ ID NO: 4501407 - DNA, 25 bp, Homo sapien
tgatgactgagggtgtctgtgccat

SEQ ID NO: 4501408 - DNA, 25 bp, Homo sapien
ctggttcgagagattcctgttgtct

SEQ ID NO: 4501409 - DNA, 25 bp, Homo sapien
gcaagggctggtgcacatctgtgcc

SEQ ID NO: 4501410 - DNA, 25 bp, Homo sapien
aggggcaagggctggtgcacatctg

SEQ ID NO: 4501411 - DNA, 25 bp, Homo sapien
gtgcccctgtgccagcctgagacat

SEQ ID NO: 4501412 - DNA, 25 bp, Homo sapien
ggtgcacatctgtgcccctgtgcca

SEQ ID NO: 4501413 - DNA, 25 bp, Homo sapien
gtcctgtttggcatgacagtgggtc

SEQ ID NO: 4501414 - DNA, 25 bp, Homo sapien
agcactgttgttgggatggtcctgt

SEQ ID NO: 4501415 - DNA, 25 bp, Homo sapien
gagcactgttgttgggatggtcctg

SEQ ID NO: 4501416 - DNA, 25 bp, Homo sapien
ggatggtcctgtttggcatgacagt

SEQ ID NO: 4501417 - DNA, 25 bp, Homo sapien
tgagttagacaccagtacaacatcc

SEQ ID NO: 4501418 - DNA, 25 bp, Homo sapien
gggacgtgactctggctggttgagt

SEQ ID NO: 4501419 - DNA, 25 bp, Homo sapien
ctggctggttgagttagacaccagt

SEQ ID NO: 4501420 - DNA, 25 bp, Homo sapien
agtacaacatccatgatgagtccag

SEQ ID NO: 4501421 - DNA, 25 bp, Homo sapien
acatgaaaagaccagatgggcctag

SEQ ID NO: 4501422 - DNA, 25 bp, Homo sapien
catgaaaagaccagatgggcctagc

SEQ ID NO: 4501423 - DNA, 25 bp, Homo sapien
taactggagctaaccttgtcattcg

SEQ ID NO: 4501424 - DNA, 25 bp, Homo sapien
ccagattagcatggttagacaccct

SEQ ID NO: 4501425 - DNA, 25 bp, Homo sapien
tgcaaatttggtcataaaacctgcg

SEQ ID NO: 4501426 - DNA, 25 bp, Homo sapien
caaacaagctgaaaccatgagcacc

SEQ ID NO: 4501427 - DNA, 25 bp, Homo sapien
agaactcccaaagcgtaagacttga

SEQ ID NO: 4501428 - DNA, 25 bp, Homo sapien
aactcccaaagcgtaagacttgagt

SEQ ID NO: 4501429 - DNA, 25 bp, Homo sapien
aagaactcccaaagcgtaagacttg

SEQ ID NO: 4501430 - DNA, 25 bp, Homo sapien
ctcccaaagcgtaagacttgagttc

SEQ ID NO: 4501431 - DNA, 25 bp, Homo sapien
caacggtgtggtatggcaagagaaa

SEQ ID NO: 4501432 - DNA, 25 bp, Homo sapien
gctggcggccccataaatgaagcat

SEQ ID NO: 4501433 - DNA, 25 bp, Homo sapien
caaatctggaaacgtgggccctata

SEQ ID NO: 4501434 - DNA, 25 bp, Homo sapien
gaaaggtaggcatagctgggaacca

SEQ ID NO: 4501435 - DNA, 25 bp, Homo sapien
ccagaggactcgtaatggcagagct

SEQ ID NO: 4501436 - DNA, 25 bp, Homo sapien
tgtctagaggtgcagagatctccat

SEQ ID NO: 4501437 - DNA, 25 bp, Homo sapien
aaaaattagggtgtcaatgtgccag

SEQ ID NO: 4501438 - DNA, 25 bp, Homo sapien
gcacgatcataactctgccttggta

SEQ ID NO: 4501439 - DNA, 25 bp, Homo sapien
gatctgatgtctttgccggccttca

SEQ ID NO: 4501440 - DNA, 25 bp, Homo sapien
ccattgcccttgctaggccagcaaa

SEQ ID NO: 4501441 - DNA, 25 bp, Homo sapien
taatggtggttaatcttactgggtc

SEQ ID NO: 4501442 - DNA, 25 bp, Homo sapien
ccagcaaaaaagttgatgatgtcac

SEQ ID NO: 4501443 - DNA, 25 bp, Homo sapien
tgcagccgccagaggcaggatattg

SEQ ID NO: 4501444 - DNA, 25 bp, Homo sapien
tagatgctgtctcttatgtggctcc

SEQ ID NO: 4501445 - DNA, 25 bp, Homo sapien
acagcaccttggatgtggaagagtc

SEQ ID NO: 4501446 - DNA, 25 bp, Homo sapien
taatttggtgtaacgccctggcaag

SEQ ID NO: 4501447 - DNA, 25 bp, Homo sapien
ccaaagcagcacttaacacgttcat

SEQ ID NO: 4501448 - DNA, 25 bp, Homo sapien
tccaaagcagcacttaacacgttca

SEQ ID NO: 4501449 - DNA, 25 bp, Homo sapien
taccagagacgaacggactgcatct

SEQ ID NO: 4501450 - DNA, 25 bp, Homo sapien
caggtgtgcggacaataccagagac

SEQ ID NO: 4501451 - DNA, 25 bp, Homo sapien
tgagtcacagaagggagttccacct

SEQ ID NO: 4501452 - DNA, 25 bp, Homo sapien
ggaggtctagctatcaggccctaaa

SEQ ID NO: 4501453 - DNA, 25 bp, Homo sapien
tcataggcccctgaagtccatccat

SEQ ID NO: 4501454 - DNA, 25 bp, Homo sapien
gtatctcagggggttcataggcccc

SEQ ID NO: 4501455 - DNA, 25 bp, Homo sapien
gggttcataggcccctgaagtccat

SEQ ID NO: 4501456 - DNA, 25 bp, Homo sapien
cagggggttcataggcccctgaagt

SEQ ID NO: 4501457 - DNA, 25 bp, Homo sapien
tcgtagaggacgcaggcgccttgct

SEQ ID NO: 4501458 - DNA, 25 bp, Homo sapien
gacatacaggtatcggtagaccaca

SEQ ID NO: 4501459 - DNA, 25 bp, Homo sapien
tggagtcgatgccagccccgaagat

SEQ ID NO: 4501460 - DNA, 25 bp, Homo sapien
atttgagcgcgatggcgatgctgac

SEQ ID NO: 4501461 - DNA, 25 bp, Homo sapien
gccctcgtggtttttgatgtagcgt

SEQ ID NO: 4501462 - DNA, 25 bp, Homo sapien
gctcagcccgccctcgtggtttttg

SEQ ID NO: 4501463 - DNA, 25 bp, Homo sapien
gatgtagcgtttatagtttttcctc

SEQ ID NO: 4501464 - DNA, 25 bp, Homo sapien
agcgtttatagtttttcctcaggca

SEQ ID NO: 4501465 - DNA, 25 bp, Homo sapien
ctatgtgtctggtttgcgggcacag

SEQ ID NO: 4501466 - DNA, 25 bp, Homo sapien
catgttttcacaccactcatggtct

SEQ ID NO: 4501467 - DNA, 25 bp, Homo sapien
tccaggttatagataaactttgtcc

SEQ ID NO: 4501468 - DNA, 25 bp, Homo sapien
ccccaggttgtctagggtcagagta

SEQ ID NO: 4501469 - DNA, 25 bp, Homo sapien
aaaggacaaagtcggtgtgtctgtc

SEQ ID NO: 4501470 - DNA, 25 bp, Homo sapien
aaaaaggacaaagtcggtgtgtctg

SEQ ID NO: 4501471 - DNA, 25 bp, Homo sapien
aaatgacccttggattactaataca

SEQ ID NO: 4501472 - DNA, 25 bp, Homo sapien
gattactaatacagagttcagccct

SEQ ID NO: 4501473 - DNA, 25 bp, Homo sapien
ggaccctgccgcacgatgtcattct

SEQ ID NO: 4501474 - DNA, 25 bp, Homo sapien
cttattctgaatcctgtctggctct

SEQ ID NO: 4501475 - DNA, 25 bp, Homo sapien
ggtgccttcaaagtagactctgtgg

SEQ ID NO: 4501476 - DNA, 25 bp, Homo sapien
tttggcagtgcctgttgcttgcagc

SEQ ID NO: 4501477 - DNA, 25 bp, Homo sapien
cccatattgcgaaagtcagagagag

SEQ ID NO: 4501478 - DNA, 25 bp, Homo sapien
tgggtgagtcgtctacacagtgacc

SEQ ID NO: 4501479 - DNA, 25 bp, Homo sapien
cacatgcagactgggtgagtcgtct

SEQ ID NO: 4501480 - DNA, 25 bp, Homo sapien
ggtgtgtcactagtgcttaatctgg

SEQ ID NO: 4501481 - DNA, 25 bp, Homo sapien
catgaggagtaagttagcagggccc

SEQ ID NO: 4501482 - DNA, 25 bp, Homo sapien
caaatgacttggactgcgttgggtc

SEQ ID NO: 4501483 - DNA, 25 bp, Homo sapien
ttttcacgcattggacacacgacag

SEQ ID NO: 4501484 - DNA, 25 bp, Homo sapien
taaatccggcctagagaactgtgtt

SEQ ID NO: 4501485 - DNA, 25 bp, Homo sapien
gagtcctgggcaagttcgagcatcc

SEQ ID NO: 4501486 - DNA, 25 bp, Homo sapien
tgttcaataggcacaacgaggccac

SEQ ID NO: 4501487 - DNA, 25 bp, Homo sapien
tcctcgggattgtgaagctgaagcc

SEQ ID NO: 4501488 - DNA, 25 bp, Homo sapien
tttgacccagcgctacaaaggtgac

SEQ ID NO: 4501489 - DNA, 25 bp, Homo sapien
gaaggtgaatgtgattcggggcagg

SEQ ID NO: 4501490 - DNA, 25 bp, Homo sapien
gtctcaatgtcttggtactctgtgc

SEQ ID NO: 4501491 - DNA, 25 bp, Homo sapien
tgtgattcggggcaggttttctcag

SEQ ID NO: 4501492 - DNA, 25 bp, Homo sapien
ttcggggcaggttttctcagtctca

SEQ ID NO: 4501493 - DNA, 25 bp, Homo sapien
ccacacactggctggataatccaca

SEQ ID NO: 4501494 - DNA, 25 bp, Homo sapien
ctcgggttctcggacagggaggagc

SEQ ID NO: 4501495 - DNA, 25 bp, Homo sapien
gggaggagcgcgctaagtgaggccc

SEQ ID NO: 4501496 - DNA, 25 bp, Homo sapien
ggataatccacatggggaccctcgg

SEQ ID NO: 4501497 - DNA, 25 bp, Homo sapien
gaagggaatttgcacaccaggtcag

SEQ ID NO: 4501498 - DNA, 25 bp, Homo sapien
tcattaaagctgttggagccctcag

SEQ ID NO: 4501499 - DNA, 25 bp, Homo sapien
gagtttctaaagcatgtcggcaagc

SEQ ID NO: 4501500 - DNA, 25 bp, Homo sapien
gagacccaggaaagatgcctactct

SEQ ID NO: 4501501 - DNA, 25 bp, Homo sapien
ctgatgaagccgtgtattctctctg

SEQ ID NO: 4501502 - DNA, 25 bp, Homo sapien
gcttgagtgcatggctaaccctttc

SEQ ID NO: 4501503 - DNA, 25 bp, Homo sapien
gactttcaagcgtggaagatgagct

SEQ ID NO: 4501504 - DNA, 25 bp, Homo sapien
ttgtgtatgtagttcaaggccctgg

SEQ ID NO: 4501505 - DNA, 25 bp, Homo sapien
ccagtgtcatgaggcctgagggttg

SEQ ID NO: 4501506 - DNA, 25 bp, Homo sapien
ctctgatattgatgtaagcaagcca

SEQ ID NO: 4501507 - DNA, 25 bp, Homo sapien
gtcatgaggcctgagggttggcagc

SEQ ID NO: 4501508 - DNA, 25 bp, Homo sapien
tgatgtaagcaagccagtgtcatga

SEQ ID NO: 4501509 - DNA, 25 bp, Homo sapien
tgtgtcttctcaattggagcctggg

SEQ ID NO: 4501510 - DNA, 25 bp, Homo sapien
ttctcaattggagcctggggagttt

SEQ ID NO: 4501511 - DNA, 25 bp, Homo sapien
gtcttctcaattggagcctggggag

SEQ ID NO: 4501512 - DNA, 25 bp, Homo sapien
ctgtgtcttctcaattggagcctgg

SEQ ID NO: 4501513 - DNA, 25 bp, Homo sapien
ggcttctggaagtcccacttcatgc

SEQ ID NO: 4501514 - DNA, 25 bp, Homo sapien
tgtcagcactagagttggcttctgg

SEQ ID NO: 4501515 - DNA, 25 bp, Homo sapien
taacagatgctgtcagcactagagt

SEQ ID NO: 4501516 - DNA, 25 bp, Homo sapien
catgctcaggtacatcttttacttg

SEQ ID NO: 4501517 - DNA, 25 bp, Homo sapien
ttatttttcaatgctgctgtagaca

SEQ ID NO: 4501518 - DNA, 25 bp, Homo sapien
atgctgctgtagacattctttttat

SEQ ID NO: 4501519 - DNA, 25 bp, Homo sapien
tcttcttggtcaccataatgagttt

SEQ ID NO: 4501520 - DNA, 25 bp, Homo sapien
catcttcttggtcaccataatgagt

SEQ ID NO: 4501521 - DNA, 25 bp, Homo sapien
cattgcctgggacaggttgacccta

SEQ ID NO: 4501522 - DNA, 25 bp, Homo sapien
tgtaattaatcatcccaggcgggct

SEQ ID NO: 4501523 - DNA, 25 bp, Homo sapien
gattgtgtcttttgaccacattgcc

SEQ ID NO: 4501524 - DNA, 25 bp, Homo sapien
ttgaccctagagagtgcgacagcag

SEQ ID NO: 4501525 - DNA, 25 bp, Homo sapien
gatctgtgattttggtgagactgcg

SEQ ID NO: 4501526 - DNA, 25 bp, Homo sapien
gatttgttgtcaccatcttatgtga

SEQ ID NO: 4501527 - DNA, 25 bp, Homo sapien
tcaactgatctgtgattttggtgag

SEQ ID NO: 4501528 - DNA, 25 bp, Homo sapien
tgagactgcgcctgtgatttgttgt

SEQ ID NO: 4501529 - DNA, 25 bp, Homo sapien
acatacatgcccatcgaatcttcca

SEQ ID NO: 4501530 - DNA, 25 bp, Homo sapien
tgtccacatacatgcccatcgaatc

SEQ ID NO: 4501531 - DNA, 25 bp, Homo sapien
cacatacatgcccatcgaatcttcc

SEQ ID NO: 4501532 - DNA, 25 bp, Homo sapien
tccacatacatgcccatcgaatctt

SEQ ID NO: 4501533 - DNA, 25 bp, Homo sapien
ggtgtccattttcatcattatccac

SEQ ID NO: 4501534 - DNA, 25 bp, Homo sapien
aaaataactggtgtccattttcatc

SEQ ID NO: 4501535 - DNA, 25 bp, Homo sapien
tgttcttaaaaataactggtgtcca

SEQ ID NO: 4501536 - DNA, 25 bp, Homo sapien
tggtgtccattttcatcattatcca

SEQ ID NO: 4501537 - DNA, 25 bp, Homo sapien
acaatgtccaattcatcctttgcac

SEQ ID NO: 4501538 - DNA, 25 bp, Homo sapien
gacaatgtccaattcatcctttgca

SEQ ID NO: 4501539 - DNA, 25 bp, Homo sapien
ttcgacaatgtccaattcatccttt

SEQ ID NO: 4501540 - DNA, 25 bp, Homo sapien
ctcttcgacaatgtccaattcatcc

SEQ ID NO: 4501541 - DNA, 25 bp, Homo sapien
taccacctccagtggcagaccgctt

SEQ ID NO: 4501542 - DNA, 25 bp, Homo sapien
ctaccacctccagtggcagaccgct

SEQ ID NO: 4501543 - DNA, 25 bp, Homo sapien
ctccagtggcagaccgctttccaga

SEQ ID NO: 4501544 - DNA, 25 bp, Homo sapien
cacctccagtggcagaccgctttcc

SEQ ID NO: 4501545 - DNA, 25 bp, Homo sapien
gtccttttgttcttggtgttaatga

SEQ ID NO: 4501546 - DNA, 25 bp, Homo sapien
tggtgttaatgatggttttgtcttt

SEQ ID NO: 4501547 - DNA, 25 bp, Homo sapien
cttttgttcttggtgttaatgatgg

SEQ ID NO: 4501548 - DNA, 25 bp, Homo sapien
tgttcttggtgttaatgatggtttt

SEQ ID NO: 4501549 - DNA, 25 bp, Homo sapien
atagcctcctggtaaatcctccgga

SEQ ID NO: 4501550 - DNA, 25 bp, Homo sapien
ctggtaaatcctccggaagcagttc

SEQ ID NO: 4501551 - DNA, 25 bp, Homo sapien
cctcctggtaaatcctccggaagca

SEQ ID NO: 4501552 - DNA, 25 bp, Homo sapien
tcctggtaaatcctccggaagcagt

SEQ ID NO: 4501553 - DNA, 25 bp, Homo sapien
tttgcttgaagtaaatccgtaagac

SEQ ID NO: 4501554 - DNA, 25 bp, Homo sapien
cttttggttgaaagtataattctca

SEQ ID NO: 4501555 - DNA, 25 bp, Homo sapien
tgcaacagatggttatggttgttac

SEQ ID NO: 4501556 - DNA, 25 bp, Homo sapien
ctgggatctttgctacatgggacaa

SEQ ID NO: 4501557 - DNA, 25 bp, Homo sapien
actcttgccccgttggcgagcttta

SEQ ID NO: 4501558 - DNA, 25 bp, Homo sapien
gccatgggttgcaagctggtccctt

SEQ ID NO: 4501559 - DNA, 25 bp, Homo sapien
tagcagtaagtatgccgttcgcata

SEQ ID NO: 4501560 - DNA, 25 bp, Homo sapien
gttcgcatatatgtccacacagtaa

SEQ ID NO: 4501561 - DNA, 25 bp, Homo sapien
acataatgatgagtactactgggct

SEQ ID NO: 4501562 - DNA, 25 bp, Homo sapien
ctacactttgccgagcctcaggacc

SEQ ID NO: 4501563 - DNA, 25 bp, Homo sapien
ggctgacttgtgttttgggctgact

SEQ ID NO: 4501564 - DNA, 25 bp, Homo sapien
ctcaggacccgtcgccagctctgtg

SEQ ID NO: 4501565 - DNA, 25 bp, Homo sapien
tggcccattgcctctgcgttgatgt

SEQ ID NO: 4501566 - DNA, 25 bp, Homo sapien
gatgtcagctgtaagcatgcacagt

SEQ ID NO: 4501567 - DNA, 25 bp, Homo sapien
gcatgcacagttcagctgttggttc

SEQ ID NO: 4501568 - DNA, 25 bp, Homo sapien
gcctctgcgttgatgtcagctgtaa

SEQ ID NO: 4501569 - DNA, 25 bp, Homo sapien
tcactcccataccacaaatctctga

SEQ ID NO: 4501570 - DNA, 25 bp, Homo sapien
tctctgaaattgatccagtacaatg

SEQ ID NO: 4501571 - DNA, 25 bp, Homo sapien
tctgaaattgatccagtacaatgga

SEQ ID NO: 4501572 - DNA, 25 bp, Homo sapien
tgaaattgatccagtacaatggaaa

SEQ ID NO: 4501573 - DNA, 25 bp, Homo sapien
cactcgtctgatgctcttcgtggga

SEQ ID NO: 4501574 - DNA, 25 bp, Homo sapien
ggaagtcaacaccactcgtctgatg

SEQ ID NO: 4501575 - DNA, 25 bp, Homo sapien
gtctgatgctcttcgtgggatgctc

SEQ ID NO: 4501576 - DNA, 25 bp, Homo sapien
cctttgctgatggaagtcaacacca

SEQ ID NO: 4501577 - DNA, 25 bp, Homo sapien
gtttcaatcaccatataattggaac

SEQ ID NO: 4501578 - DNA, 25 bp, Homo sapien
acagcggacttggtctgagccagtg

SEQ ID NO: 4501579 - DNA, 25 bp, Homo sapien
gaaagacagcggacttggtctgagc

SEQ ID NO: 4501580 - DNA, 25 bp, Homo sapien
cccggaaagacagcggacttggtct

SEQ ID NO: 4501581 - DNA, 25 bp, Homo sapien
aagacagcggacttggtctgagcca

SEQ ID NO: 4501582 - DNA, 25 bp, Homo sapien
ttgctttcttttatgcggttaatct

SEQ ID NO: 4501583 - DNA, 25 bp, Homo sapien
ttttatgcggttaatcttggctgtc

SEQ ID NO: 4501584 - DNA, 25 bp, Homo sapien
caaggattgggtaggttttctcctg

SEQ ID NO: 4501585 - DNA, 25 bp, Homo sapien
tgtaatagcggaggggggccaccag

SEQ ID NO: 4501586 - DNA, 25 bp, Homo sapien
atggccccttccttgtaggcatctg

SEQ ID NO: 4501587 - DNA, 25 bp, Homo sapien
tctgaggaaactggcccgtgttgac

SEQ ID NO: 4501588 - DNA, 25 bp, Homo sapien
tggcttgcccacctttgcccagagt

SEQ ID NO: 4501589 - DNA, 25 bp, Homo sapien
gcttcgaggaatgatcactgtgatc

SEQ ID NO: 4501590 - DNA, 25 bp, Homo sapien
ctttgtcttgcttgaagggtggttt

SEQ ID NO: 4501591 - DNA, 25 bp, Homo sapien
cttgaagggtggtttaggaggtgtg

SEQ ID NO: 4501592 - DNA, 25 bp, Homo sapien
tgaagggtggtttaggaggtgtgga

SEQ ID NO: 4501593 - DNA, 25 bp, Homo sapien
tccctttgtcttgcttgaagggtgg

SEQ ID NO: 4501594 - DNA, 25 bp, Homo sapien
attccttggcgaagtcagcgcaccc

SEQ ID NO: 4501595 - DNA, 25 bp, Homo sapien
tgtggagaacaatgttggacgtcac

SEQ ID NO: 4501596 - DNA, 25 bp, Homo sapien
ttggcgaagtcagcgcaccctgctc

SEQ ID NO: 4501597 - DNA, 25 bp, Homo sapien
caatgttggacgtcactctccctgt

SEQ ID NO: 4501598 - DNA, 25 bp, Homo sapien
gcagcgacaggcaggggttgctcag

SEQ ID NO: 4501599 - DNA, 25 bp, Homo sapien
tgcgctccggacgagtccgggccgg

SEQ ID NO: 4501600 - DNA, 25 bp, Homo sapien
ggcgcggcgagcccgctcgctccct

SEQ ID NO: 4501601 - DNA, 25 bp, Homo sapien
gggttgctcaggcgcggcgagcccg

SEQ ID NO: 4501602 - DNA, 25 bp, Homo sapien
gcggcggacgccggagcctccgcgc

SEQ ID NO: 4501603 - DNA, 25 bp, Homo sapien
cggcggacgccggagcctccgcgcg

SEQ ID NO: 4501604 - DNA, 25 bp, Homo sapien
tttcttcttcgatctctgagatgtc

SEQ ID NO: 4501605 - DNA, 25 bp, Homo sapien
gcgcggccagcatccagctccggaa

SEQ ID NO: 4501606 - DNA, 25 bp, Homo sapien
ggaagaccacgagcagcgtgagcgc

SEQ ID NO: 4501607 - DNA, 25 bp, Homo sapien
agatgtctgcgaagatgaggaagac

SEQ ID NO: 4501608 - DNA, 25 bp, Homo sapien
acagactttcccgaaatgtctccgt

SEQ ID NO: 4501609 - DNA, 25 bp, Homo sapien
cggcggtacagactttcccgaaatg

SEQ ID NO: 4501610 - DNA, 25 bp, Homo sapien
gactttcccgaaatgtctccgtctc

SEQ ID NO: 4501611 - DNA, 25 bp, Homo sapien
ggtacagactttcccgaaatgtctc

SEQ ID NO: 4501612 - DNA, 25 bp, Homo sapien
aaaaaagcgccagatcgcccgcctg

SEQ ID NO: 4501613 - DNA, 25 bp, Homo sapien
gtcgggagaaaaaaagcgccagatc

SEQ ID NO: 4501614 - DNA, 25 bp, Homo sapien
gatcgcccgcctgagggcccagaag

SEQ ID NO: 4501615 - DNA, 25 bp, Homo sapien
aaagcgccagatcgcccgcctgagg

SEQ ID NO: 4501616 - DNA, 25 bp, Homo sapien
ccacctgtcgtctaccgccctttgg

SEQ ID NO: 4501617 - DNA, 25 bp, Homo sapien
ctccccacctgtcgtctaccgccct

SEQ ID NO: 4501618 - DNA, 25 bp, Homo sapien
gcctccccacctgtcgtctaccgcc

SEQ ID NO: 4501619 - DNA, 25 bp, Homo sapien
ctgtcgtctaccgccctttggaggt

SEQ ID NO: 4501620 - DNA, 25 bp, Homo sapien
cgagcagctatgaaaagtagcatgt

SEQ ID NO: 4501621 - DNA, 25 bp, Homo sapien
gcatcttccattaccccaagacgtg

SEQ ID NO: 4501622 - DNA, 25 bp, Homo sapien
caagacgtgacttgcccgatttcct

SEQ ID NO: 4501623 - DNA, 25 bp, Homo sapien
ttcctttccaatccacgtttctgag

SEQ ID NO: 4501624 - DNA, 25 bp, Homo sapien
caggactggtcaagccagtggtcag

SEQ ID NO: 4501625 - DNA, 25 bp, Homo sapien
aggactggtcaagccagtggtcagc

SEQ ID NO: 4501626 - DNA, 25 bp, Homo sapien
tcaggactggtcaagccagtggtca

SEQ ID NO: 4501627 - DNA, 25 bp, Homo sapien
ggtcaggactggtcaagccagtggt

SEQ ID NO: 4501628 - DNA, 25 bp, Homo sapien
gttggcagtagttgctgcctgctca

SEQ ID NO: 4501629 - DNA, 25 bp, Homo sapien
ctagtgttttcccagacagggcctg

SEQ ID NO: 4501630 - DNA, 25 bp, Homo sapien
tcatggctgatgatcagagctagcc

SEQ ID NO: 4501631 - DNA, 25 bp, Homo sapien
tgcctgctcacagatctcgtcatgg

SEQ ID NO: 4501632 - DNA, 25 bp, Homo sapien
agcccttgcacggaaacagctggcc

SEQ ID NO: 4501633 - DNA, 25 bp, Homo sapien
tgctctcaacgccactatggaagcc

SEQ ID NO: 4501634 - DNA, 25 bp, Homo sapien
cgttcctggtctgctctcaacgcca

SEQ ID NO: 4501635 - DNA, 25 bp, Homo sapien
ggaccagcccttgcacggaaacagc

SEQ ID NO: 4501636 - DNA, 25 bp, Homo sapien
tgaaagtgtcaggaggaacctcgac

SEQ ID NO: 4501637 - DNA, 25 bp, Homo sapien
tccttgccatcgtcgcgaagtcagt

SEQ ID NO: 4501638 - DNA, 25 bp, Homo sapien
gagtgaatcgggatcccaagtgctt

SEQ ID NO: 4501639 - DNA, 25 bp, Homo sapien
taatacagacacatgtcgtgtcggg

SEQ ID NO: 4501640 - DNA, 25 bp, Homo sapien
cagagcctccgctgaagtgttgtgc

SEQ ID NO: 4501641 - DNA, 25 bp, Homo sapien
agtgttgtgcccgatggtgacagat

SEQ ID NO: 4501642 - DNA, 25 bp, Homo sapien
ttgtgcccgatggtgacagatgcca

SEQ ID NO: 4501643 - DNA, 25 bp, Homo sapien
agagcctccgctgaagtgttgtgcc

SEQ ID NO: 4501644 - DNA, 25 bp, Homo sapien
tcctccgcgtgcagccgattttcaa

SEQ ID NO: 4501645 - DNA, 25 bp, Homo sapien
cgcgtgcagccgattttcaaaatta

SEQ ID NO: 4501646 - DNA, 25 bp, Homo sapien
gaactggggaagctcaataacaagt

SEQ ID NO: 4501647 - DNA, 25 bp, Homo sapien
tcactcctccgcgtgcagccgattt

SEQ ID NO: 4501648 - DNA, 25 bp, Homo sapien
gtctttctttgggatgccgtctgtc

SEQ ID NO: 4501649 - DNA, 25 bp, Homo sapien
tttgggatgccgtctgtcagcacgt

SEQ ID NO: 4501650 - DNA, 25 bp, Homo sapien
gatgccgtctgtcagcacgttgctg

SEQ ID NO: 4501651 - DNA, 25 bp, Homo sapien
tgtgtccagccggcctaagaggctc

SEQ ID NO: 4501652 - DNA, 25 bp, Homo sapien
tctaaggcaacggccacttcctctg

SEQ ID NO: 4501653 - DNA, 25 bp, Homo sapien
aggcaacggccacttcctctgctcc

SEQ ID NO: 4501654 - DNA, 25 bp, Homo sapien
tggttctaaggcaacggccacttcc

SEQ ID NO: 4501655 - DNA, 25 bp, Homo sapien
cctggttctaaggcaacggccactt

SEQ ID NO: 4501656 - DNA, 25 bp, Homo sapien
catgccaggcccatagtaactttct

SEQ ID NO: 4501657 - DNA, 25 bp, Homo sapien
tcttatttctgacttggttttggaa

SEQ ID NO: 4501658 - DNA, 25 bp, Homo sapien
ctttcttatttctgacttggttttg

SEQ ID NO: 4501659 - DNA, 25 bp, Homo sapien
atgccaggcccatagtaactttctt

SEQ ID NO: 4501660 - DNA, 25 bp, Homo sapien
gagcccaaatcaccgaagatgaccc

SEQ ID NO: 4501661 - DNA, 25 bp, Homo sapien
tgagcccaaatcaccgaagatgacc

SEQ ID NO: 4501662 - DNA, 25 bp, Homo sapien
gcccaaatcaccgaagatgaccctc

SEQ ID NO: 4501663 - DNA, 25 bp, Homo sapien
ccaaatcaccgaagatgaccctctc

SEQ ID NO: 4501664 - DNA, 25 bp, Homo sapien
tctctatgcgttcggcttcagcacc

SEQ ID NO: 4501665 - DNA, 25 bp, Homo sapien
gccaccattatctctatgcgttcgg

SEQ ID NO: 4501666 - DNA, 25 bp, Homo sapien
cattatctctatgcgttcggcttca

SEQ ID NO: 4501667 - DNA, 25 bp, Homo sapien
gaagggtgccccctatattcagcca

SEQ ID NO: 4501668 - DNA, 25 bp, Homo sapien
ctggaggcttgaacatcaaggtcat

SEQ ID NO: 4501669 - DNA, 25 bp, Homo sapien
ggagatgattccctgtcacatggat

SEQ ID NO: 4501670 - DNA, 25 bp, Homo sapien
cagttgcccgagtccttgtctgtag

SEQ ID NO: 4501671 - DNA, 25 bp, Homo sapien
caagtttctcggtcatcctggtcca

SEQ ID NO: 4501672 - DNA, 25 bp, Homo sapien
gacaccaccgagtagtccttgatga

SEQ ID NO: 4501673 - DNA, 25 bp, Homo sapien
ggccactttgcactcctgaagagat

SEQ ID NO: 4501674 - DNA, 25 bp, Homo sapien
tgggccactttgcactcctgaagag

SEQ ID NO: 4501675 - DNA, 25 bp, Homo sapien
ctatccttcggcctgggccactttg

SEQ ID NO: 4501676 - DNA, 25 bp, Homo sapien
cctgggccactttgcactcctgaag

SEQ ID NO: 4501677 - DNA, 25 bp, Homo sapien
aaccaaaggtgctacccatcttctt

SEQ ID NO: 4501678 - DNA, 25 bp, Homo sapien
caaccaaaggtgctacccatcttct

SEQ ID NO: 4501679 - DNA, 25 bp, Homo sapien
accaaaggtgctacccatcttcttt

SEQ ID NO: 4501680 - DNA, 25 bp, Homo sapien
caaaggtgctacccatcttcttttc

SEQ ID NO: 4501681 - DNA, 25 bp, Homo sapien
agctgatctgattgtacctctgcct

SEQ ID NO: 4501682 - DNA, 25 bp, Homo sapien
gttcacagctgatctgattgtacct

SEQ ID NO: 4501683 - DNA, 25 bp, Homo sapien
ctattagatttgctatgtaagctgt

SEQ ID NO: 4501684 - DNA, 25 bp, Homo sapien
gctatgtaagctgttcacagctgat

SEQ ID NO: 4501685 - DNA, 25 bp, Homo sapien
catctctgcagcctctagaccttgg

SEQ ID NO: 4501686 - DNA, 25 bp, Homo sapien
tctctgcagcctctagaccttgggc

SEQ ID NO: 4501687 - DNA, 25 bp, Homo sapien
tccatctctgcagcctctagacctt

SEQ ID NO: 4501688 - DNA, 25 bp, Homo sapien
ttttccatctctgcagcctctagac

SEQ ID NO: 4501689 - DNA, 25 bp, Homo sapien
ctgtccctaaggtataacctacata

SEQ ID NO: 4501690 - DNA, 25 bp, Homo sapien
tctatttatcttccagtaatgcaga

SEQ ID NO: 4501691 - DNA, 25 bp, Homo sapien
gtccctaaggtataacctacataca

SEQ ID NO: 4501692 - DNA, 25 bp, Homo sapien
ctatttatcttccagtaatgcagaa

SEQ ID NO: 4501693 - DNA, 25 bp, Homo sapien
tctccatttggacgaggctggctgg

SEQ ID NO: 4501694 - DNA, 25 bp, Homo sapien
tgatgaggagccgtttattacaact

SEQ ID NO: 4501695 - DNA, 25 bp, Homo sapien
tggatgttgtgcttgatgctttcat

SEQ ID NO: 4501696 - DNA, 25 bp, Homo sapien
tgatcctcagagagagcgtctggtt

SEQ ID NO: 4501697 - DNA, 25 bp, Homo sapien
gatggatactgtgacgtgtatggac

SEQ ID NO: 4501698 - DNA, 25 bp, Homo sapien
tactgtgacgtgtatggacactttc

SEQ ID NO: 4501699 - DNA, 25 bp, Homo sapien
gatactgtgacgtgtatggacactt

SEQ ID NO: 4501700 - DNA, 25 bp, Homo sapien
tgtgacgtgtatggacactttctgc

SEQ ID NO: 4501701 - DNA, 25 bp, Homo sapien
tccttttcagcatccaagaacttta

SEQ ID NO: 4501702 - DNA, 25 bp, Homo sapien
gcatccaagaactttaaaatctgct

SEQ ID NO: 4501703 - DNA, 25 bp, Homo sapien
ctttaggacagaaatgtccttttca

SEQ ID NO: 4501704 - DNA, 25 bp, Homo sapien
gacagaaatgtccttttcagcatcc

SEQ ID NO: 4501705 - DNA, 25 bp, Homo sapien
cattcatggtgctgtctcgatcgaa

SEQ ID NO: 4501706 - DNA, 25 bp, Homo sapien
gaagctgtgggcgtcaatctcctgc

SEQ ID NO: 4501707 - DNA, 25 bp, Homo sapien
ttattcttcagtggcgaagtcctgg

SEQ ID NO: 4501708 - DNA, 25 bp, Homo sapien
tagaggttctgggacacattcatgg

SEQ ID NO: 4501709 - DNA, 25 bp, Homo sapien
gagaaatccagttaagagtgtaaaa

SEQ ID NO: 4501710 - DNA, 25 bp, Homo sapien
tctggcacagaggatttaatggtgg

SEQ ID NO: 4501711 - DNA, 25 bp, Homo sapien
tggaaaagccctttgaccagtgaaa

SEQ ID NO: 4501712 - DNA, 25 bp, Homo sapien
cctgcctgtgcctaggactgggatg

SEQ ID NO: 4501713 - DNA, 25 bp, Homo sapien
cacgttgacgtggtgcttcaggata

SEQ ID NO: 4501714 - DNA, 25 bp, Homo sapien
catcccgggcatactcctgtactgg

SEQ ID NO: 4501715 - DNA, 25 bp, Homo sapien
catggttaccaggtctgtcttgagc

SEQ ID NO: 4501716 - DNA, 25 bp, Homo sapien
caggataagctcgttgacccactca

SEQ ID NO: 4501717 - DNA, 25 bp, Homo sapien
tctcccacacttagtgacggtccta

SEQ ID NO: 4501718 - DNA, 25 bp, Homo sapien
gatactgcctaccaagaatctccca

SEQ ID NO: 4501719 - DNA, 25 bp, Homo sapien
tactggcctgtagggaggccgctca

SEQ ID NO: 4501720 - DNA, 25 bp, Homo sapien
ccccctcatctctcaaggaatggag

SEQ ID NO: 4501721 - DNA, 25 bp, Homo sapien
caagaatcctttgtgggtggctcag

SEQ ID NO: 4501722 - DNA, 25 bp, Homo sapien
tgatacaaccaagccagtcacggag

SEQ ID NO: 4501723 - DNA, 25 bp, Homo sapien
cagtccacgagatgagggttgccac

SEQ ID NO: 4501724 - DNA, 25 bp, Homo sapien
gttatgctaagtccccagtgaagag

SEQ ID NO: 4501725 - DNA, 25 bp, Homo sapien
tttgtttgcagaaacgtgtggccag

SEQ ID NO: 4501726 - DNA, 25 bp, Homo sapien
agaggccggtggtgggtcttttgat

SEQ ID NO: 4501727 - DNA, 25 bp, Homo sapien
cgtgtggccagggtatacatcaaga

SEQ ID NO: 4501728 - DNA, 25 bp, Homo sapien
cgtagaggtagatttgtttgcagaa

SEQ ID NO: 4501729 - DNA, 25 bp, Homo sapien
gcctgggaggtgtagccatacttga

SEQ ID NO: 4501730 - DNA, 25 bp, Homo sapien
ggttctgatccagcggaaagggcca

SEQ ID NO: 4501731 - DNA, 25 bp, Homo sapien
aactccaagggcatggtatgcgggc

SEQ ID NO: 4501732 - DNA, 25 bp, Homo sapien
tggccgacagtcagtttcaaagccc

SEQ ID NO: 4501733 - DNA, 25 bp, Homo sapien
cctgcttgttctattgtttgtgcca

SEQ ID NO: 4501734 - DNA, 25 bp, Homo sapien
aaccactagcctgcttgttctattg

SEQ ID NO: 4501735 - DNA, 25 bp, Homo sapien
caaagaaaaccactagcctgcttgt

SEQ ID NO: 4501736 - DNA, 25 bp, Homo sapien
tctattgtttgtgccaccccgactc

SEQ ID NO: 4501737 - DNA, 25 bp, Homo sapien
tgaaaacctcaatgtcggagcttgg

SEQ ID NO: 4501738 - DNA, 25 bp, Homo sapien
gagtcattcgtgctgtcccttaggc

SEQ ID NO: 4501739 - DNA, 25 bp, Homo sapien
tagggttaatggttctgccgcctcc

SEQ ID NO: 4501740 - DNA, 25 bp, Homo sapien
tttccaccgcctgtgaggagtccga

SEQ ID NO: 4501741 - DNA, 25 bp, Homo sapien
tgcagtggaggctcaaattgaactc

SEQ ID NO: 4501742 - DNA, 25 bp, Homo sapien
ccagatggagaaggacaatgagcca

SEQ ID NO: 4501743 - DNA, 25 bp, Homo sapien
gcagggaaggacaattggcccagat

SEQ ID NO: 4501744 - DNA, 25 bp, Homo sapien
gccattttggtagtgcaggactcaa

SEQ ID NO: 4501745 - DNA, 25 bp, Homo sapien
catgttcaggatggacgggaccacg

SEQ ID NO: 4501746 - DNA, 25 bp, Homo sapien
tacaaataaagtgctacggtggttc

SEQ ID NO: 4501747 - DNA, 25 bp, Homo sapien
gggtgtaatcccagcctagagctca

SEQ ID NO: 4501748 - DNA, 25 bp, Homo sapien
gagacagtaaaacgcaggcaccctt

SEQ ID NO: 4501749 - DNA, 25 bp, Homo sapien
ttccagggcataggtgacccctgtg

SEQ ID NO: 4501750 - DNA, 25 bp, Homo sapien
gggcataggtgacccctgtggaaaa

SEQ ID NO: 4501751 - DNA, 25 bp, Homo sapien
ttggaggagggccacttccaccttc

SEQ ID NO: 4501752 - DNA, 25 bp, Homo sapien
accttccagggcataggtgacccct

SEQ ID NO: 4501753 - DNA, 25 bp, Homo sapien
caggaaaggaaactctcagaagcca

SEQ ID NO: 4501754 - DNA, 25 bp, Homo sapien
tggatgccactaacacaacggcagt

SEQ ID NO: 4501755 - DNA, 25 bp, Homo sapien
ccatggaagcggtcacagaaattca

SEQ ID NO: 4501756 - DNA, 25 bp, Homo sapien
gcatgcagtaatccggagacctgga

SEQ ID NO: 4501757 - DNA, 25 bp, Homo sapien
ccaagcacagttctagtggtcagga

SEQ ID NO: 4501758 - DNA, 25 bp, Homo sapien
tcttcctttgaagcatccacacttg

SEQ ID NO: 4501759 - DNA, 25 bp, Homo sapien
ggtcagccgggtgcaagtcttcctt

SEQ ID NO: 4501760 - DNA, 25 bp, Homo sapien
gaaagcatctcacacagggtccaga

SEQ ID NO: 4501761 - DNA, 25 bp, Homo sapien
ggtgcaacaccccaacaagggctag

SEQ ID NO: 4501762 - DNA, 25 bp, Homo sapien
cttatgacaagatggttgaaggttg

SEQ ID NO: 4501763 - DNA, 25 bp, Homo sapien
cagcatcaaaccatccactcgtgag

SEQ ID NO: 4501764 - DNA, 25 bp, Homo sapien
caatgttggcttcagcatcaaacca

SEQ ID NO: 4501765 - DNA, 25 bp, Homo sapien
gtagaattaagtggccttcagggct

SEQ ID NO: 4501766 - DNA, 25 bp, Homo sapien
cctctctatgcttccgcaattgaat

SEQ ID NO: 4501767 - DNA, 25 bp, Homo sapien
tttgcaatctgtacacacatcagct

SEQ ID NO: 4501768 - DNA, 25 bp, Homo sapien
tatctgctttgggtcgaggatgtgt

SEQ ID NO: 4501769 - DNA, 25 bp, Homo sapien
gtcctggctgactctcataagatgc

SEQ ID NO: 4501770 - DNA, 25 bp, Homo sapien
tgaggaaatgagagggagcagactt

SEQ ID NO: 4501771 - DNA, 25 bp, Homo sapien
ttcgcgcccgggaagatgagagggc

SEQ ID NO: 4501772 - DNA, 25 bp, Homo sapien
agacttcgcgcccgggaagatgaga

SEQ ID NO: 4501773 - DNA, 25 bp, Homo sapien
atgagagggagcagacttcgcgccc

SEQ ID NO: 4501774 - DNA, 25 bp, Homo sapien
tccataatagatgtgcacccatatg

SEQ ID NO: 4501775 - DNA, 25 bp, Homo sapien
actccataatagatgtgcacccata

SEQ ID NO: 4501776 - DNA, 25 bp, Homo sapien
ttactccataatagatgtgcaccca

SEQ ID NO: 4501777 - DNA, 25 bp, Homo sapien
cataatagatgtgcacccatatgac

SEQ ID NO: 4501778 - DNA, 25 bp, Homo sapien
tccagtgttgggtgtttgagaagcc

SEQ ID NO: 4501779 - DNA, 25 bp, Homo sapien
tctatcagcattcagtacggacata

SEQ ID NO: 4501780 - DNA, 25 bp, Homo sapien
gatctggctggcttctggtatcagt

SEQ ID NO: 4501781 - DNA, 25 bp, Homo sapien
tgcctaccaagaaggtgagtcctgg

SEQ ID NO: 4501782 - DNA, 25 bp, Homo sapien
gcaaatctggtttctgtatcttatt

SEQ ID NO: 4501783 - DNA, 25 bp, Homo sapien
caaatctggtttctgtatcttatta

SEQ ID NO: 4501784 - DNA, 25 bp, Homo sapien
tgataaagaaggtcaagcccgttcc

SEQ ID NO: 4501785 - DNA, 25 bp, Homo sapien
cattgaacaattacgaacagctcca

SEQ ID NO: 4501786 - DNA, 25 bp, Homo sapien
caaaggaaggttgccatggcgatcc

SEQ ID NO: 4501787 - DNA, 25 bp, Homo sapien
gggcctcgtcgatcctctgtaggta

SEQ ID NO: 4501788 - DNA, 25 bp, Homo sapien
cttgaccatgttttggaggacagat

SEQ ID NO: 4501789 - DNA, 25 bp, Homo sapien
ccatgttttggaggacagatgtaaa

SEQ ID NO: 4501790 - DNA, 25 bp, Homo sapien
cttgaccacttgaccatgttttgga

SEQ ID NO: 4501791 - DNA, 25 bp, Homo sapien
gaccacttgaccatgttttggagga

SEQ ID NO: 4501792 - DNA, 25 bp, Homo sapien
ttcttgagaagggacgctaccacct

SEQ ID NO: 4501793 - DNA, 25 bp, Homo sapien
aagggacgctaccacctgaggtgga

SEQ ID NO: 4501794 - DNA, 25 bp, Homo sapien
taccacctgaggtggaaccttgtta

SEQ ID NO: 4501795 - DNA, 25 bp, Homo sapien
cacctgaggtggaaccttgttacaa

SEQ ID NO: 4501796 - DNA, 25 bp, Homo sapien
ggataagctatttccactgggtaag

SEQ ID NO: 4501797 - DNA, 25 bp, Homo sapien
ctgggtaagtaacctcagttcttag

SEQ ID NO: 4501798 - DNA, 25 bp, Homo sapien
cctgaaatggataagctatttccac

SEQ ID NO: 4501799 - DNA, 25 bp, Homo sapien
tcttaggcccttgggcacagaatag

SEQ ID NO: 4501800 - DNA, 25 bp, Homo sapien
tctgggctctttagactggaccctg

SEQ ID NO: 4501801 - DNA, 25 bp, Homo sapien
ctggaccctgtggagcctctaaggt

SEQ ID NO: 4501802 - DNA, 25 bp, Homo sapien
cattgatctgggctctttagactgg

SEQ ID NO: 4501803 - DNA, 25 bp, Homo sapien
cctctaaggttaatgggctcttggg

SEQ ID NO: 4501804 - DNA, 25 bp, Homo sapien
gacgatcctaaagctgcaaaaccat

SEQ ID NO: 4501805 - DNA, 25 bp, Homo sapien
gctgtggccttggacgatcctaaag

SEQ ID NO: 4501806 - DNA, 25 bp, Homo sapien
tgctttttgaggatagctgtggcct

SEQ ID NO: 4501807 - DNA, 25 bp, Homo sapien
atgttctggccctcaagctgctttt

SEQ ID NO: 4501808 - DNA, 25 bp, Homo sapien
gaggttcaatctcatcataggatgg

SEQ ID NO: 4501809 - DNA, 25 bp, Homo sapien
atggaatgaagtctagactggtgtc

SEQ ID NO: 4501810 - DNA, 25 bp, Homo sapien
tcatcataggatggaatgaagtcta

SEQ ID NO: 4501811 - DNA, 25 bp, Homo sapien
aatgacacaactgaggttcaatctc

SEQ ID NO: 4501812 - DNA, 25 bp, Homo sapien
gggaatcataacaccttagatttgc

SEQ ID NO: 4501813 - DNA, 25 bp, Homo sapien
agctttgatgttcattatcatattt

SEQ ID NO: 4501814 - DNA, 25 bp, Homo sapien
ggaatcataacaccttagatttgca

SEQ ID NO: 4501815 - DNA, 25 bp, Homo sapien
gaatcataacaccttagatttgcag

SEQ ID NO: 4501816 - DNA, 25 bp, Homo sapien
ttcttctcttgaggctcctgacggc

SEQ ID NO: 4501817 - DNA, 25 bp, Homo sapien
ctgacatgtacagaatggaataaga

SEQ ID NO: 4501818 - DNA, 25 bp, Homo sapien
cttcttctcttgaggctcctgacgg

SEQ ID NO: 4501819 - DNA, 25 bp, Homo sapien
gacatgtacagaatggaataagaga

SEQ ID NO: 4501820 - DNA, 25 bp, Homo sapien
taggaagatatatgtgagtacagat

SEQ ID NO: 4501821 - DNA, 25 bp, Homo sapien
gaagctgaggactggtggttctggt

SEQ ID NO: 4501822 - DNA, 25 bp, Homo sapien
tcagcccgtgaaagggcgagggaac

SEQ ID NO: 4501823 - DNA, 25 bp, Homo sapien
gagtacagatgtgaggagaacatgc

SEQ ID NO: 4501824 - DNA, 25 bp, Homo sapien
gcaacagtttgtggatagcttgtaa

SEQ ID NO: 4501825 - DNA, 25 bp, Homo sapien
gatcaaaaagtagtccacccgagaa

SEQ ID NO: 4501826 - DNA, 25 bp, Homo sapien
aactctaaatgtgtggtctcacctg

SEQ ID NO: 4501827 - DNA, 25 bp, Homo sapien
gagcttgctgacacatgacattgta

SEQ ID NO: 4501828 - DNA, 25 bp, Homo sapien
atagtctggcccctatgatcttttc

SEQ ID NO: 4501829 - DNA, 25 bp, Homo sapien
gatcttttctacattccatttctcc

SEQ ID NO: 4501830 - DNA, 25 bp, Homo sapien
tctggcccctatgatcttttctaca

SEQ ID NO: 4501831 - DNA, 25 bp, Homo sapien
agtctggcccctatgatcttttcta

SEQ ID NO: 4501832 - DNA, 25 bp, Homo sapien
aacaagctgtatcgattgacatccc

SEQ ID NO: 4501833 - DNA, 25 bp, Homo sapien
tgacatcccctagcgatgcatgaga

SEQ ID NO: 4501834 - DNA, 25 bp, Homo sapien
taggccctccacctgtgttactaaa

SEQ ID NO: 4501835 - DNA, 25 bp, Homo sapien
tctgggtcagaaggtacgacaaact

SEQ ID NO: 4501836 - DNA, 25 bp, Homo sapien
cccatcagctttcccctgcacgccc

SEQ ID NO: 4501837 - DNA, 25 bp, Homo sapien
atcagctttcccctgcacgccctca

SEQ ID NO: 4501838 - DNA, 25 bp, Homo sapien
ccctgcacgccctcatagcgctgat

SEQ ID NO: 4501839 - DNA, 25 bp, Homo sapien
ctttcccctgcacgccctcatagcg

SEQ ID NO: 4501840 - DNA, 25 bp, Homo sapien
taaaaatgtgtgagtttgtcacgaa

SEQ ID NO: 4501841 - DNA, 25 bp, Homo sapien
tgtccaccgttcagcaccagaggca

SEQ ID NO: 4501842 - DNA, 25 bp, Homo sapien
tggtcttgattcacagtgtccaccg

SEQ ID NO: 4501843 - DNA, 25 bp, Homo sapien
gagtttgtcacgaatttggtcttga

SEQ ID NO: 4501844 - DNA, 25 bp, Homo sapien
tccacaattggatggccacgcggaa

SEQ ID NO: 4501845 - DNA, 25 bp, Homo sapien
gcatctgtcagataccaggtgttga

SEQ ID NO: 4501846 - DNA, 25 bp, Homo sapien
cattactgagatcccaaaggcatcc

SEQ ID NO: 4501847 - DNA, 25 bp, Homo sapien
gatatgccgctaggacactgcagca

SEQ ID NO: 4501848 - DNA, 25 bp, Homo sapien
gaacacttgttcattagctggcact

SEQ ID NO: 4501849 - DNA, 25 bp, Homo sapien
gtgtgtcgtcaacaactgtttctgc

SEQ ID NO: 4501850 - DNA, 25 bp, Homo sapien
gctagggggtgtgtcgtcaacaact

SEQ ID NO: 4501851 - DNA, 25 bp, Homo sapien
ctgcaagcacttgctgaacacttgt

SEQ ID NO: 4501852 - DNA, 25 bp, Homo sapien
gttatcgtcattgccatgatctctg

SEQ ID NO: 4501853 - DNA, 25 bp, Homo sapien
tatcgtcattgccatgatctctgag

SEQ ID NO: 4501854 - DNA, 25 bp, Homo sapien
cttgttatcgtcattgccatgatct

SEQ ID NO: 4501855 - DNA, 25 bp, Homo sapien
tctctgagcacactcttaagcagca

SEQ ID NO: 4501856 - DNA, 25 bp, Homo sapien
tgagacccagtatcaccagagggcg

SEQ ID NO: 4501857 - DNA, 25 bp, Homo sapien
cagagggcggcttatctttggagac

SEQ ID NO: 4501858 - DNA, 25 bp, Homo sapien
tccaatgaacatgtgctgggctgcg

SEQ ID NO: 4501859 - DNA, 25 bp, Homo sapien
taggtctagcgagcattcacagctg

SEQ ID NO: 4501860 - DNA, 25 bp, Homo sapien
tgcgatcatcaggacatggagctgg

SEQ ID NO: 4501861 - DNA, 25 bp, Homo sapien
tctattctggcaaacgtgaccacaa

SEQ ID NO: 4501862 - DNA, 25 bp, Homo sapien
gcgccatcgcgtagcctctattctg

SEQ ID NO: 4501863 - DNA, 25 bp, Homo sapien
tcttgatatttaggaggcaggacaa

SEQ ID NO: 4501864 - DNA, 25 bp, Homo sapien
gactccagtgtttctatgccttctt

SEQ ID NO: 4501865 - DNA, 25 bp, Homo sapien
aagtccatctgtgggaagaactgcc

SEQ ID NO: 4501866 - DNA, 25 bp, Homo sapien
tggcacatgctcaaagttaaaagtc

SEQ ID NO: 4501867 - DNA, 25 bp, Homo sapien
tcctccagctgacacatatcatgtt

SEQ ID NO: 4501868 - DNA, 25 bp, Homo sapien
cataggagctagtgtcttctgggaa

SEQ ID NO: 4501869 - DNA, 25 bp, Homo sapien
taattatatgaggaggtgggcctac

SEQ ID NO: 4501870 - DNA, 25 bp, Homo sapien
taggtcctggtgtccaatggtccaa

SEQ ID NO: 4501871 - DNA, 25 bp, Homo sapien
gacccaggcttactgtacaaggaag

SEQ ID NO: 4501872 - DNA, 25 bp, Homo sapien
tgtcgagggtctgtgacaaatcaac

SEQ ID NO: 4501873 - DNA, 25 bp, Homo sapien
acacagggccactgcggcttggcat

SEQ ID NO: 4501874 - DNA, 25 bp, Homo sapien
tgtttcctggagattgctgtcgagg

SEQ ID NO: 4501875 - DNA, 25 bp, Homo sapien
gccactgcggcttggcatacttagt

SEQ ID NO: 4501876 - DNA, 25 bp, Homo sapien
tagctggagctgtcagtcaactctg

SEQ ID NO: 4501877 - DNA, 25 bp, Homo sapien
gctggagctgtcagtcaactctgct

SEQ ID NO: 4501878 - DNA, 25 bp, Homo sapien
agctgtcagtcaactctgcttccca

SEQ ID NO: 4501879 - DNA, 25 bp, Homo sapien
tggagctgtcagtcaactctgcttc

SEQ ID NO: 4501880 - DNA, 25 bp, Homo sapien
gaaaggatcctgtggaagggtctcc

SEQ ID NO: 4501881 - DNA, 25 bp, Homo sapien
tgaggaccctggtcatgttgaagct

SEQ ID NO: 4501882 - DNA, 25 bp, Homo sapien
ctccaaaccaaagcctggtggccat

SEQ ID NO: 4501883 - DNA, 25 bp, Homo sapien
gcaggagtgggctgctatgaggacc

SEQ ID NO: 4501884 - DNA, 25 bp, Homo sapien
gcatatgagggtgcatgaatcccat

SEQ ID NO: 4501885 - DNA, 25 bp, Homo sapien
tcatcacaacgcaatggaattaggg

SEQ ID NO: 4501886 - DNA, 25 bp, Homo sapien
taatgtgagaaatttcctcgctggg

SEQ ID NO: 4501887 - DNA, 25 bp, Homo sapien
gggagctgtcctataaatcttggtg

SEQ ID NO: 4501888 - DNA, 25 bp, Homo sapien
ccaccttcggtggttgtcacggtga

SEQ ID NO: 4501889 - DNA, 25 bp, Homo sapien
cacggccattgagatccaaagtatt

SEQ ID NO: 4501890 - DNA, 25 bp, Homo sapien
tgacctgaagctctctgttaggact

SEQ ID NO: 4501891 - DNA, 25 bp, Homo sapien
cagtgttggtcaactgacgacgcta

SEQ ID NO: 4501892 - DNA, 25 bp, Homo sapien
cacgttcttggaaggcgtgaccagc

SEQ ID NO: 4501893 - DNA, 25 bp, Homo sapien
cgtgaccagcgtgtaatttaagcaa

SEQ ID NO: 4501894 - DNA, 25 bp, Homo sapien
gatgtgccgagtatccagagtcacg

SEQ ID NO: 4501895 - DNA, 25 bp, Homo sapien
aaaatacatcttagggtcaccgcac

SEQ ID NO: 4501896 - DNA, 25 bp, Homo sapien
gcaggattccctaagagccaaaaag

SEQ ID NO: 4501897 - DNA, 25 bp, Homo sapien
gatagccctgctactcatacttgaa

SEQ ID NO: 4501898 - DNA, 25 bp, Homo sapien
cagacaaaggcaggtcctcaaggga

SEQ ID NO: 4501899 - DNA, 25 bp, Homo sapien
tctgagcataggcattccagggctt

SEQ ID NO: 4501900 - DNA, 25 bp, Homo sapien
gaagggctgccctttaagaacttga

SEQ ID NO: 4501901 - DNA, 25 bp, Homo sapien
ctgccaaaagtacctggatgggaag

SEQ ID NO: 4501902 - DNA, 25 bp, Homo sapien
gctgccctttaagaacttgaattta

SEQ ID NO: 4501903 - DNA, 25 bp, Homo sapien
agggctgccctttaagaacttgaat

SEQ ID NO: 4501904 - DNA, 25 bp, Homo sapien
tgagattgtgcctcacagaaggggc

SEQ ID NO: 4501905 - DNA, 25 bp, Homo sapien
ctgatgatgttacaggatctctaaa

SEQ ID NO: 4501906 - DNA, 25 bp, Homo sapien
tgatgatgttacaggatctctaaaa

SEQ ID NO: 4501907 - DNA, 25 bp, Homo sapien
cagaaggggctacgtcactgatgat

SEQ ID NO: 4501908 - DNA, 25 bp, Homo sapien
cccatcatgtatctcggctgacttt

SEQ ID NO: 4501909 - DNA, 25 bp, Homo sapien
tctgatctaggaatactaagcatca

SEQ ID NO: 4501910 - DNA, 25 bp, Homo sapien
ggccttcctgctggattgctccctg

SEQ ID NO: 4501911 - DNA, 25 bp, Homo sapien
taattgtgaacgcatccagtggcca

SEQ ID NO: 4501912 - DNA, 25 bp, Homo sapien
gccacttggaagtggcgtgcacctc

SEQ ID NO: 4501913 - DNA, 25 bp, Homo sapien
tcttctgctcacatgggaaagaaca

SEQ ID NO: 4501914 - DNA, 25 bp, Homo sapien
acctcttctgctcacatgggaaaga

SEQ ID NO: 4501915 - DNA, 25 bp, Homo sapien
acatctgggaggtcttatggccact

SEQ ID NO: 4501916 - DNA, 25 bp, Homo sapien
tattccaaggcagacattccagatt

SEQ ID NO: 4501917 - DNA, 25 bp, Homo sapien
tcggctctatgcgttccctcaggaa

SEQ ID NO: 4501918 - DNA, 25 bp, Homo sapien
tcattatcagtatagctcatgggac

SEQ ID NO: 4501919 - DNA, 25 bp, Homo sapien
ttccagattgttggagtaggcgcag

SEQ ID NO: 4501920 - DNA, 25 bp, Homo sapien
cttctggtctacccagaagagcctc

SEQ ID NO: 4501921 - DNA, 25 bp, Homo sapien
ccctagggtgtgagcggaggaggtg

SEQ ID NO: 4501922 - DNA, 25 bp, Homo sapien
ttctggtctacccagaagagcctcc

SEQ ID NO: 4501923 - DNA, 25 bp, Homo sapien
ggctgtgccctagggtgtgagcgga

SEQ ID NO: 4501924 - DNA, 25 bp, Homo sapien
aaatgcccctttgctagctgccagg

SEQ ID NO: 4501925 - DNA, 25 bp, Homo sapien
gtctaggaaggtcagtcacggcaca

SEQ ID NO: 4501926 - DNA, 25 bp, Homo sapien
cagcaggcattaggagcaggtcagc

SEQ ID NO: 4501927 - DNA, 25 bp, Homo sapien
aaaacggctcacacttgggatagca

SEQ ID NO: 4501928 - DNA, 25 bp, Homo sapien
taaatagacgtgactcttccgggcg

SEQ ID NO: 4501929 - DNA, 25 bp, Homo sapien
tgggtccaacaagtacctgggtgtg

SEQ ID NO: 4501930 - DNA, 25 bp, Homo sapien
tggatgggaacacaaggcgctcttg

SEQ ID NO: 4501931 - DNA, 25 bp, Homo sapien
tagttcagaaaaagggtctgtccca

SEQ ID NO: 4501932 - DNA, 25 bp, Homo sapien
gactggcaacagaacagccgtggct

SEQ ID NO: 4501933 - DNA, 25 bp, Homo sapien
caaatccttggtggcacttcagcgc

SEQ ID NO: 4501934 - DNA, 25 bp, Homo sapien
cacacagggttttcgacaactgcag

SEQ ID NO: 4501935 - DNA, 25 bp, Homo sapien
tcaacctttgaactggaactgctgg

SEQ ID NO: 4501936 - DNA, 25 bp, Homo sapien
tgtgacatgacccagggatctgctg

SEQ ID NO: 4501937 - DNA, 25 bp, Homo sapien
cctgactagcggtgttcccaggcta

SEQ ID NO: 4501938 - DNA, 25 bp, Homo sapien
tggctgcaacaaagatgcttctatt

SEQ ID NO: 4501939 - DNA, 25 bp, Homo sapien
gctgcaacaaagatgcttctattag

SEQ ID NO: 4501940 - DNA, 25 bp, Homo sapien
aaggttcagcagaaatcagcgtggc

SEQ ID NO: 4501941 - DNA, 25 bp, Homo sapien
tgcacgtgtgtgatacctataaaac

SEQ ID NO: 4501942 - DNA, 25 bp, Homo sapien
gctaggcagcctgtgattagcaaca

SEQ ID NO: 4501943 - DNA, 25 bp, Homo sapien
tcagcgtggctagttcacaaagaat

SEQ ID NO: 4501944 - DNA, 25 bp, Homo sapien
gatgtgcttagagctggtcagcccc

SEQ ID NO: 4501945 - DNA, 25 bp, Homo sapien
cattttggcgttacctgtgtcagag

SEQ ID NO: 4501946 - DNA, 25 bp, Homo sapien
caagaatctaaaacaagcctgaagg

SEQ ID NO: 4501947 - DNA, 25 bp, Homo sapien
tactggatctacacattggacccca

SEQ ID NO: 4501948 - DNA, 25 bp, Homo sapien
tatttcctctctggactgtcacaga

SEQ ID NO: 4501949 - DNA, 25 bp, Homo sapien
tatcaccgtgattgtgggatctgca

SEQ ID NO: 4501950 - DNA, 25 bp, Homo sapien
attttatgacatgagaaagtaacat

SEQ ID NO: 4501951 - DNA, 25 bp, Homo sapien
cagggttgaggagttatcaccgtga

SEQ ID NO: 4501952 - DNA, 25 bp, Homo sapien
agagcagtcccgtgggatgcccaga

SEQ ID NO: 4501953 - DNA, 25 bp, Homo sapien
acacggatgtagacagcaacctggg

SEQ ID NO: 4501954 - DNA, 25 bp, Homo sapien
tatgtgtgggcgtttcttaagcaca

SEQ ID NO: 4501955 - DNA, 25 bp, Homo sapien
taggggatccccgtaagattcagag

SEQ ID NO: 4501956 - DNA, 25 bp, Homo sapien
gacatgtcactctcctcgtgtggga

SEQ ID NO: 4501957 - DNA, 25 bp, Homo sapien
tgagggctattttgcctgccggaca

SEQ ID NO: 4501958 - DNA, 25 bp, Homo sapien
gcttcttgtaaaacatgggccagaa

SEQ ID NO: 4501959 - DNA, 25 bp, Homo sapien
tgtgggatggttgtaacccagtgtc

SEQ ID NO: 4501960 - DNA, 25 bp, Homo sapien
agctgccagggtgccagacgctact

SEQ ID NO: 4501961 - DNA, 25 bp, Homo sapien
tgccagggtgccagacgctactgac

SEQ ID NO: 4501962 - DNA, 25 bp, Homo sapien
ctgccagggtgccagacgctactga

SEQ ID NO: 4501963 - DNA, 25 bp, Homo sapien
tcagctgccagggtgccagacgcta

SEQ ID NO: 4501964 - DNA, 25 bp, Homo sapien
caggcttcctcgtggtcttctgagg

SEQ ID NO: 4501965 - DNA, 25 bp, Homo sapien
tcttctgagggcgaactgttaggag

SEQ ID NO: 4501966 - DNA, 25 bp, Homo sapien
cctgggcggtgggtatagaaacaat

SEQ ID NO: 4501967 - DNA, 25 bp, Homo sapien
catcggcagatggacagctgcctgg

SEQ ID NO: 4501968 - DNA, 25 bp, Homo sapien
taggctgacaatgactgccatattg

SEQ ID NO: 4501969 - DNA, 25 bp, Homo sapien
gctgacaatgactgccatattggca

SEQ ID NO: 4501970 - DNA, 25 bp, Homo sapien
ctaggctgacaatgactgccatatt

SEQ ID NO: 4501971 - DNA, 25 bp, Homo sapien
ggctgacaatgactgccatattggc

SEQ ID NO: 4501972 - DNA, 25 bp, Homo sapien
ttattcactgtcaggacgagagcag

SEQ ID NO: 4501973 - DNA, 25 bp, Homo sapien
gacatacctgggactaggaaatgta

SEQ ID NO: 4501974 - DNA, 25 bp, Homo sapien
cacgtggagagacctgctctgatct

SEQ ID NO: 4501975 - DNA, 25 bp, Homo sapien
gtgattcagttacctaccgagtccc

SEQ ID NO: 4501976 - DNA, 25 bp, Homo sapien
cactccagcagagcgagtggaaatg

SEQ ID NO: 4501977 - DNA, 25 bp, Homo sapien
gatgaagatgaggactccacagtat

SEQ ID NO: 4501978 - DNA, 25 bp, Homo sapien
atggcgccactaaatgaagaggatg

SEQ ID NO: 4501979 - DNA, 25 bp, Homo sapien
gatgaggactccacagtattcgaca

SEQ ID NO: 4501980 - DNA, 25 bp, Homo sapien
gccttattttagctcagcaggctca

SEQ ID NO: 4501981 - DNA, 25 bp, Homo sapien
ttataggtgtcagggattcactccc

SEQ ID NO: 4501982 - DNA, 25 bp, Homo sapien
cagggccaatgactacacgaggcat

SEQ ID NO: 4501983 - DNA, 25 bp, Homo sapien
tgcagaggctggcattaaagcatca

SEQ ID NO: 4501984 - DNA, 25 bp, Homo sapien
tggtgacccgcatttccatcctcct

SEQ ID NO: 4501985 - DNA, 25 bp, Homo sapien
cagcagtggcgacgccttggtgacc

SEQ ID NO: 4501986 - DNA, 25 bp, Homo sapien
ctcaaggcagccgtgatcgtggcgt

SEQ ID NO: 4501987 - DNA, 25 bp, Homo sapien
tgcggatcctggagctcagccgcgc

SEQ ID NO: 4501988 - DNA, 25 bp, Homo sapien
agcttcctgccaagcaccgcgcagc

SEQ ID NO: 4501989 - DNA, 25 bp, Homo sapien
gactccttgcaacgtgttggtggtg

SEQ ID NO: 4501990 - DNA, 25 bp, Homo sapien
cacggggtctcaagtcccgaggaat

SEQ ID NO: 4501991 - DNA, 25 bp, Homo sapien
gcggcccgtcgaatgactccttgca

SEQ ID NO: 4501992 - DNA, 25 bp, Homo sapien
caagtgtcatcgtggcagttgctgc

SEQ ID NO: 4501993 - DNA, 25 bp, Homo sapien
tgaaacgtgtaacacagggccagcc

SEQ ID NO: 4501994 - DNA, 25 bp, Homo sapien
ggtgccaagtcagctatcaaatgtg

SEQ ID NO: 4501995 - DNA, 25 bp, Homo sapien
tatgcgttgcataggacatcaggca

SEQ ID NO: 4501996 - DNA, 25 bp, Homo sapien
tcccagtccggttcgtaagcagagg

SEQ ID NO: 4501997 - DNA, 25 bp, Homo sapien
tcacatcccagtccggttcgtaagc

SEQ ID NO: 4501998 - DNA, 25 bp, Homo sapien
gattcacatcccagtccggttcgta

SEQ ID NO: 4501999 - DNA, 25 bp, Homo sapien
cagagattcacatcccagtccggtt

SEQ ID NO: 4502000 - DNA, 25 bp, Homo sapien
gaggcagcaagccaattattccccg

SEQ ID NO: 4502001 - DNA, 25 bp, Homo sapien
gcaagccaattattccccggagaaa

SEQ ID NO: 4502002 - DNA, 25 bp, Homo sapien
tgggcctcccactagaacttcctta

SEQ ID NO: 4502003 - DNA, 25 bp, Homo sapien
ggaatggctcctagtacttcaggta

SEQ ID NO: 4502004 - DNA, 25 bp, Homo sapien
ggctccagtccaacagccagtgcag

SEQ ID NO: 4502005 - DNA, 25 bp, Homo sapien
tctgaagcagagaacccaggtaacc

SEQ ID NO: 4502006 - DNA, 25 bp, Homo sapien
caagttgctatgttggaagggcccc

SEQ ID NO: 4502007 - DNA, 25 bp, Homo sapien
tctccttgagtgtggataaaacctg

SEQ ID NO: 4502008 - DNA, 25 bp, Homo sapien
gctgtgatagctgaggtttatgcct

SEQ ID NO: 4502009 - DNA, 25 bp, Homo sapien
aaatcatggaatcagaggtgtttct

SEQ ID NO: 4502010 - DNA, 25 bp, Homo sapien
tacaaaaataagaggctgtgatagc

SEQ ID NO: 4502011 - DNA, 25 bp, Homo sapien
aggacctctttgctgtatcgtgcag

SEQ ID NO: 4502012 - DNA, 25 bp, Homo sapien
gaaaaggcactaacgccatgggagt

SEQ ID NO: 4502013 - DNA, 25 bp, Homo sapien
ggtgatgtagaagtgccctcttgtc

SEQ ID NO: 4502014 - DNA, 25 bp, Homo sapien
taaacgatatccacagtagtacaca

SEQ ID NO: 4502015 - DNA, 25 bp, Homo sapien
tccccttctggtgaataagggacca

SEQ ID NO: 4502016 - DNA, 25 bp, Homo sapien
ggactcttccttggcggcgccttcg

SEQ ID NO: 4502017 - DNA, 25 bp, Homo sapien
cggggaaggcgcgtgccgggtgcct

SEQ ID NO: 4502018 - DNA, 25 bp, Homo sapien
ggcgccttcggcggagctgaccttc

SEQ ID NO: 4502019 - DNA, 25 bp, Homo sapien
gcggcgcgccgagagccttcgcgaa

SEQ ID NO: 4502020 - DNA, 25 bp, Homo sapien
caggaaatgatttcacctcttaaaa

SEQ ID NO: 4502021 - DNA, 25 bp, Homo sapien
actgatgagacatggtatatggtta

SEQ ID NO: 4502022 - DNA, 25 bp, Homo sapien
gtcagagcctcccataattcaatat

SEQ ID NO: 4502023 - DNA, 25 bp, Homo sapien
ccacactactttctggttgtaccaa

SEQ ID NO: 4502024 - DNA, 25 bp, Homo sapien
aagatgttacagagtacacacaatt

SEQ ID NO: 4502025 - DNA, 25 bp, Homo sapien
caatagcacgtacactacatgttca

SEQ ID NO: 4502026 - DNA, 25 bp, Homo sapien
cagagagcgccatgatcaaagagtg

SEQ ID NO: 4502027 - DNA, 25 bp, Homo sapien
tccttaagaggttatcaagtaccag

SEQ ID NO: 4502028 - DNA, 25 bp, Homo sapien
taaccagttcggtggcatggagtgc

SEQ ID NO: 4502029 - DNA, 25 bp, Homo sapien
cactcagccgttgcgtatatgggcg

SEQ ID NO: 4502030 - DNA, 25 bp, Homo sapien
tcgcgtccgtgaaatgataactccc

SEQ ID NO: 4502031 - DNA, 25 bp, Homo sapien
catagaagcggaatgccacagtccc

SEQ ID NO: 4502032 - DNA, 25 bp, Homo sapien
tgaggaaagcgcgcgcgggacgcgg

SEQ ID NO: 4502033 - DNA, 25 bp, Homo sapien
aagcggcgctcgcgcccggactccg

SEQ ID NO: 4502034 - DNA, 25 bp, Homo sapien
agcctctgaggaaagcgcgcgcggg

SEQ ID NO: 4502035 - DNA, 25 bp, Homo sapien
gaagcggcgctcgcgcccggactcc

SEQ ID NO: 4502036 - DNA, 25 bp, Homo sapien
gcggaggcggaggcttcctcaggcc

SEQ ID NO: 4502037 - DNA, 25 bp, Homo sapien
gaggcggaggcttcctcaggcccac

SEQ ID NO: 4502038 - DNA, 25 bp, Homo sapien
agggggagaaagcagcggcggaggc

SEQ ID NO: 4502039 - DNA, 25 bp, Homo sapien
gaagggggagaaagcagcggcggag

SEQ ID NO: 4502040 - DNA, 25 bp, Homo sapien
gggcaaccttttcaccagcttcgca

SEQ ID NO: 4502041 - DNA, 25 bp, Homo sapien
agcttccgctctctccgggcaacct

SEQ ID NO: 4502042 - DNA, 25 bp, Homo sapien
cagcttcgcacagactttccgcccg

SEQ ID NO: 4502043 - DNA, 25 bp, Homo sapien
ttcgcacagactttccgcccggcac

SEQ ID NO: 4502044 - DNA, 25 bp, Homo sapien
ctgggcaggggcgctttgcccatcc

SEQ ID NO: 4502045 - DNA, 25 bp, Homo sapien
ggttctgcggcggggcggctgggca

SEQ ID NO: 4502046 - DNA, 25 bp, Homo sapien
cggttctgcggcggggcggctgggc

SEQ ID NO: 4502047 - DNA, 25 bp, Homo sapien
cggctgggcaggggcgctttgccca

SEQ ID NO: 4502048 - DNA, 25 bp, Homo sapien
tcagcgccaaaggggcgcccggggc

SEQ ID NO: 4502049 - DNA, 25 bp, Homo sapien
cagcgccaaaggggcgcccggggcg

SEQ ID NO: 4502050 - DNA, 25 bp, Homo sapien
gcccggggcgggcaggcgcgtgtac

SEQ ID NO: 4502051 - DNA, 25 bp, Homo sapien
ggcgcccggggcgggcaggcgcgtg

SEQ ID NO: 4502052 - DNA, 25 bp, Homo sapien
cccaagtcgtttctgaaaggcaaga

SEQ ID NO: 4502053 - DNA, 25 bp, Homo sapien
gatccgcattttgtggctgtttaag

SEQ ID NO: 4502054 - DNA, 25 bp, Homo sapien
tactagagacctaaaagatccgcat

SEQ ID NO: 4502055 - DNA, 25 bp, Homo sapien
gcctacttgcaccttacttgttgag

SEQ ID NO: 4502056 - DNA, 25 bp, Homo sapien
ggtatctccatgattggcctcttta

SEQ ID NO: 4502057 - DNA, 25 bp, Homo sapien
tctttgaggccatctataggaatac

SEQ ID NO: 4502058 - DNA, 25 bp, Homo sapien
agctcttgctgatctttgaggccat

SEQ ID NO: 4502059 - DNA, 25 bp, Homo sapien
aatactaaagatggtggcattttcc

SEQ ID NO: 4502060 - DNA, 25 bp, Homo sapien
ctggtcccatctgaactttaaagta

SEQ ID NO: 4502061 - DNA, 25 bp, Homo sapien
tctggtcccatctgaactttaaagt

SEQ ID NO: 4502062 - DNA, 25 bp, Homo sapien
ttctggtcccatctgaactttaaag

SEQ ID NO: 4502063 - DNA, 25 bp, Homo sapien
tgaccaggtggttgacagctgtctc

SEQ ID NO: 4502064 - DNA, 25 bp, Homo sapien
ccatgctggttttgcgtcttcaaga

SEQ ID NO: 4502065 - DNA, 25 bp, Homo sapien
catggttggtcagaaaaggagctaa

SEQ ID NO: 4502066 - DNA, 25 bp, Homo sapien
aatttgtagaaaaagtggcccatgc

SEQ ID NO: 4502067 - DNA, 25 bp, Homo sapien
gtgtaggcagaaccccgggcctgaa

SEQ ID NO: 4502068 - DNA, 25 bp, Homo sapien
gtctgtgtaggcagaaccccgggcc

SEQ ID NO: 4502069 - DNA, 25 bp, Homo sapien
aagacgctctttaggaagtcacaga

SEQ ID NO: 4502070 - DNA, 25 bp, Homo sapien
tcctcatctatgaagacgctcttta

SEQ ID NO: 4502071 - DNA, 25 bp, Homo sapien
cctagatgtgcttaaggttgagcct

SEQ ID NO: 4502072 - DNA, 25 bp, Homo sapien
agttgctgggttcagtaggctccta

SEQ ID NO: 4502073 - DNA, 25 bp, Homo sapien
tttcaaagagacactggtccagtcg

SEQ ID NO: 4502074 - DNA, 25 bp, Homo sapien
tctagggtggttaaaaagctgccca

SEQ ID NO: 4502075 - DNA, 25 bp, Homo sapien
cttgattatggtcctacagattttc

SEQ ID NO: 4502076 - DNA, 25 bp, Homo sapien
agcttgattatggtcctacagattt

SEQ ID NO: 4502077 - DNA, 25 bp, Homo sapien
gcttgattatggtcctacagatttt

SEQ ID NO: 4502078 - DNA, 25 bp, Homo sapien
ctctcctaagcgagcaagctctgcg

SEQ ID NO: 4502079 - DNA, 25 bp, Homo sapien
tccacttcagttgctcagcaaagtc

SEQ ID NO: 4502080 - DNA, 25 bp, Homo sapien
cttcagttgctcagcaaagtccaaa

SEQ ID NO: 4502081 - DNA, 25 bp, Homo sapien
caagctctgcgctccacttcagttg

SEQ ID NO: 4502082 - DNA, 25 bp, Homo sapien
tcaggagagtctcttggccccgtgg

SEQ ID NO: 4502083 - DNA, 25 bp, Homo sapien
gtgtcaggagagtctcttggccccg

SEQ ID NO: 4502084 - DNA, 25 bp, Homo sapien
ggagagtctcttggccccgtgggct

SEQ ID NO: 4502085 - DNA, 25 bp, Homo sapien
ctggtgtcaggagagtctcttggcc

SEQ ID NO: 4502086 - DNA, 25 bp, Homo sapien
atctttacacgagagggatgacctc

SEQ ID NO: 4502087 - DNA, 25 bp, Homo sapien
tgatgatgttcacaagccacccgtg

SEQ ID NO: 4502088 - DNA, 25 bp, Homo sapien
cacagaatcacccatcaatgggttt

SEQ ID NO: 4502089 - DNA, 25 bp, Homo sapien
caagccacccgtggctgatgaggtt

SEQ ID NO: 4502090 - DNA, 25 bp, Homo sapien
gctgctgctgatacaaacattaaac

SEQ ID NO: 4502091 - DNA, 25 bp, Homo sapien
tataagctgtaagagagtcgacaca

SEQ ID NO: 4502092 - DNA, 25 bp, Homo sapien
tatggtcatttttgcccctataagc

SEQ ID NO: 4502093 - DNA, 25 bp, Homo sapien
aaatacagtgaagtgcccacgtggc

SEQ ID NO: 4502094 - DNA, 25 bp, Homo sapien
tttgcccctataagctgtaagagag

SEQ ID NO: 4502095 - DNA, 25 bp, Homo sapien
ccaagaagagctggatcaaagggct

SEQ ID NO: 4502096 - DNA, 25 bp, Homo sapien
atgaagtggggaacctctccctggg

SEQ ID NO: 4502097 - DNA, 25 bp, Homo sapien
aagtggggaatccttcatgagggcc

SEQ ID NO: 4502098 - DNA, 25 bp, Homo sapien
agagctggatcaaagggctctctgg

SEQ ID NO: 4502099 - DNA, 25 bp, Homo sapien
gctacaacactcaataatgttttca

SEQ ID NO: 4502100 - DNA, 25 bp, Homo sapien
tgattttaaaattctagtggctaca

SEQ ID NO: 4502101 - DNA, 25 bp, Homo sapien
aaattctagtggctacaacactcaa

SEQ ID NO: 4502102 - DNA, 25 bp, Homo sapien
ttttaaaattctagtggctacaaca

SEQ ID NO: 4502103 - DNA, 25 bp, Homo sapien
tgcttccagactaacacatgaggcc

SEQ ID NO: 4502104 - DNA, 25 bp, Homo sapien
aaaaaagccatacggttgcctcgag

SEQ ID NO: 4502105 - DNA, 25 bp, Homo sapien
gcaaggcctgcgttatcttaggtaa

SEQ ID NO: 4502106 - DNA, 25 bp, Homo sapien
gaatcgagggcacgtaagtttccac

SEQ ID NO: 4502107 - DNA, 25 bp, Homo sapien
ccgactggtaagcacgctggcagct

SEQ ID NO: 4502108 - DNA, 25 bp, Homo sapien
aaacgccacgataaagagttttctg

SEQ ID NO: 4502109 - DNA, 25 bp, Homo sapien
tgtcctccttgtttgcacggagcag

SEQ ID NO: 4502110 - DNA, 25 bp, Homo sapien
ctttgcggaactgcgccgcgggatt

SEQ ID NO: 4502111 - DNA, 25 bp, Homo sapien
tataccatcacactctgagtagctg

SEQ ID NO: 4502112 - DNA, 25 bp, Homo sapien
tgtctttcagcactagatccgtgga

SEQ ID NO: 4502113 - DNA, 25 bp, Homo sapien
cacaccggctcttttgcatctcaaa

SEQ ID NO: 4502114 - DNA, 25 bp, Homo sapien
gaaaatggaccctggaccaactgcc

SEQ ID NO: 4502115 - DNA, 25 bp, Homo sapien
tccagtgatctaccctgcccggcct

SEQ ID NO: 4502116 - DNA, 25 bp, Homo sapien
cctccagtgatctaccctgcccggc

SEQ ID NO: 4502117 - DNA, 25 bp, Homo sapien
ccagtgatctaccctgcccggcctc

SEQ ID NO: 4502118 - DNA, 25 bp, Homo sapien
gacctccagtgatctaccctgcccg

SEQ ID NO: 4502119 - DNA, 25 bp, Homo sapien
gcaaatcgttagacattttcccaac

SEQ ID NO: 4502120 - DNA, 25 bp, Homo sapien
cagacccttgactgcccatcagagg

SEQ ID NO: 4502121 - DNA, 25 bp, Homo sapien
ttgactgcccatcagaggcatcctt

SEQ ID NO: 4502122 - DNA, 25 bp, Homo sapien
cattaatataaatatcactctggcc

SEQ ID NO: 4502123 - DNA, 25 bp, Homo sapien
ccacacatgggataagtgctgtaat

SEQ ID NO: 4502124 - DNA, 25 bp, Homo sapien
aaagtctgggagtatgaaagaagga

SEQ ID NO: 4502125 - DNA, 25 bp, Homo sapien
ttccacacatgggataagtgctgta

SEQ ID NO: 4502126 - DNA, 25 bp, Homo sapien
caagtaaacaccgtgaaaagtctgg

SEQ ID NO: 4502127 - DNA, 25 bp, Homo sapien
ccaggatatatcctacgggagtcca

SEQ ID NO: 4502128 - DNA, 25 bp, Homo sapien
cggaagtagagctcttgacacatta

SEQ ID NO: 4502129 - DNA, 25 bp, Homo sapien
tttttgcaacgtaaacatccaggat

SEQ ID NO: 4502130 - DNA, 25 bp, Homo sapien
gaaatattggtctcccggaagtaga

SEQ ID NO: 4502131 - DNA, 25 bp, Homo sapien
tctcatatctagcttgatggtattc

SEQ ID NO: 4502132 - DNA, 25 bp, Homo sapien
tctagcttgatggtattcttcctct

SEQ ID NO: 4502133 - DNA, 25 bp, Homo sapien
catatctagcttgatggtattcttc

SEQ ID NO: 4502134 - DNA, 25 bp, Homo sapien
tatctagcttgatggtattcttcct

SEQ ID NO: 4502135 - DNA, 25 bp, Homo sapien
caagttgtcggtgtcttgctggtac

SEQ ID NO: 4502136 - DNA, 25 bp, Homo sapien
tcaacggagcacatggagattgttc

SEQ ID NO: 4502137 - DNA, 25 bp, Homo sapien
aagtgattcctctctgcggaagagg

SEQ ID NO: 4502138 - DNA, 25 bp, Homo sapien
taagacaaccggaaggcaagttgtc

SEQ ID NO: 4502139 - DNA, 25 bp, Homo sapien
tcacgtgtggtagtccttctttgct

SEQ ID NO: 4502140 - DNA, 25 bp, Homo sapien
tgcagaacttgaacgcaggctctgt

SEQ ID NO: 4502141 - DNA, 25 bp, Homo sapien
caggctctgtcttatgctcggtata

SEQ ID NO: 4502142 - DNA, 25 bp, Homo sapien
gcacaggttatgtcgcacacagcat

SEQ ID NO: 4502143 - DNA, 25 bp, Homo sapien
cccgccgcggccattggctccacga

SEQ ID NO: 4502144 - DNA, 25 bp, Homo sapien
cgcccgccgcggccattggctccac

SEQ ID NO: 4502145 - DNA, 25 bp, Homo sapien
ccgccgcggccattggctccacgag

SEQ ID NO: 4502146 - DNA, 25 bp, Homo sapien
cgcggccattggctccacgagcttc

SEQ ID NO: 4502147 - DNA, 25 bp, Homo sapien
gcggcaggagctccgccgcgctcca

SEQ ID NO: 4502148 - DNA, 25 bp, Homo sapien
atggcctcttcgctgcggcggcagc

SEQ ID NO: 4502149 - DNA, 25 bp, Homo sapien
acacaacatggcctcttcgctgcgg

SEQ ID NO: 4502150 - DNA, 25 bp, Homo sapien
aacatggcctcttcgctgcggcggc

SEQ ID NO: 4502151 - DNA, 25 bp, Homo sapien
gcggcggaacgcctgacagctcggg

SEQ ID NO: 4502152 - DNA, 25 bp, Homo sapien
tctgccgcgggctgtgacgccgacg

SEQ ID NO: 4502153 - DNA, 25 bp, Homo sapien
accgcagcggcgctttcggcgtcgt

SEQ ID NO: 4502154 - DNA, 25 bp, Homo sapien
gcctgctggccgtccgggcgtagct

SEQ ID NO: 4502155 - DNA, 25 bp, Homo sapien
caggaccctacgactcgggcccagg

SEQ ID NO: 4502156 - DNA, 25 bp, Homo sapien
accgaggcgcatcccgccggcgaga

SEQ ID NO: 4502157 - DNA, 25 bp, Homo sapien
cacggaggggcagtgcgagaagagc

SEQ ID NO: 4502158 - DNA, 25 bp, Homo sapien
ggcagtgcgagaagagccgagcggc

SEQ ID NO: 4502159 - DNA, 25 bp, Homo sapien
gatccagtcccggcgacgaggctgc

SEQ ID NO: 4502160 - DNA, 25 bp, Homo sapien
ttcccggcggatccagtcccggcga

SEQ ID NO: 4502161 - DNA, 25 bp, Homo sapien
tgccgcccgcgggctctgcagcggg

SEQ ID NO: 4502162 - DNA, 25 bp, Homo sapien
ccggcggatccagtcccggcgacga

SEQ ID NO: 4502163 - DNA, 25 bp, Homo sapien
ccttcgggctctcgccggcattcac

SEQ ID NO: 4502164 - DNA, 25 bp, Homo sapien
ggctctcgccggcattcacccgccg

SEQ ID NO: 4502165 - DNA, 25 bp, Homo sapien
ctctccacgcccgatccccttcggg

SEQ ID NO: 4502166 - DNA, 25 bp, Homo sapien
gcccgatccccttcgggctctcgcc

SEQ ID NO: 4502167 - DNA, 25 bp, Homo sapien
attgttcttttaaattcgatcatga

SEQ ID NO: 4502168 - DNA, 25 bp, Homo sapien
tcatgaagatgagttcccacctcac

SEQ ID NO: 4502169 - DNA, 25 bp, Homo sapien
tagtcagggttccattgttctttta

SEQ ID NO: 4502170 - DNA, 25 bp, Homo sapien
attcgatcatgaagatgagttccca

SEQ ID NO: 4502171 - DNA, 25 bp, Homo sapien
cttcgcatgtatcactgcagccgtt

SEQ ID NO: 4502172 - DNA, 25 bp, Homo sapien
ttcgcatgtatcactgcagccgttt

SEQ ID NO: 4502173 - DNA, 25 bp, Homo sapien
caaatgcaacaaatatggctcctct

SEQ ID NO: 4502174 - DNA, 25 bp, Homo sapien
gaattgacccaagtacgttctaaca

SEQ ID NO: 4502175 - DNA, 25 bp, Homo sapien
ttcatcgcccattaccgagagcagt

SEQ ID NO: 4502176 - DNA, 25 bp, Homo sapien
acattcaggtgtgagaagttgcaga

SEQ ID NO: 4502177 - DNA, 25 bp, Homo sapien
gatgtactatgtaagtctgcccaac

SEQ ID NO: 4502178 - DNA, 25 bp, Homo sapien
taacatgtaccactataggaaggct

SEQ ID NO: 4502179 - DNA, 25 bp, Homo sapien
caagatatgcgcaactgatgtaaca

SEQ ID NO: 4502180 - DNA, 25 bp, Homo sapien
caagagctccgcagaatgaagacaa

SEQ ID NO: 4502181 - DNA, 25 bp, Homo sapien
tctatgggcaaactgaagagatggc

SEQ ID NO: 4502182 - DNA, 25 bp, Homo sapien
gagatggctcatggacacataacct

SEQ ID NO: 4502183 - DNA, 25 bp, Homo sapien
tacatttatggttgcagttatttct

SEQ ID NO: 4502184 - DNA, 25 bp, Homo sapien
gcatttcttggccaacgattcagtg

SEQ ID NO: 4502185 - DNA, 25 bp, Homo sapien
cattatttgttcagaaccaacagca

SEQ ID NO: 4502186 - DNA, 25 bp, Homo sapien
ctcattatttgttcagaaccaacag

SEQ ID NO: 4502187 - DNA, 25 bp, Homo sapien
agaactcattatttgttcagaacca

SEQ ID NO: 4502188 - DNA, 25 bp, Homo sapien
aactcattatttgttcagaaccaac

SEQ ID NO: 4502189 - DNA, 25 bp, Homo sapien
ctttatcctctaggataaaactcca

SEQ ID NO: 4502190 - DNA, 25 bp, Homo sapien
tcctttatcctctaggataaaactc

SEQ ID NO: 4502191 - DNA, 25 bp, Homo sapien
aactccaacgtctcagtcttcaaaa

SEQ ID NO: 4502192 - DNA, 25 bp, Homo sapien
taaaactccaacgtctcagtcttca

SEQ ID NO: 4502193 - DNA, 25 bp, Homo sapien
gaagtgttttcaatgtcaggcaaag

SEQ ID NO: 4502194 - DNA, 25 bp, Homo sapien
taagaatcctacgatcagcaaatgc

SEQ ID NO: 4502195 - DNA, 25 bp, Homo sapien
taaattacatgcatcgactgtcttg

SEQ ID NO: 4502196 - DNA, 25 bp, Homo sapien
tcctttcagtgataagtagtctaca

SEQ ID NO: 4502197 - DNA, 25 bp, Homo sapien
taatatcacatcaattgcacagagg

SEQ ID NO: 4502198 - DNA, 25 bp, Homo sapien
tttccttaacagtgcccaatgacag

SEQ ID NO: 4502199 - DNA, 25 bp, Homo sapien
tacacccaagtttgatcgaactgca

SEQ ID NO: 4502200 - DNA, 25 bp, Homo sapien
tggaataagccaacaccaagtattg

SEQ ID NO: 4502201 - DNA, 25 bp, Homo sapien
caaaagataaagagacgtcctcaac

SEQ ID NO: 4502202 - DNA, 25 bp, Homo sapien
agtatcaccttggttcttaagcaga

SEQ ID NO: 4502203 - DNA, 25 bp, Homo sapien
taggtctcctgaatgccgaaacgtg

SEQ ID NO: 4502204 - DNA, 25 bp, Homo sapien
tgtgattacacagcatggctccttt

SEQ ID NO: 4502205 - DNA, 25 bp, Homo sapien
cagatctgtcaagcaacatacaagg

SEQ ID NO: 4502206 - DNA, 25 bp, Homo sapien
gaagcattcaatctggaaggaggta

SEQ ID NO: 4502207 - DNA, 25 bp, Homo sapien
tatgattactatgtagcacacgctt

SEQ ID NO: 4502208 - DNA, 25 bp, Homo sapien
gacagtacaattccttaatcgcttc

SEQ ID NO: 4502209 - DNA, 25 bp, Homo sapien
gcatcatcacaagaattagacacta

SEQ ID NO: 4502210 - DNA, 25 bp, Homo sapien
gagcaaaattcagcttaggcagact

SEQ ID NO: 4502211 - DNA, 25 bp, Homo sapien
taatgtaatctaccatagcatctcc

SEQ ID NO: 4502212 - DNA, 25 bp, Homo sapien
taccagtagatagggttctcacacc

SEQ ID NO: 4502213 - DNA, 25 bp, Homo sapien
gacagacaaatcgtaaaccaagtaa

SEQ ID NO: 4502214 - DNA, 25 bp, Homo sapien
tgtgaagacagacaaatcgtaaacc

SEQ ID NO: 4502215 - DNA, 25 bp, Homo sapien
ggttttgtgaagacagacaaatcgt

SEQ ID NO: 4502216 - DNA, 25 bp, Homo sapien
ttataagtaacagagggttttgtga

SEQ ID NO: 4502217 - DNA, 25 bp, Homo sapien
ggaaagtttacattgcccacctgta

SEQ ID NO: 4502218 - DNA, 25 bp, Homo sapien
aaatgtcaacatcttgcaagggtca

SEQ ID NO: 4502219 - DNA, 25 bp, Homo sapien
caagcgtaagtttcagcccctaaga

SEQ ID NO: 4502220 - DNA, 25 bp, Homo sapien
ataaaaatgtatccggccaggcccg

SEQ ID NO: 4502221 - DNA, 25 bp, Homo sapien
gaggattcagtttgaggttcatatt

SEQ ID NO: 4502222 - DNA, 25 bp, Homo sapien
tgtatggggcctttagaggattcag

SEQ ID NO: 4502223 - DNA, 25 bp, Homo sapien
aatgtttccaccaatgtctacttca

SEQ ID NO: 4502224 - DNA, 25 bp, Homo sapien
tgtctacttcattgtatggggcctt

SEQ ID NO: 4502225 - DNA, 25 bp, Homo sapien
tatttcagaggtgctaaccatgtct

SEQ ID NO: 4502226 - DNA, 25 bp, Homo sapien
aaactatttcagaggtgctaaccat

SEQ ID NO: 4502227 - DNA, 25 bp, Homo sapien
gaggtgctaaccatgtcttctaaca

SEQ ID NO: 4502228 - DNA, 25 bp, Homo sapien
agggacaatcaggctaaagaacttt

SEQ ID NO: 4502229 - DNA, 25 bp, Homo sapien
gttgcgatgagtcaagatcatgaca

SEQ ID NO: 4502230 - DNA, 25 bp, Homo sapien
aggttgcgatgagtcaagatcatga

SEQ ID NO: 4502231 - DNA, 25 bp, Homo sapien
gtgacagtggaactctgtctcgaaa

SEQ ID NO: 4502232 - DNA, 25 bp, Homo sapien
ctgcactccagcatgggtgacagtg

SEQ ID NO: 4502233 - DNA, 25 bp, Homo sapien
caacgcaagctaaagtagccatagg

SEQ ID NO: 4502234 - DNA, 25 bp, Homo sapien
caaaactttggctttcaggcatacc

SEQ ID NO: 4502235 - DNA, 25 bp, Homo sapien
tagcagccatttacacaacgcaagc

SEQ ID NO: 4502236 - DNA, 25 bp, Homo sapien
taaaatctatttcgcaggccctagc

SEQ ID NO: 4502237 - DNA, 25 bp, Homo sapien
caggtgtaaaattacctagagcaaa

SEQ ID NO: 4502238 - DNA, 25 bp, Homo sapien
tcgtctactgtctttaaatgtggaa

SEQ ID NO: 4502239 - DNA, 25 bp, Homo sapien
tatgatgatttcaatcttcgtctac

SEQ ID NO: 4502240 - DNA, 25 bp, Homo sapien
catccttctcatcatgtaattaaca

SEQ ID NO: 4502241 - DNA, 25 bp, Homo sapien
tggcaacaaagcttcaatgagtaac

SEQ ID NO: 4502242 - DNA, 25 bp, Homo sapien
gattgagtttacaagggctctccta

SEQ ID NO: 4502243 - DNA, 25 bp, Homo sapien
gaacacaagtacatgcctctgcacc

SEQ ID NO: 4502244 - DNA, 25 bp, Homo sapien
gtgaattactgcagacatggaagac

SEQ ID NO: 4502245 - DNA, 25 bp, Homo sapien
ttatacatcatcagtaagagtatct

SEQ ID NO: 4502246 - DNA, 25 bp, Homo sapien
tccttgataagactgcacgccaaag

SEQ ID NO: 4502247 - DNA, 25 bp, Homo sapien
tgagacctacaaactgaccttactg

SEQ ID NO: 4502248 - DNA, 25 bp, Homo sapien
ggttaactgagatactgccacccat

SEQ ID NO: 4502249 - DNA, 25 bp, Homo sapien
tagtacctacctcctgtggctgtag

SEQ ID NO: 4502250 - DNA, 25 bp, Homo sapien
tgaaactcttcaagctgactgggtg

SEQ ID NO: 4502251 - DNA, 25 bp, Homo sapien
tttagaaagtcaaatccactgtcca

SEQ ID NO: 4502252 - DNA, 25 bp, Homo sapien
catttgtgttgggtaagaaacctat

SEQ ID NO: 4502253 - DNA, 25 bp, Homo sapien
cagtggtagggtccatttgaaactc

SEQ ID NO: 4502254 - DNA, 25 bp, Homo sapien
aaaattaacatttcaagaggtcata

SEQ ID NO: 4502255 - DNA, 25 bp, Homo sapien
aaaaattaacatttcaagaggtcat

SEQ ID NO: 4502256 - DNA, 25 bp, Homo sapien
taaaaattaacatttcaagaggtca

SEQ ID NO: 4502257 - DNA, 25 bp, Homo sapien
aaattaacatttcaagaggtcatac

SEQ ID NO: 4502258 - DNA, 25 bp, Homo sapien
cggcaactacaaaggccaaagtatt

SEQ ID NO: 4502259 - DNA, 25 bp, Homo sapien
tttaccactcggcaactacaaaggc

SEQ ID NO: 4502260 - DNA, 25 bp, Homo sapien
tacactttaccactcggcaactaca

SEQ ID NO: 4502261 - DNA, 25 bp, Homo sapien
cactcggcaactacaaaggccaaag

SEQ ID NO: 4502262 - DNA, 25 bp, Homo sapien
catcctgaattttcgagcaacaagc

SEQ ID NO: 4502263 - DNA, 25 bp, Homo sapien
gaccatctaagagcacaactttgtg

SEQ ID NO: 4502264 - DNA, 25 bp, Homo sapien
aattgtgaatactccaaggacccta

SEQ ID NO: 4502265 - DNA, 25 bp, Homo sapien
gaaaggtgtttcatgaaagcacaaa

SEQ ID NO: 4502266 - DNA, 25 bp, Homo sapien
aagagcgcctccctagtgttcaagt

SEQ ID NO: 4502267 - DNA, 25 bp, Homo sapien
ttaggagagcgcacaaaaatggagg

SEQ ID NO: 4502268 - DNA, 25 bp, Homo sapien
gaaaaaacaacgacctgggctctca

SEQ ID NO: 4502269 - DNA, 25 bp, Homo sapien
tccaacaaggcacgaaaagaaagct

SEQ ID NO: 4502270 - DNA, 25 bp, Homo sapien
caagagtcctatctactagtagaaa

SEQ ID NO: 4502271 - DNA, 25 bp, Homo sapien
tgtagtatgtccaaaccaagagtcc

SEQ ID NO: 4502272 - DNA, 25 bp, Homo sapien
tgtccaaaccaagagtcctatctac

SEQ ID NO: 4502273 - DNA, 25 bp, Homo sapien
ccatgtagtatgtccaaaccaagag

SEQ ID NO: 4502274 - DNA, 25 bp, Homo sapien
tataacacaacaacggtaagcacca

SEQ ID NO: 4502275 - DNA, 25 bp, Homo sapien
caaagtcctgacgatgttaacgata

SEQ ID NO: 4502276 - DNA, 25 bp, Homo sapien
taaggtcccggcttctatcgatgct

SEQ ID NO: 4502277 - DNA, 25 bp, Homo sapien
gataaaccgaacagtggaagcatca

SEQ ID NO: 4502278 - DNA, 25 bp, Homo sapien
ttgctttgaagtcctgtgcccaggt

SEQ ID NO: 4502279 - DNA, 25 bp, Homo sapien
gtgtttgctttgaagtcctgtgccc

SEQ ID NO: 4502280 - DNA, 25 bp, Homo sapien
ctttgaagtcctgtgcccaggtatt

SEQ ID NO: 4502281 - DNA, 25 bp, Homo sapien
tttgctttgaagtcctgtgcccagg

SEQ ID NO: 4502282 - DNA, 25 bp, Homo sapien
cattgctgtgtagcgaactgtcctc

SEQ ID NO: 4502283 - DNA, 25 bp, Homo sapien
attgctgtgtagcgaactgtcctcc

SEQ ID NO: 4502284 - DNA, 25 bp, Homo sapien
gcattgctgtgtagcgaactgtcct

SEQ ID NO: 4502285 - DNA, 25 bp, Homo sapien
taccttttgactgctgtaagaggcc

SEQ ID NO: 4502286 - DNA, 25 bp, Homo sapien
gtgtggcatattagcaatctcaagg

SEQ ID NO: 4502287 - DNA, 25 bp, Homo sapien
caattgtaagctgaggtttctcccc

SEQ ID NO: 4502288 - DNA, 25 bp, Homo sapien
tctcaaggtcatgctttaaaaaacg

SEQ ID NO: 4502289 - DNA, 25 bp, Homo sapien
gataaaatacatctaccaacaggaa

SEQ ID NO: 4502290 - DNA, 25 bp, Homo sapien
caaggtactccaaggaatgtgaaac

SEQ ID NO: 4502291 - DNA, 25 bp, Homo sapien
ccaacaggaaatcaatgtcttaagc

SEQ ID NO: 4502292 - DNA, 25 bp, Homo sapien
gataaagcattccagacgactctgt

SEQ ID NO: 4502293 - DNA, 25 bp, Homo sapien
atcttagaggctttattacttcatc

SEQ ID NO: 4502294 - DNA, 25 bp, Homo sapien
tagaggctttattacttcatcacta

SEQ ID NO: 4502295 - DNA, 25 bp, Homo sapien
cttagaggctttattacttcatcac

SEQ ID NO: 4502296 - DNA, 25 bp, Homo sapien
acatcttagaggctttattacttca

SEQ ID NO: 4502297 - DNA, 25 bp, Homo sapien
gaaaatgcataaagaacacatcaaa

SEQ ID NO: 4502298 - DNA, 25 bp, Homo sapien
tatgaaaatgcataaagaacacatc

SEQ ID NO: 4502299 - DNA, 25 bp, Homo sapien
aatgcataaagaacacatcaaaaaa

SEQ ID NO: 4502300 - DNA, 25 bp, Homo sapien
aatgcattcatatgtacttttaaaa

SEQ ID NO: 4502301 - DNA, 25 bp, Homo sapien
gaaggaaaaccacataatgaatcac

SEQ ID NO: 4502302 - DNA, 25 bp, Homo sapien
gccaaatatatctggaggttctcat

SEQ ID NO: 4502303 - DNA, 25 bp, Homo sapien
cagcttaggatgagtaaaaaacttt

SEQ ID NO: 4502304 - DNA, 25 bp, Homo sapien
tctagtaatttacatgggcaattca

SEQ ID NO: 4502305 - DNA, 25 bp, Homo sapien
tgcaatgcagtatgtctgtcagcgc

SEQ ID NO: 4502306 - DNA, 25 bp, Homo sapien
tttggcgagtacacagtgcaatgca

SEQ ID NO: 4502307 - DNA, 25 bp, Homo sapien
ggcctttgaactcggcacggcaact

SEQ ID NO: 4502308 - DNA, 25 bp, Homo sapien
gcgctgcggcacaaaggaacagcca

SEQ ID NO: 4502309 - DNA, 25 bp, Homo sapien
caagtaaaaacgcatggggacaagt

SEQ ID NO: 4502310 - DNA, 25 bp, Homo sapien
tgagaaaatgtacggtaccaagtaa

SEQ ID NO: 4502311 - DNA, 25 bp, Homo sapien
taccaagtaaaaacgcatggggaca

SEQ ID NO: 4502312 - DNA, 25 bp, Homo sapien
aactgagaaaatgtacggtaccaag

SEQ ID NO: 4502313 - DNA, 25 bp, Homo sapien
ggaggtctctcataactgtcagttg

SEQ ID NO: 4502314 - DNA, 25 bp, Homo sapien
gcaatgttgactactttgaccccag

SEQ ID NO: 4502315 - DNA, 25 bp, Homo sapien
tattttaaacggcaaggatacagag

SEQ ID NO: 4502316 - DNA, 25 bp, Homo sapien
gaattcagtctctacacaaaaaggg

SEQ ID NO: 4502317 - DNA, 25 bp, Homo sapien
caagggttaaagtacacgaagtgct

SEQ ID NO: 4502318 - DNA, 25 bp, Homo sapien
tttgaaaacacacggagatactgca

SEQ ID NO: 4502319 - DNA, 25 bp, Homo sapien
tccagaggtcctaactcaagcagct

SEQ ID NO: 4502320 - DNA, 25 bp, Homo sapien
ggtatgcctagaactggatctgcca

SEQ ID NO: 4502321 - DNA, 25 bp, Homo sapien
taatttggaccgagctcctagaccc

SEQ ID NO: 4502322 - DNA, 25 bp, Homo sapien
tgatcagttctaaggtgcaggcccc

SEQ ID NO: 4502323 - DNA, 25 bp, Homo sapien
gaccctccttccagtgttaaacaga

SEQ ID NO: 4502324 - DNA, 25 bp, Homo sapien
taaacagaatctatggaaggccact

SEQ ID NO: 4502325 - DNA, 25 bp, Homo sapien
tgaatacacaagttccatgtgagaa

SEQ ID NO: 4502326 - DNA, 25 bp, Homo sapien
tgtgtaagatgcacactggtttggc

SEQ ID NO: 4502327 - DNA, 25 bp, Homo sapien
taaatgcagcagctagattagggct

SEQ ID NO: 4502328 - DNA, 25 bp, Homo sapien
ggcttagcaaaacaacagggcagag

SEQ ID NO: 4502329 - DNA, 25 bp, Homo sapien
ggcatccgggtcttctggtcactga

SEQ ID NO: 4502330 - DNA, 25 bp, Homo sapien
ctcccaggcatccgggtcttctggt

SEQ ID NO: 4502331 - DNA, 25 bp, Homo sapien
ccaggcatccgggtcttctggtcac

SEQ ID NO: 4502332 - DNA, 25 bp, Homo sapien
catccgggtcttctggtcactgata

SEQ ID NO: 4502333 - DNA, 25 bp, Homo sapien
tgttcgactcgctgccatgtccact

SEQ ID NO: 4502334 - DNA, 25 bp, Homo sapien
tgactgcctgagtctgaacccgaag

SEQ ID NO: 4502335 - DNA, 25 bp, Homo sapien
attcagagctgctgttcgactcgct

SEQ ID NO: 4502336 - DNA, 25 bp, Homo sapien
gagtctgaacccgaagcttcttcag

SEQ ID NO: 4502337 - DNA, 25 bp, Homo sapien
ctctcagattccgactgactctcag

SEQ ID NO: 4502338 - DNA, 25 bp, Homo sapien
gactggctgggatttggaacctgct

SEQ ID NO: 4502339 - DNA, 25 bp, Homo sapien
tggaacctgctgattcgctctcaga

SEQ ID NO: 4502340 - DNA, 25 bp, Homo sapien
cagctatccgttccttcttagaggc

SEQ ID NO: 4502341 - DNA, 25 bp, Homo sapien
gaccccataaacatcaggatattct

SEQ ID NO: 4502342 - DNA, 25 bp, Homo sapien
tcttccttaatattaaatcgcgatg

SEQ ID NO: 4502343 - DNA, 25 bp, Homo sapien
tctgcttcggtttgaccgcctgacc

SEQ ID NO: 4502344 - DNA, 25 bp, Homo sapien
taaatcgcgatggttcttgtctgct

SEQ ID NO: 4502345 - DNA, 25 bp, Homo sapien
tcccactctcagacccgctacttgc

SEQ ID NO: 4502346 - DNA, 25 bp, Homo sapien
gcctcttctttttgggctcccactc

SEQ ID NO: 4502347 - DNA, 25 bp, Homo sapien
tgttttttcagctgcctctggcctc

SEQ ID NO: 4502348 - DNA, 25 bp, Homo sapien
gggctcccactctcagacccgctac

SEQ ID NO: 4502349 - DNA, 25 bp, Homo sapien
tcagattgtcaacgggatccacacc

SEQ ID NO: 4502350 - DNA, 25 bp, Homo sapien
tctcaaatgacttgccttaggccac

SEQ ID NO: 4502351 - DNA, 25 bp, Homo sapien
tttaacatgagaacccctgaactgg

SEQ ID NO: 4502352 - DNA, 25 bp, Homo sapien
caacagagcatatgtacctagagct

SEQ ID NO: 4502353 - DNA, 25 bp, Homo sapien
gcaattagtctatcagtcagacggg

SEQ ID NO: 4502354 - DNA, 25 bp, Homo sapien
tcgtatatacactctggacactggt

SEQ ID NO: 4502355 - DNA, 25 bp, Homo sapien
cagtagatgggtccttgtacaccaa

SEQ ID NO: 4502356 - DNA, 25 bp, Homo sapien
tgtaccagagtttagccaaagtcag

SEQ ID NO: 4502357 - DNA, 25 bp, Homo sapien
ctctgcactggtgccttgttcctgt

SEQ ID NO: 4502358 - DNA, 25 bp, Homo sapien
tctctgcactggtgccttgttcctg

SEQ ID NO: 4502359 - DNA, 25 bp, Homo sapien
tctggggacaggtcttctggctttt

SEQ ID NO: 4502360 - DNA, 25 bp, Homo sapien
cttctggggacaggtcttctggctt

SEQ ID NO: 4502361 - DNA, 25 bp, Homo sapien
tggggacaggtcttctggcttttac

SEQ ID NO: 4502362 - DNA, 25 bp, Homo sapien
ttctggggacaggtcttctggcttt

SEQ ID NO: 4502363 - DNA, 25 bp, Homo sapien
ccagtctgcgaagaaagaagcagta

SEQ ID NO: 4502364 - DNA, 25 bp, Homo sapien
gaagcagtaagacctgcaatgtagg

SEQ ID NO: 4502365 - DNA, 25 bp, Homo sapien
ctgcaatgtaggctggctgaaagtg

SEQ ID NO: 4502366 - DNA, 25 bp, Homo sapien
gatagccagtctgcgaagaaagaag

SEQ ID NO: 4502367 - DNA, 25 bp, Homo sapien
gagaaatggatactcatgatcacat

SEQ ID NO: 4502368 - DNA, 25 bp, Homo sapien
agagaaatggatactcatgatcaca

SEQ ID NO: 4502369 - DNA, 25 bp, Homo sapien
aacctaaacagatgatcaacgatgt

SEQ ID NO: 4502370 - DNA, 25 bp, Homo sapien
cagatgatcaacgatgtaataaata

SEQ ID NO: 4502371 - DNA, 25 bp, Homo sapien
ccaacaggaaggtcattctaatgct

SEQ ID NO: 4502372 - DNA, 25 bp, Homo sapien
ctattgatatacacctaaacaggca

SEQ ID NO: 4502373 - DNA, 25 bp, Homo sapien
taatcctcaatcatttatgggaaag

SEQ ID NO: 4502374 - DNA, 25 bp, Homo sapien
gatagtatctctttggtgggcaaac

SEQ ID NO: 4502375 - DNA, 25 bp, Homo sapien
gtttttagccgctcttcgacgagtc

SEQ ID NO: 4502376 - DNA, 25 bp, Homo sapien
tttctctttccacgctgagtcttcg

SEQ ID NO: 4502377 - DNA, 25 bp, Homo sapien
tgccttttgggagcttcgtcatcat

SEQ ID NO: 4502378 - DNA, 25 bp, Homo sapien
tccacgctgagtcttcggctgcttt

SEQ ID NO: 4502379 - DNA, 25 bp, Homo sapien
gattcaagtagcaatacgttaagct

SEQ ID NO: 4502380 - DNA, 25 bp, Homo sapien
gctgaacctcagaaaaacgtctgtg

SEQ ID NO: 4502381 - DNA, 25 bp, Homo sapien
tgcttcatatcctattagtacttga

SEQ ID NO: 4502382 - DNA, 25 bp, Homo sapien
caattcagaagtaggaatataatcc

SEQ ID NO: 4502383 - DNA, 25 bp, Homo sapien
tgttcatcaactccttctccagtca

SEQ ID NO: 4502384 - DNA, 25 bp, Homo sapien
gttcatcaactccttctccagtcat

SEQ ID NO: 4502385 - DNA, 25 bp, Homo sapien
tattatcttgctgttcatcaactcc

SEQ ID NO: 4502386 - DNA, 25 bp, Homo sapien
tgtcaaagtcaccactagggtcgcc

SEQ ID NO: 4502387 - DNA, 25 bp, Homo sapien
cacttgatgaggtactggatttcac

SEQ ID NO: 4502388 - DNA, 25 bp, Homo sapien
tagggtcgccattagcttcaatcgc

SEQ ID NO: 4502389 - DNA, 25 bp, Homo sapien
gctgtggatgtaagaccaacccttc

SEQ ID NO: 4502390 - DNA, 25 bp, Homo sapien
caaaacctttcagatgacaacagca

SEQ ID NO: 4502391 - DNA, 25 bp, Homo sapien
tctttactagtaattacgccagaga

SEQ ID NO: 4502392 - DNA, 25 bp, Homo sapien
gattaaacatgacttggaaaactag

SEQ ID NO: 4502393 - DNA, 25 bp, Homo sapien
tacactcatagaaggatataccagt

SEQ ID NO: 4502394 - DNA, 25 bp, Homo sapien
ctttctactatctgatactgtttat

SEQ ID NO: 4502395 - DNA, 25 bp, Homo sapien
agctcctgttggcaattgaaatatt

SEQ ID NO: 4502396 - DNA, 25 bp, Homo sapien
gctcctgttggcaattgaaatattc

SEQ ID NO: 4502397 - DNA, 25 bp, Homo sapien
cctgttggcaattgaaatattctac

SEQ ID NO: 4502398 - DNA, 25 bp, Homo sapien
tggctgaagtgagttaccatgtact

SEQ ID NO: 4502399 - DNA, 25 bp, Homo sapien
aaatatggctgaagtgagttaccat

SEQ ID NO: 4502400 - DNA, 25 bp, Homo sapien
ctgaagtgagttaccatgtacttac

SEQ ID NO: 4502401 - DNA, 25 bp, Homo sapien
gctgaagtgagttaccatgtactta

SEQ ID NO: 4502402 - DNA, 25 bp, Homo sapien
tggaaaatctgtttgacccaatgta

SEQ ID NO: 4502403 - DNA, 25 bp, Homo sapien
gaaaatctgtttgacccaatgtaga

SEQ ID NO: 4502404 - DNA, 25 bp, Homo sapien
atctgtttgacccaatgtagattta

SEQ ID NO: 4502405 - DNA, 25 bp, Homo sapien
ctgtttgacccaatgtagatttact

SEQ ID NO: 4502406 - DNA, 25 bp, Homo sapien
tcctactgtggaagctgtcaatgca

SEQ ID NO: 4502407 - DNA, 25 bp, Homo sapien
tagatattcgggctcatttgagggt

SEQ ID NO: 4502408 - DNA, 25 bp, Homo sapien
cttcccagctacactctgaataggg

SEQ ID NO: 4502409 - DNA, 25 bp, Homo sapien
gggagtcccatccatttacatagat

SEQ ID NO: 4502410 - DNA, 25 bp, Homo sapien
tctcagcacatatgtgtccaatcct

SEQ ID NO: 4502411 - DNA, 25 bp, Homo sapien
tcagcacatatgtgtccaatcctct

SEQ ID NO: 4502412 - DNA, 25 bp, Homo sapien
atatgtgtccaatcctctttatcag

SEQ ID NO: 4502413 - DNA, 25 bp, Homo sapien
gcacatatgtgtccaatcctcttta

SEQ ID NO: 4502414 - DNA, 25 bp, Homo sapien
ctgtaatcccagctgctcaggaggc

SEQ ID NO: 4502415 - DNA, 25 bp, Homo sapien
ggagaatcacttaaacccaggaggc

SEQ ID NO: 4502416 - DNA, 25 bp, Homo sapien
tgctcaggaggctgaggcaggagaa

SEQ ID NO: 4502417 - DNA, 25 bp, Homo sapien
attagctggaagtggtggtgcgtgc

SEQ ID NO: 4502418 - DNA, 25 bp, Homo sapien
gctactatgttaaaacgctagccac

SEQ ID NO: 4502419 - DNA, 25 bp, Homo sapien
tagccacaattcacatattcggcat

SEQ ID NO: 4502420 - DNA, 25 bp, Homo sapien
tcacatattcggcatcaaagcataa

SEQ ID NO: 4502421 - DNA, 25 bp, Homo sapien
tgttaaaacgctagccacaattcac

SEQ ID NO: 4502422 - DNA, 25 bp, Homo sapien
acaaatcgtggtctctgcttcaggg

SEQ ID NO: 4502423 - DNA, 25 bp, Homo sapien
tctcccctcctaaatatgcaggttg

SEQ ID NO: 4502424 - DNA, 25 bp, Homo sapien
tagccagtttagaccttctagctga

SEQ ID NO: 4502425 - DNA, 25 bp, Homo sapien
tctagctgataatctcgaagttcca

SEQ ID NO: 4502426 - DNA, 25 bp, Homo sapien
aacagtaaggaaaattgcactcata

SEQ ID NO: 4502427 - DNA, 25 bp, Homo sapien
cagtaaggaaaattgcactcatatt

SEQ ID NO: 4502428 - DNA, 25 bp, Homo sapien
taaagatttcttggttgagatacaa

SEQ ID NO: 4502429 - DNA, 25 bp, Homo sapien
tgcagcataaagatttcttggttga

SEQ ID NO: 4502430 - DNA, 25 bp, Homo sapien
ggctatgacaaattacccaccaaat

SEQ ID NO: 4502431 - DNA, 25 bp, Homo sapien
taaacctccagtgctatcactgtct

SEQ ID NO: 4502432 - DNA, 25 bp, Homo sapien
caggataatcctacagactatatag

SEQ ID NO: 4502433 - DNA, 25 bp, Homo sapien
gatactttcacaggttcaaccttcc

SEQ ID NO: 4502434 - DNA, 25 bp, Homo sapien
ggtacttcttacactgcatgttctg

SEQ ID NO: 4502435 - DNA, 25 bp, Homo sapien
cgaggactaatggatccgcatgtga

SEQ ID NO: 4502436 - DNA, 25 bp, Homo sapien
ttgcacttaattgggtacttcggga

SEQ ID NO: 4502437 - DNA, 25 bp, Homo sapien
cacaggcctgtacttctaattctaa

SEQ ID NO: 4502438 - DNA, 25 bp, Homo sapien
catttcatcagcaaggattacacta

SEQ ID NO: 4502439 - DNA, 25 bp, Homo sapien
caggtcacctatgtaaaccactacg

SEQ ID NO: 4502440 - DNA, 25 bp, Homo sapien
ggtggataaagggacgactataaga

SEQ ID NO: 4502441 - DNA, 25 bp, Homo sapien
aaccactacgttaatctctggtgcc

SEQ ID NO: 4502442 - DNA, 25 bp, Homo sapien
ttatctttcaagaggatctcatatg

SEQ ID NO: 4502443 - DNA, 25 bp, Homo sapien
agtgcgttgaacttcaatcttttgg

SEQ ID NO: 4502444 - DNA, 25 bp, Homo sapien
gaatgaatccattcatattcccgta

SEQ ID NO: 4502445 - DNA, 25 bp, Homo sapien
atatgttgttataagtgcgttgaac

SEQ ID NO: 4502446 - DNA, 25 bp, Homo sapien
ttctccggcataataaagtgcagca

SEQ ID NO: 4502447 - DNA, 25 bp, Homo sapien
cattcttcaaccgatgggcttcatc

SEQ ID NO: 4502448 - DNA, 25 bp, Homo sapien
gaaaggcccagttaatactgcccag

SEQ ID NO: 4502449 - DNA, 25 bp, Homo sapien
gggtccccgtaatcaggagcctatg

SEQ ID NO: 4502450 - DNA, 25 bp, Homo sapien
ggtacatccaagtacaggttgtcta

SEQ ID NO: 4502451 - DNA, 25 bp, Homo sapien
tgaagaagactgatgcatacaatcc

SEQ ID NO: 4502452 - DNA, 25 bp, Homo sapien
tgacacactgaaaaatacttgctga

SEQ ID NO: 4502453 - DNA, 25 bp, Homo sapien
gcaaagttgccctattttaccagaa

SEQ ID NO: 4502454 - DNA, 25 bp, Homo sapien
ctcctgggctcctgggttgacgcca

SEQ ID NO: 4502455 - DNA, 25 bp, Homo sapien
tgcctcctgggctcctgggttgacg

SEQ ID NO: 4502456 - DNA, 25 bp, Homo sapien
tcctgggctcctgggttgacgccat

SEQ ID NO: 4502457 - DNA, 25 bp, Homo sapien
ctgggctcctgggttgacgccattc

SEQ ID NO: 4502458 - DNA, 25 bp, Homo sapien
tccaattctcagactgaattcagag

SEQ ID NO: 4502459 - DNA, 25 bp, Homo sapien
tctacactggataatagcacgtttc

SEQ ID NO: 4502460 - DNA, 25 bp, Homo sapien
cactagagctcttaaatagaaggga

SEQ ID NO: 4502461 - DNA, 25 bp, Homo sapien
aatcaactccatcagtctacactgg

SEQ ID NO: 4502462 - DNA, 25 bp, Homo sapien
ccactttagcaggaagggatttctc

SEQ ID NO: 4502463 - DNA, 25 bp, Homo sapien
acatctccaccctgagaatctgttc

SEQ ID NO: 4502464 - DNA, 25 bp, Homo sapien
gaaggaaaggctctagcaccttatg

SEQ ID NO: 4502465 - DNA, 25 bp, Homo sapien
taatactgtttctgaagggctgaca

SEQ ID NO: 4502466 - DNA, 25 bp, Homo sapien
cagatagcagtggttgcaacatttt

SEQ ID NO: 4502467 - DNA, 25 bp, Homo sapien
cttgtaattcctggtcagaatccac

SEQ ID NO: 4502468 - DNA, 25 bp, Homo sapien
ttggcaagagccttgtaattcctgg

SEQ ID NO: 4502469 - DNA, 25 bp, Homo sapien
cttcagggggtttaatcagatagca

SEQ ID NO: 4502470 - DNA, 25 bp, Homo sapien
tttaatagttaggtattcagccagg

SEQ ID NO: 4502471 - DNA, 25 bp, Homo sapien
ctttctcgaagtcttgtcaacagtt

SEQ ID NO: 4502472 - DNA, 25 bp, Homo sapien
gaagataagcactcgattccccctt

SEQ ID NO: 4502473 - DNA, 25 bp, Homo sapien
tgtcaacagtttgtctaataaaatc

SEQ ID NO: 4502474 - DNA, 25 bp, Homo sapien
acccatctgcattgaagtggtccag

SEQ ID NO: 4502475 - DNA, 25 bp, Homo sapien
ggtccagtgcctgttttcggatttc

SEQ ID NO: 4502476 - DNA, 25 bp, Homo sapien
tctgcattgaagtggtccagtgcct

SEQ ID NO: 4502477 - DNA, 25 bp, Homo sapien
ggatttctcccttgatggaaccatc

SEQ ID NO: 4502478 - DNA, 25 bp, Homo sapien
aatggaaatacaccccaaagacgtg

SEQ ID NO: 4502479 - DNA, 25 bp, Homo sapien
tgtatgcaacatgatccgaattagg

SEQ ID NO: 4502480 - DNA, 25 bp, Homo sapien
cctgagacagggcaatatgaaacat

SEQ ID NO: 4502481 - DNA, 25 bp, Homo sapien
tatgcgcgcctagcctcaaagtata

SEQ ID NO: 4502482 - DNA, 25 bp, Homo sapien
gactgtgtccgctgaagccaaattg

SEQ ID NO: 4502483 - DNA, 25 bp, Homo sapien
cagcccttgtcgagagcaggaaaca

SEQ ID NO: 4502484 - DNA, 25 bp, Homo sapien
aattctatgcgctcgggcttgtgcc

SEQ ID NO: 4502485 - DNA, 25 bp, Homo sapien
ttttgaccaattctatgcgctcggg

SEQ ID NO: 4502486 - DNA, 25 bp, Homo sapien
tgtccatgcgctgaatcaccagatg

SEQ ID NO: 4502487 - DNA, 25 bp, Homo sapien
cacagtcccctttgtaactaagcgg

SEQ ID NO: 4502488 - DNA, 25 bp, Homo sapien
tttggcccgttctatgatctcctcc

SEQ ID NO: 4502489 - DNA, 25 bp, Homo sapien
ggatcgtccggccagtggtgtccat

SEQ ID NO: 4502490 - DNA, 25 bp, Homo sapien
tttgaagagatcctctgctccaaat

SEQ ID NO: 4502491 - DNA, 25 bp, Homo sapien
gttctttgaagagatcctctgctcc

SEQ ID NO: 4502492 - DNA, 25 bp, Homo sapien
tgtcagctcttctttattaaaagga

SEQ ID NO: 4502493 - DNA, 25 bp, Homo sapien
tttcaaaatagctgtcagctcttct

SEQ ID NO: 4502494 - DNA, 25 bp, Homo sapien
gcctctaacagaatcttcttacaga

SEQ ID NO: 4502495 - DNA, 25 bp, Homo sapien
gaaaagttagactctcacagatcat

SEQ ID NO: 4502496 - DNA, 25 bp, Homo sapien
caaaaaagtatactcgaatgcttta

SEQ ID NO: 4502497 - DNA, 25 bp, Homo sapien
gagctatgagattcctacgaaagaa

SEQ ID NO: 4502498 - DNA, 25 bp, Homo sapien
cagccaaccgcaaaatttcatctat

SEQ ID NO: 4502499 - DNA, 25 bp, Homo sapien
tctctcgtttcagccaaccgcaaaa

SEQ ID NO: 4502500 - DNA, 25 bp, Homo sapien
tgttgcacttgttgacacttcattc

SEQ ID NO: 4502501 - DNA, 25 bp, Homo sapien
gaagttcatctgttgcacttgttga

SEQ ID NO: 4502502 - DNA, 25 bp, Homo sapien
tggaactccgaattcgaggcagcat

SEQ ID NO: 4502503 - DNA, 25 bp, Homo sapien
tccttgtgaggacgctcttctagct

SEQ ID NO: 4502504 - DNA, 25 bp, Homo sapien
tttagtggaactccgaattcgaggc

SEQ ID NO: 4502505 - DNA, 25 bp, Homo sapien
ttcctctggaatgatctcatcccag

SEQ ID NO: 4502506 - DNA, 25 bp, Homo sapien
gaggtccttccgcacactcctcgga

SEQ ID NO: 4502507 - DNA, 25 bp, Homo sapien
tctgcatcagtaaatccctccacga

SEQ ID NO: 4502508 - DNA, 25 bp, Homo sapien
cagtaaatccctccacgaggtcctt

SEQ ID NO: 4502509 - DNA, 25 bp, Homo sapien
acactcctcggacgccctctgcgct

SEQ ID NO: 4502510 - DNA, 25 bp, Homo sapien
caagacttacagtacgcactttcaa

SEQ ID NO: 4502511 - DNA, 25 bp, Homo sapien
ggatccagtcaacccaagacttaca

SEQ ID NO: 4502512 - DNA, 25 bp, Homo sapien
agtacgcactttcaaacaagctcag

SEQ ID NO: 4502513 - DNA, 25 bp, Homo sapien
ctttcaaacaagctcagtgagaaca

SEQ ID NO: 4502514 - DNA, 25 bp, Homo sapien
tgatgtcagtactaacacaggtgga

SEQ ID NO: 4502515 - DNA, 25 bp, Homo sapien
aaaccactagcaaactgatgtcagt

SEQ ID NO: 4502516 - DNA, 25 bp, Homo sapien
taatcactcacatagaaagatgtct

SEQ ID NO: 4502517 - DNA, 25 bp, Homo sapien
gctgaacaacatgctgtacatacta

SEQ ID NO: 4502518 - DNA, 25 bp, Homo sapien
gcaaaatgcagacataattcctact

SEQ ID NO: 4502519 - DNA, 25 bp, Homo sapien
ctactttataataactgcattaaat

SEQ ID NO: 4502520 - DNA, 25 bp, Homo sapien
ctttataataactgcattaaatgta

SEQ ID NO: 4502521 - DNA, 25 bp, Homo sapien
aaaacatgacatatagaagacaaat

SEQ ID NO: 4502522 - DNA, 25 bp, Homo sapien
tttggcttcttgtcatcatcagact

SEQ ID NO: 4502523 - DNA, 25 bp, Homo sapien
gtcatcatcagactcttctgtctca

SEQ ID NO: 4502524 - DNA, 25 bp, Homo sapien
tggactcactgtcagagtcactgtc

SEQ ID NO: 4502525 - DNA, 25 bp, Homo sapien
ggcctgcctcttggactcactgtca

SEQ ID NO: 4502526 - DNA, 25 bp, Homo sapien
gagaccaaacttcttataagccttg

SEQ ID NO: 4502527 - DNA, 25 bp, Homo sapien
agaccaaacttcttataagccttga

SEQ ID NO: 4502528 - DNA, 25 bp, Homo sapien
accaaacttcttataagccttgatg

SEQ ID NO: 4502529 - DNA, 25 bp, Homo sapien
cgttcaagagggagaccaaacttct

SEQ ID NO: 4502530 - DNA, 25 bp, Homo sapien
gcgcttcagatctgccaccgactta

SEQ ID NO: 4502531 - DNA, 25 bp, Homo sapien
tgttgtggatcagttcacccaggcg

SEQ ID NO: 4502532 - DNA, 25 bp, Homo sapien
cgacttatctaccagctcagcatca

SEQ ID NO: 4502533 - DNA, 25 bp, Homo sapien
gctcttcgtattcctgcattgctga

SEQ ID NO: 4502534 - DNA, 25 bp, Homo sapien
tgggtttttacatcactccgacgaa

SEQ ID NO: 4502535 - DNA, 25 bp, Homo sapien
tttaaagatatcacacaggacaggc

SEQ ID NO: 4502536 - DNA, 25 bp, Homo sapien
gaatattaagctcacagaaacgcag

SEQ ID NO: 4502537 - DNA, 25 bp, Homo sapien
cactaggcatgtgtggtcctcaagc

SEQ ID NO: 4502538 - DNA, 25 bp, Homo sapien
cagttgaagggatataacttgccca

SEQ ID NO: 4502539 - DNA, 25 bp, Homo sapien
gaaatggcacagataaaccacagtc

SEQ ID NO: 4502540 - DNA, 25 bp, Homo sapien
cagctcaacaaagctgcagaagggt

SEQ ID NO: 4502541 - DNA, 25 bp, Homo sapien
gctaacattgcaagccagacgccat

SEQ ID NO: 4502542 - DNA, 25 bp, Homo sapien
ggataatggatttcacattaacctg

SEQ ID NO: 4502543 - DNA, 25 bp, Homo sapien
gatatcttgattgttggacctctcc

SEQ ID NO: 4502544 - DNA, 25 bp, Homo sapien
cctgaactccggatatcttgattgt

SEQ ID NO: 4502545 - DNA, 25 bp, Homo sapien
gtccacagggatagatttatgcagc

SEQ ID NO: 4502546 - DNA, 25 bp, Homo sapien
tttgacacgacaggttaagcagtat

SEQ ID NO: 4502547 - DNA, 25 bp, Homo sapien
taactcccagtttccatagccatgt

SEQ ID NO: 4502548 - DNA, 25 bp, Homo sapien
tcagttaatttaagctctgggtctg

SEQ ID NO: 4502549 - DNA, 25 bp, Homo sapien
ccagcaacaggcgagaatcatcttc

SEQ ID NO: 4502550 - DNA, 25 bp, Homo sapien
tagaaatctctagcatggtagggtt

SEQ ID NO: 4502551 - DNA, 25 bp, Homo sapien
tgatgccccctcgaaaatagttaga

SEQ ID NO: 4502552 - DNA, 25 bp, Homo sapien
cagtgccacaatctgctaaagatgg

SEQ ID NO: 4502553 - DNA, 25 bp, Homo sapien
caaaatttcacctggctactgtctt

SEQ ID NO: 4502554 - DNA, 25 bp, Homo sapien
gttccttgctacaacaactgggtct

SEQ ID NO: 4502555 - DNA, 25 bp, Homo sapien
ttccttgctacaacaactgggtctc

SEQ ID NO: 4502556 - DNA, 25 bp, Homo sapien
ctgttccttgctacaacaactgggt

SEQ ID NO: 4502557 - DNA, 25 bp, Homo sapien
tgttccttgctacaacaactgggtc

SEQ ID NO: 4502558 - DNA, 25 bp, Homo sapien
cttcgttttagattgaaaatgcttc

SEQ ID NO: 4502559 - DNA, 25 bp, Homo sapien
gaaaatgcttcttagagcattgccg

SEQ ID NO: 4502560 - DNA, 25 bp, Homo sapien
agcactgagctacgccaggacatga

SEQ ID NO: 4502561 - DNA, 25 bp, Homo sapien
cattgccggagagcactgagctacg

SEQ ID NO: 4502562 - DNA, 25 bp, Homo sapien
cagggaatccctggagctaggttaa

SEQ ID NO: 4502563 - DNA, 25 bp, Homo sapien
ccaggagcagggaatccctggagct

SEQ ID NO: 4502564 - DNA, 25 bp, Homo sapien
agcagggaatccctggagctaggtt

SEQ ID NO: 4502565 - DNA, 25 bp, Homo sapien
cttccaggagcagggaatccctgga

SEQ ID NO: 4502566 - DNA, 25 bp, Homo sapien
tgtgctgttaacagggtagaacaac

SEQ ID NO: 4502567 - DNA, 25 bp, Homo sapien
cagggtagaacaactcaggtaggag

SEQ ID NO: 4502568 - DNA, 25 bp, Homo sapien
gtggcttcatctgctagagcatccc

SEQ ID NO: 4502569 - DNA, 25 bp, Homo sapien
tagagcatcccagccgtcgtggatt

SEQ ID NO: 4502570 - DNA, 25 bp, Homo sapien
cccaaaatatagataaagcctcaga

SEQ ID NO: 4502571 - DNA, 25 bp, Homo sapien
tcagatcctatctcatgtccatggc

SEQ ID NO: 4502572 - DNA, 25 bp, Homo sapien
tatagataaagcctcagatcctatc

SEQ ID NO: 4502573 - DNA, 25 bp, Homo sapien
aaagcctcagatcctatctcatgtc

SEQ ID NO: 4502574 - DNA, 25 bp, Homo sapien
cttctccagaccctttctgagcagc

SEQ ID NO: 4502575 - DNA, 25 bp, Homo sapien
tccgctcgggtctgtagctgcttcc

SEQ ID NO: 4502576 - DNA, 25 bp, Homo sapien
gagcagcttcaacaagtaatccgct

SEQ ID NO: 4502577 - DNA, 25 bp, Homo sapien
tttttatctgtctccaccggcagaa

SEQ ID NO: 4502578 - DNA, 25 bp, Homo sapien
aaagctgccaagatgccgtggtctt

SEQ ID NO: 4502579 - DNA, 25 bp, Homo sapien
cacacatgggctgctagtacagggt

SEQ ID NO: 4502580 - DNA, 25 bp, Homo sapien
tctgggatccactattacaagaacc

SEQ ID NO: 4502581 - DNA, 25 bp, Homo sapien
tataaatgacatagctgcaagagca

SEQ ID NO: 4502582 - DNA, 25 bp, Homo sapien
ccgaggcttccgcttctttaatttg

SEQ ID NO: 4502583 - DNA, 25 bp, Homo sapien
gaggcttccgcttctttaatttggc

SEQ ID NO: 4502584 - DNA, 25 bp, Homo sapien
cgaggcttccgcttctttaatttgg

SEQ ID NO: 4502585 - DNA, 25 bp, Homo sapien
cttctccctcttctgatggattatc

SEQ ID NO: 4502586 - DNA, 25 bp, Homo sapien
gatggattatctgaatgcctaggag

SEQ ID NO: 4502587 - DNA, 25 bp, Homo sapien
gaaagctcaattccatgctcctctt

SEQ ID NO: 4502588 - DNA, 25 bp, Homo sapien
tgcctaggagatgaaagctcaattc

SEQ ID NO: 4502589 - DNA, 25 bp, Homo sapien
ttcaagcaaatagcctcaagggact

SEQ ID NO: 4502590 - DNA, 25 bp, Homo sapien
atgtacgtatgtattggccaggcac

SEQ ID NO: 4502591 - DNA, 25 bp, Homo sapien
atttcacggatggaaactgagtacc

SEQ ID NO: 4502592 - DNA, 25 bp, Homo sapien
aacagggctatgaatttttgctaca

SEQ ID NO: 4502593 - DNA, 25 bp, Homo sapien
tgtctttcctagaactcatttgttt

SEQ ID NO: 4502594 - DNA, 25 bp, Homo sapien
ctttgtctttcctagaactcatttg

SEQ ID NO: 4502595 - DNA, 25 bp, Homo sapien
cattggacttttttccaagccatca

SEQ ID NO: 4502596 - DNA, 25 bp, Homo sapien
tttcattggacttttttccaagcca

SEQ ID NO: 4502597 - DNA, 25 bp, Homo sapien
caaattcagttgtggattgtgctcc

SEQ ID NO: 4502598 - DNA, 25 bp, Homo sapien
tgtcataaaagaccaagtaaaggcc

SEQ ID NO: 4502599 - DNA, 25 bp, Homo sapien
aggtgcaggtatcccatcaacggcc

SEQ ID NO: 4502600 - DNA, 25 bp, Homo sapien
tccaaatggcgaattgcaaaggctg

SEQ ID NO: 4502601 - DNA, 25 bp, Homo sapien
catgttacacccaaacagaatcctc

SEQ ID NO: 4502602 - DNA, 25 bp, Homo sapien
aaaactacccaaacagcctaatctg

SEQ ID NO: 4502603 - DNA, 25 bp, Homo sapien
aaataatgtctttctgtgggagcac

SEQ ID NO: 4502604 - DNA, 25 bp, Homo sapien
tcccatgcaactgggcccgtaggca

SEQ ID NO: 4502605 - DNA, 25 bp, Homo sapien
taagcatacagtatgctttgtttat

SEQ ID NO: 4502606 - DNA, 25 bp, Homo sapien
tatcagtcatatgttcatgaaatac

SEQ ID NO: 4502607 - DNA, 25 bp, Homo sapien
ggcagcttcaacagtatcagtcata

SEQ ID NO: 4502608 - DNA, 25 bp, Homo sapien
gaacagggggcagcttcaacagtat

SEQ ID NO: 4502609 - DNA, 25 bp, Homo sapien
tcaattacattgaaggaaaggttgc

SEQ ID NO: 4502610 - DNA, 25 bp, Homo sapien
tctatacaaatctcaattacattga

SEQ ID NO: 4502611 - DNA, 25 bp, Homo sapien
tctcaattacattgaaggaaaggtt

SEQ ID NO: 4502612 - DNA, 25 bp, Homo sapien
aatctcaattacattgaaggaaagg

SEQ ID NO: 4502613 - DNA, 25 bp, Homo sapien
aagagttacaaggagtcattgtcat

SEQ ID NO: 4502614 - DNA, 25 bp, Homo sapien
tgtgcaatcctaccgtgcgatttag

SEQ ID NO: 4502615 - DNA, 25 bp, Homo sapien
cgtgcgatttaggtttcttacctat

SEQ ID NO: 4502616 - DNA, 25 bp, Homo sapien
cattgtcatttgtgcaatcctaccg

SEQ ID NO: 4502617 - DNA, 25 bp, Homo sapien
tccaatggggacaggttcacttcct

SEQ ID NO: 4502618 - DNA, 25 bp, Homo sapien
gagatcgctttgatttactcgaaga

SEQ ID NO: 4502619 - DNA, 25 bp, Homo sapien
tgctgtaatatggacaggaccctga

SEQ ID NO: 4502620 - DNA, 25 bp, Homo sapien
ctgaatgtctcctggtccagatcat

SEQ ID NO: 4502621 - DNA, 25 bp, Homo sapien
tagaactaacctgacttacacggca

SEQ ID NO: 4502622 - DNA, 25 bp, Homo sapien
aatattggcagcacgggaaatgaca

SEQ ID NO: 4502623 - DNA, 25 bp, Homo sapien
caacggcgaggtgtcttcagaagga

SEQ ID NO: 4502624 - DNA, 25 bp, Homo sapien
aaatgaaattcgaagccaggaggga

SEQ ID NO: 4502625 - DNA, 25 bp, Homo sapien
cctatgccatataattgctagagga

SEQ ID NO: 4502626 - DNA, 25 bp, Homo sapien
agtgccagcaccatcgcttagagtt

SEQ ID NO: 4502627 - DNA, 25 bp, Homo sapien
ttcaagtcagaaaaccctgaagtgc

SEQ ID NO: 4502628 - DNA, 25 bp, Homo sapien
aagtcttgtcctttgcttactgtgc

SEQ ID NO: 4502629 - DNA, 25 bp, Homo sapien
cacgttgagccccttgtcaggtttg

SEQ ID NO: 4502630 - DNA, 25 bp, Homo sapien
taaggcactcggctatccggtctcc

SEQ ID NO: 4502631 - DNA, 25 bp, Homo sapien
tccggtctccgattttcagcaggca

SEQ ID NO: 4502632 - DNA, 25 bp, Homo sapien
aggcagttccgggtgtgttccagct

SEQ ID NO: 4502633 - DNA, 25 bp, Homo sapien
tggacaccatcatgcagaagttttc

SEQ ID NO: 4502634 - DNA, 25 bp, Homo sapien
gcgatagagtgaaagagtcagactc

SEQ ID NO: 4502635 - DNA, 25 bp, Homo sapien
gctgagggatagaagatgacacact

SEQ ID NO: 4502636 - DNA, 25 bp, Homo sapien
taaaaatgatataacggactctggg

SEQ ID NO: 4502637 - DNA, 25 bp, Homo sapien
agttttcgagcatcaaattctgtaa

SEQ ID NO: 4502638 - DNA, 25 bp, Homo sapien
tttcttatgagccatcttgtataac

SEQ ID NO: 4502639 - DNA, 25 bp, Homo sapien
tgtataacttatgcagttttcgagc

SEQ ID NO: 4502640 - DNA, 25 bp, Homo sapien
ttgagaccttttcttatgagccatc

SEQ ID NO: 4502641 - DNA, 25 bp, Homo sapien
tctgtcgcaggcattcagtgatgcc

SEQ ID NO: 4502642 - DNA, 25 bp, Homo sapien
accgcgcctagccacattgaatgta

SEQ ID NO: 4502643 - DNA, 25 bp, Homo sapien
tactcccactagtaggataccactg

SEQ ID NO: 4502644 - DNA, 25 bp, Homo sapien
tgattatgtgtccaacttcagaccc

SEQ ID NO: 4502645 - DNA, 25 bp, Homo sapien
ccccagtcacgtcgtctttcttctt

SEQ ID NO: 4502646 - DNA, 25 bp, Homo sapien
cattactgaagtgtctcttgttggg

SEQ ID NO: 4502647 - DNA, 25 bp, Homo sapien
tctcttgggtgtccatgcatctgtg

SEQ ID NO: 4502648 - DNA, 25 bp, Homo sapien
cctgaggcctctggacgaaatggtt

SEQ ID NO: 4502649 - DNA, 25 bp, Homo sapien
tgagatatcagagagtcccggctgg

SEQ ID NO: 4502650 - DNA, 25 bp, Homo sapien
aacatagaacgtaatgcttccaggc

SEQ ID NO: 4502651 - DNA, 25 bp, Homo sapien
aagtgagatttctaacagggtgtca

SEQ ID NO: 4502652 - DNA, 25 bp, Homo sapien
gatgcaactacatctaagaacaggg

SEQ ID NO: 4502653 - DNA, 25 bp, Homo sapien
taaaccctctgtgaggtaaatcaca

SEQ ID NO: 4502654 - DNA, 25 bp, Homo sapien
tgctgaagttcaaactgaaagcctg

SEQ ID NO: 4502655 - DNA, 25 bp, Homo sapien
aattcttgtaggtatgctgctgaag

SEQ ID NO: 4502656 - DNA, 25 bp, Homo sapien
gcctgacacatgttacaaacagaca

SEQ ID NO: 4502657 - DNA, 25 bp, Homo sapien
tgttgctgctggctaacgtatcagt

SEQ ID NO: 4502658 - DNA, 25 bp, Homo sapien
tatgtcgccggtccccataatggtg

SEQ ID NO: 4502659 - DNA, 25 bp, Homo sapien
catgttgttgggtcgatagcttccg

SEQ ID NO: 4502660 - DNA, 25 bp, Homo sapien
aacggtgggcatccatatgtcgccg

SEQ ID NO: 4502661 - DNA, 25 bp, Homo sapien
gtccccggtggtctcggtcactgct

SEQ ID NO: 4502662 - DNA, 25 bp, Homo sapien
ggcaaaggttggcacctggtgtctc

SEQ ID NO: 4502663 - DNA, 25 bp, Homo sapien
ctcctggcaaaggttggcacctggt

SEQ ID NO: 4502664 - DNA, 25 bp, Homo sapien
aacagctcctggcaaaggttggcac

SEQ ID NO: 4502665 - DNA, 25 bp, Homo sapien
acagctcctggcaaaggttggcacc

SEQ ID NO: 4502666 - DNA, 25 bp, Homo sapien
agacatgggattcgctgtggctgac

SEQ ID NO: 4502667 - DNA, 25 bp, Homo sapien
gcctcgcacagagcttaataatttt

SEQ ID NO: 4502668 - DNA, 25 bp, Homo sapien
ataaaacctataaccaagacatggg

SEQ ID NO: 4502669 - DNA, 25 bp, Homo sapien
tatggcgacctcttcactagatttc

SEQ ID NO: 4502670 - DNA, 25 bp, Homo sapien
taaagagggtgcagcttcagaagac

SEQ ID NO: 4502671 - DNA, 25 bp, Homo sapien
gactcttcaattatgggctcgtggc

SEQ ID NO: 4502672 - DNA, 25 bp, Homo sapien
gactgtgggctggtacccatctcgg

SEQ ID NO: 4502673 - DNA, 25 bp, Homo sapien
gcttcggctcatcgtactactggtg

SEQ ID NO: 4502674 - DNA, 25 bp, Homo sapien
gacccaagtgataagattcgcagac

SEQ ID NO: 4502675 - DNA, 25 bp, Homo sapien
aatgcaaagtacactggatgggcct

SEQ ID NO: 4502676 - DNA, 25 bp, Homo sapien
gctaatgcgggctgctgttaccaga

SEQ ID NO: 4502677 - DNA, 25 bp, Homo sapien
tacagacctactagaagaacgcagg

SEQ ID NO: 4502678 - DNA, 25 bp, Homo sapien
cctccgcttggagtcatgatggtgc

SEQ ID NO: 4502679 - DNA, 25 bp, Homo sapien
gacattcgtcggaaatcctgctggt

SEQ ID NO: 4502680 - DNA, 25 bp, Homo sapien
tgaggcctaaattcatcggatctcc

SEQ ID NO: 4502681 - DNA, 25 bp, Homo sapien
tctagtgatctctccaaaggagacc

SEQ ID NO: 4502682 - DNA, 25 bp, Homo sapien
tgcaacaagttggtcagcaggcctg

SEQ ID NO: 4502683 - DNA, 25 bp, Homo sapien
tactgaaccccacattagaagcctg

SEQ ID NO: 4502684 - DNA, 25 bp, Homo sapien
gaaggccccagcatcagtcaattga

SEQ ID NO: 4502685 - DNA, 25 bp, Homo sapien
tgtgtgctacaagtccaggctggac

SEQ ID NO: 4502686 - DNA, 25 bp, Homo sapien
tgtctgtccggctctgaaagaccgc

SEQ ID NO: 4502687 - DNA, 25 bp, Homo sapien
caccgtgaggactgatgcaactttc

SEQ ID NO: 4502688 - DNA, 25 bp, Homo sapien
gaaagaccgcagtgattagcttggg

SEQ ID NO: 4502689 - DNA, 25 bp, Homo sapien
tttcagacacaccaggccagaatgt

SEQ ID NO: 4502690 - DNA, 25 bp, Homo sapien
ggcacagatggcctaaagcagcctg

SEQ ID NO: 4502691 - DNA, 25 bp, Homo sapien
gcacagatggcctaaagcagcctgg

SEQ ID NO: 4502692 - DNA, 25 bp, Homo sapien
agtggggcacagatggcctaaagca

SEQ ID NO: 4502693 - DNA, 25 bp, Homo sapien
agatgagtggggcacagatggccta

SEQ ID NO: 4502694 - DNA, 25 bp, Homo sapien
gaaaatttaatacatactatataaa

SEQ ID NO: 4502695 - DNA, 25 bp, Homo sapien
aggaaaatttaatacatactatata

SEQ ID NO: 4502696 - DNA, 25 bp, Homo sapien
ggaaaatttaatacatactatataa

SEQ ID NO: 4502697 - DNA, 25 bp, Homo sapien
taatatacaagaatcaaaagtacag

SEQ ID NO: 4502698 - DNA, 25 bp, Homo sapien
tttaatatacaagaatcaaaagtac

SEQ ID NO: 4502699 - DNA, 25 bp, Homo sapien
ctcagtaacactttttaatatacaa

SEQ ID NO: 4502700 - DNA, 25 bp, Homo sapien
tatacaagaatcaaaagtacagcag

SEQ ID NO: 4502701 - DNA, 25 bp, Homo sapien
ggccggccgcttccagtaaaaggca

SEQ ID NO: 4502702 - DNA, 25 bp, Homo sapien
tgggcaccaagagccctcagctttt

SEQ ID NO: 4502703 - DNA, 25 bp, Homo sapien
gtttccccaaattgttccagctgag

SEQ ID NO: 4502704 - DNA, 25 bp, Homo sapien
gcagctggcagtttcgaagccttgt

SEQ ID NO: 4502705 - DNA, 25 bp, Homo sapien
cgggaacagctcctcaattagtgcc

SEQ ID NO: 4502706 - DNA, 25 bp, Homo sapien
agaacacccccaagacgtcaagcct

SEQ ID NO: 4502707 - DNA, 25 bp, Homo sapien
ggggcccaccggcagcagcgggaac

SEQ ID NO: 4502708 - DNA, 25 bp, Homo sapien
ccaagacgtcaagcctgggggaggg

SEQ ID NO: 4502709 - DNA, 25 bp, Homo sapien
tgtgatgttccggaagtggatattg

SEQ ID NO: 4502710 - DNA, 25 bp, Homo sapien
tcgaggtaagaagcctttaggccat

SEQ ID NO: 4502711 - DNA, 25 bp, Homo sapien
gctcagcgcaaaaccaggtggcctg

SEQ ID NO: 4502712 - DNA, 25 bp, Homo sapien
ggatattgttctgcccatcttcgag

SEQ ID NO: 4502713 - DNA, 25 bp, Homo sapien
tttccgagggagcctcgttcaggtg

SEQ ID NO: 4502714 - DNA, 25 bp, Homo sapien
aagcggagctagagaggaacagaac

SEQ ID NO: 4502715 - DNA, 25 bp, Homo sapien
cgccaggggctctgacggcatctgt

SEQ ID NO: 4502716 - DNA, 25 bp, Homo sapien
gcaggaagcggagctagagaggaac

SEQ ID NO: 4502717 - DNA, 25 bp, Homo sapien
cggcaaccgccttcttgagtggact

SEQ ID NO: 4502718 - DNA, 25 bp, Homo sapien
tggagcaggaaaactccggcaaccg

SEQ ID NO: 4502719 - DNA, 25 bp, Homo sapien
caggcaggctccatcagagcggttt

SEQ ID NO: 4502720 - DNA, 25 bp, Homo sapien
tgagtggacttgaccttccctttct

SEQ ID NO: 4502721 - DNA, 25 bp, Homo sapien
ggctctggttctggggtgagcagag

SEQ ID NO: 4502722 - DNA, 25 bp, Homo sapien
agggctctggttctggggtgagcag

SEQ ID NO: 4502723 - DNA, 25 bp, Homo sapien
cagggctctggttctggggtgagca

SEQ ID NO: 4502724 - DNA, 25 bp, Homo sapien
tctggttctggggtgagcagagggt

SEQ ID NO: 4502725 - DNA, 25 bp, Homo sapien
gggctctggtccacgtgcatggtga

SEQ ID NO: 4502726 - DNA, 25 bp, Homo sapien
agtgggctctggtccacgtgcatgg

SEQ ID NO: 4502727 - DNA, 25 bp, Homo sapien
tctggtccacgtgcatggtgagctg

SEQ ID NO: 4502728 - DNA, 25 bp, Homo sapien
cacctcgagggcaccgttcctccaa

SEQ ID NO: 4502729 - DNA, 25 bp, Homo sapien
catctgtgcaacaaggccagcgtca

SEQ ID NO: 4502730 - DNA, 25 bp, Homo sapien
tctccaggccgttcagccaaagcag

SEQ ID NO: 4502731 - DNA, 25 bp, Homo sapien
gttttgagctcactctgagctccat

SEQ ID NO: 4502732 - DNA, 25 bp, Homo sapien
tgtgtctggccaagcagatctgccc

SEQ ID NO: 4502733 - DNA, 25 bp, Homo sapien
cttgcaggacgggctaggttgggag

SEQ ID NO: 4502734 - DNA, 25 bp, Homo sapien
tgcaggacgggctaggttgggagcc

SEQ ID NO: 4502735 - DNA, 25 bp, Homo sapien
ggacgggctaggttgggagcctctg

SEQ ID NO: 4502736 - DNA, 25 bp, Homo sapien
caggacgggctaggttgggagcctc

SEQ ID NO: 4502737 - DNA, 25 bp, Homo sapien
gccgtcgtgaatatggaacacagca

SEQ ID NO: 4502738 - DNA, 25 bp, Homo sapien
tactggttgccctcacgagcatgga

SEQ ID NO: 4502739 - DNA, 25 bp, Homo sapien
tgccctcacgagcatggaaatgccg

SEQ ID NO: 4502740 - DNA, 25 bp, Homo sapien
cgagcatggaaatgccgtcgtgaat

SEQ ID NO: 4502741 - DNA, 25 bp, Homo sapien
tggcggccggaaccgtcactacagg

SEQ ID NO: 4502742 - DNA, 25 bp, Homo sapien
ccgtgcccttagcagtcccagggac

SEQ ID NO: 4502743 - DNA, 25 bp, Homo sapien
tgctcgtccggcacagagaacagtt

SEQ ID NO: 4502744 - DNA, 25 bp, Homo sapien
cggagccattggtgctcgtccggca

SEQ ID NO: 4502745 - DNA, 25 bp, Homo sapien
gagacaggtgactatgtggtggaga

SEQ ID NO: 4502746 - DNA, 25 bp, Homo sapien
cagggagacaggtgactatgtggtg

SEQ ID NO: 4502747 - DNA, 25 bp, Homo sapien
tgtggtggagagacatatggtgccc

SEQ ID NO: 4502748 - DNA, 25 bp, Homo sapien
tatgtggtggagagacatatggtgc

SEQ ID NO: 4502749 - DNA, 25 bp, Homo sapien
tcacgatgagctgtctttggagctt

SEQ ID NO: 4502750 - DNA, 25 bp, Homo sapien
acgatgagctgtctttggagcttgg

SEQ ID NO: 4502751 - DNA, 25 bp, Homo sapien
cacgatgagctgtctttggagcttg

SEQ ID NO: 4502752 - DNA, 25 bp, Homo sapien
gccaccacacattgcttttgtaaag

SEQ ID NO: 4502753 - DNA, 25 bp, Homo sapien
tgcttttgtaaagtcacttttcctc

SEQ ID NO: 4502754 - DNA, 25 bp, Homo sapien
taacagccaccacacattgcttttg

SEQ ID NO: 4502755 - DNA, 25 bp, Homo sapien
acacattgcttttgtaaagtcactt

SEQ ID NO: 4502756 - DNA, 25 bp, Homo sapien
tacgccctgtgcacgcggcggacgg

SEQ ID NO: 4502757 - DNA, 25 bp, Homo sapien
ctacgccctgtgcacgcggcggacg

SEQ ID NO: 4502758 - DNA, 25 bp, Homo sapien
tgcacgcggcggacggcccgcacct

SEQ ID NO: 4502759 - DNA, 25 bp, Homo sapien
ctgtgcacgcggcggacggcccgca

SEQ ID NO: 4502760 - DNA, 25 bp, Homo sapien
agaagataaggtgtgttaaagccat

SEQ ID NO: 4502761 - DNA, 25 bp, Homo sapien
ttgtggtcactatgggctgtgcaga

SEQ ID NO: 4502762 - DNA, 25 bp, Homo sapien
tggccagttgtggtcactatgggct

SEQ ID NO: 4502763 - DNA, 25 bp, Homo sapien
tgagaagataaggtgtgttaaagcc

SEQ ID NO: 4502764 - DNA, 25 bp, Homo sapien
gggagcccaaatttcagatgagcac

SEQ ID NO: 4502765 - DNA, 25 bp, Homo sapien
cagtatggcaaacgggtcacgtgaa

SEQ ID NO: 4502766 - DNA, 25 bp, Homo sapien
gatctgggaaggtgacttgtgctcc

SEQ ID NO: 4502767 - DNA, 25 bp, Homo sapien
gactcgcccgtgctcaagtctgtga

SEQ ID NO: 4502768 - DNA, 25 bp, Homo sapien
gttccttccggttgattttctctga

SEQ ID NO: 4502769 - DNA, 25 bp, Homo sapien
ggtgaaccggagcttgagcgtggcc

SEQ ID NO: 4502770 - DNA, 25 bp, Homo sapien
ggccatccattaacaggagaccagt

SEQ ID NO: 4502771 - DNA, 25 bp, Homo sapien
ccggttgattttctctgacacccac

SEQ ID NO: 4502772 - DNA, 25 bp, Homo sapien
taaagggacaggcagtgttctttcc

SEQ ID NO: 4502773 - DNA, 25 bp, Homo sapien
tgtaaagggacaggcagtgttcttt

SEQ ID NO: 4502774 - DNA, 25 bp, Homo sapien
gctgtaaagggacaggcagtgttct

SEQ ID NO: 4502775 - DNA, 25 bp, Homo sapien
ctgctgtaaagggacaggcagtgtt

SEQ ID NO: 4502776 - DNA, 25 bp, Homo sapien
tggtcgtggtggagagtcagagccc

SEQ ID NO: 4502777 - DNA, 25 bp, Homo sapien
tagcagatcccgatcacgaagccag

SEQ ID NO: 4502778 - DNA, 25 bp, Homo sapien
cacataccccagagttctgtagctg

SEQ ID NO: 4502779 - DNA, 25 bp, Homo sapien
tgcggtgctgctctgagaacagttt

SEQ ID NO: 4502780 - DNA, 25 bp, Homo sapien
gatttctgtcatgaactgcccacat

SEQ ID NO: 4502781 - DNA, 25 bp, Homo sapien
gacctggatccaggtggaatccact

SEQ ID NO: 4502782 - DNA, 25 bp, Homo sapien
tgactgatcctggacagtcagtgga

SEQ ID NO: 4502783 - DNA, 25 bp, Homo sapien
atccactgcgccctgagagtgagtg

SEQ ID NO: 4502784 - DNA, 25 bp, Homo sapien
ccctcgacagtcatgaccattgact

SEQ ID NO: 4502785 - DNA, 25 bp, Homo sapien
gtgacaggcaggaaaccgagtgctc

SEQ ID NO: 4502786 - DNA, 25 bp, Homo sapien
aagaggcattttaggatgccgtgaa

SEQ ID NO: 4502787 - DNA, 25 bp, Homo sapien
ggttgtgacaggcaggaaaccgagt

SEQ ID NO: 4502788 - DNA, 25 bp, Homo sapien
ttaggatgccgtgaaaacttgggga

SEQ ID NO: 4502789 - DNA, 25 bp, Homo sapien
gaagcctcgtaaactcttaggaaga

SEQ ID NO: 4502790 - DNA, 25 bp, Homo sapien
gcagagctggatccaagttccctga

SEQ ID NO: 4502791 - DNA, 25 bp, Homo sapien
gtcattcccttgagctttggaagag

SEQ ID NO: 4502792 - DNA, 25 bp, Homo sapien
tggatccaagttccctgagagtttg

SEQ ID NO: 4502793 - DNA, 25 bp, Homo sapien
agtccccacggcgacgatgcccggg

SEQ ID NO: 4502794 - DNA, 25 bp, Homo sapien
tggcaggggcggagtcgcctcgggc

SEQ ID NO: 4502795 - DNA, 25 bp, Homo sapien
tagcggtggtggtaccagtgcccgc

SEQ ID NO: 4502796 - DNA, 25 bp, Homo sapien
cggcggcggtggtgacggcagtccc

SEQ ID NO: 4502797 - DNA, 25 bp, Homo sapien
ctagtggtaacaggccgagctggat

SEQ ID NO: 4502798 - DNA, 25 bp, Homo sapien
tgatctagggccgtggttttccgag

SEQ ID NO: 4502799 - DNA, 25 bp, Homo sapien
ttttccgaggtcctcacggcgagcg

SEQ ID NO: 4502800 - DNA, 25 bp, Homo sapien
tcaatgctgggccagatgtgcgcga

SEQ ID NO: 4502801 - DNA, 25 bp, Homo sapien
cggaagtgggtttttcagcctcctg

SEQ ID NO: 4502802 - DNA, 25 bp, Homo sapien
ggaagtgggtttttcagcctcctgc

SEQ ID NO: 4502803 - DNA, 25 bp, Homo sapien
tgatttcttgggtggattttgagcc

SEQ ID NO: 4502804 - DNA, 25 bp, Homo sapien
ttaactgctgtaagaagatgcccct

SEQ ID NO: 4502805 - DNA, 25 bp, Homo sapien
tcctgtgcatcacaaacgggtgatt

SEQ ID NO: 4502806 - DNA, 25 bp, Homo sapien
gccccttccgcaggtatctggtgca

SEQ ID NO: 4502807 - DNA, 25 bp, Homo sapien
cgccaaggtaagcgcgggtcgggag

SEQ ID NO: 4502808 - DNA, 25 bp, Homo sapien
agccgccaaggtaagcgcgggtcgg

SEQ ID NO: 4502809 - DNA, 25 bp, Homo sapien
gcagccgccaaggtaagcgcgggtc

SEQ ID NO: 4502810 - DNA, 25 bp, Homo sapien
caaggtaagcgcgggtcgggagccg

SEQ ID NO: 4502811 - DNA, 25 bp, Homo sapien
cccggggcagacgagcggcgccccg

SEQ ID NO: 4502812 - DNA, 25 bp, Homo sapien
ccggggcagacgagcggcgccccga

SEQ ID NO: 4502813 - DNA, 25 bp, Homo sapien
tgtgtaaccagaccgacttcacgct

SEQ ID NO: 4502814 - DNA, 25 bp, Homo sapien
gggtttcagatccacacatggcgat

SEQ ID NO: 4502815 - DNA, 25 bp, Homo sapien
gttcaagccactgtgtgcatgcgct

SEQ ID NO: 4502816 - DNA, 25 bp, Homo sapien
ttactgctcccgacgtggccgtgtt

SEQ ID NO: 4502817 - DNA, 25 bp, Homo sapien
cagagttctcatcatatcaaaattc

SEQ ID NO: 4502818 - DNA, 25 bp, Homo sapien
gagttctcatcatatcaaaattcaa

SEQ ID NO: 4502819 - DNA, 25 bp, Homo sapien
agagttctcatcatatcaaaattca

SEQ ID NO: 4502820 - DNA, 25 bp, Homo sapien
aataacgatcgtgttttaatgcgga

SEQ ID NO: 4502821 - DNA, 25 bp, Homo sapien
taaaaccacatctctgaagaccaca

SEQ ID NO: 4502822 - DNA, 25 bp, Homo sapien
gatcgtgttttaatgcggacgatac

SEQ ID NO: 4502823 - DNA, 25 bp, Homo sapien
gaagaccacacgcataaataacgat

SEQ ID NO: 4502824 - DNA, 25 bp, Homo sapien
acttgctctttctttaaggtgcctt

SEQ ID NO: 4502825 - DNA, 25 bp, Homo sapien
ttccgaggacagttgctgacttgct

SEQ ID NO: 4502826 - DNA, 25 bp, Homo sapien
cgaggacagttgctgacttgctctt

SEQ ID NO: 4502827 - DNA, 25 bp, Homo sapien
agtaggttccgaggacagttgctga

SEQ ID NO: 4502828 - DNA, 25 bp, Homo sapien
cacctctgccactctgatactcttc

SEQ ID NO: 4502829 - DNA, 25 bp, Homo sapien
cctctgccactctgatactcttcca

SEQ ID NO: 4502830 - DNA, 25 bp, Homo sapien
acctctgccactctgatactcttcc

SEQ ID NO: 4502831 - DNA, 25 bp, Homo sapien
ctctgccactctgatactcttccat

SEQ ID NO: 4502832 - DNA, 25 bp, Homo sapien
aagcttgctccccatagtgtttctc

SEQ ID NO: 4502833 - DNA, 25 bp, Homo sapien
aagtggggtacaagcttgctcccca

SEQ ID NO: 4502834 - DNA, 25 bp, Homo sapien
cacattcatactccactagctttgg

SEQ ID NO: 4502835 - DNA, 25 bp, Homo sapien
attcatactccactagctttggcag

SEQ ID NO: 4502836 - DNA, 25 bp, Homo sapien
tgagcttcccggtgattcacaaggt

SEQ ID NO: 4502837 - DNA, 25 bp, Homo sapien
aagaacaatgcaccggcagagcttg

SEQ ID NO: 4502838 - DNA, 25 bp, Homo sapien
cttcccggtgattcacaaggtgggc

SEQ ID NO: 4502839 - DNA, 25 bp, Homo sapien
cagagcccaccagaagaacaatgca

SEQ ID NO: 4502840 - DNA, 25 bp, Homo sapien
agtcccctcccatagccgtatacgg

SEQ ID NO: 4502841 - DNA, 25 bp, Homo sapien
gccgtatacggggacctagcttgca

SEQ ID NO: 4502842 - DNA, 25 bp, Homo sapien
tcccatagccgtatacggggaccta

SEQ ID NO: 4502843 - DNA, 25 bp, Homo sapien
tatacggggacctagcttgcatccc

SEQ ID NO: 4502844 - DNA, 25 bp, Homo sapien
cactgcctcctcgttagggcagtgc

SEQ ID NO: 4502845 - DNA, 25 bp, Homo sapien
agttcaggcttcacatcctttgagg

SEQ ID NO: 4502846 - DNA, 25 bp, Homo sapien
gcagtgccacaggagtcctggttcc

SEQ ID NO: 4502847 - DNA, 25 bp, Homo sapien
gcctcctcgttagggcagtgccaca

SEQ ID NO: 4502848 - DNA, 25 bp, Homo sapien
gggcgtccgaccagataacacaagg

SEQ ID NO: 4502849 - DNA, 25 bp, Homo sapien
gcctctggtaggtatttcatcaggt

SEQ ID NO: 4502850 - DNA, 25 bp, Homo sapien
taacacaaggaatgcggatgccacc

SEQ ID NO: 4502851 - DNA, 25 bp, Homo sapien
ttgaataagttagacggcctgcggg

SEQ ID NO: 4502852 - DNA, 25 bp, Homo sapien
gagcatcaggaaggaagggtgcagt

SEQ ID NO: 4502853 - DNA, 25 bp, Homo sapien
catcaggaaggaagggtgcagtata

SEQ ID NO: 4502854 - DNA, 25 bp, Homo sapien
gcttgggatggtgagcatcaggaag

SEQ ID NO: 4502855 - DNA, 25 bp, Homo sapien
gtgagcatcaggaaggaagggtgca

SEQ ID NO: 4502856 - DNA, 25 bp, Homo sapien
tgcgaccgtatgttcctccagggaa

SEQ ID NO: 4502857 - DNA, 25 bp, Homo sapien
tcccagtgctgcgaccgtatgttcc

SEQ ID NO: 4502858 - DNA, 25 bp, Homo sapien
ggtcctccgcagtgccagctacatc

SEQ ID NO: 4502859 - DNA, 25 bp, Homo sapien
agtgctgcgaccgtatgttcctcca

SEQ ID NO: 4502860 - DNA, 25 bp, Homo sapien
taaggataataagggctggagaagt

SEQ ID NO: 4502861 - DNA, 25 bp, Homo sapien
aacaagtgccctagctgctctagct

SEQ ID NO: 4502862 - DNA, 25 bp, Homo sapien
tccagggacttctagctaattccac

SEQ ID NO: 4502863 - DNA, 25 bp, Homo sapien
tggagaagtccacgctccagggact

SEQ ID NO: 4502864 - DNA, 25 bp, Homo sapien
gctggggttttctcaagcagccaaa

SEQ ID NO: 4502865 - DNA, 25 bp, Homo sapien
gaaaaaactgggtcatctctaacga

SEQ ID NO: 4502866 - DNA, 25 bp, Homo sapien
aaatgcatcttcaaccctggcagag

SEQ ID NO: 4502867 - DNA, 25 bp, Homo sapien
tggcagagttcagtgcggaaaaaac

SEQ ID NO: 4502868 - DNA, 25 bp, Homo sapien
ctgcaatctacaaggctccaggtcc

SEQ ID NO: 4502869 - DNA, 25 bp, Homo sapien
tccaggtccgaggctggaccaaaac

SEQ ID NO: 4502870 - DNA, 25 bp, Homo sapien
ctgttgcatccggaaagccagcctg

SEQ ID NO: 4502871 - DNA, 25 bp, Homo sapien
ctgctgttgcatccggaaagccagc

SEQ ID NO: 4502872 - DNA, 25 bp, Homo sapien
gcctggcaggaaattgttccataac

SEQ ID NO: 4502873 - DNA, 25 bp, Homo sapien
gaacccggccacaagtaagcatcat

SEQ ID NO: 4502874 - DNA, 25 bp, Homo sapien
gcattataaaagtaagccactgcgc

SEQ ID NO: 4502875 - DNA, 25 bp, Homo sapien
ctacacgtgcgtaccatcacgcttg

SEQ ID NO: 4502876 - DNA, 25 bp, Homo sapien
ccctggaatcccatggccagcagca

SEQ ID NO: 4502877 - DNA, 25 bp, Homo sapien
cctggaatcccatggccagcagcag

SEQ ID NO: 4502878 - DNA, 25 bp, Homo sapien
ggtccagagtcaggtggtcagacaa

SEQ ID NO: 4502879 - DNA, 25 bp, Homo sapien
cagcaggtccagagtcaggtggtca

SEQ ID NO: 4502880 - DNA, 25 bp, Homo sapien
cagcttgacctctggtaaaaccagc

SEQ ID NO: 4502881 - DNA, 25 bp, Homo sapien
ctggaagtaatctacaggacactgg

SEQ ID NO: 4502882 - DNA, 25 bp, Homo sapien
cactgggttcaagatcctcagcttg

SEQ ID NO: 4502883 - DNA, 25 bp, Homo sapien
aagtaatctacaggacactgggttc

SEQ ID NO: 4502884 - DNA, 25 bp, Homo sapien
ccaggcagcttgatgtccccagcat

SEQ ID NO: 4502885 - DNA, 25 bp, Homo sapien
ggggttcgcagcgccctgcaaagtc

SEQ ID NO: 4502886 - DNA, 25 bp, Homo sapien
caaagtcggggtgagcctggctgaa

SEQ ID NO: 4502887 - DNA, 25 bp, Homo sapien
aaagtcggggtgagcctggctgaaa

SEQ ID NO: 4502888 - DNA, 25 bp, Homo sapien
gttcgcagcgccctgcaaagtcggg

SEQ ID NO: 4502889 - DNA, 25 bp, Homo sapien
cagaacgatggagacatatagagca

SEQ ID NO: 4502890 - DNA, 25 bp, Homo sapien
gaacgatggagacatatagagcata

SEQ ID NO: 4502891 - DNA, 25 bp, Homo sapien
aacgatggagacatatagagcatac

SEQ ID NO: 4502892 - DNA, 25 bp, Homo sapien
agaacgatggagacatatagagcat

SEQ ID NO: 4502893 - DNA, 25 bp, Homo sapien
gccatgaaaagaacttgcgctgcat

SEQ ID NO: 4502894 - DNA, 25 bp, Homo sapien
cacttgccatgaaaagaacttgcgc

SEQ ID NO: 4502895 - DNA, 25 bp, Homo sapien
catgaaaagaacttgcgctgcatac

SEQ ID NO: 4502896 - DNA, 25 bp, Homo sapien
ttgccatgaaaagaacttgcgctgc

SEQ ID NO: 4502897 - DNA, 25 bp, Homo sapien
gatgtactacgcacacaaggtggac

SEQ ID NO: 4502898 - DNA, 25 bp, Homo sapien
gggccaccactagcaaacgctgagt

SEQ ID NO: 4502899 - DNA, 25 bp, Homo sapien
cccgtggacttgctagtgtgccgat

SEQ ID NO: 4502900 - DNA, 25 bp, Homo sapien
caatacaggtggttcaaatggagag

SEQ ID NO: 4502901 - DNA, 25 bp, Homo sapien
catgagacagcgtagattggtggtt

SEQ ID NO: 4502902 - DNA, 25 bp, Homo sapien
ctgtatcatgagacagcgtagattg

SEQ ID NO: 4502903 - DNA, 25 bp, Homo sapien
tatcatgagacagcgtagattggtg

SEQ ID NO: 4502904 - DNA, 25 bp, Homo sapien
acagcgtagattggtggttagcaga

SEQ ID NO: 4502905 - DNA, 25 bp, Homo sapien
agtgcccgaacctgcaggcgaggct

SEQ ID NO: 4502906 - DNA, 25 bp, Homo sapien
aggcgaggctgtaaccacgaggaaa

SEQ ID NO: 4502907 - DNA, 25 bp, Homo sapien
ggatacttcatagtgccagccacgt

SEQ ID NO: 4502908 - DNA, 25 bp, Homo sapien
gcagagcccgcagaaaggtggatac

SEQ ID NO: 4502909 - DNA, 25 bp, Homo sapien
ttctgggactcagcacaggtcttct

SEQ ID NO: 4502910 - DNA, 25 bp, Homo sapien
gaccagtgcctttgctcgatgtgac

SEQ ID NO: 4502911 - DNA, 25 bp, Homo sapien
cacctgaggataggacgacctgagg

SEQ ID NO: 4502912 - DNA, 25 bp, Homo sapien
tgagctgacacggtgaagagctgcc

SEQ ID NO: 4502913 - DNA, 25 bp, Homo sapien
tcatgccaccctttgaagcctactg

SEQ ID NO: 4502914 - DNA, 25 bp, Homo sapien
ctccgtactattgactcatgccacc

SEQ ID NO: 4502915 - DNA, 25 bp, Homo sapien
cctccgtactattgactcatgccac

SEQ ID NO: 4502916 - DNA, 25 bp, Homo sapien
gaagcctactgcacaaaagacacac

SEQ ID NO: 4502917 - DNA, 25 bp, Homo sapien
acatggtcagtcctactttcagaat

SEQ ID NO: 4502918 - DNA, 25 bp, Homo sapien
gaagagaccactggtggactacccc

SEQ ID NO: 4502919 - DNA, 25 bp, Homo sapien
tgcaaaaatcctacactaactccag

SEQ ID NO: 4502920 - DNA, 25 bp, Homo sapien
ccaagaggacttttggccgccacgg

SEQ ID NO: 4502921 - DNA, 25 bp, Homo sapien
ggaactcgcagtcacctctggcaaa

SEQ ID NO: 4502922 - DNA, 25 bp, Homo sapien
tatgtaccttatttgtgagtgagag

SEQ ID NO: 4502923 - DNA, 25 bp, Homo sapien
ccagaggagttccacacaatgtgtg

SEQ ID NO: 4502924 - DNA, 25 bp, Homo sapien
ctcctaacttattgaacccagagga

SEQ ID NO: 4502925 - DNA, 25 bp, Homo sapien
gcataagctaagatacctctcctaa

SEQ ID NO: 4502926 - DNA, 25 bp, Homo sapien
tgttcgattgtgaagccccaccagg

SEQ ID NO: 4502927 - DNA, 25 bp, Homo sapien
catgctttagggctgtggtcggctt

SEQ ID NO: 4502928 - DNA, 25 bp, Homo sapien
cgtggctttcggtacagactatggg

SEQ ID NO: 4502929 - DNA, 25 bp, Homo sapien
cagctctgggctgacaatgttcgat

SEQ ID NO: 4502930 - DNA, 25 bp, Homo sapien
gaactcttggatgcaattacagcca

SEQ ID NO: 4502931 - DNA, 25 bp, Homo sapien
cagctctggattaagccctcgggag

SEQ ID NO: 4502932 - DNA, 25 bp, Homo sapien
tagccaagagcctatgcagggcctg

SEQ ID NO: 4502933 - DNA, 25 bp, Homo sapien
tgttgcgacaacaggacttggaccc

SEQ ID NO: 4502934 - DNA, 25 bp, Homo sapien
cttagtgccttggagcaaggtaggt

SEQ ID NO: 4502935 - DNA, 25 bp, Homo sapien
taggtgatgcaccttcaagttttgt

SEQ ID NO: 4502936 - DNA, 25 bp, Homo sapien
caaggtaggtgatgcaccttcaagt

SEQ ID NO: 4502937 - DNA, 25 bp, Homo sapien
ggtaggtgatgcaccttcaagtttt

SEQ ID NO: 4502938 - DNA, 25 bp, Homo sapien
tcctgagaagtccagcaaccaagat

SEQ ID NO: 4502939 - DNA, 25 bp, Homo sapien
atcaccactgagagtttttcctgag

SEQ ID NO: 4502940 - DNA, 25 bp, Homo sapien
tgcacgtgaggcacaaattccacaa

SEQ ID NO: 4502941 - DNA, 25 bp, Homo sapien
acctgaccatgtgcttaactgcacg

SEQ ID NO: 4502942 - DNA, 25 bp, Homo sapien
agggaaggagcatgtgatatctcca

SEQ ID NO: 4502943 - DNA, 25 bp, Homo sapien
ggagggaaggagcatgtgatatctc

SEQ ID NO: 4502944 - DNA, 25 bp, Homo sapien
gagggaaggagcatgtgatatctcc

SEQ ID NO: 4502945 - DNA, 25 bp, Homo sapien
gggagggaaggagcatgtgatatct

SEQ ID NO: 4502946 - DNA, 25 bp, Homo sapien
aagcccaatgctttaaggattctac

SEQ ID NO: 4502947 - DNA, 25 bp, Homo sapien
tagcatttccgcaagcccaatgctt

SEQ ID NO: 4502948 - DNA, 25 bp, Homo sapien
gaacctggaggttgatagcatttcc

SEQ ID NO: 4502949 - DNA, 25 bp, Homo sapien
caatgctttaaggattctactgtgg

SEQ ID NO: 4502950 - DNA, 25 bp, Homo sapien
ttagccacaagcctagcaaagggtg

SEQ ID NO: 4502951 - DNA, 25 bp, Homo sapien
gccacaagcctagcaaagggtggac

SEQ ID NO: 4502952 - DNA, 25 bp, Homo sapien
gatttagccacaagcctagcaaagg

SEQ ID NO: 4502953 - DNA, 25 bp, Homo sapien
aagatttagccacaagcctagcaaa

SEQ ID NO: 4502954 - DNA, 25 bp, Homo sapien
acaggagatgttatgaagagtagca

SEQ ID NO: 4502955 - DNA, 25 bp, Homo sapien
gatgttatgaagagtagcaagtccc

SEQ ID NO: 4502956 - DNA, 25 bp, Homo sapien
ggatccagaaaaggacgtgtcccat

SEQ ID NO: 4502957 - DNA, 25 bp, Homo sapien
tgaagagtagcaagtccctgggatg

SEQ ID NO: 4502958 - DNA, 25 bp, Homo sapien
tgcggccagcggtgtgcagttatca

SEQ ID NO: 4502959 - DNA, 25 bp, Homo sapien
gagtctctctgagccgggctgcggc

SEQ ID NO: 4502960 - DNA, 25 bp, Homo sapien
gttatcacaaatgacgacagcagca

SEQ ID NO: 4502961 - DNA, 25 bp, Homo sapien
cagtccctcagaatcaggtcatgag

SEQ ID NO: 4502962 - DNA, 25 bp, Homo sapien
ccacactcggtgtaacagaagcaga

SEQ ID NO: 4502963 - DNA, 25 bp, Homo sapien
tgtggtttttcctgtcgctcggcct

SEQ ID NO: 4502964 - DNA, 25 bp, Homo sapien
tttcctgtcgctcggcctttccaaa

SEQ ID NO: 4502965 - DNA, 25 bp, Homo sapien
ccaaaatgagacagacctcctgcac

SEQ ID NO: 4502966 - DNA, 25 bp, Homo sapien
catccacaactctgccttgcatgta

SEQ ID NO: 4502967 - DNA, 25 bp, Homo sapien
ctgccttgcatgtactgtcgctgtt

SEQ ID NO: 4502968 - DNA, 25 bp, Homo sapien
aaagtccactcttccatccacaact

SEQ ID NO: 4502969 - DNA, 25 bp, Homo sapien
aactctgccttgcatgtactgtcgc

SEQ ID NO: 4502970 - DNA, 25 bp, Homo sapien
taacactgcgttgttgagatccagc

SEQ ID NO: 4502971 - DNA, 25 bp, Homo sapien
tcaaacttcatgtgcatccacagca

SEQ ID NO: 4502972 - DNA, 25 bp, Homo sapien
ccagcgatgtcgctgttggctggct

SEQ ID NO: 4502973 - DNA, 25 bp, Homo sapien
cagcctcatctcttagctgagagag

SEQ ID NO: 4502974 - DNA, 25 bp, Homo sapien
aatactgagagctctagccctccag

SEQ ID NO: 4502975 - DNA, 25 bp, Homo sapien
tccagggaattcgacttccggccca

SEQ ID NO: 4502976 - DNA, 25 bp, Homo sapien
ctgtgctgacttcacatatgtccaa

SEQ ID NO: 4502977 - DNA, 25 bp, Homo sapien
ggaattcgacttccggcccacagag

SEQ ID NO: 4502978 - DNA, 25 bp, Homo sapien
cttaagctaaggtaggacacctgag

SEQ ID NO: 4502979 - DNA, 25 bp, Homo sapien
agatccctgagaatagcgcttttca

SEQ ID NO: 4502980 - DNA, 25 bp, Homo sapien
cacaagtcaagtatccaggcctaag

SEQ ID NO: 4502981 - DNA, 25 bp, Homo sapien
caggcctaagcagcagttctctagc

SEQ ID NO: 4502982 - DNA, 25 bp, Homo sapien
tatacctagacacctatgatagttt

SEQ ID NO: 4502983 - DNA, 25 bp, Homo sapien
tctttttcaagggaactgattcagc

SEQ ID NO: 4502984 - DNA, 25 bp, Homo sapien
gtggctctcgcctctaatcccggaa

SEQ ID NO: 4502985 - DNA, 25 bp, Homo sapien
ggaagaaagagccattaccccttgc

SEQ ID NO: 4502986 - DNA, 25 bp, Homo sapien
tccactcatagggatttttggtctt

SEQ ID NO: 4502987 - DNA, 25 bp, Homo sapien
ggcttccactcatagggatttttgg

SEQ ID NO: 4502988 - DNA, 25 bp, Homo sapien
gcttccactcatagggatttttggt

SEQ ID NO: 4502989 - DNA, 25 bp, Homo sapien
ggagcagccgtagcgccggcagcag

SEQ ID NO: 4502990 - DNA, 25 bp, Homo sapien
ctggccgaagccgtcaagctttcct

SEQ ID NO: 4502991 - DNA, 25 bp, Homo sapien
ctccctggcctggccgaagccgtca

SEQ ID NO: 4502992 - DNA, 25 bp, Homo sapien
agccgtagcgccggcagcaggaagt

SEQ ID NO: 4502993 - DNA, 25 bp, Homo sapien
ctagaaatcactagggccacctctg

SEQ ID NO: 4502994 - DNA, 25 bp, Homo sapien
cacaacgtgcagtaggaaggaagac

SEQ ID NO: 4502995 - DNA, 25 bp, Homo sapien
aataaaacagctcataggtcagccc

SEQ ID NO: 4502996 - DNA, 25 bp, Homo sapien
gttcaggcagatctttccacgtata

SEQ ID NO: 4502997 - DNA, 25 bp, Homo sapien
cagttggataaactcctaaattcaa

SEQ ID NO: 4502998 - DNA, 25 bp, Homo sapien
ccagttggataaactcctaaattca

SEQ ID NO: 4502999 - DNA, 25 bp, Homo sapien
ttctccacgatcctccacaaacttc

SEQ ID NO: 4503000 - DNA, 25 bp, Homo sapien
tctccacgatcctccacaaacttct

SEQ ID NO: 4503001 - DNA, 25 bp, Homo sapien
gaaatgactcgtttcacatctgcat

SEQ ID NO: 4503002 - DNA, 25 bp, Homo sapien
tgttccacaaagctgtgaggttcca

SEQ ID NO: 4503003 - DNA, 25 bp, Homo sapien
aaataggtgttggagtatatcaggg

SEQ ID NO: 4503004 - DNA, 25 bp, Homo sapien
tgcgccaacctgaaagagactgttt

SEQ ID NO: 4503005 - DNA, 25 bp, Homo sapien
ggctggcttctccgctcttgcaggc

SEQ ID NO: 4503006 - DNA, 25 bp, Homo sapien
tccgctcttgcaggcccacgatgac

SEQ ID NO: 4503007 - DNA, 25 bp, Homo sapien
cttctccgctcttgcaggcccacga

SEQ ID NO: 4503008 - DNA, 25 bp, Homo sapien
gacggcgatggtgacaggactcact

SEQ ID NO: 4503009 - DNA, 25 bp, Homo sapien
tcgctgccgagttccgtcatgatca

SEQ ID NO: 4503010 - DNA, 25 bp, Homo sapien
acggctgtctcgctgccgagttccg

SEQ ID NO: 4503011 - DNA, 25 bp, Homo sapien
gtctcgctgccgagttccgtcatga

SEQ ID NO: 4503012 - DNA, 25 bp, Homo sapien
gccgagttccgtcatgatcatgtgg

SEQ ID NO: 4503013 - DNA, 25 bp, Homo sapien
tattctcgtcccccccatagcccat

SEQ ID NO: 4503014 - DNA, 25 bp, Homo sapien
ggataagatgaaacctttacctgtg

SEQ ID NO: 4503015 - DNA, 25 bp, Homo sapien
tgcaggataagatgaaacctttacc

SEQ ID NO: 4503016 - DNA, 25 bp, Homo sapien
ctgtgcaggataagatgaaaccttt

SEQ ID NO: 4503017 - DNA, 25 bp, Homo sapien
aagatgaaacctttacctgtgaaca

SEQ ID NO: 4503018 - DNA, 25 bp, Homo sapien
cttgtgccctagagttgtggccctt

SEQ ID NO: 4503019 - DNA, 25 bp, Homo sapien
ttgtgccctagagttgtggcccttt

SEQ ID NO: 4503020 - DNA, 25 bp, Homo sapien
tctgcacacctatgtggtgagctgg

SEQ ID NO: 4503021 - DNA, 25 bp, Homo sapien
gaatctgacatgagagcccaggtgg

SEQ ID NO: 4503022 - DNA, 25 bp, Homo sapien
caacccagagcctggtgattggagg

SEQ ID NO: 4503023 - DNA, 25 bp, Homo sapien
agctggaatctgacatgagagccca

SEQ ID NO: 4503024 - DNA, 25 bp, Homo sapien
tctcctcagaaccagcaatattcac

SEQ ID NO: 4503025 - DNA, 25 bp, Homo sapien
gtaccctcaagtctccacatgaaat

SEQ ID NO: 4503026 - DNA, 25 bp, Homo sapien
ttctcctcagaaccagcaatattca

SEQ ID NO: 4503027 - DNA, 25 bp, Homo sapien
tagttgccgtcgaggataaaggcca

SEQ ID NO: 4503028 - DNA, 25 bp, Homo sapien
gatagttgccgtcgaggataaaggc

SEQ ID NO: 4503029 - DNA, 25 bp, Homo sapien
cagatagttgccgtcgaggataaag

SEQ ID NO: 4503030 - DNA, 25 bp, Homo sapien
gttgccgtcgaggataaaggccatc

SEQ ID NO: 4503031 - DNA, 25 bp, Homo sapien
ccaggagtgctcactgacaggcagt

SEQ ID NO: 4503032 - DNA, 25 bp, Homo sapien
gaacttttcaggatgaatacagcac

SEQ ID NO: 4503033 - DNA, 25 bp, Homo sapien
tcagagaccagtaggtggcttcctc

SEQ ID NO: 4503034 - DNA, 25 bp, Homo sapien
cagaatgttctatctatgtggcagg

SEQ ID NO: 4503035 - DNA, 25 bp, Homo sapien
ccttccattgtgagtcttactggaa

SEQ ID NO: 4503036 - DNA, 25 bp, Homo sapien
aggaggatgactgcaagatgctttc

SEQ ID NO: 4503037 - DNA, 25 bp, Homo sapien
tgtgagtcttactggaaggcggctt

SEQ ID NO: 4503038 - DNA, 25 bp, Homo sapien
ttcggtaaaggtgatcttctggcca

SEQ ID NO: 4503039 - DNA, 25 bp, Homo sapien
accaagagcctgacactttgcccat

SEQ ID NO: 4503040 - DNA, 25 bp, Homo sapien
tgacactttgcccatcctcgttctc

SEQ ID NO: 4503041 - DNA, 25 bp, Homo sapien
aagagcctgacactttgcccatcct

SEQ ID NO: 4503042 - DNA, 25 bp, Homo sapien
gctgcaccaagagcctgacactttg

SEQ ID NO: 4503043 - DNA, 25 bp, Homo sapien
tcagtcactgattgggtctgcacca

SEQ ID NO: 4503044 - DNA, 25 bp, Homo sapien
cagtcactgattgggtctgcaccag

SEQ ID NO: 4503045 - DNA, 25 bp, Homo sapien
tcaaacgagcaacggcaacgcagga

SEQ ID NO: 4503046 - DNA, 25 bp, Homo sapien
tcatacattattggcttactgctgg

SEQ ID NO: 4503047 - DNA, 25 bp, Homo sapien
tactgctggaaaggtcatgagcacc

SEQ ID NO: 4503048 - DNA, 25 bp, Homo sapien
atgagcacccggaggcagtccgtct

SEQ ID NO: 4503049 - DNA, 25 bp, Homo sapien
cagggccgcttgttcccaggcccca

SEQ ID NO: 4503050 - DNA, 25 bp, Homo sapien
ctgctctaagcctgctggtgtaagg

SEQ ID NO: 4503051 - DNA, 25 bp, Homo sapien
aggactggtagagttggtgccactc

SEQ ID NO: 4503052 - DNA, 25 bp, Homo sapien
taagcctgctggtgtaaggactggt

SEQ ID NO: 4503053 - DNA, 25 bp, Homo sapien
catggaacagattcatccgcacggc

SEQ ID NO: 4503054 - DNA, 25 bp, Homo sapien
tgataaattatagcagcccagccaa

SEQ ID NO: 4503055 - DNA, 25 bp, Homo sapien
tgccagggttaaggacacacttgtg

SEQ ID NO: 4503056 - DNA, 25 bp, Homo sapien
tggaccattggaacagcctcctagc

SEQ ID NO: 4503057 - DNA, 25 bp, Homo sapien
gaattattaactgcaagagcagccc

SEQ ID NO: 4503058 - DNA, 25 bp, Homo sapien
ctttctggcagggattgaattgtcc

SEQ ID NO: 4503059 - DNA, 25 bp, Homo sapien
ttgaattgtccaggataacgctgtc

SEQ ID NO: 4503060 - DNA, 25 bp, Homo sapien
ccagcctagacgtgtgcgccgaggg

SEQ ID NO: 4503061 - DNA, 25 bp, Homo sapien
agtgaatctggacttctgggtgcac

SEQ ID NO: 4503062 - DNA, 25 bp, Homo sapien
atctggacttctgggtgcacaccgg

SEQ ID NO: 4503063 - DNA, 25 bp, Homo sapien
tcagggtacttctgggggaacttga

SEQ ID NO: 4503064 - DNA, 25 bp, Homo sapien
tgaatctggacttctgggtgcacac

SEQ ID NO: 4503065 - DNA, 25 bp, Homo sapien
tggtggagaaaatatcatctttccc

SEQ ID NO: 4503066 - DNA, 25 bp, Homo sapien
ctggtggagaaaatatcatctttcc

SEQ ID NO: 4503067 - DNA, 25 bp, Homo sapien
gttgtaatagacatgcaccgcccgc

SEQ ID NO: 4503068 - DNA, 25 bp, Homo sapien
ggttgtaatagacatgcaccgcccg

SEQ ID NO: 4503069 - DNA, 25 bp, Homo sapien
cccaccaggttgtaatagacatgca

SEQ ID NO: 4503070 - DNA, 25 bp, Homo sapien
ccaccaggttgtaatagacatgcac

SEQ ID NO: 4503071 - DNA, 25 bp, Homo sapien
aggcagctccgatctgatgagaatt

SEQ ID NO: 4503072 - DNA, 25 bp, Homo sapien
aaccggatgtcagcaacaggagcaa

SEQ ID NO: 4503073 - DNA, 25 bp, Homo sapien
tcactccaagggctgacaagccctt

SEQ ID NO: 4503074 - DNA, 25 bp, Homo sapien
ttgtcagcagcaggttatcagcccc

SEQ ID NO: 4503075 - DNA, 25 bp, Homo sapien
tttctcttttgcatctttgttgtag

SEQ ID NO: 4503076 - DNA, 25 bp, Homo sapien
tgttaaacaatccttcctctttctc

SEQ ID NO: 4503077 - DNA, 25 bp, Homo sapien
ctctttctcttttgcatctttgttg

SEQ ID NO: 4503078 - DNA, 25 bp, Homo sapien
tctgtcgtttgttaaacaatccttc

SEQ ID NO: 4503079 - DNA, 25 bp, Homo sapien
tctttctccatgtgtccattgggca

SEQ ID NO: 4503080 - DNA, 25 bp, Homo sapien
tccattgggcaccaacattttacaa

SEQ ID NO: 4503081 - DNA, 25 bp, Homo sapien
catgtgtccattgggcaccaacatt

SEQ ID NO: 4503082 - DNA, 25 bp, Homo sapien
tctccatgtgtccattgggcaccaa

SEQ ID NO: 4503083 - DNA, 25 bp, Homo sapien
gggctttgctgcagaaaggtcccaa

SEQ ID NO: 4503084 - DNA, 25 bp, Homo sapien
gccaaatggcgggtcatcagaaagg

SEQ ID NO: 4503085 - DNA, 25 bp, Homo sapien
tgagaagccaaatggcgggtcatca

SEQ ID NO: 4503086 - DNA, 25 bp, Homo sapien
gaaaggtcccaagtgagaagccaaa

SEQ ID NO: 4503087 - DNA, 25 bp, Homo sapien
ctgtcaggctgtaatgacttcattc

SEQ ID NO: 4503088 - DNA, 25 bp, Homo sapien
tcactgtcaggctgtaatgacttca

SEQ ID NO: 4503089 - DNA, 25 bp, Homo sapien
actgtcaggctgtaatgacttcatt

SEQ ID NO: 4503090 - DNA, 25 bp, Homo sapien
gaaatctagcgtatccactaggaca

SEQ ID NO: 4503091 - DNA, 25 bp, Homo sapien
gaaacggttgctatttcttgcccaa

SEQ ID NO: 4503092 - DNA, 25 bp, Homo sapien
cgtgcatagcgtccccaaatgagct

SEQ ID NO: 4503093 - DNA, 25 bp, Homo sapien
ccctttactggaccaattgagaaag

SEQ ID NO: 4503094 - DNA, 25 bp, Homo sapien
ttcaaggccaagatcggcaggcgtg

SEQ ID NO: 4503095 - DNA, 25 bp, Homo sapien
cccaaatattttggcgatgccacga

SEQ ID NO: 4503096 - DNA, 25 bp, Homo sapien
tgtaccctcatgcactgtaagtggg

SEQ ID NO: 4503097 - DNA, 25 bp, Homo sapien
gagtgacccgtgtctgtacacaagg

SEQ ID NO: 4503098 - DNA, 25 bp, Homo sapien
cagtttgtttccgaccaggcattcc

SEQ ID NO: 4503099 - DNA, 25 bp, Homo sapien
tgtttccgaccaggcattccctgcg

SEQ ID NO: 4503100 - DNA, 25 bp, Homo sapien
ggaaagcatcggtgggctcctcact

SEQ ID NO: 4503101 - DNA, 25 bp, Homo sapien
ccagggcctggaggaaagcatcggt

SEQ ID NO: 4503102 - DNA, 25 bp, Homo sapien
catatccagcccttcagctgatccc

SEQ ID NO: 4503103 - DNA, 25 bp, Homo sapien
ccatatccagcccttcagctgatcc

SEQ ID NO: 4503104 - DNA, 25 bp, Homo sapien
tccatatccagcccttcagctgatc

SEQ ID NO: 4503105 - DNA, 25 bp, Homo sapien
ctccatatccagcccttcagctgat

SEQ ID NO: 4503106 - DNA, 25 bp, Homo sapien
tagtgatgggctcccaggaggcttc

SEQ ID NO: 4503107 - DNA, 25 bp, Homo sapien
gctcccaggaggcttcagatccctg

SEQ ID NO: 4503108 - DNA, 25 bp, Homo sapien
ggctcccaggaggcttcagatccct

SEQ ID NO: 4503109 - DNA, 25 bp, Homo sapien
cccaggaggcttcagatccctgtcc

SEQ ID NO: 4503110 - DNA, 25 bp, Homo sapien
ccgcaggtggtcagggaaaggtaag

SEQ ID NO: 4503111 - DNA, 25 bp, Homo sapien
ctgccgcaggtggtcagggaaaggt

SEQ ID NO: 4503112 - DNA, 25 bp, Homo sapien
gccgcaggtggtcagggaaaggtaa

SEQ ID NO: 4503113 - DNA, 25 bp, Homo sapien
tgccgcaggtggtcagggaaaggta

SEQ ID NO: 4503114 - DNA, 25 bp, Homo sapien
gctggcagagcattgaaagcaagtt

SEQ ID NO: 4503115 - DNA, 25 bp, Homo sapien
cctgcctgctggcagagcattgaaa

SEQ ID NO: 4503116 - DNA, 25 bp, Homo sapien
cgagcagctgtagatgatgctccct

SEQ ID NO: 4503117 - DNA, 25 bp, Homo sapien
acagccaagggcgagcagctgtaga

SEQ ID NO: 4503118 - DNA, 25 bp, Homo sapien
atcaacttccctggaggcacggagc

SEQ ID NO: 4503119 - DNA, 25 bp, Homo sapien
taacacagcatttgagggtcgcagc

SEQ ID NO: 4503120 - DNA, 25 bp, Homo sapien
agctggctgtagaggttcccaccca

SEQ ID NO: 4503121 - DNA, 25 bp, Homo sapien
ctcgagccggtgaagcaacatcaaa

SEQ ID NO: 4503122 - DNA, 25 bp, Homo sapien
tcacatggtaggttctccttccagg

SEQ ID NO: 4503123 - DNA, 25 bp, Homo sapien
acatggtaggttctccttccagggg

SEQ ID NO: 4503124 - DNA, 25 bp, Homo sapien
cacatggtaggttctccttccaggg

SEQ ID NO: 4503125 - DNA, 25 bp, Homo sapien
gggcttcctttgtggtcctctcaca

SEQ ID NO: 4503126 - DNA, 25 bp, Homo sapien
tcagccatgatgaaacggactttct

SEQ ID NO: 4503127 - DNA, 25 bp, Homo sapien
ttgtgtactctacttccgcttctta

SEQ ID NO: 4503128 - DNA, 25 bp, Homo sapien
tccgcttcttaaggtcagccatgat

SEQ ID NO: 4503129 - DNA, 25 bp, Homo sapien
tcccagcatgctgaaaagtaaccca

SEQ ID NO: 4503130 - DNA, 25 bp, Homo sapien
ggttgctgcaaacgttgccccaggt

SEQ ID NO: 4503131 - DNA, 25 bp, Homo sapien
tggctgcaatggctcgtgaaattct

SEQ ID NO: 4503132 - DNA, 25 bp, Homo sapien
cacttggtgttagagggtggtccct

SEQ ID NO: 4503133 - DNA, 25 bp, Homo sapien
gctcatttgtcactgttctaaatcc

SEQ ID NO: 4503134 - DNA, 25 bp, Homo sapien
tcctctgctggcacggagtagacca

SEQ ID NO: 4503135 - DNA, 25 bp, Homo sapien
gttctaaatccaactcgtttctcaa

SEQ ID NO: 4503136 - DNA, 25 bp, Homo sapien
gtagaccagctcaagatctgtgcca

SEQ ID NO: 4503137 - DNA, 25 bp, Homo sapien
tggttataagtgtatgtctctcctc

SEQ ID NO: 4503138 - DNA, 25 bp, Homo sapien
gttataagtgtatgtctctcctcca

SEQ ID NO: 4503139 - DNA, 25 bp, Homo sapien
ggttataagtgtatgtctctcctcc

SEQ ID NO: 4503140 - DNA, 25 bp, Homo sapien
gtggttataagtgtatgtctctcct

SEQ ID NO: 4503141 - DNA, 25 bp, Homo sapien
gcggctgaattgcattgcctattat

SEQ ID NO: 4503142 - DNA, 25 bp, Homo sapien
tattacaggtcgcttggattccctc

SEQ ID NO: 4503143 - DNA, 25 bp, Homo sapien
ggccaccttgcctgcggctgaattg

SEQ ID NO: 4503144 - DNA, 25 bp, Homo sapien
tgcattgcctattattacaggtcgc

SEQ ID NO: 4503145 - DNA, 25 bp, Homo sapien
aggaagtggccaagaaacctctcgc

SEQ ID NO: 4503146 - DNA, 25 bp, Homo sapien
agtggccaagaaacctctcgcccat

SEQ ID NO: 4503147 - DNA, 25 bp, Homo sapien
ggaagtggccaagaaacctctcgcc

SEQ ID NO: 4503148 - DNA, 25 bp, Homo sapien
tgaggaagtggccaagaaacctctc

SEQ ID NO: 4503149 - DNA, 25 bp, Homo sapien
tctccacatttgcaatcttggggag

SEQ ID NO: 4503150 - DNA, 25 bp, Homo sapien
cttctcagaggatttgtaacttttc

SEQ ID NO: 4503151 - DNA, 25 bp, Homo sapien
gaggatttgtaacttttcaaggctc

SEQ ID NO: 4503152 - DNA, 25 bp, Homo sapien
cacatttgcaatcttggggaggtca

SEQ ID NO: 4503153 - DNA, 25 bp, Homo sapien
ctctgctgtgtagggaggttttgct

SEQ ID NO: 4503154 - DNA, 25 bp, Homo sapien
ctgcaaccacgctctgtggagactt

SEQ ID NO: 4503155 - DNA, 25 bp, Homo sapien
aaccacgctctgtggagacttccag

SEQ ID NO: 4503156 - DNA, 25 bp, Homo sapien
tagggaggttttgctcccagcagag

SEQ ID NO: 4503157 - DNA, 25 bp, Homo sapien
tggagccctcctgcttcgggaacgg

SEQ ID NO: 4503158 - DNA, 25 bp, Homo sapien
ggatgagcaggctttggagactccc

SEQ ID NO: 4503159 - DNA, 25 bp, Homo sapien
gccctcctgcttcgggaacggccat

SEQ ID NO: 4503160 - DNA, 25 bp, Homo sapien
ttggagactcccttggagccctcct

SEQ ID NO: 4503161 - DNA, 25 bp, Homo sapien
actgcctctgtgtggtagggcttca

SEQ ID NO: 4503162 - DNA, 25 bp, Homo sapien
tgaaggttgtctatgatggatggcc

SEQ ID NO: 4503163 - DNA, 25 bp, Homo sapien
taaggtcgtcttcacttgtggtcca

SEQ ID NO: 4503164 - DNA, 25 bp, Homo sapien
tggatggccaggcacaaaacggcag

SEQ ID NO: 4503165 - DNA, 25 bp, Homo sapien
gggccgcggcgtttttattcaggca

SEQ ID NO: 4503166 - DNA, 25 bp, Homo sapien
tgtggccgctactgcgggccgcggc

SEQ ID NO: 4503167 - DNA, 25 bp, Homo sapien
tgtgagcccgcgtcctcgctgtggc

SEQ ID NO: 4503168 - DNA, 25 bp, Homo sapien
tattcaggcaatgcttaagggaagc

SEQ ID NO: 4503169 - DNA, 25 bp, Homo sapien
gaagcatccagtaaacaagggtcca

SEQ ID NO: 4503170 - DNA, 25 bp, Homo sapien
ctgaagcatccagtaaacaagggtc

SEQ ID NO: 4503171 - DNA, 25 bp, Homo sapien
tgaagcatccagtaaacaagggtcc

SEQ ID NO: 4503172 - DNA, 25 bp, Homo sapien
tggtagcaacccataaccctgttcg

SEQ ID NO: 4503173 - DNA, 25 bp, Homo sapien
ctactgtgtagctgatgcccttgaa

SEQ ID NO: 4503174 - DNA, 25 bp, Homo sapien
aaccctgttcgtcttgctaccttca

SEQ ID NO: 4503175 - DNA, 25 bp, Homo sapien
aagtggccacaatggtagcaaccca

SEQ ID NO: 4503176 - DNA, 25 bp, Homo sapien
gatccatccaaacacagcactgggc

SEQ ID NO: 4503177 - DNA, 25 bp, Homo sapien
cagcactgggcaccggacagccgcc

SEQ ID NO: 4503178 - DNA, 25 bp, Homo sapien
gcactgggcaccggacagccgcctg

SEQ ID NO: 4503179 - DNA, 25 bp, Homo sapien
gggatccatccaaacacagcactgg

SEQ ID NO: 4503180 - DNA, 25 bp, Homo sapien
catgaaagataagccaatagctgcc

SEQ ID NO: 4503181 - DNA, 25 bp, Homo sapien
aagataagccaatagctgcccttga

SEQ ID NO: 4503182 - DNA, 25 bp, Homo sapien
gataagccaatagctgcccttgaca

SEQ ID NO: 4503183 - DNA, 25 bp, Homo sapien
taagccaatagctgcccttgacagc

SEQ ID NO: 4503184 - DNA, 25 bp, Homo sapien
aagagaaccaaggcttcaagggcag

SEQ ID NO: 4503185 - DNA, 25 bp, Homo sapien
ttgagtcaaatccatgacatcaagt

SEQ ID NO: 4503186 - DNA, 25 bp, Homo sapien
ctacccgggcaaagaagcacaccat

SEQ ID NO: 4503187 - DNA, 25 bp, Homo sapien
catttagagtttgtgacgtaagtct

SEQ ID NO: 4503188 - DNA, 25 bp, Homo sapien
gatctgccaaggtagcaggccctgg

SEQ ID NO: 4503189 - DNA, 25 bp, Homo sapien
agagcctacgaacccaaagctggga

SEQ ID NO: 4503190 - DNA, 25 bp, Homo sapien
tgatttcacccccattagtaggctg

SEQ ID NO: 4503191 - DNA, 25 bp, Homo sapien
ttcctgcggaattcacctttgatgg

SEQ ID NO: 4503192 - DNA, 25 bp, Homo sapien
tcagaagagcattcaaagacttggg

SEQ ID NO: 4503193 - DNA, 25 bp, Homo sapien
cctttgatgggagatccggcaagtt

SEQ ID NO: 4503194 - DNA, 25 bp, Homo sapien
ctaacagtggcagtgtgtggattca

SEQ ID NO: 4503195 - DNA, 25 bp, Homo sapien
cgcaactgtcgaattaatgaaaaat

SEQ ID NO: 4503196 - DNA, 25 bp, Homo sapien
gagtctccgcaactgtcgaattaat

SEQ ID NO: 4503197 - DNA, 25 bp, Homo sapien
atatagagtctccgcaactgtcgaa

SEQ ID NO: 4503198 - DNA, 25 bp, Homo sapien
tctccgcaactgtcgaattaatgaa

SEQ ID NO: 4503199 - DNA, 25 bp, Homo sapien
gggctttgaagaggatgcaacccaa

SEQ ID NO: 4503200 - DNA, 25 bp, Homo sapien
gagtcatacagagtcctcgagccag

SEQ ID NO: 4503201 - DNA, 25 bp, Homo sapien
tagcatcccatctgccacaactgtg

SEQ ID NO: 4503202 - DNA, 25 bp, Homo sapien
tccactagggaagtcgagtcataca

SEQ ID NO: 4503203 - DNA, 25 bp, Homo sapien
tatccaaaaagtcccattgtagtgc

SEQ ID NO: 4503204 - DNA, 25 bp, Homo sapien
tctgctacatcacacagtctgcaaa

SEQ ID NO: 4503205 - DNA, 25 bp, Homo sapien
tatttcgccaaatagaaaggctggg

SEQ ID NO: 4503206 - DNA, 25 bp, Homo sapien
tatttgagtcctagctttaagccag

SEQ ID NO: 4503207 - DNA, 25 bp, Homo sapien
ttctaaaggaagaagaaggcctgcc

SEQ ID NO: 4503208 - DNA, 25 bp, Homo sapien
ctctaccccaggggttgagagttct

SEQ ID NO: 4503209 - DNA, 25 bp, Homo sapien
tcttctaaaggaagaagaaggcctg

SEQ ID NO: 4503210 - DNA, 25 bp, Homo sapien
ggttgagagttcttctaaaggaaga

SEQ ID NO: 4503211 - DNA, 25 bp, Homo sapien
gaggacacgggcatcaatttcacag

SEQ ID NO: 4503212 - DNA, 25 bp, Homo sapien
tttgtagcaatgcacaggtggcgtc

SEQ ID NO: 4503213 - DNA, 25 bp, Homo sapien
gaccaggagcggtggaaatagcact

SEQ ID NO: 4503214 - DNA, 25 bp, Homo sapien
catgccagatgccttgaccaggagc

SEQ ID NO: 4503215 - DNA, 25 bp, Homo sapien
caaactgacccatggatccatagca

SEQ ID NO: 4503216 - DNA, 25 bp, Homo sapien
gacccatggatccatagcacagtag

SEQ ID NO: 4503217 - DNA, 25 bp, Homo sapien
cacagtaggccataaggagaacata

SEQ ID NO: 4503218 - DNA, 25 bp, Homo sapien
gatccatagcacagtaggccataag

SEQ ID NO: 4503219 - DNA, 25 bp, Homo sapien
ctgagcagctcaagttgccttgcac

SEQ ID NO: 4503220 - DNA, 25 bp, Homo sapien
gagcagctcaagttgccttgcactg

SEQ ID NO: 4503221 - DNA, 25 bp, Homo sapien
ttgcactgagcgtgtcataggaagc

SEQ ID NO: 4503222 - DNA, 25 bp, Homo sapien
gttgccttgcactgagcgtgtcata

SEQ ID NO: 4503223 - DNA, 25 bp, Homo sapien
tttgatcaatgacacagccagacat

SEQ ID NO: 4503224 - DNA, 25 bp, Homo sapien
tcttcactccatgaggtttgatcaa

SEQ ID NO: 4503225 - DNA, 25 bp, Homo sapien
cagagccaacccttccgaggcttgt

SEQ ID NO: 4503226 - DNA, 25 bp, Homo sapien
tgaaagcagagccaacccttccgag

SEQ ID NO: 4503227 - DNA, 25 bp, Homo sapien
tcagtagacgtcgacagtgagtaca

SEQ ID NO: 4503228 - DNA, 25 bp, Homo sapien
tcgacagtgagtacaaagagacctg

SEQ ID NO: 4503229 - DNA, 25 bp, Homo sapien
gccactaagttagcgctgaggcagt

SEQ ID NO: 4503230 - DNA, 25 bp, Homo sapien
aagagacctgcgagtttctctgcca

SEQ ID NO: 4503231 - DNA, 25 bp, Homo sapien
tgtctccagaaccccttctctctcc

SEQ ID NO: 4503232 - DNA, 25 bp, Homo sapien
ctctctccttctttctttctgccat

SEQ ID NO: 4503233 - DNA, 25 bp, Homo sapien
tctccagaaccccttctctctcctt

SEQ ID NO: 4503234 - DNA, 25 bp, Homo sapien
ctgccaagtgtctccagaacccctt

SEQ ID NO: 4503235 - DNA, 25 bp, Homo sapien
tgccaacttggtcatcaaatgatga

SEQ ID NO: 4503236 - DNA, 25 bp, Homo sapien
taaatcctgttaaggaggatgtgag

SEQ ID NO: 4503237 - DNA, 25 bp, Homo sapien
tgagggcctgaagaacaagtaggta

SEQ ID NO: 4503238 - DNA, 25 bp, Homo sapien
taggtaggctgtcatcagaatctgg

SEQ ID NO: 4503239 - DNA, 25 bp, Homo sapien
tgtgtgctttccaagacaatgttct

SEQ ID NO: 4503240 - DNA, 25 bp, Homo sapien
gaaaactgattgtatagactgaagc

SEQ ID NO: 4503241 - DNA, 25 bp, Homo sapien
gctgctgggcactatttcttgagag

SEQ ID NO: 4503242 - DNA, 25 bp, Homo sapien
tatactaacccacgcataaggagga

SEQ ID NO: 4503243 - DNA, 25 bp, Homo sapien
tagcccaaaactctcagcagcacga

SEQ ID NO: 4503244 - DNA, 25 bp, Homo sapien
catctctgccaaattcattgtgttc

SEQ ID NO: 4503245 - DNA, 25 bp, Homo sapien
tgagttatgcatttgatgtgttgac

SEQ ID NO: 4503246 - DNA, 25 bp, Homo sapien
ggtgagtctttgagttatgcatttg

SEQ ID NO: 4503247 - DNA, 25 bp, Homo sapien
ataagcattttcacccaagttgttc

SEQ ID NO: 4503248 - DNA, 25 bp, Homo sapien
cataagcattttcacccaagttgtt

SEQ ID NO: 4503249 - DNA, 25 bp, Homo sapien
ttttcacccaagttgttctctctga

SEQ ID NO: 4503250 - DNA, 25 bp, Homo sapien
tcataagcattttcacccaagttgt

SEQ ID NO: 4503251 - DNA, 25 bp, Homo sapien
gtcactttgcacagacacaattggt

SEQ ID NO: 4503252 - DNA, 25 bp, Homo sapien
tggaaacagcactacctcattgatg

SEQ ID NO: 4503253 - DNA, 25 bp, Homo sapien
tgctgtcacatagaaatccgggccc

SEQ ID NO: 4503254 - DNA, 25 bp, Homo sapien
tatggtgccctaagtgtatcttcca

SEQ ID NO: 4503255 - DNA, 25 bp, Homo sapien
ataaacagtgttgggaaaactggct

SEQ ID NO: 4503256 - DNA, 25 bp, Homo sapien
tatgcagaaaactgaaactgtaccc

SEQ ID NO: 4503257 - DNA, 25 bp, Homo sapien
tgcagaaaactgaaactgtacccct

SEQ ID NO: 4503258 - DNA, 25 bp, Homo sapien
catatgcagaaaactgaaactgtac

SEQ ID NO: 4503259 - DNA, 25 bp, Homo sapien
ttaatcggcagatcatgtatagaac

SEQ ID NO: 4503260 - DNA, 25 bp, Homo sapien
acttttaatcggcagatcatgtata

SEQ ID NO: 4503261 - DNA, 25 bp, Homo sapien
tgaactgtccttgggacttttaatc

SEQ ID NO: 4503262 - DNA, 25 bp, Homo sapien
aatcggcagatcatgtatagaacca

SEQ ID NO: 4503263 - DNA, 25 bp, Homo sapien
tacagaaggcgttcttatggcagct

SEQ ID NO: 4503264 - DNA, 25 bp, Homo sapien
catgaatattggcttctgtacggtt

SEQ ID NO: 4503265 - DNA, 25 bp, Homo sapien
ggtttttgctaccagacaatctctg

SEQ ID NO: 4503266 - DNA, 25 bp, Homo sapien
cccttatgattgtaggataggaacg

SEQ ID NO: 4503267 - DNA, 25 bp, Homo sapien
cacgtgggccaatgcatcattcaaa

SEQ ID NO: 4503268 - DNA, 25 bp, Homo sapien
agagcagtgcgtccaatccttgatg

SEQ ID NO: 4503269 - DNA, 25 bp, Homo sapien
tgccttcctaagagcagtgcgtcca

SEQ ID NO: 4503270 - DNA, 25 bp, Homo sapien
tgtgatcagtactcaagcctgagtc

SEQ ID NO: 4503271 - DNA, 25 bp, Homo sapien
tccttttcatgcttagtggaaatca

SEQ ID NO: 4503272 - DNA, 25 bp, Homo sapien
ctgatcatttgtggccggtgctggc

SEQ ID NO: 4503273 - DNA, 25 bp, Homo sapien
gtgctggccctcgaaattccttttc

SEQ ID NO: 4503274 - DNA, 25 bp, Homo sapien
cacaggacaggctgatcatttgtgg

SEQ ID NO: 4503275 - DNA, 25 bp, Homo sapien
ggccagtgacgggacaagaggctgt

SEQ ID NO: 4503276 - DNA, 25 bp, Homo sapien
cagtgacgggacaagaggctgtgca

SEQ ID NO: 4503277 - DNA, 25 bp, Homo sapien
tgacgggacaagaggctgtgcaagg

SEQ ID NO: 4503278 - DNA, 25 bp, Homo sapien
ggggccagtgacgggacaagaggct

SEQ ID NO: 4503279 - DNA, 25 bp, Homo sapien
ctgtcaggggattggactccagtcc

SEQ ID NO: 4503280 - DNA, 25 bp, Homo sapien
gcactgtcaggggattggactccag

SEQ ID NO: 4503281 - DNA, 25 bp, Homo sapien
tcctctgagtggagcacgtctgtgg

SEQ ID NO: 4503282 - DNA, 25 bp, Homo sapien
gcacgtctgtggcaggatctggagc

SEQ ID NO: 4503283 - DNA, 25 bp, Homo sapien
tcatctccagagcagaaagtcaaag

SEQ ID NO: 4503284 - DNA, 25 bp, Homo sapien
gataatcatggccaattatccatgg

SEQ ID NO: 4503285 - DNA, 25 bp, Homo sapien
aaatacacgagaaaaatggcccaca

SEQ ID NO: 4503286 - DNA, 25 bp, Homo sapien
caaaggcaatgggttgataatcatg

SEQ ID NO: 4503287 - DNA, 25 bp, Homo sapien
ttggttctgacccttgtaatctccc

SEQ ID NO: 4503288 - DNA, 25 bp, Homo sapien
cattggttctgacccttgtaatctc

SEQ ID NO: 4503289 - DNA, 25 bp, Homo sapien
ttacattggttctgacccttgtaat

SEQ ID NO: 4503290 - DNA, 25 bp, Homo sapien
tggttctgacccttgtaatctccca

SEQ ID NO: 4503291 - DNA, 25 bp, Homo sapien
tcaaacccacacacatcaatggtgt

SEQ ID NO: 4503292 - DNA, 25 bp, Homo sapien
tgtttggcccaatgtttcacagagg

SEQ ID NO: 4503293 - DNA, 25 bp, Homo sapien
gaggcctggctttgcaatgtctctt

SEQ ID NO: 4503294 - DNA, 25 bp, Homo sapien
acagaggaatcatttagaggcctgg

SEQ ID NO: 4503295 - DNA, 25 bp, Homo sapien
tgcaatggccaagcgtggttctcag

SEQ ID NO: 4503296 - DNA, 25 bp, Homo sapien
ggaatagaggtgacacgtatcccca

SEQ ID NO: 4503297 - DNA, 25 bp, Homo sapien
cctttgttgagagcctgcaatggcc

SEQ ID NO: 4503298 - DNA, 25 bp, Homo sapien
ggccccttgaagttatgacatgtga

SEQ ID NO: 4503299 - DNA, 25 bp, Homo sapien
gactgtccacaattagcctgaggag

SEQ ID NO: 4503300 - DNA, 25 bp, Homo sapien
ccagctggctgagagattcgtgctc

SEQ ID NO: 4503301 - DNA, 25 bp, Homo sapien
gactaagttgccacgctgctaatga

SEQ ID NO: 4503302 - DNA, 25 bp, Homo sapien
cgtgctcgtcaagaaaagactgtcc

SEQ ID NO: 4503303 - DNA, 25 bp, Homo sapien
ctgagtaggcaaaggcattaatccc

SEQ ID NO: 4503304 - DNA, 25 bp, Homo sapien
ggcaaaggcattaatcccatctcaa

SEQ ID NO: 4503305 - DNA, 25 bp, Homo sapien
ggatttgaagtctctagaatggttc

SEQ ID NO: 4503306 - DNA, 25 bp, Homo sapien
tctagaatggttcaatgatctggtc

SEQ ID NO: 4503307 - DNA, 25 bp, Homo sapien
ggcccattaatttcagcatgcttgg

SEQ ID NO: 4503308 - DNA, 25 bp, Homo sapien
cacttgcaatggtcagtctgtcctc

SEQ ID NO: 4503309 - DNA, 25 bp, Homo sapien
ttggcctttccgtctaagagcagga

SEQ ID NO: 4503310 - DNA, 25 bp, Homo sapien
gaactccttcctgacgatggcccat

SEQ ID NO: 4503311 - DNA, 25 bp, Homo sapien
tcaatgtctttgaactagtagtttt

SEQ ID NO: 4503312 - DNA, 25 bp, Homo sapien
cagctaacggaaaatgaaaagcggt

SEQ ID NO: 4503313 - DNA, 25 bp, Homo sapien
tttcagctaacggaaaatgaaaagc

SEQ ID NO: 4503314 - DNA, 25 bp, Homo sapien
tgaactagtagttttttcagctaac

SEQ ID NO: 4503315 - DNA, 25 bp, Homo sapien
ctattgcaaacccagagtagggaga

SEQ ID NO: 4503316 - DNA, 25 bp, Homo sapien
cactaagatttaaggcatgttgccg

SEQ ID NO: 4503317 - DNA, 25 bp, Homo sapien
acagttattgaaatgagtgtttccc

SEQ ID NO: 4503318 - DNA, 25 bp, Homo sapien
gaagttcctctgagtaccatcgccc

SEQ ID NO: 4503319 - DNA, 25 bp, Homo sapien
gacgatgtttggtcatgaatgccac

SEQ ID NO: 4503320 - DNA, 25 bp, Homo sapien
tgccctgttcttttgagcgttccat

SEQ ID NO: 4503321 - DNA, 25 bp, Homo sapien
gtgccctgttcttttgagcgttcca

SEQ ID NO: 4503322 - DNA, 25 bp, Homo sapien
gccctgttcttttgagcgttccatc

SEQ ID NO: 4503323 - DNA, 25 bp, Homo sapien
ccctgttcttttgagcgttccatcc

SEQ ID NO: 4503324 - DNA, 25 bp, Homo sapien
gaaattatgccacgcaaagaatgag

SEQ ID NO: 4503325 - DNA, 25 bp, Homo sapien
agtccggaaattatgccacgcaaag

SEQ ID NO: 4503326 - DNA, 25 bp, Homo sapien
tatgccacgcaaagaatgagctcat

SEQ ID NO: 4503327 - DNA, 25 bp, Homo sapien
cggaggagtccggaaattatgccac

SEQ ID NO: 4503328 - DNA, 25 bp, Homo sapien
gactgaacgaggtctctccatttgt

SEQ ID NO: 4503329 - DNA, 25 bp, Homo sapien
catccatcgactgaacgaggtctct

SEQ ID NO: 4503330 - DNA, 25 bp, Homo sapien
cttccttgttgctaccatccatcga

SEQ ID NO: 4503331 - DNA, 25 bp, Homo sapien
gctaccatccatcgactgaacgagg

SEQ ID NO: 4503332 - DNA, 25 bp, Homo sapien
cattattcttcagccttctggctgg

SEQ ID NO: 4503333 - DNA, 25 bp, Homo sapien
tgtttccctggatgtacgctggtct

SEQ ID NO: 4503334 - DNA, 25 bp, Homo sapien
tgtacgctggtctgtgtcatctcat

SEQ ID NO: 4503335 - DNA, 25 bp, Homo sapien
tcttctccattattcttcagccttc

SEQ ID NO: 4503336 - DNA, 25 bp, Homo sapien
atacttcgttctctaagtagctcac

SEQ ID NO: 4503337 - DNA, 25 bp, Homo sapien
tgatatacttcgttctctaagtagc

SEQ ID NO: 4503338 - DNA, 25 bp, Homo sapien
ggagttgatatacttcgttctctaa

SEQ ID NO: 4503339 - DNA, 25 bp, Homo sapien
cagggagttgatatacttcgttctc

SEQ ID NO: 4503340 - DNA, 25 bp, Homo sapien
caatgaatcgtaatgaagctcagct

SEQ ID NO: 4503341 - DNA, 25 bp, Homo sapien
tcagctggtatactactatgggcaa

SEQ ID NO: 4503342 - DNA, 25 bp, Homo sapien
tggaaagcgtttgcccttaaacaga

SEQ ID NO: 4503343 - DNA, 25 bp, Homo sapien
gatgtagaaaaagcaaccctattgg

SEQ ID NO: 4503344 - DNA, 25 bp, Homo sapien
aaacaaaccactgttcttcatctct

SEQ ID NO: 4503345 - DNA, 25 bp, Homo sapien
atagactaccttatcccccaccgtg

SEQ ID NO: 4503346 - DNA, 25 bp, Homo sapien
ccaccgtgagcatcttgatttggct

SEQ ID NO: 4503347 - DNA, 25 bp, Homo sapien
gtagaaaggacccttgctgcataac

SEQ ID NO: 4503348 - DNA, 25 bp, Homo sapien
ttgctgcataacccttcccatagac

SEQ ID NO: 4503349 - DNA, 25 bp, Homo sapien
aaagacttccaagtgtaggtgcaca

SEQ ID NO: 4503350 - DNA, 25 bp, Homo sapien
cctgaactattcaagatgtctggca

SEQ ID NO: 4503351 - DNA, 25 bp, Homo sapien
taggtgcacataattaggatcaggt

SEQ ID NO: 4503352 - DNA, 25 bp, Homo sapien
caggtgggttgtcctctttattcac

SEQ ID NO: 4503353 - DNA, 25 bp, Homo sapien
ggtgtccatcgaggaatgattttcc

SEQ ID NO: 4503354 - DNA, 25 bp, Homo sapien
tctttttacgtgaactctttgttca

SEQ ID NO: 4503355 - DNA, 25 bp, Homo sapien
tgttccattccaggtgtccatcgag

SEQ ID NO: 4503356 - DNA, 25 bp, Homo sapien
ttaaatgttccattccaggtgtcca

SEQ ID NO: 4503357 - DNA, 25 bp, Homo sapien
ccgttgttggcaagcttgttagaac

SEQ ID NO: 4503358 - DNA, 25 bp, Homo sapien
tgcaataagactagacaatgccgtt

SEQ ID NO: 4503359 - DNA, 25 bp, Homo sapien
tcacataacaaactctaattagttt

SEQ ID NO: 4503360 - DNA, 25 bp, Homo sapien
tcacacatgtacagccactgacatg

SEQ ID NO: 4503361 - DNA, 25 bp, Homo sapien
gagtcactatcgtaggaggtgccta

SEQ ID NO: 4503362 - DNA, 25 bp, Homo sapien
gtaaacagcctaacacagcagtgtg

SEQ ID NO: 4503363 - DNA, 25 bp, Homo sapien
tgacaccttataggagcagcccaca

SEQ ID NO: 4503364 - DNA, 25 bp, Homo sapien
ggatcaactaccagaagcccacagt

SEQ ID NO: 4503365 - DNA, 25 bp, Homo sapien
gcttcgcgcgtctggaggagttcca

SEQ ID NO: 4503366 - DNA, 25 bp, Homo sapien
aacatattgcttcgcgcgtctggag

SEQ ID NO: 4503367 - DNA, 25 bp, Homo sapien
tccatcaaacatattgcttcgcgcg

SEQ ID NO: 4503368 - DNA, 25 bp, Homo sapien
tgtatccatcaaacatattgcttcg

SEQ ID NO: 4503369 - DNA, 25 bp, Homo sapien
gaggtcagtcaaatgtgaatctata

SEQ ID NO: 4503370 - DNA, 25 bp, Homo sapien
ctcttcctttggaggtcagtcaaat

SEQ ID NO: 4503371 - DNA, 25 bp, Homo sapien
aaactcttcctttggaggtcagtca

SEQ ID NO: 4503372 - DNA, 25 bp, Homo sapien
gtgacattgcattaaatctcttgtc

SEQ ID NO: 4503373 - DNA, 25 bp, Homo sapien
caggtgtaaagacaacatagaccca

SEQ ID NO: 4503374 - DNA, 25 bp, Homo sapien
tatctgggatactctcatgcaaaca

SEQ ID NO: 4503375 - DNA, 25 bp, Homo sapien
catagacccaaccagggattccaca

SEQ ID NO: 4503376 - DNA, 25 bp, Homo sapien
tgctccactagtccatcagacttgc

SEQ ID NO: 4503377 - DNA, 25 bp, Homo sapien
gctggagtctaactcaagtgttacg

SEQ ID NO: 4503378 - DNA, 25 bp, Homo sapien
tcagcttatgaccaagacaagggtc

SEQ ID NO: 4503379 - DNA, 25 bp, Homo sapien
tctgataaggcagtatcggcttacc

SEQ ID NO: 4503380 - DNA, 25 bp, Homo sapien
acaagggtcattctttggttgctga

SEQ ID NO: 4503381 - DNA, 25 bp, Homo sapien
caggtgcaatgcagaaggtcaaaga

SEQ ID NO: 4503382 - DNA, 25 bp, Homo sapien
ggtacaggtgcaatgcagaaggtca

SEQ ID NO: 4503383 - DNA, 25 bp, Homo sapien
gggtacaggtgcaatgcagaaggtc

SEQ ID NO: 4503384 - DNA, 25 bp, Homo sapien
tacaggtgcaatgcagaaggtcaaa

SEQ ID NO: 4503385 - DNA, 25 bp, Homo sapien
acgggctcattgaatgttgcccacg

SEQ ID NO: 4503386 - DNA, 25 bp, Homo sapien
tgtgggccaagcacgggctcattga

SEQ ID NO: 4503387 - DNA, 25 bp, Homo sapien
agctgtgggccaagcacgggctcat

SEQ ID NO: 4503388 - DNA, 25 bp, Homo sapien
caagcacgggctcattgaatgttgc

SEQ ID NO: 4503389 - DNA, 25 bp, Homo sapien
caaggtggacggaattgtgtagatt

SEQ ID NO: 4503390 - DNA, 25 bp, Homo sapien
tgtgtagattgtatgaatacagtca

SEQ ID NO: 4503391 - DNA, 25 bp, Homo sapien
tcatcacacttcagaaaacgtgaat

SEQ ID NO: 4503392 - DNA, 25 bp, Homo sapien
catgaaaacttgcaaggtggacgga

SEQ ID NO: 4503393 - DNA, 25 bp, Homo sapien
catttggaaggcatggcaccaacta

SEQ ID NO: 4503394 - DNA, 25 bp, Homo sapien
ccaagtggtgctggaaaaggtattc

SEQ ID NO: 4503395 - DNA, 25 bp, Homo sapien
tagtccaaggcatcttgccaagtgg

SEQ ID NO: 4503396 - DNA, 25 bp, Homo sapien
aaccagggattgctttgcacgctca

SEQ ID NO: 4503397 - DNA, 25 bp, Homo sapien
cagctccatttatgttgccgcaaaa

SEQ ID NO: 4503398 - DNA, 25 bp, Homo sapien
cacttattgacaacatgcggtattt

SEQ ID NO: 4503399 - DNA, 25 bp, Homo sapien
tagatttaaggagtacctgtgtggg

SEQ ID NO: 4503400 - DNA, 25 bp, Homo sapien
tgccatctttataagtaccccatat

SEQ ID NO: 4503401 - DNA, 25 bp, Homo sapien
cttactagatgtggagcctttagga

SEQ ID NO: 4503402 - DNA, 25 bp, Homo sapien
ggtgaagggcatatcataaattgct

SEQ ID NO: 4503403 - DNA, 25 bp, Homo sapien
taatagttcctaagcagacttgctg

SEQ ID NO: 4503404 - DNA, 25 bp, Homo sapien
ggctatcacatgcaaagtagggact

SEQ ID NO: 4503405 - DNA, 25 bp, Homo sapien
agcgcctgtgctcagactgcccaca

SEQ ID NO: 4503406 - DNA, 25 bp, Homo sapien
gactcctgcagtgggcttcattttg

SEQ ID NO: 4503407 - DNA, 25 bp, Homo sapien
acacagtgcctgcaagggtgtccca

SEQ ID NO: 4503408 - DNA, 25 bp, Homo sapien
tgttggtagtctccacacgactcac

SEQ ID NO: 4503409 - DNA, 25 bp, Homo sapien
attgtccatttgcagataacatgat

SEQ ID NO: 4503410 - DNA, 25 bp, Homo sapien
tccatttgcagataacatgattgta

SEQ ID NO: 4503411 - DNA, 25 bp, Homo sapien
aaattgtccatttgcagataacatg

SEQ ID NO: 4503412 - DNA, 25 bp, Homo sapien
tcaaattgtccatttgcagataaca

SEQ ID NO: 4503413 - DNA, 25 bp, Homo sapien
ttgcagaaatgagcccacattctac

SEQ ID NO: 4503414 - DNA, 25 bp, Homo sapien
gaaatgagcccacattctaccatca

SEQ ID NO: 4503415 - DNA, 25 bp, Homo sapien
tagtttgagaactcaactggattgc

SEQ ID NO: 4503416 - DNA, 25 bp, Homo sapien
gaactcaactggattgcagaaatga

SEQ ID NO: 4503417 - DNA, 25 bp, Homo sapien
cttcctatagaaatccccgaatcca

SEQ ID NO: 4503418 - DNA, 25 bp, Homo sapien
ttcctatagaaatccccgaatccat

SEQ ID NO: 4503419 - DNA, 25 bp, Homo sapien
gcttgatccccaggggagagcttga

SEQ ID NO: 4503420 - DNA, 25 bp, Homo sapien
catcattgcttgatccccaggggag

SEQ ID NO: 4503421 - DNA, 25 bp, Homo sapien
gatccccaggggagagcttgatcat

SEQ ID NO: 4503422 - DNA, 25 bp, Homo sapien
gctcaggaggcaccatcatcattgc

SEQ ID NO: 4503423 - DNA, 25 bp, Homo sapien
tggcagacataactttgcaatactc

SEQ ID NO: 4503424 - DNA, 25 bp, Homo sapien
gtctggcagacataactttgcaata

SEQ ID NO: 4503425 - DNA, 25 bp, Homo sapien
caagtctggcagacataactttgca

SEQ ID NO: 4503426 - DNA, 25 bp, Homo sapien
gacataactttgcaatactccaata

SEQ ID NO: 4503427 - DNA, 25 bp, Homo sapien
caagtcatgagtggttcctatgttc

SEQ ID NO: 4503428 - DNA, 25 bp, Homo sapien
ttgcttgcaagtcatgagtggttcc

SEQ ID NO: 4503429 - DNA, 25 bp, Homo sapien
gagtggttcctatgttcttccttcc

SEQ ID NO: 4503430 - DNA, 25 bp, Homo sapien
tcatgagtggttcctatgttcttcc

SEQ ID NO: 4503431 - DNA, 25 bp, Homo sapien
tccatgtgatgggaaacgagtggct

SEQ ID NO: 4503432 - DNA, 25 bp, Homo sapien
cttagaataggtcccttgctagaga

SEQ ID NO: 4503433 - DNA, 25 bp, Homo sapien
tcttgatgagtggactgagcttcca

SEQ ID NO: 4503434 - DNA, 25 bp, Homo sapien
cctgctgacattctggatgttctta

SEQ ID NO: 4503435 - DNA, 25 bp, Homo sapien
ttagtccccatgatctggccctgcc

SEQ ID NO: 4503436 - DNA, 25 bp, Homo sapien
cttagtccccatgatctggccctgc

SEQ ID NO: 4503437 - DNA, 25 bp, Homo sapien
tccaggggccctccctgccacttgt

SEQ ID NO: 4503438 - DNA, 25 bp, Homo sapien
cctgccacttgtccagccattctac

SEQ ID NO: 4503439 - DNA, 25 bp, Homo sapien
ttaaattgctttgatattgacgttc

SEQ ID NO: 4503440 - DNA, 25 bp, Homo sapien
attgctttgatattgacgttcagac

SEQ ID NO: 4503441 - DNA, 25 bp, Homo sapien
ttgctttgatattgacgttcagaca

SEQ ID NO: 4503442 - DNA, 25 bp, Homo sapien
aaattgctttgatattgacgttcag

SEQ ID NO: 4503443 - DNA, 25 bp, Homo sapien
tatgatcgccacatgaaagttctgg

SEQ ID NO: 4503444 - DNA, 25 bp, Homo sapien
tgtactgataagcaagcgaaaggcc

SEQ ID NO: 4503445 - DNA, 25 bp, Homo sapien
ttctggagcaccacatacgaaggca

SEQ ID NO: 4503446 - DNA, 25 bp, Homo sapien
tacgaaggcactcagaggacaagga

SEQ ID NO: 4503447 - DNA, 25 bp, Homo sapien
tgggatcccttgtcgttggcttacg

SEQ ID NO: 4503448 - DNA, 25 bp, Homo sapien
tccttcagccggagaagcaatccct

SEQ ID NO: 4503449 - DNA, 25 bp, Homo sapien
gaataaacagacattcctgcgcaag

SEQ ID NO: 4503450 - DNA, 25 bp, Homo sapien
tgcgcaagtgcaaggtaatccatgc

SEQ ID NO: 4503451 - DNA, 25 bp, Homo sapien
ctacccggggatgtgttgtaacatg

SEQ ID NO: 4503452 - DNA, 25 bp, Homo sapien
gtaacatgtgtagctcagcactgca

SEQ ID NO: 4503453 - DNA, 25 bp, Homo sapien
cactgcacgatggttccacgtgact

SEQ ID NO: 4503454 - DNA, 25 bp, Homo sapien
tgtgtagctcagcactgcacgatgg

SEQ ID NO: 4503455 - DNA, 25 bp, Homo sapien
ttgaagaaagtttgggctttggcag

SEQ ID NO: 4503456 - DNA, 25 bp, Homo sapien
tttgaagaaagtttgggctttggca

SEQ ID NO: 4503457 - DNA, 25 bp, Homo sapien
tgaagaaagtttgggctttggcaga

SEQ ID NO: 4503458 - DNA, 25 bp, Homo sapien
gaagaaagtttgggctttggcagaa

SEQ ID NO: 4503459 - DNA, 25 bp, Homo sapien
cattgctggcataagcatcatggcg

SEQ ID NO: 4503460 - DNA, 25 bp, Homo sapien
ctacccattagacgccattgctggc

SEQ ID NO: 4503461 - DNA, 25 bp, Homo sapien
gctggcataagcatcatggcgtctg

SEQ ID NO: 4503462 - DNA, 25 bp, Homo sapien
tagacgccattgctggcataagcat

SEQ ID NO: 4503463 - DNA, 25 bp, Homo sapien
taggctatggttccaatggcagttt

SEQ ID NO: 4503464 - DNA, 25 bp, Homo sapien
tcattcgagttgtcatttccttggt

SEQ ID NO: 4503465 - DNA, 25 bp, Homo sapien
taattccaacattgaacttagtgca

SEQ ID NO: 4503466 - DNA, 25 bp, Homo sapien
tttatcacatacgtaagtcttggcc

SEQ ID NO: 4503467 - DNA, 25 bp, Homo sapien
tgaattgcaaaatagccaaggaggc

SEQ ID NO: 4503468 - DNA, 25 bp, Homo sapien
cagctggtgtgattaagcatctgca

SEQ ID NO: 4503469 - DNA, 25 bp, Homo sapien
tctgttatggcaagcactacgacgc

SEQ ID NO: 4503470 - DNA, 25 bp, Homo sapien
caacagatgaagctttgtgaccaaa

SEQ ID NO: 4503471 - DNA, 25 bp, Homo sapien
tcttccagccaccataagccgtggc

SEQ ID NO: 4503472 - DNA, 25 bp, Homo sapien
gtctctcttcatgttgtcgtctctg

SEQ ID NO: 4503473 - DNA, 25 bp, Homo sapien
gtacagagagtcctacaaggtgatg

SEQ ID NO: 4503474 - DNA, 25 bp, Homo sapien
tgttgtcgtctctgtaccatgtgca

SEQ ID NO: 4503475 - DNA, 25 bp, Homo sapien
cttgcatatgagctgtagccccaga

SEQ ID NO: 4503476 - DNA, 25 bp, Homo sapien
tctccacttggaagggtagaactga

SEQ ID NO: 4503477 - DNA, 25 bp, Homo sapien
tagaactgattagtgccagagcatg

SEQ ID NO: 4503478 - DNA, 25 bp, Homo sapien
tagccaatttccaccaatgcccttg

SEQ ID NO: 4503479 - DNA, 25 bp, Homo sapien
aggagtcccagtggtcctgcactga

SEQ ID NO: 4503480 - DNA, 25 bp, Homo sapien
gggctctactagaagcatggcagtg

SEQ ID NO: 4503481 - DNA, 25 bp, Homo sapien
gataactattaggaagatgaggcaa

SEQ ID NO: 4503482 - DNA, 25 bp, Homo sapien
gttcatggcccactgtcacaacaca

SEQ ID NO: 4503483 - DNA, 25 bp, Homo sapien
tgtagcccctgagtacatgtttctt

SEQ ID NO: 4503484 - DNA, 25 bp, Homo sapien
ttgatatctaggcatgtaggccact

SEQ ID NO: 4503485 - DNA, 25 bp, Homo sapien
tggattcaggtcttaccacttctgg

SEQ ID NO: 4503486 - DNA, 25 bp, Homo sapien
catgacaatggaccgcaaacttgcc

SEQ ID NO: 4503487 - DNA, 25 bp, Homo sapien
gctagatctctacgtgacatgaaat

SEQ ID NO: 4503488 - DNA, 25 bp, Homo sapien
ggaaagattaaatccagagcttgaa

SEQ ID NO: 4503489 - DNA, 25 bp, Homo sapien
caagtggagtaagaattattgttcc

SEQ ID NO: 4503490 - DNA, 25 bp, Homo sapien
ggaccaagatgagaacctaagcccc

SEQ ID NO: 4503491 - DNA, 25 bp, Homo sapien
tatgcatagagtaatcactaggacc

SEQ ID NO: 4503492 - DNA, 25 bp, Homo sapien
aacacaataggtctctgcttatttc

SEQ ID NO: 4503493 - DNA, 25 bp, Homo sapien
tgataacctaacacaataggtctct

SEQ ID NO: 4503494 - DNA, 25 bp, Homo sapien
ctgctcctcagcaaccaatgatatc

SEQ ID NO: 4503495 - DNA, 25 bp, Homo sapien
tcctcagcaaccaatgatatcttcc

SEQ ID NO: 4503496 - DNA, 25 bp, Homo sapien
gctccagccattgaaaatagtgcaa

SEQ ID NO: 4503497 - DNA, 25 bp, Homo sapien
aaaatagtgcaatatgaaaacttgc

SEQ ID NO: 4503498 - DNA, 25 bp, Homo sapien
tcctcagcaagtgtaaagttgtaga

SEQ ID NO: 4503499 - DNA, 25 bp, Homo sapien
ccttgcttttccggatggtgaatgg

SEQ ID NO: 4503500 - DNA, 25 bp, Homo sapien
taattttccacaatatgtcctcagc

SEQ ID NO: 4503501 - DNA, 25 bp, Homo sapien
tggtgactctagacatcatcaggcc

SEQ ID NO: 4503502 - DNA, 25 bp, Homo sapien
caaccagaggtaataagattatagc

SEQ ID NO: 4503503 - DNA, 25 bp, Homo sapien
ggtctgtgactacttcaaccagagg

SEQ ID NO: 4503504 - DNA, 25 bp, Homo sapien
tagccatgtggaacgctttcagaag

SEQ ID NO: 4503505 - DNA, 25 bp, Homo sapien
cctttgaaaggcatataattggtgg

SEQ ID NO: 4503506 - DNA, 25 bp, Homo sapien
gagtggcttcactagtcaagtcagg

SEQ ID NO: 4503507 - DNA, 25 bp, Homo sapien
ggagagggcagtcacttacactgac

SEQ ID NO: 4503508 - DNA, 25 bp, Homo sapien
tcaagtcaggactgaaacataccac

SEQ ID NO: 4503509 - DNA, 25 bp, Homo sapien
ggtgcctcatgggtattagctcaga

SEQ ID NO: 4503510 - DNA, 25 bp, Homo sapien
aagcctcttggtaggagcactagag

SEQ ID NO: 4503511 - DNA, 25 bp, Homo sapien
tccatgacccaagtctacgtagatg

SEQ ID NO: 4503512 - DNA, 25 bp, Homo sapien
tatgcatccctacagggtgcttcac

SEQ ID NO: 4503513 - DNA, 25 bp, Homo sapien
tacgtagatgtcatgctatgcatcc

SEQ ID NO: 4503514 - DNA, 25 bp, Homo sapien
accttcctggatatggtgaactggg

SEQ ID NO: 4503515 - DNA, 25 bp, Homo sapien
tgtcggagtacaacgtgggtatttc

SEQ ID NO: 4503516 - DNA, 25 bp, Homo sapien
cctgctgcgagaactgatatatctg

SEQ ID NO: 4503517 - DNA, 25 bp, Homo sapien
tatcattccagcatgttcccctagg

SEQ ID NO: 4503518 - DNA, 25 bp, Homo sapien
tatcccttaagggatgcccctccat

SEQ ID NO: 4503519 - DNA, 25 bp, Homo sapien
tttgagataattgtctcctcatctg

SEQ ID NO: 4503520 - DNA, 25 bp, Homo sapien
cacattattctttgccttttgacca

SEQ ID NO: 4503521 - DNA, 25 bp, Homo sapien
catgcaccggagagttcacacacat

SEQ ID NO: 4503522 - DNA, 25 bp, Homo sapien
ctgtcagttccggtcggagtctgtg

SEQ ID NO: 4503523 - DNA, 25 bp, Homo sapien
ccgcgctgtcagttccggtcggagt

SEQ ID NO: 4503524 - DNA, 25 bp, Homo sapien
cagttccggtcggagtctgtggcct

SEQ ID NO: 4503525 - DNA, 25 bp, Homo sapien
tggaggccgcgctgtcagttccggt

SEQ ID NO: 4503526 - DNA, 25 bp, Homo sapien
ctagagagggcccaaaatggactct

SEQ ID NO: 4503527 - DNA, 25 bp, Homo sapien
gagtcatgggtctgtctctcatcag

SEQ ID NO: 4503528 - DNA, 25 bp, Homo sapien
ctgggtctgtccctagagagggccc

SEQ ID NO: 4503529 - DNA, 25 bp, Homo sapien
agagtcatgggtctgtctctcatca

SEQ ID NO: 4503530 - DNA, 25 bp, Homo sapien
gcactgtaggagatgccaactgttc

SEQ ID NO: 4503531 - DNA, 25 bp, Homo sapien
tcaaactagcaaatctccttaggct

SEQ ID NO: 4503532 - DNA, 25 bp, Homo sapien
gccaactgttcatcatggaccttca

SEQ ID NO: 4503533 - DNA, 25 bp, Homo sapien
caggactcaaactagcaaatctcct

SEQ ID NO: 4503534 - DNA, 25 bp, Homo sapien
cagcaataattggaaggagagacac

SEQ ID NO: 4503535 - DNA, 25 bp, Homo sapien
taattggaaggagagacacgaactc

SEQ ID NO: 4503536 - DNA, 25 bp, Homo sapien
tttctgcaccagacatcctgttaca

SEQ ID NO: 4503537 - DNA, 25 bp, Homo sapien
ggagagacacgaactccccgttgct

SEQ ID NO: 4503538 - DNA, 25 bp, Homo sapien
ccatttgctagaatgaacatcaggg

SEQ ID NO: 4503539 - DNA, 25 bp, Homo sapien
tgctagaatgaacatcagggagggt

SEQ ID NO: 4503540 - DNA, 25 bp, Homo sapien
attaccttagctcccttggctgcat

SEQ ID NO: 4503541 - DNA, 25 bp, Homo sapien
accttagctcccttggctgcattga

SEQ ID NO: 4503542 - DNA, 25 bp, Homo sapien
gtgtccctcttgctcaatgatgtgc

SEQ ID NO: 4503543 - DNA, 25 bp, Homo sapien
ggtgtccctcttgctcaatgatgtg

SEQ ID NO: 4503544 - DNA, 25 bp, Homo sapien
gtccctcttgctcaatgatgtgcag

SEQ ID NO: 4503545 - DNA, 25 bp, Homo sapien
tgtccctcttgctcaatgatgtgca

SEQ ID NO: 4503546 - DNA, 25 bp, Homo sapien
ggatgtattcatggacacatctgga

SEQ ID NO: 4503547 - DNA, 25 bp, Homo sapien
tccacaggccatcgttttatggatg

SEQ ID NO: 4503548 - DNA, 25 bp, Homo sapien
gatggtccagtacgtcctccttaga

SEQ ID NO: 4503549 - DNA, 25 bp, Homo sapien
acagccagccttgccgtagatcttt

SEQ ID NO: 4503550 - DNA, 25 bp, Homo sapien
aatctcaagttatatcttttggttt

SEQ ID NO: 4503551 - DNA, 25 bp, Homo sapien
ctctaacgagtatataaaccctggg

SEQ ID NO: 4503552 - DNA, 25 bp, Homo sapien
gtaaatcaagtgtttgttccttctg

SEQ ID NO: 4503553 - DNA, 25 bp, Homo sapien
gagattacaatagttaaaatctggg

SEQ ID NO: 4503554 - DNA, 25 bp, Homo sapien
ttacctggtttcatccatgcttgcc

SEQ ID NO: 4503555 - DNA, 25 bp, Homo sapien
gagccaccaggatctctatatggcc

SEQ ID NO: 4503556 - DNA, 25 bp, Homo sapien
ggagccaccaggatctctatatggc

SEQ ID NO: 4503557 - DNA, 25 bp, Homo sapien
gagggagccaccaggatctctatat

SEQ ID NO: 4503558 - DNA, 25 bp, Homo sapien
gggagccaccaggatctctatatgg

SEQ ID NO: 4503559 - DNA, 25 bp, Homo sapien
cgatttctgttatgaacgctgtcaa

SEQ ID NO: 4503560 - DNA, 25 bp, Homo sapien
ctgttatgaacgctgtcaattctcc

SEQ ID NO: 4503561 - DNA, 25 bp, Homo sapien
ttctgttatgaacgctgtcaattct

SEQ ID NO: 4503562 - DNA, 25 bp, Homo sapien
tttccgatttctgttatgaacgctg

SEQ ID NO: 4503563 - DNA, 25 bp, Homo sapien
tcttagattcatccgtttccattag

SEQ ID NO: 4503564 - DNA, 25 bp, Homo sapien
ttttcttagattcatccgtttccat

SEQ ID NO: 4503565 - DNA, 25 bp, Homo sapien
ttcttagattcatccgtttccatta

SEQ ID NO: 4503566 - DNA, 25 bp, Homo sapien
ttagattcatccgtttccattagca

SEQ ID NO: 4503567 - DNA, 25 bp, Homo sapien
tcgaagaacgaagatagctattggc

SEQ ID NO: 4503568 - DNA, 25 bp, Homo sapien
gatgattcgaagaacgaagatagct

SEQ ID NO: 4503569 - DNA, 25 bp, Homo sapien
ccagatgattcgaagaacgaagata

SEQ ID NO: 4503570 - DNA, 25 bp, Homo sapien
gattcgaagaacgaagatagctatt

SEQ ID NO: 4503571 - DNA, 25 bp, Homo sapien
ctgtgggaacgcctccagattggca

SEQ ID NO: 4503572 - DNA, 25 bp, Homo sapien
tgtgggaacgcctccagattggcag

SEQ ID NO: 4503573 - DNA, 25 bp, Homo sapien
gcagcgcgcggcgcaaaattctgcc

SEQ ID NO: 4503574 - DNA, 25 bp, Homo sapien
agcaacagcagcgcgcggcgcaaaa

SEQ ID NO: 4503575 - DNA, 25 bp, Homo sapien
gcgcgcggcgcaaaattctgcccag

SEQ ID NO: 4503576 - DNA, 25 bp, Homo sapien
aacagcagcgcgcggcgcaaaattc

SEQ ID NO: 4503577 - DNA, 25 bp, Homo sapien
aggcagtgagtggctcccgcccctg

SEQ ID NO: 4503578 - DNA, 25 bp, Homo sapien
cagccaacatggaggcagtgagtgg

SEQ ID NO: 4503579 - DNA, 25 bp, Homo sapien
cagtgagtggctcccgcccctgcac

SEQ ID NO: 4503580 - DNA, 25 bp, Homo sapien
ccaacatggaggcagtgagtggctc

SEQ ID NO: 4503581 - DNA, 25 bp, Homo sapien
gatgagcctgtagaactgctacagc

SEQ ID NO: 4503582 - DNA, 25 bp, Homo sapien
tctttcttggcatgatgagcctgta

SEQ ID NO: 4503583 - DNA, 25 bp, Homo sapien
catgatgagcctgtagaactgctac

SEQ ID NO: 4503584 - DNA, 25 bp, Homo sapien
agcctgtagaactgctacagcttca

SEQ ID NO: 4503585 - DNA, 25 bp, Homo sapien
gccttgagctgaattccatgagggg

SEQ ID NO: 4503586 - DNA, 25 bp, Homo sapien
aagccttgagctgaattccatgagg

SEQ ID NO: 4503587 - DNA, 25 bp, Homo sapien
ctaggaagacttcaagccttgagct

SEQ ID NO: 4503588 - DNA, 25 bp, Homo sapien
gctaggaagacttcaagccttgagc

SEQ ID NO: 4503589 - DNA, 25 bp, Homo sapien
tatcgagaatggtagtttctaggtt

SEQ ID NO: 4503590 - DNA, 25 bp, Homo sapien
ccaaggcctatatcgagaatggtag

SEQ ID NO: 4503591 - DNA, 25 bp, Homo sapien
atttgccaaggcctatatcgagaat

SEQ ID NO: 4503592 - DNA, 25 bp, Homo sapien
ggcctatatcgagaatggtagtttc

SEQ ID NO: 4503593 - DNA, 25 bp, Homo sapien
tcacaggtgttcactgaggaggaac

SEQ ID NO: 4503594 - DNA, 25 bp, Homo sapien
tgctgccaatcacaggtgttcactg

SEQ ID NO: 4503595 - DNA, 25 bp, Homo sapien
caatcacaggtgttcactgaggagg

SEQ ID NO: 4503596 - DNA, 25 bp, Homo sapien
gtgtctgctgccaatcacaggtgtt

SEQ ID NO: 4503597 - DNA, 25 bp, Homo sapien
tgtttgtactgtgtactgtcttacc

SEQ ID NO: 4503598 - DNA, 25 bp, Homo sapien
tgtgtactgtcttacctctgtatat

SEQ ID NO: 4503599 - DNA, 25 bp, Homo sapien
tctgtccaattctgtggagttatgg

SEQ ID NO: 4503600 - DNA, 25 bp, Homo sapien
gagttatggaggtgcctgtttgtac

SEQ ID NO: 4503601 - DNA, 25 bp, Homo sapien
tgtcactgctatcctcatgggcagc

SEQ ID NO: 4503602 - DNA, 25 bp, Homo sapien
actgctatcctcatgggcagcacca

SEQ ID NO: 4503603 - DNA, 25 bp, Homo sapien
gcaaaagactctagcaccttcctga

SEQ ID NO: 4503604 - DNA, 25 bp, Homo sapien
cctgctgcaaaagactctagcacct

SEQ ID NO: 4503605 - DNA, 25 bp, Homo sapien
ctgagcttaggatcaagtctatgcc

SEQ ID NO: 4503606 - DNA, 25 bp, Homo sapien
tgagcttaggatcaagtctatgccc

SEQ ID NO: 4503607 - DNA, 25 bp, Homo sapien
gcttaggatcaagtctatgcccagg

SEQ ID NO: 4503608 - DNA, 25 bp, Homo sapien
gagcttaggatcaagtctatgccca

SEQ ID NO: 4503609 - DNA, 25 bp, Homo sapien
gtcaataccctggaaagtgttttca

SEQ ID NO: 4503610 - DNA, 25 bp, Homo sapien
tcaataccctggaaagtgttttcaa

SEQ ID NO: 4503611 - DNA, 25 bp, Homo sapien
agcaacatgccggtgtgtttcacgc

SEQ ID NO: 4503612 - DNA, 25 bp, Homo sapien
gtgtgtttcacgctgctgcctcctg

SEQ ID NO: 4503613 - DNA, 25 bp, Homo sapien
tgttctgagccatcgccgggcactc

SEQ ID NO: 4503614 - DNA, 25 bp, Homo sapien
catgccggtgtgtttcacgctgctg

SEQ ID NO: 4503615 - DNA, 25 bp, Homo sapien
cacactgaaggagcctttcctaaaa

SEQ ID NO: 4503616 - DNA, 25 bp, Homo sapien
ctgaaggagcctttcctaaaataca

SEQ ID NO: 4503617 - DNA, 25 bp, Homo sapien
cagacacactgaaggagcctttcct

SEQ ID NO: 4503618 - DNA, 25 bp, Homo sapien
gacacactgaaggagcctttcctaa

SEQ ID NO: 4503619 - DNA, 25 bp, Homo sapien
ggaagctcagactagcataggccca

SEQ ID NO: 4503620 - DNA, 25 bp, Homo sapien
gaagctcagactagcataggcccaa

SEQ ID NO: 4503621 - DNA, 25 bp, Homo sapien
tcacaccaatttggggggcgacagt

SEQ ID NO: 4503622 - DNA, 25 bp, Homo sapien
ttaagggacgtcaaaggacacctga

SEQ ID NO: 4503623 - DNA, 25 bp, Homo sapien
tgttactataatttcccgtagcacc

SEQ ID NO: 4503624 - DNA, 25 bp, Homo sapien
tgtcacaccaatttggggggcgaca

SEQ ID NO: 4503625 - DNA, 25 bp, Homo sapien
ctcatcagagcagaacgatctggaa

SEQ ID NO: 4503626 - DNA, 25 bp, Homo sapien
gagcagaacgatctggaagttgctg

SEQ ID NO: 4503627 - DNA, 25 bp, Homo sapien
cagggatctcaggcctcatcagagc

SEQ ID NO: 4503628 - DNA, 25 bp, Homo sapien
tgctggccacatgccactgattttc

SEQ ID NO: 4503629 - DNA, 25 bp, Homo sapien
cagcacggttggaagaagttcttgg

SEQ ID NO: 4503630 - DNA, 25 bp, Homo sapien
tttgctgccagcacggttggaagaa

SEQ ID NO: 4503631 - DNA, 25 bp, Homo sapien
ctgctttgctgccagcacggttgga

SEQ ID NO: 4503632 - DNA, 25 bp, Homo sapien
tgccagcacggttggaagaagttct

SEQ ID NO: 4503633 - DNA, 25 bp, Homo sapien
tgcctctttagctgtagatcagtac

SEQ ID NO: 4503634 - DNA, 25 bp, Homo sapien
cacagagtgtgggttcgtgcctctt

SEQ ID NO: 4503635 - DNA, 25 bp, Homo sapien
ccacggatgtatggactggagccag

SEQ ID NO: 4503636 - DNA, 25 bp, Homo sapien
tgtagatcagtactctgtccatagg

SEQ ID NO: 4503637 - DNA, 25 bp, Homo sapien
cttcaggaagtttgacagttgaatc

SEQ ID NO: 4503638 - DNA, 25 bp, Homo sapien
tcaggaagtttgacagttgaatcca

SEQ ID NO: 4503639 - DNA, 25 bp, Homo sapien
ggaagtttgacagttgaatccaaac

SEQ ID NO: 4503640 - DNA, 25 bp, Homo sapien
gtttgacagttgaatccaaacacat

SEQ ID NO: 4503641 - DNA, 25 bp, Homo sapien
tgttgaggattttgatgacctgcat

SEQ ID NO: 4503642 - DNA, 25 bp, Homo sapien
taagggaaaacatgcttctgttgag

SEQ ID NO: 4503643 - DNA, 25 bp, Homo sapien
ttaagggaaaacatgcttctgttga

SEQ ID NO: 4503644 - DNA, 25 bp, Homo sapien
aagggaaaacatgcttctgttgagg

SEQ ID NO: 4503645 - DNA, 25 bp, Homo sapien
tggaatgaacacaggatctttgagg

SEQ ID NO: 4503646 - DNA, 25 bp, Homo sapien
cttctttctattggcaaagttgatg

SEQ ID NO: 4503647 - DNA, 25 bp, Homo sapien
ggcagagttaatgtgacagcagtaa

SEQ ID NO: 4503648 - DNA, 25 bp, Homo sapien
agcactcctatactcagagggctga

SEQ ID NO: 4503649 - DNA, 25 bp, Homo sapien
cactgtgatattgttggctgttacc

SEQ ID NO: 4503650 - DNA, 25 bp, Homo sapien
aatggcactgtgatattgttggctg

SEQ ID NO: 4503651 - DNA, 25 bp, Homo sapien
gtgtggtcctactgctgatctttgc

SEQ ID NO: 4503652 - DNA, 25 bp, Homo sapien
tgttaccagagttttgccgtgtggt

SEQ ID NO: 4503653 - DNA, 25 bp, Homo sapien
tagaatatgaaactgcaggctttcc

SEQ ID NO: 4503654 - DNA, 25 bp, Homo sapien
atctagaatatgaaactgcaggctt

SEQ ID NO: 4503655 - DNA, 25 bp, Homo sapien
tggtccagcacagtcatgtgtgact

SEQ ID NO: 4503656 - DNA, 25 bp, Homo sapien
ggctaaatgctgatgaacctaaagg

SEQ ID NO: 4503657 - DNA, 25 bp, Homo sapien
cagaataaggaaatcagagctgctg

SEQ ID NO: 4503658 - DNA, 25 bp, Homo sapien
gaataaggaaatcagagctgctggg

SEQ ID NO: 4503659 - DNA, 25 bp, Homo sapien
gacagaataaggaaatcagagctgc

SEQ ID NO: 4503660 - DNA, 25 bp, Homo sapien
ctggtgacagaataaggaaatcaga

SEQ ID NO: 4503661 - DNA, 25 bp, Homo sapien
tgtctgctcaaataggaacgcaccc

SEQ ID NO: 4503662 - DNA, 25 bp, Homo sapien
tttatcaacatgcctcacagcttgc

SEQ ID NO: 4503663 - DNA, 25 bp, Homo sapien
ttgcctttgatcctctctgacttcc

SEQ ID NO: 4503664 - DNA, 25 bp, Homo sapien
atttcatcaccttcatcctgtctgc

SEQ ID NO: 4503665 - DNA, 25 bp, Homo sapien
atatttatcgcctccattgttccac

SEQ ID NO: 4503666 - DNA, 25 bp, Homo sapien
ataagaacatatttatcgcctccat

SEQ ID NO: 4503667 - DNA, 25 bp, Homo sapien
agaacatatttatcgcctccattgt

SEQ ID NO: 4503668 - DNA, 25 bp, Homo sapien
aaatctcctcctcctgattgctatt

SEQ ID NO: 4503669 - DNA, 25 bp, Homo sapien
tctgagagtcacactagtaaaatcc

SEQ ID NO: 4503670 - DNA, 25 bp, Homo sapien
cctcacacagtggatgggattcaca

SEQ ID NO: 4503671 - DNA, 25 bp, Homo sapien
tcacactagtaaaatcctcacacag

SEQ ID NO: 4503672 - DNA, 25 bp, Homo sapien
tcctcacacagtggatgggattcac

SEQ ID NO: 4503673 - DNA, 25 bp, Homo sapien
cagcatactttcatcttttcttccc

SEQ ID NO: 4503674 - DNA, 25 bp, Homo sapien
gcatactttcatcttttcttcccat

SEQ ID NO: 4503675 - DNA, 25 bp, Homo sapien
gtcagcatactttcatcttttcttc

SEQ ID NO: 4503676 - DNA, 25 bp, Homo sapien
agcatactttcatcttttcttccca

SEQ ID NO: 4503677 - DNA, 25 bp, Homo sapien
tgataggagcgtttttcctctgtgt

SEQ ID NO: 4503678 - DNA, 25 bp, Homo sapien
tgaaattcgcaacttggcagacaaa

SEQ ID NO: 4503679 - DNA, 25 bp, Homo sapien
tctgtgtgtggttatagggcaagct

SEQ ID NO: 4503680 - DNA, 25 bp, Homo sapien
tagggcaagcttgaaattcgcaact

SEQ ID NO: 4503681 - DNA, 25 bp, Homo sapien
cagaaacgtagccatccaaggaaca

SEQ ID NO: 4503682 - DNA, 25 bp, Homo sapien
gaaacgtagccatccaaggaacaca

SEQ ID NO: 4503683 - DNA, 25 bp, Homo sapien
aatgctacaacagaaacgtagccat

SEQ ID NO: 4503684 - DNA, 25 bp, Homo sapien
tacaacagaaacgtagccatccaag

SEQ ID NO: 4503685 - DNA, 25 bp, Homo sapien
ttcctctccaatcctgtgagtgttg

SEQ ID NO: 4503686 - DNA, 25 bp, Homo sapien
cttccacagccggttgcttcctggg

SEQ ID NO: 4503687 - DNA, 25 bp, Homo sapien
ccactggttgatctgtgggcagtcg

SEQ ID NO: 4503688 - DNA, 25 bp, Homo sapien
ggcagtcggctttgtaccagccacg

SEQ ID NO: 4503689 - DNA, 25 bp, Homo sapien
gagggcgcactactgcaagcagctt

SEQ ID NO: 4503690 - DNA, 25 bp, Homo sapien
gcctgtaattatgagttttcttcac

SEQ ID NO: 4503691 - DNA, 25 bp, Homo sapien
ggcctgtaattatgagttttcttca

SEQ ID NO: 4503692 - DNA, 25 bp, Homo sapien
caggcctgtaattatgagttttctt

SEQ ID NO: 4503693 - DNA, 25 bp, Homo sapien
aggcctgtaattatgagttttcttc

SEQ ID NO: 4503694 - DNA, 25 bp, Homo sapien
agaagtttggaggacttctgataag

SEQ ID NO: 4503695 - DNA, 25 bp, Homo sapien
aagtttgcaaatcagaagtttggag

SEQ ID NO: 4503696 - DNA, 25 bp, Homo sapien
aggaaagtttgcaaatcagaagttt

SEQ ID NO: 4503697 - DNA, 25 bp, Homo sapien
aagtttggaggacttctgataaggt

SEQ ID NO: 4503698 - DNA, 25 bp, Homo sapien
gctgcgctctaaaagcgcagatgtt

SEQ ID NO: 4503699 - DNA, 25 bp, Homo sapien
tgcgctctaaaagcgcagatgtttt

SEQ ID NO: 4503700 - DNA, 25 bp, Homo sapien
agctgcgctctaaaagcgcagatgt

SEQ ID NO: 4503701 - DNA, 25 bp, Homo sapien
gtcctgagcaattacgtgcatcaga

SEQ ID NO: 4503702 - DNA, 25 bp, Homo sapien
ctctacgtatgagatgtgctagctg

SEQ ID NO: 4503703 - DNA, 25 bp, Homo sapien
agatgtgctagctggacgacttttg

SEQ ID NO: 4503704 - DNA, 25 bp, Homo sapien
tatgagatgtgctagctggacgact

SEQ ID NO: 4503705 - DNA, 25 bp, Homo sapien
aggccaaccagatagccctcactca

SEQ ID NO: 4503706 - DNA, 25 bp, Homo sapien
gggagcggttgacagattcacagct

SEQ ID NO: 4503707 - DNA, 25 bp, Homo sapien
agattcacagcttaaagttgtcacc

SEQ ID NO: 4503708 - DNA, 25 bp, Homo sapien
taagacatgcacagccaagcttttg

SEQ ID NO: 4503709 - DNA, 25 bp, Homo sapien
ggctggtaagacatgcacagccaag

SEQ ID NO: 4503710 - DNA, 25 bp, Homo sapien
gcacagtggtgagttcaacagacac

SEQ ID NO: 4503711 - DNA, 25 bp, Homo sapien
tgagttcaacagacactcctgtggg

SEQ ID NO: 4503712 - DNA, 25 bp, Homo sapien
agacactcctgtgggagaaactgaa

SEQ ID NO: 4503713 - DNA, 25 bp, Homo sapien
caacagacactcctgtgggagaaac

SEQ ID NO: 4503714 - DNA, 25 bp, Homo sapien
ttacactctgtatgccaagagagca

SEQ ID NO: 4503715 - DNA, 25 bp, Homo sapien
actgtgatagagtcatggaaataaa

SEQ ID NO: 4503716 - DNA, 25 bp, Homo sapien
gtcatggaaataaatcctaattcag

SEQ ID NO: 4503717 - DNA, 25 bp, Homo sapien
gcaagtggcttcttcagattgctaa

SEQ ID NO: 4503718 - DNA, 25 bp, Homo sapien
catctattttgtgctccaggattca

SEQ ID NO: 4503719 - DNA, 25 bp, Homo sapien
tgtcacaactaagaagcggatgctg

SEQ ID NO: 4503720 - DNA, 25 bp, Homo sapien
cccatggaacctagatatattttac

SEQ ID NO: 4503721 - DNA, 25 bp, Homo sapien
actattagccaaacactgggctgta

SEQ ID NO: 4503722 - DNA, 25 bp, Homo sapien
ttgtagtgacaattgttgccacttc

SEQ ID NO: 4503723 - DNA, 25 bp, Homo sapien
tttaggcacgtctttgtagtgacaa

SEQ ID NO: 4503724 - DNA, 25 bp, Homo sapien
ttttttaggcacgtctttgtagtga

SEQ ID NO: 4503725 - DNA, 25 bp, Homo sapien
ctttgtagtgacaattgttgccact

SEQ ID NO: 4503726 - DNA, 25 bp, Homo sapien
ccgataagagcagaagtagaaaaat

SEQ ID NO: 4503727 - DNA, 25 bp, Homo sapien
catttctgggccgataagagcagaa

SEQ ID NO: 4503728 - DNA, 25 bp, Homo sapien
tgggccgataagagcagaagtagaa

SEQ ID NO: 4503729 - DNA, 25 bp, Homo sapien
catcatttctgggccgataagagca

SEQ ID NO: 4503730 - DNA, 25 bp, Homo sapien
gtgtcttctgaaggcccagtgtact

SEQ ID NO: 4503731 - DNA, 25 bp, Homo sapien
gatgtgtcttctgaaggcccagtgt

SEQ ID NO: 4503732 - DNA, 25 bp, Homo sapien
tgtgtcttctgaaggcccagtgtac

SEQ ID NO: 4503733 - DNA, 25 bp, Homo sapien
aagatgtgtcttctgaaggcccagt

SEQ ID NO: 4503734 - DNA, 25 bp, Homo sapien
ctaatagattcatgggaagacagca

SEQ ID NO: 4503735 - DNA, 25 bp, Homo sapien
agacagcagcctccctttgtaacgc

SEQ ID NO: 4503736 - DNA, 25 bp, Homo sapien
taatagattcatgggaagacagcag

SEQ ID NO: 4503737 - DNA, 25 bp, Homo sapien
gcagcctccctttgtaacgccctga

SEQ ID NO: 4503738 - DNA, 25 bp, Homo sapien
tgtgtccaaaaagtccgaagtgagg

SEQ ID NO: 4503739 - DNA, 25 bp, Homo sapien
gaagggttctcttcgctcctgtagg

SEQ ID NO: 4503740 - DNA, 25 bp, Homo sapien
taactcattcgtttgggttggctca

SEQ ID NO: 4503741 - DNA, 25 bp, Homo sapien
aataggacgaggatggcttgcaaac

SEQ ID NO: 4503742 - DNA, 25 bp, Homo sapien
gcatcaccgagggcccccggacttc

SEQ ID NO: 4503743 - DNA, 25 bp, Homo sapien
tgcagtcgccactcggaagcgcagg

SEQ ID NO: 4503744 - DNA, 25 bp, Homo sapien
ctgcagtcgccactcggaagcgcag

SEQ ID NO: 4503745 - DNA, 25 bp, Homo sapien
ctgcaccggacccgctgcagtcgcc

SEQ ID NO: 4503746 - DNA, 25 bp, Homo sapien
caccggacccgctgcagtcgccact

SEQ ID NO: 4503747 - DNA, 25 bp, Homo sapien
gtgcgaggccgcgttcgggggctgc

SEQ ID NO: 4503748 - DNA, 25 bp, Homo sapien
ctgtgcgaggccgcgttcgggggct

SEQ ID NO: 4503749 - DNA, 25 bp, Homo sapien
gccgcgttcgggggctgcaaagctg

SEQ ID NO: 4503750 - DNA, 25 bp, Homo sapien
cgaggccgcgttcgggggctgcaaa

SEQ ID NO: 4503751 - DNA, 25 bp, Homo sapien
gggtagtagcgccactgaattctca

SEQ ID NO: 4503752 - DNA, 25 bp, Homo sapien
cctcaggacacctttctgatctctg

SEQ ID NO: 4503753 - DNA, 25 bp, Homo sapien
ccaactcccagcttcggttgagaga

SEQ ID NO: 4503754 - DNA, 25 bp, Homo sapien
tttctgatctctgaaccacaagcag

SEQ ID NO: 4503755 - DNA, 25 bp, Homo sapien
tggatgtggcggtgactacctccgt

SEQ ID NO: 4503756 - DNA, 25 bp, Homo sapien
agcgccccggggagactgaatgtgt

SEQ ID NO: 4503757 - DNA, 25 bp, Homo sapien
agtcctggatgtggcggtgactacc

SEQ ID NO: 4503758 - DNA, 25 bp, Homo sapien
tggcggtgactacctccgtagcgcc

SEQ ID NO: 4503759 - DNA, 25 bp, Homo sapien
gagcaaatgtcagcgcaaagaatta

SEQ ID NO: 4503760 - DNA, 25 bp, Homo sapien
cagcgcaaagaattaaagttgaacc

SEQ ID NO: 4503761 - DNA, 25 bp, Homo sapien
ccggtgtcgttgagcaaatgtcagc

SEQ ID NO: 4503762 - DNA, 25 bp, Homo sapien
caaggatttctgctccggtgtcgtt

SEQ ID NO: 4503763 - DNA, 25 bp, Homo sapien
gcatcgatgaaaactctcccaggca

SEQ ID NO: 4503764 - DNA, 25 bp, Homo sapien
ggttctaaaaccagacagcctgtgc

SEQ ID NO: 4503765 - DNA, 25 bp, Homo sapien
tggccaatgccaacacataacagtg

SEQ ID NO: 4503766 - DNA, 25 bp, Homo sapien
tccccgctgggtaatccataggagc

SEQ ID NO: 4503767 - DNA, 25 bp, Homo sapien
cactgtgccctgcttctgttatttt

SEQ ID NO: 4503768 - DNA, 25 bp, Homo sapien
ctgtgccctgcttctgttattttat

SEQ ID NO: 4503769 - DNA, 25 bp, Homo sapien
attttattctgcttggagaaaaggg

SEQ ID NO: 4503770 - DNA, 25 bp, Homo sapien
tattctgcttggagaaaagggacaa

SEQ ID NO: 4503771 - DNA, 25 bp, Homo sapien
tggtcccaggtcaccaagcgattga

SEQ ID NO: 4503772 - DNA, 25 bp, Homo sapien
tgtggtcccaggtcaccaagcgatt

SEQ ID NO: 4503773 - DNA, 25 bp, Homo sapien
gctgtggtcccaggtcaccaagcga

SEQ ID NO: 4503774 - DNA, 25 bp, Homo sapien
aggtcaccaagcgattgaacttcat

SEQ ID NO: 4503775 - DNA, 25 bp, Homo sapien
gagcagggacgacatgaccttcctg

SEQ ID NO: 4503776 - DNA, 25 bp, Homo sapien
gcagacattgtatttctgctcagct

SEQ ID NO: 4503777 - DNA, 25 bp, Homo sapien
ggagagcagggacgacatgaccttc

SEQ ID NO: 4503778 - DNA, 25 bp, Homo sapien
tggagcagacattgtatttctgctc

SEQ ID NO: 4503779 - DNA, 25 bp, Homo sapien
tacttgccaatttgttaacctctgt

SEQ ID NO: 4503780 - DNA, 25 bp, Homo sapien
taacctctgtagtgtcctcaaacca

SEQ ID NO: 4503781 - DNA, 25 bp, Homo sapien
tttctttctgtacaacttgactact

SEQ ID NO: 4503782 - DNA, 25 bp, Homo sapien
tctgtacaacttgactacttgccaa

SEQ ID NO: 4503783 - DNA, 25 bp, Homo sapien
ctgaataagggacacaaggaagtgt

SEQ ID NO: 4503784 - DNA, 25 bp, Homo sapien
gaataagggacacaaggaagtgtgt

SEQ ID NO: 4503785 - DNA, 25 bp, Homo sapien
ataagggacacaaggaagtgtgtgt

SEQ ID NO: 4503786 - DNA, 25 bp, Homo sapien
tgggtgtgcatgcattgggaaatga

SEQ ID NO: 4503787 - DNA, 25 bp, Homo sapien
acagggatggtggtgccgttggccc

SEQ ID NO: 4503788 - DNA, 25 bp, Homo sapien
gatggtggtgccgttggccctctca

SEQ ID NO: 4503789 - DNA, 25 bp, Homo sapien
cttgctcaagtgaaggcccacaggg

SEQ ID NO: 4503790 - DNA, 25 bp, Homo sapien
ggtggtgccgttggccctctcacac

SEQ ID NO: 4503791 - DNA, 25 bp, Homo sapien
ttgcattcaagaattttttctgatc

SEQ ID NO: 4503792 - DNA, 25 bp, Homo sapien
ttgtccagttttggcctggtgagag

SEQ ID NO: 4503793 - DNA, 25 bp, Homo sapien
ttttctgatccttgtccagttttgg

SEQ ID NO: 4503794 - DNA, 25 bp, Homo sapien
tccagttttggcctggtgagagcca

SEQ ID NO: 4503795 - DNA, 25 bp, Homo sapien
cataagtgttgatactgagctgagc

SEQ ID NO: 4503796 - DNA, 25 bp, Homo sapien
tccaccttgtagtccttcaaattgg

SEQ ID NO: 4503797 - DNA, 25 bp, Homo sapien
tgtagtccttcaaattggttcctat

SEQ ID NO: 4503798 - DNA, 25 bp, Homo sapien
tgatactgagctgagcaagcagtcc

SEQ ID NO: 4503799 - DNA, 25 bp, Homo sapien
agaaggtggccagtaccttctcagc

SEQ ID NO: 4503800 - DNA, 25 bp, Homo sapien
gctgaagactcagcacatgtgtgaa

SEQ ID NO: 4503801 - DNA, 25 bp, Homo sapien
cccatatgtcatgcagcggctgctg

SEQ ID NO: 4503802 - DNA, 25 bp, Homo sapien
taaagtatacctgaacatagcccag

SEQ ID NO: 4503803 - DNA, 25 bp, Homo sapien
agccacttctcagaagtacacctct

SEQ ID NO: 4503804 - DNA, 25 bp, Homo sapien
gactgtttcaaggagctactgctgc

SEQ ID NO: 4503805 - DNA, 25 bp, Homo sapien
ttgatcaacaatggcctggtccgct

SEQ ID NO: 4503806 - DNA, 25 bp, Homo sapien
tcaaagatgccgttgctggacaccc

SEQ ID NO: 4503807 - DNA, 25 bp, Homo sapien
tccgctcagcaggagaggcataggc

SEQ ID NO: 4503808 - DNA, 25 bp, Homo sapien
tccctgcaccaattttcctgattct

SEQ ID NO: 4503809 - DNA, 25 bp, Homo sapien
catggagcccatgcattctccctgc

SEQ ID NO: 4503810 - DNA, 25 bp, Homo sapien
atggagcccatgcattctccctgca

SEQ ID NO: 4503811 - DNA, 25 bp, Homo sapien
atccctgcaccaattttcctgattc

SEQ ID NO: 4503812 - DNA, 25 bp, Homo sapien
tcaagttctaatttgtggctcagta

SEQ ID NO: 4503813 - DNA, 25 bp, Homo sapien
caagttctaatttgtggctcagtac

SEQ ID NO: 4503814 - DNA, 25 bp, Homo sapien
tctccatatcttttgtccaaggcaa

SEQ ID NO: 4503815 - DNA, 25 bp, Homo sapien
gactggctgacgaagcctcgggaca

SEQ ID NO: 4503816 - DNA, 25 bp, Homo sapien
gtgaccaggacaaagtcagagactg

SEQ ID NO: 4503817 - DNA, 25 bp, Homo sapien
cagcctgtgcgccatttctccatat

SEQ ID NO: 4503818 - DNA, 25 bp, Homo sapien
ggtctccagttctattaattgaatc

SEQ ID NO: 4503819 - DNA, 25 bp, Homo sapien
taattgaatcaatgctctacctaac

SEQ ID NO: 4503820 - DNA, 25 bp, Homo sapien
aaatcacatgctatggtctccagtt

SEQ ID NO: 4503821 - DNA, 25 bp, Homo sapien
gctctacctaaccaatcccattttg

SEQ ID NO: 4503822 - DNA, 25 bp, Homo sapien
gagccaagagtaaacggtgctgatg

SEQ ID NO: 4503823 - DNA, 25 bp, Homo sapien
caagagtaaacggtgctgatgctct

SEQ ID NO: 4503824 - DNA, 25 bp, Homo sapien
gccaagagtaaacggtgctgatgct

SEQ ID NO: 4503825 - DNA, 25 bp, Homo sapien
aagagtaaacggtgctgatgctctg

SEQ ID NO: 4503826 - DNA, 25 bp, Homo sapien
aaatgcaatcgttctgcctgatttc

SEQ ID NO: 4503827 - DNA, 25 bp, Homo sapien
gttttataccatacactatcatttc

SEQ ID NO: 4503828 - DNA, 25 bp, Homo sapien
tatgtgttttataccatacactatc

SEQ ID NO: 4503829 - DNA, 25 bp, Homo sapien
atttcccaataatgcaatcaaatgc

SEQ ID NO: 4503830 - DNA, 25 bp, Homo sapien
ggagctgcaaacaaggacgggcttt

SEQ ID NO: 4503831 - DNA, 25 bp, Homo sapien
tgcatgcagtgacatcgagaaaggc

SEQ ID NO: 4503832 - DNA, 25 bp, Homo sapien
catcgagaaaggctgcaactgggca

SEQ ID NO: 4503833 - DNA, 25 bp, Homo sapien
tgcaaacaaggacgggctttctggc

SEQ ID NO: 4503834 - DNA, 25 bp, Homo sapien
ttataggcacaaaggagattttatc

SEQ ID NO: 4503835 - DNA, 25 bp, Homo sapien
tggaactttaacagagtttctgggc

SEQ ID NO: 4503836 - DNA, 25 bp, Homo sapien
tttctgggctgaatgtgaggacagc

SEQ ID NO: 4503837 - DNA, 25 bp, Homo sapien
gattcctcagttgtgtcagctttta

SEQ ID NO: 4503838 - DNA, 25 bp, Homo sapien
ggaaatgagtccacagggcaatgac

SEQ ID NO: 4503839 - DNA, 25 bp, Homo sapien
ccaggaaatgagtccacagggcaat

SEQ ID NO: 4503840 - DNA, 25 bp, Homo sapien
aaatgagtccacagggcaatgacac

SEQ ID NO: 4503841 - DNA, 25 bp, Homo sapien
caggaaatgagtccacagggcaatg

SEQ ID NO: 4503842 - DNA, 25 bp, Homo sapien
cttcaaaatgttgagatgtcataga

SEQ ID NO: 4503843 - DNA, 25 bp, Homo sapien
actcctgctggccatattgtagaat

SEQ ID NO: 4503844 - DNA, 25 bp, Homo sapien
tccagaaatgcatcaactcctgctg

SEQ ID NO: 4503845 - DNA, 25 bp, Homo sapien
tatgtattacatgagcccaattaaa

SEQ ID NO: 4503846 - DNA, 25 bp, Homo sapien
atattgtagaattcaagtctgtttt

SEQ ID NO: 4503847 - DNA, 25 bp, Homo sapien
gctggggaggttactcaagccatca

SEQ ID NO: 4503848 - DNA, 25 bp, Homo sapien
tggtgaggaggtacgcaaaagggct

SEQ ID NO: 4503849 - DNA, 25 bp, Homo sapien
acagcgatctcggacaaccaggttc

SEQ ID NO: 4503850 - DNA, 25 bp, Homo sapien
ccttcaggtgtatggtgaggaggta

SEQ ID NO: 4503851 - DNA, 25 bp, Homo sapien
tgggaggcacccctacactggttta

SEQ ID NO: 4503852 - DNA, 25 bp, Homo sapien
gacactgtgccggatcagggtaaga

SEQ ID NO: 4503853 - DNA, 25 bp, Homo sapien
gaatcaggatatctgtgggaggcac

SEQ ID NO: 4503854 - DNA, 25 bp, Homo sapien
tctactcgccagagaaatggttaca

SEQ ID NO: 4503855 - DNA, 25 bp, Homo sapien
catcagtttgatagagaagtatagt

SEQ ID NO: 4503856 - DNA, 25 bp, Homo sapien
tgctgtaactgcatcagtttgatag

SEQ ID NO: 4503857 - DNA, 25 bp, Homo sapien
agtattgcctgacagcagtgaggga

SEQ ID NO: 4503858 - DNA, 25 bp, Homo sapien
gtatagtattgcctgacagcagtga

SEQ ID NO: 4503859 - DNA, 25 bp, Homo sapien
cacatgatgttttgactgtgatgaa

SEQ ID NO: 4503860 - DNA, 25 bp, Homo sapien
atgatgttttgactgtgatgaaact

SEQ ID NO: 4503861 - DNA, 25 bp, Homo sapien
catgatgttttgactgtgatgaaac

SEQ ID NO: 4503862 - DNA, 25 bp, Homo sapien
tcacatgatgttttgactgtgatga

SEQ ID NO: 4503863 - DNA, 25 bp, Homo sapien
tgacactacgggtcatcatgtctgc

SEQ ID NO: 4503864 - DNA, 25 bp, Homo sapien
caggcatgctaatgtgccacaaaca

SEQ ID NO: 4503865 - DNA, 25 bp, Homo sapien
cagcttccggccatttccgagtgtg

SEQ ID NO: 4503866 - DNA, 25 bp, Homo sapien
tcatgtctgcctcgatgttgcatct

SEQ ID NO: 4503867 - DNA, 25 bp, Homo sapien
tactcggcgaggagaatgaagccag

SEQ ID NO: 4503868 - DNA, 25 bp, Homo sapien
gagcttcagaaacaatgaggctctt

SEQ ID NO: 4503869 - DNA, 25 bp, Homo sapien
caatgaggctcttgtagtagtgtgg

SEQ ID NO: 4503870 - DNA, 25 bp, Homo sapien
cttgtagtagtgtggtactcggcga

SEQ ID NO: 4503871 - DNA, 25 bp, Homo sapien
ggcaatacaactatctcatcccata

SEQ ID NO: 4503872 - DNA, 25 bp, Homo sapien
gatcaaggctttggattggcaatac

SEQ ID NO: 4503873 - DNA, 25 bp, Homo sapien
tcacacgtagcttttgatcaaggct

SEQ ID NO: 4503874 - DNA, 25 bp, Homo sapien
tttacttttgtacagcgtcttccca

SEQ ID NO: 4503875 - DNA, 25 bp, Homo sapien
ctgagaatgacaaatgcagaaccca

SEQ ID NO: 4503876 - DNA, 25 bp, Homo sapien
cagatgtggttaaatctcgatcata

SEQ ID NO: 4503877 - DNA, 25 bp, Homo sapien
tgaaatcagatgtggttaaatctcg

SEQ ID NO: 4503878 - DNA, 25 bp, Homo sapien
tgcagaacccatgaaatcagatgtg

SEQ ID NO: 4503879 - DNA, 25 bp, Homo sapien
ggttcaaatttaacacgatcactcc

SEQ ID NO: 4503880 - DNA, 25 bp, Homo sapien
tcaccctgttttaccactaggttca

SEQ ID NO: 4503881 - DNA, 25 bp, Homo sapien
ccactaggttcaaatttaacacgat

SEQ ID NO: 4503882 - DNA, 25 bp, Homo sapien
aatttaacacgatcactcccatgtc

SEQ ID NO: 4503883 - DNA, 25 bp, Homo sapien
cagtcatctgctagctatcaaggga

SEQ ID NO: 4503884 - DNA, 25 bp, Homo sapien
tcaagggacaattgcaatgagccat

SEQ ID NO: 4503885 - DNA, 25 bp, Homo sapien
tgaggtcacaagtgtcaacagggcc

SEQ ID NO: 4503886 - DNA, 25 bp, Homo sapien
gaaatttgcatgtactagactagag

SEQ ID NO: 4503887 - DNA, 25 bp, Homo sapien
tcaccggtcacctactgtatcactg

SEQ ID NO: 4503888 - DNA, 25 bp, Homo sapien
ccggtcacctactgtatcactgaca

SEQ ID NO: 4503889 - DNA, 25 bp, Homo sapien
gtatcactgacactgaatccagagt

SEQ ID NO: 4503890 - DNA, 25 bp, Homo sapien
tgacactgaatccagagtcacggat

SEQ ID NO: 4503891 - DNA, 25 bp, Homo sapien
tatcagctggcaagttgtcaaccac

SEQ ID NO: 4503892 - DNA, 25 bp, Homo sapien
taaggaagcacatgagtgagcggac

SEQ ID NO: 4503893 - DNA, 25 bp, Homo sapien
caaagtcttcaacatgggaggtggg

SEQ ID NO: 4503894 - DNA, 25 bp, Homo sapien
ggagtcagaggaaaccaggcctaca

SEQ ID NO: 4503895 - DNA, 25 bp, Homo sapien
cacaaagatagctatttgaatatgc

SEQ ID NO: 4503896 - DNA, 25 bp, Homo sapien
acaaacccaacttgaataaatatgg

SEQ ID NO: 4503897 - DNA, 25 bp, Homo sapien
tacaaacccaacttgaataaatatg

SEQ ID NO: 4503898 - DNA, 25 bp, Homo sapien
aaagatagctatttgaatatgcagc

SEQ ID NO: 4503899 - DNA, 25 bp, Homo sapien
ccactggtggatctaggattcagac

SEQ ID NO: 4503900 - DNA, 25 bp, Homo sapien
gtatgtttgtcagccttgcagccag

SEQ ID NO: 4503901 - DNA, 25 bp, Homo sapien
tttgagttaaccagaccactggtgg

SEQ ID NO: 4503902 - DNA, 25 bp, Homo sapien
gatttccagtcccaagtgctagtta

SEQ ID NO: 4503903 - DNA, 25 bp, Homo sapien
ttaatcgcttccgatttgaccaacg

SEQ ID NO: 4503904 - DNA, 25 bp, Homo sapien
gctggcacttaatcgcttccgattt

SEQ ID NO: 4503905 - DNA, 25 bp, Homo sapien
cttgctggcacttaatcgcttccga

SEQ ID NO: 4503906 - DNA, 25 bp, Homo sapien
ggcacttaatcgcttccgatttgac

SEQ ID NO: 4503907 - DNA, 25 bp, Homo sapien
caaactccagtctttgagctggcag

SEQ ID NO: 4503908 - DNA, 25 bp, Homo sapien
ttcgctctctcggtctctcatccgc

SEQ ID NO: 4503909 - DNA, 25 bp, Homo sapien
aaactccagtctttgagctggcagt

SEQ ID NO: 4503910 - DNA, 25 bp, Homo sapien
gtctctcatccgcatccaaactcca

SEQ ID NO: 4503911 - DNA, 25 bp, Homo sapien
caccttatggttaggagccagagcc

SEQ ID NO: 4503912 - DNA, 25 bp, Homo sapien
ctccatcaccttatggttaggagcc

SEQ ID NO: 4503913 - DNA, 25 bp, Homo sapien
ccttatggttaggagccagagccat

SEQ ID NO: 4503914 - DNA, 25 bp, Homo sapien
catcaccttatggttaggagccaga

SEQ ID NO: 4503915 - DNA, 25 bp, Homo sapien
gagtgactttgatgatcataggaat

SEQ ID NO: 4503916 - DNA, 25 bp, Homo sapien
atgacatgtaaacttgcttctaatt

SEQ ID NO: 4503917 - DNA, 25 bp, Homo sapien
ctttgatgatcataggaattccaac

SEQ ID NO: 4503918 - DNA, 25 bp, Homo sapien
gacatgtaaacttgcttctaattcc

SEQ ID NO: 4503919 - DNA, 25 bp, Homo sapien
gccgtaggttgcgtatcaaagagga

SEQ ID NO: 4503920 - DNA, 25 bp, Homo sapien
actcagagagccgtaggttgcgtat

SEQ ID NO: 4503921 - DNA, 25 bp, Homo sapien
tataatcccgttccagagttggttc

SEQ ID NO: 4503922 - DNA, 25 bp, Homo sapien
agttatacttataatcccgttccag

SEQ ID NO: 4503923 - DNA, 25 bp, Homo sapien
tacttttatacctctgatctcccag

SEQ ID NO: 4503924 - DNA, 25 bp, Homo sapien
ccagttttaactggacaaacatctc

SEQ ID NO: 4503925 - DNA, 25 bp, Homo sapien
agttttaactggacaaacatctctg

SEQ ID NO: 4503926 - DNA, 25 bp, Homo sapien
ctctgatctcccagttttaactgga

SEQ ID NO: 4503927 - DNA, 25 bp, Homo sapien
gcggatttgcactcttacacagtgt

SEQ ID NO: 4503928 - DNA, 25 bp, Homo sapien
gaaagtcaaactgttcctgccactg

SEQ ID NO: 4503929 - DNA, 25 bp, Homo sapien
tgttcctgccactgcggatttgcac

SEQ ID NO: 4503930 - DNA, 25 bp, Homo sapien
gtgaaagtcaaactgttcctgccac

SEQ ID NO: 4503931 - DNA, 25 bp, Homo sapien
cacacttcaatgtccaaaatgccca

SEQ ID NO: 4503932 - DNA, 25 bp, Homo sapien
tttccccacacttcaatgtccaaaa

SEQ ID NO: 4503933 - DNA, 25 bp, Homo sapien
acgttcctcatgctttttgttgtcc

SEQ ID NO: 4503934 - DNA, 25 bp, Homo sapien
gtgcccagacgttcctcatgctttt

SEQ ID NO: 4503935 - DNA, 25 bp, Homo sapien
cagcttcggaaaagacaccccgtag

SEQ ID NO: 4503936 - DNA, 25 bp, Homo sapien
gtagtggttgggatccctttcaaca

SEQ ID NO: 4503937 - DNA, 25 bp, Homo sapien
ttgatggagaaaactacttggtgtt

SEQ ID NO: 4503938 - DNA, 25 bp, Homo sapien
aaggcatctccctgaacccaagatc

SEQ ID NO: 4503939 - DNA, 25 bp, Homo sapien
cagggtcctggtatatcacagcagt

SEQ ID NO: 4503940 - DNA, 25 bp, Homo sapien
aacgtcagacacactgagaagtacc

SEQ ID NO: 4503941 - DNA, 25 bp, Homo sapien
tactaccatccgtattggcagggtc

SEQ ID NO: 4503942 - DNA, 25 bp, Homo sapien
tacctgagcctgagctatctcagtc

SEQ ID NO: 4503943 - DNA, 25 bp, Homo sapien
ctgcaagctcgaggcagggtaaagc

SEQ ID NO: 4503944 - DNA, 25 bp, Homo sapien
gcagggtaaagcagtagcaccagct

SEQ ID NO: 4503945 - DNA, 25 bp, Homo sapien
tgcaagctcgaggcagggtaaagca

SEQ ID NO: 4503946 - DNA, 25 bp, Homo sapien
gcaagctcgaggcagggtaaagcag

SEQ ID NO: 4503947 - DNA, 25 bp, Homo sapien
tgcgcaagggaataaacagtgtcaa

SEQ ID NO: 4503948 - DNA, 25 bp, Homo sapien
caagggaataaacagtgtcaagtag

SEQ ID NO: 4503949 - DNA, 25 bp, Homo sapien
cgcaagggaataaacagtgtcaagt

SEQ ID NO: 4503950 - DNA, 25 bp, Homo sapien
agtagatgttgttactgttagccat

SEQ ID NO: 4503951 - DNA, 25 bp, Homo sapien
ccagtgtttttaggagttacttgtg

SEQ ID NO: 4503952 - DNA, 25 bp, Homo sapien
cagtgtttttaggagttacttgtgg

SEQ ID NO: 4503953 - DNA, 25 bp, Homo sapien
cagggggaatctgcaggtcggtgga

SEQ ID NO: 4503954 - DNA, 25 bp, Homo sapien
agttacttgtggctcagggggaatc

SEQ ID NO: 4503955 - DNA, 25 bp, Homo sapien
tggtgtccccatttatttccacatt

SEQ ID NO: 4503956 - DNA, 25 bp, Homo sapien
ctggtgtccccatttatttccacat

SEQ ID NO: 4503957 - DNA, 25 bp, Homo sapien
ttgcttcagagggagtgccgagata

SEQ ID NO: 4503958 - DNA, 25 bp, Homo sapien
cccgcacagggtgtaagtgtgacca

SEQ ID NO: 4503959 - DNA, 25 bp, Homo sapien
gtgtgaccaacataaggagagcccc

SEQ ID NO: 4503960 - DNA, 25 bp, Homo sapien
gctttctttcgctgaggtctgctaa

SEQ ID NO: 4503961 - DNA, 25 bp, Homo sapien
aaaaccttcacttgtagaatgccga

SEQ ID NO: 4503962 - DNA, 25 bp, Homo sapien
agaaatctgccgctaagagatctgc

SEQ ID NO: 4503963 - DNA, 25 bp, Homo sapien
tctgccgctaagagatctgctgcct

SEQ ID NO: 4503964 - DNA, 25 bp, Homo sapien
gaatgccgacgtctttcacatcttt

SEQ ID NO: 4503965 - DNA, 25 bp, Homo sapien
cttcatgcactccaaaactatctac

SEQ ID NO: 4503966 - DNA, 25 bp, Homo sapien
catgcactccaaaactatctactga

SEQ ID NO: 4503967 - DNA, 25 bp, Homo sapien
tcatgcactccaaaactatctactg

SEQ ID NO: 4503968 - DNA, 25 bp, Homo sapien
tgcactccaaaactatctactgaat

SEQ ID NO: 4503969 - DNA, 25 bp, Homo sapien
ttgtagccctaaagcagtgccttgg

SEQ ID NO: 4503970 - DNA, 25 bp, Homo sapien
aattacaactatctggaataagtcc

SEQ ID NO: 4503971 - DNA, 25 bp, Homo sapien
tggaataagtccactttgtagccct

SEQ ID NO: 4503972 - DNA, 25 bp, Homo sapien
gtgggaacaacactctggaggattc

SEQ ID NO: 4503973 - DNA, 25 bp, Homo sapien
gctacctcacggtaatgtgaatcca

SEQ ID NO: 4503974 - DNA, 25 bp, Homo sapien
tgatccccaccgtaggccacgatcg

SEQ ID NO: 4503975 - DNA, 25 bp, Homo sapien
tgataacagcagtaatgcctgatcc

SEQ ID NO: 4503976 - DNA, 25 bp, Homo sapien
gacctcttagaggtattcattgcta

SEQ ID NO: 4503977 - DNA, 25 bp, Homo sapien
ggttggcttttctgatcctgatcca

SEQ ID NO: 4503978 - DNA, 25 bp, Homo sapien
gacactgttgaggtctgttttattt

SEQ ID NO: 4503979 - DNA, 25 bp, Homo sapien
aatggaaggcatagagtagaaatac

SEQ ID NO: 4503980 - DNA, 25 bp, Homo sapien
tcttaaatgttcctggcactgacaa

SEQ ID NO: 4503981 - DNA, 25 bp, Homo sapien
gactaatccctatggacttttgctt

SEQ ID NO: 4503982 - DNA, 25 bp, Homo sapien
gtaactataacctccgtatggacta

SEQ ID NO: 4503983 - DNA, 25 bp, Homo sapien
gactactgccaagactaatccctat

SEQ ID NO: 4503984 - DNA, 25 bp, Homo sapien
cacagagtttaccatatgcattcac

SEQ ID NO: 4503985 - DNA, 25 bp, Homo sapien
cactaagtcatccatatactcccaa

SEQ ID NO: 4503986 - DNA, 25 bp, Homo sapien
catccatatactcccaaactttgca

SEQ ID NO: 4503987 - DNA, 25 bp, Homo sapien
caaactttgcaatggctacagtcca

SEQ ID NO: 4503988 - DNA, 25 bp, Homo sapien
ggtgcctctaagttataaaccacta

SEQ ID NO: 4503989 - DNA, 25 bp, Homo sapien
catcccccaagaacagtgctacggc

SEQ ID NO: 4503990 - DNA, 25 bp, Homo sapien
gaatggctccgtaatgtccgtagga

SEQ ID NO: 4503991 - DNA, 25 bp, Homo sapien
attgccggcgtctgcagcacactgg

SEQ ID NO: 4503992 - DNA, 25 bp, Homo sapien
tgtccgtaggacattaacgcattgc

SEQ ID NO: 4503993 - DNA, 25 bp, Homo sapien
aagaacgaatggctccgtaatgtcc

SEQ ID NO: 4503994 - DNA, 25 bp, Homo sapien
ttcccttttgctgtgtttggcggaa

SEQ ID NO: 4503995 - DNA, 25 bp, Homo sapien
tttgctgtgtttggcggaaggatct

SEQ ID NO: 4503996 - DNA, 25 bp, Homo sapien
ttggcggaaggatctggatttggaa

SEQ ID NO: 4503997 - DNA, 25 bp, Homo sapien
ccttttgctgtgtttggcggaagga

SEQ ID NO: 4503998 - DNA, 25 bp, Homo sapien
agtgaatctcgaaagggacaagggc

SEQ ID NO: 4503999 - DNA, 25 bp, Homo sapien
agggcaatgtgaacaagagtcagat

SEQ ID NO: 4504000 - DNA, 25 bp, Homo sapien
tggaaagataacatacacatcggtc

SEQ ID NO: 4504001 - DNA, 25 bp, Homo sapien
catacacatcggtcaaagacaagtg

SEQ ID NO: 4504002 - DNA, 25 bp, Homo sapien
tgtagacggtatgcgtctgaagtcg

SEQ ID NO: 4504003 - DNA, 25 bp, Homo sapien
tgaggtttttgtagacggtatgcgt

SEQ ID NO: 4504004 - DNA, 25 bp, Homo sapien
tctgaagtcggtcattgcctaactc

SEQ ID NO: 4504005 - DNA, 25 bp, Homo sapien
tccaacaagcaaaatgggtcactct

SEQ ID NO: 4504006 - DNA, 25 bp, Homo sapien
ttccaaaacatcatggatatcttta

SEQ ID NO: 4504007 - DNA, 25 bp, Homo sapien
ccaaaacatcatggatatctttaat

SEQ ID NO: 4504008 - DNA, 25 bp, Homo sapien
tccatcttcatcaaacactgtcact

SEQ ID NO: 4504009 - DNA, 25 bp, Homo sapien
ttcatcaaacactgtcacttccaaa

SEQ ID NO: 4504010 - DNA, 25 bp, Homo sapien
ggaatttgccaaccaaatctatgcc

SEQ ID NO: 4504011 - DNA, 25 bp, Homo sapien
tggaatttgccaaccaaatctatgc

SEQ ID NO: 4504012 - DNA, 25 bp, Homo sapien
atggaatttgccaaccaaatctatg

SEQ ID NO: 4504013 - DNA, 25 bp, Homo sapien
taacaattcggttgtccatctctaa

SEQ ID NO: 4504014 - DNA, 25 bp, Homo sapien
aacaattcggttgtccatctctaat

SEQ ID NO: 4504015 - DNA, 25 bp, Homo sapien
tgcggctgtcttcaacaaagcgctt

SEQ ID NO: 4504016 - DNA, 25 bp, Homo sapien
tgtcttcaacaaagcgcttttcccg

SEQ ID NO: 4504017 - DNA, 25 bp, Homo sapien
ctttttggacagcttgcggctgtct

SEQ ID NO: 4504018 - DNA, 25 bp, Homo sapien
gacagcttgcggctgtcttcaacaa

SEQ ID NO: 4504019 - DNA, 25 bp, Homo sapien
tgtacttcttaatgtggattcccac

SEQ ID NO: 4504020 - DNA, 25 bp, Homo sapien
cacggtccacatctcttgataagat

SEQ ID NO: 4504021 - DNA, 25 bp, Homo sapien
tagtgattcttttcacacggtccac

SEQ ID NO: 4504022 - DNA, 25 bp, Homo sapien
tggaagcagcttttaaggaactgca

SEQ ID NO: 4504023 - DNA, 25 bp, Homo sapien
tcccaactggcttgaaatgaataaa

SEQ ID NO: 4504024 - DNA, 25 bp, Homo sapien
taaaatgtaaattgaacaattcagt

SEQ ID NO: 4504025 - DNA, 25 bp, Homo sapien
ctgaatgaaattgcaatgtgtaatg

SEQ ID NO: 4504026 - DNA, 25 bp, Homo sapien
tgtgtaatgatcagtatgtcccaac

SEQ ID NO: 4504027 - DNA, 25 bp, Homo sapien
tcatagacaggggtggttcctcttt

SEQ ID NO: 4504028 - DNA, 25 bp, Homo sapien
tcataaggatgggccaatgtcacca

SEQ ID NO: 4504029 - DNA, 25 bp, Homo sapien
atttcatagacaggggtggttcctc

SEQ ID NO: 4504030 - DNA, 25 bp, Homo sapien
tttcatagacaggggtggttcctct

SEQ ID NO: 4504031 - DNA, 25 bp, Homo sapien
cataaaaatgttgggagtgaccttg

SEQ ID NO: 4504032 - DNA, 25 bp, Homo sapien
tacaaagatttgcagtcgggagact

SEQ ID NO: 4504033 - DNA, 25 bp, Homo sapien
taggtcctctacaccgaagcagtgg

SEQ ID NO: 4504034 - DNA, 25 bp, Homo sapien
tataggaaaggtcaagcctacaggc

SEQ ID NO: 4504035 - DNA, 25 bp, Homo sapien
ggaactcaacgcatgaagccaccag

SEQ ID NO: 4504036 - DNA, 25 bp, Homo sapien
cagaattgcatagaacattccatgg

SEQ ID NO: 4504037 - DNA, 25 bp, Homo sapien
gaggttgaaggggaactcaacgcat

SEQ ID NO: 4504038 - DNA, 25 bp, Homo sapien
tgaaggggaactcaacgcatgaagc

SEQ ID NO: 4504039 - DNA, 25 bp, Homo sapien
ctgagagtacaacatggcagcctgc

SEQ ID NO: 4504040 - DNA, 25 bp, Homo sapien
ctgcattctccagcgtgggggcggg

SEQ ID NO: 4504041 - DNA, 25 bp, Homo sapien
agcctgcattctccagcgtgggggc

SEQ ID NO: 4504042 - DNA, 25 bp, Homo sapien
ggcagcctgcattctccagcgtggg

SEQ ID NO: 4504043 - DNA, 25 bp, Homo sapien
acacacagtcgcatatacccatgga

SEQ ID NO: 4504044 - DNA, 25 bp, Homo sapien
ggaaaaccagcaaggagaacaccac

SEQ ID NO: 4504045 - DNA, 25 bp, Homo sapien
ggatccttgcaaaatcatactttgg

SEQ ID NO: 4504046 - DNA, 25 bp, Homo sapien
aacaccaccttgatcttccttgctg

SEQ ID NO: 4504047 - DNA, 25 bp, Homo sapien
tcaaattatccagctggattccaag

SEQ ID NO: 4504048 - DNA, 25 bp, Homo sapien
tgccaaatgcatgtgatgcccaggg

SEQ ID NO: 4504049 - DNA, 25 bp, Homo sapien
tattctcgcccatgtaatgagggtt

SEQ ID NO: 4504050 - DNA, 25 bp, Homo sapien
aattttggtctcatcatcacttgtg

SEQ ID NO: 4504051 - DNA, 25 bp, Homo sapien
cactgtgcaagagcaaggcttagat

SEQ ID NO: 4504052 - DNA, 25 bp, Homo sapien
aacacgctgtagtaaaccctgacca

SEQ ID NO: 4504053 - DNA, 25 bp, Homo sapien
ggtctaattacaggctaccccagca

SEQ ID NO: 4504054 - DNA, 25 bp, Homo sapien
caggcagctagaacgattactgggc

SEQ ID NO: 4504055 - DNA, 25 bp, Homo sapien
tcggaagaaatcagtgggtgtagga

SEQ ID NO: 4504056 - DNA, 25 bp, Homo sapien
cggaagaaatcagtgggtgtaggag

SEQ ID NO: 4504057 - DNA, 25 bp, Homo sapien
attctacactttcggaagaaatcag

SEQ ID NO: 4504058 - DNA, 25 bp, Homo sapien
ctaattctacactttcggaagaaat

SEQ ID NO: 4504059 - DNA, 25 bp, Homo sapien
ctgcactggcctaggaatgctttca

SEQ ID NO: 4504060 - DNA, 25 bp, Homo sapien
tagatcacgtaccactggaaacact

SEQ ID NO: 4504061 - DNA, 25 bp, Homo sapien
gcactggcctaggaatgctttcaaa

SEQ ID NO: 4504062 - DNA, 25 bp, Homo sapien
agtagatcacgtaccactggaaaca

SEQ ID NO: 4504063 - DNA, 25 bp, Homo sapien
tagcattggcctctatcgggaatac

SEQ ID NO: 4504064 - DNA, 25 bp, Homo sapien
ggtggtaccagctgagtaaaactcc

SEQ ID NO: 4504065 - DNA, 25 bp, Homo sapien
tgtgaatgccgctaaagttgctggc

SEQ ID NO: 4504066 - DNA, 25 bp, Homo sapien
catgcagagcacactcaagcagtct

SEQ ID NO: 4504067 - DNA, 25 bp, Homo sapien
caaataagaatacacgactgcttga

SEQ ID NO: 4504068 - DNA, 25 bp, Homo sapien
aagaatacacgactgcttgataaaa

SEQ ID NO: 4504069 - DNA, 25 bp, Homo sapien
gacaaataagaatacacgactgctt

SEQ ID NO: 4504070 - DNA, 25 bp, Homo sapien
aataagaatacacgactgcttgata

SEQ ID NO: 4504071 - DNA, 25 bp, Homo sapien
ccaaggggatcatatatagttcaaa

SEQ ID NO: 4504072 - DNA, 25 bp, Homo sapien
gatgaaattgtagacaaagatcagc

SEQ ID NO: 4504073 - DNA, 25 bp, Homo sapien
gcaacaatgccaaggggatcatata

SEQ ID NO: 4504074 - DNA, 25 bp, Homo sapien
gcctttcacaggtctgatgaaattg

SEQ ID NO: 4504075 - DNA, 25 bp, Homo sapien
tcctcgtcatctatgtctgtgctct

SEQ ID NO: 4504076 - DNA, 25 bp, Homo sapien
tcatcctcctcgtcatctatgtctg

SEQ ID NO: 4504077 - DNA, 25 bp, Homo sapien
cctcctcgtcatctatgtctgtgct

SEQ ID NO: 4504078 - DNA, 25 bp, Homo sapien
atcctcctcgtcatctatgtctgtg

SEQ ID NO: 4504079 - DNA, 25 bp, Homo sapien
cacagacatatagctgaaaacgctg

SEQ ID NO: 4504080 - DNA, 25 bp, Homo sapien
tagctgaaaacgctgccaggaacag

SEQ ID NO: 4504081 - DNA, 25 bp, Homo sapien
tctgaaagcgtaatgacaacaaaag

SEQ ID NO: 4504082 - DNA, 25 bp, Homo sapien
agcagcagatttgagagattctccc

SEQ ID NO: 4504083 - DNA, 25 bp, Homo sapien
gcatctgtgtgaacccttttctgaa

SEQ ID NO: 4504084 - DNA, 25 bp, Homo sapien
gacttaatcactcagaaaccgctag

SEQ ID NO: 4504085 - DNA, 25 bp, Homo sapien
gacatcaataagaaacttgcatctg

SEQ ID NO: 4504086 - DNA, 25 bp, Homo sapien
cgctagctaacatcaagacatcaat

SEQ ID NO: 4504087 - DNA, 25 bp, Homo sapien
ctgaaagttctatgttatccctgaa

SEQ ID NO: 4504088 - DNA, 25 bp, Homo sapien
gaaagttctatgttatccctgaaag

SEQ ID NO: 4504089 - DNA, 25 bp, Homo sapien
tgaaagttctatgttatccctgaaa

SEQ ID NO: 4504090 - DNA, 25 bp, Homo sapien
aaagttctatgttatccctgaaagt

SEQ ID NO: 4504091 - DNA, 25 bp, Homo sapien
ggaacctagacccttgaaagattga

SEQ ID NO: 4504092 - DNA, 25 bp, Homo sapien
tcagctcaataggaagatactcaca

SEQ ID NO: 4504093 - DNA, 25 bp, Homo sapien
taaaagtctctctgcactaagtgac

SEQ ID NO: 4504094 - DNA, 25 bp, Homo sapien
taaaaggaatacacagtcagctcaa

SEQ ID NO: 4504095 - DNA, 25 bp, Homo sapien
agctatttcctccaagacgttttga

SEQ ID NO: 4504096 - DNA, 25 bp, Homo sapien
cagttgaaacaatatcctgtaccat

SEQ ID NO: 4504097 - DNA, 25 bp, Homo sapien
caatcaacccctttttctcagattc

SEQ ID NO: 4504098 - DNA, 25 bp, Homo sapien
tcctgtaccatatagattctttcaa

SEQ ID NO: 4504099 - DNA, 25 bp, Homo sapien
tggtttcagttagtcggagttccga

SEQ ID NO: 4504100 - DNA, 25 bp, Homo sapien
taaaaagacacggaacaagcaagta

SEQ ID NO: 4504101 - DNA, 25 bp, Homo sapien
agaaaggtgagactgtagtcacccc

SEQ ID NO: 4504102 - DNA, 25 bp, Homo sapien
gactgtggcacataacgctgttaac

SEQ ID NO: 4504103 - DNA, 25 bp, Homo sapien
gaaggagggacacattgtaccatag

SEQ ID NO: 4504104 - DNA, 25 bp, Homo sapien
catagagtggacataaatcatgccc

SEQ ID NO: 4504105 - DNA, 25 bp, Homo sapien
taggtcctgggactggtagtatccc

SEQ ID NO: 4504106 - DNA, 25 bp, Homo sapien
catgccctcggtgctaagtggagaa

SEQ ID NO: 4504107 - DNA, 25 bp, Homo sapien
taggaacgtgcttaagaaaattgat

SEQ ID NO: 4504108 - DNA, 25 bp, Homo sapien
tatctcttcaagttaagtaactccc

SEQ ID NO: 4504109 - DNA, 25 bp, Homo sapien
taatacctatatcacagattctgct

SEQ ID NO: 4504110 - DNA, 25 bp, Homo sapien
gaaattgattgaataaatctgaacc

SEQ ID NO: 4504111 - DNA, 25 bp, Homo sapien
gattaaaatgatgtaccgcagtgga

SEQ ID NO: 4504112 - DNA, 25 bp, Homo sapien
tggctgctgccagaatcaaacaggc

SEQ ID NO: 4504113 - DNA, 25 bp, Homo sapien
gatgtaccgcagtggaatgaaatac

SEQ ID NO: 4504114 - DNA, 25 bp, Homo sapien
gctgctgccagaatcaaacaggcca

SEQ ID NO: 4504115 - DNA, 25 bp, Homo sapien
ctggaattgattgctagcaaaagga

SEQ ID NO: 4504116 - DNA, 25 bp, Homo sapien
ggaattgattgctagcaaaaggacc

SEQ ID NO: 4504117 - DNA, 25 bp, Homo sapien
ttgattgctagcaaaaggaccattc

SEQ ID NO: 4504118 - DNA, 25 bp, Homo sapien
aattgattgctagcaaaaggaccat

SEQ ID NO: 4504119 - DNA, 25 bp, Homo sapien
cctttacggagaacggctaactgct

SEQ ID NO: 4504120 - DNA, 25 bp, Homo sapien
tggttaggtattcacagaacgcccc

SEQ ID NO: 4504121 - DNA, 25 bp, Homo sapien
tatgtaggcacaccatttcccctgg

SEQ ID NO: 4504122 - DNA, 25 bp, Homo sapien
gaattcatcggcagtcatagctaag

SEQ ID NO: 4504123 - DNA, 25 bp, Homo sapien
tgcagagggctaccatcattactgt

SEQ ID NO: 4504124 - DNA, 25 bp, Homo sapien
tgtgacgtaggaatacctgggcccc

SEQ ID NO: 4504125 - DNA, 25 bp, Homo sapien
gaaattctacaacaatgcagagggc

SEQ ID NO: 4504126 - DNA, 25 bp, Homo sapien
tcacattgggcagtacaggcaaaat

SEQ ID NO: 4504127 - DNA, 25 bp, Homo sapien
ttagcttcgttgtactctgaatggc

SEQ ID NO: 4504128 - DNA, 25 bp, Homo sapien
ggctgtcagtcccaatgacgctgaa

SEQ ID NO: 4504129 - DNA, 25 bp, Homo sapien
cttctgaagttttgccacagggtgc

SEQ ID NO: 4504130 - DNA, 25 bp, Homo sapien
gaaagactaggtggccttctgaagt

SEQ ID NO: 4504131 - DNA, 25 bp, Homo sapien
tccggagctcataagctgtagtctt

SEQ ID NO: 4504132 - DNA, 25 bp, Homo sapien
ctatatccggagctcataagctgta

SEQ ID NO: 4504133 - DNA, 25 bp, Homo sapien
tatccggagctcataagctgtagtc

SEQ ID NO: 4504134 - DNA, 25 bp, Homo sapien
cggagctcataagctgtagtctttt

SEQ ID NO: 4504135 - DNA, 25 bp, Homo sapien
catgttgctgtcatgtagaatcatt

SEQ ID NO: 4504136 - DNA, 25 bp, Homo sapien
gtcatgtagaatcattcacaaatgc

SEQ ID NO: 4504137 - DNA, 25 bp, Homo sapien
gttgctgtcatgtagaatcattcac

SEQ ID NO: 4504138 - DNA, 25 bp, Homo sapien
tgctgtcatgtagaatcattcacaa

SEQ ID NO: 4504139 - DNA, 25 bp, Homo sapien
gaatagggatttcgaagcttcttag

SEQ ID NO: 4504140 - DNA, 25 bp, Homo sapien
gtagctcattattgtcgatggaata

SEQ ID NO: 4504141 - DNA, 25 bp, Homo sapien
ttttgaacatcagacggtaccctag

SEQ ID NO: 4504142 - DNA, 25 bp, Homo sapien
ccctagagaggaagtctagtagctc

SEQ ID NO: 4504143 - DNA, 25 bp, Homo sapien
gggtttctaccttcgctgggcactg

SEQ ID NO: 4504144 - DNA, 25 bp, Homo sapien
taagcttaataactgcctcttggga

SEQ ID NO: 4504145 - DNA, 25 bp, Homo sapien
ccttggcgatacacggaggatctta

SEQ ID NO: 4504146 - DNA, 25 bp, Homo sapien
tgttattagaaagcgcccttggcga

SEQ ID NO: 4504147 - DNA, 25 bp, Homo sapien
gtaaccctagctcgccacagtgtgt

SEQ ID NO: 4504148 - DNA, 25 bp, Homo sapien
gatgctggcggttaggtaaccctag

SEQ ID NO: 4504149 - DNA, 25 bp, Homo sapien
cacagtgtgtgctaatggctcccca

SEQ ID NO: 4504150 - DNA, 25 bp, Homo sapien
ctgtgaaaacaaatagccgtgatgc

SEQ ID NO: 4504151 - DNA, 25 bp, Homo sapien
ctagagagcgctgcgcttcttccgc

SEQ ID NO: 4504152 - DNA, 25 bp, Homo sapien
tgctgcagagtttcaattctgcata

SEQ ID NO: 4504153 - DNA, 25 bp, Homo sapien
gtggctgctgcagagtttcaattct

SEQ ID NO: 4504154 - DNA, 25 bp, Homo sapien
agagtttcaattctgcatactgcac

SEQ ID NO: 4504155 - DNA, 25 bp, Homo sapien
aacagccataacattggtctactca

SEQ ID NO: 4504156 - DNA, 25 bp, Homo sapien
gccataacattggtctactcaacca

SEQ ID NO: 4504157 - DNA, 25 bp, Homo sapien
caaacacaatattgggtgctgctgt

SEQ ID NO: 4504158 - DNA, 25 bp, Homo sapien
ctgctgtccaaagtcggtgtgtgcc

SEQ ID NO: 4504159 - DNA, 25 bp, Homo sapien
gggctgaccctctacgcaactagga

SEQ ID NO: 4504160 - DNA, 25 bp, Homo sapien
gagaatttcaatcgggctacagagg

SEQ ID NO: 4504161 - DNA, 25 bp, Homo sapien
gagaagagacttacgcccatgaacg

SEQ ID NO: 4504162 - DNA, 25 bp, Homo sapien
gccacagggcatgcatttcagaagg

SEQ ID NO: 4504163 - DNA, 25 bp, Homo sapien
tgcattgacactggacctactaggc

SEQ ID NO: 4504164 - DNA, 25 bp, Homo sapien
gatgaccgagaaattccaagcccag

SEQ ID NO: 4504165 - DNA, 25 bp, Homo sapien
ggttatgaaggcctccacttgggtg

SEQ ID NO: 4504166 - DNA, 25 bp, Homo sapien
cacttgggtggtggaaatcagaaca

SEQ ID NO: 4504167 - DNA, 25 bp, Homo sapien
aaaggaagttggagtcacatccagc

SEQ ID NO: 4504168 - DNA, 25 bp, Homo sapien
aaaataatctctacgacctggcctg

SEQ ID NO: 4504169 - DNA, 25 bp, Homo sapien
ggacagtggtcaaagcctcttatga

SEQ ID NO: 4504170 - DNA, 25 bp, Homo sapien
taatgggctattcagtggaggacag

SEQ ID NO: 4504171 - DNA, 25 bp, Homo sapien
gattcagcgctaaaactggactcct

SEQ ID NO: 4504172 - DNA, 25 bp, Homo sapien
cagtgccactatttgaaagtccagg

SEQ ID NO: 4504173 - DNA, 25 bp, Homo sapien
ttatcaggagtactacaaagggcta

SEQ ID NO: 4504174 - DNA, 25 bp, Homo sapien
gctaatagggttacactgaggtcat

SEQ ID NO: 4504175 - DNA, 25 bp, Homo sapien
caggtctgacacttaagtctttcat

SEQ ID NO: 4504176 - DNA, 25 bp, Homo sapien
gaagttgtccactccctaatgtatg

SEQ ID NO: 4504177 - DNA, 25 bp, Homo sapien
tgtctgttatgatagcaacaccatg

SEQ ID NO: 4504178 - DNA, 25 bp, Homo sapien
gaagtcaggaagagtcatgctttca

SEQ ID NO: 4504179 - DNA, 25 bp, Homo sapien
tctggattctatcacgtcttcccat

SEQ ID NO: 4504180 - DNA, 25 bp, Homo sapien
cagagggttcttcagatcgcttttc

SEQ ID NO: 4504181 - DNA, 25 bp, Homo sapien
tcttcagatcgcttttctgcactgc

SEQ ID NO: 4504182 - DNA, 25 bp, Homo sapien
actggctttatgtcagagggttctt

SEQ ID NO: 4504183 - DNA, 25 bp, Homo sapien
atgtggatgagggtctactggcttt

SEQ ID NO: 4504184 - DNA, 25 bp, Homo sapien
accgcatgtgctaaagtggatttct

SEQ ID NO: 4504185 - DNA, 25 bp, Homo sapien
cttcccaacaggcacaccgcatgtg

SEQ ID NO: 4504186 - DNA, 25 bp, Homo sapien
ccaacaggcacaccgcatgtgctaa

SEQ ID NO: 4504187 - DNA, 25 bp, Homo sapien
caggcacaccgcatgtgctaaagtg

SEQ ID NO: 4504188 - DNA, 25 bp, Homo sapien
caaatatgcaatttgggtcaggctc

SEQ ID NO: 4504189 - DNA, 25 bp, Homo sapien
gcacatgactgttatacacagggca

SEQ ID NO: 4504190 - DNA, 25 bp, Homo sapien
gcagctgtgttagctccactgaggt

SEQ ID NO: 4504191 - DNA, 25 bp, Homo sapien
ggtcaggctcattagcagtagcaca

SEQ ID NO: 4504192 - DNA, 25 bp, Homo sapien
catcttacagaagtcaaagctaagg

SEQ ID NO: 4504193 - DNA, 25 bp, Homo sapien
caatcgtattctactcatcttacag

SEQ ID NO: 4504194 - DNA, 25 bp, Homo sapien
gagatagcaatcgtattctactcat

SEQ ID NO: 4504195 - DNA, 25 bp, Homo sapien
acccagggagatagcaatcgtattc

SEQ ID NO: 4504196 - DNA, 25 bp, Homo sapien
ctctgaaacagcattcctcctagtt

SEQ ID NO: 4504197 - DNA, 25 bp, Homo sapien
tgccatcaccgcaagacaccagtga

SEQ ID NO: 4504198 - DNA, 25 bp, Homo sapien
agcattcctcctagttaaggatctc

SEQ ID NO: 4504199 - DNA, 25 bp, Homo sapien
caccagtgagttgactatattttat

SEQ ID NO: 4504200 - DNA, 25 bp, Homo sapien
cctctaacgtgtcattttgccattg

SEQ ID NO: 4504201 - DNA, 25 bp, Homo sapien
tgtatcctctaacgtgtcattttgc

SEQ ID NO: 4504202 - DNA, 25 bp, Homo sapien
attttccatccctgctaagctaaac

SEQ ID NO: 4504203 - DNA, 25 bp, Homo sapien
taagctaaacagactcttgcatctt

SEQ ID NO: 4504204 - DNA, 25 bp, Homo sapien
gggtactttacaatctggcctcatc

SEQ ID NO: 4504205 - DNA, 25 bp, Homo sapien
ctaagggtactttacaatctggcct

SEQ ID NO: 4504206 - DNA, 25 bp, Homo sapien
aagggtactttacaatctggcctca

SEQ ID NO: 4504207 - DNA, 25 bp, Homo sapien
tactttacaatctggcctcatctac

SEQ ID NO: 4504208 - DNA, 25 bp, Homo sapien
tttcccccatatctcctgtcacagt

SEQ ID NO: 4504209 - DNA, 25 bp, Homo sapien
gagaacaggcagacaatcagtctgg

SEQ ID NO: 4504210 - DNA, 25 bp, Homo sapien
agaagtttatggagaacaggcagac

SEQ ID NO: 4504211 - DNA, 25 bp, Homo sapien
cacagtcctgaactattgtaaaagg

SEQ ID NO: 4504212 - DNA, 25 bp, Homo sapien
tgtgaatgcacataattccctgggc

SEQ ID NO: 4504213 - DNA, 25 bp, Homo sapien
ggagcagagcattgcacaaaaattt

SEQ ID NO: 4504214 - DNA, 25 bp, Homo sapien
cagtggcctgaaagtaatttctgac

SEQ ID NO: 4504215 - DNA, 25 bp, Homo sapien
taatagtgtgaggtcggagagaaaa

SEQ ID NO: 4504216 - DNA, 25 bp, Homo sapien
tctccaacctagtgcagatgccatg

SEQ ID NO: 4504217 - DNA, 25 bp, Homo sapien
tgtctcctggatgtgagcatggacc

SEQ ID NO: 4504218 - DNA, 25 bp, Homo sapien
gaatggttccatttcaggagcaatg

SEQ ID NO: 4504219 - DNA, 25 bp, Homo sapien
gcccgggaacccaggtatacattca

SEQ ID NO: 4504220 - DNA, 25 bp, Homo sapien
aggcacttgcaacccaggaacttct

SEQ ID NO: 4504221 - DNA, 25 bp, Homo sapien
tccaggtgctcgaaaggcacttgca

SEQ ID NO: 4504222 - DNA, 25 bp, Homo sapien
aggctctaatagaatttccaggtgc

SEQ ID NO: 4504223 - DNA, 25 bp, Homo sapien
ctctaatagaatttccaggtgctcg

SEQ ID NO: 4504224 - DNA, 25 bp, Homo sapien
catggtgaaaagagggtgtgccttt

SEQ ID NO: 4504225 - DNA, 25 bp, Homo sapien
cctgcttggtaagttaagaatcacc

SEQ ID NO: 4504226 - DNA, 25 bp, Homo sapien
tcttgatgggtgaagatatgctcac

SEQ ID NO: 4504227 - DNA, 25 bp, Homo sapien
ctttgcacctgttaaggccagctgc

SEQ ID NO: 4504228 - DNA, 25 bp, Homo sapien
tgagagtcctttttgtctcctccat

SEQ ID NO: 4504229 - DNA, 25 bp, Homo sapien
ggtgagagcaatgttttgagagtcc

SEQ ID NO: 4504230 - DNA, 25 bp, Homo sapien
tgttttgagagtcctttttgtctcc

SEQ ID NO: 4504231 - DNA, 25 bp, Homo sapien
tgaaggtgagagcaatgttttgaga

SEQ ID NO: 4504232 - DNA, 25 bp, Homo sapien
tcgcagaggtcaatgacaaatgagg

SEQ ID NO: 4504233 - DNA, 25 bp, Homo sapien
tctccctttacccagtcgcagaggt

SEQ ID NO: 4504234 - DNA, 25 bp, Homo sapien
gctgtattgtccctgctgccttctt

SEQ ID NO: 4504235 - DNA, 25 bp, Homo sapien
catttgtgacccctctgtggacacc

SEQ ID NO: 4504236 - DNA, 25 bp, Homo sapien
tccagagacacatcctgtttcaggg

SEQ ID NO: 4504237 - DNA, 25 bp, Homo sapien
catgggagattctagtgcactgtct

SEQ ID NO: 4504238 - DNA, 25 bp, Homo sapien
gagagtcatcaaggactttgctgca

SEQ ID NO: 4504239 - DNA, 25 bp, Homo sapien
cttggacgatattaacaccgctggg

SEQ ID NO: 4504240 - DNA, 25 bp, Homo sapien
tcctattctcctggcatcccagagt

SEQ ID NO: 4504241 - DNA, 25 bp, Homo sapien
tgtctctcatcgcttccaggaacat

SEQ ID NO: 4504242 - DNA, 25 bp, Homo sapien
ccacattctcaccataaacggctgt

SEQ ID NO: 4504243 - DNA, 25 bp, Homo sapien
tctggtccttgggtgtaaaccttca

SEQ ID NO: 4504244 - DNA, 25 bp, Homo sapien
tgcttctgctaatggtgacacccgg

SEQ ID NO: 4504245 - DNA, 25 bp, Homo sapien
cgagcccaatatttgtgctgagaac

SEQ ID NO: 4504246 - DNA, 25 bp, Homo sapien
ctaatggtgacacccggagaaccga

SEQ ID NO: 4504247 - DNA, 25 bp, Homo sapien
cccggagaaccgagcccaatatttg

SEQ ID NO: 4504248 - DNA, 25 bp, Homo sapien
cattttctaggtacgtgggtttgca

SEQ ID NO: 4504249 - DNA, 25 bp, Homo sapien
agttcccaaggctatcaaatgacag

SEQ ID NO: 4504250 - DNA, 25 bp, Homo sapien
aagtgccctgtgttcgattatacca

SEQ ID NO: 4504251 - DNA, 25 bp, Homo sapien
gagtggagggttctaatgtgtcccc

SEQ ID NO: 4504252 - DNA, 25 bp, Homo sapien
taggtctcttttgacagggcaaggg

SEQ ID NO: 4504253 - DNA, 25 bp, Homo sapien
gagctctgccgttttgtgatcacaa

SEQ ID NO: 4504254 - DNA, 25 bp, Homo sapien
tcctgctaagagtaagagctgctgt

SEQ ID NO: 4504255 - DNA, 25 bp, Homo sapien
aggtttggccaatcctgctcaggca

SEQ ID NO: 4504256 - DNA, 25 bp, Homo sapien
caggtggattcttacatggaaggac

SEQ ID NO: 4504257 - DNA, 25 bp, Homo sapien
gggccagattctctcttcgttaaga

SEQ ID NO: 4504258 - DNA, 25 bp, Homo sapien
gacagattttgccagggtaggacat

SEQ ID NO: 4504259 - DNA, 25 bp, Homo sapien
tctcctgcagggttgaatatggcca

SEQ ID NO: 4504260 - DNA, 25 bp, Homo sapien
tcgtttcccatatgctgaagttcag

SEQ ID NO: 4504261 - DNA, 25 bp, Homo sapien
ccgaagtcgtttcccatatgctgaa

SEQ ID NO: 4504262 - DNA, 25 bp, Homo sapien
gaagtcgtttcccatatgctgaagt

SEQ ID NO: 4504263 - DNA, 25 bp, Homo sapien
tagccccgaagtcgtttcccatatg

SEQ ID NO: 4504264 - DNA, 25 bp, Homo sapien
catgactagcttgggaattcctttg

SEQ ID NO: 4504265 - DNA, 25 bp, Homo sapien
ttaaggcagccaccccagacaaggc

SEQ ID NO: 4504266 - DNA, 25 bp, Homo sapien
caccccagacaaggctagcagagag

SEQ ID NO: 4504267 - DNA, 25 bp, Homo sapien
tgataaacaattttcggacagttac

SEQ ID NO: 4504268 - DNA, 25 bp, Homo sapien
cttggccttgacaggctctctgatc

SEQ ID NO: 4504269 - DNA, 25 bp, Homo sapien
caggctctctgatcttaagcggctc

SEQ ID NO: 4504270 - DNA, 25 bp, Homo sapien
ctcttttagtttctccagtcttcca

SEQ ID NO: 4504271 - DNA, 25 bp, Homo sapien
taagcggctcttttagtttctccag

SEQ ID NO: 4504272 - DNA, 25 bp, Homo sapien
caagtccctggttctgtaatgagcg

SEQ ID NO: 4504273 - DNA, 25 bp, Homo sapien
cacagctgccgaaatagttaagaag

SEQ ID NO: 4504274 - DNA, 25 bp, Homo sapien
taatgagcgcttcaattcttagagg

SEQ ID NO: 4504275 - DNA, 25 bp, Homo sapien
taaaatgactgaaggtggtatggcc

SEQ ID NO: 4504276 - DNA, 25 bp, Homo sapien
gaaatttgcccgatgcttgacaact

SEQ ID NO: 4504277 - DNA, 25 bp, Homo sapien
tctccgaaatttgcccgatgcttga

SEQ ID NO: 4504278 - DNA, 25 bp, Homo sapien
tgtagtctccgaaatttgcccgatg

SEQ ID NO: 4504279 - DNA, 25 bp, Homo sapien
catctgtgtagtctccgaaatttgc

SEQ ID NO: 4504280 - DNA, 25 bp, Homo sapien
cctggaagctgtagggatatgcgat

SEQ ID NO: 4504281 - DNA, 25 bp, Homo sapien
ttcccctggaagctgtagggatatg

SEQ ID NO: 4504282 - DNA, 25 bp, Homo sapien
cttagtgtgaaacactctcttgttc

SEQ ID NO: 4504283 - DNA, 25 bp, Homo sapien
tagtgtgaaacactctcttgttctg

SEQ ID NO: 4504284 - DNA, 25 bp, Homo sapien
tctgtgtctttggatatattgctct

SEQ ID NO: 4504285 - DNA, 25 bp, Homo sapien
agtcaaatccggctgctcgctttgc

SEQ ID NO: 4504286 - DNA, 25 bp, Homo sapien
tttgccatgaagtggtcacagttat

SEQ ID NO: 4504287 - DNA, 25 bp, Homo sapien
cctcaaacaagctcagaccccacat

SEQ ID NO: 4504288 - DNA, 25 bp, Homo sapien
tagagctcaaggatatggacatcgt

SEQ ID NO: 4504289 - DNA, 25 bp, Homo sapien
tatggacatcgtcaaaatacttgac

SEQ ID NO: 4504290 - DNA, 25 bp, Homo sapien
caaggatatggacatcgtcaaaata

SEQ ID NO: 4504291 - DNA, 25 bp, Homo sapien
gctcaaggatatggacatcgtcaaa

SEQ ID NO: 4504292 - DNA, 25 bp, Homo sapien
tggtggacacggacagattgtatta

SEQ ID NO: 4504293 - DNA, 25 bp, Homo sapien
aacaacttcaggatattgccccggg

SEQ ID NO: 4504294 - DNA, 25 bp, Homo sapien
cacggacagattgtattactgtcca

SEQ ID NO: 4504295 - DNA, 25 bp, Homo sapien
ttttctgtgtgaaatattatattcc

SEQ ID NO: 4504296 - DNA, 25 bp, Homo sapien
gaattttcaagcctgaggaaggcat

SEQ ID NO: 4504297 - DNA, 25 bp, Homo sapien
tgaacagcagaaagtttaaccaaac

SEQ ID NO: 4504298 - DNA, 25 bp, Homo sapien
ttttttatctgaacagcagaaagtt

SEQ ID NO: 4504299 - DNA, 25 bp, Homo sapien
ttttcaagcctgaggaaggcatcta

SEQ ID NO: 4504300 - DNA, 25 bp, Homo sapien
ttcaattttgcgctctctctgtctc

SEQ ID NO: 4504301 - DNA, 25 bp, Homo sapien
taacttcaattttgcgctctctctg

SEQ ID NO: 4504302 - DNA, 25 bp, Homo sapien
tgatgtgtgaaaattgacatgaaga

SEQ ID NO: 4504303 - DNA, 25 bp, Homo sapien
aattgggaccgagggagcccaagca

SEQ ID NO: 4504304 - DNA, 25 bp, Homo sapien
ggagaacaatgctgctaccttggaa

SEQ ID NO: 4504305 - DNA, 25 bp, Homo sapien
aggagagcaggccagtagcaaggaa

SEQ ID NO: 4504306 - DNA, 25 bp, Homo sapien
gtagcaaggaagaactggacccgct

SEQ ID NO: 4504307 - DNA, 25 bp, Homo sapien
tattagctggtataagctcaagtgc

SEQ ID NO: 4504308 - DNA, 25 bp, Homo sapien
tcctagaggtacaggtgggactttc

SEQ ID NO: 4504309 - DNA, 25 bp, Homo sapien
ttattgggtagctggagactgcttg

SEQ ID NO: 4504310 - DNA, 25 bp, Homo sapien
tagcaggtacttcaatgccaaagga

SEQ ID NO: 4504311 - DNA, 25 bp, Homo sapien
ccacgatatgcagaatcctgcaggg

SEQ ID NO: 4504312 - DNA, 25 bp, Homo sapien
ggagactggcaagggtcactgagcg

SEQ ID NO: 4504313 - DNA, 25 bp, Homo sapien
catcacacagctcgtagaagcacag

SEQ ID NO: 4504314 - DNA, 25 bp, Homo sapien
agcctgaccttgcttccccaggaga

SEQ ID NO: 4504315 - DNA, 25 bp, Homo sapien
acagcctgatggacaccgagcctga

SEQ ID NO: 4504316 - DNA, 25 bp, Homo sapien
cacaaccaaaagctgcacgctgaca

SEQ ID NO: 4504317 - DNA, 25 bp, Homo sapien
cttttattttggcataggaaatgct

SEQ ID NO: 4504318 - DNA, 25 bp, Homo sapien
tgaactgcattacaacgaactcaga

SEQ ID NO: 4504319 - DNA, 25 bp, Homo sapien
gacacatcagctgatagcatccaca

SEQ ID NO: 4504320 - DNA, 25 bp, Homo sapien
aacagagcctgagtaccggcactga

SEQ ID NO: 4504321 - DNA, 25 bp, Homo sapien
agagcctgagtaccggcactgacat

SEQ ID NO: 4504322 - DNA, 25 bp, Homo sapien
gaacagagcctgagtaccggcactg

SEQ ID NO: 4504323 - DNA, 25 bp, Homo sapien
acagagcctgagtaccggcactgac

SEQ ID NO: 4504324 - DNA, 25 bp, Homo sapien
agaggaaaaatagattcctcagaaa

SEQ ID NO: 4504325 - DNA, 25 bp, Homo sapien
aggagaggaaaaatagattcctcag

SEQ ID NO: 4504326 - DNA, 25 bp, Homo sapien
gaaggagaggaaaaatagattcctc

SEQ ID NO: 4504327 - DNA, 25 bp, Homo sapien
ggagaggaaaaatagattcctcaga

SEQ ID NO: 4504328 - DNA, 25 bp, Homo sapien
ggaagcagatgttgaacggcagccc

SEQ ID NO: 4504329 - DNA, 25 bp, Homo sapien
agcagatgttgaacggcagcccagc

SEQ ID NO: 4504330 - DNA, 25 bp, Homo sapien
ggggaagcagatgttgaacggcagc

SEQ ID NO: 4504331 - DNA, 25 bp, Homo sapien
gaagcagatgttgaacggcagccca

SEQ ID NO: 4504332 - DNA, 25 bp, Homo sapien
tgaggcagtgcacaccggtgagccc

SEQ ID NO: 4504333 - DNA, 25 bp, Homo sapien
tgtgtgaactttgttcccctacttc

SEQ ID NO: 4504334 - DNA, 25 bp, Homo sapien
aggcagtgcacaccggtgagccctg

SEQ ID NO: 4504335 - DNA, 25 bp, Homo sapien
tacttccggcgtgacaaagccagga

SEQ ID NO: 4504336 - DNA, 25 bp, Homo sapien
aactgcttggtctccactgacatgg

SEQ ID NO: 4504337 - DNA, 25 bp, Homo sapien
tctgtcggttacaaactgcttggtc

SEQ ID NO: 4504338 - DNA, 25 bp, Homo sapien
tagagaggcctgagacttgcttctg

SEQ ID NO: 4504339 - DNA, 25 bp, Homo sapien
catctggatcagtttccctgtagag

SEQ ID NO: 4504340 - DNA, 25 bp, Homo sapien
gaagccttacaaccttgtagcatgt

SEQ ID NO: 4504341 - DNA, 25 bp, Homo sapien
tgtttgcccagaagccttacaacct

SEQ ID NO: 4504342 - DNA, 25 bp, Homo sapien
gcccagaagccttacaaccttgtag

SEQ ID NO: 4504343 - DNA, 25 bp, Homo sapien
cttatgtttgcccagaagccttaca

SEQ ID NO: 4504344 - DNA, 25 bp, Homo sapien
tcattctacttcgtaactttcccat

SEQ ID NO: 4504345 - DNA, 25 bp, Homo sapien
caaaggcacagttctaaggctctga

SEQ ID NO: 4504346 - DNA, 25 bp, Homo sapien
ctgagttttcattctacttcgtaac

SEQ ID NO: 4504347 - DNA, 25 bp, Homo sapien
ccatctttgaggaaacaccgtcact

SEQ ID NO: 4504348 - DNA, 25 bp, Homo sapien
catcgccttagtttcatgattaaaa

SEQ ID NO: 4504349 - DNA, 25 bp, Homo sapien
tatggagtcccttcatcgccttagt

SEQ ID NO: 4504350 - DNA, 25 bp, Homo sapien
cctcttcctaacctcactatggagt

SEQ ID NO: 4504351 - DNA, 25 bp, Homo sapien
catgattaaaataaccgggtaactg

SEQ ID NO: 4504352 - DNA, 25 bp, Homo sapien
cagacagctctaaggaatgacaaat

SEQ ID NO: 4504353 - DNA, 25 bp, Homo sapien
tgacaaatgtctatgatttgctgct

SEQ ID NO: 4504354 - DNA, 25 bp, Homo sapien
gcattcttcagtttcgaattagaga

SEQ ID NO: 4504355 - DNA, 25 bp, Homo sapien
gctattttgctggaaacacctgatg

SEQ ID NO: 4504356 - DNA, 25 bp, Homo sapien
agtgctccagtaaacgatggtcttt

SEQ ID NO: 4504357 - DNA, 25 bp, Homo sapien
tcctgttcccatggtaaggttagtg

SEQ ID NO: 4504358 - DNA, 25 bp, Homo sapien
gtgcaaacacgacatgtggagaaag

SEQ ID NO: 4504359 - DNA, 25 bp, Homo sapien
ctggatgtgcaaacacgacatgtgg

SEQ ID NO: 4504360 - DNA, 25 bp, Homo sapien
cttcttatttcttgggcctcgccgc

SEQ ID NO: 4504361 - DNA, 25 bp, Homo sapien
ggctcctgcgcaagcctccgccagt

SEQ ID NO: 4504362 - DNA, 25 bp, Homo sapien
ctcagcgctgggtccgccgaaatgg

SEQ ID NO: 4504363 - DNA, 25 bp, Homo sapien
caggaaaccagaatcgttatcgctt

SEQ ID NO: 4504364 - DNA, 25 bp, Homo sapien
cctgtagccgcacgtcttccaggaa

SEQ ID NO: 4504365 - DNA, 25 bp, Homo sapien
tagccgcacgtcttccaggaactgg

SEQ ID NO: 4504366 - DNA, 25 bp, Homo sapien
gtagccgcacgtcttccaggaactg

SEQ ID NO: 4504367 - DNA, 25 bp, Homo sapien
ctgtagccgcacgtcttccaggaac

SEQ ID NO: 4504368 - DNA, 25 bp, Homo sapien
tcatttggggcctctctcaacaagc

SEQ ID NO: 4504369 - DNA, 25 bp, Homo sapien
ttttcatttggggcctctctcaaca

SEQ ID NO: 4504370 - DNA, 25 bp, Homo sapien
atttggggcctctctcaacaagcca

SEQ ID NO: 4504371 - DNA, 25 bp, Homo sapien
tttggggcctctctcaacaagccac

SEQ ID NO: 4504372 - DNA, 25 bp, Homo sapien
tctcgaggatgaggtcaacccgaag

SEQ ID NO: 4504373 - DNA, 25 bp, Homo sapien
ggggtttcttgagaagcagtgactt

SEQ ID NO: 4504374 - DNA, 25 bp, Homo sapien
cgaaggggtttcttgagaagcagtg

SEQ ID NO: 4504375 - DNA, 25 bp, Homo sapien
ctcgaggatgaggtcaacccgaagg

SEQ ID NO: 4504376 - DNA, 25 bp, Homo sapien
ttccgcctgagcttcttggcgttcg

SEQ ID NO: 4504377 - DNA, 25 bp, Homo sapien
gcagctcgccctgcttggccagatt

SEQ ID NO: 4504378 - DNA, 25 bp, Homo sapien
agcttcttggcgttcgggacctggt

SEQ ID NO: 4504379 - DNA, 25 bp, Homo sapien
tggccagattctcccatagctgctc

SEQ ID NO: 4504380 - DNA, 25 bp, Homo sapien
ggagccgggcctgggccctgcgcac

SEQ ID NO: 4504381 - DNA, 25 bp, Homo sapien
ctgtgggagggttgaggagccgggc

SEQ ID NO: 4504382 - DNA, 25 bp, Homo sapien
tgggagggttgaggagccgggcctg

SEQ ID NO: 4504383 - DNA, 25 bp, Homo sapien
gaggagccgggcctgggccctgcgc

SEQ ID NO: 4504384 - DNA, 25 bp, Homo sapien
ccagagttcgtagaagggccgctcc

SEQ ID NO: 4504385 - DNA, 25 bp, Homo sapien
cgtagaagggccgctccacggtgtc

SEQ ID NO: 4504386 - DNA, 25 bp, Homo sapien
agaagggccgctccacggtgtcctg

SEQ ID NO: 4504387 - DNA, 25 bp, Homo sapien
gagttcgtagaagggccgctccacg

SEQ ID NO: 4504388 - DNA, 25 bp, Homo sapien
tggccaaacaatggccagtccaggg

SEQ ID NO: 4504389 - DNA, 25 bp, Homo sapien
atcctggccaaacaatggccagtcc

SEQ ID NO: 4504390 - DNA, 25 bp, Homo sapien
ctggccaaacaatggccagtccagg

SEQ ID NO: 4504391 - DNA, 25 bp, Homo sapien
gccaaacaatggccagtccaggggg

SEQ ID NO: 4504392 - DNA, 25 bp, Homo sapien
ctgggacggcttggtgtgcaggcgt

SEQ ID NO: 4504393 - DNA, 25 bp, Homo sapien
gcttggtgtgcaggcgtggtggccg

SEQ ID NO: 4504394 - DNA, 25 bp, Homo sapien
tgcaggcgtggtggccgcttcactc

SEQ ID NO: 4504395 - DNA, 25 bp, Homo sapien
gtgtgcaggcgtggtggccgcttca

SEQ ID NO: 4504396 - DNA, 25 bp, Homo sapien
tcaaagtacgggttgtaggaagctc

SEQ ID NO: 4504397 - DNA, 25 bp, Homo sapien
cctcgcacggctacctggaacgtgg

SEQ ID NO: 4504398 - DNA, 25 bp, Homo sapien
cggctacctggaacgtggactcctg

SEQ ID NO: 4504399 - DNA, 25 bp, Homo sapien
tacctggaacgtggactcctgggtg

SEQ ID NO: 4504400 - DNA, 25 bp, Homo sapien
cgcacggctacctggaacgtggact

SEQ ID NO: 4504401 - DNA, 25 bp, Homo sapien
gcggccaggcgggtgggcgtgggac

SEQ ID NO: 4504402 - DNA, 25 bp, Homo sapien
ggccaggcgggtgggcgtgggacag

SEQ ID NO: 4504403 - DNA, 25 bp, Homo sapien
ccaggcgggtgggcgtgggacagac

SEQ ID NO: 4504404 - DNA, 25 bp, Homo sapien
ctgtggcggccaggcgggtgggcgt

SEQ ID NO: 4504405 - DNA, 25 bp, Homo sapien
cggagcctggcagtccgcaacgcgg

SEQ ID NO: 4504406 - DNA, 25 bp, Homo sapien
gcagcctgcgcgcagccttctcccg

SEQ ID NO: 4504407 - DNA, 25 bp, Homo sapien
gagcctggcagtccgcaacgcggcc

SEQ ID NO: 4504408 - DNA, 25 bp, Homo sapien
gccggagcctggcagtccgcaacgc

SEQ ID NO: 4504409 - DNA, 25 bp, Homo sapien
ttgtcagcctcggccttccgccgtg

SEQ ID NO: 4504410 - DNA, 25 bp, Homo sapien
tgtcagcctcggccttccgccgtgc

SEQ ID NO: 4504411 - DNA, 25 bp, Homo sapien
ctcagctgcacgtcgatgtcaggtg

SEQ ID NO: 4504412 - DNA, 25 bp, Homo sapien
tcagctgcacgtcgatgtcaggtgc

SEQ ID NO: 4504413 - DNA, 25 bp, Homo sapien
gctcagctgcacgtcgatgtcaggt

SEQ ID NO: 4504414 - DNA, 25 bp, Homo sapien
tgaacttggctctctgtcgaggctg

SEQ ID NO: 4504415 - DNA, 25 bp, Homo sapien
cttgtacctgggtttgaacttggct

SEQ ID NO: 4504416 - DNA, 25 bp, Homo sapien
tctgtcgaggctggatcatattcct

SEQ ID NO: 4504417 - DNA, 25 bp, Homo sapien
tttgaacttggctctctgtcgaggc

SEQ ID NO: 4504418 - DNA, 25 bp, Homo sapien
ggcgaggctccggcctctgatggga

SEQ ID NO: 4504419 - DNA, 25 bp, Homo sapien
ctttttattgaaaggcgaggctccg

SEQ ID NO: 4504420 - DNA, 25 bp, Homo sapien
gactttttattgaaaggcgaggctc

SEQ ID NO: 4504421 - DNA, 25 bp, Homo sapien
aggcgaggctccggcctctgatggg

SEQ ID NO: 4504422 - DNA, 25 bp, Homo sapien
gaatgagatgttgcctgcagatcta

SEQ ID NO: 4504423 - DNA, 25 bp, Homo sapien
agctccagaatgagatgttgcctgc

SEQ ID NO: 4504424 - DNA, 25 bp, Homo sapien
caggtgaatcagctccagaatgaga

SEQ ID NO: 4504425 - DNA, 25 bp, Homo sapien
tggcagagcaggtgaatcagctcca

SEQ ID NO: 4504426 - DNA, 25 bp, Homo sapien
tccagcttagtgtaagggaccatgt

SEQ ID NO: 4504427 - DNA, 25 bp, Homo sapien
accctgcagtgagtctacgtgtgtg

SEQ ID NO: 4504428 - DNA, 25 bp, Homo sapien
tgtacatgtgcgtggatatacacac

SEQ ID NO: 4504429 - DNA, 25 bp, Homo sapien
tgatttaataacaggaccctgcagt

SEQ ID NO: 4504430 - DNA, 25 bp, Homo sapien
gcattatcatttcataaggcaaaac

SEQ ID NO: 4504431 - DNA, 25 bp, Homo sapien
gaaggtggaaaaagcctactgccat

SEQ ID NO: 4504432 - DNA, 25 bp, Homo sapien
agtttttcatggaacatattcatca

SEQ ID NO: 4504433 - DNA, 25 bp, Homo sapien
agcctactgccatcccttagttttt

SEQ ID NO: 4504434 - DNA, 25 bp, Homo sapien
tgagcagcacaatattcaacccgcc

SEQ ID NO: 4504435 - DNA, 25 bp, Homo sapien
tatctagagtcaatacgaggcagta

SEQ ID NO: 4504436 - DNA, 25 bp, Homo sapien
cagaagcagaagtatccatcaccat

SEQ ID NO: 4504437 - DNA, 25 bp, Homo sapien
taatattcaaacgagattgggtgca

SEQ ID NO: 4504438 - DNA, 25 bp, Homo sapien
gaaacaggatgccaacgggaagctc

SEQ ID NO: 4504439 - DNA, 25 bp, Homo sapien
ctttcttctgacaacgcgcctggac

SEQ ID NO: 4504440 - DNA, 25 bp, Homo sapien
ggatgccaacgggaagctcctcacc

SEQ ID NO: 4504441 - DNA, 25 bp, Homo sapien
gcctggacagctcttgcagaatgaa

SEQ ID NO: 4504442 - DNA, 25 bp, Homo sapien
tgttcttgccctgaagttaaatggc

SEQ ID NO: 4504443 - DNA, 25 bp, Homo sapien
gcattagtgcaagtgtgaacttctg

SEQ ID NO: 4504444 - DNA, 25 bp, Homo sapien
cctgaagttaaatggcttattttct

SEQ ID NO: 4504445 - DNA, 25 bp, Homo sapien
ctgcattagtgcaagtgtgaacttc

SEQ ID NO: 4504446 - DNA, 25 bp, Homo sapien
acacggagggcacggtggctgtctg

SEQ ID NO: 4504447 - DNA, 25 bp, Homo sapien
cttcttgctaaatgtactgaacaca

SEQ ID NO: 4504448 - DNA, 25 bp, Homo sapien
tgcagaagtgcttctctacagagct

SEQ ID NO: 4504449 - DNA, 25 bp, Homo sapien
cagcaccaagtcttcttgctaaatg

SEQ ID NO: 4504450 - DNA, 25 bp, Homo sapien
ccagctcagtgcaaatgcgaactta

SEQ ID NO: 4504451 - DNA, 25 bp, Homo sapien
tgcgaacttactcctttgctaatgc

SEQ ID NO: 4504452 - DNA, 25 bp, Homo sapien
tctgcgggttccaatatgcacagtc

SEQ ID NO: 4504453 - DNA, 25 bp, Homo sapien
ttctcataactagggagcagaacgc

SEQ ID NO: 4504454 - DNA, 25 bp, Homo sapien
tctctgcctgcttaactgccagctc

SEQ ID NO: 4504455 - DNA, 25 bp, Homo sapien
tgttgttgcacaaagtagtttccca

SEQ ID NO: 4504456 - DNA, 25 bp, Homo sapien
ttcaggaaagcggacttcgttgagt

SEQ ID NO: 4504457 - DNA, 25 bp, Homo sapien
tgccagctccttgtatgagtctaat

SEQ ID NO: 4504458 - DNA, 25 bp, Homo sapien
tgaatgttagaaaagtgctcagtac

SEQ ID NO: 4504459 - DNA, 25 bp, Homo sapien
aagtgctcagtactgcaaagggcca

SEQ ID NO: 4504460 - DNA, 25 bp, Homo sapien
ggacctttgcaatcgtgatcaactg

SEQ ID NO: 4504461 - DNA, 25 bp, Homo sapien
aagaattggtggttctgaatgttag

SEQ ID NO: 4504462 - DNA, 25 bp, Homo sapien
gcttcaacatcaactggcacggcct

SEQ ID NO: 4504463 - DNA, 25 bp, Homo sapien
cagtctgcccatgtaagtatggacc

SEQ ID NO: 4504464 - DNA, 25 bp, Homo sapien
cacaaaggttcaggagcttcaacat

SEQ ID NO: 4504465 - DNA, 25 bp, Homo sapien
tattcccttgtgactgcctgacagc

SEQ ID NO: 4504466 - DNA, 25 bp, Homo sapien
tttatcaccgtccatctgatagaaa

SEQ ID NO: 4504467 - DNA, 25 bp, Homo sapien
catagtctttatcaccgtccatctg

SEQ ID NO: 4504468 - DNA, 25 bp, Homo sapien
ctttctttagggttgcatagtcttt

SEQ ID NO: 4504469 - DNA, 25 bp, Homo sapien
tagggttgcatagtctttatcaccg

SEQ ID NO: 4504470 - DNA, 25 bp, Homo sapien
tctgacaaccactcgaggctgggaa

SEQ ID NO: 4504471 - DNA, 25 bp, Homo sapien
ttcatactagggacatcaatctcag

SEQ ID NO: 4504472 - DNA, 25 bp, Homo sapien
tttgcattgcaaataggcgaacgtg

SEQ ID NO: 4504473 - DNA, 25 bp, Homo sapien
agagacctgtgtcgtttccactcag

SEQ ID NO: 4504474 - DNA, 25 bp, Homo sapien
ctatctccgccagcgccgctttgtt

SEQ ID NO: 4504475 - DNA, 25 bp, Homo sapien
atctccgccagcgccgctttgttac

SEQ ID NO: 4504476 - DNA, 25 bp, Homo sapien
tatctccgccagcgccgctttgtta

SEQ ID NO: 4504477 - DNA, 25 bp, Homo sapien
taggagaaaagttcttccaaatcaa

SEQ ID NO: 4504478 - DNA, 25 bp, Homo sapien
ttaggagaaaagttcttccaaatca

SEQ ID NO: 4504479 - DNA, 25 bp, Homo sapien
ttttgatgtcatatccatcctcagc

SEQ ID NO: 4504480 - DNA, 25 bp, Homo sapien
tctggtcggaagatgcaatccttca

SEQ ID NO: 4504481 - DNA, 25 bp, Homo sapien
gcacctgcttctggtcggaagatgc

SEQ ID NO: 4504482 - DNA, 25 bp, Homo sapien
tgatgtcatatccatcctcagcacc

SEQ ID NO: 4504483 - DNA, 25 bp, Homo sapien
cattatctgcaaaaggtcgcaacca

SEQ ID NO: 4504484 - DNA, 25 bp, Homo sapien
tgtgtaccctgtgtcacattatctg

SEQ ID NO: 4504485 - DNA, 25 bp, Homo sapien
ccttccgctcttgtgtaccctgtgt

SEQ ID NO: 4504486 - DNA, 25 bp, Homo sapien
tgcaaaaggtcgcaaccaacttccc

SEQ ID NO: 4504487 - DNA, 25 bp, Homo sapien
gccccttgaagtgataaacatgctg

SEQ ID NO: 4504488 - DNA, 25 bp, Homo sapien
ctatgttataaaacgggtgggcctg

SEQ ID NO: 4504489 - DNA, 25 bp, Homo sapien
cactgctgttcaattacatggctgc

SEQ ID NO: 4504490 - DNA, 25 bp, Homo sapien
ttgccccaggagataaacatttccg

SEQ ID NO: 4504491 - DNA, 25 bp, Homo sapien
ctaagtcaccatgtttacactggcc

SEQ ID NO: 4504492 - DNA, 25 bp, Homo sapien
accatgtttacactggccacgtcca

SEQ ID NO: 4504493 - DNA, 25 bp, Homo sapien
tccatcttcatcaccgttgtaccac

SEQ ID NO: 4504494 - DNA, 25 bp, Homo sapien
agtcaccatgtttacactggccacg

SEQ ID NO: 4504495 - DNA, 25 bp, Homo sapien
gtgttctgctatttaaatcataacc

SEQ ID NO: 4504496 - DNA, 25 bp, Homo sapien
tcttgtgttctgctatttaaatcat

SEQ ID NO: 4504497 - DNA, 25 bp, Homo sapien
tgtgttctgctatttaaatcataac

SEQ ID NO: 4504498 - DNA, 25 bp, Homo sapien
tttcttgtgttctgctatttaaatc

SEQ ID NO: 4504499 - DNA, 25 bp, Homo sapien
cagagctgtaggtgttgatacaaac

SEQ ID NO: 4504500 - DNA, 25 bp, Homo sapien
cgtcctgtgaaattcattctatgca

SEQ ID NO: 4504501 - DNA, 25 bp, Homo sapien
gagtccatgaattggatgcgtcctg

SEQ ID NO: 4504502 - DNA, 25 bp, Homo sapien
gatacaaacttgtaagagtccatga

SEQ ID NO: 4504503 - DNA, 25 bp, Homo sapien
cagtagagtaggtgcttgcattcca

SEQ ID NO: 4504504 - DNA, 25 bp, Homo sapien
ggcataaggacttgtgcacaacatt

SEQ ID NO: 4504505 - DNA, 25 bp, Homo sapien
taaagatattgttgattgatagcag

SEQ ID NO: 4504506 - DNA, 25 bp, Homo sapien
ttttgcagtccctccaatggtctgg

SEQ ID NO: 4504507 - DNA, 25 bp, Homo sapien
ttttgccttgaacttgtttgtcctc

SEQ ID NO: 4504508 - DNA, 25 bp, Homo sapien
gtcatgacaatgttctcctgtgaag

SEQ ID NO: 4504509 - DNA, 25 bp, Homo sapien
cctgtgaagattgcacagtctcttc

SEQ ID NO: 4504510 - DNA, 25 bp, Homo sapien
tgcaataccttgctagaggaagtcc

SEQ ID NO: 4504511 - DNA, 25 bp, Homo sapien
ggaaatttccaataactcgagtgta

SEQ ID NO: 4504512 - DNA, 25 bp, Homo sapien
tgggaaatttccaataactcgagtg

SEQ ID NO: 4504513 - DNA, 25 bp, Homo sapien
gctgtgttctttccgctttcaggag

SEQ ID NO: 4504514 - DNA, 25 bp, Homo sapien
gagtgtgggaatctttatgggaaat

SEQ ID NO: 4504515 - DNA, 25 bp, Homo sapien
cagcaagacccaaggacatcaagtc

SEQ ID NO: 4504516 - DNA, 25 bp, Homo sapien
aaggacatcaagtcccttgtaaaat

SEQ ID NO: 4504517 - DNA, 25 bp, Homo sapien
caatttgatggctgaggagcttttc

SEQ ID NO: 4504518 - DNA, 25 bp, Homo sapien
gagcttttcgtccaagcctttgtga

SEQ ID NO: 4504519 - DNA, 25 bp, Homo sapien
tgtgaggtttcaagtttccgtttgc

SEQ ID NO: 4504520 - DNA, 25 bp, Homo sapien
ttcaggcacagtgggtaaacctggg

SEQ ID NO: 4504521 - DNA, 25 bp, Homo sapien
aggtttcaagtttccgtttgctgtg

SEQ ID NO: 4504522 - DNA, 25 bp, Homo sapien
gtttcaggcacagtgggtaaacctg

SEQ ID NO: 4504523 - DNA, 25 bp, Homo sapien
aatgttagtgcgagggaatccagcc

SEQ ID NO: 4504524 - DNA, 25 bp, Homo sapien
gaatccctgcagtggctgacgagct

SEQ ID NO: 4504525 - DNA, 25 bp, Homo sapien
taaacgtcagatgtgggcttgtcgc

SEQ ID NO: 4504526 - DNA, 25 bp, Homo sapien
ggtgccatttccctcctgctgtaga

SEQ ID NO: 4504527 - DNA, 25 bp, Homo sapien
tcgacagaatcagtcaggcaaaggg

SEQ ID NO: 4504528 - DNA, 25 bp, Homo sapien
gcatcgtgtctcatagtcgacagaa

SEQ ID NO: 4504529 - DNA, 25 bp, Homo sapien
tgcagttaacttcaagccggagtac

SEQ ID NO: 4504530 - DNA, 25 bp, Homo sapien
ggattcaacccgtagtgcagttaac

SEQ ID NO: 4504531 - DNA, 25 bp, Homo sapien
tagattgacacaggccgtaggaggc

SEQ ID NO: 4504532 - DNA, 25 bp, Homo sapien
tgtatttagtcgtacatggtatgat

SEQ ID NO: 4504533 - DNA, 25 bp, Homo sapien
aaccacatgcattggattttgaatc

SEQ ID NO: 4504534 - DNA, 25 bp, Homo sapien
gattttgaatcataggcatagattg

SEQ ID NO: 4504535 - DNA, 25 bp, Homo sapien
tctaaagcccataacggcactagtg

SEQ ID NO: 4504536 - DNA, 25 bp, Homo sapien
cacctccgctctgatcacagctata

SEQ ID NO: 4504537 - DNA, 25 bp, Homo sapien
taaaactgccattgaaatccaaatg

SEQ ID NO: 4504538 - DNA, 25 bp, Homo sapien
aacctcttaatgttcagatagatcc

SEQ ID NO: 4504539 - DNA, 25 bp, Homo sapien
aggaatctttgccacggtcagtgga

SEQ ID NO: 4504540 - DNA, 25 bp, Homo sapien
ggcaatgccggaaaggaaatagaca

SEQ ID NO: 4504541 - DNA, 25 bp, Homo sapien
ccacagagcgctaatggaggaatct

SEQ ID NO: 4504542 - DNA, 25 bp, Homo sapien
gaaggattatcatccacccctgtgg

SEQ ID NO: 4504543 - DNA, 25 bp, Homo sapien
ctgacagtaaaatatgcgaagaaaa

SEQ ID NO: 4504544 - DNA, 25 bp, Homo sapien
cagcacctatgccctccagtcctga

SEQ ID NO: 4504545 - DNA, 25 bp, Homo sapien
agcacctatgccctccagtcctgag

SEQ ID NO: 4504546 - DNA, 25 bp, Homo sapien
tatgaggttgcaaccacctaattgt

SEQ ID NO: 4504547 - DNA, 25 bp, Homo sapien
tgtaagtacatcaacggcaaggatc

SEQ ID NO: 4504548 - DNA, 25 bp, Homo sapien
tatgagccaattaaccaacaaccac

SEQ ID NO: 4504549 - DNA, 25 bp, Homo sapien
tataattgagtatacagcaaaacaa

SEQ ID NO: 4504550 - DNA, 25 bp, Homo sapien
ttcatttttaacgccagctgtggca

SEQ ID NO: 4504551 - DNA, 25 bp, Homo sapien
catttttaacgccagctgtggcata

SEQ ID NO: 4504552 - DNA, 25 bp, Homo sapien
aaattcatttttaacgccagctgtg

SEQ ID NO: 4504553 - DNA, 25 bp, Homo sapien
aattcatttttaacgccagctgtgg

SEQ ID NO: 4504554 - DNA, 25 bp, Homo sapien
tatgggttgaaaaattcccacaaga

SEQ ID NO: 4504555 - DNA, 25 bp, Homo sapien
gaaaaattcccacaagagtcacaaa

SEQ ID NO: 4504556 - DNA, 25 bp, Homo sapien
cacaaactcagaaattagagatgga

SEQ ID NO: 4504557 - DNA, 25 bp, Homo sapien
caagagtcacaaactcagaaattag

SEQ ID NO: 4504558 - DNA, 25 bp, Homo sapien
atgacaacatcctttagaggagaga

SEQ ID NO: 4504559 - DNA, 25 bp, Homo sapien
ttatgccaagatcctcccaatgaca

SEQ ID NO: 4504560 - DNA, 25 bp, Homo sapien
aagatcctcccaatgacaacatcct

SEQ ID NO: 4504561 - DNA, 25 bp, Homo sapien
gacaacatcctttagaggagagacc

SEQ ID NO: 4504562 - DNA, 25 bp, Homo sapien
caatccggattttaggtcagtcacc

SEQ ID NO: 4504563 - DNA, 25 bp, Homo sapien
gatgtatttgccttcacagctgaac

SEQ ID NO: 4504564 - DNA, 25 bp, Homo sapien
ccagggccatcaaagaggcttgcaa

SEQ ID NO: 4504565 - DNA, 25 bp, Homo sapien
tcattatgctaaagatgtatttgcc

SEQ ID NO: 4504566 - DNA, 25 bp, Homo sapien
gaaaacaaagcagaactcgtgggtg

SEQ ID NO: 4504567 - DNA, 25 bp, Homo sapien
tcctgcgtggtgtgttttagtaaca

SEQ ID NO: 4504568 - DNA, 25 bp, Homo sapien
taattgccgtgctgtctggctcgga

SEQ ID NO: 4504569 - DNA, 25 bp, Homo sapien
tattctcacactgaaggctgtagtg

SEQ ID NO: 4504570 - DNA, 25 bp, Homo sapien
gaccctttatgtggcctgacagttg

SEQ ID NO: 4504571 - DNA, 25 bp, Homo sapien
cagcgcgttccagaccctttatgtg

SEQ ID NO: 4504572 - DNA, 25 bp, Homo sapien
tatttgcttaagtcagcgcgttcca

SEQ ID NO: 4504573 - DNA, 25 bp, Homo sapien
tgattgggagaagtcccacgaactt

SEQ ID NO: 4504574 - DNA, 25 bp, Homo sapien
tctcagaactcactttgaggcagag

SEQ ID NO: 4504575 - DNA, 25 bp, Homo sapien
aatgattgaacttatttctggccag

SEQ ID NO: 4504576 - DNA, 25 bp, Homo sapien
cattcttcgttgcatgagggcagag

SEQ ID NO: 4504577 - DNA, 25 bp, Homo sapien
gatctgggacgccaactcaagttct

SEQ ID NO: 4504578 - DNA, 25 bp, Homo sapien
agcccacattccttaagggtggctt

SEQ ID NO: 4504579 - DNA, 25 bp, Homo sapien
ccttaagggtggcttgctaaatgtc

SEQ ID NO: 4504580 - DNA, 25 bp, Homo sapien
cattccttaagggtggcttgctaaa

SEQ ID NO: 4504581 - DNA, 25 bp, Homo sapien
aagggtggcttgctaaatgtccatc

SEQ ID NO: 4504582 - DNA, 25 bp, Homo sapien
tcagctctcggtagcataatcttct

SEQ ID NO: 4504583 - DNA, 25 bp, Homo sapien
agctctcggtagcataatcttctga

SEQ ID NO: 4504584 - DNA, 25 bp, Homo sapien
cagctctcggtagcataatcttctg

SEQ ID NO: 4504585 - DNA, 25 bp, Homo sapien
cattcttcctgttcaccaaagtgga

SEQ ID NO: 4504586 - DNA, 25 bp, Homo sapien
ttttgtatgagcagaacattcttcc

SEQ ID NO: 4504587 - DNA, 25 bp, Homo sapien
gccactgaggatcgcccgcagaagg

SEQ ID NO: 4504588 - DNA, 25 bp, Homo sapien
accaaagtggaactgaagtttctct

SEQ ID NO: 4504589 - DNA, 25 bp, Homo sapien
gagcgtggcctttgttcatcccctt

SEQ ID NO: 4504590 - DNA, 25 bp, Homo sapien
aagctcccccttcagagcgtggcct

SEQ ID NO: 4504591 - DNA, 25 bp, Homo sapien
agagcgtggcctttgttcatcccct

SEQ ID NO: 4504592 - DNA, 25 bp, Homo sapien
gagaagctcccccttcagagcgtgg

SEQ ID NO: 4504593 - DNA, 25 bp, Homo sapien
aagccacgtctgaattccgcatgcc

SEQ ID NO: 4504594 - DNA, 25 bp, Homo sapien
tgggtgaacccatggtgcagtttcc

SEQ ID NO: 4504595 - DNA, 25 bp, Homo sapien
gaagggaagtgtaactgagaacacg

SEQ ID NO: 4504596 - DNA, 25 bp, Homo sapien
gaatgtgttgcctctggtctgtttc

SEQ ID NO: 4504597 - DNA, 25 bp, Homo sapien
taatacacacgcgtgctttggatgg

SEQ ID NO: 4504598 - DNA, 25 bp, Homo sapien
tggaacgtgggaggacacgctgtcc

SEQ ID NO: 4504599 - DNA, 25 bp, Homo sapien
tcccttaatacacacgcgtgctttg

SEQ ID NO: 4504600 - DNA, 25 bp, Homo sapien
tacacacgcgtgctttggatgggtg

SEQ ID NO: 4504601 - DNA, 25 bp, Homo sapien
ggacaggtacgctcgggtgacaggg

SEQ ID NO: 4504602 - DNA, 25 bp, Homo sapien
tcgggtgacagggaccgtacgtgcg

SEQ ID NO: 4504603 - DNA, 25 bp, Homo sapien
ctccaaggccagaacgggacaggta

SEQ ID NO: 4504604 - DNA, 25 bp, Homo sapien
acagggaccgtacgtgcgctgagcc

SEQ ID NO: 4504605 - DNA, 25 bp, Homo sapien
gacagcccgccgcttccctccgctc

SEQ ID NO: 4504606 - DNA, 25 bp, Homo sapien
gcgacagcccgccgcttccctccgc

SEQ ID NO: 4504607 - DNA, 25 bp, Homo sapien
ctgcgcgacagcccgccgcttccct

SEQ ID NO: 4504608 - DNA, 25 bp, Homo sapien
agcccgccgcttccctccgctccct

SEQ ID NO: 4504609 - DNA, 25 bp, Homo sapien
tgaactgtttgccatttgggaaggg

SEQ ID NO: 4504610 - DNA, 25 bp, Homo sapien
tgaaacatcagtccgaaattattcg

SEQ ID NO: 4504611 - DNA, 25 bp, Homo sapien
gctcgcgggttgttccctggcgaaa

SEQ ID NO: 4504612 - DNA, 25 bp, Homo sapien
tccttttgtgcaggcatctcgctgt

SEQ ID NO: 4504613 - DNA, 25 bp, Homo sapien
taccttcagcgtggcggtttgcgca

SEQ ID NO: 4504614 - DNA, 25 bp, Homo sapien
tttcagtcgccaaagaagagcccgg

SEQ ID NO: 4504615 - DNA, 25 bp, Homo sapien
gactgactgcctcctcgacaggaga

SEQ ID NO: 4504616 - DNA, 25 bp, Homo sapien
tatctaaagtgtattgtccacgccc

SEQ ID NO: 4504617 - DNA, 25 bp, Homo sapien
gaaacacttgtacttaagctctctc

SEQ ID NO: 4504618 - DNA, 25 bp, Homo sapien
tatatgctgtccctgttagcctgat

SEQ ID NO: 4504619 - DNA, 25 bp, Homo sapien
aaaatataccttggtgatatgtttc

SEQ ID NO: 4504620 - DNA, 25 bp, Homo sapien
actgttctgttcatatggtatttga

SEQ ID NO: 4504621 - DNA, 25 bp, Homo sapien
ccttcgacataatgctgtgtgaatc

SEQ ID NO: 4504622 - DNA, 25 bp, Homo sapien
acataatgctgtgtgaatcactaca

SEQ ID NO: 4504623 - DNA, 25 bp, Homo sapien
agtcccttcgacataatgctgtgtg

SEQ ID NO: 4504624 - DNA, 25 bp, Homo sapien
ttaaaaagtcccttcgacataatgc

SEQ ID NO: 4504625 - DNA, 25 bp, Homo sapien
aacatggaaatgttgcctcaagatg

SEQ ID NO: 4504626 - DNA, 25 bp, Homo sapien
agatgttccttactgtgttatttac

SEQ ID NO: 4504627 - DNA, 25 bp, Homo sapien
tactctagtgaaatccaaaagcaac

SEQ ID NO: 4504628 - DNA, 25 bp, Homo sapien
gaaaatgttcctaatgtatggccca

SEQ ID NO: 4504629 - DNA, 25 bp, Homo sapien
tatgtgccaccatggaaggaaagca

SEQ ID NO: 4504630 - DNA, 25 bp, Homo sapien
gagagaatacgatttgctatcaggt

SEQ ID NO: 4504631 - DNA, 25 bp, Homo sapien
gaacagcatacatcttcagactagg

SEQ ID NO: 4504632 - DNA, 25 bp, Homo sapien
gctagtgcaaggatcaacgattcta

SEQ ID NO: 4504633 - DNA, 25 bp, Homo sapien
gcttggagcagagttatatggcatc

SEQ ID NO: 4504634 - DNA, 25 bp, Homo sapien
gaatgtttgcgtggtgtcaccgtga

SEQ ID NO: 4504635 - DNA, 25 bp, Homo sapien
ggccctggccttgtcgcaatttgaa

SEQ ID NO: 4504636 - DNA, 25 bp, Homo sapien
tgctaaaagggacatgggctgctac

SEQ ID NO: 4504637 - DNA, 25 bp, Homo sapien
aactctaggtgactcctcctcacca

SEQ ID NO: 4504638 - DNA, 25 bp, Homo sapien
cctttatgagccatgatggccagat

SEQ ID NO: 4504639 - DNA, 25 bp, Homo sapien
ataagggccgcatcaaaaactctag

SEQ ID NO: 4504640 - DNA, 25 bp, Homo sapien
cctcctcaccaggaatgatggcaga

SEQ ID NO: 4504641 - DNA, 25 bp, Homo sapien
aatgaaaataaaactctctgttaca

SEQ ID NO: 4504642 - DNA, 25 bp, Homo sapien
atacaatgaaaataaaactctctgt

SEQ ID NO: 4504643 - DNA, 25 bp, Homo sapien
ctacacgaatacaatgaaaataaaa

SEQ ID NO: 4504644 - DNA, 25 bp, Homo sapien
caatgaaaataaaactctctgttac

SEQ ID NO: 4504645 - DNA, 25 bp, Homo sapien
ctcctgctccttccgcaacgtggag

SEQ ID NO: 4504646 - DNA, 25 bp, Homo sapien
ccctgagactttcacaccgctgaag

SEQ ID NO: 4504647 - DNA, 25 bp, Homo sapien
tcaaatatttggacctgaaggtctg

SEQ ID NO: 4504648 - DNA, 25 bp, Homo sapien
tggagcgcctcaccagcacatgtgt

SEQ ID NO: 4504649 - DNA, 25 bp, Homo sapien
taacatgtactatgcatgaggcaca

SEQ ID NO: 4504650 - DNA, 25 bp, Homo sapien
tatgtacttagcttgggatgcccag

SEQ ID NO: 4504651 - DNA, 25 bp, Homo sapien
tcatggaggtgacctgcagagtcag

SEQ ID NO: 4504652 - DNA, 25 bp, Homo sapien
aaaacagcatccaccacttagcagg

SEQ ID NO: 4504653 - DNA, 25 bp, Homo sapien
gagagttacggtcacatgggctggt

SEQ ID NO: 4504654 - DNA, 25 bp, Homo sapien
ttacggtcacatgggctggtgttac

SEQ ID NO: 4504655 - DNA, 25 bp, Homo sapien
cgttgagtgagagttacggtcacat

SEQ ID NO: 4504656 - DNA, 25 bp, Homo sapien
ttgagtgagagttacggtcacatgg

SEQ ID NO: 4504657 - DNA, 25 bp, Homo sapien
atgaataacatgatgacttagagga

SEQ ID NO: 4504658 - DNA, 25 bp, Homo sapien
tgccttggggcccattgggaccagg

SEQ ID NO: 4504659 - DNA, 25 bp, Homo sapien
ctggttgtactgagagagatgactt

SEQ ID NO: 4504660 - DNA, 25 bp, Homo sapien
agccctggggtcagatgaataacat

SEQ ID NO: 4504661 - DNA, 25 bp, Homo sapien
atctcctaataatggagctgctata

SEQ ID NO: 4504662 - DNA, 25 bp, Homo sapien
ttctagccagcaatgggaccgagcc

SEQ ID NO: 4504663 - DNA, 25 bp, Homo sapien
ctagccagcaatgggaccgagccat

SEQ ID NO: 4504664 - DNA, 25 bp, Homo sapien
aattctagccagcaatgggaccgag

SEQ ID NO: 4504665 - DNA, 25 bp, Homo sapien
taaagcaaacggaaccttctggagc

SEQ ID NO: 4504666 - DNA, 25 bp, Homo sapien
tccgcttgacaatgatttatgaacc

SEQ ID NO: 4504667 - DNA, 25 bp, Homo sapien
tatctagctccgcttgacaatgatt

SEQ ID NO: 4504668 - DNA, 25 bp, Homo sapien
gaaaacaagacagcttcattttcat

SEQ ID NO: 4504669 - DNA, 25 bp, Homo sapien
agagctggagcccccgatttcctgt

SEQ ID NO: 4504670 - DNA, 25 bp, Homo sapien
attctcacagcaattactaggagag

SEQ ID NO: 4504671 - DNA, 25 bp, Homo sapien
ctcacagcaattactaggagagctg

SEQ ID NO: 4504672 - DNA, 25 bp, Homo sapien
acagcaattactaggagagctggag

SEQ ID NO: 4504673 - DNA, 25 bp, Homo sapien
tccttgtttcctgttatgttgcaca

SEQ ID NO: 4504674 - DNA, 25 bp, Homo sapien
ccttgtttcctgttatgttgcacat

SEQ ID NO: 4504675 - DNA, 25 bp, Homo sapien
ctccttgtttcctgttatgttgcac

SEQ ID NO: 4504676 - DNA, 25 bp, Homo sapien
taaacagaaaaacgcaatcaaatcc

SEQ ID NO: 4504677 - DNA, 25 bp, Homo sapien
caaaatgtaaacagaaaaacgcaat

SEQ ID NO: 4504678 - DNA, 25 bp, Homo sapien
acagaaaaacgcaatcaaatcccaa

SEQ ID NO: 4504679 - DNA, 25 bp, Homo sapien
caccccactcctcaaaatgtaaaca

SEQ ID NO: 4504680 - DNA, 25 bp, Homo sapien
tcagaaacgtgctataacttcaaca

SEQ ID NO: 4504681 - DNA, 25 bp, Homo sapien
tatgtgtgaattccagtcggatgat

SEQ ID NO: 4504682 - DNA, 25 bp, Homo sapien
tcattctgacatgggagttctttgc

SEQ ID NO: 4504683 - DNA, 25 bp, Homo sapien
cccctcatcatatgctatgtgtgaa

SEQ ID NO: 4504684 - DNA, 25 bp, Homo sapien
ttctggtcttgttgaaggtacattc

SEQ ID NO: 4504685 - DNA, 25 bp, Homo sapien
ggtcttgttgaaggtacattctcct

SEQ ID NO: 4504686 - DNA, 25 bp, Homo sapien
catttcctctttggaacctatgtct

SEQ ID NO: 4504687 - DNA, 25 bp, Homo sapien
ttggaacctatgtcttctggtcttg

SEQ ID NO: 4504688 - DNA, 25 bp, Homo sapien
cgggtcacttcaatttcctgcttca

SEQ ID NO: 4504689 - DNA, 25 bp, Homo sapien
gggtcacttcaatttcctgcttcat

SEQ ID NO: 4504690 - DNA, 25 bp, Homo sapien
gaacggtttctgagaactgtatcag

SEQ ID NO: 4504691 - DNA, 25 bp, Homo sapien
gagtggagaacggtttctgagaact

SEQ ID NO: 4504692 - DNA, 25 bp, Homo sapien
atgaaatagagtggagaacggtttc

SEQ ID NO: 4504693 - DNA, 25 bp, Homo sapien
ttctgagaactgtatcagtagtcag

SEQ ID NO: 4504694 - DNA, 25 bp, Homo sapien
caagtgaatcaaagggtaactggcc

SEQ ID NO: 4504695 - DNA, 25 bp, Homo sapien
cttgttatcggaaccattggaggca

SEQ ID NO: 4504696 - DNA, 25 bp, Homo sapien
ccaatttggtgacctggtagtccta

SEQ ID NO: 4504697 - DNA, 25 bp, Homo sapien
ggtagtcctataccaccagtagtca

SEQ ID NO: 4504698 - DNA, 25 bp, Homo sapien
gatggatctccaggacctatagccc

SEQ ID NO: 4504699 - DNA, 25 bp, Homo sapien
aaacgccatgctttcgcctgtacct

SEQ ID NO: 4504700 - DNA, 25 bp, Homo sapien
cctgataagataattctggaccgca

SEQ ID NO: 4504701 - DNA, 25 bp, Homo sapien
taaagcagacagcatgcctggtgag

SEQ ID NO: 4504702 - DNA, 25 bp, Homo sapien
aaccaggcattgattgaccttctac

SEQ ID NO: 4504703 - DNA, 25 bp, Homo sapien
aaaccaggcattgattgaccttcta

SEQ ID NO: 4504704 - DNA, 25 bp, Homo sapien
gatgtccaggctacagtaatgttct

SEQ ID NO: 4504705 - DNA, 25 bp, Homo sapien
taatgttcccactagtagaccaagc

SEQ ID NO: 4504706 - DNA, 25 bp, Homo sapien
tactcaagtggaggtagcaaatgct

SEQ ID NO: 4504707 - DNA, 25 bp, Homo sapien
tataagatgtcctaggttggtggct

SEQ ID NO: 4504708 - DNA, 25 bp, Homo sapien
ggatttatgcctcggagctctgaac

SEQ ID NO: 4504709 - DNA, 25 bp, Homo sapien
aatcatctctaaccatgtcagccag

SEQ ID NO: 4504710 - DNA, 25 bp, Homo sapien
cagctgcctgtcctaagatgtttgg

SEQ ID NO: 4504711 - DNA, 25 bp, Homo sapien
caagacactgtcagggaaagggccc

SEQ ID NO: 4504712 - DNA, 25 bp, Homo sapien
gcttcgaggaacttatcacattgca

SEQ ID NO: 4504713 - DNA, 25 bp, Homo sapien
gtttaagcaagaggacaggccctct

SEQ ID NO: 4504714 - DNA, 25 bp, Homo sapien
tgtttagttccatctgcacccctag

SEQ ID NO: 4504715 - DNA, 25 bp, Homo sapien
taaactctcgaaagacacctgttaa

SEQ ID NO: 4504716 - DNA, 25 bp, Homo sapien
aatttcaagttaggagtctgtcatc

SEQ ID NO: 4504717 - DNA, 25 bp, Homo sapien
ccaagggaagtgaagcatcattcat

SEQ ID NO: 4504718 - DNA, 25 bp, Homo sapien
tgtcatctctagaacactttagtgc

SEQ ID NO: 4504719 - DNA, 25 bp, Homo sapien
tttatgagccatgagattacaggga

SEQ ID NO: 4504720 - DNA, 25 bp, Homo sapien
gatgctgctacgtataatagtttca

SEQ ID NO: 4504721 - DNA, 25 bp, Homo sapien
ggaatcctaaggaaactatcctctc

SEQ ID NO: 4504722 - DNA, 25 bp, Homo sapien
caagcgttttccataaggaatccta

SEQ ID NO: 4504723 - DNA, 25 bp, Homo sapien
tcattattcacaaaaaacaagcgtt

SEQ ID NO: 4504724 - DNA, 25 bp, Homo sapien
tgaggtcacaatgtttcattcacag

SEQ ID NO: 4504725 - DNA, 25 bp, Homo sapien
ttgagtgatatacttgaactctctg

SEQ ID NO: 4504726 - DNA, 25 bp, Homo sapien
aactctctgaagtttattgtcttca

SEQ ID NO: 4504727 - DNA, 25 bp, Homo sapien
catctgtaaacttgaggtcacaatg

SEQ ID NO: 4504728 - DNA, 25 bp, Homo sapien
cacttcacttagaaactcaaataag

SEQ ID NO: 4504729 - DNA, 25 bp, Homo sapien
tgggcacagtcttaatggacacttc

SEQ ID NO: 4504730 - DNA, 25 bp, Homo sapien
aagcacatgtcaagtcttgcaaaac

SEQ ID NO: 4504731 - DNA, 25 bp, Homo sapien
tggcttcccagtagacttcttatgt

SEQ ID NO: 4504732 - DNA, 25 bp, Homo sapien
tcatcttcccaggtacatttcacac

SEQ ID NO: 4504733 - DNA, 25 bp, Homo sapien
agaaccaccgagtcctctttgcaca

SEQ ID NO: 4504734 - DNA, 25 bp, Homo sapien
tctcaggtggaaacataagaaccac

SEQ ID NO: 4504735 - DNA, 25 bp, Homo sapien
taatctccctactttctcaggtgga

SEQ ID NO: 4504736 - DNA, 25 bp, Homo sapien
ttctgacccatttaatctccctact

SEQ ID NO: 4504737 - DNA, 25 bp, Homo sapien
aagatggcggcttccctgaagttca

SEQ ID NO: 4504738 - DNA, 25 bp, Homo sapien
cactgtgctttagaggagtgaacta

SEQ ID NO: 4504739 - DNA, 25 bp, Homo sapien
aatccttcgtgtttccctcatgggc

SEQ ID NO: 4504740 - DNA, 25 bp, Homo sapien
tgtttcatgttgcagacactgtgct

SEQ ID NO: 4504741 - DNA, 25 bp, Homo sapien
cctccgggctctgcttagtgtcaca

SEQ ID NO: 4504742 - DNA, 25 bp, Homo sapien
aacacctcataagcatcagttctgg

SEQ ID NO: 4504743 - DNA, 25 bp, Homo sapien
tgagttacaaagatggactgccacc

SEQ ID NO: 4504744 - DNA, 25 bp, Homo sapien
tgccattgaataacacttaggaccc

SEQ ID NO: 4504745 - DNA, 25 bp, Homo sapien
tatccatctctagggctctttctgg

SEQ ID NO: 4504746 - DNA, 25 bp, Homo sapien
ttccaacaggttccttatccatctc

SEQ ID NO: 4504747 - DNA, 25 bp, Homo sapien
ccttatccatctctagggctctttc

SEQ ID NO: 4504748 - DNA, 25 bp, Homo sapien
gagcattccaacaggttccttatcc

SEQ ID NO: 4504749 - DNA, 25 bp, Homo sapien
aatatcctcgtgctgagaagcagcc

SEQ ID NO: 4504750 - DNA, 25 bp, Homo sapien
gcaaggcgcctgacacaagcaggaa

SEQ ID NO: 4504751 - DNA, 25 bp, Homo sapien
taagccccaagttccgtggcagagg

SEQ ID NO: 4504752 - DNA, 25 bp, Homo sapien
gatacaaagtgcaaatttccaggga

SEQ ID NO: 4504753 - DNA, 25 bp, Homo sapien
cacagggcttgattaccaccggggc

SEQ ID NO: 4504754 - DNA, 25 bp, Homo sapien
gaggaccaccaatccagtatgcatg

SEQ ID NO: 4504755 - DNA, 25 bp, Homo sapien
ttctatgataagaggaccaccaatc

SEQ ID NO: 4504756 - DNA, 25 bp, Homo sapien
cacactggcggaattttctatgata

SEQ ID NO: 4504757 - DNA, 25 bp, Homo sapien
cgagaacgacaagcatctttttgcc

SEQ ID NO: 4504758 - DNA, 25 bp, Homo sapien
catagggcaggattccgataccata

SEQ ID NO: 4504759 - DNA, 25 bp, Homo sapien
cgataccatactgtattatcacaag

SEQ ID NO: 4504760 - DNA, 25 bp, Homo sapien
ctgaaattctggtagattaaacgag

SEQ ID NO: 4504761 - DNA, 25 bp, Homo sapien
tcggtgggaccgcagaccgatacat

SEQ ID NO: 4504762 - DNA, 25 bp, Homo sapien
ttattgttcggtgggaccgcagacc

SEQ ID NO: 4504763 - DNA, 25 bp, Homo sapien
ggaccgcagaccgatacatcattaa

SEQ ID NO: 4504764 - DNA, 25 bp, Homo sapien
cattctgtaattattgttcggtggg

SEQ ID NO: 4504765 - DNA, 25 bp, Homo sapien
gactggtccgtgtaagacctctcac

SEQ ID NO: 4504766 - DNA, 25 bp, Homo sapien
tgcacatccccaagttgcaatgtgg

SEQ ID NO: 4504767 - DNA, 25 bp, Homo sapien
tcccaggtatttgccggactggtcc

SEQ ID NO: 4504768 - DNA, 25 bp, Homo sapien
ggacggacagttcagacgtggaact

SEQ ID NO: 4504769 - DNA, 25 bp, Homo sapien
cactttggctcgtgcaatgtaagca

SEQ ID NO: 4504770 - DNA, 25 bp, Homo sapien
gctctaatgaataaccccactttgg

SEQ ID NO: 4504771 - DNA, 25 bp, Homo sapien
gaactggaaatccatctggccggct

SEQ ID NO: 4504772 - DNA, 25 bp, Homo sapien
catctggccggctgcctgctctaat

SEQ ID NO: 4504773 - DNA, 25 bp, Homo sapien
tcacatccgctaagacacagcaatt

SEQ ID NO: 4504774 - DNA, 25 bp, Homo sapien
ttgaaattcacatccgctaagacac

SEQ ID NO: 4504775 - DNA, 25 bp, Homo sapien
aattcacatccgctaagacacagca

SEQ ID NO: 4504776 - DNA, 25 bp, Homo sapien
tccgctaagacacagcaattggatt

SEQ ID NO: 4504777 - DNA, 25 bp, Homo sapien
agacatatgaaaagtgcggccctcc

SEQ ID NO: 4504778 - DNA, 25 bp, Homo sapien
tctgctgttgctctttctcggtctt

SEQ ID NO: 4504779 - DNA, 25 bp, Homo sapien
cagttgttgacaaggactcagttcc

SEQ ID NO: 4504780 - DNA, 25 bp, Homo sapien
aaactaatgaaagatcatcctgaca

SEQ ID NO: 4504781 - DNA, 25 bp, Homo sapien
gctggaactgccgaataaaatagtg

SEQ ID NO: 4504782 - DNA, 25 bp, Homo sapien
cacattcctgagtttgaacgtcctc

SEQ ID NO: 4504783 - DNA, 25 bp, Homo sapien
gacaatgtgacagaaccaggctgga

SEQ ID NO: 4504784 - DNA, 25 bp, Homo sapien
cacagcagatgatgagtgctccaca

SEQ ID NO: 4504785 - DNA, 25 bp, Homo sapien
aagcctgggaggctctcaggaactg

SEQ ID NO: 4504786 - DNA, 25 bp, Homo sapien
tcaggaactgggagattcctgttcc

SEQ ID NO: 4504787 - DNA, 25 bp, Homo sapien
aactgggagattcctgttcctttct

SEQ ID NO: 4504788 - DNA, 25 bp, Homo sapien
ggaggctctcaggaactgggagatt

SEQ ID NO: 4504789 - DNA, 25 bp, Homo sapien
cagctttatcccattgacctttaca

SEQ ID NO: 4504790 - DNA, 25 bp, Homo sapien
tcccattgacctttacaggccttca

SEQ ID NO: 4504791 - DNA, 25 bp, Homo sapien
taggatggtgttcatctgcctttcc

SEQ ID NO: 4504792 - DNA, 25 bp, Homo sapien
tacaggccttcatgtttaggatggt

SEQ ID NO: 4504793 - DNA, 25 bp, Homo sapien
acacatacaacactttaacttcctt

SEQ ID NO: 4504794 - DNA, 25 bp, Homo sapien
ctctttcctctaacacatacaacac

SEQ ID NO: 4504795 - DNA, 25 bp, Homo sapien
tctttcctctaacacatacaacact

SEQ ID NO: 4504796 - DNA, 25 bp, Homo sapien
gcacatactgaattagctccaaaag

SEQ ID NO: 4504797 - DNA, 25 bp, Homo sapien
aaagttagtgcttctttgcacatac

SEQ ID NO: 4504798 - DNA, 25 bp, Homo sapien
catactgaattagctccaaaaggga

SEQ ID NO: 4504799 - DNA, 25 bp, Homo sapien
tgttcctgaatgtgcaaagttagtg

SEQ ID NO: 4504800 - DNA, 25 bp, Homo sapien
ttcaattggtctaacgctagtttca

SEQ ID NO: 4504801 - DNA, 25 bp, Homo sapien
acacaggttgctatagggggataca

SEQ ID NO: 4504802 - DNA, 25 bp, Homo sapien
agtttcattcacactcccacgttct

SEQ ID NO: 4504803 - DNA, 25 bp, Homo sapien
ctcccacgttctcccactacacagg

SEQ ID NO: 4504804 - DNA, 25 bp, Homo sapien
tacctccagatgagcaccgtcagag

SEQ ID NO: 4504805 - DNA, 25 bp, Homo sapien
cgcagtgtgaaacgcgctggctctg

SEQ ID NO: 4504806 - DNA, 25 bp, Homo sapien
tggacgccccggtgggtcctctatg

SEQ ID NO: 4504807 - DNA, 25 bp, Homo sapien
tctgcctgccataggtattgtttgg

SEQ ID NO: 4504808 - DNA, 25 bp, Homo sapien
tgagatatgccaatggggatgcatt

SEQ ID NO: 4504809 - DNA, 25 bp, Homo sapien
cctgaacggactctaagatgagata

SEQ ID NO: 4504810 - DNA, 25 bp, Homo sapien
gccctgaacggactctaagatgaga

SEQ ID NO: 4504811 - DNA, 25 bp, Homo sapien
gccaatggggatgcattagagccat

SEQ ID NO: 4504812 - DNA, 25 bp, Homo sapien
ccagtataggatgtttcaaagcacc

SEQ ID NO: 4504813 - DNA, 25 bp, Homo sapien
ggatgtttcaaagcacctggcatct

SEQ ID NO: 4504814 - DNA, 25 bp, Homo sapien
atgccagtataggatgtttcaaagc

SEQ ID NO: 4504815 - DNA, 25 bp, Homo sapien
gtataggatgtttcaaagcacctgg

SEQ ID NO: 4504816 - DNA, 25 bp, Homo sapien
tctctggtagatcctgcaggtgaca

SEQ ID NO: 4504817 - DNA, 25 bp, Homo sapien
gagtttcagtggatggtcgggcagg

SEQ ID NO: 4504818 - DNA, 25 bp, Homo sapien
cgatgatggcgcactggataccact

SEQ ID NO: 4504819 - DNA, 25 bp, Homo sapien
ggagaaatggatcaactgcactgag

SEQ ID NO: 4504820 - DNA, 25 bp, Homo sapien
gccactaaaggttctgactatgtac

SEQ ID NO: 4504821 - DNA, 25 bp, Homo sapien
cacaattgcagacagcagaaaatgc

SEQ ID NO: 4504822 - DNA, 25 bp, Homo sapien
ttctgactatgtacacgtggggcat

SEQ ID NO: 4504823 - DNA, 25 bp, Homo sapien
cagaaaatgcggttctgcatctgtc

SEQ ID NO: 4504824 - DNA, 25 bp, Homo sapien
ttagggtagtgtcagccggaaccgc

SEQ ID NO: 4504825 - DNA, 25 bp, Homo sapien
tgtctgcactgattacataggcata

SEQ ID NO: 4504826 - DNA, 25 bp, Homo sapien
gaaccgcccggtctcttttctgaca

SEQ ID NO: 4504827 - DNA, 25 bp, Homo sapien
tcatttacttaacggctgtctgcac

SEQ ID NO: 4504828 - DNA, 25 bp, Homo sapien
ttttcgcgcttaattggccgtattg

SEQ ID NO: 4504829 - DNA, 25 bp, Homo sapien
tcaaggatgttatggtaggtaatgc

SEQ ID NO: 4504830 - DNA, 25 bp, Homo sapien
tttagctgcgtcaaaaagcccaggc

SEQ ID NO: 4504831 - DNA, 25 bp, Homo sapien
tggccgtattgtctccaaaagttaa

SEQ ID NO: 4504832 - DNA, 25 bp, Homo sapien
tctccattaacaattgaacggcgac

SEQ ID NO: 4504833 - DNA, 25 bp, Homo sapien
aattgaacggcgacaataagtgcca

SEQ ID NO: 4504834 - DNA, 25 bp, Homo sapien
ctttgccttcatacttcaataggga

SEQ ID NO: 4504835 - DNA, 25 bp, Homo sapien
tacttcaatagggaccgaatctcca

SEQ ID NO: 4504836 - DNA, 25 bp, Homo sapien
tctgaagagtccaagccagtgaaaa

SEQ ID NO: 4504837 - DNA, 25 bp, Homo sapien
ctctctgaagagtccaagccagtga

SEQ ID NO: 4504838 - DNA, 25 bp, Homo sapien
aaccagggcaatatcttgtcggaca

SEQ ID NO: 4504839 - DNA, 25 bp, Homo sapien
tatcttgtcggacactgatatttct

SEQ ID NO: 4504840 - DNA, 25 bp, Homo sapien
tacgctgctcgacacaataggcctt

SEQ ID NO: 4504841 - DNA, 25 bp, Homo sapien
cacagaacatccatcgacacaaatt

SEQ ID NO: 4504842 - DNA, 25 bp, Homo sapien
tatgttttaatacgctgctcgacac

SEQ ID NO: 4504843 - DNA, 25 bp, Homo sapien
aattatctctgttcatccggatagg

SEQ ID NO: 4504844 - DNA, 25 bp, Homo sapien
ttattattgtttgtacacttcactg

SEQ ID NO: 4504845 - DNA, 25 bp, Homo sapien
tattgtttgtacacttcactggaat

SEQ ID NO: 4504846 - DNA, 25 bp, Homo sapien
gtttgtacacttcactggaatatac

SEQ ID NO: 4504847 - DNA, 25 bp, Homo sapien
gtacacttcactggaatatacatac

SEQ ID NO: 4504848 - DNA, 25 bp, Homo sapien
tacagatttaaccatggctacccag

SEQ ID NO: 4504849 - DNA, 25 bp, Homo sapien
cagaagacacttaacagcaggctca

SEQ ID NO: 4504850 - DNA, 25 bp, Homo sapien
cggatctattaggaagccacagggt

SEQ ID NO: 4504851 - DNA, 25 bp, Homo sapien
ggctacccaggatcgtaacatgaat

SEQ ID NO: 4504852 - DNA, 25 bp, Homo sapien
tgtcttcggcagagccaagcgtttc

SEQ ID NO: 4504853 - DNA, 25 bp, Homo sapien
ttcctaacacagagtgcggccttgc

SEQ ID NO: 4504854 - DNA, 25 bp, Homo sapien
cacatcacggataggtcggagacct

SEQ ID NO: 4504855 - DNA, 25 bp, Homo sapien
cggtgcaggccggattaaaagcctg

SEQ ID NO: 4504856 - DNA, 25 bp, Homo sapien
cagacagcaccgtgttgaaaatgtc

SEQ ID NO: 4504857 - DNA, 25 bp, Homo sapien
tctgtgattggccagacagcaccgt

SEQ ID NO: 4504858 - DNA, 25 bp, Homo sapien
cagatgagagaaggtatttggctaa

SEQ ID NO: 4504859 - DNA, 25 bp, Homo sapien
tctccatctgggctaatctgctctc

SEQ ID NO: 4504860 - DNA, 25 bp, Homo sapien
tttcatatccagctcccgggtatct

SEQ ID NO: 4504861 - DNA, 25 bp, Homo sapien
ccaggtaggttgctaaatcatcaaa

SEQ ID NO: 4504862 - DNA, 25 bp, Homo sapien
catcatccatagaacttggctttca

SEQ ID NO: 4504863 - DNA, 25 bp, Homo sapien
tcctgtgactcgtctttttgtttca

SEQ ID NO: 4504864 - DNA, 25 bp, Homo sapien
tcccctgtgtactcctcttcacttc

SEQ ID NO: 4504865 - DNA, 25 bp, Homo sapien
ttcccctgtgtactcctcttcactt

SEQ ID NO: 4504866 - DNA, 25 bp, Homo sapien
ccctgtgtactcctcttcacttctc

SEQ ID NO: 4504867 - DNA, 25 bp, Homo sapien
cctgtgtactcctcttcacttctca

SEQ ID NO: 4504868 - DNA, 25 bp, Homo sapien
taaagaagtctaacaaattggcttc

SEQ ID NO: 4504869 - DNA, 25 bp, Homo sapien
gcccctgacctgtaaagaagtctaa

SEQ ID NO: 4504870 - DNA, 25 bp, Homo sapien
ccaaaaggtgccatcaaagaagaga

SEQ ID NO: 4504871 - DNA, 25 bp, Homo sapien
tcaaagaagagacggttcgctggtc

SEQ ID NO: 4504872 - DNA, 25 bp, Homo sapien
tctgcgatgttatcagctggaaggg

SEQ ID NO: 4504873 - DNA, 25 bp, Homo sapien
tagtcccaaatttccaagccttgtg

SEQ ID NO: 4504874 - DNA, 25 bp, Homo sapien
gaaagctggccgtgaaactgttatg

SEQ ID NO: 4504875 - DNA, 25 bp, Homo sapien
gaaacccatgtgatcctccatcgaa

SEQ ID NO: 4504876 - DNA, 25 bp, Homo sapien
tctcatcattgggatagctgtccat

SEQ ID NO: 4504877 - DNA, 25 bp, Homo sapien
tactcagttggcagggggttcctct

SEQ ID NO: 4504878 - DNA, 25 bp, Homo sapien
ggcccaagccctgcagtactcagtt

SEQ ID NO: 4504879 - DNA, 25 bp, Homo sapien
ggcttgactggtgactctcatcatt

SEQ ID NO: 4504880 - DNA, 25 bp, Homo sapien
gtacaaatattcactaacagcaatc

SEQ ID NO: 4504881 - DNA, 25 bp, Homo sapien
tccaaggccccgagcagtgcttcat

SEQ ID NO: 4504882 - DNA, 25 bp, Homo sapien
cttcatcatgctagcatggtcaccg

SEQ ID NO: 4504883 - DNA, 25 bp, Homo sapien
gctagcatggtcaccgtgacagaag

SEQ ID NO: 4504884 - DNA, 25 bp, Homo sapien
agtctccttaagtaaaggagctatc

SEQ ID NO: 4504885 - DNA, 25 bp, Homo sapien
gcagcacgttggagaaagtctcctt

SEQ ID NO: 4504886 - DNA, 25 bp, Homo sapien
ccactcagggaattgctgctccagg

SEQ ID NO: 4504887 - DNA, 25 bp, Homo sapien
ggagctatcccagggatgcgccagc

SEQ ID NO: 4504888 - DNA, 25 bp, Homo sapien
acaacatggataccaatgaagtggg

SEQ ID NO: 4504889 - DNA, 25 bp, Homo sapien
aatgaagtgggagggtcctggaatc

SEQ ID NO: 4504890 - DNA, 25 bp, Homo sapien
aacatggataccaatgaagtgggag

SEQ ID NO: 4504891 - DNA, 25 bp, Homo sapien
ctggatcaggtgaacaacatggata

SEQ ID NO: 4504892 - DNA, 25 bp, Homo sapien
tgccagttgaggttaaaaggtatcc

SEQ ID NO: 4504893 - DNA, 25 bp, Homo sapien
tgattttatgatggatgggtttaga

SEQ ID NO: 4504894 - DNA, 25 bp, Homo sapien
cctgctgtgtgccaatgattttatg

SEQ ID NO: 4504895 - DNA, 25 bp, Homo sapien
ttagaatacctggctagaattcttg

SEQ ID NO: 4504896 - DNA, 25 bp, Homo sapien
aaacatgtcgctttcaacattaaaa

SEQ ID NO: 4504897 - DNA, 25 bp, Homo sapien
ataaacatgtcgctttcaacattaa

SEQ ID NO: 4504898 - DNA, 25 bp, Homo sapien
tccataaacatgtcgctttcaacat

SEQ ID NO: 4504899 - DNA, 25 bp, Homo sapien
ccataaacatgtcgctttcaacatt

SEQ ID NO: 4504900 - DNA, 25 bp, Homo sapien
gcaacagcaattacagtgattctat

SEQ ID NO: 4504901 - DNA, 25 bp, Homo sapien
caatgaggccgtaatttgcaacagc

SEQ ID NO: 4504902 - DNA, 25 bp, Homo sapien
tgtgcagatgtccaaacacatggga

SEQ ID NO: 4504903 - DNA, 25 bp, Homo sapien
aattgccacatgttgactgtgcaga

SEQ ID NO: 4504904 - DNA, 25 bp, Homo sapien
ttgagggactcatgtggcttatacc

SEQ ID NO: 4504905 - DNA, 25 bp, Homo sapien
tctccagggtggaacacttctccag

SEQ ID NO: 4504906 - DNA, 25 bp, Homo sapien
ggctgtactgtggtaataaacttcc

SEQ ID NO: 4504907 - DNA, 25 bp, Homo sapien
gcattgcatgacaagcagctccata

SEQ ID NO: 4504908 - DNA, 25 bp, Homo sapien
gggtttttcccgtcagccattcaca

SEQ ID NO: 4504909 - DNA, 25 bp, Homo sapien
taaatcgcagctctttcctgtaacg

SEQ ID NO: 4504910 - DNA, 25 bp, Homo sapien
taagtcaactgttccccaattagaa

SEQ ID NO: 4504911 - DNA, 25 bp, Homo sapien
tgttctcttgtactccggctcccaa

SEQ ID NO: 4504912 - DNA, 25 bp, Homo sapien
aataatgaaagtgtcggaaagtgtc

SEQ ID NO: 4504913 - DNA, 25 bp, Homo sapien
tctgatttgcacaacctaagtcctt

SEQ ID NO: 4504914 - DNA, 25 bp, Homo sapien
aagtgtccgaatgcaatttgttagg

SEQ ID NO: 4504915 - DNA, 25 bp, Homo sapien
cagtgactaattattacctgagtta

SEQ ID NO: 4504916 - DNA, 25 bp, Homo sapien
ttgacctcccaagtcattatccttg

SEQ ID NO: 4504917 - DNA, 25 bp, Homo sapien
aatcaccctttagcatgttcatgaa

SEQ ID NO: 4504918 - DNA, 25 bp, Homo sapien
ccctctgtgaggtcaaatcaccctt

SEQ ID NO: 4504919 - DNA, 25 bp, Homo sapien
cccttgaagcaactaagaaatcact

SEQ ID NO: 4504920 - DNA, 25 bp, Homo sapien
tgtcagtcactgcacttttgtgctg

SEQ ID NO: 4504921 - DNA, 25 bp, Homo sapien
ttgtgtttgcaaatatggtggttcc

SEQ ID NO: 4504922 - DNA, 25 bp, Homo sapien
tatgaatggcactctaaaatcaacc

SEQ ID NO: 4504923 - DNA, 25 bp, Homo sapien
tcatcagagtgtaaatatgcatttg

SEQ ID NO: 4504924 - DNA, 25 bp, Homo sapien
gaactgcaatgaaaacgtcaggcca

SEQ ID NO: 4504925 - DNA, 25 bp, Homo sapien
tacatccaatctaaggagtgctgac

SEQ ID NO: 4504926 - DNA, 25 bp, Homo sapien
gaagctgaagctgtatcagcattta

SEQ ID NO: 4504927 - DNA, 25 bp, Homo sapien
agtgctgactggtgtcattggaagc

SEQ ID NO: 4504928 - DNA, 25 bp, Homo sapien
ctgactggtgtcattggaagctgaa

SEQ ID NO: 4504929 - DNA, 25 bp, Homo sapien
gaagatgagcaaagtaaatctctgt

SEQ ID NO: 4504930 - DNA, 25 bp, Homo sapien
gcaaagtaaatctctgttccaattc

SEQ ID NO: 4504931 - DNA, 25 bp, Homo sapien
ctgtgataggaagatgagcaaagta

SEQ ID NO: 4504932 - DNA, 25 bp, Homo sapien
atgagcaaagtaaatctctgttcca

SEQ ID NO: 4504933 - DNA, 25 bp, Homo sapien
tcgcacagatttgggaaaagtcctt

SEQ ID NO: 4504934 - DNA, 25 bp, Homo sapien
tcacgggacattggttctcagggag

SEQ ID NO: 4504935 - DNA, 25 bp, Homo sapien
cacttttggcagaagtgcgctgcta

SEQ ID NO: 4504936 - DNA, 25 bp, Homo sapien
tgggaacgtgctttctcacgggaca

SEQ ID NO: 4504937 - DNA, 25 bp, Homo sapien
gaattgaatgtttgcgctgacataa

SEQ ID NO: 4504938 - DNA, 25 bp, Homo sapien
aattgaatgtttgcgctgacataat

SEQ ID NO: 4504939 - DNA, 25 bp, Homo sapien
cctttatcacagtttgacttggcta

SEQ ID NO: 4504940 - DNA, 25 bp, Homo sapien
gtttgacttggctatgatctcctta

SEQ ID NO: 4504941 - DNA, 25 bp, Homo sapien
catgttaagcgaagacagaccttgt

SEQ ID NO: 4504942 - DNA, 25 bp, Homo sapien
caatgggcatgttaagcgaagacag

SEQ ID NO: 4504943 - DNA, 25 bp, Homo sapien
caaagtcagttaagaatttgacctt

SEQ ID NO: 4504944 - DNA, 25 bp, Homo sapien
acgttctcaaagtcagttaagaatt

SEQ ID NO: 4504945 - DNA, 25 bp, Homo sapien
aacgttctcaaagtcagttaagaat

SEQ ID NO: 4504946 - DNA, 25 bp, Homo sapien
tgttcgctacagtgaaactcaataa

SEQ ID NO: 4504947 - DNA, 25 bp, Homo sapien
ggaacaagagcttccctaaatgaca

SEQ ID NO: 4504948 - DNA, 25 bp, Homo sapien
tggtacagtggtgctaaaatcagga

SEQ ID NO: 4504949 - DNA, 25 bp, Homo sapien
gatgcaggcagaaattgttcgctac

SEQ ID NO: 4504950 - DNA, 25 bp, Homo sapien
cattattaagttgtcaggcgggctg

SEQ ID NO: 4504951 - DNA, 25 bp, Homo sapien
aaagggcgtcccgtgctggctttct

SEQ ID NO: 4504952 - DNA, 25 bp, Homo sapien
cttataaagggcagccgggagtgca

SEQ ID NO: 4504953 - DNA, 25 bp, Homo sapien
aaggaacagggcagctttagagtct

SEQ ID NO: 4504954 - DNA, 25 bp, Homo sapien
taaaacctcttcgttatttgcagga

SEQ ID NO: 4504955 - DNA, 25 bp, Homo sapien
caaggtacagagtgaagtccaagca

SEQ ID NO: 4504956 - DNA, 25 bp, Homo sapien
gtggcaccctgtctatattgtaccc

SEQ ID NO: 4504957 - DNA, 25 bp, Homo sapien
gaaaggcacacacggacaccttagg

SEQ ID NO: 4504958 - DNA, 25 bp, Homo sapien
actgtattttccacagcgtagtctt

SEQ ID NO: 4504959 - DNA, 25 bp, Homo sapien
tggcaatcaagtgaatctactgtat

SEQ ID NO: 4504960 - DNA, 25 bp, Homo sapien
ttccacagcgtagtcttttcctttc

SEQ ID NO: 4504961 - DNA, 25 bp, Homo sapien
tgtcgaagatgatttgagatctgtt

SEQ ID NO: 4504962 - DNA, 25 bp, Homo sapien
tctccgttgtagaaattggcctcag

SEQ ID NO: 4504963 - DNA, 25 bp, Homo sapien
atgcctgagttctccgttgtagaaa

SEQ ID NO: 4504964 - DNA, 25 bp, Homo sapien
gacagcttaaggacattcacccaaa

SEQ ID NO: 4504965 - DNA, 25 bp, Homo sapien
tggcctcaggataggtccagagaga

SEQ ID NO: 4504966 - DNA, 25 bp, Homo sapien
gtcctaacccgaaaagtccatgctg

SEQ ID NO: 4504967 - DNA, 25 bp, Homo sapien
tgtgtgctccactcccctatccaca

SEQ ID NO: 4504968 - DNA, 25 bp, Homo sapien
gtgtgctccactcccctatccacat

SEQ ID NO: 4504969 - DNA, 25 bp, Homo sapien
ccagtcctaacccgaaaagtccatg

SEQ ID NO: 4504970 - DNA, 25 bp, Homo sapien
tccagtaaaataaatcgtgcttgtc

SEQ ID NO: 4504971 - DNA, 25 bp, Homo sapien
tctataaagggctgtgtacactcac

SEQ ID NO: 4504972 - DNA, 25 bp, Homo sapien
aataatttgcatatacagtggcctg

SEQ ID NO: 4504973 - DNA, 25 bp, Homo sapien
tccatgaaaagtccctgctattccg

SEQ ID NO: 4504974 - DNA, 25 bp, Homo sapien
tgatgcttgttctggtgactagctt

SEQ ID NO: 4504975 - DNA, 25 bp, Homo sapien
tatggtcccaaatttgtatggggct

SEQ ID NO: 4504976 - DNA, 25 bp, Homo sapien
gggctgatgcttgttctggtgacta

SEQ ID NO: 4504977 - DNA, 25 bp, Homo sapien
cccaaatttgtatggggctgatgct

SEQ ID NO: 4504978 - DNA, 25 bp, Homo sapien
tgtcctttgattccatggaaggatt

SEQ ID NO: 4504979 - DNA, 25 bp, Homo sapien
tactcggtaacttgctaatatacca

SEQ ID NO: 4504980 - DNA, 25 bp, Homo sapien
tccatggaaggattactcggtaact

SEQ ID NO: 4504981 - DNA, 25 bp, Homo sapien
taccatccaatttgtctggaagctt

SEQ ID NO: 4504982 - DNA, 25 bp, Homo sapien
cttgggcccaccattttcctcaaga

SEQ ID NO: 4504983 - DNA, 25 bp, Homo sapien
caccattttcctcaagattcagttc

SEQ ID NO: 4504984 - DNA, 25 bp, Homo sapien
tgggcccaccattttcctcaagatt

SEQ ID NO: 4504985 - DNA, 25 bp, Homo sapien
ttcctcaagattcagttcccttttc

SEQ ID NO: 4504986 - DNA, 25 bp, Homo sapien
gctgtcattgcatgattccaccagt

SEQ ID NO: 4504987 - DNA, 25 bp, Homo sapien
tcaaatcacttggtagttccatact

SEQ ID NO: 4504988 - DNA, 25 bp, Homo sapien
tgttgtaatatttgtcggtgctgtc

SEQ ID NO: 4504989 - DNA, 25 bp, Homo sapien
ccatgctttattgccagctccttca

SEQ ID NO: 4504990 - DNA, 25 bp, Homo sapien
caaggcctgacatttgacacccaag

SEQ ID NO: 4504991 - DNA, 25 bp, Homo sapien
ccaagaccctgggacttatgcacag

SEQ ID NO: 4504992 - DNA, 25 bp, Homo sapien
aatcatctcagcccattcttctctt

SEQ ID NO: 4504993 - DNA, 25 bp, Homo sapien
agctcagtacaaggcctgacatttg

SEQ ID NO: 4504994 - DNA, 25 bp, Homo sapien
aagtattccaacacttgggcatggg

SEQ ID NO: 4504995 - DNA, 25 bp, Homo sapien
tgtgtggctccctacatgaatatgc

SEQ ID NO: 4504996 - DNA, 25 bp, Homo sapien
cagatatgacattgccctgctccca

SEQ ID NO: 4504997 - DNA, 25 bp, Homo sapien
aatataggcgctgtgggtagcccca

SEQ ID NO: 4504998 - DNA, 25 bp, Homo sapien
ggggctcgaaggtatccctggcaac

SEQ ID NO: 4504999 - DNA, 25 bp, Homo sapien
aggggctcgaaggtatccctggcaa

SEQ ID NO: 4505000 - DNA, 25 bp, Homo sapien
gatggtgaacattggccctgtgcca

SEQ ID NO: 4505001 - DNA, 25 bp, Homo sapien
tttgtttcctgttaagctgtttcat

SEQ ID NO: 4505002 - DNA, 25 bp, Homo sapien
aagatggtgaacattggccctgtgc

SEQ ID NO: 4505003 - DNA, 25 bp, Homo sapien
gtttcctgttaagctgtttcatgac

SEQ ID NO: 4505004 - DNA, 25 bp, Homo sapien
ggatagaagatgtatcatatattaa

SEQ ID NO: 4505005 - DNA, 25 bp, Homo sapien
cttggatagaagatgtatcatatat

SEQ ID NO: 4505006 - DNA, 25 bp, Homo sapien
ccttggatagaagatgtatcatata

SEQ ID NO: 4505007 - DNA, 25 bp, Homo sapien
tggatagaagatgtatcatatatta

SEQ ID NO: 4505008 - DNA, 25 bp, Homo sapien
tgtggagatgtcaccgggcttccct

SEQ ID NO: 4505009 - DNA, 25 bp, Homo sapien
gatgtcaccgggcttccctgaggtc

SEQ ID NO: 4505010 - DNA, 25 bp, Homo sapien
tctgtggagatgtcaccgggcttcc

SEQ ID NO: 4505011 - DNA, 25 bp, Homo sapien
tcattctgtggagatgtcaccgggc

SEQ ID NO: 4505012 - DNA, 25 bp, Homo sapien
gtcccatgctctactgactgactgt

SEQ ID NO: 4505013 - DNA, 25 bp, Homo sapien
ctctactgactgactgtgcagtgct

SEQ ID NO: 4505014 - DNA, 25 bp, Homo sapien
gctctactgactgactgtgcagtgc

SEQ ID NO: 4505015 - DNA, 25 bp, Homo sapien
ccatgctctactgactgactgtgca

SEQ ID NO: 4505016 - DNA, 25 bp, Homo sapien
ttcctttcactccctgttctttcat

SEQ ID NO: 4505017 - DNA, 25 bp, Homo sapien
taaagctctcttcctttcactccct

SEQ ID NO: 4505018 - DNA, 25 bp, Homo sapien
ctctcttcctttcactccctgttct

SEQ ID NO: 4505019 - DNA, 25 bp, Homo sapien
ctcttcctttcactccctgttcttt

SEQ ID NO: 4505020 - DNA, 25 bp, Homo sapien
tttaccagcagacagtaatgcacag

SEQ ID NO: 4505021 - DNA, 25 bp, Homo sapien
aggggcccagttaaaccagaagctg

SEQ ID NO: 4505022 - DNA, 25 bp, Homo sapien
agaagctgaatttaccagcagacag

SEQ ID NO: 4505023 - DNA, 25 bp, Homo sapien
cagcagacagtaatgcacaggttcc

SEQ ID NO: 4505024 - DNA, 25 bp, Homo sapien
catccgtcaattcagggtctatggg

SEQ ID NO: 4505025 - DNA, 25 bp, Homo sapien
tcccggctctgagtaggtgttccag

SEQ ID NO: 4505026 - DNA, 25 bp, Homo sapien
ccagatggtgtgcaggtaagtgtca

SEQ ID NO: 4505027 - DNA, 25 bp, Homo sapien
tctctccacgttgccagcagaggct

SEQ ID NO: 4505028 - DNA, 25 bp, Homo sapien
taaacagccactggggatcacagcc

SEQ ID NO: 4505029 - DNA, 25 bp, Homo sapien
tgtaggggaggcctcctaaacagcc

SEQ ID NO: 4505030 - DNA, 25 bp, Homo sapien
gtctttatcctggtgggattgtata

SEQ ID NO: 4505031 - DNA, 25 bp, Homo sapien
gttctcgaagggtgtctttatcctg

SEQ ID NO: 4505032 - DNA, 25 bp, Homo sapien
gaagagtaactggtcgaccacagcg

SEQ ID NO: 4505033 - DNA, 25 bp, Homo sapien
gatcatcaaggaaggagtctagctg

SEQ ID NO: 4505034 - DNA, 25 bp, Homo sapien
gaaatacactgtccctctgagaagt

SEQ ID NO: 4505035 - DNA, 25 bp, Homo sapien
tcctctgatgagagtgacgaccggg

SEQ ID NO: 4505036 - DNA, 25 bp, Homo sapien
ctgatggtaatgacagatcattcag

SEQ ID NO: 4505037 - DNA, 25 bp, Homo sapien
gtaatgacagatcattcagaagcat

SEQ ID NO: 4505038 - DNA, 25 bp, Homo sapien
tggtaatgacagatcattcagaagc

SEQ ID NO: 4505039 - DNA, 25 bp, Homo sapien
gatggtaatgacagatcattcagaa

SEQ ID NO: 4505040 - DNA, 25 bp, Homo sapien
gagaggtttctctcggatgcttttc

SEQ ID NO: 4505041 - DNA, 25 bp, Homo sapien
cctataggtggcaatgagaggtttc

SEQ ID NO: 4505042 - DNA, 25 bp, Homo sapien
ttctgcagcctataggtggcaatga

SEQ ID NO: 4505043 - DNA, 25 bp, Homo sapien
caatgagaggtttctctcggatgct

SEQ ID NO: 4505044 - DNA, 25 bp, Homo sapien
ctccagaacatctcctcctgctgct

SEQ ID NO: 4505045 - DNA, 25 bp, Homo sapien
ggataaacactttcaagataatagc

SEQ ID NO: 4505046 - DNA, 25 bp, Homo sapien
ttcaggtcttgaagagatctgttgg

SEQ ID NO: 4505047 - DNA, 25 bp, Homo sapien
tcttgaagagatctgttgggataaa

SEQ ID NO: 4505048 - DNA, 25 bp, Homo sapien
taattccagttgtgagtgaaggtga

SEQ ID NO: 4505049 - DNA, 25 bp, Homo sapien
tggaagataacatgtgagccatccc

SEQ ID NO: 4505050 - DNA, 25 bp, Homo sapien
cccagtcataagcatctgtctgcag

SEQ ID NO: 4505051 - DNA, 25 bp, Homo sapien
gaagataacatgtgagccatcccca

SEQ ID NO: 4505052 - DNA, 25 bp, Homo sapien
atccccagtcataagcatctgtctg

SEQ ID NO: 4505053 - DNA, 25 bp, Homo sapien
aagttagatcggctgcacagaggct

SEQ ID NO: 4505054 - DNA, 25 bp, Homo sapien
taactcccttaactactctgactgc

SEQ ID NO: 4505055 - DNA, 25 bp, Homo sapien
gggcttgatgggttatgaccaagtt

SEQ ID NO: 4505056 - DNA, 25 bp, Homo sapien
tctgactgcagaacgccactctgat

SEQ ID NO: 4505057 - DNA, 25 bp, Homo sapien
cagtggtttctttcgttttctcgag

SEQ ID NO: 4505058 - DNA, 25 bp, Homo sapien
tctggggagatggtttggttttcat

SEQ ID NO: 4505059 - DNA, 25 bp, Homo sapien
ttcatgcattccagcttggtcacag

SEQ ID NO: 4505060 - DNA, 25 bp, Homo sapien
tctcgagttctttggaaatggcccc

SEQ ID NO: 4505061 - DNA, 25 bp, Homo sapien
acagtacttgacacaccagcacatt

SEQ ID NO: 4505062 - DNA, 25 bp, Homo sapien
aacagtacttgacacaccagcacat

SEQ ID NO: 4505063 - DNA, 25 bp, Homo sapien
taacagtacttgacacaccagcaca

SEQ ID NO: 4505064 - DNA, 25 bp, Homo sapien
gggcccccagcttagcaagagtctt

SEQ ID NO: 4505065 - DNA, 25 bp, Homo sapien
agagagggtcaaagcttgtgtttcg

SEQ ID NO: 4505066 - DNA, 25 bp, Homo sapien
gagggtcaaagcttgtgtttcggct

SEQ ID NO: 4505067 - DNA, 25 bp, Homo sapien
caagagtcttgctggcaggtggagt

SEQ ID NO: 4505068 - DNA, 25 bp, Homo sapien
gatggagataatctagcctttgaca

SEQ ID NO: 4505069 - DNA, 25 bp, Homo sapien
gataatctagcctttgacatataaa

SEQ ID NO: 4505070 - DNA, 25 bp, Homo sapien
aaatagatgtccatgtgaaagtatg

SEQ ID NO: 4505071 - DNA, 25 bp, Homo sapien
tataaaatagatgtccatgtgaaag

SEQ ID NO: 4505072 - DNA, 25 bp, Homo sapien
tgcataatagcctggtgatgtctgg

SEQ ID NO: 4505073 - DNA, 25 bp, Homo sapien
gtaagcacaagctgagcgcacacct

SEQ ID NO: 4505074 - DNA, 25 bp, Homo sapien
tctcagaaaagtgtttgaccaacac

SEQ ID NO: 4505075 - DNA, 25 bp, Homo sapien
tgatgtctggtaagcacaagctgag

SEQ ID NO: 4505076 - DNA, 25 bp, Homo sapien
ctccccgacgtctgatcctagactg

SEQ ID NO: 4505077 - DNA, 25 bp, Homo sapien
tccccgacgtctgatcctagactga

SEQ ID NO: 4505078 - DNA, 25 bp, Homo sapien
ccccgacgtctgatcctagactgac

SEQ ID NO: 4505079 - DNA, 25 bp, Homo sapien
caacaatatagcagcatcatccttg

SEQ ID NO: 4505080 - DNA, 25 bp, Homo sapien
tccttgatgtgagccttctggattc

SEQ ID NO: 4505081 - DNA, 25 bp, Homo sapien
tccatacgggatgtttcctttctct

SEQ ID NO: 4505082 - DNA, 25 bp, Homo sapien
gcatccatacgggatgtttcctttc

SEQ ID NO: 4505083 - DNA, 25 bp, Homo sapien
aatatgatttctttgtcagtcacat

SEQ ID NO: 4505084 - DNA, 25 bp, Homo sapien
agtttgaagtagacttttctccaag

SEQ ID NO: 4505085 - DNA, 25 bp, Homo sapien
cttccagaagtctgtcagaggccct

SEQ ID NO: 4505086 - DNA, 25 bp, Homo sapien
ttctttgtcagtcacataagtttga

SEQ ID NO: 4505087 - DNA, 25 bp, Homo sapien
gacatgagagtgtgtgcctggcaac

SEQ ID NO: 4505088 - DNA, 25 bp, Homo sapien
ctggcaggcatcagacatgagagtg

SEQ ID NO: 4505089 - DNA, 25 bp, Homo sapien
aggctcagtagcttggagttcgtca

SEQ ID NO: 4505090 - DNA, 25 bp, Homo sapien
caggtttatgtgcaccagggaccca

SEQ ID NO: 4505091 - DNA, 25 bp, Homo sapien
tgccattaaaaacgacaaatgtgtt

SEQ ID NO: 4505092 - DNA, 25 bp, Homo sapien
ctgccattaaaaacgacaaatgtgt

SEQ ID NO: 4505093 - DNA, 25 bp, Homo sapien
tactgccgagctcaagttgagtgta

SEQ ID NO: 4505094 - DNA, 25 bp, Homo sapien
tttactgccgagctcaagttgagtg

SEQ ID NO: 4505095 - DNA, 25 bp, Homo sapien
gcttttactgccgagctcaagttga

SEQ ID NO: 4505096 - DNA, 25 bp, Homo sapien
tctctgcttttactgccgagctcaa

SEQ ID NO: 4505097 - DNA, 25 bp, Homo sapien
gactcaggtgggctgatacttctcc

SEQ ID NO: 4505098 - DNA, 25 bp, Homo sapien
ctcaggtgggctgatacttctcccc

SEQ ID NO: 4505099 - DNA, 25 bp, Homo sapien
cagactcaggtgggctgatacttct

SEQ ID NO: 4505100 - DNA, 25 bp, Homo sapien
ccagactcaggtgggctgatacttc

SEQ ID NO: 4505101 - DNA, 25 bp, Homo sapien
tctgtgcattggagctgagcgccgt

SEQ ID NO: 4505102 - DNA, 25 bp, Homo sapien
aaagcatccagtgggatttcttaaa

SEQ ID NO: 4505103 - DNA, 25 bp, Homo sapien
tgagcgccgtaacaccaaggctctg

SEQ ID NO: 4505104 - DNA, 25 bp, Homo sapien
gcagggcgccttcgtagcgcagtct

SEQ ID NO: 4505105 - DNA, 25 bp, Homo sapien
gcaaatggccatttcacattggtaa

SEQ ID NO: 4505106 - DNA, 25 bp, Homo sapien
ggtggcacccagaataatggagctc

SEQ ID NO: 4505107 - DNA, 25 bp, Homo sapien
gaggttgaatcacttccattttcgg

SEQ ID NO: 4505108 - DNA, 25 bp, Homo sapien
taggcaagtctttccgcgtagctgt

SEQ ID NO: 4505109 - DNA, 25 bp, Homo sapien
gcagcaaatgtttcccactaaaatg

SEQ ID NO: 4505110 - DNA, 25 bp, Homo sapien
agcaaatgtttcccactaaaatgga

SEQ ID NO: 4505111 - DNA, 25 bp, Homo sapien
gcagataaaacccctgaaggtcttg

SEQ ID NO: 4505112 - DNA, 25 bp, Homo sapien
cagcaaatgtttcccactaaaatgg

SEQ ID NO: 4505113 - DNA, 25 bp, Homo sapien
tgttctgaactcgtaagttgaaatg

SEQ ID NO: 4505114 - DNA, 25 bp, Homo sapien
tagctgggtcagcttgtgaaatgcc

SEQ ID NO: 4505115 - DNA, 25 bp, Homo sapien
tgtaatgcttgattctagccaatta

SEQ ID NO: 4505116 - DNA, 25 bp, Homo sapien
cattgagttgcagttgcttagctgg

SEQ ID NO: 4505117 - DNA, 25 bp, Homo sapien
aatcctgtgtgactgtagtgacaga

SEQ ID NO: 4505118 - DNA, 25 bp, Homo sapien
cttatggaaaggtgtgtcagcttca

SEQ ID NO: 4505119 - DNA, 25 bp, Homo sapien
gggacacccacgaaatcctgtgtga

SEQ ID NO: 4505120 - DNA, 25 bp, Homo sapien
gcttcagattactcatttgctgtgc

SEQ ID NO: 4505121 - DNA, 25 bp, Homo sapien
taaatgctgatcgttttgatggtgc

SEQ ID NO: 4505122 - DNA, 25 bp, Homo sapien
tcagtaacttcaatacattcatgcc

SEQ ID NO: 4505123 - DNA, 25 bp, Homo sapien
tatgttcactttgtagtccctcagt

SEQ ID NO: 4505124 - DNA, 25 bp, Homo sapien
tgcctgtgattatcacctgtctctt

SEQ ID NO: 4505125 - DNA, 25 bp, Homo sapien
gaatttatcagggtcagttagcata

SEQ ID NO: 4505126 - DNA, 25 bp, Homo sapien
taactgacggctattgaatttatca

SEQ ID NO: 4505127 - DNA, 25 bp, Homo sapien
acggctattgaatttatcagggtca

SEQ ID NO: 4505128 - DNA, 25 bp, Homo sapien
cagggtcagttagcataatgaaaac

SEQ ID NO: 4505129 - DNA, 25 bp, Homo sapien
tgcaaacaagagcacgtgttcctgg

SEQ ID NO: 4505130 - DNA, 25 bp, Homo sapien
tcctggctttagagattggagcagc

SEQ ID NO: 4505131 - DNA, 25 bp, Homo sapien
ggttttaaattggagccaggcttgc

SEQ ID NO: 4505132 - DNA, 25 bp, Homo sapien
gcaaatgagcccaccagttaacaga

SEQ ID NO: 4505133 - DNA, 25 bp, Homo sapien
tggtgtccaactgcagcaatcatct

SEQ ID NO: 4505134 - DNA, 25 bp, Homo sapien
gcaatcatctggttaaaatcaggca

SEQ ID NO: 4505135 - DNA, 25 bp, Homo sapien
gaatggcttgtaaattagagtccct

SEQ ID NO: 4505136 - DNA, 25 bp, Homo sapien
cctaatgaaaactcgctggtgtcca

SEQ ID NO: 4505137 - DNA, 25 bp, Homo sapien
gcattagatatttttaatgccctta

SEQ ID NO: 4505138 - DNA, 25 bp, Homo sapien
cattagatatttttaatgcccttaa

SEQ ID NO: 4505139 - DNA, 25 bp, Homo sapien
aaagcattagatatttttaatgccc

SEQ ID NO: 4505140 - DNA, 25 bp, Homo sapien
ctaaagcattagatatttttaatgc

SEQ ID NO: 4505141 - DNA, 25 bp, Homo sapien
tactgtctggcttggtatcttctcc

SEQ ID NO: 4505142 - DNA, 25 bp, Homo sapien
cttggtatcttctccctgacagtgg

SEQ ID NO: 4505143 - DNA, 25 bp, Homo sapien
gaccatttgtctgttccattattgc

SEQ ID NO: 4505144 - DNA, 25 bp, Homo sapien
caaaaattagaggtgttgatgactt

SEQ ID NO: 4505145 - DNA, 25 bp, Homo sapien
tctgagtgtgaccttgttgaaacac

SEQ ID NO: 4505146 - DNA, 25 bp, Homo sapien
tcaatgttttctgagtgtgaccttg

SEQ ID NO: 4505147 - DNA, 25 bp, Homo sapien
aattctgtggatatgacgttgtcaa

SEQ ID NO: 4505148 - DNA, 25 bp, Homo sapien
gaaacacaattacaaggctcagaag

SEQ ID NO: 4505149 - DNA, 25 bp, Homo sapien
attagcacgtgaggaaaataaacca

SEQ ID NO: 4505150 - DNA, 25 bp, Homo sapien
tggccaacaattaaagccaattagc

SEQ ID NO: 4505151 - DNA, 25 bp, Homo sapien
acacttgtctttgtgtagtccagtc

SEQ ID NO: 4505152 - DNA, 25 bp, Homo sapien
taacacttgtctttgtgtagtccag

SEQ ID NO: 4505153 - DNA, 25 bp, Homo sapien
ggagagcctgttttatgtattcagc

SEQ ID NO: 4505154 - DNA, 25 bp, Homo sapien
ggcatttggagccacttaaataaac

SEQ ID NO: 4505155 - DNA, 25 bp, Homo sapien
agggtttggagagcctgttttatgt

SEQ ID NO: 4505156 - DNA, 25 bp, Homo sapien
gcatttggagccacttaaataaacc

SEQ ID NO: 4505157 - DNA, 25 bp, Homo sapien
aggaacaatgcgaggaagcagagtg

SEQ ID NO: 4505158 - DNA, 25 bp, Homo sapien
ggaacaatgcgaggaagcagagtgg

SEQ ID NO: 4505159 - DNA, 25 bp, Homo sapien
tgtgatggtaaacggccaacgctct

SEQ ID NO: 4505160 - DNA, 25 bp, Homo sapien
catgacagctcgtttgcatgacaga

SEQ ID NO: 4505161 - DNA, 25 bp, Homo sapien
tgacatagcgacagaaagcatgaca

SEQ ID NO: 4505162 - DNA, 25 bp, Homo sapien
cggccaacgctcttgatccaggcag

SEQ ID NO: 4505163 - DNA, 25 bp, Homo sapien
tgagtactgaagtttaagatgcggt

SEQ ID NO: 4505164 - DNA, 25 bp, Homo sapien
gatgcggtacttttgactactggta

SEQ ID NO: 4505165 - DNA, 25 bp, Homo sapien
catcctcatggacccatccctgttc

SEQ ID NO: 4505166 - DNA, 25 bp, Homo sapien
tgactactggtagtaagtaaaactc

SEQ ID NO: 4505167 - DNA, 25 bp, Homo sapien
ttaggtaaccgtgaggaagagagca

SEQ ID NO: 4505168 - DNA, 25 bp, Homo sapien
tattgtgtaggaagaaatcgggcat

SEQ ID NO: 4505169 - DNA, 25 bp, Homo sapien
ccttatgaaggcttgcacgggtatt

SEQ ID NO: 4505170 - DNA, 25 bp, Homo sapien
tgctctcattacaagagcggcaggc

SEQ ID NO: 4505171 - DNA, 25 bp, Homo sapien
cactggcgctagtgaagacagaaaa

SEQ ID NO: 4505172 - DNA, 25 bp, Homo sapien
gcagcgagaagcagacagtgcatga

SEQ ID NO: 4505173 - DNA, 25 bp, Homo sapien
caggcactggcgctagtgaagacag

SEQ ID NO: 4505174 - DNA, 25 bp, Homo sapien
catgattgcattgggactcaagagc

SEQ ID NO: 4505175 - DNA, 25 bp, Homo sapien
tatgcttggacaatttgccctgttg

SEQ ID NO: 4505176 - DNA, 25 bp, Homo sapien
gaaccacagcagagttatgcttgga

SEQ ID NO: 4505177 - DNA, 25 bp, Homo sapien
gcagtctttagctgtgctcctgccc

SEQ ID NO: 4505178 - DNA, 25 bp, Homo sapien
tcattacttcctctatgaaccacag

SEQ ID NO: 4505179 - DNA, 25 bp, Homo sapien
tctagaaggtatggcaagacatgcc

SEQ ID NO: 4505180 - DNA, 25 bp, Homo sapien
ttaagagaggagcagatttagtctg

SEQ ID NO: 4505181 - DNA, 25 bp, Homo sapien
gacatgcccatgatattaagagagg

SEQ ID NO: 4505182 - DNA, 25 bp, Homo sapien
cctaggagtgacgtgacggtctgct

SEQ ID NO: 4505183 - DNA, 25 bp, Homo sapien
taaactgcatttaaggactgcaaaa

SEQ ID NO: 4505184 - DNA, 25 bp, Homo sapien
ttaaactgcatttaaggactgcaaa

SEQ ID NO: 4505185 - DNA, 25 bp, Homo sapien
aaatgatttcgttgactcatggtca

SEQ ID NO: 4505186 - DNA, 25 bp, Homo sapien
tggctgtgcggttccatcattatct

SEQ ID NO: 4505187 - DNA, 25 bp, Homo sapien
tctgaagggttaacccagagggtga

SEQ ID NO: 4505188 - DNA, 25 bp, Homo sapien
ggctcagtgtgacccgagaggacat

SEQ ID NO: 4505189 - DNA, 25 bp, Homo sapien
ttgaatcaatgtcttcttgagcctt

SEQ ID NO: 4505190 - DNA, 25 bp, Homo sapien
aatattgatcgttggggcacattcc

SEQ ID NO: 4505191 - DNA, 25 bp, Homo sapien
gaaaggtgcagcaggcataaaattt

SEQ ID NO: 4505192 - DNA, 25 bp, Homo sapien
gccttttgaaaggtgcagcaggcat

SEQ ID NO: 4505193 - DNA, 25 bp, Homo sapien
gctgaatccaggaaatcaaccagag

SEQ ID NO: 4505194 - DNA, 25 bp, Homo sapien
gaccagctgataagagggattccca

SEQ ID NO: 4505195 - DNA, 25 bp, Homo sapien
tcaccagaaccaaggatccagaacc

SEQ ID NO: 4505196 - DNA, 25 bp, Homo sapien
ccttgggcaggtagcatttaaaagc

SEQ ID NO: 4505197 - DNA, 25 bp, Homo sapien
gatgcaggacgctgatgaaaacagt

SEQ ID NO: 4505198 - DNA, 25 bp, Homo sapien
gtgagcaccagttgctgcccacact

SEQ ID NO: 4505199 - DNA, 25 bp, Homo sapien
caggacgctgatgaaaacagtgtga

SEQ ID NO: 4505200 - DNA, 25 bp, Homo sapien
agctaggatgcaggacgctgatgaa

SEQ ID NO: 4505201 - DNA, 25 bp, Homo sapien
gaagcgcggaataatgcctctttga

SEQ ID NO: 4505202 - DNA, 25 bp, Homo sapien
gatgccaaattgcaagaacaacaca

SEQ ID NO: 4505203 - DNA, 25 bp, Homo sapien
gagcaggcctttagcctgtggtgaa

SEQ ID NO: 4505204 - DNA, 25 bp, Homo sapien
gcagactgacaacttctgatgccaa

SEQ ID NO: 4505205 - DNA, 25 bp, Homo sapien
agctcccaggatccaaaagggtggg

SEQ ID NO: 4505206 - DNA, 25 bp, Homo sapien
tttcttcatcacgtaaagccttctg

SEQ ID NO: 4505207 - DNA, 25 bp, Homo sapien
tgtttcttcatcacgtaaagccttc

SEQ ID NO: 4505208 - DNA, 25 bp, Homo sapien
ctgtttcttcatcacgtaaagcctt

SEQ ID NO: 4505209 - DNA, 25 bp, Homo sapien
cagtgttgccgtcagaaatgggtac

SEQ ID NO: 4505210 - DNA, 25 bp, Homo sapien
ctgagccctggtctgatgtgcagcg

SEQ ID NO: 4505211 - DNA, 25 bp, Homo sapien
tgtgcagcggaatccagtgttgccg

SEQ ID NO: 4505212 - DNA, 25 bp, Homo sapien
cctggtctgatgtgcagcggaatcc

SEQ ID NO: 4505213 - DNA, 25 bp, Homo sapien
gatcttctaattgcctcaagacata

SEQ ID NO: 4505214 - DNA, 25 bp, Homo sapien
ctaattgcctcaagacatatacaca

SEQ ID NO: 4505215 - DNA, 25 bp, Homo sapien
ctcccacgtgtttgatcttctaatt

SEQ ID NO: 4505216 - DNA, 25 bp, Homo sapien
ctcaagacatatacacaggtttgct

SEQ ID NO: 4505217 - DNA, 25 bp, Homo sapien
cctatgggtccgtggcttactgtaa

SEQ ID NO: 4505218 - DNA, 25 bp, Homo sapien
ggtttcattcgaatagggcctatgg

SEQ ID NO: 4505219 - DNA, 25 bp, Homo sapien
tactgtaagctttagattagctgtg

SEQ ID NO: 4505220 - DNA, 25 bp, Homo sapien
tcagagttggcatgacccatagcag

SEQ ID NO: 4505221 - DNA, 25 bp, Homo sapien
ggccctgactgacaagctaatcggt

SEQ ID NO: 4505222 - DNA, 25 bp, Homo sapien
gaagcgctgagctattgattccact

SEQ ID NO: 4505223 - DNA, 25 bp, Homo sapien
tcagcaacgaagaaagggaggcatt

SEQ ID NO: 4505224 - DNA, 25 bp, Homo sapien
gaaatttgcttgtaggtagtgcggc

SEQ ID NO: 4505225 - DNA, 25 bp, Homo sapien
ataaaatttaccatccgtgacacta

SEQ ID NO: 4505226 - DNA, 25 bp, Homo sapien
tgttctaacgacagtgtgtccaggg

SEQ ID NO: 4505227 - DNA, 25 bp, Homo sapien
tcctgtcgatgccagatttcaccag

SEQ ID NO: 4505228 - DNA, 25 bp, Homo sapien
catttggctcaaagtgtagctggca

SEQ ID NO: 4505229 - DNA, 25 bp, Homo sapien
tagctggcacttccgtgtgacaaca

SEQ ID NO: 4505230 - DNA, 25 bp, Homo sapien
agggggcagaggaagttctttcatt

SEQ ID NO: 4505231 - DNA, 25 bp, Homo sapien
gattcattgactcatgtaatattaa

SEQ ID NO: 4505232 - DNA, 25 bp, Homo sapien
atttgagaagtgaagattcattgac

SEQ ID NO: 4505233 - DNA, 25 bp, Homo sapien
ccttttcactgacacccagatgttt

SEQ ID NO: 4505234 - DNA, 25 bp, Homo sapien
tcttctgttctggtcctcatcctgt

SEQ ID NO: 4505235 - DNA, 25 bp, Homo sapien
ctgttctggtcctcatcctgtgttc

SEQ ID NO: 4505236 - DNA, 25 bp, Homo sapien
ctcacctcttctgttctggtcctca

SEQ ID NO: 4505237 - DNA, 25 bp, Homo sapien
tcacctcttctgttctggtcctcat

SEQ ID NO: 4505238 - DNA, 25 bp, Homo sapien
gagagtgacagacggtctggtgggc

SEQ ID NO: 4505239 - DNA, 25 bp, Homo sapien
cagggcggatcaaggcttgcccggg

SEQ ID NO: 4505240 - DNA, 25 bp, Homo sapien
ttccacgtggcgcagggcggatcaa

SEQ ID NO: 4505241 - DNA, 25 bp, Homo sapien
tcctccggcagccggtgtcagcgga

SEQ ID NO: 4505242 - DNA, 25 bp, Homo sapien
ggaagcccaggctttcgctccgatt

SEQ ID NO: 4505243 - DNA, 25 bp, Homo sapien
tttcgctccgatttcaacctgtggc

SEQ ID NO: 4505244 - DNA, 25 bp, Homo sapien
ttcttcacctggctcggggaagccc

SEQ ID NO: 4505245 - DNA, 25 bp, Homo sapien
agcccaggctttcgctccgatttca

SEQ ID NO: 4505246 - DNA, 25 bp, Homo sapien
tttatgctgtgaactcaaaatttcc

SEQ ID NO: 4505247 - DNA, 25 bp, Homo sapien
ggatttgccccttctgaacagtttc

SEQ ID NO: 4505248 - DNA, 25 bp, Homo sapien
gagtttttatgctgtgaactcaaaa

SEQ ID NO: 4505249 - DNA, 25 bp, Homo sapien
atgctgtgaactcaaaatttccggg

SEQ ID NO: 4505250 - DNA, 25 bp, Homo sapien
aataacttccttccagccgcatgtg

SEQ ID NO: 4505251 - DNA, 25 bp, Homo sapien
taacttccttccagccgcatgtgtg

SEQ ID NO: 4505252 - DNA, 25 bp, Homo sapien
aacttccttccagccgcatgtgtga

SEQ ID NO: 4505253 - DNA, 25 bp, Homo sapien
acttccttccagccgcatgtgtgag

SEQ ID NO: 4505254 - DNA, 25 bp, Homo sapien
cccctcacttagactgccttgtaga

SEQ ID NO: 4505255 - DNA, 25 bp, Homo sapien
cctcacttagactgccttgtagaaa

SEQ ID NO: 4505256 - DNA, 25 bp, Homo sapien
tcctactgcacatcttctcacagta

SEQ ID NO: 4505257 - DNA, 25 bp, Homo sapien
ccttgtagaaatggacccaggagat

SEQ ID NO: 4505258 - DNA, 25 bp, Homo sapien
tcaatggctcccatgtaacttccat

SEQ ID NO: 4505259 - DNA, 25 bp, Homo sapien
agcacacattctaagacaatgtcaa

SEQ ID NO: 4505260 - DNA, 25 bp, Homo sapien
gacaatgtcaatggctcccatgtaa

SEQ ID NO: 4505261 - DNA, 25 bp, Homo sapien
ttctaagacaatgtcaatggctccc

SEQ ID NO: 4505262 - DNA, 25 bp, Homo sapien
tcatgtcttttggtgcttgttgtgg

SEQ ID NO: 4505263 - DNA, 25 bp, Homo sapien
tcttttggtgcttgttgtggagtga

SEQ ID NO: 4505264 - DNA, 25 bp, Homo sapien
ctgcttcatagatgtaacgggcaag

SEQ ID NO: 4505265 - DNA, 25 bp, Homo sapien
tgtaacgggcaaggggtattctata

SEQ ID NO: 4505266 - DNA, 25 bp, Homo sapien
tgtggaaggtattaccatgggccat

SEQ ID NO: 4505267 - DNA, 25 bp, Homo sapien
tctgtggaaggtattaccatgggcc

SEQ ID NO: 4505268 - DNA, 25 bp, Homo sapien
ttctgtggaaggtattaccatgggc

SEQ ID NO: 4505269 - DNA, 25 bp, Homo sapien
tcttctgtggaaggtattaccatgg

SEQ ID NO: 4505270 - DNA, 25 bp, Homo sapien
cactgctacagttgagggaaggatt

SEQ ID NO: 4505271 - DNA, 25 bp, Homo sapien
ttcccactgctacagttgagggaag

SEQ ID NO: 4505272 - DNA, 25 bp, Homo sapien
ctgctacagttgagggaaggattgt

SEQ ID NO: 4505273 - DNA, 25 bp, Homo sapien
cccactgctacagttgagggaagga

SEQ ID NO: 4505274 - DNA, 25 bp, Homo sapien
taattccagtcttatgtagtgacac

SEQ ID NO: 4505275 - DNA, 25 bp, Homo sapien
cagtcttatgtagtgacacctgcat

SEQ ID NO: 4505276 - DNA, 25 bp, Homo sapien
tttggccctgggtatggagtattcc

SEQ ID NO: 4505277 - DNA, 25 bp, Homo sapien
ggagtattcctacctcttggcataa

SEQ ID NO: 4505278 - DNA, 25 bp, Homo sapien
cagctgactttgcaatctggacttt

SEQ ID NO: 4505279 - DNA, 25 bp, Homo sapien
tacactagagtcttcagttccagct

SEQ ID NO: 4505280 - DNA, 25 bp, Homo sapien
tctgtgttgcacagaagcacagcct

SEQ ID NO: 4505281 - DNA, 25 bp, Homo sapien
tccaacgtctagtgtgagctaagat

SEQ ID NO: 4505282 - DNA, 25 bp, Homo sapien
taaagctgagcccactaacataaag

SEQ ID NO: 4505283 - DNA, 25 bp, Homo sapien
aaaccaaagcaaggagtagggagag

SEQ ID NO: 4505284 - DNA, 25 bp, Homo sapien
tgggtgcgcagcccctgtgtcttcc

SEQ ID NO: 4505285 - DNA, 25 bp, Homo sapien
tgtcttcctccttgcgttaccactt

SEQ ID NO: 4505286 - DNA, 25 bp, Homo sapien
tgttccttccctagcccctgccctg

SEQ ID NO: 4505287 - DNA, 25 bp, Homo sapien
cccctgccctgccctgattggtgaa

SEQ ID NO: 4505288 - DNA, 25 bp, Homo sapien
ctgccctgccctgattggtgaagtt

SEQ ID NO: 4505289 - DNA, 25 bp, Homo sapien
gttccttccctagcccctgccctgc

SEQ ID NO: 4505290 - DNA, 25 bp, Homo sapien
tcggctgagttaggaatcagactcc

SEQ ID NO: 4505291 - DNA, 25 bp, Homo sapien
agttcactttatggtgggccccagg

SEQ ID NO: 4505292 - DNA, 25 bp, Homo sapien
caagacatgccccttgaggctcagc

SEQ ID NO: 4505293 - DNA, 25 bp, Homo sapien
tcttgtgaagagtgataatcctgag

SEQ ID NO: 4505294 - DNA, 25 bp, Homo sapien
tctgagaagtctgccccatagaaag

SEQ ID NO: 4505295 - DNA, 25 bp, Homo sapien
ccattggatctttgattctgagaag

SEQ ID NO: 4505296 - DNA, 25 bp, Homo sapien
aaggaggaggcttaactctaggaat

SEQ ID NO: 4505297 - DNA, 25 bp, Homo sapien
gaggcttaactctaggaatgcttcc

SEQ ID NO: 4505298 - DNA, 25 bp, Homo sapien
cacagagagcttcttcgtagacagg

SEQ ID NO: 4505299 - DNA, 25 bp, Homo sapien
agagtcccctgtgactctgatccct

SEQ ID NO: 4505300 - DNA, 25 bp, Homo sapien
ttcctgctgtcgcaaagacacagag

SEQ ID NO: 4505301 - DNA, 25 bp, Homo sapien
gagcttcttcgtagacaggcaccat

SEQ ID NO: 4505302 - DNA, 25 bp, Homo sapien
tgaaggagtgccaagctggagctca

SEQ ID NO: 4505303 - DNA, 25 bp, Homo sapien
gagacagctcatgcctagccgaagg

SEQ ID NO: 4505304 - DNA, 25 bp, Homo sapien
atgcctagccgaaggaacacaatgc

SEQ ID NO: 4505305 - DNA, 25 bp, Homo sapien
cagctcatgcctagccgaaggaaca

SEQ ID NO: 4505306 - DNA, 25 bp, Homo sapien
actctctaaagcacaaatatgatgc

SEQ ID NO: 4505307 - DNA, 25 bp, Homo sapien
gcttcctaactgtgcaatgtacaca

SEQ ID NO: 4505308 - DNA, 25 bp, Homo sapien
tacacatcctgttgctgaccatggg

SEQ ID NO: 4505309 - DNA, 25 bp, Homo sapien
aatcgaggttacttgcaaaatcagc

SEQ ID NO: 4505310 - DNA, 25 bp, Homo sapien
cttgaaggacgtaagtacccaatat

SEQ ID NO: 4505311 - DNA, 25 bp, Homo sapien
ttggctgcttaaaagcataacaagg

SEQ ID NO: 4505312 - DNA, 25 bp, Homo sapien
cagagggccttgattgtccttgcct

SEQ ID NO: 4505313 - DNA, 25 bp, Homo sapien
tcttgtcctttggtgagaacttcat

SEQ ID NO: 4505314 - DNA, 25 bp, Homo sapien
gatgaattcaccataagaacgtggg

SEQ ID NO: 4505315 - DNA, 25 bp, Homo sapien
ccaagggtcaacttgattcttctcc

SEQ ID NO: 4505316 - DNA, 25 bp, Homo sapien
ctgcccaagggtcaacttgattctt

SEQ ID NO: 4505317 - DNA, 25 bp, Homo sapien
caagggtcaacttgattcttctcct

SEQ ID NO: 4505318 - DNA, 25 bp, Homo sapien
gcccaagggtcaacttgattcttct

SEQ ID NO: 4505319 - DNA, 25 bp, Homo sapien
ttgttccaccttgaacagtgaaggt

SEQ ID NO: 4505320 - DNA, 25 bp, Homo sapien
aatcagccagtgtgtatcttctgac

SEQ ID NO: 4505321 - DNA, 25 bp, Homo sapien
cagtgaaggtgaaagggtaccaatc

SEQ ID NO: 4505322 - DNA, 25 bp, Homo sapien
attattgttccaccttgaacagtga

SEQ ID NO: 4505323 - DNA, 25 bp, Homo sapien
ttccgtgtattaccaaaatatgcac

SEQ ID NO: 4505324 - DNA, 25 bp, Homo sapien
cgccttaatggctttcgaagagcca

SEQ ID NO: 4505325 - DNA, 25 bp, Homo sapien
cattaggctcaactgagtgaatatt

SEQ ID NO: 4505326 - DNA, 25 bp, Homo sapien
atatgcacaatgtatccccaaacag

SEQ ID NO: 4505327 - DNA, 25 bp, Homo sapien
tgaagaataacaattagggtggtaa

SEQ ID NO: 4505328 - DNA, 25 bp, Homo sapien
cccattaggaaatgggtaatgtagt

SEQ ID NO: 4505329 - DNA, 25 bp, Homo sapien
taatgtagtctgtggtccggggcca

SEQ ID NO: 4505330 - DNA, 25 bp, Homo sapien
ggccaggctgtaagggcttgaagga

SEQ ID NO: 4505331 - DNA, 25 bp, Homo sapien
cgatctgagcgtccagcttttggtt

SEQ ID NO: 4505332 - DNA, 25 bp, Homo sapien
tttggtttctctgagccgctccata

SEQ ID NO: 4505333 - DNA, 25 bp, Homo sapien
tctttgttctgtcacgatctgagcg

SEQ ID NO: 4505334 - DNA, 25 bp, Homo sapien
ccctgaagctgtctggttcccatct

SEQ ID NO: 4505335 - DNA, 25 bp, Homo sapien
acacacagagctgttggttgcaagc

SEQ ID NO: 4505336 - DNA, 25 bp, Homo sapien
cagagctgttggttgcaagcaaagc

SEQ ID NO: 4505337 - DNA, 25 bp, Homo sapien
tggttgcaagcaaagcaggtgtcac

SEQ ID NO: 4505338 - DNA, 25 bp, Homo sapien
ctgctgcagcatggcacacacagag

SEQ ID NO: 4505339 - DNA, 25 bp, Homo sapien
tcacgctgcaagtatccaggataca

SEQ ID NO: 4505340 - DNA, 25 bp, Homo sapien
cccatagaagagaaccctcacgctg

SEQ ID NO: 4505341 - DNA, 25 bp, Homo sapien
ttctgagaggttcccatagaagaga

SEQ ID NO: 4505342 - DNA, 25 bp, Homo sapien
gaagagaaccctcacgctgcaagta

SEQ ID NO: 4505343 - DNA, 25 bp, Homo sapien
taaaatgtggtagtcaagatcagac

SEQ ID NO: 4505344 - DNA, 25 bp, Homo sapien
tagagaataaaatgtggtagtcaag

SEQ ID NO: 4505345 - DNA, 25 bp, Homo sapien
gagaataaaatgtggtagtcaagat

SEQ ID NO: 4505346 - DNA, 25 bp, Homo sapien
aataaaatgtggtagtcaagatcag

SEQ ID NO: 4505347 - DNA, 25 bp, Homo sapien
gagcctgaataactccaagttcccc

SEQ ID NO: 4505348 - DNA, 25 bp, Homo sapien
aacagacagagcctgaataactcca

SEQ ID NO: 4505349 - DNA, 25 bp, Homo sapien
cacctgttgcacatcgcaaaccttt

SEQ ID NO: 4505350 - DNA, 25 bp, Homo sapien
tgcacatcgcaaacctttattttga

SEQ ID NO: 4505351 - DNA, 25 bp, Homo sapien
tgatacgggcattctttaagctctg

SEQ ID NO: 4505352 - DNA, 25 bp, Homo sapien
tttcctctgccatctcccgtcaatc

SEQ ID NO: 4505353 - DNA, 25 bp, Homo sapien
tctcccgtcaatctcttccagctgc

SEQ ID NO: 4505354 - DNA, 25 bp, Homo sapien
tctcccttcacgctgtcttttcctc

SEQ ID NO: 4505355 - DNA, 25 bp, Homo sapien
cttgttggcggggaatatcatcaaa

SEQ ID NO: 4505356 - DNA, 25 bp, Homo sapien
tcatcaaaagccctgcatttaggcg

SEQ ID NO: 4505357 - DNA, 25 bp, Homo sapien
atatcatcaaaagccctgcatttag

SEQ ID NO: 4505358 - DNA, 25 bp, Homo sapien
gggaatatcatcaaaagccctgcat

SEQ ID NO: 4505359 - DNA, 25 bp, Homo sapien
tttagacatccatgtgaacagacga

SEQ ID NO: 4505360 - DNA, 25 bp, Homo sapien
tgtgaacagacgattccaggaagaa

SEQ ID NO: 4505361 - DNA, 25 bp, Homo sapien
ccaggaagaattgctggtaggacac

SEQ ID NO: 4505362 - DNA, 25 bp, Homo sapien
catccatgtgaacagacgattccag

SEQ ID NO: 4505363 - DNA, 25 bp, Homo sapien
catcttcgactctaagcaggatcgg

SEQ ID NO: 4505364 - DNA, 25 bp, Homo sapien
ccctgtttctaggtgtggtaagcac

SEQ ID NO: 4505365 - DNA, 25 bp, Homo sapien
tattggacgatgctgaataaccaga

SEQ ID NO: 4505366 - DNA, 25 bp, Homo sapien
gactggtgctccaagcccattatga

SEQ ID NO: 4505367 - DNA, 25 bp, Homo sapien
ctggggatgtttctatgtctttcac

SEQ ID NO: 4505368 - DNA, 25 bp, Homo sapien
cagttttccacaagcggatttggcg

SEQ ID NO: 4505369 - DNA, 25 bp, Homo sapien
gggatgtttctatgtctttcactgt

SEQ ID NO: 4505370 - DNA, 25 bp, Homo sapien
agttttccacaagcggatttggcgg

SEQ ID NO: 4505371 - DNA, 25 bp, Homo sapien
gattgtggcttgtctgtaagtggcc

SEQ ID NO: 4505372 - DNA, 25 bp, Homo sapien
ctttgggtggcgcatttgctgcatc

SEQ ID NO: 4505373 - DNA, 25 bp, Homo sapien
tgctgcccacaagcgtgttgggtgc

SEQ ID NO: 4505374 - DNA, 25 bp, Homo sapien
tgctgcatctgtcagcctgggatta

SEQ ID NO: 4505375 - DNA, 25 bp, Homo sapien
gaacgctcttggcttcttcgctgct

SEQ ID NO: 4505376 - DNA, 25 bp, Homo sapien
ttatggaatgcgtcggcagccctga

SEQ ID NO: 4505377 - DNA, 25 bp, Homo sapien
cctgaacgctcttggcttcttcgct

SEQ ID NO: 4505378 - DNA, 25 bp, Homo sapien
gctcttggcttcttcgctgctggct

SEQ ID NO: 4505379 - DNA, 25 bp, Homo sapien
tcaaggcaacactggaaatttgggt

SEQ ID NO: 4505380 - DNA, 25 bp, Homo sapien
tgtctacagcttggacttgaccttt

SEQ ID NO: 4505381 - DNA, 25 bp, Homo sapien
tcctgtctacagcttggacttgacc

SEQ ID NO: 4505382 - DNA, 25 bp, Homo sapien
tgccttcctgtctacagcttggact

SEQ ID NO: 4505383 - DNA, 25 bp, Homo sapien
acctttgccttcctgtctacagctt

SEQ ID NO: 4505384 - DNA, 25 bp, Homo sapien
ggtgataggcacttgcacccatgat

SEQ ID NO: 4505385 - DNA, 25 bp, Homo sapien
tatgcattcgtccagcattaataca

SEQ ID NO: 4505386 - DNA, 25 bp, Homo sapien
gcctctgcgttcagcaaggaatttg

SEQ ID NO: 4505387 - DNA, 25 bp, Homo sapien
aagatgaaagcggtagcctctgcgt

SEQ ID NO: 4505388 - DNA, 25 bp, Homo sapien
ctaaaccgcagcagtatcttccaag

SEQ ID NO: 4505389 - DNA, 25 bp, Homo sapien
gtacttagcactcagctctgaaatg

SEQ ID NO: 4505390 - DNA, 25 bp, Homo sapien
tgtagtacttagcactcagctctga

SEQ ID NO: 4505391 - DNA, 25 bp, Homo sapien
tggcctgtagtacttagcactcagc

SEQ ID NO: 4505392 - DNA, 25 bp, Homo sapien
gaagacttgatattgttcagatggc

SEQ ID NO: 4505393 - DNA, 25 bp, Homo sapien
ggcaaaacatcccatgttaatgatt

SEQ ID NO: 4505394 - DNA, 25 bp, Homo sapien
tccacagattcaagacattcccttt

SEQ ID NO: 4505395 - DNA, 25 bp, Homo sapien
tgcaaaatgtttacactaacaactg

SEQ ID NO: 4505396 - DNA, 25 bp, Homo sapien
ggctcgtgactacaatcctaccctt

SEQ ID NO: 4505397 - DNA, 25 bp, Homo sapien
tgtagatgccctcccctcttccaga

SEQ ID NO: 4505398 - DNA, 25 bp, Homo sapien
cagaacttcttactgaagcctaggg

SEQ ID NO: 4505399 - DNA, 25 bp, Homo sapien
ggtggctcgtgactacaatcctacc

SEQ ID NO: 4505400 - DNA, 25 bp, Homo sapien
ctgggttttatgacagatgtcaaat

SEQ ID NO: 4505401 - DNA, 25 bp, Homo sapien
tatatcgaagtgtgttgtgaagcag

SEQ ID NO: 4505402 - DNA, 25 bp, Homo sapien
gaagatgtatgggaaactttccttg

SEQ ID NO: 4505403 - DNA, 25 bp, Homo sapien
tgtgaagcagattgccttattggca

SEQ ID NO: 4505404 - DNA, 25 bp, Homo sapien
taagaggcagacatgtactccagaa

SEQ ID NO: 4505405 - DNA, 25 bp, Homo sapien
gaaataagaggcagacatgtactcc

SEQ ID NO: 4505406 - DNA, 25 bp, Homo sapien
ctgtacaggaaataagaggcagaca

SEQ ID NO: 4505407 - DNA, 25 bp, Homo sapien
caggaaataagaggcagacatgtac

SEQ ID NO: 4505408 - DNA, 25 bp, Homo sapien
cttctgtccataaagtcttcgatct

SEQ ID NO: 4505409 - DNA, 25 bp, Homo sapien
gaagatacatgacttctgtccataa

SEQ ID NO: 4505410 - DNA, 25 bp, Homo sapien
cgatcttgtggactcatacagaaaa

SEQ ID NO: 4505411 - DNA, 25 bp, Homo sapien
tggactcatacagaaaacacgggtc

SEQ ID NO: 4505412 - DNA, 25 bp, Homo sapien
ctgtcatggctggtcccttcttttg

SEQ ID NO: 4505413 - DNA, 25 bp, Homo sapien
ctggaggagtcagagtggctgtgaa

SEQ ID NO: 4505414 - DNA, 25 bp, Homo sapien
cagttctccactgttgttcctggag

SEQ ID NO: 4505415 - DNA, 25 bp, Homo sapien
gcttcatctgggctccactgggccc

SEQ ID NO: 4505416 - DNA, 25 bp, Homo sapien
tagttcaaagatgcctgccatatct

SEQ ID NO: 4505417 - DNA, 25 bp, Homo sapien
tatctaaataagttcgcatgtgtgc

SEQ ID NO: 4505418 - DNA, 25 bp, Homo sapien
caggaagagcatttgtacagatcat

SEQ ID NO: 4505419 - DNA, 25 bp, Homo sapien
gcatgtcttactctagaacaggaag

SEQ ID NO: 4505420 - DNA, 25 bp, Homo sapien
catctgccagattcctgtgattcct

SEQ ID NO: 4505421 - DNA, 25 bp, Homo sapien
tgcatttggtatctcagaacttgaa

SEQ ID NO: 4505422 - DNA, 25 bp, Homo sapien
tgctatcgacaggaacatctgccag

SEQ ID NO: 4505423 - DNA, 25 bp, Homo sapien
atactccctcgtcatcttgtttcag

SEQ ID NO: 4505424 - DNA, 25 bp, Homo sapien
agccatctttgtccccgtactggct

SEQ ID NO: 4505425 - DNA, 25 bp, Homo sapien
atctttgtccccgtactggctattt

SEQ ID NO: 4505426 - DNA, 25 bp, Homo sapien
ggtagccatctttgtccccgtactg

SEQ ID NO: 4505427 - DNA, 25 bp, Homo sapien
gggctccagatggccatagctgtgg

SEQ ID NO: 4505428 - DNA, 25 bp, Homo sapien
tatccagcaaggtgaaaataataga

SEQ ID NO: 4505429 - DNA, 25 bp, Homo sapien
acttcattatgatatcggtttacac

SEQ ID NO: 4505430 - DNA, 25 bp, Homo sapien
tacacttccagggtacacaaaaaga

SEQ ID NO: 4505431 - DNA, 25 bp, Homo sapien
cagccattacttatgcattcctgca

SEQ ID NO: 4505432 - DNA, 25 bp, Homo sapien
cagccatattgcataccaagcagtg

SEQ ID NO: 4505433 - DNA, 25 bp, Homo sapien
gacatccacccgtatgcatttgcac

SEQ ID NO: 4505434 - DNA, 25 bp, Homo sapien
caagcagtgtgcacgcaaaatcccc

SEQ ID NO: 4505435 - DNA, 25 bp, Homo sapien
tattgggtacttgagttcaccagcc

SEQ ID NO: 4505436 - DNA, 25 bp, Homo sapien
gaattctcggagcactctgggcgtc

SEQ ID NO: 4505437 - DNA, 25 bp, Homo sapien
tctgggcgtctttcctagggtttgc

SEQ ID NO: 4505438 - DNA, 25 bp, Homo sapien
ggaccctccttcatggaacctgctg

SEQ ID NO: 4505439 - DNA, 25 bp, Homo sapien
caaagctgccgagctactggagacc

SEQ ID NO: 4505440 - DNA, 25 bp, Homo sapien
cagatttctgtcttaccttgaaaaa

SEQ ID NO: 4505441 - DNA, 25 bp, Homo sapien
gtaacagtgagggatggctgatctt

SEQ ID NO: 4505442 - DNA, 25 bp, Homo sapien
agcccctattccaccatggtaacag

SEQ ID NO: 4505443 - DNA, 25 bp, Homo sapien
gaattgacaataattagcccctatt

SEQ ID NO: 4505444 - DNA, 25 bp, Homo sapien
cgaaggtggccaaaaataacagcgc

SEQ ID NO: 4505445 - DNA, 25 bp, Homo sapien
cagcgctttccagatgagggtaatg

SEQ ID NO: 4505446 - DNA, 25 bp, Homo sapien
ttgaagccgcatcctcacagagatt

SEQ ID NO: 4505447 - DNA, 25 bp, Homo sapien
gaacagctacacgaagatccgaagg

SEQ ID NO: 4505448 - DNA, 25 bp, Homo sapien
cagttgaatctctggccttcgtggg

SEQ ID NO: 4505449 - DNA, 25 bp, Homo sapien
tcagccggaaaactacaaggtgtgt

SEQ ID NO: 4505450 - DNA, 25 bp, Homo sapien
tctgggaatcgtcctgtatgcaaca

SEQ ID NO: 4505451 - DNA, 25 bp, Homo sapien
tggcagagaaccaggaaaccacggt

SEQ ID NO: 4505452 - DNA, 25 bp, Homo sapien
gaaagtcactggtacaaccaagttg

SEQ ID NO: 4505453 - DNA, 25 bp, Homo sapien
gggacttggaagcagctaaaacaga

SEQ ID NO: 4505454 - DNA, 25 bp, Homo sapien
tacagggcgtaaaactgcgcttcgc

SEQ ID NO: 4505455 - DNA, 25 bp, Homo sapien
gagcattgagaactgtagcccgata

SEQ ID NO: 4505456 - DNA, 25 bp, Homo sapien
taactttcataagaacattttggcc

SEQ ID NO: 4505457 - DNA, 25 bp, Homo sapien
gctggcttagcattaactttcataa

SEQ ID NO: 4505458 - DNA, 25 bp, Homo sapien
taagaacattttggcctcgaggcat

SEQ ID NO: 4505459 - DNA, 25 bp, Homo sapien
caactcagaagctggcttagcatta

SEQ ID NO: 4505460 - DNA, 25 bp, Homo sapien
ggctgcgatgaagaatcacacaata

SEQ ID NO: 4505461 - DNA, 25 bp, Homo sapien
aacactccgatctgtatttattaca

SEQ ID NO: 4505462 - DNA, 25 bp, Homo sapien
taagtcacaataacactccgatctg

SEQ ID NO: 4505463 - DNA, 25 bp, Homo sapien
tattacaatgctcctctgatgcctc

SEQ ID NO: 4505464 - DNA, 25 bp, Homo sapien
gaaatgaaggtgtcttcaagtcgcc

SEQ ID NO: 4505465 - DNA, 25 bp, Homo sapien
tgtgtctgaagaagattaatagggc

SEQ ID NO: 4505466 - DNA, 25 bp, Homo sapien
tcaagtcgccagtgttgccagagtg

SEQ ID NO: 4505467 - DNA, 25 bp, Homo sapien
ggaacacctattgaaatgtgtctga

SEQ ID NO: 4505468 - DNA, 25 bp, Homo sapien
tggtcttggccagaacgaaggttaa

SEQ ID NO: 4505469 - DNA, 25 bp, Homo sapien
aagagacgtagcaaaaaggaagcga

SEQ ID NO: 4505470 - DNA, 25 bp, Homo sapien
gtatattcactctagttgccagaat

SEQ ID NO: 4505471 - DNA, 25 bp, Homo sapien
tcaggagccgggtgtccattaaccc

SEQ ID NO: 4505472 - DNA, 25 bp, Homo sapien
tcaggtgtgaggctatcgggtacct

SEQ ID NO: 4505473 - DNA, 25 bp, Homo sapien
ttgaagcgaccgtgttcaggtgtga

SEQ ID NO: 4505474 - DNA, 25 bp, Homo sapien
ttggaagttcgcaagccaagctgac

SEQ ID NO: 4505475 - DNA, 25 bp, Homo sapien
gaatcccagtggattgaagcgaccg

SEQ ID NO: 4505476 - DNA, 25 bp, Homo sapien
cacactaactttagagagacaaggt

SEQ ID NO: 4505477 - DNA, 25 bp, Homo sapien
ccttggaaaaccctgcacactaact

SEQ ID NO: 4505478 - DNA, 25 bp, Homo sapien
aaggaagtgcttccccatgtattag

SEQ ID NO: 4505479 - DNA, 25 bp, Homo sapien
tccccatgtattaggctctctcagc

SEQ ID NO: 4505480 - DNA, 25 bp, Homo sapien
aattaaagagaatctcctcctcggt

SEQ ID NO: 4505481 - DNA, 25 bp, Homo sapien
cccctgaaaagatgtgtctttgata

SEQ ID NO: 4505482 - DNA, 25 bp, Homo sapien
tgttcaaggtcccaaaccgcttgca

SEQ ID NO: 4505483 - DNA, 25 bp, Homo sapien
tagtttggcgggtgaaataaatgct

SEQ ID NO: 4505484 - DNA, 25 bp, Homo sapien
taaacgtttgcctgaaatccgcacg

SEQ ID NO: 4505485 - DNA, 25 bp, Homo sapien
gaggctccgcagtcttaacgcttcg

SEQ ID NO: 4505486 - DNA, 25 bp, Homo sapien
gatacttagtgcgagcctagcagct

SEQ ID NO: 4505487 - DNA, 25 bp, Homo sapien
aattgcttcttaagtcagcccggcg

SEQ ID NO: 4505488 - DNA, 25 bp, Homo sapien
gattagagcaagtacagtatctgtc

SEQ ID NO: 4505489 - DNA, 25 bp, Homo sapien
cagagcatatgctgggagggaaaaa

SEQ ID NO: 4505490 - DNA, 25 bp, Homo sapien
ggaaaaaattgcttaagattagagc

SEQ ID NO: 4505491 - DNA, 25 bp, Homo sapien
agagtcctcgctgcctaaaattcaa

SEQ ID NO: 4505492 - DNA, 25 bp, Homo sapien
actggagctccatgaatagggaaag

SEQ ID NO: 4505493 - DNA, 25 bp, Homo sapien
cactggcttgtggtactttgaaaat

SEQ ID NO: 4505494 - DNA, 25 bp, Homo sapien
agtagaaaccagttccgtcctccag

SEQ ID NO: 4505495 - DNA, 25 bp, Homo sapien
tttccctcaatctagtccgtgtgtg

SEQ ID NO: 4505496 - DNA, 25 bp, Homo sapien
cctgatgggctgtatttctttacag

SEQ ID NO: 4505497 - DNA, 25 bp, Homo sapien
gctgtatttctttacagattgaatc

SEQ ID NO: 4505498 - DNA, 25 bp, Homo sapien
cagattgaatcacaatatgaataca

SEQ ID NO: 4505499 - DNA, 25 bp, Homo sapien
tctttacagattgaatcacaatatg

SEQ ID NO: 4505500 - DNA, 25 bp, Homo sapien
gagcttgtaggcattttccaaacga

SEQ ID NO: 4505501 - DNA, 25 bp, Homo sapien
aacgaaagagttggccagatccggg

SEQ ID NO: 4505502 - DNA, 25 bp, Homo sapien
gaaggtgccacgaactgagcttgta

SEQ ID NO: 4505503 - DNA, 25 bp, Homo sapien
agatccgggtgatggcaaacccttc

SEQ ID NO: 4505504 - DNA, 25 bp, Homo sapien
tctcttaaaggctccgcgagaggct

SEQ ID NO: 4505505 - DNA, 25 bp, Homo sapien
ggaatcggggagtttgcctctcgca

SEQ ID NO: 4505506 - DNA, 25 bp, Homo sapien
gcaacttggcgatgtcacgaattcc

SEQ ID NO: 4505507 - DNA, 25 bp, Homo sapien
gcgatgtcacgaattccgccgctcg

SEQ ID NO: 4505508 - DNA, 25 bp, Homo sapien
tggcgacggcgcgccttataaggca

SEQ ID NO: 4505509 - DNA, 25 bp, Homo sapien
ttataaggcagcagccggggttggc

SEQ ID NO: 4505510 - DNA, 25 bp, Homo sapien
cgacggcgcgccttataaggcagca

SEQ ID NO: 4505511 - DNA, 25 bp, Homo sapien
gttgccatggcgacggcgcgcctta

SEQ ID NO: 4505512 - DNA, 25 bp, Homo sapien
gagggaatgcgatttataggcgccg

SEQ ID NO: 4505513 - DNA, 25 bp, Homo sapien
gacacgactgctgcaacttagcgca

SEQ ID NO: 4505514 - DNA, 25 bp, Homo sapien
cactgagctctctatatagtgaact

SEQ ID NO: 4505515 - DNA, 25 bp, Homo sapien
tcaaatatgctaaaaaggggggcgc

SEQ ID NO: 4505516 - DNA, 25 bp, Homo sapien
gatcaccacctagaagcacatcctt

SEQ ID NO: 4505517 - DNA, 25 bp, Homo sapien
tagggaaagagtcaactcgccggcg

SEQ ID NO: 4505518 - DNA, 25 bp, Homo sapien
aaggcagtacggcacccggagaaag

SEQ ID NO: 4505519 - DNA, 25 bp, Homo sapien
gaagcacatccttcgtgcgcagagg

SEQ ID NO: 4505520 - DNA, 25 bp, Homo sapien
gccgccgccgctgaagtcgctgctg

SEQ ID NO: 4505521 - DNA, 25 bp, Homo sapien
cgccgccgctgaagtcgctgctgcc

SEQ ID NO: 4505522 - DNA, 25 bp, Homo sapien
ccgccgctgaagtcgctgctgccgc

SEQ ID NO: 4505523 - DNA, 25 bp, Homo sapien
ccgccgccgccgctgaagtcgctgc

SEQ ID NO: 4505524 - DNA, 25 bp, Homo sapien
gccgggtcgggcccggagccgctgc

SEQ ID NO: 4505525 - DNA, 25 bp, Homo sapien
cgccgggtcgggcccggagccgctg

SEQ ID NO: 4505526 - DNA, 25 bp, Homo sapien
ccgggtcgggcccggagccgctgcg

SEQ ID NO: 4505527 - DNA, 25 bp, Homo sapien
cgggtcgggcccggagccgctgcgt

SEQ ID NO: 4505528 - DNA, 25 bp, Homo sapien
aaatcaggaggactaggagatcgga

SEQ ID NO: 4505529 - DNA, 25 bp, Homo sapien
gaagtcgattgtctggcttcaagac

SEQ ID NO: 4505530 - DNA, 25 bp, Homo sapien
tcaggaaagccatcgaaatcaggag

SEQ ID NO: 4505531 - DNA, 25 bp, Homo sapien
ttttgtcgatggcttgtctggcccg

SEQ ID NO: 4505532 - DNA, 25 bp, Homo sapien
gggtgcaagagggcgcgggagggcg

SEQ ID NO: 4505533 - DNA, 25 bp, Homo sapien
ggctccggcgcgccgccttttgtgt

SEQ ID NO: 4505534 - DNA, 25 bp, Homo sapien
tttgtgtgtgcgagggtgcaagagg

SEQ ID NO: 4505535 - DNA, 25 bp, Homo sapien
ccggcgcgccgccttttgtgtgtgc

SEQ ID NO: 4505536 - DNA, 25 bp, Homo sapien
tgggggtcgcgccacgtgctgacta

SEQ ID NO: 4505537 - DNA, 25 bp, Homo sapien
ctgggggtcgcgccacgtgctgact

SEQ ID NO: 4505538 - DNA, 25 bp, Homo sapien
ggggtcgcgccacgtgctgactacc

SEQ ID NO: 4505539 - DNA, 25 bp, Homo sapien
ggtcgcgccacgtgctgactaccat

SEQ ID NO: 4505540 - DNA, 25 bp, Homo sapien
ctgtggcgtgtgcggggcgccgggc

SEQ ID NO: 4505541 - DNA, 25 bp, Homo sapien
ccaccggccgccgtctgggctggcg

SEQ ID NO: 4505542 - DNA, 25 bp, Homo sapien
ccgccctggccaccggccgccgtct

SEQ ID NO: 4505543 - DNA, 25 bp, Homo sapien
cggccgccgtctgggctggcgtgct

SEQ ID NO: 4505544 - DNA, 25 bp, Homo sapien
ctggccaccggccgccgtctgggct

SEQ ID NO: 4505545 - DNA, 25 bp, Homo sapien
cttgcagccctcgcacgtgaactgg

SEQ ID NO: 4505546 - DNA, 25 bp, Homo sapien
gcgcggcacgtgtagctcaggttcc

SEQ ID NO: 4505547 - DNA, 25 bp, Homo sapien
gggacagttccggttggcgcggcac

SEQ ID NO: 4505548 - DNA, 25 bp, Homo sapien
ttcctccgcacgctgcgcttgaaga

SEQ ID NO: 4505549 - DNA, 25 bp, Homo sapien
ccaggacgagggaaggagaaatgag

SEQ ID NO: 4505550 - DNA, 25 bp, Homo sapien
acccaggacgagggaaggagaaatg

SEQ ID NO: 4505551 - DNA, 25 bp, Homo sapien
ggaaggagaaatgagaggccgatac

SEQ ID NO: 4505552 - DNA, 25 bp, Homo sapien
aggacgagggaaggagaaatgagag

SEQ ID NO: 4505553 - DNA, 25 bp, Homo sapien
tttgcaaaaggcacgagggtccacc

SEQ ID NO: 4505554 - DNA, 25 bp, Homo sapien
gaaaggcagactccagtgaactcac

SEQ ID NO: 4505555 - DNA, 25 bp, Homo sapien
tgttatctgactccggaccgggaga

SEQ ID NO: 4505556 - DNA, 25 bp, Homo sapien
aaatcagtcggccaaagcatgcgga

SEQ ID NO: 4505557 - DNA, 25 bp, Homo sapien
cttattgattggaggagagggagcg

SEQ ID NO: 4505558 - DNA, 25 bp, Homo sapien
ctgtgggcgggatgtagcattctga

SEQ ID NO: 4505559 - DNA, 25 bp, Homo sapien
tctttactgctaaacagctgatatt

SEQ ID NO: 4505560 - DNA, 25 bp, Homo sapien
ggctggtccgccgaggacccagaat

SEQ ID NO: 4505561 - DNA, 25 bp, Homo sapien
ccagaattggccaccttgcctcggg

SEQ ID NO: 4505562 - DNA, 25 bp, Homo sapien
ggtccgccgaggacccagaattggc

SEQ ID NO: 4505563 - DNA, 25 bp, Homo sapien
cgaggacccagaattggccaccttg

SEQ ID NO: 4505564 - DNA, 25 bp, Homo sapien
aaaccaccacccaggcgagctctga

SEQ ID NO: 4505565 - DNA, 25 bp, Homo sapien
tgagcagcgcaagaaccaggcaggc

SEQ ID NO: 4505566 - DNA, 25 bp, Homo sapien
aggctcttggcaccattcctttcaa

SEQ ID NO: 4505567 - DNA, 25 bp, Homo sapien
ctgccacagagctggagtcgccagg

SEQ ID NO: 4505568 - DNA, 25 bp, Homo sapien
tatatccggacaggtacgagtggca

SEQ ID NO: 4505569 - DNA, 25 bp, Homo sapien
tccgtatgtggtccataaaggcgac

SEQ ID NO: 4505570 - DNA, 25 bp, Homo sapien
tcctcgcggccagttcgcaaatgtt

SEQ ID NO: 4505571 - DNA, 25 bp, Homo sapien
tgaacaggactatggccttgaggca

SEQ ID NO: 4505572 - DNA, 25 bp, Homo sapien
gaaaaccgagggcttgaggagattc

SEQ ID NO: 4505573 - DNA, 25 bp, Homo sapien
caactcctattgagttagcaggcaa

SEQ ID NO: 4505574 - DNA, 25 bp, Homo sapien
gcaggagagggcatcccaatctgga

SEQ ID NO: 4505575 - DNA, 25 bp, Homo sapien
agccagggcgctagagaaaaccgag

SEQ ID NO: 4505576 - DNA, 25 bp, Homo sapien
tatcagctctattactcacacaggt

SEQ ID NO: 4505577 - DNA, 25 bp, Homo sapien
tctgaagagttatgacggtcccttt

SEQ ID NO: 4505578 - DNA, 25 bp, Homo sapien
gaggcagccaaaaagctcaggtgtg

SEQ ID NO: 4505579 - DNA, 25 bp, Homo sapien
ggcagtctgcattattccagtaaga

SEQ ID NO: 4505580 - DNA, 25 bp, Homo sapien
caaccggagttggagcaaatgtcta

SEQ ID NO: 4505581 - DNA, 25 bp, Homo sapien
aagagggcgactcatttttctccag

SEQ ID NO: 4505582 - DNA, 25 bp, Homo sapien
cagtttagcctattgaagggcagcc

SEQ ID NO: 4505583 - DNA, 25 bp, Homo sapien
caaaagtgcattgggtctgtctggc

SEQ ID NO: 4505584 - DNA, 25 bp, Homo sapien
ggtactggctcctaacgtattcttc

SEQ ID NO: 4505585 - DNA, 25 bp, Homo sapien
ttccgaatctcgtcggctggttggg

SEQ ID NO: 4505586 - DNA, 25 bp, Homo sapien
gaagggaggcgaagcaaaagctttc

SEQ ID NO: 4505587 - DNA, 25 bp, Homo sapien
tttccacatgggctacatcagagag

SEQ ID NO: 4505588 - DNA, 25 bp, Homo sapien
aacggacgaaaaacaattgctctat

SEQ ID NO: 4505589 - DNA, 25 bp, Homo sapien
caaacggacgaaaaacaattgctct

SEQ ID NO: 4505590 - DNA, 25 bp, Homo sapien
tatacggccagttaaaactgctgcc

SEQ ID NO: 4505591 - DNA, 25 bp, Homo sapien
gccagttaaaactgctgccggacag

SEQ ID NO: 4505592 - DNA, 25 bp, Homo sapien
gccggacagtaacatatcccggatg

SEQ ID NO: 4505593 - DNA, 25 bp, Homo sapien
ttattgaattgccatatacggccag

SEQ ID NO: 4505594 - DNA, 25 bp, Homo sapien
gcaagttgttctgaccgacacagga

SEQ ID NO: 4505595 - DNA, 25 bp, Homo sapien
cacagaataaactggtttggaacca

SEQ ID NO: 4505596 - DNA, 25 bp, Homo sapien
tcaaaacttattatagaaccacaga

SEQ ID NO: 4505597 - DNA, 25 bp, Homo sapien
cagctagaggtacatagacacagga

SEQ ID NO: 4505598 - DNA, 25 bp, Homo sapien
tcacgttacctataagtgccaacag

SEQ ID NO: 4505599 - DNA, 25 bp, Homo sapien
taagtgttatatgtggttcctccag

SEQ ID NO: 4505600 - DNA, 25 bp, Homo sapien
caaagactcgaccaaacagttcagt

SEQ ID NO: 4505601 - DNA, 25 bp, Homo sapien
caattcaagaactaagcgggaccca

SEQ ID NO: 4505602 - DNA, 25 bp, Homo sapien
cacctttgaacaaactgactgaggg

SEQ ID NO: 4505603 - DNA, 25 bp, Homo sapien
ggccagctaagcgagagctcacagg

SEQ ID NO: 4505604 - DNA, 25 bp, Homo sapien
caaccacgctagagtagaatcacag

SEQ ID NO: 4505605 - DNA, 25 bp, Homo sapien
tagcttgcttgaacgatcttctgag

SEQ ID NO: 4505606 - DNA, 25 bp, Homo sapien
aaagattcccttgaccctgtggtca

SEQ ID NO: 4505607 - DNA, 25 bp, Homo sapien
tcacatggatagcacttgcaagagg

SEQ ID NO: 4505608 - DNA, 25 bp, Homo sapien
ttggcttctaaggacaaaggatccc

SEQ ID NO: 4505609 - DNA, 25 bp, Homo sapien
cacaacatgatgaagtactggcggt

SEQ ID NO: 4505610 - DNA, 25 bp, Homo sapien
tcagctcataggaccaagtcaaaag

SEQ ID NO: 4505611 - DNA, 25 bp, Homo sapien
tggctcagctcataggaccaagtca

SEQ ID NO: 4505612 - DNA, 25 bp, Homo sapien
gttggctcagctcataggaccaagt

SEQ ID NO: 4505613 - DNA, 25 bp, Homo sapien
gctcagctcataggaccaagtcaaa

SEQ ID NO: 4505614 - DNA, 25 bp, Homo sapien
ctcgcggtgcagtgggagacgccat

SEQ ID NO: 4505615 - DNA, 25 bp, Homo sapien
gcgctcgcggtgcagtgggagacgc

SEQ ID NO: 4505616 - DNA, 25 bp, Homo sapien
ccggcgctcgcggtgcagtgggaga

SEQ ID NO: 4505617 - DNA, 25 bp, Homo sapien
cagcccggcgctcgcggtgcagtgg

SEQ ID NO: 4505618 - DNA, 25 bp, Homo sapien
tttctgcctgcagacggaatggcct

SEQ ID NO: 4505619 - DNA, 25 bp, Homo sapien
gaccggactcacttgccagcaagag

SEQ ID NO: 4505620 - DNA, 25 bp, Homo sapien
agaaggtacagcgttaccaatattt

SEQ ID NO: 4505621 - DNA, 25 bp, Homo sapien
atcaactctcctgaatatgggaggg

SEQ ID NO: 4505622 - DNA, 25 bp, Homo sapien
ggtctaagatccagaggctgaatcc

SEQ ID NO: 4505623 - DNA, 25 bp, Homo sapien
cccggtctaagatccagaggctgaa

SEQ ID NO: 4505624 - DNA, 25 bp, Homo sapien
cggtctaagatccagaggctgaatc

SEQ ID NO: 4505625 - DNA, 25 bp, Homo sapien
ccggtctaagatccagaggctgaat

SEQ ID NO: 4505626 - DNA, 25 bp, Homo sapien
tgctgagtaaacctccctcgctggg

SEQ ID NO: 4505627 - DNA, 25 bp, Homo sapien
gctgaaggcgaatccccgttgataa

SEQ ID NO: 4505628 - DNA, 25 bp, Homo sapien
gggtgctcgccgacatatttgctga

SEQ ID NO: 4505629 - DNA, 25 bp, Homo sapien
cattaccgttcggattcagggaggc

SEQ ID NO: 4505630 - DNA, 25 bp, Homo sapien
gatgggcaggcaaggcattcgttct

SEQ ID NO: 4505631 - DNA, 25 bp, Homo sapien
tctgtaaaaatccacgtgagccgcc

SEQ ID NO: 4505632 - DNA, 25 bp, Homo sapien
tcagcatagcgggtagatggcacaa

SEQ ID NO: 4505633 - DNA, 25 bp, Homo sapien
cattgggtctgtgcggtaaggatca

SEQ ID NO: 4505634 - DNA, 25 bp, Homo sapien
tgcagaagcgaagagtcccggccac

SEQ ID NO: 4505635 - DNA, 25 bp, Homo sapien
tgccgctgcagccaagttcgcggcc

SEQ ID NO: 4505636 - DNA, 25 bp, Homo sapien
gatttggtcggagatctgccgctgc

SEQ ID NO: 4505637 - DNA, 25 bp, Homo sapien
cctcggccagctgtatgctgcagaa

SEQ ID NO: 4505638 - DNA, 25 bp, Homo sapien
ggccagggaggtgggaacggtggca

SEQ ID NO: 4505639 - DNA, 25 bp, Homo sapien
cagccgacagcccaagggattggcc

SEQ ID NO: 4505640 - DNA, 25 bp, Homo sapien
agacagccgacagcccaagggattg

SEQ ID NO: 4505641 - DNA, 25 bp, Homo sapien
cccaaccagggtcttggacaggcag

SEQ ID NO: 4505642 - DNA, 25 bp, Homo sapien
aagccacagggcgttttaattagtg

SEQ ID NO: 4505643 - DNA, 25 bp, Homo sapien
acagggcgttttaattagtgatgag

SEQ ID NO: 4505644 - DNA, 25 bp, Homo sapien
ccggagcctcgggagctgtaggcag

SEQ ID NO: 4505645 - DNA, 25 bp, Homo sapien
agggggagacgcacagccccagacc

SEQ ID NO: 4505646 - DNA, 25 bp, Homo sapien
tctagtctgattgcaaatcacctgg

SEQ ID NO: 4505647 - DNA, 25 bp, Homo sapien
tgcagaggttactcctttccctaaa

SEQ ID NO: 4505648 - DNA, 25 bp, Homo sapien
cccctgatatcgacctgcagaggtt

SEQ ID NO: 4505649 - DNA, 25 bp, Homo sapien
gctttcttctactagccccacggga

SEQ ID NO: 4505650 - DNA, 25 bp, Homo sapien
cagaaactgaacacctccgaatcca

SEQ ID NO: 4505651 - DNA, 25 bp, Homo sapien
agccagcgagtcttaattgatccca

SEQ ID NO: 4505652 - DNA, 25 bp, Homo sapien
atccacgggcatagcgaccgggcat

SEQ ID NO: 4505653 - DNA, 25 bp, Homo sapien
caggagcaggtgaaagcggcgatgc

SEQ ID NO: 4505654 - DNA, 25 bp, Homo sapien
tgccgtgccccgtgagagtggaaaa

SEQ ID NO: 4505655 - DNA, 25 bp, Homo sapien
tcgggcctggccactaggtctttgg

SEQ ID NO: 4505656 - DNA, 25 bp, Homo sapien
ctaggtctttggcacgggcttccac

SEQ ID NO: 4505657 - DNA, 25 bp, Homo sapien
tctgtctggagacaaaaggcctctg

SEQ ID NO: 4505658 - DNA, 25 bp, Homo sapien
ctccaggccgccagaacgggagagt

SEQ ID NO: 4505659 - DNA, 25 bp, Homo sapien
ccgccagaacgggagagttttgctc

SEQ ID NO: 4505660 - DNA, 25 bp, Homo sapien
ccatccccctaacgctggaggctga

SEQ ID NO: 4505661 - DNA, 25 bp, Homo sapien
ccagaacgggagagttttgctccat

SEQ ID NO: 4505662 - DNA, 25 bp, Homo sapien
ctgacaaccagtccgtccagtgttg

SEQ ID NO: 4505663 - DNA, 25 bp, Homo sapien
tcaacaggttctagccacgttcgct

SEQ ID NO: 4505664 - DNA, 25 bp, Homo sapien
ttgccacgagctgtgcggacttcca

SEQ ID NO: 4505665 - DNA, 25 bp, Homo sapien
cacgttcgctcttcttcgcgctgaa

SEQ ID NO: 4505666 - DNA, 25 bp, Homo sapien
gtcgaagaatatccatcagcctggg

SEQ ID NO: 4505667 - DNA, 25 bp, Homo sapien
gccccggtcgaagaatatccatcag

SEQ ID NO: 4505668 - DNA, 25 bp, Homo sapien
agggccccggtcgaagaatatccat

SEQ ID NO: 4505669 - DNA, 25 bp, Homo sapien
ccggtcgaagaatatccatcagcct

SEQ ID NO: 4505670 - DNA, 25 bp, Homo sapien
gcgggagccgggcgttaagcctgga

SEQ ID NO: 4505671 - DNA, 25 bp, Homo sapien
accgcccagcagtccgcttctgccc

SEQ ID NO: 4505672 - DNA, 25 bp, Homo sapien
gggagccctcggctctcgccaggac

SEQ ID NO: 4505673 - DNA, 25 bp, Homo sapien
tccctcggggctgcggccctttgaa

SEQ ID NO: 4505674 - DNA, 25 bp, Homo sapien
ggagtgcgaatgtgagaacctcccc

SEQ ID NO: 4505675 - DNA, 25 bp, Homo sapien
ggaaggcattgtcctaacgagcgac

SEQ ID NO: 4505676 - DNA, 25 bp, Homo sapien
gaaatacacgcatgttccctctttg

SEQ ID NO: 4505677 - DNA, 25 bp, Homo sapien
gaccgcgctggtttctttgaaatac

SEQ ID NO: 4505678 - DNA, 25 bp, Homo sapien
gaaatgcgaacgcagtgaagcccct

SEQ ID NO: 4505679 - DNA, 25 bp, Homo sapien
aagcccctaagccttcaatcgtgtg

SEQ ID NO: 4505680 - DNA, 25 bp, Homo sapien
ccactgatctgagtttgaaatgcga

SEQ ID NO: 4505681 - DNA, 25 bp, Homo sapien
ggatcacagccatgtcagggtgtct

SEQ ID NO: 4505682 - DNA, 25 bp, Homo sapien
caaattttcgtcattgtccttcaca

SEQ ID NO: 4505683 - DNA, 25 bp, Homo sapien
tttcgtcattgtccttcacatcaaa

SEQ ID NO: 4505684 - DNA, 25 bp, Homo sapien
tctcagattcaaattttcgtcattg

SEQ ID NO: 4505685 - DNA, 25 bp, Homo sapien
cattgtccttcacatcaaataatga

SEQ ID NO: 4505686 - DNA, 25 bp, Homo sapien
ccttgcggtaattggcagagacttc

SEQ ID NO: 4505687 - DNA, 25 bp, Homo sapien
gactgtggtagaaggacctggttcc

SEQ ID NO: 4505688 - DNA, 25 bp, Homo sapien
cacctcttgaagtcgggagaatcag

SEQ ID NO: 4505689 - DNA, 25 bp, Homo sapien
caagctcactctcacagttggcagg

SEQ ID NO: 4505690 - DNA, 25 bp, Homo sapien
taatggcagtggtaggattctaacc

SEQ ID NO: 4505691 - DNA, 25 bp, Homo sapien
tctctacaactagctagtcatggtg

SEQ ID NO: 4505692 - DNA, 25 bp, Homo sapien
cctctagtcctagtcacccaggaga

SEQ ID NO: 4505693 - DNA, 25 bp, Homo sapien
agctttggccacacttcacactgca

SEQ ID NO: 4505694 - DNA, 25 bp, Homo sapien
gatggatgaaagagtacctcaaagt

SEQ ID NO: 4505695 - DNA, 25 bp, Homo sapien
gatgaaagagtacctcaaagtaaag

SEQ ID NO: 4505696 - DNA, 25 bp, Homo sapien
agggatggatgaaagagtacctcaa

SEQ ID NO: 4505697 - DNA, 25 bp, Homo sapien
ctggtacatgggtgaagggatggat

SEQ ID NO: 4505698 - DNA, 25 bp, Homo sapien
cctcacatatgccaagtatgcattt

SEQ ID NO: 4505699 - DNA, 25 bp, Homo sapien
cacaagtttgacctcacatatgcca

SEQ ID NO: 4505700 - DNA, 25 bp, Homo sapien
tgacctcacatatgccaagtatgca

SEQ ID NO: 4505701 - DNA, 25 bp, Homo sapien
gtttgacctcacatatgccaagtat

SEQ ID NO: 4505702 - DNA, 25 bp, Homo sapien
tcccaatgtggtacccggtggagac

SEQ ID NO: 4505703 - DNA, 25 bp, Homo sapien
aatgctggcattgtcaccctcagga

SEQ ID NO: 4505704 - DNA, 25 bp, Homo sapien
ccatgatgttgtaccatgaagtaca

SEQ ID NO: 4505705 - DNA, 25 bp, Homo sapien
gtaaatacatgtacttgctgcctga

SEQ ID NO: 4505706 - DNA, 25 bp, Homo sapien
gacatcatctgccatagaaatctca

SEQ ID NO: 4505707 - DNA, 25 bp, Homo sapien
taggcccctaatatctctgctgaga

SEQ ID NO: 4505708 - DNA, 25 bp, Homo sapien
gaacctcagaccaatctggtaccct

SEQ ID NO: 4505709 - DNA, 25 bp, Homo sapien
tgaatattgatctgacggaacctca

SEQ ID NO: 4505710 - DNA, 25 bp, Homo sapien
ggaagtggctgtcccataaccatac

SEQ ID NO: 4505711 - DNA, 25 bp, Homo sapien
gatagtgatggactttgcccacaca

SEQ ID NO: 4505712 - DNA, 25 bp, Homo sapien
gttgaaaatctgttccacccaagcc

SEQ ID NO: 4505713 - DNA, 25 bp, Homo sapien
taaccatacactccaggcttgagga

SEQ ID NO: 4505714 - DNA, 25 bp, Homo sapien
ttggcacagcacagacgaatgattc

SEQ ID NO: 4505715 - DNA, 25 bp, Homo sapien
ttgatagaggcagaagcttggcaca

SEQ ID NO: 4505716 - DNA, 25 bp, Homo sapien
tatcagaaggcaagcttagcaaggt

SEQ ID NO: 4505717 - DNA, 25 bp, Homo sapien
gcctcctacccatgcttgaaagata

SEQ ID NO: 4505718 - DNA, 25 bp, Homo sapien
aaagtcatcgcagtttgaattcagc

SEQ ID NO: 4505719 - DNA, 25 bp, Homo sapien
tgaaaacagctagcatgcgtaactt

SEQ ID NO: 4505720 - DNA, 25 bp, Homo sapien
tatgaaactaggataaggccgccag

SEQ ID NO: 4505721 - DNA, 25 bp, Homo sapien
caatattgtgtctttggcattcgaa

SEQ ID NO: 4505722 - DNA, 25 bp, Homo sapien
cagtgtagatttgttcacgacagga

SEQ ID NO: 4505723 - DNA, 25 bp, Homo sapien
ctggacagtgacattgcaaaactaa

SEQ ID NO: 4505724 - DNA, 25 bp, Homo sapien
taacacacgttcacttggattggtg

SEQ ID NO: 4505725 - DNA, 25 bp, Homo sapien
ccttaagaaatgtagtgcaggagtg

SEQ ID NO: 4505726 - DNA, 25 bp, Homo sapien
tgactctagaggcttagttggtaga

SEQ ID NO: 4505727 - DNA, 25 bp, Homo sapien
gtgagacacctcagcaagagtgggt

SEQ ID NO: 4505728 - DNA, 25 bp, Homo sapien
catgtctgggcagtagtgagacacc

SEQ ID NO: 4505729 - DNA, 25 bp, Homo sapien
gccaaagttgagaatcatgcccggt

SEQ ID NO: 4505730 - DNA, 25 bp, Homo sapien
cccagattgcagttaatggagagct

SEQ ID NO: 4505731 - DNA, 25 bp, Homo sapien
tggacaggtgtctacatcagaattg

SEQ ID NO: 4505732 - DNA, 25 bp, Homo sapien
gacagggtgtttgatggtttctaga

SEQ ID NO: 4505733 - DNA, 25 bp, Homo sapien
gttgttcactgacagggtgtttgat

SEQ ID NO: 4505734 - DNA, 25 bp, Homo sapien
tcaaagcaataatatgagctttcag

SEQ ID NO: 4505735 - DNA, 25 bp, Homo sapien
caaagcaataatatgagctttcagt

SEQ ID NO: 4505736 - DNA, 25 bp, Homo sapien
gctgtcaaagcaataatatgagctt

SEQ ID NO: 4505737 - DNA, 25 bp, Homo sapien
tgaagctgtcaaagcaataatatga

SEQ ID NO: 4505738 - DNA, 25 bp, Homo sapien
cctgaccgagagcaacacaagggat

SEQ ID NO: 4505739 - DNA, 25 bp, Homo sapien
aacgagaggcgcctatttgcacttg

SEQ ID NO: 4505740 - DNA, 25 bp, Homo sapien
tcaggcgcgttcctcaaaacgagag

SEQ ID NO: 4505741 - DNA, 25 bp, Homo sapien
ataccaaggtcacgtcagccggcat

SEQ ID NO: 4505742 - DNA, 25 bp, Homo sapien
tcctgggagagccaactagttccca

SEQ ID NO: 4505743 - DNA, 25 bp, Homo sapien
cagatgtccgattgccactggctct

SEQ ID NO: 4505744 - DNA, 25 bp, Homo sapien
agatgtccgattgccactggctctc

SEQ ID NO: 4505745 - DNA, 25 bp, Homo sapien
gcaggcgcgtccatgggcatgccca

SEQ ID NO: 4505746 - DNA, 25 bp, Homo sapien
gctggcaggcgcgtccatgggcatg

SEQ ID NO: 4505747 - DNA, 25 bp, Homo sapien
gctagagctggcaggcgcgtccatg

SEQ ID NO: 4505748 - DNA, 25 bp, Homo sapien
ctagagctggcaggcgcgtccatgg

SEQ ID NO: 4505749 - DNA, 25 bp, Homo sapien
gagcgacaagaggaaaggcccctct

SEQ ID NO: 4505750 - DNA, 25 bp, Homo sapien
gacatttgtcatgggtgacccggcg

SEQ ID NO: 4505751 - DNA, 25 bp, Homo sapien
ggaagcccgcgctaatgtaataaag

SEQ ID NO: 4505752 - DNA, 25 bp, Homo sapien
tgctcactccgttttactgtcaggg

SEQ ID NO: 4505753 - DNA, 25 bp, Homo sapien
ctgaaactgacacccgcaagcactc

SEQ ID NO: 4505754 - DNA, 25 bp, Homo sapien
gaaactgacacccgcaagcactctc

SEQ ID NO: 4505755 - DNA, 25 bp, Homo sapien
tgaaactgacacccgcaagcactct

SEQ ID NO: 4505756 - DNA, 25 bp, Homo sapien
gactttgcgctttcgagagctcttt

SEQ ID NO: 4505757 - DNA, 25 bp, Homo sapien
ttttggagactttgcgctttcgaga

SEQ ID NO: 4505758 - DNA, 25 bp, Homo sapien
cggcggcccaggcttccgtgacttg

SEQ ID NO: 4505759 - DNA, 25 bp, Homo sapien
tggggaggcgctggaacccttgtaa

SEQ ID NO: 4505760 - DNA, 25 bp, Homo sapien
taagctctcctaagtgccgtcggtg

SEQ ID NO: 4505761 - DNA, 25 bp, Homo sapien
ttgactttaaccttgcgctcgcgcc

SEQ ID NO: 4505762 - DNA, 25 bp, Homo sapien
ggcgtcgcctgccactcaaatagta

SEQ ID NO: 4505763 - DNA, 25 bp, Homo sapien
ttagcagcgaggatgtttgcgcccg

SEQ ID NO: 4505764 - DNA, 25 bp, Homo sapien
aaacaagtcctctgtgttgaatgga

SEQ ID NO: 4505765 - DNA, 25 bp, Homo sapien
gtaattgtagctgtagactgtacac

SEQ ID NO: 4505766 - DNA, 25 bp, Homo sapien
cacttgggtgccataaggtactgtc

SEQ ID NO: 4505767 - DNA, 25 bp, Homo sapien
caaataacgtttgatgcccttctaa

SEQ ID NO: 4505768 - DNA, 25 bp, Homo sapien
tcaccacctcattgatggcagaatg

SEQ ID NO: 4505769 - DNA, 25 bp, Homo sapien
acttgttgatggagtattctcgggt

SEQ ID NO: 4505770 - DNA, 25 bp, Homo sapien
cctcattgatggcagaatggccctt

SEQ ID NO: 4505771 - DNA, 25 bp, Homo sapien
gaatggccctttttcttctcgccac

SEQ ID NO: 4505772 - DNA, 25 bp, Homo sapien
accgcacatggatttggtatgggac

SEQ ID NO: 4505773 - DNA, 25 bp, Homo sapien
ggacaaccgcacatggatttggtat

SEQ ID NO: 4505774 - DNA, 25 bp, Homo sapien
ttgaacctggtatcaatgtgcacat

SEQ ID NO: 4505775 - DNA, 25 bp, Homo sapien
ttctggacaaccgcacatggatttg

SEQ ID NO: 4505776 - DNA, 25 bp, Homo sapien
cctgacacaatttgctcagaagtag

SEQ ID NO: 4505777 - DNA, 25 bp, Homo sapien
cagaagtaggcttaccacattgcat

SEQ ID NO: 4505778 - DNA, 25 bp, Homo sapien
tcagcaactcctgacacaatttgct

SEQ ID NO: 4505779 - DNA, 25 bp, Homo sapien
tgctcagaagtaggcttaccacatt

SEQ ID NO: 4505780 - DNA, 25 bp, Homo sapien
tgaaagcagagcagagcagggggcc

SEQ ID NO: 4505781 - DNA, 25 bp, Homo sapien
agagcagagcagggggccgctgtgc

SEQ ID NO: 4505782 - DNA, 25 bp, Homo sapien
gcagagcagagcagggggccgctgt

SEQ ID NO: 4505783 - DNA, 25 bp, Homo sapien
aaagcagagcagagcagggggccgc

SEQ ID NO: 4505784 - DNA, 25 bp, Homo sapien
tggaagcgtgcaccatcagcgctca

SEQ ID NO: 4505785 - DNA, 25 bp, Homo sapien
gcaccatcagcgctcacggatgtca

SEQ ID NO: 4505786 - DNA, 25 bp, Homo sapien
tcacggatgtcacagacatgcatga

SEQ ID NO: 4505787 - DNA, 25 bp, Homo sapien
gaaaatgactggaagcgtgcaccat

SEQ ID NO: 4505788 - DNA, 25 bp, Homo sapien
gatctattgcgggtctataaccgct

SEQ ID NO: 4505789 - DNA, 25 bp, Homo sapien
cgccgatctattgcgggtctataac

SEQ ID NO: 4505790 - DNA, 25 bp, Homo sapien
tgcgggtctataaccgctccataaa

SEQ ID NO: 4505791 - DNA, 25 bp, Homo sapien
tcaacgccgatctattgcgggtcta

SEQ ID NO: 4505792 - DNA, 25 bp, Homo sapien
tggagcaaatcctgttttggttttg

SEQ ID NO: 4505793 - DNA, 25 bp, Homo sapien
gactctgattacttccctgggtttc

SEQ ID NO: 4505794 - DNA, 25 bp, Homo sapien
cagagaagacctggttggagcaaat

SEQ ID NO: 4505795 - DNA, 25 bp, Homo sapien
ctgttttggttttgtggtagttgtg

SEQ ID NO: 4505796 - DNA, 25 bp, Homo sapien
gcagctagtcacatacccctgatcg

SEQ ID NO: 4505797 - DNA, 25 bp, Homo sapien
tacccctgatcgaagaatagtctcc

SEQ ID NO: 4505798 - DNA, 25 bp, Homo sapien
gtctccctctatcagggaagtttgt

SEQ ID NO: 4505799 - DNA, 25 bp, Homo sapien
gggagggcagctagtcacatacccc

SEQ ID NO: 4505800 - DNA, 25 bp, Homo sapien
tagtgtttttggcacataagatcat

SEQ ID NO: 4505801 - DNA, 25 bp, Homo sapien
tttttggcacataagatcatgttgt

SEQ ID NO: 4505802 - DNA, 25 bp, Homo sapien
tcttagtgtttttggcacataagat

SEQ ID NO: 4505803 - DNA, 25 bp, Homo sapien
gtgtttttggcacataagatcatgt

SEQ ID NO: 4505804 - DNA, 25 bp, Homo sapien
ggctttgcaggagacatacggaagt

SEQ ID NO: 4505805 - DNA, 25 bp, Homo sapien
tgctctccatcctactgtgtagcac

SEQ ID NO: 4505806 - DNA, 25 bp, Homo sapien
ccttgttcacaagttgccagcccaa

SEQ ID NO: 4505807 - DNA, 25 bp, Homo sapien
gagattattgatgccaagtactttc

SEQ ID NO: 4505808 - DNA, 25 bp, Homo sapien
gctgaagcttatcccagattttgca

SEQ ID NO: 4505809 - DNA, 25 bp, Homo sapien
tagcaagagttgtaggcacttaaag

SEQ ID NO: 4505810 - DNA, 25 bp, Homo sapien
tgcagcactaatgtataaacttctc

SEQ ID NO: 4505811 - DNA, 25 bp, Homo sapien
tggattagggcctttgtgcgcgcct

SEQ ID NO: 4505812 - DNA, 25 bp, Homo sapien
tgctggctgatctacctgtgaatag

SEQ ID NO: 4505813 - DNA, 25 bp, Homo sapien
gccagagcctggatagataaattct

SEQ ID NO: 4505814 - DNA, 25 bp, Homo sapien
tcctgactgggtccttccagagtct

SEQ ID NO: 4505815 - DNA, 25 bp, Homo sapien
tcagttagaaagtgagtggctccag

SEQ ID NO: 4505816 - DNA, 25 bp, Homo sapien
cccaggcgggtgcttaatgagccta

SEQ ID NO: 4505817 - DNA, 25 bp, Homo sapien
agtattttgtaacaagcccaggcgg

SEQ ID NO: 4505818 - DNA, 25 bp, Homo sapien
ccagtgtgctccaactgaatgtaat

SEQ ID NO: 4505819 - DNA, 25 bp, Homo sapien
tctgtcaaagccttaaagttgattt

SEQ ID NO: 4505820 - DNA, 25 bp, Homo sapien
ctgaatgtaatctgtcaaagcctta

SEQ ID NO: 4505821 - DNA, 25 bp, Homo sapien
caaaacattctcaggccagtgtgct

SEQ ID NO: 4505822 - DNA, 25 bp, Homo sapien
tctttcccaagtgcgcaagacagtc

SEQ ID NO: 4505823 - DNA, 25 bp, Homo sapien
tagaccgcgtttatctccaaatgag

SEQ ID NO: 4505824 - DNA, 25 bp, Homo sapien
cattcaggcagtattgggaccactc

SEQ ID NO: 4505825 - DNA, 25 bp, Homo sapien
tgcttgttgaacctgtagaccgcgt

SEQ ID NO: 4505826 - DNA, 25 bp, Homo sapien
tgtggctgtgaagaatatagctcgt

SEQ ID NO: 4505827 - DNA, 25 bp, Homo sapien
gtggctgtgaagaatatagctcgtg

SEQ ID NO: 4505828 - DNA, 25 bp, Homo sapien
ggctgtgaagaatatagctcgtgca

SEQ ID NO: 4505829 - DNA, 25 bp, Homo sapien
tggctgtgaagaatatagctcgtgc

SEQ ID NO: 4505830 - DNA, 25 bp, Homo sapien
acatcttacggtaacctacttgcag

SEQ ID NO: 4505831 - DNA, 25 bp, Homo sapien
tgaacgaaagtaacaggtaaagtca

SEQ ID NO: 4505832 - DNA, 25 bp, Homo sapien
caaacaggcacttacattaagagaa

SEQ ID NO: 4505833 - DNA, 25 bp, Homo sapien
acacacaaactttattgaacgaaag

SEQ ID NO: 4505834 - DNA, 25 bp, Homo sapien
tgtagggcattattcatgcaggagc

SEQ ID NO: 4505835 - DNA, 25 bp, Homo sapien
tgtagttgacccttgctgccagtgg

SEQ ID NO: 4505836 - DNA, 25 bp, Homo sapien
tgtggaaggtccagtcagaagggcc

SEQ ID NO: 4505837 - DNA, 25 bp, Homo sapien
cagaagggcccaaaaacatgttgtt

SEQ ID NO: 4505838 - DNA, 25 bp, Homo sapien
ctttgtattcagggacagtccccat

SEQ ID NO: 4505839 - DNA, 25 bp, Homo sapien
aatccggtagtgagacacagagaga

SEQ ID NO: 4505840 - DNA, 25 bp, Homo sapien
cagaagacacatcgtgattgtcgca

SEQ ID NO: 4505841 - DNA, 25 bp, Homo sapien
cacatcgtgattgtcgcaaatccgg

SEQ ID NO: 4505842 - DNA, 25 bp, Homo sapien
gattgtcgcaaatccggtagtgaga

SEQ ID NO: 4505843 - DNA, 25 bp, Homo sapien
tgacaggcagctcgtggatcccatc

SEQ ID NO: 4505844 - DNA, 25 bp, Homo sapien
ctgccaactgacaggcagctcgtgg

SEQ ID NO: 4505845 - DNA, 25 bp, Homo sapien
aactgacaggcagctcgtggatccc

SEQ ID NO: 4505846 - DNA, 25 bp, Homo sapien
ccaactgacaggcagctcgtggatc

SEQ ID NO: 4505847 - DNA, 25 bp, Homo sapien
tcctgccaagcactcggtggcactg

SEQ ID NO: 4505848 - DNA, 25 bp, Homo sapien
tgccaagcactcggtggcactgtgt

SEQ ID NO: 4505849 - DNA, 25 bp, Homo sapien
gtcctgccaagcactcggtggcact

SEQ ID NO: 4505850 - DNA, 25 bp, Homo sapien
cctgccaagcactcggtggcactgt

SEQ ID NO: 4505851 - DNA, 25 bp, Homo sapien
ttgaatagcaacatcctccagttgg

SEQ ID NO: 4505852 - DNA, 25 bp, Homo sapien
ttggaggaaaacctgctgtcgccat

SEQ ID NO: 4505853 - DNA, 25 bp, Homo sapien
gaatagcaacatcctccagttggag

SEQ ID NO: 4505854 - DNA, 25 bp, Homo sapien
catcctccagttggaggaaaacctg

SEQ ID NO: 4505855 - DNA, 25 bp, Homo sapien
gaaaggcagggactatcagcatgct

SEQ ID NO: 4505856 - DNA, 25 bp, Homo sapien
ggtgactggcactctattaggattg

SEQ ID NO: 4505857 - DNA, 25 bp, Homo sapien
gatttgggcctttcacgccttctga

SEQ ID NO: 4505858 - DNA, 25 bp, Homo sapien
ttctagttgtaaagcggtcacccgc

SEQ ID NO: 4505859 - DNA, 25 bp, Homo sapien
ttaaacaacatcttcggcatactga

SEQ ID NO: 4505860 - DNA, 25 bp, Homo sapien
tgtgggagactttgcgattctagca

SEQ ID NO: 4505861 - DNA, 25 bp, Homo sapien
gaagccttgttactccaaagcacag

SEQ ID NO: 4505862 - DNA, 25 bp, Homo sapien
caaagcacaggtctgaataattcag

SEQ ID NO: 4505863 - DNA, 25 bp, Homo sapien
tgaaacacatcggagaaacgcattg

SEQ ID NO: 4505864 - DNA, 25 bp, Homo sapien
aaacgcattgcatgtcaaggacagc

SEQ ID NO: 4505865 - DNA, 25 bp, Homo sapien
ccaaaaagggtcttgaagcattgta

SEQ ID NO: 4505866 - DNA, 25 bp, Homo sapien
ttctctctgcgtttcagcaatggcg

SEQ ID NO: 4505867 - DNA, 25 bp, Homo sapien
ctgcctgctagagtcaatagggggc

SEQ ID NO: 4505868 - DNA, 25 bp, Homo sapien
agcctgcctgctagagtcaataggg

SEQ ID NO: 4505869 - DNA, 25 bp, Homo sapien
gcctgcctgctagagtcaatagggg

SEQ ID NO: 4505870 - DNA, 25 bp, Homo sapien
cagcctgcctgctagagtcaatagg

SEQ ID NO: 4505871 - DNA, 25 bp, Homo sapien
catgggactccggtccggcagtaca

SEQ ID NO: 4505872 - DNA, 25 bp, Homo sapien
aattcctgtgccttttgattgagtg

SEQ ID NO: 4505873 - DNA, 25 bp, Homo sapien
tgagtgtttcaatggaagtccagaa

SEQ ID NO: 4505874 - DNA, 25 bp, Homo sapien
tgattgagtgtttcaatggaagtcc

SEQ ID NO: 4505875 - DNA, 25 bp, Homo sapien
tatttcctggacggtatgtccattt

SEQ ID NO: 4505876 - DNA, 25 bp, Homo sapien
ctatttcctggacggtatgtccatt

SEQ ID NO: 4505877 - DNA, 25 bp, Homo sapien
atttcctggacggtatgtccatttc

SEQ ID NO: 4505878 - DNA, 25 bp, Homo sapien
ttcctggacggtatgtccatttctt

SEQ ID NO: 4505879 - DNA, 25 bp, Homo sapien
tccaaagatctcaagcgtggacaga

SEQ ID NO: 4505880 - DNA, 25 bp, Homo sapien
gattaagtgcctcagtaggcttctc

SEQ ID NO: 4505881 - DNA, 25 bp, Homo sapien
ttccaaagatctcaagcgtggacag

SEQ ID NO: 4505882 - DNA, 25 bp, Homo sapien
attaagtgcctcagtaggcttctca

SEQ ID NO: 4505883 - DNA, 25 bp, Homo sapien
tgtgataatttctcttcggcaaccc

SEQ ID NO: 4505884 - DNA, 25 bp, Homo sapien
gatttgcgggcatttaacaggttcc

SEQ ID NO: 4505885 - DNA, 25 bp, Homo sapien
tctgacagggatataaccgaacccg

SEQ ID NO: 4505886 - DNA, 25 bp, Homo sapien
ggcaacccgtaaagatttgcgggca

SEQ ID NO: 4505887 - DNA, 25 bp, Homo sapien
ttcaaagatttcaaaactgatctgt

SEQ ID NO: 4505888 - DNA, 25 bp, Homo sapien
caaaactgatctgtttctgatacat

SEQ ID NO: 4505889 - DNA, 25 bp, Homo sapien
cttcaaagatttcaaaactgatctg

SEQ ID NO: 4505890 - DNA, 25 bp, Homo sapien
tttcaaaactgatctgtttctgata

SEQ ID NO: 4505891 - DNA, 25 bp, Homo sapien
ggagtaaggagtaactataaactga

SEQ ID NO: 4505892 - DNA, 25 bp, Homo sapien
taaggagtaactataaactgaggtc

SEQ ID NO: 4505893 - DNA, 25 bp, Homo sapien
agtaaggagtaactataaactgagg

SEQ ID NO: 4505894 - DNA, 25 bp, Homo sapien
gagtaaggagtaactataaactgag

SEQ ID NO: 4505895 - DNA, 25 bp, Homo sapien
gagctccacatagactcctggctcc

SEQ ID NO: 4505896 - DNA, 25 bp, Homo sapien
ggagctccacatagactcctggctc

SEQ ID NO: 4505897 - DNA, 25 bp, Homo sapien
acagaagtggtgtgagagggctcag

SEQ ID NO: 4505898 - DNA, 25 bp, Homo sapien
cagaagtggtgtgagagggctcaga

SEQ ID NO: 4505899 - DNA, 25 bp, Homo sapien
tcctgaggtctgcattcgaattcgt

SEQ ID NO: 4505900 - DNA, 25 bp, Homo sapien
ctctgaaaggtacactaagtgaccg

SEQ ID NO: 4505901 - DNA, 25 bp, Homo sapien
cttggaaacaaggtcagtggttact

SEQ ID NO: 4505902 - DNA, 25 bp, Homo sapien
catattctttgggtcacggatgcct

SEQ ID NO: 4505903 - DNA, 25 bp, Homo sapien
tgtggaggcaatgcatccaggctgc

SEQ ID NO: 4505904 - DNA, 25 bp, Homo sapien
aaggggctccagtcaagcatgggac

SEQ ID NO: 4505905 - DNA, 25 bp, Homo sapien
tctgtggaggcaatgcatccaggct

SEQ ID NO: 4505906 - DNA, 25 bp, Homo sapien
ggccaaaaggggctccagtcaagca

SEQ ID NO: 4505907 - DNA, 25 bp, Homo sapien
tacaccagagcctggtaggccttgg

SEQ ID NO: 4505908 - DNA, 25 bp, Homo sapien
gtacaccagagcctggtaggccttg

SEQ ID NO: 4505909 - DNA, 25 bp, Homo sapien
tcattctttcctgtaattctgagtt

SEQ ID NO: 4505910 - DNA, 25 bp, Homo sapien
agttcagtttccaagtgtaactcat

SEQ ID NO: 4505911 - DNA, 25 bp, Homo sapien
taatctgaaagttcagtttccaagt

SEQ ID NO: 4505912 - DNA, 25 bp, Homo sapien
aattctgagttctttcataatctga

SEQ ID NO: 4505913 - DNA, 25 bp, Homo sapien
cactgcaggatctcggagtaaaatt

SEQ ID NO: 4505914 - DNA, 25 bp, Homo sapien
gcaggatctcggagtaaaattgcaa

SEQ ID NO: 4505915 - DNA, 25 bp, Homo sapien
gaattagagtcaggtgaaggtaata

SEQ ID NO: 4505916 - DNA, 25 bp, Homo sapien
aatgaggaacgcaatagatagggtg

SEQ ID NO: 4505917 - DNA, 25 bp, Homo sapien
gaaaggtaccatcaagtcatcaagc

SEQ ID NO: 4505918 - DNA, 25 bp, Homo sapien
aaggtaccatcaagtcatcaagcat

SEQ ID NO: 4505919 - DNA, 25 bp, Homo sapien
aatgaaaggtaccatcaagtcatca

SEQ ID NO: 4505920 - DNA, 25 bp, Homo sapien
ctgaaatgaaaggtaccatcaagtc

SEQ ID NO: 4505921 - DNA, 25 bp, Homo sapien
tctggaagacttgcttttaacttag

SEQ ID NO: 4505922 - DNA, 25 bp, Homo sapien
aactctggaagacttgcttttaact

SEQ ID NO: 4505923 - DNA, 25 bp, Homo sapien
aattgctttcgggtctcttctccat

SEQ ID NO: 4505924 - DNA, 25 bp, Homo sapien
taacttagtaactacaggagcagac

SEQ ID NO: 4505925 - DNA, 25 bp, Homo sapien
atgagtacattgcgaacccaatcaa

SEQ ID NO: 4505926 - DNA, 25 bp, Homo sapien
cttgaatgagtacattgcgaaccca

SEQ ID NO: 4505927 - DNA, 25 bp, Homo sapien
tgaatgagtacattgcgaacccaat

SEQ ID NO: 4505928 - DNA, 25 bp, Homo sapien
gaatgagtacattgcgaacccaatc

SEQ ID NO: 4505929 - DNA, 25 bp, Homo sapien
ccaaaacagacatagcctctctcac

SEQ ID NO: 4505930 - DNA, 25 bp, Homo sapien
gccaaaacagacatagcctctctca

SEQ ID NO: 4505931 - DNA, 25 bp, Homo sapien
tagccaaaacagacatagcctctct

SEQ ID NO: 4505932 - DNA, 25 bp, Homo sapien
ttagccaaaacagacatagcctctc

SEQ ID NO: 4505933 - DNA, 25 bp, Homo sapien
ctggaaatcccagtgcatagccacg

SEQ ID NO: 4505934 - DNA, 25 bp, Homo sapien
tggaaatcccagtgcatagccacgg

SEQ ID NO: 4505935 - DNA, 25 bp, Homo sapien
ggaaatcccagtgcatagccacggt

SEQ ID NO: 4505936 - DNA, 25 bp, Homo sapien
gcttgcagtctgcaggcaaactcct

SEQ ID NO: 4505937 - DNA, 25 bp, Homo sapien
gatgaaataattacagggatctata

SEQ ID NO: 4505938 - DNA, 25 bp, Homo sapien
taagttcggcctgcaagaagcttgc

SEQ ID NO: 4505939 - DNA, 25 bp, Homo sapien
gcttggtgccaaggttatgaagaat

SEQ ID NO: 4505940 - DNA, 25 bp, Homo sapien
cctgtactactactccacctttgtg

SEQ ID NO: 4505941 - DNA, 25 bp, Homo sapien
tgtactactactccacctttgtgtg

SEQ ID NO: 4505942 - DNA, 25 bp, Homo sapien
cctccttcctgtactactactccac

SEQ ID NO: 4505943 - DNA, 25 bp, Homo sapien
ttcctgtactactactccacctttg

SEQ ID NO: 4505944 - DNA, 25 bp, Homo sapien
cactcacttcaacgggtaggaaatt

SEQ ID NO: 4505945 - DNA, 25 bp, Homo sapien
tctatggttacccatatgatcaaaa

SEQ ID NO: 4505946 - DNA, 25 bp, Homo sapien
cagacactcacttcaacgggtagga

SEQ ID NO: 4505947 - DNA, 25 bp, Homo sapien
tatttctttggtgagtccgatgatc

SEQ ID NO: 4505948 - DNA, 25 bp, Homo sapien
tcattttgtacaaaggacctttcag

SEQ ID NO: 4505949 - DNA, 25 bp, Homo sapien
ttacattgcttgaccaaagtgtcta

SEQ ID NO: 4505950 - DNA, 25 bp, Homo sapien
ggacagacccttgtttgatgaatag

SEQ ID NO: 4505951 - DNA, 25 bp, Homo sapien
accaaagtgtctaacctggacagac

SEQ ID NO: 4505952 - DNA, 25 bp, Homo sapien
gcagctggcagatctcaggtcctcg

SEQ ID NO: 4505953 - DNA, 25 bp, Homo sapien
gaattgcagttatctcaaggctagg

SEQ ID NO: 4505954 - DNA, 25 bp, Homo sapien
tgggtgtcctgcagagcaatgatca

SEQ ID NO: 4505955 - DNA, 25 bp, Homo sapien
agaaatccatttgtgactcagctga

SEQ ID NO: 4505956 - DNA, 25 bp, Homo sapien
ttgtaggtattagctctgagttccc

SEQ ID NO: 4505957 - DNA, 25 bp, Homo sapien
ctttgtgttaatcatggcagtttga

SEQ ID NO: 4505958 - DNA, 25 bp, Homo sapien
tcattgcttacctgtagtgattatt

SEQ ID NO: 4505959 - DNA, 25 bp, Homo sapien
tcagcattcaccattcatatcattg

SEQ ID NO: 4505960 - DNA, 25 bp, Homo sapien
aacacaagtatagctgaggtccctt

SEQ ID NO: 4505961 - DNA, 25 bp, Homo sapien
caagtatagctgaggtcccttgagt

SEQ ID NO: 4505962 - DNA, 25 bp, Homo sapien
cacaagtatagctgaggtcccttga

SEQ ID NO: 4505963 - DNA, 25 bp, Homo sapien
tatagctgaggtcccttgagtgctt

SEQ ID NO: 4505964 - DNA, 25 bp, Homo sapien
tgtcgagttcgattgtccaagtgga

SEQ ID NO: 4505965 - DNA, 25 bp, Homo sapien
ttagaacagagtggagactcacccg

SEQ ID NO: 4505966 - DNA, 25 bp, Homo sapien
gactcacccgttctactggcaactg

SEQ ID NO: 4505967 - DNA, 25 bp, Homo sapien
gggacatgaaccagcagtaaagcag

SEQ ID NO: 4505968 - DNA, 25 bp, Homo sapien
gaccagccaatcaatggctgtttca

SEQ ID NO: 4505969 - DNA, 25 bp, Homo sapien
tttttcctgagccatatggttctct

SEQ ID NO: 4505970 - DNA, 25 bp, Homo sapien
gggtgctctgtagaccagccaatca

SEQ ID NO: 4505971 - DNA, 25 bp, Homo sapien
ctttagattgccaaacgggtgctct

SEQ ID NO: 4505972 - DNA, 25 bp, Homo sapien
aagtctctcaggtgtatcttctcca

SEQ ID NO: 4505973 - DNA, 25 bp, Homo sapien
tcatgtaggcttctaattccctggg

SEQ ID NO: 4505974 - DNA, 25 bp, Homo sapien
taagctactccactgccaaaagtcc

SEQ ID NO: 4505975 - DNA, 25 bp, Homo sapien
tttcaacacaggctactgcactgcc

SEQ ID NO: 4505976 - DNA, 25 bp, Homo sapien
ttacaatagacatttccagtttcac

SEQ ID NO: 4505977 - DNA, 25 bp, Homo sapien
taatttacaatagacatttccagtt

SEQ ID NO: 4505978 - DNA, 25 bp, Homo sapien
atttacaatagacatttccagtttc

SEQ ID NO: 4505979 - DNA, 25 bp, Homo sapien
ttaatttacaatagacatttccagt

SEQ ID NO: 4505980 - DNA, 25 bp, Homo sapien
gggcctgccgagcaagcgtctttat

SEQ ID NO: 4505981 - DNA, 25 bp, Homo sapien
gactacaaacccgtgaaccttcagc

SEQ ID NO: 4505982 - DNA, 25 bp, Homo sapien
tttttctttattgttccagactaca

SEQ ID NO: 4505983 - DNA, 25 bp, Homo sapien
ctcagcatggctaataacagctggg

SEQ ID NO: 4505984 - DNA, 25 bp, Homo sapien
gttgaaaccagggataaactctcca

SEQ ID NO: 4505985 - DNA, 25 bp, Homo sapien
tggaatctcacagatgcagggctcc

SEQ ID NO: 4505986 - DNA, 25 bp, Homo sapien
cagggctcctgggataaacaaagac

SEQ ID NO: 4505987 - DNA, 25 bp, Homo sapien
gcttgcttccactcttttcattagg

SEQ ID NO: 4505988 - DNA, 25 bp, Homo sapien
tgtaccacccccttaggcataaatg

SEQ ID NO: 4505989 - DNA, 25 bp, Homo sapien
gggttgggcctcaatagcataatat

SEQ ID NO: 4505990 - DNA, 25 bp, Homo sapien
gagttggatctggattgagtgccat

SEQ ID NO: 4505991 - DNA, 25 bp, Homo sapien
tctgttgctgtagtacaaaatgggt

SEQ ID NO: 4505992 - DNA, 25 bp, Homo sapien
gctatcaggacttctatccacaaat

SEQ ID NO: 4505993 - DNA, 25 bp, Homo sapien
agcagcaagggatcacacagggtgc

SEQ ID NO: 4505994 - DNA, 25 bp, Homo sapien
acccaaactccaaactgctatcagg

SEQ ID NO: 4505995 - DNA, 25 bp, Homo sapien
tcagcagcaagggatcacacagggt

SEQ ID NO: 4505996 - DNA, 25 bp, Homo sapien
tcaatgcctccgtttcactggtgtc

SEQ ID NO: 4505997 - DNA, 25 bp, Homo sapien
cactggtgtctcctttgtgtctgag

SEQ ID NO: 4505998 - DNA, 25 bp, Homo sapien
taaaattcccacacatgtaggccat

SEQ ID NO: 4505999 - DNA, 25 bp, Homo sapien
gagactctcacactgggttctccct

SEQ ID NO: 4506000 - DNA, 25 bp, Homo sapien
cagcatctcagtgcatgcatgaaca

SEQ ID NO: 4506001 - DNA, 25 bp, Homo sapien
ttcaggatgcaatcttgaaactggg

SEQ ID NO: 4506002 - DNA, 25 bp, Homo sapien
acattcaggatgcaatcttgaaact

SEQ ID NO: 4506003 - DNA, 25 bp, Homo sapien
atagaaaatctacacacagcatctc

SEQ ID NO: 4506004 - DNA, 25 bp, Homo sapien
cacactgtggttatctttagctgaa

SEQ ID NO: 4506005 - DNA, 25 bp, Homo sapien
ctttagctgaagttttgtaacgctc

SEQ ID NO: 4506006 - DNA, 25 bp, Homo sapien
ccagttcccaccagagctgcacact

SEQ ID NO: 4506007 - DNA, 25 bp, Homo sapien
gttcccaccagagctgcacactgtg

SEQ ID NO: 4506008 - DNA, 25 bp, Homo sapien
tctggggcacgaagattgattttct

SEQ ID NO: 4506009 - DNA, 25 bp, Homo sapien
aagactccaatgcctcagtgacttt

SEQ ID NO: 4506010 - DNA, 25 bp, Homo sapien
tgaagcccgaagccatttcctcaga

SEQ ID NO: 4506011 - DNA, 25 bp, Homo sapien
gaagcccgaagccatttcctcagag

SEQ ID NO: 4506012 - DNA, 25 bp, Homo sapien
aagcccgaagccatttcctcagagt

SEQ ID NO: 4506013 - DNA, 25 bp, Homo sapien
ttgaagcccgaagccatttcctcag

SEQ ID NO: 4506014 - DNA, 25 bp, Homo sapien
catgccagaacctttaaccctctta

SEQ ID NO: 4506015 - DNA, 25 bp, Homo sapien
tagaggggtcatcgcacttgcagga

SEQ ID NO: 4506016 - DNA, 25 bp, Homo sapien
cacccattagtgatcctgcctttaa

SEQ ID NO: 4506017 - DNA, 25 bp, Homo sapien
gaccacagacccaagcaggtgtttg

SEQ ID NO: 4506018 - DNA, 25 bp, Homo sapien
tcaagtccacagtctttgaccacag

SEQ ID NO: 4506019 - DNA, 25 bp, Homo sapien
tctgcccttgactctggggtagtaa

SEQ ID NO: 4506020 - DNA, 25 bp, Homo sapien
cccagtcccggctctaatggcttga

SEQ ID NO: 4506021 - DNA, 25 bp, Homo sapien
tttctacgcgtcagctggtccctct

SEQ ID NO: 4506022 - DNA, 25 bp, Homo sapien
tgagtctctgctttctacgcgtcag

SEQ ID NO: 4506023 - DNA, 25 bp, Homo sapien
ggcttgggttgtagaatgcatgaaa

SEQ ID NO: 4506024 - DNA, 25 bp, Homo sapien
gaagaaaagcaccttattttgctgc

SEQ ID NO: 4506025 - DNA, 25 bp, Homo sapien
tgtgcatgggaatagaaaatgggct

SEQ ID NO: 4506026 - DNA, 25 bp, Homo sapien
tgatgataaccaccctcgacacagt

SEQ ID NO: 4506027 - DNA, 25 bp, Homo sapien
gtgactctcccaactgcatgcatcg

SEQ ID NO: 4506028 - DNA, 25 bp, Homo sapien
ggagttcaggatgcctcttacccct

SEQ ID NO: 4506029 - DNA, 25 bp, Homo sapien
ggaaccgtcctttggaatcatccca

SEQ ID NO: 4506030 - DNA, 25 bp, Homo sapien
tcccaataggtggagcacgtttctc

SEQ ID NO: 4506031 - DNA, 25 bp, Homo sapien
ccactggtgccactgtcaacatcta

SEQ ID NO: 4506032 - DNA, 25 bp, Homo sapien
cactggtgccactgtcaacatctac

SEQ ID NO: 4506033 - DNA, 25 bp, Homo sapien
accactggtgccactgtcaacatct

SEQ ID NO: 4506034 - DNA, 25 bp, Homo sapien
caccactggtgccactgtcaacatc

SEQ ID NO: 4506035 - DNA, 25 bp, Homo sapien
gctgtcataatgagaggccctgaac

SEQ ID NO: 4506036 - DNA, 25 bp, Homo sapien
tagtttttccatgagggtattgctg

SEQ ID NO: 4506037 - DNA, 25 bp, Homo sapien
tccttcggaagagctgtgaccccct

SEQ ID NO: 4506038 - DNA, 25 bp, Homo sapien
tccctggcagtttggtctccctgtc

SEQ ID NO: 4506039 - DNA, 25 bp, Homo sapien
ctggcagtcgtatggtacactctga

SEQ ID NO: 4506040 - DNA, 25 bp, Homo sapien
gcagtcgtatggtacactctgatag

SEQ ID NO: 4506041 - DNA, 25 bp, Homo sapien
tcgctggcagtcgtatggtacactc

SEQ ID NO: 4506042 - DNA, 25 bp, Homo sapien
cgtcgctggcagtcgtatggtacac

SEQ ID NO: 4506043 - DNA, 25 bp, Homo sapien
cacaagtggggagcgttagaatagc

SEQ ID NO: 4506044 - DNA, 25 bp, Homo sapien
ctacacagcacaagtggggagcgtt

SEQ ID NO: 4506045 - DNA, 25 bp, Homo sapien
cacagcacaagtggggagcgttaga

SEQ ID NO: 4506046 - DNA, 25 bp, Homo sapien
agcacaagtggggagcgttagaata

SEQ ID NO: 4506047 - DNA, 25 bp, Homo sapien
tggggcagtatcttgatttctctaa

SEQ ID NO: 4506048 - DNA, 25 bp, Homo sapien
ttggggcagtatcttgatttctcta

SEQ ID NO: 4506049 - DNA, 25 bp, Homo sapien
acacctgcggccacgacactggata

SEQ ID NO: 4506050 - DNA, 25 bp, Homo sapien
attctccgcagccagatcacacctg

SEQ ID NO: 4506051 - DNA, 25 bp, Homo sapien
cacgacactggatactggcgatact

SEQ ID NO: 4506052 - DNA, 25 bp, Homo sapien
tactggcgatactgtgcgggctttt

SEQ ID NO: 4506053 - DNA, 25 bp, Homo sapien
catattcccaggagaagtctgagtt

SEQ ID NO: 4506054 - DNA, 25 bp, Homo sapien
attcccaggagaagtctgagttgcc

SEQ ID NO: 4506055 - DNA, 25 bp, Homo sapien
tattcccaggagaagtctgagttgc

SEQ ID NO: 4506056 - DNA, 25 bp, Homo sapien
tcccaggagaagtctgagttgcctt

SEQ ID NO: 4506057 - DNA, 25 bp, Homo sapien
ctttttcagtggcattttgatcgag

SEQ ID NO: 4506058 - DNA, 25 bp, Homo sapien
gtagactcttggtatgcacactcaa

SEQ ID NO: 4506059 - DNA, 25 bp, Homo sapien
gagacaaggttgtttcatatgaagc

SEQ ID NO: 4506060 - DNA, 25 bp, Homo sapien
gggatctaggatacaatctataacc

SEQ ID NO: 4506061 - DNA, 25 bp, Homo sapien
gaggtgaggaaagctagctgtccac

SEQ ID NO: 4506062 - DNA, 25 bp, Homo sapien
tgctaggtattcctcaattattcct

SEQ ID NO: 4506063 - DNA, 25 bp, Homo sapien
gctaggtattcctcaattattcctt

SEQ ID NO: 4506064 - DNA, 25 bp, Homo sapien
ctaggtattcctcaattattccttc

SEQ ID NO: 4506065 - DNA, 25 bp, Homo sapien
ttcatgcagtaaaatggagcaatgg

SEQ ID NO: 4506066 - DNA, 25 bp, Homo sapien
aatgggaggataccctaatttctgt

SEQ ID NO: 4506067 - DNA, 25 bp, Homo sapien
ggagcaatgggaggataccctaatt

SEQ ID NO: 4506068 - DNA, 25 bp, Homo sapien
tgctccatacagctcacaaccttgc

SEQ ID NO: 4506069 - DNA, 25 bp, Homo sapien
gcatcccataaaccaagagaccatt

SEQ ID NO: 4506070 - DNA, 25 bp, Homo sapien
tctcatcatggtgggcaaatccttc

SEQ ID NO: 4506071 - DNA, 25 bp, Homo sapien
cattggatttgaggtaacggacagc

SEQ ID NO: 4506072 - DNA, 25 bp, Homo sapien
tggctcactcagcacacagaaactt

SEQ ID NO: 4506073 - DNA, 25 bp, Homo sapien
tggccaatttcgagttgaaaggatg

SEQ ID NO: 4506074 - DNA, 25 bp, Homo sapien
caatttcgagttgaaaggatggtac

SEQ ID NO: 4506075 - DNA, 25 bp, Homo sapien
tcgatttggccaatttcgagttgaa

SEQ ID NO: 4506076 - DNA, 25 bp, Homo sapien
ctccacagctcgatttggccaattt

SEQ ID NO: 4506077 - DNA, 25 bp, Homo sapien
cggatgaagggttcgtggcgatgga

SEQ ID NO: 4506078 - DNA, 25 bp, Homo sapien
tcgtggcgatggattgcgtctcttg

SEQ ID NO: 4506079 - DNA, 25 bp, Homo sapien
tccacaagtcttggtattccagcac

SEQ ID NO: 4506080 - DNA, 25 bp, Homo sapien
tattccagcacgtgaatggcttgtg

SEQ ID NO: 4506081 - DNA, 25 bp, Homo sapien
tttcgactcagggacattggtgagg

SEQ ID NO: 4506082 - DNA, 25 bp, Homo sapien
caccacacttggagctcgactggag

SEQ ID NO: 4506083 - DNA, 25 bp, Homo sapien
tatttcgactcagggacattggtga

SEQ ID NO: 4506084 - DNA, 25 bp, Homo sapien
ctggagtcgccacggggctccgtct

SEQ ID NO: 4506085 - DNA, 25 bp, Homo sapien
ccaaccatcgagctcattctaggaa

SEQ ID NO: 4506086 - DNA, 25 bp, Homo sapien
catcgagctcattctaggaagtatg

SEQ ID NO: 4506087 - DNA, 25 bp, Homo sapien
accatcgagctcattctaggaagta

SEQ ID NO: 4506088 - DNA, 25 bp, Homo sapien
ctttccccaaccatcgagctcattc

SEQ ID NO: 4506089 - DNA, 25 bp, Homo sapien
ccgcgtgaaagcctagagatatctt

SEQ ID NO: 4506090 - DNA, 25 bp, Homo sapien
cagaggtagcaacattgtggccacg

SEQ ID NO: 4506091 - DNA, 25 bp, Homo sapien
gagatatcttggtcagcagcttcgc

SEQ ID NO: 4506092 - DNA, 25 bp, Homo sapien
ccacggttgtgtagaatgcattgca

SEQ ID NO: 4506093 - DNA, 25 bp, Homo sapien
attttgccgggcacgatgccttgat

SEQ ID NO: 4506094 - DNA, 25 bp, Homo sapien
tttgccgggcacgatgccttgatat

SEQ ID NO: 4506095 - DNA, 25 bp, Homo sapien
gatctgtcccttgaattttgccggg

SEQ ID NO: 4506096 - DNA, 25 bp, Homo sapien
gctggtggatctgtcccttgaattt

SEQ ID NO: 4506097 - DNA, 25 bp, Homo sapien
ctgaaggtaataaagagaagaaaga

SEQ ID NO: 4506098 - DNA, 25 bp, Homo sapien
agaaagaaaggtgatatgctggggg

SEQ ID NO: 4506099 - DNA, 25 bp, Homo sapien
gaagaaagaaaggtgatatgctggg

SEQ ID NO: 4506100 - DNA, 25 bp, Homo sapien
aagaaaggtgatatgctgggggctc

SEQ ID NO: 4506101 - DNA, 25 bp, Homo sapien
tgtagatgaatcatgggcctgaccc

SEQ ID NO: 4506102 - DNA, 25 bp, Homo sapien
ccagctgtagatgaatcatgggcct

SEQ ID NO: 4506103 - DNA, 25 bp, Homo sapien
tcaccccagctgtagatgaatcatg

SEQ ID NO: 4506104 - DNA, 25 bp, Homo sapien
cttcaccccagctgtagatgaatca

SEQ ID NO: 4506105 - DNA, 25 bp, Homo sapien
aactcctagtagtgttgagaactca

SEQ ID NO: 4506106 - DNA, 25 bp, Homo sapien
gctttatcttatattgaactcctag

SEQ ID NO: 4506107 - DNA, 25 bp, Homo sapien
tgagaactcaaattcaattgagaat

SEQ ID NO: 4506108 - DNA, 25 bp, Homo sapien
gagaatgtcactgttgagaagggaa

SEQ ID NO: 4506109 - DNA, 25 bp, Homo sapien
ccagcccggaagctgcttgctgatg

SEQ ID NO: 4506110 - DNA, 25 bp, Homo sapien
tgccttctaaccctgccgtagccat

SEQ ID NO: 4506111 - DNA, 25 bp, Homo sapien
tgcttgctgatgtccaactccaccc

SEQ ID NO: 4506112 - DNA, 25 bp, Homo sapien
cctgccgtagccatcccagtgtcct

SEQ ID NO: 4506113 - DNA, 25 bp, Homo sapien
gaactccatgtagaatgagcttcga

SEQ ID NO: 4506114 - DNA, 25 bp, Homo sapien
accatgatggtcagaggcactcgga

SEQ ID NO: 4506115 - DNA, 25 bp, Homo sapien
cagaggcactcggaaacaggtcact

SEQ ID NO: 4506116 - DNA, 25 bp, Homo sapien
gaaatgaaagaccatgatggtcaga

SEQ ID NO: 4506117 - DNA, 25 bp, Homo sapien
acagtcatgtctccattcacacatg

SEQ ID NO: 4506118 - DNA, 25 bp, Homo sapien
cattccaccactctccacagtcatg

SEQ ID NO: 4506119 - DNA, 25 bp, Homo sapien
tacacggcaccgaaacaaacaatgc

SEQ ID NO: 4506120 - DNA, 25 bp, Homo sapien
ctcatgacttgcctgagtacacggc

SEQ ID NO: 4506121 - DNA, 25 bp, Homo sapien
cccagatgatggtcaatggagtctt

SEQ ID NO: 4506122 - DNA, 25 bp, Homo sapien
aaggtggtgcttccttgccaccaga

SEQ ID NO: 4506123 - DNA, 25 bp, Homo sapien
cactggagtatcaccaaggtggtgc

SEQ ID NO: 4506124 - DNA, 25 bp, Homo sapien
tccccatttgaagggcagaggccca

SEQ ID NO: 4506125 - DNA, 25 bp, Homo sapien
gctcccaaatgctggagacctcagg

SEQ ID NO: 4506126 - DNA, 25 bp, Homo sapien
aatgctggagacctcaggtttgaag

SEQ ID NO: 4506127 - DNA, 25 bp, Homo sapien
gatacagcaggaacggtctccaaga

SEQ ID NO: 4506128 - DNA, 25 bp, Homo sapien
gcaggaacggtctccaagacagcca

SEQ ID NO: 4506129 - DNA, 25 bp, Homo sapien
gaccagtcagggttggctgggtgga

SEQ ID NO: 4506130 - DNA, 25 bp, Homo sapien
gctgggtggacctgggatgtgcaag

SEQ ID NO: 4506131 - DNA, 25 bp, Homo sapien
gtattttctcgttccagtcagaggc

SEQ ID NO: 4506132 - DNA, 25 bp, Homo sapien
ggtattttctcgttccagtcagagg

SEQ ID NO: 4506133 - DNA, 25 bp, Homo sapien
gggggcacctcatggttcccaactc

SEQ ID NO: 4506134 - DNA, 25 bp, Homo sapien
caggggggcacctcatggttcccaa

SEQ ID NO: 4506135 - DNA, 25 bp, Homo sapien
tgcaggggggcacctcatggttccc

SEQ ID NO: 4506136 - DNA, 25 bp, Homo sapien
gggcacctcatggttcccaactctc

SEQ ID NO: 4506137 - DNA, 25 bp, Homo sapien
cctgcactcaggaactacatgggag

SEQ ID NO: 4506138 - DNA, 25 bp, Homo sapien
cttttagacgccccttcttcaggag

SEQ ID NO: 4506139 - DNA, 25 bp, Homo sapien
ttcaggagagtcctgcactcaggaa

SEQ ID NO: 4506140 - DNA, 25 bp, Homo sapien
ctcaggaactacatgggagaagtga

SEQ ID NO: 4506141 - DNA, 25 bp, Homo sapien
gtctgaacaagatgcatgggctggc

SEQ ID NO: 4506142 - DNA, 25 bp, Homo sapien
tggatccctgggcttagcggagatg

SEQ ID NO: 4506143 - DNA, 25 bp, Homo sapien
ggagcagcctggtctgaacaagatg

SEQ ID NO: 4506144 - DNA, 25 bp, Homo sapien
tgggcttagcggagatggagcagcc

SEQ ID NO: 4506145 - DNA, 25 bp, Homo sapien
caggctgccactaaagacaattatc

SEQ ID NO: 4506146 - DNA, 25 bp, Homo sapien
gcccaggctgccactaaagacaatt

SEQ ID NO: 4506147 - DNA, 25 bp, Homo sapien
aagacaattatcccagaaagacaca

SEQ ID NO: 4506148 - DNA, 25 bp, Homo sapien
ggctgccactaaagacaattatccc

SEQ ID NO: 4506149 - DNA, 25 bp, Homo sapien
aggagttgtcctgggcccctgacat

SEQ ID NO: 4506150 - DNA, 25 bp, Homo sapien
ttcctggtagagacaggagttgtcc

SEQ ID NO: 4506151 - DNA, 25 bp, Homo sapien
ctaggacaaggcagcctctgaaaag

SEQ ID NO: 4506152 - DNA, 25 bp, Homo sapien
agagggggcaatttcctggtagaga

SEQ ID NO: 4506153 - DNA, 25 bp, Homo sapien
caaagaaatggtagcctaataggag

SEQ ID NO: 4506154 - DNA, 25 bp, Homo sapien
tagcctaataggagtcagacctaca

SEQ ID NO: 4506155 - DNA, 25 bp, Homo sapien
taggagtcagacctacatctggagt

SEQ ID NO: 4506156 - DNA, 25 bp, Homo sapien
ctacatctggagttgaaaactgcca

SEQ ID NO: 4506157 - DNA, 25 bp, Homo sapien
cccacattgagtgagagcctcatag

SEQ ID NO: 4506158 - DNA, 25 bp, Homo sapien
gaaaagctcatctccggcttgagtg

SEQ ID NO: 4506159 - DNA, 25 bp, Homo sapien
catagagttggattttgggaaaagc

SEQ ID NO: 4506160 - DNA, 25 bp, Homo sapien
tcaggatgtcccctcagcatcagga

SEQ ID NO: 4506161 - DNA, 25 bp, Homo sapien
agccgcagggacatgtcatggcttc

SEQ ID NO: 4506162 - DNA, 25 bp, Homo sapien
gccgcagggacatgtcatggcttct

SEQ ID NO: 4506163 - DNA, 25 bp, Homo sapien
ggcttctgagaaatgtcgcgacgag

SEQ ID NO: 4506164 - DNA, 25 bp, Homo sapien
ttctgagaaatgtcgcgacgaggtt

SEQ ID NO: 4506165 - DNA, 25 bp, Homo sapien
aaatagagacaaaggacaggagcct

SEQ ID NO: 4506166 - DNA, 25 bp, Homo sapien
ttggcacaaacccataacccatgct

SEQ ID NO: 4506167 - DNA, 25 bp, Homo sapien
tgagtgattgtccaaggcccatcca

SEQ ID NO: 4506168 - DNA, 25 bp, Homo sapien
cccatgctgaccgagaagctgcaga

SEQ ID NO: 4506169 - DNA, 25 bp, Homo sapien
ggttatctggagaacacatttgggt

SEQ ID NO: 4506170 - DNA, 25 bp, Homo sapien
cacagaggaaaggttatctggagaa

SEQ ID NO: 4506171 - DNA, 25 bp, Homo sapien
tctcttcgtatacacagaggaaagg

SEQ ID NO: 4506172 - DNA, 25 bp, Homo sapien
taaacgttctctcttcgtatacaca

SEQ ID NO: 4506173 - DNA, 25 bp, Homo sapien
ggatccttccgtgagaacagctgtt

SEQ ID NO: 4506174 - DNA, 25 bp, Homo sapien
aacaggacacttctcctgtttatct

SEQ ID NO: 4506175 - DNA, 25 bp, Homo sapien
agatggcacccttcgcctttgaacc

SEQ ID NO: 4506176 - DNA, 25 bp, Homo sapien
ggaagcagatggcacccttcgcctt

SEQ ID NO: 4506177 - DNA, 25 bp, Homo sapien
tgatatagagccagctgattgccct

SEQ ID NO: 4506178 - DNA, 25 bp, Homo sapien
gattgccctttccaggtgagttcca

SEQ ID NO: 4506179 - DNA, 25 bp, Homo sapien
ggcatgtatgccaagctccgagcta

SEQ ID NO: 4506180 - DNA, 25 bp, Homo sapien
tctagccttggccttgaatagggaa

SEQ ID NO: 4506181 - DNA, 25 bp, Homo sapien
aatctgtaactagaaacctggccca

SEQ ID NO: 4506182 - DNA, 25 bp, Homo sapien
atctgtaactagaaacctggcccat

SEQ ID NO: 4506183 - DNA, 25 bp, Homo sapien
accttaaatattgggcaacctggtg

SEQ ID NO: 4506184 - DNA, 25 bp, Homo sapien
ccagacataacgagggcagcaaaga

SEQ ID NO: 4506185 - DNA, 25 bp, Homo sapien
tctttccaaaggtgggacactccac

SEQ ID NO: 4506186 - DNA, 25 bp, Homo sapien
tttttaagcaagcatgggaactgac

SEQ ID NO: 4506187 - DNA, 25 bp, Homo sapien
tcttaaggtttaatgcattgtcaag

SEQ ID NO: 4506188 - DNA, 25 bp, Homo sapien
ttaatgcattgtcaagataggacat

SEQ ID NO: 4506189 - DNA, 25 bp, Homo sapien
ttttcttaaggtttaatgcattgtc

SEQ ID NO: 4506190 - DNA, 25 bp, Homo sapien
aaggtttaatgcattgtcaagatag

SEQ ID NO: 4506191 - DNA, 25 bp, Homo sapien
tcttttcaccagaggtagtcctgtg

SEQ ID NO: 4506192 - DNA, 25 bp, Homo sapien
ccaacagcgagaactaccgttttct

SEQ ID NO: 4506193 - DNA, 25 bp, Homo sapien
ttcagcctcgaagtgaccctggtca

SEQ ID NO: 4506194 - DNA, 25 bp, Homo sapien
cgccagagggtcagcgcagctaaat

SEQ ID NO: 4506195 - DNA, 25 bp, Homo sapien
aagggatagggatgaggtctctgcc

SEQ ID NO: 4506196 - DNA, 25 bp, Homo sapien
aatgagatgaaaaagggatagggat

SEQ ID NO: 4506197 - DNA, 25 bp, Homo sapien
ggatagggatgaggtctctgccttc

SEQ ID NO: 4506198 - DNA, 25 bp, Homo sapien
tagggatgaggtctctgccttcgag

SEQ ID NO: 4506199 - DNA, 25 bp, Homo sapien
tgggctcctcgctccttggtatcaa

SEQ ID NO: 4506200 - DNA, 25 bp, Homo sapien
tagcactactggaatctggcacgat

SEQ ID NO: 4506201 - DNA, 25 bp, Homo sapien
aggacactcctgattgacaagcaag

SEQ ID NO: 4506202 - DNA, 25 bp, Homo sapien
gaggactggcctctatatggttcaa

SEQ ID NO: 4506203 - DNA, 25 bp, Homo sapien
atggaaggacggataccaagaaggg

SEQ ID NO: 4506204 - DNA, 25 bp, Homo sapien
cagctatcagaaaatgagcatgcag

SEQ ID NO: 4506205 - DNA, 25 bp, Homo sapien
aagagctgattagcaaaataagcaa

SEQ ID NO: 4506206 - DNA, 25 bp, Homo sapien
gcatgcagatatggaaagagctgat

SEQ ID NO: 4506207 - DNA, 25 bp, Homo sapien
cgagcagcggcaatgaaactttgcc

SEQ ID NO: 4506208 - DNA, 25 bp, Homo sapien
aataagtacttgtacgtccaatgac

SEQ ID NO: 4506209 - DNA, 25 bp, Homo sapien
aaataagtacttgtacgtccaatga

SEQ ID NO: 4506210 - DNA, 25 bp, Homo sapien
taaataagtacttgtacgtccaatg

SEQ ID NO: 4506211 - DNA, 25 bp, Homo sapien
gagctgtttctgcaccgtgaggctc

SEQ ID NO: 4506212 - DNA, 25 bp, Homo sapien
aggctcagtcagcacaattgtattt

SEQ ID NO: 4506213 - DNA, 25 bp, Homo sapien
cagagctgtttctgcaccgtgaggc

SEQ ID NO: 4506214 - DNA, 25 bp, Homo sapien
gaggctcagtcagcacaattgtatt

SEQ ID NO: 4506215 - DNA, 25 bp, Homo sapien
ccaaaacgtggtgaatataagaaca

SEQ ID NO: 4506216 - DNA, 25 bp, Homo sapien
caaatttgttgcgggtaatcttcct

SEQ ID NO: 4506217 - DNA, 25 bp, Homo sapien
tataagaacaaatttgttgcgggta

SEQ ID NO: 4506218 - DNA, 25 bp, Homo sapien
ccttgaaccaaaacgtggtgaatat

SEQ ID NO: 4506219 - DNA, 25 bp, Homo sapien
cgtcctcttcatccgaatgtacagc

SEQ ID NO: 4506220 - DNA, 25 bp, Homo sapien
tgcagctaatcttatatccatgact

SEQ ID NO: 4506221 - DNA, 25 bp, Homo sapien
ggtcgtcctcttcatccgaatgtac

SEQ ID NO: 4506222 - DNA, 25 bp, Homo sapien
gggagtgcagctaatcttatatcca

SEQ ID NO: 4506223 - DNA, 25 bp, Homo sapien
gctgtgggtccccatagccaatcca

SEQ ID NO: 4506224 - DNA, 25 bp, Homo sapien
ctgtgggtccccatagccaatccat

SEQ ID NO: 4506225 - DNA, 25 bp, Homo sapien
tgctgtgggtccccatagccaatcc

SEQ ID NO: 4506226 - DNA, 25 bp, Homo sapien
cacaagttagggtggccagattgaa

SEQ ID NO: 4506227 - DNA, 25 bp, Homo sapien
caatgggagctgtggtaaccatctc

SEQ ID NO: 4506228 - DNA, 25 bp, Homo sapien
tgctgtccaatctaagaactgctct

SEQ ID NO: 4506229 - DNA, 25 bp, Homo sapien
tatggaacacctcctgcgcacaata

SEQ ID NO: 4506230 - DNA, 25 bp, Homo sapien
tgttgtacagcctggccctttcaca

SEQ ID NO: 4506231 - DNA, 25 bp, Homo sapien
tcacttctgctactgttgtacagcc

SEQ ID NO: 4506232 - DNA, 25 bp, Homo sapien
tctgctactgttgtacagcctggcc

SEQ ID NO: 4506233 - DNA, 25 bp, Homo sapien
cagttcacttctgctactgttgtac

SEQ ID NO: 4506234 - DNA, 25 bp, Homo sapien
taggacccctaaagtcttcatgcca

SEQ ID NO: 4506235 - DNA, 25 bp, Homo sapien
tcatgccagagatcagtgccggtgg

SEQ ID NO: 4506236 - DNA, 25 bp, Homo sapien
gaggcttcagggcccctaggtctgc

SEQ ID NO: 4506237 - DNA, 25 bp, Homo sapien
ccggtggtggtaggcgaggcttcag

SEQ ID NO: 4506238 - DNA, 25 bp, Homo sapien
aaacccagctgcgagatgggcaggt

SEQ ID NO: 4506239 - DNA, 25 bp, Homo sapien
aaattcggcttctcctaaggtgcgg

SEQ ID NO: 4506240 - DNA, 25 bp, Homo sapien
taaggtgcggtgcaccaggcagctc

SEQ ID NO: 4506241 - DNA, 25 bp, Homo sapien
gtcgccttaattgtctgacagaatg

SEQ ID NO: 4506242 - DNA, 25 bp, Homo sapien
ctttaactctggatgatggtatttg

SEQ ID NO: 4506243 - DNA, 25 bp, Homo sapien
actttaactctggatgatggtattt

SEQ ID NO: 4506244 - DNA, 25 bp, Homo sapien
tttaactctggatgatggtatttga

SEQ ID NO: 4506245 - DNA, 25 bp, Homo sapien
aagaatcagcaaacagactctggac

SEQ ID NO: 4506246 - DNA, 25 bp, Homo sapien
tatgccatcgttggaggagggaaca

SEQ ID NO: 4506247 - DNA, 25 bp, Homo sapien
ctggcacaaggagagggtttatgcc

SEQ ID NO: 4506248 - DNA, 25 bp, Homo sapien
caaagaatcagcaaacagactctgg

SEQ ID NO: 4506249 - DNA, 25 bp, Homo sapien
gactgtgagcttctgacagccgaaa

SEQ ID NO: 4506250 - DNA, 25 bp, Homo sapien
gagcttctgacagccgaaatcaggc

SEQ ID NO: 4506251 - DNA, 25 bp, Homo sapien
ttctgacagccgaaatcaggcacag

SEQ ID NO: 4506252 - DNA, 25 bp, Homo sapien
tgacagccgaaatcaggcacagcag

SEQ ID NO: 4506253 - DNA, 25 bp, Homo sapien
gagtggtccacagtccctcgttgcc

SEQ ID NO: 4506254 - DNA, 25 bp, Homo sapien
acccatcacccctccacatagctca

SEQ ID NO: 4506255 - DNA, 25 bp, Homo sapien
tctcccttgcctgcttattatcatt

SEQ ID NO: 4506256 - DNA, 25 bp, Homo sapien
tgctacccatcacccctccacatag

SEQ ID NO: 4506257 - DNA, 25 bp, Homo sapien
tgtgtctttcatgtaaacaacatct

SEQ ID NO: 4506258 - DNA, 25 bp, Homo sapien
aaacaacatctgcaagtttgcatga

SEQ ID NO: 4506259 - DNA, 25 bp, Homo sapien
taaacaacatctgcaagtttgcatg

SEQ ID NO: 4506260 - DNA, 25 bp, Homo sapien
caacatctgcaagtttgcatgatga

SEQ ID NO: 4506261 - DNA, 25 bp, Homo sapien
tatcaatccactcttgatcagtgta

SEQ ID NO: 4506262 - DNA, 25 bp, Homo sapien
caatccactcttgatcagtgtaaag

SEQ ID NO: 4506263 - DNA, 25 bp, Homo sapien
cttatcaatccactcttgatcagtg

SEQ ID NO: 4506264 - DNA, 25 bp, Homo sapien
ctgcacttatcaatccactcttgat

SEQ ID NO: 4506265 - DNA, 25 bp, Homo sapien
ccgctcaacgggcccaagttgcttt

SEQ ID NO: 4506266 - DNA, 25 bp, Homo sapien
actcccgctcaacgggcccaagttg

SEQ ID NO: 4506267 - DNA, 25 bp, Homo sapien
gctcaacgggcccaagttgctttct

SEQ ID NO: 4506268 - DNA, 25 bp, Homo sapien
caacgggcccaagttgctttctatg

SEQ ID NO: 4506269 - DNA, 25 bp, Homo sapien
cacgacgacaagagggtttgcatgt

SEQ ID NO: 4506270 - DNA, 25 bp, Homo sapien
ttccacgacgacaagagggtttgca

SEQ ID NO: 4506271 - DNA, 25 bp, Homo sapien
acgacaagagggtttgcatgtgctg

SEQ ID NO: 4506272 - DNA, 25 bp, Homo sapien
cttattccacgacgacaagagggtt

SEQ ID NO: 4506273 - DNA, 25 bp, Homo sapien
taagtaaatttgaatgggtgttgct

SEQ ID NO: 4506274 - DNA, 25 bp, Homo sapien
ataagtaaatttgaatgggtgttgc

SEQ ID NO: 4506275 - DNA, 25 bp, Homo sapien
ctctggtcacaatagcacttaccct

SEQ ID NO: 4506276 - DNA, 25 bp, Homo sapien
ggtcacaatagcacttaccctaatt

SEQ ID NO: 4506277 - DNA, 25 bp, Homo sapien
ggggaacccaagactagtgagccca

SEQ ID NO: 4506278 - DNA, 25 bp, Homo sapien
caaatgttgccttttattgcattgc

SEQ ID NO: 4506279 - DNA, 25 bp, Homo sapien
ggaacccaagactagtgagcccaag

SEQ ID NO: 4506280 - DNA, 25 bp, Homo sapien
aacccaagactagtgagcccaagcc

SEQ ID NO: 4506281 - DNA, 25 bp, Homo sapien
tgtaatcagaattggtgttgggtcg

SEQ ID NO: 4506282 - DNA, 25 bp, Homo sapien
gcagatttcggatttgtaagtgtaa

SEQ ID NO: 4506283 - DNA, 25 bp, Homo sapien
ggtcgattggttcctcttcttgccc

SEQ ID NO: 4506284 - DNA, 25 bp, Homo sapien
tgtggaaagcttgacccaagcagag

SEQ ID NO: 4506285 - DNA, 25 bp, Homo sapien
caggaggaatctctattggacccag

SEQ ID NO: 4506286 - DNA, 25 bp, Homo sapien
gacatccccaatccattggctctga

SEQ ID NO: 4506287 - DNA, 25 bp, Homo sapien
taaatctcccttatcaatggcctct

SEQ ID NO: 4506288 - DNA, 25 bp, Homo sapien
gtgccctgacaggaggaatctctat

SEQ ID NO: 4506289 - DNA, 25 bp, Homo sapien
acatacccagcatggccatagggag

SEQ ID NO: 4506290 - DNA, 25 bp, Homo sapien
tacccagcatggccatagggagcat

SEQ ID NO: 4506291 - DNA, 25 bp, Homo sapien
ttaacatacccagcatggccatagg

SEQ ID NO: 4506292 - DNA, 25 bp, Homo sapien
cttaacatacccagcatggccatag

SEQ ID NO: 4506293 - DNA, 25 bp, Homo sapien
tgaaatggatctgcccaatactctg

SEQ ID NO: 4506294 - DNA, 25 bp, Homo sapien
ctagacttgacaaatgaaatggatc

SEQ ID NO: 4506295 - DNA, 25 bp, Homo sapien
tggatccagagctggtaatccaggg

SEQ ID NO: 4506296 - DNA, 25 bp, Homo sapien
ggagaacctactctggtggtagtga

SEQ ID NO: 4506297 - DNA, 25 bp, Homo sapien
gaaaaggctgtgacaagccaacaag

SEQ ID NO: 4506298 - DNA, 25 bp, Homo sapien
acaagagaccctggaccggggatag

SEQ ID NO: 4506299 - DNA, 25 bp, Homo sapien
caagagaccctggaccggggatagg

SEQ ID NO: 4506300 - DNA, 25 bp, Homo sapien
aaaggctgtgacaagccaacaagag

SEQ ID NO: 4506301 - DNA, 25 bp, Homo sapien
tcttattgtctatagcgatatctaa

SEQ ID NO: 4506302 - DNA, 25 bp, Homo sapien
taaaagatgtaatgtctcttcaacg

SEQ ID NO: 4506303 - DNA, 25 bp, Homo sapien
acggtgaagcgctgatggttgaaca

SEQ ID NO: 4506304 - DNA, 25 bp, Homo sapien
tgtctatagcgatatctaaaagatg

SEQ ID NO: 4506305 - DNA, 25 bp, Homo sapien
tcatggttattcagttgctcatttt

SEQ ID NO: 4506306 - DNA, 25 bp, Homo sapien
atggttattcagttgctcattttgc

SEQ ID NO: 4506307 - DNA, 25 bp, Homo sapien
ccatccttcagcttttcaatgatcc

SEQ ID NO: 4506308 - DNA, 25 bp, Homo sapien
tcagcttttcaatgatccctttcac

SEQ ID NO: 4506309 - DNA, 25 bp, Homo sapien
tgcaaaggagatgctaagacggtcc

SEQ ID NO: 4506310 - DNA, 25 bp, Homo sapien
gcaaaggagatgctaagacggtcca

SEQ ID NO: 4506311 - DNA, 25 bp, Homo sapien
caaaggagatgctaagacggtccat

SEQ ID NO: 4506312 - DNA, 25 bp, Homo sapien
cctgcaaaggagatgctaagacggt

SEQ ID NO: 4506313 - DNA, 25 bp, Homo sapien
tggatcacgaaaacgtttgagtctt

SEQ ID NO: 4506314 - DNA, 25 bp, Homo sapien
cacgaaaacgtttgagtctttctgc

SEQ ID NO: 4506315 - DNA, 25 bp, Homo sapien
tttgaaaacagttggatcacgaaaa

SEQ ID NO: 4506316 - DNA, 25 bp, Homo sapien
cagttggatcacgaaaacgtttgag

SEQ ID NO: 4506317 - DNA, 25 bp, Homo sapien
taattccttagaggagcgaataacc

SEQ ID NO: 4506318 - DNA, 25 bp, Homo sapien
cagaggcacattcagtttgaaacgt

SEQ ID NO: 4506319 - DNA, 25 bp, Homo sapien
taggaaccaagcattgatctgtcac

SEQ ID NO: 4506320 - DNA, 25 bp, Homo sapien
gctagttcattaggcgtccctggct

SEQ ID NO: 4506321 - DNA, 25 bp, Homo sapien
aatgaatcctcgctgtaagtctcca

SEQ ID NO: 4506322 - DNA, 25 bp, Homo sapien
gcctgttgtctgcagctccggagaa

SEQ ID NO: 4506323 - DNA, 25 bp, Homo sapien
aaatgatttcgatggtgtctgctgc

SEQ ID NO: 4506324 - DNA, 25 bp, Homo sapien
gctgagtctaattgccagaaagcac

SEQ ID NO: 4506325 - DNA, 25 bp, Homo sapien
gtatcttgaaggcaagggtatggca

SEQ ID NO: 4506326 - DNA, 25 bp, Homo sapien
aagcaaagggtaggttcttcccatg

SEQ ID NO: 4506327 - DNA, 25 bp, Homo sapien
tgaaatgtaggtgcaaaacacaagc

SEQ ID NO: 4506328 - DNA, 25 bp, Homo sapien
tgggctgggcaaatgcgaaatctgc

SEQ ID NO: 4506329 - DNA, 25 bp, Homo sapien
gaaatctgcgctgatgacctccggg

SEQ ID NO: 4506330 - DNA, 25 bp, Homo sapien
gtctggcttctcaggttgttatggg

SEQ ID NO: 4506331 - DNA, 25 bp, Homo sapien
ggttgttatgggaactatttctcac

SEQ ID NO: 4506332 - DNA, 25 bp, Homo sapien
tgcaggtgtttctctctattgaatc

SEQ ID NO: 4506333 - DNA, 25 bp, Homo sapien
cctgaggtgactgtcttgtaactaa

SEQ ID NO: 4506334 - DNA, 25 bp, Homo sapien
gagcctgtcgtgttccatctcctct

SEQ ID NO: 4506335 - DNA, 25 bp, Homo sapien
agatgctacaggcaagtggagcctg

SEQ ID NO: 4506336 - DNA, 25 bp, Homo sapien
tcacattctcctgttatctgaaagg

SEQ ID NO: 4506337 - DNA, 25 bp, Homo sapien
acatcacattctcctgttatctgaa

SEQ ID NO: 4506338 - DNA, 25 bp, Homo sapien
cattctcctgttatctgaaaggcca

SEQ ID NO: 4506339 - DNA, 25 bp, Homo sapien
acattctcctgttatctgaaaggcc

SEQ ID NO: 4506340 - DNA, 25 bp, Homo sapien
aattttgcacccatggttcgctggt

SEQ ID NO: 4506341 - DNA, 25 bp, Homo sapien
catagaaagagtttcccaaatagta

SEQ ID NO: 4506342 - DNA, 25 bp, Homo sapien
catgcattggagttgctattatagg

SEQ ID NO: 4506343 - DNA, 25 bp, Homo sapien
gattttgtcccctatgctggtcttc

SEQ ID NO: 4506344 - DNA, 25 bp, Homo sapien
gcaattgtgagtactggctgtaact

SEQ ID NO: 4506345 - DNA, 25 bp, Homo sapien
ctggagtcaaattctgcaattgtga

SEQ ID NO: 4506346 - DNA, 25 bp, Homo sapien
gtttaaattgcttagtagtgcctgc

SEQ ID NO: 4506347 - DNA, 25 bp, Homo sapien
gctttgcacgcagcactgtgcttgg

SEQ ID NO: 4506348 - DNA, 25 bp, Homo sapien
gcgctttggaccagacttgcaaagg

SEQ ID NO: 4506349 - DNA, 25 bp, Homo sapien
ggacccatattttgggacaatggaa

SEQ ID NO: 4506350 - DNA, 25 bp, Homo sapien
ctttggaccagacttgcaaaggctg

SEQ ID NO: 4506351 - DNA, 25 bp, Homo sapien
gggacaatggaagcgctttggacca

SEQ ID NO: 4506352 - DNA, 25 bp, Homo sapien
tatatgagatgcctcagcgatggca

SEQ ID NO: 4506353 - DNA, 25 bp, Homo sapien
tacaccagtaggcagttggatcaga

SEQ ID NO: 4506354 - DNA, 25 bp, Homo sapien
tacacagtgagcaatagtcaaccag

SEQ ID NO: 4506355 - DNA, 25 bp, Homo sapien
tgacacaggttgctatgatgccagt

SEQ ID NO: 4506356 - DNA, 25 bp, Homo sapien
ggactcaatatagctgtaaaccaat

SEQ ID NO: 4506357 - DNA, 25 bp, Homo sapien
tgtaagcagtatcagagattaagcc

SEQ ID NO: 4506358 - DNA, 25 bp, Homo sapien
taagccgtcatcgttgcatttgtga

SEQ ID NO: 4506359 - DNA, 25 bp, Homo sapien
tgtgagcttcccatttcaatctgga

SEQ ID NO: 4506360 - DNA, 25 bp, Homo sapien
atgaatgacttaaggtaacctggga

SEQ ID NO: 4506361 - DNA, 25 bp, Homo sapien
tgcagctggcctaaaagtgtttttg

SEQ ID NO: 4506362 - DNA, 25 bp, Homo sapien
gattctgactaataactctggagat

SEQ ID NO: 4506363 - DNA, 25 bp, Homo sapien
taaatgtgttataggcgtatgttct

SEQ ID NO: 4506364 - DNA, 25 bp, Homo sapien
atggaaatcataaattaccaaaaca

SEQ ID NO: 4506365 - DNA, 25 bp, Homo sapien
taatggaaatcataaattaccaaaa

SEQ ID NO: 4506366 - DNA, 25 bp, Homo sapien
tactgtgttgactgctggcaatgtc

SEQ ID NO: 4506367 - DNA, 25 bp, Homo sapien
ctaatggaaatcataaattaccaaa

SEQ ID NO: 4506368 - DNA, 25 bp, Homo sapien
gggaaatgccgacttcacaatcaat

SEQ ID NO: 4506369 - DNA, 25 bp, Homo sapien
tcaatgtgacactttaatcagcccc

SEQ ID NO: 4506370 - DNA, 25 bp, Homo sapien
taatcagcccccaatgtgactggga

SEQ ID NO: 4506371 - DNA, 25 bp, Homo sapien
ccccaatgtgactgggaaatgccga

SEQ ID NO: 4506372 - DNA, 25 bp, Homo sapien
aactatcaaattataaccagaggcc

SEQ ID NO: 4506373 - DNA, 25 bp, Homo sapien
cgttattacacgcagtgacaaaaac

SEQ ID NO: 4506374 - DNA, 25 bp, Homo sapien
cacgcagtgacaaaaactatcaaat

SEQ ID NO: 4506375 - DNA, 25 bp, Homo sapien
tctcttcgttattacacgcagtgac

SEQ ID NO: 4506376 - DNA, 25 bp, Homo sapien
tcattggaacctgtccatatgaccc

SEQ ID NO: 4506377 - DNA, 25 bp, Homo sapien
gtccaaagttcatatgattttgcat

SEQ ID NO: 4506378 - DNA, 25 bp, Homo sapien
cctatcttaagtttcagggtctcat

SEQ ID NO: 4506379 - DNA, 25 bp, Homo sapien
tccttctcaattcgtgtccaaagtt

SEQ ID NO: 4506380 - DNA, 25 bp, Homo sapien
gctggagccgaaaccatgaaggtaa

SEQ ID NO: 4506381 - DNA, 25 bp, Homo sapien
tcctcatgaacccacaggtgttgga

SEQ ID NO: 4506382 - DNA, 25 bp, Homo sapien
gggacatttaaggagactcctcatg

SEQ ID NO: 4506383 - DNA, 25 bp, Homo sapien
cacaggtgttggagtcacttgcatt

SEQ ID NO: 4506384 - DNA, 25 bp, Homo sapien
tgatcctgccttgatcatatgcaaa

SEQ ID NO: 4506385 - DNA, 25 bp, Homo sapien
gatcctgccttgatcatatgcaaaa

SEQ ID NO: 4506386 - DNA, 25 bp, Homo sapien
ctcctgatcctgccttgatcatatg

SEQ ID NO: 4506387 - DNA, 25 bp, Homo sapien
cctgatcctgccttgatcatatgca

SEQ ID NO: 4506388 - DNA, 25 bp, Homo sapien
gattttgtctgttggatgctccttg

SEQ ID NO: 4506389 - DNA, 25 bp, Homo sapien
caggcaaaatggaatgacgttgagc

SEQ ID NO: 4506390 - DNA, 25 bp, Homo sapien
gaaagcctgagtaagaatatgcagg

SEQ ID NO: 4506391 - DNA, 25 bp, Homo sapien
tccttgccgcttctagcaaagtctt

SEQ ID NO: 4506392 - DNA, 25 bp, Homo sapien
aggcattccgagaaacaaatgaggg

SEQ ID NO: 4506393 - DNA, 25 bp, Homo sapien
gatctggttcattgctaggtcctca

SEQ ID NO: 4506394 - DNA, 25 bp, Homo sapien
cctcagcatccacgggtaaaaaggt

SEQ ID NO: 4506395 - DNA, 25 bp, Homo sapien
aggtcctcagcatccacgggtaaaa

SEQ ID NO: 4506396 - DNA, 25 bp, Homo sapien
tatataactgactgcccaggcttcg

SEQ ID NO: 4506397 - DNA, 25 bp, Homo sapien
taaaccaatgcttctcagctgaggg

SEQ ID NO: 4506398 - DNA, 25 bp, Homo sapien
ctgagggctagggaggcacttttcc

SEQ ID NO: 4506399 - DNA, 25 bp, Homo sapien
tatgtcaagaggagagaaagcgtat

SEQ ID NO: 4506400 - DNA, 25 bp, Homo sapien
taacaggccccataagattgatgtc

SEQ ID NO: 4506401 - DNA, 25 bp, Homo sapien
tgaacttccagcctgtctcgatgaa

SEQ ID NO: 4506402 - DNA, 25 bp, Homo sapien
tgaattatggaccacagcccctgag

SEQ ID NO: 4506403 - DNA, 25 bp, Homo sapien
tggcactttgaacgagaccttgaac

SEQ ID NO: 4506404 - DNA, 25 bp, Homo sapien
aatgatatcaattaggcccgacccg

SEQ ID NO: 4506405 - DNA, 25 bp, Homo sapien
gcagctttcttggtaacgcggacat

SEQ ID NO: 4506406 - DNA, 25 bp, Homo sapien
caagggcgactcgttagatgtccca

SEQ ID NO: 4506407 - DNA, 25 bp, Homo sapien
tacctgttagacatgccaagggcga

SEQ ID NO: 4506408 - DNA, 25 bp, Homo sapien
cccagtcggcatagcatagcacact

SEQ ID NO: 4506409 - DNA, 25 bp, Homo sapien
atacccagtcggcatagcatagcac

SEQ ID NO: 4506410 - DNA, 25 bp, Homo sapien
tacccagtcggcatagcatagcaca

SEQ ID NO: 4506411 - DNA, 25 bp, Homo sapien
ctgagaagcaatgttgctcattaaa

SEQ ID NO: 4506412 - DNA, 25 bp, Homo sapien
gagaagcaatgttgctcattaaatt

SEQ ID NO: 4506413 - DNA, 25 bp, Homo sapien
gaagcaatgttgctcattaaattcc

SEQ ID NO: 4506414 - DNA, 25 bp, Homo sapien
gcaatgttgctcattaaattcccca

SEQ ID NO: 4506415 - DNA, 25 bp, Homo sapien
cattttcatgcctggaccacccatg

SEQ ID NO: 4506416 - DNA, 25 bp, Homo sapien
tgcttctatgtatgttaaactcctg

SEQ ID NO: 4506417 - DNA, 25 bp, Homo sapien
ccacccatggtgagtgcatggaaaa

SEQ ID NO: 4506418 - DNA, 25 bp, Homo sapien
gagattgcccggcattctctgcagt

SEQ ID NO: 4506419 - DNA, 25 bp, Homo sapien
tgacaaatcgttggcacttccactg

SEQ ID NO: 4506420 - DNA, 25 bp, Homo sapien
ttgggctccagctgtacgtaatggc

SEQ ID NO: 4506421 - DNA, 25 bp, Homo sapien
tctgtgctgaagctagagcccaata

SEQ ID NO: 4506422 - DNA, 25 bp, Homo sapien
tgagtgtccactcgcaaatcctacc

SEQ ID NO: 4506423 - DNA, 25 bp, Homo sapien
taagatctttgttgctacctgctgc

SEQ ID NO: 4506424 - DNA, 25 bp, Homo sapien
tttgccttgtaagccctcatccaag

SEQ ID NO: 4506425 - DNA, 25 bp, Homo sapien
ggctgccttctctggttgatctgag

SEQ ID NO: 4506426 - DNA, 25 bp, Homo sapien
ttataagatgactcagcatgcaatc

SEQ ID NO: 4506427 - DNA, 25 bp, Homo sapien
gatgacacgaggcatttcaggcagc

SEQ ID NO: 4506428 - DNA, 25 bp, Homo sapien
ggctttgacaaggacgcctgcactc

SEQ ID NO: 4506429 - DNA, 25 bp, Homo sapien
ggctccgactgagaatccgattgga

SEQ ID NO: 4506430 - DNA, 25 bp, Homo sapien
cctctaaattagacagggcctctgc

SEQ ID NO: 4506431 - DNA, 25 bp, Homo sapien
ttaataagctcataaagggcccagg

SEQ ID NO: 4506432 - DNA, 25 bp, Homo sapien
tgtgtcaatgtatctgccaagctca

SEQ ID NO: 4506433 - DNA, 25 bp, Homo sapien
tcaaatgtcctaccacagaacagag

SEQ ID NO: 4506434 - DNA, 25 bp, Homo sapien
gattgcctattaccaatgggaacca

SEQ ID NO: 4506435 - DNA, 25 bp, Homo sapien
caatcgaccttcaatctcagccaaa

SEQ ID NO: 4506436 - DNA, 25 bp, Homo sapien
cattccaagtcaagggaggcctctt

SEQ ID NO: 4506437 - DNA, 25 bp, Homo sapien
tttgaccacattccaagtcaaggga

SEQ ID NO: 4506438 - DNA, 25 bp, Homo sapien
tcgaccttcaatctcagccaaatga

SEQ ID NO: 4506439 - DNA, 25 bp, Homo sapien
ggaggacttgggaagcttttactca

SEQ ID NO: 4506440 - DNA, 25 bp, Homo sapien
caccaacaaagtgggctttagaagc

SEQ ID NO: 4506441 - DNA, 25 bp, Homo sapien
tagggatctgagtatcaggcagcca

SEQ ID NO: 4506442 - DNA, 25 bp, Homo sapien
caatcagatcccagaagtattaggg

SEQ ID NO: 4506443 - DNA, 25 bp, Homo sapien
tgctgttgcaagactcctggaaaat

SEQ ID NO: 4506444 - DNA, 25 bp, Homo sapien
gaatcatggtgaagaatgctccact

SEQ ID NO: 4506445 - DNA, 25 bp, Homo sapien
taactctcttggtgtcgtcctgaca

SEQ ID NO: 4506446 - DNA, 25 bp, Homo sapien
tgtgtggagccccaaaaccaatact

SEQ ID NO: 4506447 - DNA, 25 bp, Homo sapien
tagattgtctgaacgggcacaaagc

SEQ ID NO: 4506448 - DNA, 25 bp, Homo sapien
cctccaaaagcacaagtgtgtaaaa

SEQ ID NO: 4506449 - DNA, 25 bp, Homo sapien
tgtgtaatagacacttgttgtcccc

SEQ ID NO: 4506450 - DNA, 25 bp, Homo sapien
ccaaaagcacaagtgtgtaaaatgt

SEQ ID NO: 4506451 - DNA, 25 bp, Homo sapien
taatagacacttgttgtccccccat

SEQ ID NO: 4506452 - DNA, 25 bp, Homo sapien
gaagagacctctaatccttgacttc

SEQ ID NO: 4506453 - DNA, 25 bp, Homo sapien
aagagacctctaatccttgacttct

SEQ ID NO: 4506454 - DNA, 25 bp, Homo sapien
agagacctctaatccttgacttctc

SEQ ID NO: 4506455 - DNA, 25 bp, Homo sapien
ccaacccgtatacgccagggctgta

SEQ ID NO: 4506456 - DNA, 25 bp, Homo sapien
ttcaaaatatgaattgcaggtctgg

SEQ ID NO: 4506457 - DNA, 25 bp, Homo sapien
tatacgccagggctgtatcttgagt

SEQ ID NO: 4506458 - DNA, 25 bp, Homo sapien
gccaagtaggctttaaacccattca

SEQ ID NO: 4506459 - DNA, 25 bp, Homo sapien
gcagttatatttatatgggggtaaa

SEQ ID NO: 4506460 - DNA, 25 bp, Homo sapien
gagcagttatatttatatgggggta

SEQ ID NO: 4506461 - DNA, 25 bp, Homo sapien
aatataatcaagggaaagtggttca

SEQ ID NO: 4506462 - DNA, 25 bp, Homo sapien
gggaaagtggttcaaatctatttca

SEQ ID NO: 4506463 - DNA, 25 bp, Homo sapien
tatcttgctagctgaaaggcaccac

SEQ ID NO: 4506464 - DNA, 25 bp, Homo sapien
taccaacagaggcatttagtcagtc

SEQ ID NO: 4506465 - DNA, 25 bp, Homo sapien
tgagaacttactgccccaatgcaaa

SEQ ID NO: 4506466 - DNA, 25 bp, Homo sapien
aatcgggctggtcttcgccatgaca

SEQ ID NO: 4506467 - DNA, 25 bp, Homo sapien
aaaattgttgaagttgttgatagca

SEQ ID NO: 4506468 - DNA, 25 bp, Homo sapien
caatttcaacgtggatgttgagaaa

SEQ ID NO: 4506469 - DNA, 25 bp, Homo sapien
tcatcaatttcaacgtggatgttga

SEQ ID NO: 4506470 - DNA, 25 bp, Homo sapien
aagttgttgatagcatttgcattca

SEQ ID NO: 4506471 - DNA, 25 bp, Homo sapien
cttaatagcagcattagctatttca

SEQ ID NO: 4506472 - DNA, 25 bp, Homo sapien
tagcagcattagctatttcagctcc

SEQ ID NO: 4506473 - DNA, 25 bp, Homo sapien
atagcagcattagctatttcagctc

SEQ ID NO: 4506474 - DNA, 25 bp, Homo sapien
ctgctcacctcttgatgctgcaacc

SEQ ID NO: 4506475 - DNA, 25 bp, Homo sapien
taacactccgagacctcacataggg

SEQ ID NO: 4506476 - DNA, 25 bp, Homo sapien
ttgtgacagcaataataacactccg

SEQ ID NO: 4506477 - DNA, 25 bp, Homo sapien
atccctaacatagccagaagtctgg

SEQ ID NO: 4506478 - DNA, 25 bp, Homo sapien
tagctcagccgtatggtcaggatcc

SEQ ID NO: 4506479 - DNA, 25 bp, Homo sapien
aattggcacttcattatctactgtc

SEQ ID NO: 4506480 - DNA, 25 bp, Homo sapien
attggcacttcattatctactgtca

SEQ ID NO: 4506481 - DNA, 25 bp, Homo sapien
ttggcacttcattatctactgtcat

SEQ ID NO: 4506482 - DNA, 25 bp, Homo sapien
cctttcgaacgccttctctgtgact

SEQ ID NO: 4506483 - DNA, 25 bp, Homo sapien
caatggatccctggaaaaattcacc

SEQ ID NO: 4506484 - DNA, 25 bp, Homo sapien
agtgttttacactgatcatagcaca

SEQ ID NO: 4506485 - DNA, 25 bp, Homo sapien
tgatattctgtccacggcagggtca

SEQ ID NO: 4506486 - DNA, 25 bp, Homo sapien
ggtcagagttagaggattcttccag

SEQ ID NO: 4506487 - DNA, 25 bp, Homo sapien
ggagtttgtaatggatcccaatgag

SEQ ID NO: 4506488 - DNA, 25 bp, Homo sapien
cagtatattcctgatgaggtattca

SEQ ID NO: 4506489 - DNA, 25 bp, Homo sapien
gatcccaatgaggtcagagttagag

SEQ ID NO: 4506490 - DNA, 25 bp, Homo sapien
ccaaatgagcactggttgtaacaaa

SEQ ID NO: 4506491 - DNA, 25 bp, Homo sapien
ggagctatctgatgctaaatcccaa

SEQ ID NO: 4506492 - DNA, 25 bp, Homo sapien
tgcccacataattaaggccacttga

SEQ ID NO: 4506493 - DNA, 25 bp, Homo sapien
gagatggtgactgataagacaatta

SEQ ID NO: 4506494 - DNA, 25 bp, Homo sapien
tcattgtcatcaaatagaatacaat

SEQ ID NO: 4506495 - DNA, 25 bp, Homo sapien
catttaggaagaggatcttttggat

SEQ ID NO: 4506496 - DNA, 25 bp, Homo sapien
tgtttcctttaagagtgcggtatat

SEQ ID NO: 4506497 - DNA, 25 bp, Homo sapien
tattagctcgataccatctgggagt

SEQ ID NO: 4506498 - DNA, 25 bp, Homo sapien
ccaagtgtatgaaggccggctgtta

SEQ ID NO: 4506499 - DNA, 25 bp, Homo sapien
tgctaagccacctatgaatttgaag

SEQ ID NO: 4506500 - DNA, 25 bp, Homo sapien
agaagcacctggtccataggctgga

SEQ ID NO: 4506501 - DNA, 25 bp, Homo sapien
tatgaagagcatgatcaggacacaa

SEQ ID NO: 4506502 - DNA, 25 bp, Homo sapien
ctcccaggatcccatagtatgtgga

SEQ ID NO: 4506503 - DNA, 25 bp, Homo sapien
ctacatgttgaggatggtattgcac

SEQ ID NO: 4506504 - DNA, 25 bp, Homo sapien
tcacctaagtgggacatccaggcat

SEQ ID NO: 4506505 - DNA, 25 bp, Homo sapien
ccatgggttaggagcaatcacaaat

SEQ ID NO: 4506506 - DNA, 25 bp, Homo sapien
taactccccaccttcttcctctcca

SEQ ID NO: 4506507 - DNA, 25 bp, Homo sapien
ctccccaccttcttcctctccacat

SEQ ID NO: 4506508 - DNA, 25 bp, Homo sapien
actccccaccttcttcctctccaca

SEQ ID NO: 4506509 - DNA, 25 bp, Homo sapien
ctctgagatattgttgagcctcatc

SEQ ID NO: 4506510 - DNA, 25 bp, Homo sapien
catcttctaatgcagggcagaaata

SEQ ID NO: 4506511 - DNA, 25 bp, Homo sapien
agacacccatcttctaatgcagggc

SEQ ID NO: 4506512 - DNA, 25 bp, Homo sapien
gagcctcatctaggttgagcagaca

SEQ ID NO: 4506513 - DNA, 25 bp, Homo sapien
caacatattggaggattttgtcgtc

SEQ ID NO: 4506514 - DNA, 25 bp, Homo sapien
ttccgacagcttttcagtgacaaca

SEQ ID NO: 4506515 - DNA, 25 bp, Homo sapien
tgagtgacaggaggttgcttcttag

SEQ ID NO: 4506516 - DNA, 25 bp, Homo sapien
taattagatgcaacgctgtcagctg

SEQ ID NO: 4506517 - DNA, 25 bp, Homo sapien
cactgaatccagaatttcatggcta

SEQ ID NO: 4506518 - DNA, 25 bp, Homo sapien
cactcatgtcactggaactgaaagt

SEQ ID NO: 4506519 - DNA, 25 bp, Homo sapien
gatgggatcctgatttggattcacc

SEQ ID NO: 4506520 - DNA, 25 bp, Homo sapien
aagtgactagtgtctgttgagggaa

SEQ ID NO: 4506521 - DNA, 25 bp, Homo sapien
tgttgcttggatagatatttttgca

SEQ ID NO: 4506522 - DNA, 25 bp, Homo sapien
ttttgcatgttatctagagaggtgc

SEQ ID NO: 4506523 - DNA, 25 bp, Homo sapien
gcctgttgcaagtgtctccaattgt

SEQ ID NO: 4506524 - DNA, 25 bp, Homo sapien
aataacttctatttctgatttgatc

SEQ ID NO: 4506525 - DNA, 25 bp, Homo sapien
ccacccaagtgtgggctttgatcat

SEQ ID NO: 4506526 - DNA, 25 bp, Homo sapien
aggccttcaggtccacccaagtgtg

SEQ ID NO: 4506527 - DNA, 25 bp, Homo sapien
gccttcaggtccacccaagtgtggg

SEQ ID NO: 4506528 - DNA, 25 bp, Homo sapien
tcaggtccacccaagtgtgggcttt

SEQ ID NO: 4506529 - DNA, 25 bp, Homo sapien
aagcaccaccatttcataggacaac

SEQ ID NO: 4506530 - DNA, 25 bp, Homo sapien
ttaaagagctaatccataaagcacc

SEQ ID NO: 4506531 - DNA, 25 bp, Homo sapien
gaatatatggagatgcttgagcttc

SEQ ID NO: 4506532 - DNA, 25 bp, Homo sapien
taaaactacacgtatgaatatatgg

SEQ ID NO: 4506533 - DNA, 25 bp, Homo sapien
ccagaagcaggttagagtcagcgct

SEQ ID NO: 4506534 - DNA, 25 bp, Homo sapien
tcttgacactttgatgagcggtgct

SEQ ID NO: 4506535 - DNA, 25 bp, Homo sapien
tcagcgctcagcatcctgcaagaag

SEQ ID NO: 4506536 - DNA, 25 bp, Homo sapien
tgtggctgattaatgtgtcccaggc

SEQ ID NO: 4506537 - DNA, 25 bp, Homo sapien
ttttcacaattctcaacgtggcttg

SEQ ID NO: 4506538 - DNA, 25 bp, Homo sapien
ctgttttcacaattctcaacgtggc

SEQ ID NO: 4506539 - DNA, 25 bp, Homo sapien
aattctcaacgtggcttgtttctca

SEQ ID NO: 4506540 - DNA, 25 bp, Homo sapien
cacaattctcaacgtggcttgtttc

SEQ ID NO: 4506541 - DNA, 25 bp, Homo sapien
tcagtggagattggacaggtcttga

SEQ ID NO: 4506542 - DNA, 25 bp, Homo sapien
cacagccttgtccaagattgagata

SEQ ID NO: 4506543 - DNA, 25 bp, Homo sapien
aaatgttggctgctgactcgtccaa

SEQ ID NO: 4506544 - DNA, 25 bp, Homo sapien
tgctgcactcctttatgtcactggc

SEQ ID NO: 4506545 - DNA, 25 bp, Homo sapien
attaccgatgagtccttctaagaag

SEQ ID NO: 4506546 - DNA, 25 bp, Homo sapien
taattaccgatgagtccttctaaga

SEQ ID NO: 4506547 - DNA, 25 bp, Homo sapien
ttaattaccgatgagtccttctaag

SEQ ID NO: 4506548 - DNA, 25 bp, Homo sapien
ttaccgatgagtccttctaagaaga

SEQ ID NO: 4506549 - DNA, 25 bp, Homo sapien
ctctttctcaaaccctgtaggagtc

SEQ ID NO: 4506550 - DNA, 25 bp, Homo sapien
atttcactgaacaacctcctgtctc

SEQ ID NO: 4506551 - DNA, 25 bp, Homo sapien
tctgtgttttttccgaccttccagc

SEQ ID NO: 4506552 - DNA, 25 bp, Homo sapien
ctttcccaatgctggcggacttgtc

SEQ ID NO: 4506553 - DNA, 25 bp, Homo sapien
ggtgtttctcgcagccttgtggcca

SEQ ID NO: 4506554 - DNA, 25 bp, Homo sapien
tgcattccaaagacaatggaagctg

SEQ ID NO: 4506555 - DNA, 25 bp, Homo sapien
tagattttactactgcattccaaag

SEQ ID NO: 4506556 - DNA, 25 bp, Homo sapien
tactgcattccaaagacaatggaag

SEQ ID NO: 4506557 - DNA, 25 bp, Homo sapien
ttccaaagacaatggaagctgactt

SEQ ID NO: 4506558 - DNA, 25 bp, Homo sapien
ctgcaataagcaatacctgcttcat

SEQ ID NO: 4506559 - DNA, 25 bp, Homo sapien
ttcgatcccccggtttcacactctg

SEQ ID NO: 4506560 - DNA, 25 bp, Homo sapien
tcccgggctgctttgtacatccaaa

SEQ ID NO: 4506561 - DNA, 25 bp, Homo sapien
gttcccgggctgctttgtacatcca

SEQ ID NO: 4506562 - DNA, 25 bp, Homo sapien
tgtacatccaaagccccgctcctct

SEQ ID NO: 4506563 - DNA, 25 bp, Homo sapien
taatccgagcccgtgtcagaggacg

SEQ ID NO: 4506564 - DNA, 25 bp, Homo sapien
tgtgcgtgcgtccatctgagtggaa

SEQ ID NO: 4506565 - DNA, 25 bp, Homo sapien
tgcaagtggcaaaaagagtcctgtc

SEQ ID NO: 4506566 - DNA, 25 bp, Homo sapien
taaaggctcgtcatctgtgcgtgcg

SEQ ID NO: 4506567 - DNA, 25 bp, Homo sapien
tttttggcgactgcctcctgttccc

SEQ ID NO: 4506568 - DNA, 25 bp, Homo sapien
ttctttttggcgactgcctcctgtt

SEQ ID NO: 4506569 - DNA, 25 bp, Homo sapien
gactgcctcctgttccctattagga

SEQ ID NO: 4506570 - DNA, 25 bp, Homo sapien
ttggcgactgcctcctgttccctat

SEQ ID NO: 4506571 - DNA, 25 bp, Homo sapien
taaagcttagatcgcaatactccag

SEQ ID NO: 4506572 - DNA, 25 bp, Homo sapien
catagtcatattagtggtggccaca

SEQ ID NO: 4506573 - DNA, 25 bp, Homo sapien
ggttgcctacaaataagcccggaca

SEQ ID NO: 4506574 - DNA, 25 bp, Homo sapien
caagcgaactaaataagccagcagg

SEQ ID NO: 4506575 - DNA, 25 bp, Homo sapien
tctagagcacagagctgttctttca

SEQ ID NO: 4506576 - DNA, 25 bp, Homo sapien
ttaatccgatctagagcacagagct

SEQ ID NO: 4506577 - DNA, 25 bp, Homo sapien
gcacagagctgttctttcatccact

SEQ ID NO: 4506578 - DNA, 25 bp, Homo sapien
tccgatctagagcacagagctgttc

SEQ ID NO: 4506579 - DNA, 25 bp, Homo sapien
gatttttggtagtgagggttggatg

SEQ ID NO: 4506580 - DNA, 25 bp, Homo sapien
tatgtccctggcattataattagat

SEQ ID NO: 4506581 - DNA, 25 bp, Homo sapien
gggacagttggccaagagctccaaa

SEQ ID NO: 4506582 - DNA, 25 bp, Homo sapien
ctaaatatgtccctggcattataat

SEQ ID NO: 4506583 - DNA, 25 bp, Homo sapien
tcagagagttttaattgagttatca

SEQ ID NO: 4506584 - DNA, 25 bp, Homo sapien
gcatttgttgattcatcagagagtt

SEQ ID NO: 4506585 - DNA, 25 bp, Homo sapien
cagagagttttaattgagttatcat

SEQ ID NO: 4506586 - DNA, 25 bp, Homo sapien
ttggcatttgttgattcatcagaga

SEQ ID NO: 4506587 - DNA, 25 bp, Homo sapien
tggcagcttcttgtttacgagaacc

SEQ ID NO: 4506588 - DNA, 25 bp, Homo sapien
cgagaaccgggatggaatgattctg

SEQ ID NO: 4506589 - DNA, 25 bp, Homo sapien
gattctgatgttatgcttagttcac

SEQ ID NO: 4506590 - DNA, 25 bp, Homo sapien
tgatgttatgcttagttcacagcct

SEQ ID NO: 4506591 - DNA, 25 bp, Homo sapien
gattaaaacacacgctgctgtagct

SEQ ID NO: 4506592 - DNA, 25 bp, Homo sapien
ttgattaaaacacacgctgctgtag

SEQ ID NO: 4506593 - DNA, 25 bp, Homo sapien
attaaaacacacgctgctgtagctt

SEQ ID NO: 4506594 - DNA, 25 bp, Homo sapien
tgattaaaacacacgctgctgtagc

SEQ ID NO: 4506595 - DNA, 25 bp, Homo sapien
caaatgagccttgttgacaggtgaa

SEQ ID NO: 4506596 - DNA, 25 bp, Homo sapien
tttcaggtaatgactaagagttagt

SEQ ID NO: 4506597 - DNA, 25 bp, Homo sapien
tagttgttgcaaatgagccttgttg

SEQ ID NO: 4506598 - DNA, 25 bp, Homo sapien
gactaagagttagttgttgcaaatg

SEQ ID NO: 4506599 - DNA, 25 bp, Homo sapien
cagatctgaccagcatacacagagc

SEQ ID NO: 4506600 - DNA, 25 bp, Homo sapien
cccagatctgaccagcatacacaga

SEQ ID NO: 4506601 - DNA, 25 bp, Homo sapien
ccagatctgaccagcatacacagag

SEQ ID NO: 4506602 - DNA, 25 bp, Homo sapien
gcaccaacctcgggcaaattagcca

SEQ ID NO: 4506603 - DNA, 25 bp, Homo sapien
caccaacctcgggcaaattagccat

SEQ ID NO: 4506604 - DNA, 25 bp, Homo sapien
ctgcaccaacctcgggcaaattagc

SEQ ID NO: 4506605 - DNA, 25 bp, Homo sapien
tgcaccaacctcgggcaaattagcc

SEQ ID NO: 4506606 - DNA, 25 bp, Homo sapien
aagcaattagctgccgtgcggctga

SEQ ID NO: 4506607 - DNA, 25 bp, Homo sapien
tgatgtaccccgcagaggactggtg

SEQ ID NO: 4506608 - DNA, 25 bp, Homo sapien
tggttgtgcaacgtctgctgcctgg

SEQ ID NO: 4506609 - DNA, 25 bp, Homo sapien
tggtggctcgtctgacacatctggg

SEQ ID NO: 4506610 - DNA, 25 bp, Homo sapien
tctgtgccgccattgtgtacaactc

SEQ ID NO: 4506611 - DNA, 25 bp, Homo sapien
gaagactgaagtctagtctcagcct

SEQ ID NO: 4506612 - DNA, 25 bp, Homo sapien
ttgtgagccgtgacgacagctggca

SEQ ID NO: 4506613 - DNA, 25 bp, Homo sapien
tatcatcgaggtaggccagcaagtg

SEQ ID NO: 4506614 - DNA, 25 bp, Homo sapien
tcaaggaagattcaactcgagatgt

SEQ ID NO: 4506615 - DNA, 25 bp, Homo sapien
ggaagattcaactcgagatgtaaca

SEQ ID NO: 4506616 - DNA, 25 bp, Homo sapien
tggtttactgggccggagatgggta

SEQ ID NO: 4506617 - DNA, 25 bp, Homo sapien
gcaggcaggccagtgttgaagcact

SEQ ID NO: 4506618 - DNA, 25 bp, Homo sapien
ggcaagggtaggagagccagcctcc

SEQ ID NO: 4506619 - DNA, 25 bp, Homo sapien
gcaagggtaggagagccagcctccc

SEQ ID NO: 4506620 - DNA, 25 bp, Homo sapien
cagcctcccgcccctagagggagag

SEQ ID NO: 4506621 - DNA, 25 bp, Homo sapien
aagggtaggagagccagcctcccgc

SEQ ID NO: 4506622 - DNA, 25 bp, Homo sapien
ttccaccatggtcctcccctggact

SEQ ID NO: 4506623 - DNA, 25 bp, Homo sapien
cacaggcctggagcgtgtgtttgga

SEQ ID NO: 4506624 - DNA, 25 bp, Homo sapien
ctggactctctgtgtgtgcagatcc

SEQ ID NO: 4506625 - DNA, 25 bp, Homo sapien
aacaagggtgaccaagctcctcagc

SEQ ID NO: 4506626 - DNA, 25 bp, Homo sapien
ctttattccatgtctgcacgccctc

SEQ ID NO: 4506627 - DNA, 25 bp, Homo sapien
ttattccatgtctgcacgccctcca

SEQ ID NO: 4506628 - DNA, 25 bp, Homo sapien
ttaatataaaggcattccaacttat

SEQ ID NO: 4506629 - DNA, 25 bp, Homo sapien
aaggcattccaacttatttacttgt

SEQ ID NO: 4506630 - DNA, 25 bp, Homo sapien
gagcctgctagctgttccgggcact

SEQ ID NO: 4506631 - DNA, 25 bp, Homo sapien
gatccgagttggtgttggaacttcc

SEQ ID NO: 4506632 - DNA, 25 bp, Homo sapien
taaaagagctgttggagatccgagt

SEQ ID NO: 4506633 - DNA, 25 bp, Homo sapien
cttggagaggaacacgaagtttctc

SEQ ID NO: 4506634 - DNA, 25 bp, Homo sapien
caaagttcaagttgtgaagattccc

SEQ ID NO: 4506635 - DNA, 25 bp, Homo sapien
ccctattaatagattggcttgggca

SEQ ID NO: 4506636 - DNA, 25 bp, Homo sapien
tctggaagtatctacccttggaaaa

SEQ ID NO: 4506637 - DNA, 25 bp, Homo sapien
agtggtcttcccaggaaggccctat

SEQ ID NO: 4506638 - DNA, 25 bp, Homo sapien
gaagcgcatttatctccactaatta

SEQ ID NO: 4506639 - DNA, 25 bp, Homo sapien
tccactaattaagaggtgagtatca

SEQ ID NO: 4506640 - DNA, 25 bp, Homo sapien
gacatgattgaagcgcatttatctc

SEQ ID NO: 4506641 - DNA, 25 bp, Homo sapien
atctccactaattaagaggtgagta

SEQ ID NO: 4506642 - DNA, 25 bp, Homo sapien
cacttttccgacaggctcaagcata

SEQ ID NO: 4506643 - DNA, 25 bp, Homo sapien
actttcacttttccgacaggctcaa

SEQ ID NO: 4506644 - DNA, 25 bp, Homo sapien
ttggtctaagtttctcctcaaggcc

SEQ ID NO: 4506645 - DNA, 25 bp, Homo sapien
ttatcattctgtccttggtctaagt

SEQ ID NO: 4506646 - DNA, 25 bp, Homo sapien
tatttaccatctcgaccacactgag

SEQ ID NO: 4506647 - DNA, 25 bp, Homo sapien
cttatttaccatctcgaccacactg

SEQ ID NO: 4506648 - DNA, 25 bp, Homo sapien
atttaccatctcgaccacactgagc

SEQ ID NO: 4506649 - DNA, 25 bp, Homo sapien
ttaccatctcgaccacactgagccc

SEQ ID NO: 4506650 - DNA, 25 bp, Homo sapien
caagtaactcatctaaaacacgttt

SEQ ID NO: 4506651 - DNA, 25 bp, Homo sapien
cagttattgttattagaccaaccct

SEQ ID NO: 4506652 - DNA, 25 bp, Homo sapien
caaccctaggaacaagtaactcatc

SEQ ID NO: 4506653 - DNA, 25 bp, Homo sapien
tctaaaacacgtttttcgcctgctg

SEQ ID NO: 4506654 - DNA, 25 bp, Homo sapien
cttgctcagtaccgggggtattggt

SEQ ID NO: 4506655 - DNA, 25 bp, Homo sapien
ttcttgctcagtaccgggggtattg

SEQ ID NO: 4506656 - DNA, 25 bp, Homo sapien
tgctcagtaccgggggtattggtgg

SEQ ID NO: 4506657 - DNA, 25 bp, Homo sapien
ccttcttgctcagtaccgggggtat

SEQ ID NO: 4506658 - DNA, 25 bp, Homo sapien
gcttcatcaaaaatcctcttcccta

SEQ ID NO: 4506659 - DNA, 25 bp, Homo sapien
ctcttccctaactcttcttgctcac

SEQ ID NO: 4506660 - DNA, 25 bp, Homo sapien
ttaagcttcatcaaaaatcctcttc

SEQ ID NO: 4506661 - DNA, 25 bp, Homo sapien
aatcctcttccctaactcttcttgc

SEQ ID NO: 4506662 - DNA, 25 bp, Homo sapien
taaccccagatagatctttgatatt

SEQ ID NO: 4506663 - DNA, 25 bp, Homo sapien
ctttaaccccagatagatctttgat

SEQ ID NO: 4506664 - DNA, 25 bp, Homo sapien
catttaaggaacacatccagaatga

SEQ ID NO: 4506665 - DNA, 25 bp, Homo sapien
acatttaaggaacacatccagaatg

SEQ ID NO: 4506666 - DNA, 25 bp, Homo sapien
gcagcgagaggtcgacatcaaagct

SEQ ID NO: 4506667 - DNA, 25 bp, Homo sapien
ggtcgacatcaaagctcgttcccag

SEQ ID NO: 4506668 - DNA, 25 bp, Homo sapien
cagcggctcgcctctaatgctggca

SEQ ID NO: 4506669 - DNA, 25 bp, Homo sapien
tctgtcagtggcagcgagaggtcga

SEQ ID NO: 4506670 - DNA, 25 bp, Homo sapien
tctgaagtttagctggttcataacc

SEQ ID NO: 4506671 - DNA, 25 bp, Homo sapien
cggccgtgcctcctttcatccttct

SEQ ID NO: 4506672 - DNA, 25 bp, Homo sapien
cctctgtaatcacaaggcttggcat

SEQ ID NO: 4506673 - DNA, 25 bp, Homo sapien
tcttcctgaagaatctaagggaaca

SEQ ID NO: 4506674 - DNA, 25 bp, Homo sapien
gatagctcatgccattccataaaga

SEQ ID NO: 4506675 - DNA, 25 bp, Homo sapien
tggctgctggtgaatttaataatga

SEQ ID NO: 4506676 - DNA, 25 bp, Homo sapien
tgagcagagacttccctgcgaagac

SEQ ID NO: 4506677 - DNA, 25 bp, Homo sapien
ccaggatagagccaagtggacttct

SEQ ID NO: 4506678 - DNA, 25 bp, Homo sapien
cctgggttgtcacatttacgtttct

SEQ ID NO: 4506679 - DNA, 25 bp, Homo sapien
catttacgtttctgaacaccttcct

SEQ ID NO: 4506680 - DNA, 25 bp, Homo sapien
cattgatgattttccctgaaccatt

SEQ ID NO: 4506681 - DNA, 25 bp, Homo sapien
tgccttacagttccatcgtgacatc

SEQ ID NO: 4506682 - DNA, 25 bp, Homo sapien
tgtgagcccatcatttccaccaagg

SEQ ID NO: 4506683 - DNA, 25 bp, Homo sapien
ctgtgagcccatcatttccaccaag

SEQ ID NO: 4506684 - DNA, 25 bp, Homo sapien
aatactgtgagcccatcatttccac

SEQ ID NO: 4506685 - DNA, 25 bp, Homo sapien
tactgtgagcccatcatttccacca

SEQ ID NO: 4506686 - DNA, 25 bp, Homo sapien
agtgaggagtcctcctgaagtggca

SEQ ID NO: 4506687 - DNA, 25 bp, Homo sapien
tggcagaacacttcacatctgtact

SEQ ID NO: 4506688 - DNA, 25 bp, Homo sapien
ggctactgtgcaccctgaattctca

SEQ ID NO: 4506689 - DNA, 25 bp, Homo sapien
gcatcaaggtaggaatacagaacca

SEQ ID NO: 4506690 - DNA, 25 bp, Homo sapien
ttgaagatgatgactttcagcgtca

SEQ ID NO: 4506691 - DNA, 25 bp, Homo sapien
gatgatgactttcagcgtcatgagc

SEQ ID NO: 4506692 - DNA, 25 bp, Homo sapien
tgactttcagcgtcatgagcgtcat

SEQ ID NO: 4506693 - DNA, 25 bp, Homo sapien
tgatgactttcagcgtcatgagcgt

SEQ ID NO: 4506694 - DNA, 25 bp, Homo sapien
ctcttgttgcatctgcagttcggca

SEQ ID NO: 4506695 - DNA, 25 bp, Homo sapien
gattgcagagcctatgggcctggca

SEQ ID NO: 4506696 - DNA, 25 bp, Homo sapien
tgcagcctgcagatcagagaccctg

SEQ ID NO: 4506697 - DNA, 25 bp, Homo sapien
caaagatgcagggatgcctccatgc

SEQ ID NO: 4506698 - DNA, 25 bp, Homo sapien
gcctcatcgagaagaagccaggtaa

SEQ ID NO: 4506699 - DNA, 25 bp, Homo sapien
gctaattgagctggcctgtccgcat

SEQ ID NO: 4506700 - DNA, 25 bp, Homo sapien
gagagagaattacccagctctcgct

SEQ ID NO: 4506701 - DNA, 25 bp, Homo sapien
tgggtcgcctgcctaactcctgttg

SEQ ID NO: 4506702 - DNA, 25 bp, Homo sapien
taaagtgatgcccttagagttacgc

SEQ ID NO: 4506703 - DNA, 25 bp, Homo sapien
tatacacagtgcctccgcataggac

SEQ ID NO: 4506704 - DNA, 25 bp, Homo sapien
tatcggtcctgaagaagaaccaaag

SEQ ID NO: 4506705 - DNA, 25 bp, Homo sapien
aacgcaagtgttggtgtatcggtcc

SEQ ID NO: 4506706 - DNA, 25 bp, Homo sapien
acttcttggaagcagtcaccagaga

SEQ ID NO: 4506707 - DNA, 25 bp, Homo sapien
agcccacttcttggaagcagtcacc

SEQ ID NO: 4506708 - DNA, 25 bp, Homo sapien
ctggtgttaatcgaagtagctggag

SEQ ID NO: 4506709 - DNA, 25 bp, Homo sapien
tgcagctggtgttaatcgaagtagc

SEQ ID NO: 4506710 - DNA, 25 bp, Homo sapien
ctgaagggagaagactccaaacagt

SEQ ID NO: 4506711 - DNA, 25 bp, Homo sapien
tgaagggagaagactccaaacagtg

SEQ ID NO: 4506712 - DNA, 25 bp, Homo sapien
tcagtgggcggtccaggaagaacca

SEQ ID NO: 4506713 - DNA, 25 bp, Homo sapien
accaaagccaacagggttgggcctg

SEQ ID NO: 4506714 - DNA, 25 bp, Homo sapien
gttgggcctgcacaaggcttgcgta

SEQ ID NO: 4506715 - DNA, 25 bp, Homo sapien
cacaaggcttgcgtagggaaggtcc

SEQ ID NO: 4506716 - DNA, 25 bp, Homo sapien
tgtagctgtagaagtctctattgcc

SEQ ID NO: 4506717 - DNA, 25 bp, Homo sapien
gccattgatgcattttacacagagc

SEQ ID NO: 4506718 - DNA, 25 bp, Homo sapien
ctattgccattgatgcattttacac

SEQ ID NO: 4506719 - DNA, 25 bp, Homo sapien
ttttacacagagctcaatgctctgg

SEQ ID NO: 4506720 - DNA, 25 bp, Homo sapien
tgaaacaactttgatgtggcttaag

SEQ ID NO: 4506721 - DNA, 25 bp, Homo sapien
tttgatgtggcttaagatgtgtttt

SEQ ID NO: 4506722 - DNA, 25 bp, Homo sapien
gatgtggcttaagatgtgtttttgt

SEQ ID NO: 4506723 - DNA, 25 bp, Homo sapien
aaacaactttgatgtggcttaagat

SEQ ID NO: 4506724 - DNA, 25 bp, Homo sapien
tcttttagcttggcctttatttgta

SEQ ID NO: 4506725 - DNA, 25 bp, Homo sapien
tttagcttggcctttatttgtacat

SEQ ID NO: 4506726 - DNA, 25 bp, Homo sapien
gaaggcaagcagttcacagggagga

SEQ ID NO: 4506727 - DNA, 25 bp, Homo sapien
ttttagcttggcctttatttgtaca

SEQ ID NO: 4506728 - DNA, 25 bp, Homo sapien
ctggaaacaattgagacagacaatt

SEQ ID NO: 4506729 - DNA, 25 bp, Homo sapien
ggaaacaattgagacagacaattgg

SEQ ID NO: 4506730 - DNA, 25 bp, Homo sapien
gaaacaattgagacagacaattggg

SEQ ID NO: 4506731 - DNA, 25 bp, Homo sapien
tggaaacaattgagacagacaattg

SEQ ID NO: 4506732 - DNA, 25 bp, Homo sapien
tggaactggatctggaagtccaggt

SEQ ID NO: 4506733 - DNA, 25 bp, Homo sapien
tttggctctgagcaggccccagcct

SEQ ID NO: 4506734 - DNA, 25 bp, Homo sapien
gaactggaactggatctggaagtcc

SEQ ID NO: 4506735 - DNA, 25 bp, Homo sapien
gagcaggccccagcctcttcagcag

SEQ ID NO: 4506736 - DNA, 25 bp, Homo sapien
taatctcgcgggcttcaggaatgaa

SEQ ID NO: 4506737 - DNA, 25 bp, Homo sapien
gacagtgcaaatcagggtggcctac

SEQ ID NO: 4506738 - DNA, 25 bp, Homo sapien
taattcatttatgggcagggcaggc

SEQ ID NO: 4506739 - DNA, 25 bp, Homo sapien
tatactgagaactagaccatgggtc

SEQ ID NO: 4506740 - DNA, 25 bp, Homo sapien
caggatgtccaggcctcccaggctg

SEQ ID NO: 4506741 - DNA, 25 bp, Homo sapien
gcctcccaggctgaagggccctgcc

SEQ ID NO: 4506742 - DNA, 25 bp, Homo sapien
ggatgtccaggcctcccaggctgaa

SEQ ID NO: 4506743 - DNA, 25 bp, Homo sapien
ctcccaggctgaagggccctgcctg

SEQ ID NO: 4506744 - DNA, 25 bp, Homo sapien
tgccgagtggccttagaaacgccac

SEQ ID NO: 4506745 - DNA, 25 bp, Homo sapien
tagaaacgccaccatagccattttc

SEQ ID NO: 4506746 - DNA, 25 bp, Homo sapien
aggcccactggcaattgtccactgt

SEQ ID NO: 4506747 - DNA, 25 bp, Homo sapien
ttgtccactgtctgccgagtggcct

SEQ ID NO: 4506748 - DNA, 25 bp, Homo sapien
tagatctctctttatgtaatttgag

SEQ ID NO: 4506749 - DNA, 25 bp, Homo sapien
tctagatctctctttatgtaatttg

SEQ ID NO: 4506750 - DNA, 25 bp, Homo sapien
gtcgtgttcctgtgctctagatctc

SEQ ID NO: 4506751 - DNA, 25 bp, Homo sapien
tctctctttatgtaatttgagagct

SEQ ID NO: 4506752 - DNA, 25 bp, Homo sapien
caattgcacacaaatgccgttctgc

SEQ ID NO: 4506753 - DNA, 25 bp, Homo sapien
tgcggctggtcctcaattgcacaca

SEQ ID NO: 4506754 - DNA, 25 bp, Homo sapien
caaatgccgttctgcactcaaagcc

SEQ ID NO: 4506755 - DNA, 25 bp, Homo sapien
gcactcaaagccacaatgccacggg

SEQ ID NO: 4506756 - DNA, 25 bp, Homo sapien
tctggggggttttcctttctgcagc

SEQ ID NO: 4506757 - DNA, 25 bp, Homo sapien
tggggggttttcctttctgcagctc

SEQ ID NO: 4506758 - DNA, 25 bp, Homo sapien
gggttttcctttctgcagctcccac

SEQ ID NO: 4506759 - DNA, 25 bp, Homo sapien
ttagcgatgccatgtgtcttccttt

SEQ ID NO: 4506760 - DNA, 25 bp, Homo sapien
tctgggagaatacatcggcaacatg

SEQ ID NO: 4506761 - DNA, 25 bp, Homo sapien
cacattgctgtgcacgggatcggag

SEQ ID NO: 4506762 - DNA, 25 bp, Homo sapien
ccatcagggatgaccagcttggact

SEQ ID NO: 4506763 - DNA, 25 bp, Homo sapien
tggacaatgccttcattctcctggg

SEQ ID NO: 4506764 - DNA, 25 bp, Homo sapien
tgtagatgctcctgctttcgatgcc

SEQ ID NO: 4506765 - DNA, 25 bp, Homo sapien
gatgctcctgctttcgatgccacat

SEQ ID NO: 4506766 - DNA, 25 bp, Homo sapien
tagatgctcctgctttcgatgccac

SEQ ID NO: 4506767 - DNA, 25 bp, Homo sapien
gtagatgctcctgctttcgatgcca

SEQ ID NO: 4506768 - DNA, 25 bp, Homo sapien
ttgccattctgcacatccagtcctg

SEQ ID NO: 4506769 - DNA, 25 bp, Homo sapien
cattctgcacatccagtcctggcat

SEQ ID NO: 4506770 - DNA, 25 bp, Homo sapien
tctgcacatccagtcctggcatctg

SEQ ID NO: 4506771 - DNA, 25 bp, Homo sapien
tgccattctgcacatccagtcctgg

SEQ ID NO: 4506772 - DNA, 25 bp, Homo sapien
cttcaaaccgctcatcatcagcata

SEQ ID NO: 4506773 - DNA, 25 bp, Homo sapien
ttcaaaccgctcatcatcagcataa

SEQ ID NO: 4506774 - DNA, 25 bp, Homo sapien
tcttcaaaccgctcatcatcagcat

SEQ ID NO: 4506775 - DNA, 25 bp, Homo sapien
ctcttcaaaccgctcatcatcagca

SEQ ID NO: 4506776 - DNA, 25 bp, Homo sapien
gagctctgactctgcttctgacact

SEQ ID NO: 4506777 - DNA, 25 bp, Homo sapien
ctctgcttctgacactcttggtcca

SEQ ID NO: 4506778 - DNA, 25 bp, Homo sapien
gactctgcttctgacactcttggtc

SEQ ID NO: 4506779 - DNA, 25 bp, Homo sapien
ctgcttctgacactcttggtccaac

SEQ ID NO: 4506780 - DNA, 25 bp, Homo sapien
tctctgctgagattggagcccagct

SEQ ID NO: 4506781 - DNA, 25 bp, Homo sapien
ctctgctgagattggagcccagctc

SEQ ID NO: 4506782 - DNA, 25 bp, Homo sapien
cacaagcacacgcacggaaaggcgt

SEQ ID NO: 4506783 - DNA, 25 bp, Homo sapien
cggaaaggcgtcgtgggagaggtca

SEQ ID NO: 4506784 - DNA, 25 bp, Homo sapien
accctgcttgtgagtgacctttgta

SEQ ID NO: 4506785 - DNA, 25 bp, Homo sapien
caccctgcttgtgagtgacctttgt

SEQ ID NO: 4506786 - DNA, 25 bp, Homo sapien
gattactaaacacgaagtgactcac

SEQ ID NO: 4506787 - DNA, 25 bp, Homo sapien
caaagatccagagtggacttatgcg

SEQ ID NO: 4506788 - DNA, 25 bp, Homo sapien
tatgcgtgggcgtctgattactaaa

SEQ ID NO: 4506789 - DNA, 25 bp, Homo sapien
ggaagtgaggtacgcacaaagatcc

SEQ ID NO: 4506790 - DNA, 25 bp, Homo sapien
tcagtgattttcaaagaagtaactt

SEQ ID NO: 4506791 - DNA, 25 bp, Homo sapien
cagtgattttcaaagaagtaactta

SEQ ID NO: 4506792 - DNA, 25 bp, Homo sapien
tcatttctgactgtcttccttcttt

SEQ ID NO: 4506793 - DNA, 25 bp, Homo sapien
catttctgactgtcttccttctttc

SEQ ID NO: 4506794 - DNA, 25 bp, Homo sapien
atttctgactgtcttccttctttct

SEQ ID NO: 4506795 - DNA, 25 bp, Homo sapien
gtgctcaacacatcgaggcctttgt

SEQ ID NO: 4506796 - DNA, 25 bp, Homo sapien
agtttcctcaaagtcgggctggtca

SEQ ID NO: 4506797 - DNA, 25 bp, Homo sapien
tctggtcaacagaaagtgctcaaca

SEQ ID NO: 4506798 - DNA, 25 bp, Homo sapien
gtgacctatgacaagccacttgaat

SEQ ID NO: 4506799 - DNA, 25 bp, Homo sapien
tgcggtacccgatggggcaccggct

SEQ ID NO: 4506800 - DNA, 25 bp, Homo sapien
gcagggtaaggccgccgcggcagcc

SEQ ID NO: 4506801 - DNA, 25 bp, Homo sapien
gcgctcgcggcagggtaaggccgcc

SEQ ID NO: 4506802 - DNA, 25 bp, Homo sapien
cagccgtgcggtacccgatggggca

SEQ ID NO: 4506803 - DNA, 25 bp, Homo sapien
gccgggcgactctttcctgcccctg

SEQ ID NO: 4506804 - DNA, 25 bp, Homo sapien
tcctgcccctgaggtcggcagaggc

SEQ ID NO: 4506805 - DNA, 25 bp, Homo sapien
ggcgactctttcctgcccctgaggt

SEQ ID NO: 4506806 - DNA, 25 bp, Homo sapien
tctttcctgcccctgaggtcggcag

SEQ ID NO: 4506807 - DNA, 25 bp, Homo sapien
actgtctcgccgctggaatagcagc

SEQ ID NO: 4506808 - DNA, 25 bp, Homo sapien
cgttcaggtactccacctccgagaa

SEQ ID NO: 4506809 - DNA, 25 bp, Homo sapien
gctggaatagcagcccttgcgctcg

SEQ ID NO: 4506810 - DNA, 25 bp, Homo sapien
gctcccgcaggctgaggcgcacgtt

SEQ ID NO: 4506811 - DNA, 25 bp, Homo sapien
gaatggaacctcatagccgccggtt

SEQ ID NO: 4506812 - DNA, 25 bp, Homo sapien
taggacacgggcaccgcagaatgga

SEQ ID NO: 4506813 - DNA, 25 bp, Homo sapien
aaccaagaacgtatgcaggataggg

SEQ ID NO: 4506814 - DNA, 25 bp, Homo sapien
accaaatttctgctaattcatcatg

SEQ ID NO: 4506815 - DNA, 25 bp, Homo sapien
ttcggccatcttgcaaattgtattg

SEQ ID NO: 4506816 - DNA, 25 bp, Homo sapien
tcccaaggtccttgactccattcgg

SEQ ID NO: 4506817 - DNA, 25 bp, Homo sapien
catcttgcaaattgtattgtctgct

SEQ ID NO: 4506818 - DNA, 25 bp, Homo sapien
ccactggggcctgggttgatcctgg

SEQ ID NO: 4506819 - DNA, 25 bp, Homo sapien
acgtgtgctcaggaaggtagcagca

SEQ ID NO: 4506820 - DNA, 25 bp, Homo sapien
ccagtggctgacgtgtgctcaggaa

SEQ ID NO: 4506821 - DNA, 25 bp, Homo sapien
gaacaagtcacaggggcatgagatc

SEQ ID NO: 4506822 - DNA, 25 bp, Homo sapien
taaattcagtggcagggcgggtccc

SEQ ID NO: 4506823 - DNA, 25 bp, Homo sapien
tcaatttgaatactccacagttggg

SEQ ID NO: 4506824 - DNA, 25 bp, Homo sapien
ctgccacttaagtcaatttgaatac

SEQ ID NO: 4506825 - DNA, 25 bp, Homo sapien
aatttgaatactccacagttgggtg

SEQ ID NO: 4506826 - DNA, 25 bp, Homo sapien
agtcaatttgaatactccacagttg

SEQ ID NO: 4506827 - DNA, 25 bp, Homo sapien
aagttgaaagcgaaatggaaattca

SEQ ID NO: 4506828 - DNA, 25 bp, Homo sapien
gaagttgaaagcgaaatggaaattc

SEQ ID NO: 4506829 - DNA, 25 bp, Homo sapien
gatggaagttgaaagcgaaatggaa

SEQ ID NO: 4506830 - DNA, 25 bp, Homo sapien
tggaagttgaaagcgaaatggaaat

SEQ ID NO: 4506831 - DNA, 25 bp, Homo sapien
gatcaggtaccttgggtcgttccaa

SEQ ID NO: 4506832 - DNA, 25 bp, Homo sapien
gacatcgacatgactaacaacctgg

SEQ ID NO: 4506833 - DNA, 25 bp, Homo sapien
taatgctggtgtgttgacatcgaca

SEQ ID NO: 4506834 - DNA, 25 bp, Homo sapien
tatttcccagtaaacgaggtgacca

SEQ ID NO: 4506835 - DNA, 25 bp, Homo sapien
taccctgaagtcattatgtttccag

SEQ ID NO: 4506836 - DNA, 25 bp, Homo sapien
tatcctcatgtaacatattaggcca

SEQ ID NO: 4506837 - DNA, 25 bp, Homo sapien
taagccactctagagaactcataga

SEQ ID NO: 4506838 - DNA, 25 bp, Homo sapien
tattaggacttataaacatgacaga

SEQ ID NO: 4506839 - DNA, 25 bp, Homo sapien
tttctcttgagttttcaatacaggg

SEQ ID NO: 4506840 - DNA, 25 bp, Homo sapien
aaaccaacagccaaccattttctct

SEQ ID NO: 4506841 - DNA, 25 bp, Homo sapien
gactggaccagaagtgaaaaaccaa

SEQ ID NO: 4506842 - DNA, 25 bp, Homo sapien
ccaacagccaaccattttctcttga

SEQ ID NO: 4506843 - DNA, 25 bp, Homo sapien
cattacagtatccctttctttcaat

SEQ ID NO: 4506844 - DNA, 25 bp, Homo sapien
ctttcatttggactttcaagcattt

SEQ ID NO: 4506845 - DNA, 25 bp, Homo sapien
tttcatttggactttcaagcatttt

SEQ ID NO: 4506846 - DNA, 25 bp, Homo sapien
tagtccactctgataatgcagcaat

SEQ ID NO: 4506847 - DNA, 25 bp, Homo sapien
gcacattggcgaccatgtgtcgaat

SEQ ID NO: 4506848 - DNA, 25 bp, Homo sapien
gtgctcccagaagcgatgtggtttc

SEQ ID NO: 4506849 - DNA, 25 bp, Homo sapien
tagcagcctttggaacaatcagacg

SEQ ID NO: 4506850 - DNA, 25 bp, Homo sapien
cactaatggcagttcgagcatcaat

SEQ ID NO: 4506851 - DNA, 25 bp, Homo sapien
gagcatcaattttttagcaccagga

SEQ ID NO: 4506852 - DNA, 25 bp, Homo sapien
ggcagggtcagtgtcaaccagctca

SEQ ID NO: 4506853 - DNA, 25 bp, Homo sapien
ccattatatggaattgtaccgatca

SEQ ID NO: 4506854 - DNA, 25 bp, Homo sapien
ggcaaacacaggacagcacacttct

SEQ ID NO: 4506855 - DNA, 25 bp, Homo sapien
gaatgtgtctagagaattcttcctc

SEQ ID NO: 4506856 - DNA, 25 bp, Homo sapien
tcttcctctgataccacatctgcat

SEQ ID NO: 4506857 - DNA, 25 bp, Homo sapien
aaaccggaattcttgtatacaggca

SEQ ID NO: 4506858 - DNA, 25 bp, Homo sapien
ttctacgtcgctaggatgtgggtca

SEQ ID NO: 4506859 - DNA, 25 bp, Homo sapien
tctcttctacgtcgctaggatgtgg

SEQ ID NO: 4506860 - DNA, 25 bp, Homo sapien
tcttctacgtcgctaggatgtgggt

SEQ ID NO: 4506861 - DNA, 25 bp, Homo sapien
tggctctcttctacgtcgctaggat

SEQ ID NO: 4506862 - DNA, 25 bp, Homo sapien
gattcctttctctcacgtcagcgca

SEQ ID NO: 4506863 - DNA, 25 bp, Homo sapien
gagtgggccattctcctatgcacac

SEQ ID NO: 4506864 - DNA, 25 bp, Homo sapien
tatggtaggaaatcatgaagcaccc

SEQ ID NO: 4506865 - DNA, 25 bp, Homo sapien
tgtgtagttatcaaggcatcctgca

SEQ ID NO: 4506866 - DNA, 25 bp, Homo sapien
gaagaaaaccaaagtactctgctgg

SEQ ID NO: 4506867 - DNA, 25 bp, Homo sapien
tcagctcacaaaaccaacagatgga

SEQ ID NO: 4506868 - DNA, 25 bp, Homo sapien
gaactatgcacgatgcttccaggat

SEQ ID NO: 4506869 - DNA, 25 bp, Homo sapien
catggagtcgaacaatgccttggca

SEQ ID NO: 4506870 - DNA, 25 bp, Homo sapien
atcccaatgtccttgttcgtttctg

SEQ ID NO: 4506871 - DNA, 25 bp, Homo sapien
gatgccatccaagtgccaatggcca

SEQ ID NO: 4506872 - DNA, 25 bp, Homo sapien
ggaactgaaccagctgtactgctgg

SEQ ID NO: 4506873 - DNA, 25 bp, Homo sapien
cttcttggaggacgacagctggtgt

SEQ ID NO: 4506874 - DNA, 25 bp, Homo sapien
tgtgtttctcgcctctgctgctgtc

SEQ ID NO: 4506875 - DNA, 25 bp, Homo sapien
gtctttcacctctgctttgcctggt

SEQ ID NO: 4506876 - DNA, 25 bp, Homo sapien
ctccctgtcggatgtgtttctcgcc

SEQ ID NO: 4506877 - DNA, 25 bp, Homo sapien
tcggatgtgtttctcgcctctgctg

SEQ ID NO: 4506878 - DNA, 25 bp, Homo sapien
ctagggtcctatggagtagacatac

SEQ ID NO: 4506879 - DNA, 25 bp, Homo sapien
tggagtagacatacaggaccttccg

SEQ ID NO: 4506880 - DNA, 25 bp, Homo sapien
cctatggagtagacatacaggacct

SEQ ID NO: 4506881 - DNA, 25 bp, Homo sapien
tagacatacaggaccttccgaactg

SEQ ID NO: 4506882 - DNA, 25 bp, Homo sapien
gagcccagccagaatctctactttt

SEQ ID NO: 4506883 - DNA, 25 bp, Homo sapien
tgagcccagccagaatctctacttt

SEQ ID NO: 4506884 - DNA, 25 bp, Homo sapien
attcttatgatcaagtatgttggag

SEQ ID NO: 4506885 - DNA, 25 bp, Homo sapien
tatgatcaagtatgttggaggaata

SEQ ID NO: 4506886 - DNA, 25 bp, Homo sapien
tgtcttgccttgacgacctgtccag

SEQ ID NO: 4506887 - DNA, 25 bp, Homo sapien
tggtcaacatgctctaaggcagatt

SEQ ID NO: 4506888 - DNA, 25 bp, Homo sapien
tgaggacatccacaacctcattgag

SEQ ID NO: 4506889 - DNA, 25 bp, Homo sapien
ccagcttcctgaatccgtgagaaca

SEQ ID NO: 4506890 - DNA, 25 bp, Homo sapien
gtgatttaaatcagatggtgaccca

SEQ ID NO: 4506891 - DNA, 25 bp, Homo sapien
tgaaatccagtaacaggtgatagga

SEQ ID NO: 4506892 - DNA, 25 bp, Homo sapien
tgacccaatgacaatgtctgtgctg

SEQ ID NO: 4506893 - DNA, 25 bp, Homo sapien
ctttcacaacgagacaagaagtgat

SEQ ID NO: 4506894 - DNA, 25 bp, Homo sapien
aaatgccaaggacggctccaagggt

SEQ ID NO: 4506895 - DNA, 25 bp, Homo sapien
aatccattctcagggtagacacaat

SEQ ID NO: 4506896 - DNA, 25 bp, Homo sapien
gacacaataggactggtgattgatt

SEQ ID NO: 4506897 - DNA, 25 bp, Homo sapien
ggagatagagattcgtttttgaaag

SEQ ID NO: 4506898 - DNA, 25 bp, Homo sapien
taaagaaggagtggaaaatggcaaa

SEQ ID NO: 4506899 - DNA, 25 bp, Homo sapien
gaggctaaagaaggagtggaaaatg

SEQ ID NO: 4506900 - DNA, 25 bp, Homo sapien
gctaaagaaggagtggaaaatggca

SEQ ID NO: 4506901 - DNA, 25 bp, Homo sapien
ggctaaagaaggagtggaaaatggc

SEQ ID NO: 4506902 - DNA, 25 bp, Homo sapien
tttatgcctgattctaaggaagaca

SEQ ID NO: 4506903 - DNA, 25 bp, Homo sapien
agtcccatgattttatgcctgattc

SEQ ID NO: 4506904 - DNA, 25 bp, Homo sapien
ggagtcccatgattttatgcctgat

SEQ ID NO: 4506905 - DNA, 25 bp, Homo sapien
tatgcctgattctaaggaagacagt

SEQ ID NO: 4506906 - DNA, 25 bp, Homo sapien
taagtcgagccgtttctgctgtgcc

SEQ ID NO: 4506907 - DNA, 25 bp, Homo sapien
cacagcgatctatatacaggagtcc

SEQ ID NO: 4506908 - DNA, 25 bp, Homo sapien
ggagagatccttgcgatgagcacag

SEQ ID NO: 4506909 - DNA, 25 bp, Homo sapien
tttccacagacgatcaagagacggt

SEQ ID NO: 4506910 - DNA, 25 bp, Homo sapien
gggtgctttgcaagccatgaacata

SEQ ID NO: 4506911 - DNA, 25 bp, Homo sapien
ataatgtatcgggacagattttcct

SEQ ID NO: 4506912 - DNA, 25 bp, Homo sapien
tagcgcttaaacaactctctcgtgg

SEQ ID NO: 4506913 - DNA, 25 bp, Homo sapien
ccttcaggatacatgcaatcagtaa

SEQ ID NO: 4506914 - DNA, 25 bp, Homo sapien
agaccctggcatcaagtaggagctt

SEQ ID NO: 4506915 - DNA, 25 bp, Homo sapien
catcaagtaggagcttggactgtgg

SEQ ID NO: 4506916 - DNA, 25 bp, Homo sapien
caagtaggagcttggactgtggctc

SEQ ID NO: 4506917 - DNA, 25 bp, Homo sapien
ctggcatcaagtaggagcttggact

SEQ ID NO: 4506918 - DNA, 25 bp, Homo sapien
actgcgaggctaattaacaagtcta

SEQ ID NO: 4506919 - DNA, 25 bp, Homo sapien
tgtgagttccagtgatgcctttcct

SEQ ID NO: 4506920 - DNA, 25 bp, Homo sapien
gcaaaaccgttgcttctgtggagca

SEQ ID NO: 4506921 - DNA, 25 bp, Homo sapien
tcttcggatgaaatgataaaacgag

SEQ ID NO: 4506922 - DNA, 25 bp, Homo sapien
caagggctctacagtctgccagtac

SEQ ID NO: 4506923 - DNA, 25 bp, Homo sapien
gccagtacaagcattgctggtggaa

SEQ ID NO: 4506924 - DNA, 25 bp, Homo sapien
tacagtctgccagtacaagcattgc

SEQ ID NO: 4506925 - DNA, 25 bp, Homo sapien
gtggaaagttggcaggctgactatc

SEQ ID NO: 4506926 - DNA, 25 bp, Homo sapien
ccaaagctgtggctggttatctgct

SEQ ID NO: 4506927 - DNA, 25 bp, Homo sapien
tggttatctgctggactaagagctg

SEQ ID NO: 4506928 - DNA, 25 bp, Homo sapien
gctgtgggcattggcttattatctg

SEQ ID NO: 4506929 - DNA, 25 bp, Homo sapien
gtgggcattggcttattatctgctg

SEQ ID NO: 4506930 - DNA, 25 bp, Homo sapien
tgaggttccacatctatgctaatgc

SEQ ID NO: 4506931 - DNA, 25 bp, Homo sapien
ggctttaatcaagttctcccatcta

SEQ ID NO: 4506932 - DNA, 25 bp, Homo sapien
catctacttcttacatgggtgaaac

SEQ ID NO: 4506933 - DNA, 25 bp, Homo sapien
ttcccagtgactggctttaatcaag

SEQ ID NO: 4506934 - DNA, 25 bp, Homo sapien
gagagtctgagagtgtagtggaggt

SEQ ID NO: 4506935 - DNA, 25 bp, Homo sapien
tgagaaccaaagcaaatggtctgag

SEQ ID NO: 4506936 - DNA, 25 bp, Homo sapien
tctgagagtgtagtggaggtaacgt

SEQ ID NO: 4506937 - DNA, 25 bp, Homo sapien
ggaggtaacgtgttcgtgtcctctc

SEQ ID NO: 4506938 - DNA, 25 bp, Homo sapien
tggataccgtttggaggcatgccag

SEQ ID NO: 4506939 - DNA, 25 bp, Homo sapien
caccttggcgtgaatcggagcaggc

SEQ ID NO: 4506940 - DNA, 25 bp, Homo sapien
caaggagctccttgtgtagcctgcc

SEQ ID NO: 4506941 - DNA, 25 bp, Homo sapien
gctcaaatgtgtgcatgtcaccttg

SEQ ID NO: 4506942 - DNA, 25 bp, Homo sapien
ggaaggctcttgaagggagataccc

SEQ ID NO: 4506943 - DNA, 25 bp, Homo sapien
agtagggaaggctcttgaagggaga

SEQ ID NO: 4506944 - DNA, 25 bp, Homo sapien
ccaggatgtacttccgaagtggtgg

SEQ ID NO: 4506945 - DNA, 25 bp, Homo sapien
tggtcccttccaggatgtacttccg

SEQ ID NO: 4506946 - DNA, 25 bp, Homo sapien
tagttgcatcatggggtcttggctt

SEQ ID NO: 4506947 - DNA, 25 bp, Homo sapien
gttgcatcatggggtcttggcttcc

SEQ ID NO: 4506948 - DNA, 25 bp, Homo sapien
ctagttgcatcatggggtcttggct

SEQ ID NO: 4506949 - DNA, 25 bp, Homo sapien
ttgcatcatggggtcttggcttccc

SEQ ID NO: 4506950 - DNA, 25 bp, Homo sapien
gctctgcgggcctggtcgcgtgctg

SEQ ID NO: 4506951 - DNA, 25 bp, Homo sapien
gcttccttagcgttctgggcccgga

SEQ ID NO: 4506952 - DNA, 25 bp, Homo sapien
gactgccgggccactgtggagcggg

SEQ ID NO: 4506953 - DNA, 25 bp, Homo sapien
gctgggcttccttagcgttctgggc

SEQ ID NO: 4506954 - DNA, 25 bp, Homo sapien
cgggcattcccgaatcatggctgat

SEQ ID NO: 4506955 - DNA, 25 bp, Homo sapien
gaaggccacgctctggaatccagcg

SEQ ID NO: 4506956 - DNA, 25 bp, Homo sapien
ctaacacaggaaggccacgctctgg

SEQ ID NO: 4506957 - DNA, 25 bp, Homo sapien
gaatccagcgggcattcccgaatca

SEQ ID NO: 4506958 - DNA, 25 bp, Homo sapien
gatcttaaggcttctgttgctaatg

SEQ ID NO: 4506959 - DNA, 25 bp, Homo sapien
tgatcttaaggcttctgttgctaat

SEQ ID NO: 4506960 - DNA, 25 bp, Homo sapien
cttaaggcttctgttgctaatgaaa

SEQ ID NO: 4506961 - DNA, 25 bp, Homo sapien
tcttaaggcttctgttgctaatgaa

SEQ ID NO: 4506962 - DNA, 25 bp, Homo sapien
tgatacacttccttgaccaggcgct

SEQ ID NO: 4506963 - DNA, 25 bp, Homo sapien
tctgatacacttccttgaccaggcg

SEQ ID NO: 4506964 - DNA, 25 bp, Homo sapien
ttctgatacacttccttgaccaggc

SEQ ID NO: 4506965 - DNA, 25 bp, Homo sapien
ccttctgatacacttccttgaccag

SEQ ID NO: 4506966 - DNA, 25 bp, Homo sapien
gatgacttccttctgatactgatgt

SEQ ID NO: 4506967 - DNA, 25 bp, Homo sapien
ttttcaaagccaccccctgggatga

SEQ ID NO: 4506968 - DNA, 25 bp, Homo sapien
ctcctgggcttgtgagagtcccttc

SEQ ID NO: 4506969 - DNA, 25 bp, Homo sapien
ttccttctgatactgatgtgcaagc

SEQ ID NO: 4506970 - DNA, 25 bp, Homo sapien
gcctgacttggccagatcatagaga

SEQ ID NO: 4506971 - DNA, 25 bp, Homo sapien
cagctcttgcaaagatgcctgactt

SEQ ID NO: 4506972 - DNA, 25 bp, Homo sapien
atgcctgacttggccagatcataga

SEQ ID NO: 4506973 - DNA, 25 bp, Homo sapien
ctcttgcaaagatgcctgacttggc

SEQ ID NO: 4506974 - DNA, 25 bp, Homo sapien
gaatgcaagtgtcccctagatggca

SEQ ID NO: 4506975 - DNA, 25 bp, Homo sapien
accatgatggagagcccccgagtgg

SEQ ID NO: 4506976 - DNA, 25 bp, Homo sapien
cgagtggaatgcaagtgtcccctag

SEQ ID NO: 4506977 - DNA, 25 bp, Homo sapien
gcaagtgtcccctagatggcatgac

SEQ ID NO: 4506978 - DNA, 25 bp, Homo sapien
tatgccaccctttatgcatattaat

SEQ ID NO: 4506979 - DNA, 25 bp, Homo sapien
gccaccctttatgcatattaatgag

SEQ ID NO: 4506980 - DNA, 25 bp, Homo sapien
tgccaccctttatgcatattaatga

SEQ ID NO: 4506981 - DNA, 25 bp, Homo sapien
caccctttatgcatattaatgagtc

SEQ ID NO: 4506982 - DNA, 25 bp, Homo sapien
tatgttggagacgtgcactgtgttc

SEQ ID NO: 4506983 - DNA, 25 bp, Homo sapien
tgtccaacttctggaatgggtatga

SEQ ID NO: 4506984 - DNA, 25 bp, Homo sapien
tgattttggttgtatgttggagacg

SEQ ID NO: 4506985 - DNA, 25 bp, Homo sapien
tcttgaacacagatgccgtaaccat

SEQ ID NO: 4506986 - DNA, 25 bp, Homo sapien
gaactagaggatgaatggacattac

SEQ ID NO: 4506987 - DNA, 25 bp, Homo sapien
atgaaggaactagaggatgaatgga

SEQ ID NO: 4506988 - DNA, 25 bp, Homo sapien
tcatgaaggaactagaggatgaatg

SEQ ID NO: 4506989 - DNA, 25 bp, Homo sapien
aggaactagaggatgaatggacatt

SEQ ID NO: 4506990 - DNA, 25 bp, Homo sapien
ccttgaatcttcgtggaaccatgac

SEQ ID NO: 4506991 - DNA, 25 bp, Homo sapien
tacgccgagacaacgggttgtggca

SEQ ID NO: 4506992 - DNA, 25 bp, Homo sapien
tatgcagcaggtcaatacgccgaga

SEQ ID NO: 4506993 - DNA, 25 bp, Homo sapien
gaaccatgacaggtccattgcccaa

SEQ ID NO: 4506994 - DNA, 25 bp, Homo sapien
ctgttggattcttgtaaaagcacca

SEQ ID NO: 4506995 - DNA, 25 bp, Homo sapien
agctgttggattcttgtaaaagcac

SEQ ID NO: 4506996 - DNA, 25 bp, Homo sapien
gctgttggattcttgtaaaagcacc

SEQ ID NO: 4506997 - DNA, 25 bp, Homo sapien
tgttggattcttgtaaaagcaccat

SEQ ID NO: 4506998 - DNA, 25 bp, Homo sapien
tttgattggattagacgctgccttt

SEQ ID NO: 4506999 - DNA, 25 bp, Homo sapien
cagccaaaatgacatctcacgttca

SEQ ID NO: 4507000 - DNA, 25 bp, Homo sapien
tcctggcttcaattagaggcagcca

SEQ ID NO: 4507001 - DNA, 25 bp, Homo sapien
ttcatattcttgacacacgctgctc

SEQ ID NO: 4507002 - DNA, 25 bp, Homo sapien
aaaacatgacaggggagggtgtaat

SEQ ID NO: 4507003 - DNA, 25 bp, Homo sapien
gtaattggggagacaaaatacacag

SEQ ID NO: 4507004 - DNA, 25 bp, Homo sapien
acacaggaagtttgtaatttacatg

SEQ ID NO: 4507005 - DNA, 25 bp, Homo sapien
caggaagtttgtaatttacatgtca

SEQ ID NO: 4507006 - DNA, 25 bp, Homo sapien
gcataaagattgaagctgccgactg

SEQ ID NO: 4507007 - DNA, 25 bp, Homo sapien
gactgctggtacctgagacctcctt

SEQ ID NO: 4507008 - DNA, 25 bp, Homo sapien
attgaagctgccgactgactgctgg

SEQ ID NO: 4507009 - DNA, 25 bp, Homo sapien
tgccgactgactgctggtacctgag

SEQ ID NO: 4507010 - DNA, 25 bp, Homo sapien
tgctgcccctggagttttgtcagga

SEQ ID NO: 4507011 - DNA, 25 bp, Homo sapien
caggaagagtagcttcaagagtatg

SEQ ID NO: 4507012 - DNA, 25 bp, Homo sapien
gagttttgtcaggaagagtagcttc

SEQ ID NO: 4507013 - DNA, 25 bp, Homo sapien
ccctggagttttgtcaggaagagta

SEQ ID NO: 4507014 - DNA, 25 bp, Homo sapien
cttggtgatctgaacctgaccacca

SEQ ID NO: 4507015 - DNA, 25 bp, Homo sapien
ttggtgatctgaacctgaccaccag

SEQ ID NO: 4507016 - DNA, 25 bp, Homo sapien
tggtgatctgaacctgaccaccaga

SEQ ID NO: 4507017 - DNA, 25 bp, Homo sapien
ggctttcccggagaagtagcagaag

SEQ ID NO: 4507018 - DNA, 25 bp, Homo sapien
gaatggtcctcagacagagctcgct

SEQ ID NO: 4507019 - DNA, 25 bp, Homo sapien
ggtatgtgcacaagcttcattgggc

SEQ ID NO: 4507020 - DNA, 25 bp, Homo sapien
gctcgctcaggaagaggactgacga

SEQ ID NO: 4507021 - DNA, 25 bp, Homo sapien
ggttgcaccctaagccaaggacaat

SEQ ID NO: 4507022 - DNA, 25 bp, Homo sapien
catggattctttcctactgtcccga

SEQ ID NO: 4507023 - DNA, 25 bp, Homo sapien
tcagcttgacatgcaacacacgaga

SEQ ID NO: 4507024 - DNA, 25 bp, Homo sapien
tctagttcatcacgccaggctgatt

SEQ ID NO: 4507025 - DNA, 25 bp, Homo sapien
taatttgagcttggatgtcagcagt

SEQ ID NO: 4507026 - DNA, 25 bp, Homo sapien
tactaatttgagcttggatgtcagc

SEQ ID NO: 4507027 - DNA, 25 bp, Homo sapien
actaatttgagcttggatgtcagca

SEQ ID NO: 4507028 - DNA, 25 bp, Homo sapien
ctactaatttgagcttggatgtcag

SEQ ID NO: 4507029 - DNA, 25 bp, Homo sapien
tccatcctggcctacaacctttacc

SEQ ID NO: 4507030 - DNA, 25 bp, Homo sapien
catcctggcctacaacctttaccat

SEQ ID NO: 4507031 - DNA, 25 bp, Homo sapien
cactccatcctggcctacaaccttt

SEQ ID NO: 4507032 - DNA, 25 bp, Homo sapien
tcttcctctgtccgcactccatcct

SEQ ID NO: 4507033 - DNA, 25 bp, Homo sapien
aatagtcatcgagggtgtggaagcc

SEQ ID NO: 4507034 - DNA, 25 bp, Homo sapien
taaggaatgcggcacttggccagca

SEQ ID NO: 4507035 - DNA, 25 bp, Homo sapien
ggcagctgattaaggaatgcggcac

SEQ ID NO: 4507036 - DNA, 25 bp, Homo sapien
aagggcagcacctcttggatcgtgg

SEQ ID NO: 4507037 - DNA, 25 bp, Homo sapien
taacatcaatcttaccaaattctcc

SEQ ID NO: 4507038 - DNA, 25 bp, Homo sapien
tcatctggtattcattgcaataaca

SEQ ID NO: 4507039 - DNA, 25 bp, Homo sapien
gtaattgagcactaaatgatgtccc

SEQ ID NO: 4507040 - DNA, 25 bp, Homo sapien
tcctggtgttaatgtagatgttctg

SEQ ID NO: 4507041 - DNA, 25 bp, Homo sapien
tcatccaagtaataatggcttgtaa

SEQ ID NO: 4507042 - DNA, 25 bp, Homo sapien
tccaagtaataatggcttgtaacaa

SEQ ID NO: 4507043 - DNA, 25 bp, Homo sapien
catccaagtaataatggcttgtaac

SEQ ID NO: 4507044 - DNA, 25 bp, Homo sapien
ggcttgtaacaagaccattttcttg

SEQ ID NO: 4507045 - DNA, 25 bp, Homo sapien
gataacagtgctcgaccatattggg

SEQ ID NO: 4507046 - DNA, 25 bp, Homo sapien
acaagcattgattctgatatttccc

SEQ ID NO: 4507047 - DNA, 25 bp, Homo sapien
tcaggacctcaatgtaatatacaag

SEQ ID NO: 4507048 - DNA, 25 bp, Homo sapien
catattggggtcgtaagtcagtaag

SEQ ID NO: 4507049 - DNA, 25 bp, Homo sapien
ctgtgttgtgatttagaaggccctt

SEQ ID NO: 4507050 - DNA, 25 bp, Homo sapien
tgttgtgatttagaaggcccttggc

SEQ ID NO: 4507051 - DNA, 25 bp, Homo sapien
tgtgttgtgatttagaaggcccttg

SEQ ID NO: 4507052 - DNA, 25 bp, Homo sapien
ttgtgatttagaaggcccttggcca

SEQ ID NO: 4507053 - DNA, 25 bp, Homo sapien
tgagaaacagcatctaataagctga

SEQ ID NO: 4507054 - DNA, 25 bp, Homo sapien
gaggtgttgaaaacctttgaggaca

SEQ ID NO: 4507055 - DNA, 25 bp, Homo sapien
cacattaattgtgggtgttcagaat

SEQ ID NO: 4507056 - DNA, 25 bp, Homo sapien
cattttagtacccattctcaggagg

SEQ ID NO: 4507057 - DNA, 25 bp, Homo sapien
gttagtggcacaaaagcctggtggt

SEQ ID NO: 4507058 - DNA, 25 bp, Homo sapien
gaataagttccaattgatgtacccc

SEQ ID NO: 4507059 - DNA, 25 bp, Homo sapien
gaaagtgttacgactccagctgtga

SEQ ID NO: 4507060 - DNA, 25 bp, Homo sapien
tgattgatgtccttctagactccag

SEQ ID NO: 4507061 - DNA, 25 bp, Homo sapien
agctcctggttggtgtcaacacagt

SEQ ID NO: 4507062 - DNA, 25 bp, Homo sapien
ctcctggttggtgtcaacacagtga

SEQ ID NO: 4507063 - DNA, 25 bp, Homo sapien
gctcctggttggtgtcaacacagtg

SEQ ID NO: 4507064 - DNA, 25 bp, Homo sapien
tcctggttggtgtcaacacagtgat

SEQ ID NO: 4507065 - DNA, 25 bp, Homo sapien
gatgctccgggaaatcacatttgga

SEQ ID NO: 4507066 - DNA, 25 bp, Homo sapien
ctgtgctatttttgaagtaatggga

SEQ ID NO: 4507067 - DNA, 25 bp, Homo sapien
tttggaagatttactggtgagggct

SEQ ID NO: 4507068 - DNA, 25 bp, Homo sapien
tgtgccatcagaacagttctgtgct

SEQ ID NO: 4507069 - DNA, 25 bp, Homo sapien
atgctgctgtggccgatcttctgag

SEQ ID NO: 4507070 - DNA, 25 bp, Homo sapien
gagggaaggtcagctcccagcatgc

SEQ ID NO: 4507071 - DNA, 25 bp, Homo sapien
tgctgtggccgatcttctgagggaa

SEQ ID NO: 4507072 - DNA, 25 bp, Homo sapien
ttctgagggaaggtcagctcccagc

SEQ ID NO: 4507073 - DNA, 25 bp, Homo sapien
aggtgacaggcggcatgaaaaagta

SEQ ID NO: 4507074 - DNA, 25 bp, Homo sapien
tgaaaaagtacactaattgagacat

SEQ ID NO: 4507075 - DNA, 25 bp, Homo sapien
gacaggcggcatgaaaaagtacact

SEQ ID NO: 4507076 - DNA, 25 bp, Homo sapien
caggcggcatgaaaaagtacactaa

SEQ ID NO: 4507077 - DNA, 25 bp, Homo sapien
gacagctgtggttaagaatgcatcc

SEQ ID NO: 4507078 - DNA, 25 bp, Homo sapien
tcagcgtgaaagaatcaggctgcca

SEQ ID NO: 4507079 - DNA, 25 bp, Homo sapien
tcatgtgctgggaatgtcgattgct

SEQ ID NO: 4507080 - DNA, 25 bp, Homo sapien
gcagtgatccggttttcagcgtgaa

SEQ ID NO: 4507081 - DNA, 25 bp, Homo sapien
ctgcgcaatggactgtctgtgagag

SEQ ID NO: 4507082 - DNA, 25 bp, Homo sapien
caatggactgtctgtgagagctgct

SEQ ID NO: 4507083 - DNA, 25 bp, Homo sapien
gactgtctgtgagagctgcttggct

SEQ ID NO: 4507084 - DNA, 25 bp, Homo sapien
cgcaatggactgtctgtgagagctg

SEQ ID NO: 4507085 - DNA, 25 bp, Homo sapien
gccttctatattgcggagtgctttt

SEQ ID NO: 4507086 - DNA, 25 bp, Homo sapien
cttttttggccattagactgtgttg

SEQ ID NO: 4507087 - DNA, 25 bp, Homo sapien
ttctgccttctatattgcggagtgc

SEQ ID NO: 4507088 - DNA, 25 bp, Homo sapien
cattagactgtgttgagaaagagga

SEQ ID NO: 4507089 - DNA, 25 bp, Homo sapien
gagaatgagattctgagcctctgaa

SEQ ID NO: 4507090 - DNA, 25 bp, Homo sapien
aaggacccataggttcccactcagg

SEQ ID NO: 4507091 - DNA, 25 bp, Homo sapien
gagcctctgaattccgatggcccca

SEQ ID NO: 4507092 - DNA, 25 bp, Homo sapien
ttccgatggccccaaaggacccata

SEQ ID NO: 4507093 - DNA, 25 bp, Homo sapien
actgatttgcaccttccccgactgg

SEQ ID NO: 4507094 - DNA, 25 bp, Homo sapien
gcaccttccccgactggatagatca

SEQ ID NO: 4507095 - DNA, 25 bp, Homo sapien
gatcattaagagaattggtttacaa

SEQ ID NO: 4507096 - DNA, 25 bp, Homo sapien
ccccgactggatagatcattaagag

SEQ ID NO: 4507097 - DNA, 25 bp, Homo sapien
tttggcccctggaattctcggctgt

SEQ ID NO: 4507098 - DNA, 25 bp, Homo sapien
ttggcccctggaattctcggctgta

SEQ ID NO: 4507099 - DNA, 25 bp, Homo sapien
tctgtgttctgacccatgccggctg

SEQ ID NO: 4507100 - DNA, 25 bp, Homo sapien
taagtctgtgcttgagcttgctcaa

SEQ ID NO: 4507101 - DNA, 25 bp, Homo sapien
gtttgtgctggtccctgtctttccc

SEQ ID NO: 4507102 - DNA, 25 bp, Homo sapien
tagcctggttctgcggattcttttc

SEQ ID NO: 4507103 - DNA, 25 bp, Homo sapien
gattactgctgacatccccttcaaa

SEQ ID NO: 4507104 - DNA, 25 bp, Homo sapien
tcactgtcacaacaccttcttcggg

SEQ ID NO: 4507105 - DNA, 25 bp, Homo sapien
acaacaccttcttcgggactgacag

SEQ ID NO: 4507106 - DNA, 25 bp, Homo sapien
tcttcgggactgacagtcttggtaa

SEQ ID NO: 4507107 - DNA, 25 bp, Homo sapien
cagtcttggtaattgatgggttggt

SEQ ID NO: 4507108 - DNA, 25 bp, Homo sapien
cgaatgacatccagaaactctcctt

SEQ ID NO: 4507109 - DNA, 25 bp, Homo sapien
gttccgaatgacatccagaaactct

SEQ ID NO: 4507110 - DNA, 25 bp, Homo sapien
ttccgaatgacatccagaaactctc

SEQ ID NO: 4507111 - DNA, 25 bp, Homo sapien
tcagttccgaatgacatccagaaac

SEQ ID NO: 4507112 - DNA, 25 bp, Homo sapien
tacccagtcctggtgatgagcttga

SEQ ID NO: 4507113 - DNA, 25 bp, Homo sapien
ttgacctcattacccagtcctggtg

SEQ ID NO: 4507114 - DNA, 25 bp, Homo sapien
tcctggggaacgtgccttccagttg

SEQ ID NO: 4507115 - DNA, 25 bp, Homo sapien
gttttcacattgacctcattaccca

SEQ ID NO: 4507116 - DNA, 25 bp, Homo sapien
cctgggaagatgcagggcccggttg

SEQ ID NO: 4507117 - DNA, 25 bp, Homo sapien
ggagtgtagactccctccgcaggcc

SEQ ID NO: 4507118 - DNA, 25 bp, Homo sapien
gatgtggggagtgtagactccctcc

SEQ ID NO: 4507119 - DNA, 25 bp, Homo sapien
cagggcccggttgtctggcttcttt

SEQ ID NO: 4507120 - DNA, 25 bp, Homo sapien
acttctccgggtgaatgctctaatc

SEQ ID NO: 4507121 - DNA, 25 bp, Homo sapien
tccgggtgaatgctctaatctctct

SEQ ID NO: 4507122 - DNA, 25 bp, Homo sapien
ggaatggattcttggctgctggcat

SEQ ID NO: 4507123 - DNA, 25 bp, Homo sapien
tcctggaggaatggattcttggctg

SEQ ID NO: 4507124 - DNA, 25 bp, Homo sapien
tgatgagcgctcagaagttttaggg

SEQ ID NO: 4507125 - DNA, 25 bp, Homo sapien
gtgtataaacaccagctctcatggg

SEQ ID NO: 4507126 - DNA, 25 bp, Homo sapien
tcacatgcgggaatgttcttttgat

SEQ ID NO: 4507127 - DNA, 25 bp, Homo sapien
tagggcccagggtcgtgtataaaca

SEQ ID NO: 4507128 - DNA, 25 bp, Homo sapien
agaatacagatcatttttaggaaag

SEQ ID NO: 4507129 - DNA, 25 bp, Homo sapien
aagaatacagatcatttttaggaaa

SEQ ID NO: 4507130 - DNA, 25 bp, Homo sapien
gaagaatacagatcatttttaggaa

SEQ ID NO: 4507131 - DNA, 25 bp, Homo sapien
cagctccaggagatcctttctttag

SEQ ID NO: 4507132 - DNA, 25 bp, Homo sapien
tcagctccaggagatcctttcttta

SEQ ID NO: 4507133 - DNA, 25 bp, Homo sapien
atcctttctttagatcctcaggcat

SEQ ID NO: 4507134 - DNA, 25 bp, Homo sapien
ttgctgtatggtgatgagcaacagt

SEQ ID NO: 4507135 - DNA, 25 bp, Homo sapien
ggccttgggcgtcttatagtttgag

SEQ ID NO: 4507136 - DNA, 25 bp, Homo sapien
gtcttatagtttgagcaatcatcag

SEQ ID NO: 4507137 - DNA, 25 bp, Homo sapien
gggcgtcttatagtttgagcaatca

SEQ ID NO: 4507138 - DNA, 25 bp, Homo sapien
gccttctttatgtgcgctggctggc

SEQ ID NO: 4507139 - DNA, 25 bp, Homo sapien
ccttctttatgtgcgctggctggca

SEQ ID NO: 4507140 - DNA, 25 bp, Homo sapien
ttgccttctttatgtgcgctggctg

SEQ ID NO: 4507141 - DNA, 25 bp, Homo sapien
accttgccttctttatgtgcgctgg

SEQ ID NO: 4507142 - DNA, 25 bp, Homo sapien
tatgtgtagtcacagccccatttac

SEQ ID NO: 4507143 - DNA, 25 bp, Homo sapien
cctagagtgtggcttgagcatgtcc

SEQ ID NO: 4507144 - DNA, 25 bp, Homo sapien
gccccatttacaacacctagagtgt

SEQ ID NO: 4507145 - DNA, 25 bp, Homo sapien
cattctgcactgtgtcctgcatatg

SEQ ID NO: 4507146 - DNA, 25 bp, Homo sapien
aaggttttcagccaaccggcttcag

SEQ ID NO: 4507147 - DNA, 25 bp, Homo sapien
tataaatcatggctagttcccagtt

SEQ ID NO: 4507148 - DNA, 25 bp, Homo sapien
cgagggcccgcagtcaggattttaa

SEQ ID NO: 4507149 - DNA, 25 bp, Homo sapien
ccggcttcagcttgcaaccattatg

SEQ ID NO: 4507150 - DNA, 25 bp, Homo sapien
cacaaaagtcgtgcaatgccttgga

SEQ ID NO: 4507151 - DNA, 25 bp, Homo sapien
gacagttgctgtgtcgactcgcgta

SEQ ID NO: 4507152 - DNA, 25 bp, Homo sapien
catctgtatggaagtggtagcctga

SEQ ID NO: 4507153 - DNA, 25 bp, Homo sapien
tctgtggcaaagaggcgctgaagtt

SEQ ID NO: 4507154 - DNA, 25 bp, Homo sapien
ggacagcgaaatgttttggaagtgc

SEQ ID NO: 4507155 - DNA, 25 bp, Homo sapien
aaggacagcgaaatgttttggaagt

SEQ ID NO: 4507156 - DNA, 25 bp, Homo sapien
gacagcgaaatgttttggaagtgca

SEQ ID NO: 4507157 - DNA, 25 bp, Homo sapien
acagcgaaatgttttggaagtgcat

SEQ ID NO: 4507158 - DNA, 25 bp, Homo sapien
ggttaggaggcaccctgtaaatatg

SEQ ID NO: 4507159 - DNA, 25 bp, Homo sapien
ctggttaggaggcaccctgtaaata

SEQ ID NO: 4507160 - DNA, 25 bp, Homo sapien
gttaggaggcaccctgtaaatatgc

SEQ ID NO: 4507161 - DNA, 25 bp, Homo sapien
tggttaggaggcaccctgtaaatat

SEQ ID NO: 4507162 - DNA, 25 bp, Homo sapien
cccgcagactcatgaacacgaagga

SEQ ID NO: 4507163 - DNA, 25 bp, Homo sapien
tttgaagtgtgatggccccgcagac

SEQ ID NO: 4507164 - DNA, 25 bp, Homo sapien
gagatttcccggagcctgcttcagg

SEQ ID NO: 4507165 - DNA, 25 bp, Homo sapien
tgtggagcggtgattgcaatttttc

SEQ ID NO: 4507166 - DNA, 25 bp, Homo sapien
tgaaaccagagccttggtgtagcct

SEQ ID NO: 4507167 - DNA, 25 bp, Homo sapien
gtagcctgccttccgcatggctgtc

SEQ ID NO: 4507168 - DNA, 25 bp, Homo sapien
ttggtgtagcctgccttccgcatgg

SEQ ID NO: 4507169 - DNA, 25 bp, Homo sapien
ggtgtagcctgccttccgcatggct

SEQ ID NO: 4507170 - DNA, 25 bp, Homo sapien
gaaacttgctgatttgtcttgtaag

SEQ ID NO: 4507171 - DNA, 25 bp, Homo sapien
tctgaccctttctgaatgggcctct

SEQ ID NO: 4507172 - DNA, 25 bp, Homo sapien
acacctttagttccagatggagtct

SEQ ID NO: 4507173 - DNA, 25 bp, Homo sapien
tgttgtacttgtcaggaaacttgct

SEQ ID NO: 4507174 - DNA, 25 bp, Homo sapien
ttcaaaagtaaggtgagaggaaaga

SEQ ID NO: 4507175 - DNA, 25 bp, Homo sapien
cttcaaaagtaaggtgagaggaaag

SEQ ID NO: 4507176 - DNA, 25 bp, Homo sapien
cactctgtatgcccatgacattttc

SEQ ID NO: 4507177 - DNA, 25 bp, Homo sapien
ctctgtatgcccatgacattttcac

SEQ ID NO: 4507178 - DNA, 25 bp, Homo sapien
tctgtatgcccatgacattttcacc

SEQ ID NO: 4507179 - DNA, 25 bp, Homo sapien
actctgtatgcccatgacattttca

SEQ ID NO: 4507180 - DNA, 25 bp, Homo sapien
ggtagagggatgtgctgctgtcacc

SEQ ID NO: 4507181 - DNA, 25 bp, Homo sapien
gggtagagggatgtgctgctgtcac

SEQ ID NO: 4507182 - DNA, 25 bp, Homo sapien
ctgggtagagggatgtgctgctgtc

SEQ ID NO: 4507183 - DNA, 25 bp, Homo sapien
tgggtagagggatgtgctgctgtca

SEQ ID NO: 4507184 - DNA, 25 bp, Homo sapien
gatacgaagagtcgggctttccgtg

SEQ ID NO: 4507185 - DNA, 25 bp, Homo sapien
tggtttcgggctccggatccgtgct

SEQ ID NO: 4507186 - DNA, 25 bp, Homo sapien
gatccgtgctggacagttgttccac

SEQ ID NO: 4507187 - DNA, 25 bp, Homo sapien
ccgccgcatggtgttgtggtattac

SEQ ID NO: 4507188 - DNA, 25 bp, Homo sapien
tgcgctcacaggtagtcctgcccat

SEQ ID NO: 4507189 - DNA, 25 bp, Homo sapien
cccagtgctgcgctcacaggtagtc

SEQ ID NO: 4507190 - DNA, 25 bp, Homo sapien
ctgaatggctgggacattcaaagtt

SEQ ID NO: 4507191 - DNA, 25 bp, Homo sapien
cattcaaagttctcccagtgctgcg

SEQ ID NO: 4507192 - DNA, 25 bp, Homo sapien
caggaacctggaacaggtgctttgc

SEQ ID NO: 4507193 - DNA, 25 bp, Homo sapien
gtcgttggctcagagagcgtgggcc

SEQ ID NO: 4507194 - DNA, 25 bp, Homo sapien
tgccaaagtctgagcctcctggcgg

SEQ ID NO: 4507195 - DNA, 25 bp, Homo sapien
gaattttatgacactcaagttcttc

SEQ ID NO: 4507196 - DNA, 25 bp, Homo sapien
gacgatggtgtctgcttggcctcta

SEQ ID NO: 4507197 - DNA, 25 bp, Homo sapien
tctcacccgcaagggaggacgatgg

SEQ ID NO: 4507198 - DNA, 25 bp, Homo sapien
tcgttagagtcctccactgttcggg

SEQ ID NO: 4507199 - DNA, 25 bp, Homo sapien
tgttggaatcaaagcactgggcaga

SEQ ID NO: 4507200 - DNA, 25 bp, Homo sapien
tgcccgccatattatcatattccag

SEQ ID NO: 4507201 - DNA, 25 bp, Homo sapien
cccgccatattatcatattccagga

SEQ ID NO: 4507202 - DNA, 25 bp, Homo sapien
cgccatattatcatattccaggatc

SEQ ID NO: 4507203 - DNA, 25 bp, Homo sapien
ctctgcccgccatattatcatattc

SEQ ID NO: 4507204 - DNA, 25 bp, Homo sapien
atgaaggctttgtagtctgttctat

SEQ ID NO: 4507205 - DNA, 25 bp, Homo sapien
ggctttgtagtctgttctatttgca

SEQ ID NO: 4507206 - DNA, 25 bp, Homo sapien
ttgttgctctcatgtaaatgagaat

SEQ ID NO: 4507207 - DNA, 25 bp, Homo sapien
ttgtagtctgttctatttgcaggga

SEQ ID NO: 4507208 - DNA, 25 bp, Homo sapien
ggccagggcacagaatatgaaggtg

SEQ ID NO: 4507209 - DNA, 25 bp, Homo sapien
gcacagaatatgaaggtgagtggct

SEQ ID NO: 4507210 - DNA, 25 bp, Homo sapien
cagggcacagaatatgaaggtgagt

SEQ ID NO: 4507211 - DNA, 25 bp, Homo sapien
aaggtgagtggcttgagcatgccgg

SEQ ID NO: 4507212 - DNA, 25 bp, Homo sapien
ctgcttcccctcctggagactccca

SEQ ID NO: 4507213 - DNA, 25 bp, Homo sapien
tgcttcccctcctggagactcccac

SEQ ID NO: 4507214 - DNA, 25 bp, Homo sapien
cggctgctgcgaccgcctctgattt

SEQ ID NO: 4507215 - DNA, 25 bp, Homo sapien
tgctgatggagacgaggaacggctg

SEQ ID NO: 4507216 - DNA, 25 bp, Homo sapien
acgaggaacggctgctgcgaccgcc

SEQ ID NO: 4507217 - DNA, 25 bp, Homo sapien
aaatggcaacgcggatgctgatgga

SEQ ID NO: 4507218 - DNA, 25 bp, Homo sapien
cagacacacgtgtgactaactcagg

SEQ ID NO: 4507219 - DNA, 25 bp, Homo sapien
tccttcgctctggagcagtgagctc

SEQ ID NO: 4507220 - DNA, 25 bp, Homo sapien
gtgactaactcaggcacaaggcagg

SEQ ID NO: 4507221 - DNA, 25 bp, Homo sapien
ttcgtcacctctagcaaaacctgtc

SEQ ID NO: 4507222 - DNA, 25 bp, Homo sapien
aaatgcctttatgatgattaatctg

SEQ ID NO: 4507223 - DNA, 25 bp, Homo sapien
gcctttatgatgattaatctgaaca

SEQ ID NO: 4507224 - DNA, 25 bp, Homo sapien
tatgatgattaatctgaacattaaa

SEQ ID NO: 4507225 - DNA, 25 bp, Homo sapien
tgcctttatgatgattaatctgaac

SEQ ID NO: 4507226 - DNA, 25 bp, Homo sapien
ctgtgggagggaaggatggaaagag

SEQ ID NO: 4507227 - DNA, 25 bp, Homo sapien
gtcaggtgtggactttccaataccc

SEQ ID NO: 4507228 - DNA, 25 bp, Homo sapien
catccagtcaggtgtggactttcca

SEQ ID NO: 4507229 - DNA, 25 bp, Homo sapien
gaaaacatccagtcaggtgtggact

SEQ ID NO: 4507230 - DNA, 25 bp, Homo sapien
tgagagctgaaaacatccagtcagg

SEQ ID NO: 4507231 - DNA, 25 bp, Homo sapien
gcctgtgagagtgcccatgagatag

SEQ ID NO: 4507232 - DNA, 25 bp, Homo sapien
gatcttcagtggaggttcccaatgc

SEQ ID NO: 4507233 - DNA, 25 bp, Homo sapien
cagacaaccttcgtaaagcctgtga

SEQ ID NO: 4507234 - DNA, 25 bp, Homo sapien
tcagtggaggttcccaatgcagaca

SEQ ID NO: 4507235 - DNA, 25 bp, Homo sapien
gaactcctggagaatggcatgactc

SEQ ID NO: 4507236 - DNA, 25 bp, Homo sapien
taaattctgctctcgatccgcagga

SEQ ID NO: 4507237 - DNA, 25 bp, Homo sapien
aatgttaaattctgctctcgatccg

SEQ ID NO: 4507238 - DNA, 25 bp, Homo sapien
tccagtagccagaatcagagcaaac

SEQ ID NO: 4507239 - DNA, 25 bp, Homo sapien
agcaatatggtagcacattggagct

SEQ ID NO: 4507240 - DNA, 25 bp, Homo sapien
ggtagcacattggagctgtgccctt

SEQ ID NO: 4507241 - DNA, 25 bp, Homo sapien
ttggaggtggtgtagccttcagaag

SEQ ID NO: 4507242 - DNA, 25 bp, Homo sapien
tatggtagcacattggagctgtgcc

SEQ ID NO: 4507243 - DNA, 25 bp, Homo sapien
aggcctgaaatggtaactgagtaaa

SEQ ID NO: 4507244 - DNA, 25 bp, Homo sapien
aaaggcctgaaatggtaactgagta

SEQ ID NO: 4507245 - DNA, 25 bp, Homo sapien
aaggcctgaaatggtaactgagtaa

SEQ ID NO: 4507246 - DNA, 25 bp, Homo sapien
tctgaaatatcggaacaaaagttcc

SEQ ID NO: 4507247 - DNA, 25 bp, Homo sapien
gcactacttttggtcacacgtctga

SEQ ID NO: 4507248 - DNA, 25 bp, Homo sapien
tggtcacacgtctgaaatatcggaa

SEQ ID NO: 4507249 - DNA, 25 bp, Homo sapien
ccgaagcagcctttggaaagcacta

SEQ ID NO: 4507250 - DNA, 25 bp, Homo sapien
aactgttcagaagcatttgggttgt

SEQ ID NO: 4507251 - DNA, 25 bp, Homo sapien
actgttcagaagcatttgggttgtt

SEQ ID NO: 4507252 - DNA, 25 bp, Homo sapien
caactgttcagaagcatttgggttg

SEQ ID NO: 4507253 - DNA, 25 bp, Homo sapien
cagataagaacgttaacatttcccg

SEQ ID NO: 4507254 - DNA, 25 bp, Homo sapien
ttaacatttcccgtgtcaactcctc

SEQ ID NO: 4507255 - DNA, 25 bp, Homo sapien
cctccgcaaggatcgtggcaattct

SEQ ID NO: 4507256 - DNA, 25 bp, Homo sapien
taagcattgctgtcaaggagtacac

SEQ ID NO: 4507257 - DNA, 25 bp, Homo sapien
tgcctgatgatcaatactggaggaa

SEQ ID NO: 4507258 - DNA, 25 bp, Homo sapien
tcttcagtaagtttaatgggttctc

SEQ ID NO: 4507259 - DNA, 25 bp, Homo sapien
gcaggaaccaaattgtatagcaaat

SEQ ID NO: 4507260 - DNA, 25 bp, Homo sapien
ttctaaattggcagtctctttggtc

SEQ ID NO: 4507261 - DNA, 25 bp, Homo sapien
taaacaataaaagttatttgatatc

SEQ ID NO: 4507262 - DNA, 25 bp, Homo sapien
agttatttgatatcagcaatgtgtg

SEQ ID NO: 4507263 - DNA, 25 bp, Homo sapien
taaaagttatttgatatcagcaatg

SEQ ID NO: 4507264 - DNA, 25 bp, Homo sapien
tatttgatatcagcaatgtgtgtcc

SEQ ID NO: 4507265 - DNA, 25 bp, Homo sapien
tagtgcctgtttgcatcatgtagat

SEQ ID NO: 4507266 - DNA, 25 bp, Homo sapien
gtaatgacggtatctttctgtacac

SEQ ID NO: 4507267 - DNA, 25 bp, Homo sapien
ttctgtacacaatgtattcagttac

SEQ ID NO: 4507268 - DNA, 25 bp, Homo sapien
tttaggtccatctggtaatgacggt

SEQ ID NO: 4507269 - DNA, 25 bp, Homo sapien
gatggaaggtgccacaaggatggga

SEQ ID NO: 4507270 - DNA, 25 bp, Homo sapien
aaggtgccacaaggatgggagccac

SEQ ID NO: 4507271 - DNA, 25 bp, Homo sapien
tgccacaaggatgggagccaccttc

SEQ ID NO: 4507272 - DNA, 25 bp, Homo sapien
acgtggatggaaggtgccacaagga

SEQ ID NO: 4507273 - DNA, 25 bp, Homo sapien
tgtgatgctcctggttggctgatct

SEQ ID NO: 4507274 - DNA, 25 bp, Homo sapien
ctgtgatgctcctggttggctgatc

SEQ ID NO: 4507275 - DNA, 25 bp, Homo sapien
ccactctgatggcaggccctgctct

SEQ ID NO: 4507276 - DNA, 25 bp, Homo sapien
gtgatgctcctggttggctgatctt

SEQ ID NO: 4507277 - DNA, 25 bp, Homo sapien
agcgcgcatgtgcagaggagagtcc

SEQ ID NO: 4507278 - DNA, 25 bp, Homo sapien
cctgctaagcgcgcatgtgcagagg

SEQ ID NO: 4507279 - DNA, 25 bp, Homo sapien
gcgcatgtgcagaggagagtccctt

SEQ ID NO: 4507280 - DNA, 25 bp, Homo sapien
ttttcccagcagagctgctcatcca

SEQ ID NO: 4507281 - DNA, 25 bp, Homo sapien
aggaatccaagctggcacagaaatg

SEQ ID NO: 4507282 - DNA, 25 bp, Homo sapien
gtgcctgaacatccacagaataatt

SEQ ID NO: 4507283 - DNA, 25 bp, Homo sapien
cacaggtaggaatccaagctggcac

SEQ ID NO: 4507284 - DNA, 25 bp, Homo sapien
tggcacagaaatgtgcctgaacatc

SEQ ID NO: 4507285 - DNA, 25 bp, Homo sapien
cagccttcagagtaggtgcttggtg

SEQ ID NO: 4507286 - DNA, 25 bp, Homo sapien
agccttcagagtaggtgcttggtga

SEQ ID NO: 4507287 - DNA, 25 bp, Homo sapien
ccttcagagtaggtgcttggtgaga

SEQ ID NO: 4507288 - DNA, 25 bp, Homo sapien
gccttcagagtaggtgcttggtgag

SEQ ID NO: 4507289 - DNA, 25 bp, Homo sapien
ctactcgtattcaaggccaaacctc

SEQ ID NO: 4507290 - DNA, 25 bp, Homo sapien
aggccaaacctcaactccattgttc

SEQ ID NO: 4507291 - DNA, 25 bp, Homo sapien
gatgctctctgtaagcctcttattg

SEQ ID NO: 4507292 - DNA, 25 bp, Homo sapien
tctgtaagcctcttattgagttcca

SEQ ID NO: 4507293 - DNA, 25 bp, Homo sapien
agatttcttttgtagtattacactt

SEQ ID NO: 4507294 - DNA, 25 bp, Homo sapien
aaggctgaaaaggacaggcacctgg

SEQ ID NO: 4507295 - DNA, 25 bp, Homo sapien
ccagaaggaggagcctcgggttgaa

SEQ ID NO: 4507296 - DNA, 25 bp, Homo sapien
cacacacctctttactgtctccact

SEQ ID NO: 4507297 - DNA, 25 bp, Homo sapien
ctgtctccactccttgtaaatgatg

SEQ ID NO: 4507298 - DNA, 25 bp, Homo sapien
tcactctacgaagcctggtgtcttt

SEQ ID NO: 4507299 - DNA, 25 bp, Homo sapien
tccccagaggtggaattagcttttc

SEQ ID NO: 4507300 - DNA, 25 bp, Homo sapien
gatctccgtgggtccaaaatggaaa

SEQ ID NO: 4507301 - DNA, 25 bp, Homo sapien
gaggtttcagagagcatttgcgcag

SEQ ID NO: 4507302 - DNA, 25 bp, Homo sapien
taactttcggcaccacgttcagtaa

SEQ ID NO: 4507303 - DNA, 25 bp, Homo sapien
cctgggccaagagtgataggcaccc

SEQ ID NO: 4507304 - DNA, 25 bp, Homo sapien
aatgctggtaaacaagagccccagc

SEQ ID NO: 4507305 - DNA, 25 bp, Homo sapien
taatgctggtaaacaagagccccag

SEQ ID NO: 4507306 - DNA, 25 bp, Homo sapien
ttaatgctggtaaacaagagcccca

SEQ ID NO: 4507307 - DNA, 25 bp, Homo sapien
atgctggtaaacaagagccccagcc

SEQ ID NO: 4507308 - DNA, 25 bp, Homo sapien
tcgccccgaagtccgggtcacaggc

SEQ ID NO: 4507309 - DNA, 25 bp, Homo sapien
ccggcgaggggcagaaacgcggagt

SEQ ID NO: 4507310 - DNA, 25 bp, Homo sapien
gcagttcgcaagatcgccccgaagt

SEQ ID NO: 4507311 - DNA, 25 bp, Homo sapien
gcagaaacgcggagtcaaaatgaat

SEQ ID NO: 4507312 - DNA, 25 bp, Homo sapien
ggcgggctgtcggcgtcgtcggcct

SEQ ID NO: 4507313 - DNA, 25 bp, Homo sapien
gggcgggctgtcggcgtcgtcggcc

SEQ ID NO: 4507314 - DNA, 25 bp, Homo sapien
ggggcgggctgtcggcgtcgtcggc

SEQ ID NO: 4507315 - DNA, 25 bp, Homo sapien
ttgggatgaaattcccctttctcaa

SEQ ID NO: 4507316 - DNA, 25 bp, Homo sapien
tgggatgaaattcccctttctcaaa

SEQ ID NO: 4507317 - DNA, 25 bp, Homo sapien
tttgggatgaaattcccctttctca

SEQ ID NO: 4507318 - DNA, 25 bp, Homo sapien
tttctccactcgtcggccagagcga

SEQ ID NO: 4507319 - DNA, 25 bp, Homo sapien
tccactcgtcggccagagcgagagc

SEQ ID NO: 4507320 - DNA, 25 bp, Homo sapien
ggagcccccacagcgaggtcgggga

SEQ ID NO: 4507321 - DNA, 25 bp, Homo sapien
aggagcccccacagcgaggtcgggg

SEQ ID NO: 4507322 - DNA, 25 bp, Homo sapien
gcctttctgaattgccccggtgatg

SEQ ID NO: 4507323 - DNA, 25 bp, Homo sapien
tcgcccaatcgagtccgctgaaagt

SEQ ID NO: 4507324 - DNA, 25 bp, Homo sapien
gtaaacacgcgaaccacgatctgct

SEQ ID NO: 4507325 - DNA, 25 bp, Homo sapien
ttcaaagttaatcggcaccacctgc

SEQ ID NO: 4507326 - DNA, 25 bp, Homo sapien
cataggcgagatgggcaaagtgcac

SEQ ID NO: 4507327 - DNA, 25 bp, Homo sapien
tgatcctaggaccacaagaggcacg

SEQ ID NO: 4507328 - DNA, 25 bp, Homo sapien
taagggaagcctcacagcagatctc

SEQ ID NO: 4507329 - DNA, 25 bp, Homo sapien
tcttaaaggagcttgccagagggca

SEQ ID NO: 4507330 - DNA, 25 bp, Homo sapien
tggcagccatgggccgctccagctg

SEQ ID NO: 4507331 - DNA, 25 bp, Homo sapien
gatgctcatccttgcaagcagccat

SEQ ID NO: 4507332 - DNA, 25 bp, Homo sapien
tcctgttctggcagccatgggccgc

SEQ ID NO: 4507333 - DNA, 25 bp, Homo sapien
gggatgctcatccttgcaagcagcc

SEQ ID NO: 4507334 - DNA, 25 bp, Homo sapien
gctcacgtaagggtaacaattatgc

SEQ ID NO: 4507335 - DNA, 25 bp, Homo sapien
tcaaggttcacagacattgtagcac

SEQ ID NO: 4507336 - DNA, 25 bp, Homo sapien
tggatggacccttgagttgctttca

SEQ ID NO: 4507337 - DNA, 25 bp, Homo sapien
tatccacccgtctatggatggaccc

SEQ ID NO: 4507338 - DNA, 25 bp, Homo sapien
tacaagctcagttgggacatgctcc

SEQ ID NO: 4507339 - DNA, 25 bp, Homo sapien
aatggagatccagtaacagagcggg

SEQ ID NO: 4507340 - DNA, 25 bp, Homo sapien
tgaatctggaatggactcgggaccc

SEQ ID NO: 4507341 - DNA, 25 bp, Homo sapien
gtgagacaccaaacaaatgcccgca

SEQ ID NO: 4507342 - DNA, 25 bp, Homo sapien
acaggaacaccctcagcaaacatga

SEQ ID NO: 4507343 - DNA, 25 bp, Homo sapien
ggaacaccctcagcaaacatgagag

SEQ ID NO: 4507344 - DNA, 25 bp, Homo sapien
caccctcagcaaacatgagagggac

SEQ ID NO: 4507345 - DNA, 25 bp, Homo sapien
tcagcaaacatgagagggacagtca

SEQ ID NO: 4507346 - DNA, 25 bp, Homo sapien
tctccactggggcatcccgagagac

SEQ ID NO: 4507347 - DNA, 25 bp, Homo sapien
tggtatctctccatcggacaggatc

SEQ ID NO: 4507348 - DNA, 25 bp, Homo sapien
cgctggctgaaacgctggtatctct

SEQ ID NO: 4507349 - DNA, 25 bp, Homo sapien
ggacaggatctgttcaacatcaatg

SEQ ID NO: 4507350 - DNA, 25 bp, Homo sapien
ttggaatgtgagatcccaggcagcc

SEQ ID NO: 4507351 - DNA, 25 bp, Homo sapien
ctcaaagcaaccgatattggcatga

SEQ ID NO: 4507352 - DNA, 25 bp, Homo sapien
tctcccttctcaaagcaaccgatat

SEQ ID NO: 4507353 - DNA, 25 bp, Homo sapien
atgcaaaataccctttctcccttct

SEQ ID NO: 4507354 - DNA, 25 bp, Homo sapien
ctgtgataccctgccgcccacagtg

SEQ ID NO: 4507355 - DNA, 25 bp, Homo sapien
tcctctgtgataccctgccgcccac

SEQ ID NO: 4507356 - DNA, 25 bp, Homo sapien
cctcctctgtgataccctgccgccc

SEQ ID NO: 4507357 - DNA, 25 bp, Homo sapien
ctctgtgataccctgccgcccacag

SEQ ID NO: 4507358 - DNA, 25 bp, Homo sapien
aacaccatctgacaagactccacgg

SEQ ID NO: 4507359 - DNA, 25 bp, Homo sapien
caacaccatctgacaagactccacg

SEQ ID NO: 4507360 - DNA, 25 bp, Homo sapien
acaccatctgacaagactccacggg

SEQ ID NO: 4507361 - DNA, 25 bp, Homo sapien
tagttattggacaccgcatccagga

SEQ ID NO: 4507362 - DNA, 25 bp, Homo sapien
tttccagccgcggatgaccgtgagg

SEQ ID NO: 4507363 - DNA, 25 bp, Homo sapien
ggttgtaaagcccaatatccttgag

SEQ ID NO: 4507364 - DNA, 25 bp, Homo sapien
tcagctgctgatagtcgttgcggat

SEQ ID NO: 4507365 - DNA, 25 bp, Homo sapien
tgttcacatacgcactgatccaatt

SEQ ID NO: 4507366 - DNA, 25 bp, Homo sapien
caatgttcacatacgcactgatcca

SEQ ID NO: 4507367 - DNA, 25 bp, Homo sapien
aatgttcacatacgcactgatccaa

SEQ ID NO: 4507368 - DNA, 25 bp, Homo sapien
tcaatgttcacatacgcactgatcc

SEQ ID NO: 4507369 - DNA, 25 bp, Homo sapien
taatgttttcgaatggccatcttaa

SEQ ID NO: 4507370 - DNA, 25 bp, Homo sapien
gaactcaaggtagccattctgcctg

SEQ ID NO: 4507371 - DNA, 25 bp, Homo sapien
ttctgcctggactcaatgcccttca

SEQ ID NO: 4507372 - DNA, 25 bp, Homo sapien
tgcttatgttgaactcaaggtagcc

SEQ ID NO: 4507373 - DNA, 25 bp, Homo sapien
ggatacacccagaatttacagtggg

SEQ ID NO: 4507374 - DNA, 25 bp, Homo sapien
gggagacaggcctcccgaaatctgc

SEQ ID NO: 4507375 - DNA, 25 bp, Homo sapien
ttcactaagcagatgcagtgcttgc

SEQ ID NO: 4507376 - DNA, 25 bp, Homo sapien
aaaaagtgtcccatcaggtgctggg

SEQ ID NO: 4507377 - DNA, 25 bp, Homo sapien
caacaggcacttaggtaaattcagc

SEQ ID NO: 4507378 - DNA, 25 bp, Homo sapien
agaaaagagctacccgccatagtgg

SEQ ID NO: 4507379 - DNA, 25 bp, Homo sapien
tggtcagtactcctcagtagcaatg

SEQ ID NO: 4507380 - DNA, 25 bp, Homo sapien
ttaagtcagtgagatgccatcagtg

SEQ ID NO: 4507381 - DNA, 25 bp, Homo sapien
ctgatccccttgaacggaaggaaga

SEQ ID NO: 4507382 - DNA, 25 bp, Homo sapien
tgatccccttgaacggaaggaagac

SEQ ID NO: 4507383 - DNA, 25 bp, Homo sapien
agcaccaggcggagatgctcctgat

SEQ ID NO: 4507384 - DNA, 25 bp, Homo sapien
tgattccactgagaatcctcctgcc

SEQ ID NO: 4507385 - DNA, 25 bp, Homo sapien
aggcaggaaactcggggcactcagt

SEQ ID NO: 4507386 - DNA, 25 bp, Homo sapien
tgcccacacaggcaggaaactcggg

SEQ ID NO: 4507387 - DNA, 25 bp, Homo sapien
tagtctgtgagttcaaaagtctcct

SEQ ID NO: 4507388 - DNA, 25 bp, Homo sapien
ttagtctgtgagttcaaaagtctcc

SEQ ID NO: 4507389 - DNA, 25 bp, Homo sapien
gtctgtgagttcaaaagtctcctca

SEQ ID NO: 4507390 - DNA, 25 bp, Homo sapien
ctgtgagttcaaaagtctcctcatt

SEQ ID NO: 4507391 - DNA, 25 bp, Homo sapien
tgatggctcctaccccagtgcaata

SEQ ID NO: 4507392 - DNA, 25 bp, Homo sapien
cactttagtcacccctgcttcataa

SEQ ID NO: 4507393 - DNA, 25 bp, Homo sapien
taccccagtgcaataggcagatcca

SEQ ID NO: 4507394 - DNA, 25 bp, Homo sapien
gaaaagctgacggtgatggctccta

SEQ ID NO: 4507395 - DNA, 25 bp, Homo sapien
ttccagagaattacacagggcaggt

SEQ ID NO: 4507396 - DNA, 25 bp, Homo sapien
tctaggagtcccaaagaccggcatg

SEQ ID NO: 4507397 - DNA, 25 bp, Homo sapien
taatacagagggtaatcaccacagg

SEQ ID NO: 4507398 - DNA, 25 bp, Homo sapien
gattaaagaatactggcgaggtgcc

SEQ ID NO: 4507399 - DNA, 25 bp, Homo sapien
actgggataactcccaaaacaggtg

SEQ ID NO: 4507400 - DNA, 25 bp, Homo sapien
aggtgtcccaggatctccctctctg

SEQ ID NO: 4507401 - DNA, 25 bp, Homo sapien
ttcccttgggagtcgtcccactgac

SEQ ID NO: 4507402 - DNA, 25 bp, Homo sapien
tgctcgtgccacaagcacctaaact

SEQ ID NO: 4507403 - DNA, 25 bp, Homo sapien
cagtgtgtttgcaaaggacttccgg

SEQ ID NO: 4507404 - DNA, 25 bp, Homo sapien
tatcagctcctgttatggccctggc

SEQ ID NO: 4507405 - DNA, 25 bp, Homo sapien
cagaagtagcttgcaaacagtccca

SEQ ID NO: 4507406 - DNA, 25 bp, Homo sapien
tttgcctcccgaagacagctttcag

SEQ ID NO: 4507407 - DNA, 25 bp, Homo sapien
gactagaccgtcaacagagcatgca

SEQ ID NO: 4507408 - DNA, 25 bp, Homo sapien
gatcatgaaaacacagcacgcaggc

SEQ ID NO: 4507409 - DNA, 25 bp, Homo sapien
gcttcacaaaactgaggacggtcag

SEQ ID NO: 4507410 - DNA, 25 bp, Homo sapien
ctaggaaggctatgacagacgggac

SEQ ID NO: 4507411 - DNA, 25 bp, Homo sapien
tcagcttgcataggtatcttgttac

SEQ ID NO: 4507412 - DNA, 25 bp, Homo sapien
cagcgagaccaaatggcaaaactat

SEQ ID NO: 4507413 - DNA, 25 bp, Homo sapien
ttttccaacatgacccctctgggtg

SEQ ID NO: 4507414 - DNA, 25 bp, Homo sapien
tgggtgtctggtaaaaggcaataca

SEQ ID NO: 4507415 - DNA, 25 bp, Homo sapien
aggcgggcggatcaccaggtcagga

SEQ ID NO: 4507416 - DNA, 25 bp, Homo sapien
aaattgagtagtgccagggcacagt

SEQ ID NO: 4507417 - DNA, 25 bp, Homo sapien
ggctgtaatcccagcactttgggag

SEQ ID NO: 4507418 - DNA, 25 bp, Homo sapien
gccgaggcgggcggatcaccaggtc

SEQ ID NO: 4507419 - DNA, 25 bp, Homo sapien
aatatattaccgaaatctttggcct

SEQ ID NO: 4507420 - DNA, 25 bp, Homo sapien
aatctttggcctaacgaatccacac

SEQ ID NO: 4507421 - DNA, 25 bp, Homo sapien
attatatttgtcacatgagaaacat

SEQ ID NO: 4507422 - DNA, 25 bp, Homo sapien
taaaagttgtgcatgcagaagtaaa

SEQ ID NO: 4507423 - DNA, 25 bp, Homo sapien
agtgcaagtggcacaatctccgctc

SEQ ID NO: 4507424 - DNA, 25 bp, Homo sapien
gtgcaagtggcacaatctccgctca

SEQ ID NO: 4507425 - DNA, 25 bp, Homo sapien
tttcaaattgttaggcaccggtagc

SEQ ID NO: 4507426 - DNA, 25 bp, Homo sapien
gacagagaaagtcatgggaacggca

SEQ ID NO: 4507427 - DNA, 25 bp, Homo sapien
taagaagaagaaatgcgagcgccca

SEQ ID NO: 4507428 - DNA, 25 bp, Homo sapien
ggcagaacgtccctattagagaaca

SEQ ID NO: 4507429 - DNA, 25 bp, Homo sapien
cattagcaggttcgggcactttacc

SEQ ID NO: 4507430 - DNA, 25 bp, Homo sapien
gaaggtacttcaatgtcggaccaag

SEQ ID NO: 4507431 - DNA, 25 bp, Homo sapien
tatcttaagccaactatgtgcccca

SEQ ID NO: 4507432 - DNA, 25 bp, Homo sapien
tcggaccaagtcagagaagtgcttc

SEQ ID NO: 4507433 - DNA, 25 bp, Homo sapien
ggtgttctcacacaataaccaagca

SEQ ID NO: 4507434 - DNA, 25 bp, Homo sapien
ccaagcaaaatgtggcagcaaaggc

SEQ ID NO: 4507435 - DNA, 25 bp, Homo sapien
tgtctgcaaatactggtcatcttga

SEQ ID NO: 4507436 - DNA, 25 bp, Homo sapien
gaattagaagtctcacggtaccacg

SEQ ID NO: 4507437 - DNA, 25 bp, Homo sapien
ttaggccccgactctaccaagagga

SEQ ID NO: 4507438 - DNA, 25 bp, Homo sapien
catttggcaagacgaagctgttcag

SEQ ID NO: 4507439 - DNA, 25 bp, Homo sapien
tactggagaacactctggaactcag

SEQ ID NO: 4507440 - DNA, 25 bp, Homo sapien
gaggacaacaatctacaaagctctg

SEQ ID NO: 4507441 - DNA, 25 bp, Homo sapien
gaaccagacaccctctcccttgcgt

SEQ ID NO: 4507442 - DNA, 25 bp, Homo sapien
acaccctctcccttgcgtggcatca

SEQ ID NO: 4507443 - DNA, 25 bp, Homo sapien
cctctcccttgcgtggcatcagcat

SEQ ID NO: 4507444 - DNA, 25 bp, Homo sapien
ttgcaccactgccactgcacagaac

SEQ ID NO: 4507445 - DNA, 25 bp, Homo sapien
aaactgcagcacagaatgagagcct

SEQ ID NO: 4507446 - DNA, 25 bp, Homo sapien
tgaatccaaactgcagcacagaatg

SEQ ID NO: 4507447 - DNA, 25 bp, Homo sapien
tccaaactgcagcacagaatgagag

SEQ ID NO: 4507448 - DNA, 25 bp, Homo sapien
actgcagcacagaatgagagcctgc

SEQ ID NO: 4507449 - DNA, 25 bp, Homo sapien
tttgatacctcttgcacaatgccaa

SEQ ID NO: 4507450 - DNA, 25 bp, Homo sapien
gggcatccaacgaatactttccttg

SEQ ID NO: 4507451 - DNA, 25 bp, Homo sapien
ccaaagtgtagaaagggcatccaac

SEQ ID NO: 4507452 - DNA, 25 bp, Homo sapien
tccttggaaggactacatatcaact

SEQ ID NO: 4507453 - DNA, 25 bp, Homo sapien
taactctctttgcttgggttcgcct

SEQ ID NO: 4507454 - DNA, 25 bp, Homo sapien
tctccacagatagcctgctctcgtg

SEQ ID NO: 4507455 - DNA, 25 bp, Homo sapien
ccatgcaagtcactaccacagctga

SEQ ID NO: 4507456 - DNA, 25 bp, Homo sapien
ggtatgtcggataacctcccatgca

SEQ ID NO: 4507457 - DNA, 25 bp, Homo sapien
aaactttggcaaataattatcctgt

SEQ ID NO: 4507458 - DNA, 25 bp, Homo sapien
ctttggcaaataattatcctgtact

SEQ ID NO: 4507459 - DNA, 25 bp, Homo sapien
ggcaaataattatcctgtacttctt

SEQ ID NO: 4507460 - DNA, 25 bp, Homo sapien
attctctgcagcggccgggagtggc

SEQ ID NO: 4507461 - DNA, 25 bp, Homo sapien
tagcacatggacaaggcattgccgc

SEQ ID NO: 4507462 - DNA, 25 bp, Homo sapien
gagtgaggccgttctaatttcaaca

SEQ ID NO: 4507463 - DNA, 25 bp, Homo sapien
tctggacatagagccttcacggtaa

SEQ ID NO: 4507464 - DNA, 25 bp, Homo sapien
taataggacgtcaactactttctgg

SEQ ID NO: 4507465 - DNA, 25 bp, Homo sapien
tcttactaatgccagagaacgggtg

SEQ ID NO: 4507466 - DNA, 25 bp, Homo sapien
gagataatttccttaggcgtcctgg

SEQ ID NO: 4507467 - DNA, 25 bp, Homo sapien
caaggactaggaaaaagggatctct

SEQ ID NO: 4507468 - DNA, 25 bp, Homo sapien
aacgggtgtttcttgccacagtgcc

SEQ ID NO: 4507469 - DNA, 25 bp, Homo sapien
ctcgagtagctggtattataggcat

SEQ ID NO: 4507470 - DNA, 25 bp, Homo sapien
atgcatgagccatggctcaccgcaa

SEQ ID NO: 4507471 - DNA, 25 bp, Homo sapien
cctccaactcctgggttcaagtgat

SEQ ID NO: 4507472 - DNA, 25 bp, Homo sapien
tacatgcatgagccatggctcaccg

SEQ ID NO: 4507473 - DNA, 25 bp, Homo sapien
tgaggcaattccattcggaaaggag

SEQ ID NO: 4507474 - DNA, 25 bp, Homo sapien
acttcactgaggcaattccattcgg

SEQ ID NO: 4507475 - DNA, 25 bp, Homo sapien
aggagcaacaggaagaggttgttac

SEQ ID NO: 4507476 - DNA, 25 bp, Homo sapien
aattccattcggaaaggagcaacag

SEQ ID NO: 4507477 - DNA, 25 bp, Homo sapien
aaacaaacaatagcctgattgtgcc

SEQ ID NO: 4507478 - DNA, 25 bp, Homo sapien
aataggatgccatagcttttcccaa

SEQ ID NO: 4507479 - DNA, 25 bp, Homo sapien
caaacaatagcctgattgtgccctg

SEQ ID NO: 4507480 - DNA, 25 bp, Homo sapien
ttcttccataaataattgcaatagg

SEQ ID NO: 4507481 - DNA, 25 bp, Homo sapien
tacaaatgtactcttggaaccttaa

SEQ ID NO: 4507482 - DNA, 25 bp, Homo sapien
tcttcatacacctggctgagaaaaa

SEQ ID NO: 4507483 - DNA, 25 bp, Homo sapien
tcccactgaggcctaagaacttaaa

SEQ ID NO: 4507484 - DNA, 25 bp, Homo sapien
gcccttcaacgataaattacagtcg

SEQ ID NO: 4507485 - DNA, 25 bp, Homo sapien
catcctatggatggacagtcacagg

SEQ ID NO: 4507486 - DNA, 25 bp, Homo sapien
tctgtgcagtcaatggccaaccatc

SEQ ID NO: 4507487 - DNA, 25 bp, Homo sapien
agaagtacaaggagtcagatccaca

SEQ ID NO: 4507488 - DNA, 25 bp, Homo sapien
ccaaggtgtcttatacgagcaggca

SEQ ID NO: 4507489 - DNA, 25 bp, Homo sapien
tagttcacgtagcatcaagttcaca

SEQ ID NO: 4507490 - DNA, 25 bp, Homo sapien
aactgagtgcttcggagggcttgaa

SEQ ID NO: 4507491 - DNA, 25 bp, Homo sapien
ttcagccggacttggtaaaatgcct

SEQ ID NO: 4507492 - DNA, 25 bp, Homo sapien
gaataatgtgcaattagaccgacag

SEQ ID NO: 4507493 - DNA, 25 bp, Homo sapien
ctaggttctaaagcaattaagctgg

SEQ ID NO: 4507494 - DNA, 25 bp, Homo sapien
tcctaggaatggctagcatcagaca

SEQ ID NO: 4507495 - DNA, 25 bp, Homo sapien
tattgaagttcaggagagggtacca

SEQ ID NO: 4507496 - DNA, 25 bp, Homo sapien
taacagagaccaggtaaatgtgcca

SEQ ID NO: 4507497 - DNA, 25 bp, Homo sapien
gaaggtgtctacctgcaaacccgct

SEQ ID NO: 4507498 - DNA, 25 bp, Homo sapien
ggcttacgtggaacaaacattagga

SEQ ID NO: 4507499 - DNA, 25 bp, Homo sapien
aaatggagccattgtcaagtcaccc

SEQ ID NO: 4507500 - DNA, 25 bp, Homo sapien
tagctgatggaaatactgtgctccg

SEQ ID NO: 4507501 - DNA, 25 bp, Homo sapien
ggtccatactattactcaacaaggg

SEQ ID NO: 4507502 - DNA, 25 bp, Homo sapien
gacatctggcaagtcctcataaacc

SEQ ID NO: 4507503 - DNA, 25 bp, Homo sapien
caacatcagctgttacatgctccag

SEQ ID NO: 4507504 - DNA, 25 bp, Homo sapien
taccagagttatcatgatccaacac

SEQ ID NO: 4507505 - DNA, 25 bp, Homo sapien
tggcttgccaagaaagtgcatcacc

SEQ ID NO: 4507506 - DNA, 25 bp, Homo sapien
gaactttctaaggaggccatcttcg

SEQ ID NO: 4507507 - DNA, 25 bp, Homo sapien
tgatcctgttgtgagcactgccttg

SEQ ID NO: 4507508 - DNA, 25 bp, Homo sapien
tgttgttcacttagcccctcagagt

SEQ ID NO: 4507509 - DNA, 25 bp, Homo sapien
gcagcaaacgcatagttcacaggaa

SEQ ID NO: 4507510 - DNA, 25 bp, Homo sapien
tcagaatgagaattatctaatgcca

SEQ ID NO: 4507511 - DNA, 25 bp, Homo sapien
gccgcccagacttatctaacatgaa

SEQ ID NO: 4507512 - DNA, 25 bp, Homo sapien
ttactatgtttcagcggctggtgag

SEQ ID NO: 4507513 - DNA, 25 bp, Homo sapien
ggtggaatttcccaacgcagcgatt

SEQ ID NO: 4507514 - DNA, 25 bp, Homo sapien
aatactcctgctgcatccttgcggg

SEQ ID NO: 4507515 - DNA, 25 bp, Homo sapien
tgcgggatgcccacttgactgacag

SEQ ID NO: 4507516 - DNA, 25 bp, Homo sapien
tggtgatcgcctccctaatactcct

SEQ ID NO: 4507517 - DNA, 25 bp, Homo sapien
caggcagccctgtcgcaaataattc

SEQ ID NO: 4507518 - DNA, 25 bp, Homo sapien
tttttgaactgaatgccacatgctg

SEQ ID NO: 4507519 - DNA, 25 bp, Homo sapien
gaatacaaccacattgtactgctgg

SEQ ID NO: 4507520 - DNA, 25 bp, Homo sapien
aaataattcatgtccactacgcccc

SEQ ID NO: 4507521 - DNA, 25 bp, Homo sapien
tgtttaccacctgcgaagtgtgtga

SEQ ID NO: 4507522 - DNA, 25 bp, Homo sapien
gtagaatctacctcatcggctgttg

SEQ ID NO: 4507523 - DNA, 25 bp, Homo sapien
gagtgtctgagtgcaaacatcgcag

SEQ ID NO: 4507524 - DNA, 25 bp, Homo sapien
tcttgagggcaaagcttacgaactg

SEQ ID NO: 4507525 - DNA, 25 bp, Homo sapien
tgggtttacccaagacatcatttga

SEQ ID NO: 4507526 - DNA, 25 bp, Homo sapien
aatcttcatttagtgcaggttggac

SEQ ID NO: 4507527 - DNA, 25 bp, Homo sapien
catttgaaggcccagtatagttcag

SEQ ID NO: 4507528 - DNA, 25 bp, Homo sapien
gtcttcaggatgcaggtacccactg

SEQ ID NO: 4507529 - DNA, 25 bp, Homo sapien
ggaggacatgatgacgcgaggtagc

SEQ ID NO: 4507530 - DNA, 25 bp, Homo sapien
gaggacatgatgacgcgaggtagca

SEQ ID NO: 4507531 - DNA, 25 bp, Homo sapien
aggacatgatgacgcgaggtagcat

SEQ ID NO: 4507532 - DNA, 25 bp, Homo sapien
tagtctaagtaaagcctctgaagtg

SEQ ID NO: 4507533 - DNA, 25 bp, Homo sapien
caaactggtgtgcaacatccctgag

SEQ ID NO: 4507534 - DNA, 25 bp, Homo sapien
tgaagaccagagaaccaaagctatg

SEQ ID NO: 4507535 - DNA, 25 bp, Homo sapien
cactcacaagagttgggttaaacac

SEQ ID NO: 4507536 - DNA, 25 bp, Homo sapien
gctgtctcccgaaatcccggagcat

SEQ ID NO: 4507537 - DNA, 25 bp, Homo sapien
gagcatcctcgtcccggagccgagg

SEQ ID NO: 4507538 - DNA, 25 bp, Homo sapien
aactgctgtctcccgaaatcccgga

SEQ ID NO: 4507539 - DNA, 25 bp, Homo sapien
atcccggagcatcctcgtcccggag

SEQ ID NO: 4507540 - DNA, 25 bp, Homo sapien
caaagaaataagctttgtaggaact

SEQ ID NO: 4507541 - DNA, 25 bp, Homo sapien
ataagctttgtaggaactttgagat

SEQ ID NO: 4507542 - DNA, 25 bp, Homo sapien
agaaataagctttgtaggaactttg

SEQ ID NO: 4507543 - DNA, 25 bp, Homo sapien
gaaataagctttgtaggaactttga

SEQ ID NO: 4507544 - DNA, 25 bp, Homo sapien
tgtacaggcaaatcacagtgaagcc

SEQ ID NO: 4507545 - DNA, 25 bp, Homo sapien
gatttttacctgcacacctgtacag

SEQ ID NO: 4507546 - DNA, 25 bp, Homo sapien
tgaagacagccacttgtagggaaac

SEQ ID NO: 4507547 - DNA, 25 bp, Homo sapien
catctgcattacctgtggcgttaac

SEQ ID NO: 4507548 - DNA, 25 bp, Homo sapien
tgtccctccatgactaactaaagtg

SEQ ID NO: 4507549 - DNA, 25 bp, Homo sapien
caggcatgtgtacgtaaagacaccc

SEQ ID NO: 4507550 - DNA, 25 bp, Homo sapien
tattgtgggctcctaaatgttgctg

SEQ ID NO: 4507551 - DNA, 25 bp, Homo sapien
cagtactgtgagcaacaggcatgtg

SEQ ID NO: 4507552 - DNA, 25 bp, Homo sapien
aaatttccaattacggcgctatggg

SEQ ID NO: 4507553 - DNA, 25 bp, Homo sapien
aacacactgagtgcgattaaaggca

SEQ ID NO: 4507554 - DNA, 25 bp, Homo sapien
ctaccaaatttccaattacggcgct

SEQ ID NO: 4507555 - DNA, 25 bp, Homo sapien
ccatgaataaacacactgagtgcga

SEQ ID NO: 4507556 - DNA, 25 bp, Homo sapien
tgtagctagaggtggccatatgact

SEQ ID NO: 4507557 - DNA, 25 bp, Homo sapien
tatggccatccagttacagactaca

SEQ ID NO: 4507558 - DNA, 25 bp, Homo sapien
aacgttgtgactggaacttcctgga

SEQ ID NO: 4507559 - DNA, 25 bp, Homo sapien
ctggccagtgagatataaacaaacg

SEQ ID NO: 4507560 - DNA, 25 bp, Homo sapien
ggtttacacacccactagttgcctc

SEQ ID NO: 4507561 - DNA, 25 bp, Homo sapien
tccaagagttcctatttcgctgcaa

SEQ ID NO: 4507562 - DNA, 25 bp, Homo sapien
tattgcaatcggcaaagcaatcttc

SEQ ID NO: 4507563 - DNA, 25 bp, Homo sapien
tatcagaacttggacatgcaaatga

SEQ ID NO: 4507564 - DNA, 25 bp, Homo sapien
gagacggagatgagaccgggcaggg

SEQ ID NO: 4507565 - DNA, 25 bp, Homo sapien
agatgagaccgggcaggggaggcac

SEQ ID NO: 4507566 - DNA, 25 bp, Homo sapien
gagatgagaccgggcaggggaggca

SEQ ID NO: 4507567 - DNA, 25 bp, Homo sapien
ggagagacggagatgagaccgggca

SEQ ID NO: 4507568 - DNA, 25 bp, Homo sapien
tacacaggccgtgtcgttgtcaggc

SEQ ID NO: 4507569 - DNA, 25 bp, Homo sapien
gcatagtagtagtggcggcaagcta

SEQ ID NO: 4507570 - DNA, 25 bp, Homo sapien
gggtggcagcactcattgttctcgg

SEQ ID NO: 4507571 - DNA, 25 bp, Homo sapien
tgcactcgccgtcgtggatcacaaa

SEQ ID NO: 4507572 - DNA, 25 bp, Homo sapien
cccccgtcggatgttaatgagcaaa

SEQ ID NO: 4507573 - DNA, 25 bp, Homo sapien
gcaaattgcccttgaagatggtgca

SEQ ID NO: 4507574 - DNA, 25 bp, Homo sapien
tcctcacagaccttcgggcaaggac

SEQ ID NO: 4507575 - DNA, 25 bp, Homo sapien
gcagaagtaacagaatcaatggtct

SEQ ID NO: 4507576 - DNA, 25 bp, Homo sapien
taccagactgccaattagctaaggc

SEQ ID NO: 4507577 - DNA, 25 bp, Homo sapien
cagtacaagggcatgactaaatcaa

SEQ ID NO: 4507578 - DNA, 25 bp, Homo sapien
tgttaacaatggctatctatgaggg

SEQ ID NO: 4507579 - DNA, 25 bp, Homo sapien
tagctaaggctgacgaatgtaggga

SEQ ID NO: 4507580 - DNA, 25 bp, Homo sapien
agaacaattcaacggcaggtgcccc

SEQ ID NO: 4507581 - DNA, 25 bp, Homo sapien
gactcctggaacgaggcctcccagg

SEQ ID NO: 4507582 - DNA, 25 bp, Homo sapien
agtgagaacaattcaacggcaggtg

SEQ ID NO: 4507583 - DNA, 25 bp, Homo sapien
gactctcaacaacgactcctggaac

SEQ ID NO: 4507584 - DNA, 25 bp, Homo sapien
tgctcacttggtgtaagggtgacat

SEQ ID NO: 4507585 - DNA, 25 bp, Homo sapien
tgtgtcactgtgtgctcacttggtg

SEQ ID NO: 4507586 - DNA, 25 bp, Homo sapien
cattgaaaggggattgtgtcactgt

SEQ ID NO: 4507587 - DNA, 25 bp, Homo sapien
ggtgtaagggtgacatacttggatt

SEQ ID NO: 4507588 - DNA, 25 bp, Homo sapien
ggcggatcttcacgtagcccgtcac

SEQ ID NO: 4507589 - DNA, 25 bp, Homo sapien
accacctcgatgagccccatgaagt

SEQ ID NO: 4507590 - DNA, 25 bp, Homo sapien
ccacctcgatgagccccatgaagtt

SEQ ID NO: 4507591 - DNA, 25 bp, Homo sapien
agaatggcggatcttcacgtagccc

SEQ ID NO: 4507592 - DNA, 25 bp, Homo sapien
tagagtacagcatcctgaggcagat

SEQ ID NO: 4507593 - DNA, 25 bp, Homo sapien
ataaaaaccatctcgtgaatccggg

SEQ ID NO: 4507594 - DNA, 25 bp, Homo sapien
cacgcaacccttgactgatgaggca

SEQ ID NO: 4507595 - DNA, 25 bp, Homo sapien
gagggtcgcgcgaacaatgatttca

SEQ ID NO: 4507596 - DNA, 25 bp, Homo sapien
aactggtagggcctcagcttgccag

SEQ ID NO: 4507597 - DNA, 25 bp, Homo sapien
cagcctccttcgatttgcaatgaga

SEQ ID NO: 4507598 - DNA, 25 bp, Homo sapien
tgccaggtaagtgactgaggagtct

SEQ ID NO: 4507599 - DNA, 25 bp, Homo sapien
gcggcagcctccttcgatttgcaat

SEQ ID NO: 4507600 - DNA, 25 bp, Homo sapien
tctttagacaagcactgattcctgg

SEQ ID NO: 4507601 - DNA, 25 bp, Homo sapien
cactgggatgaaagctatcttggct

SEQ ID NO: 4507602 - DNA, 25 bp, Homo sapien
aatgccacctcttgtcagaagcctg

SEQ ID NO: 4507603 - DNA, 25 bp, Homo sapien
tctccagtgttagttgcccaacagg

SEQ ID NO: 4507604 - DNA, 25 bp, Homo sapien
tgaagtgtgaaagtcccctggaaca

SEQ ID NO: 4507605 - DNA, 25 bp, Homo sapien
gagaaaattgcctcttcacggctgt

SEQ ID NO: 4507606 - DNA, 25 bp, Homo sapien
catctgggaatccaaaggtcaggtc

SEQ ID NO: 4507607 - DNA, 25 bp, Homo sapien
taaatggagctgaacccgaggtctc

SEQ ID NO: 4507608 - DNA, 25 bp, Homo sapien
ctttgccacctgctccacaatacat

SEQ ID NO: 4507609 - DNA, 25 bp, Homo sapien
cctctttgccacctgctccacaata

SEQ ID NO: 4507610 - DNA, 25 bp, Homo sapien
cacaggtcctctttgccacctgctc

SEQ ID NO: 4507611 - DNA, 25 bp, Homo sapien
ctgctggccacgtaacacaggtcct

SEQ ID NO: 4507612 - DNA, 25 bp, Homo sapien
ctgcccttggccacagtcccctcta

SEQ ID NO: 4507613 - DNA, 25 bp, Homo sapien
tgcccttggccacagtcccctctag

SEQ ID NO: 4507614 - DNA, 25 bp, Homo sapien
gcccttggccacagtcccctctagc

SEQ ID NO: 4507615 - DNA, 25 bp, Homo sapien
tagaagcacagaaatcgatgttagc

SEQ ID NO: 4507616 - DNA, 25 bp, Homo sapien
gaagcacagaaatcgatgttagcgc

SEQ ID NO: 4507617 - DNA, 25 bp, Homo sapien
ctagaagcacagaaatcgatgttag

SEQ ID NO: 4507618 - DNA, 25 bp, Homo sapien
agcacagaaatcgatgttagcgcac

SEQ ID NO: 4507619 - DNA, 25 bp, Homo sapien
tcctggtgtttatgtcccctttgct

SEQ ID NO: 4507620 - DNA, 25 bp, Homo sapien
gtcaggttgcggtggtcccagtccc

SEQ ID NO: 4507621 - DNA, 25 bp, Homo sapien
tgcaagttctggttgtcgaggacgt

SEQ ID NO: 4507622 - DNA, 25 bp, Homo sapien
ccatgcggtaaatttcggaaacaca

SEQ ID NO: 4507623 - DNA, 25 bp, Homo sapien
taaatccagacaccagcgaaacaag

SEQ ID NO: 4507624 - DNA, 25 bp, Homo sapien
aacaagtgtcgccaggtaaatccag

SEQ ID NO: 4507625 - DNA, 25 bp, Homo sapien
agccaaagccaaacacgcatcggtt

SEQ ID NO: 4507626 - DNA, 25 bp, Homo sapien
tgttcagccctaggtcagtcagcgt

SEQ ID NO: 4507627 - DNA, 25 bp, Homo sapien
taccggtgccaggttatgatgatgc

SEQ ID NO: 4507628 - DNA, 25 bp, Homo sapien
taaacggtgaagctgatgagatccc

SEQ ID NO: 4507629 - DNA, 25 bp, Homo sapien
tggtggaggtgaaatgcaggacgtc

SEQ ID NO: 4507630 - DNA, 25 bp, Homo sapien
tgatgcgattcttcgacgtggtggt

SEQ ID NO: 4507631 - DNA, 25 bp, Homo sapien
ggtcacagccttgacgtaaacggcg

SEQ ID NO: 4507632 - DNA, 25 bp, Homo sapien
cactcttggccccacggatatggtc

SEQ ID NO: 4507633 - DNA, 25 bp, Homo sapien
taaacggcgtactgagtccagggct

SEQ ID NO: 4507634 - DNA, 25 bp, Homo sapien
ccatgtagtaagatgccgggctcca

SEQ ID NO: 4507635 - DNA, 25 bp, Homo sapien
gatgatggaagatagtaccgaggcc

SEQ ID NO: 4507636 - DNA, 25 bp, Homo sapien
cacagaagagcctaatgtgttagca

SEQ ID NO: 4507637 - DNA, 25 bp, Homo sapien
tagctcactgctaaccctacaatga

SEQ ID NO: 4507638 - DNA, 25 bp, Homo sapien
gggccttccaatgaaaccagcccag

SEQ ID NO: 4507639 - DNA, 25 bp, Homo sapien
tgtgatagaagctccaatacactaa

SEQ ID NO: 4507640 - DNA, 25 bp, Homo sapien
ccttctatgagaggccccggagagt

SEQ ID NO: 4507641 - DNA, 25 bp, Homo sapien
ctaccaaaactcacatgtcaaaatc

SEQ ID NO: 4507642 - DNA, 25 bp, Homo sapien
gaatgtttatcagtgctatagagtg

SEQ ID NO: 4507643 - DNA, 25 bp, Homo sapien
aggaccaagttctcgtctgtctccg

SEQ ID NO: 4507644 - DNA, 25 bp, Homo sapien
gaggaccaagttctcgtctgtctcc

SEQ ID NO: 4507645 - DNA, 25 bp, Homo sapien
gcagaggaccaagttctcgtctgtc

SEQ ID NO: 4507646 - DNA, 25 bp, Homo sapien
cagaggaccaagttctcgtctgtct

SEQ ID NO: 4507647 - DNA, 25 bp, Homo sapien
ctgaaagaacgtccaagggaatgga

SEQ ID NO: 4507648 - DNA, 25 bp, Homo sapien
tgaaagaacgtccaagggaatggaa

SEQ ID NO: 4507649 - DNA, 25 bp, Homo sapien
gagagggagggttccacttcacgat

SEQ ID NO: 4507650 - DNA, 25 bp, Homo sapien
tgtgccggtaaaggtagccgtcctg

SEQ ID NO: 4507651 - DNA, 25 bp, Homo sapien
ctttggagcagtaattgtgccggta

SEQ ID NO: 4507652 - DNA, 25 bp, Homo sapien
ccgctgccagcgcacaatgtagtaa

SEQ ID NO: 4507653 - DNA, 25 bp, Homo sapien
atcaagaagatagctggtctcggcc

SEQ ID NO: 4507654 - DNA, 25 bp, Homo sapien
ctttaatcaagaagatagctggtct

SEQ ID NO: 4507655 - DNA, 25 bp, Homo sapien
caagaagatagctggtctcggccag

SEQ ID NO: 4507656 - DNA, 25 bp, Homo sapien
taatcaagaagatagctggtctcgg

SEQ ID NO: 4507657 - DNA, 25 bp, Homo sapien
aaggaaaaataatagctctcagtac

SEQ ID NO: 4507658 - DNA, 25 bp, Homo sapien
cttgtaaggaaaaataatagctctc

SEQ ID NO: 4507659 - DNA, 25 bp, Homo sapien
gtaaggaaaaataatagctctcagt

SEQ ID NO: 4507660 - DNA, 25 bp, Homo sapien
tgtaaggaaaaataatagctctcag

SEQ ID NO: 4507661 - DNA, 25 bp, Homo sapien
aaagccaaaacaagagtgggaatga

SEQ ID NO: 4507662 - DNA, 25 bp, Homo sapien
aaaagccaaaacaagagtgggaatg

SEQ ID NO: 4507663 - DNA, 25 bp, Homo sapien
gggcaggcgcagcaaggccctttct

SEQ ID NO: 4507664 - DNA, 25 bp, Homo sapien
cacgaagatggagttgtgcaggaaa

SEQ ID NO: 4507665 - DNA, 25 bp, Homo sapien
tgtgacctcctcaatgtcgatggtg

SEQ ID NO: 4507666 - DNA, 25 bp, Homo sapien
aaagactttgcggtattcagcctcc

SEQ ID NO: 4507667 - DNA, 25 bp, Homo sapien
agaaaggcaacagaaccggcctgag

SEQ ID NO: 4507668 - DNA, 25 bp, Homo sapien
aaggcaacagaaccggcctgagcag

SEQ ID NO: 4507669 - DNA, 25 bp, Homo sapien
aacagaaccggcctgagcagtgggt

SEQ ID NO: 4507670 - DNA, 25 bp, Homo sapien
ccggcctgagcagtgggttttgcca

SEQ ID NO: 4507671 - DNA, 25 bp, Homo sapien
tgcgggcatagtccttgcaaagacg

SEQ ID NO: 4507672 - DNA, 25 bp, Homo sapien
tgctctcaaagaaagggtactctgt

SEQ ID NO: 4507673 - DNA, 25 bp, Homo sapien
cctcgtggttgcagctgtggatatc

SEQ ID NO: 4507674 - DNA, 25 bp, Homo sapien
tacaatgtgaaaggccgaaggttag

SEQ ID NO: 4507675 - DNA, 25 bp, Homo sapien
agatggatgaatgcccgagtgacag

SEQ ID NO: 4507676 - DNA, 25 bp, Homo sapien
gatggatgaatgcccgagtgacagg

SEQ ID NO: 4507677 - DNA, 25 bp, Homo sapien
atggatgaatgcccgagtgacaggc

SEQ ID NO: 4507678 - DNA, 25 bp, Homo sapien
tggatgaatgcccgagtgacaggca

SEQ ID NO: 4507679 - DNA, 25 bp, Homo sapien
tgtacaatttaaacaggtgacaaag

SEQ ID NO: 4507680 - DNA, 25 bp, Homo sapien
agggagggaggccaacactgggctg

SEQ ID NO: 4507681 - DNA, 25 bp, Homo sapien
tgacaaagttggatttgggttccca

SEQ ID NO: 4507682 - DNA, 25 bp, Homo sapien
taaacaggtgacaaagttggatttg

SEQ ID NO: 4507683 - DNA, 25 bp, Homo sapien
ctcaacttgtgatccgtattttatt

SEQ ID NO: 4507684 - DNA, 25 bp, Homo sapien
ttgggattctcaggttccggccact

SEQ ID NO: 4507685 - DNA, 25 bp, Homo sapien
tccattgggattctcaggttccggc

SEQ ID NO: 4507686 - DNA, 25 bp, Homo sapien
tcaatccattgggattctcaggttc

SEQ ID NO: 4507687 - DNA, 25 bp, Homo sapien
cctgaatccgggctgtgtagttccc

SEQ ID NO: 4507688 - DNA, 25 bp, Homo sapien
gcctggacatagaagaacacaggat

SEQ ID NO: 4507689 - DNA, 25 bp, Homo sapien
tgtctggacacacattctcgctgat

SEQ ID NO: 4507690 - DNA, 25 bp, Homo sapien
agccggtttagcttggcccctccat

SEQ ID NO: 4507691 - DNA, 25 bp, Homo sapien
ctctttctatggaagacgtacagca

SEQ ID NO: 4507692 - DNA, 25 bp, Homo sapien
tggaagacgtacagcataatcacca

SEQ ID NO: 4507693 - DNA, 25 bp, Homo sapien
tcccacgatcaacaggacagcgacg

SEQ ID NO: 4507694 - DNA, 25 bp, Homo sapien
gcgacgggcagagcgatgatcagat

SEQ ID NO: 4507695 - DNA, 25 bp, Homo sapien
agaaagtgtcataactttgcacatc

SEQ ID NO: 4507696 - DNA, 25 bp, Homo sapien
aaagtgtcataactttgcacatcac

SEQ ID NO: 4507697 - DNA, 25 bp, Homo sapien
gtgtcataactttgcacatcactga

SEQ ID NO: 4507698 - DNA, 25 bp, Homo sapien
agtgtcataactttgcacatcactg

SEQ ID NO: 4507699 - DNA, 25 bp, Homo sapien
ggttcacagaggcatacagcactcc

SEQ ID NO: 4507700 - DNA, 25 bp, Homo sapien
gaagtactccgggttcacagaggca

SEQ ID NO: 4507701 - DNA, 25 bp, Homo sapien
catcagcagcgctgaagtactccgg

SEQ ID NO: 4507702 - DNA, 25 bp, Homo sapien
acagaggcatacagcactccattcc

SEQ ID NO: 4507703 - DNA, 25 bp, Homo sapien
cagtgctggtggcccggactcttac

SEQ ID NO: 4507704 - DNA, 25 bp, Homo sapien
gaagtaccaagacgtatcatgaaag

SEQ ID NO: 4507705 - DNA, 25 bp, Homo sapien
tgttgtaatgaagtaccaagacgta

SEQ ID NO: 4507706 - DNA, 25 bp, Homo sapien
taatgaagtaccaagacgtatcatg

SEQ ID NO: 4507707 - DNA, 25 bp, Homo sapien
taccaagacgtatcatgaaagcatt

SEQ ID NO: 4507708 - DNA, 25 bp, Homo sapien
tggagaagaaaccgtaattaaagca

SEQ ID NO: 4507709 - DNA, 25 bp, Homo sapien
taattaaagcaggtacagaaacaag

SEQ ID NO: 4507710 - DNA, 25 bp, Homo sapien
attaaagcaggtacagaaacaagcc

SEQ ID NO: 4507711 - DNA, 25 bp, Homo sapien
cgtaattaaagcaggtacagaaaca

SEQ ID NO: 4507712 - DNA, 25 bp, Homo sapien
acctcccactcatcaggaacgtaca

SEQ ID NO: 4507713 - DNA, 25 bp, Homo sapien
cacctcccactcatcaggaacgtac

SEQ ID NO: 4507714 - DNA, 25 bp, Homo sapien
gccacctcccactcatcaggaacgt

SEQ ID NO: 4507715 - DNA, 25 bp, Homo sapien
cgagccacctcccactcatcaggaa

SEQ ID NO: 4507716 - DNA, 25 bp, Homo sapien
tgcggcctcgttcactgttttaatg

SEQ ID NO: 4507717 - DNA, 25 bp, Homo sapien
gttttaatggccactctggtttcag

SEQ ID NO: 4507718 - DNA, 25 bp, Homo sapien
cacagaagcttcgttgagaaactca

SEQ ID NO: 4507719 - DNA, 25 bp, Homo sapien
gagaaactcaatcctctcacgcatg

SEQ ID NO: 4507720 - DNA, 25 bp, Homo sapien
caggtggcccttgctgatgcctgtg

SEQ ID NO: 4507721 - DNA, 25 bp, Homo sapien
cagttccatgatgaccagtgttggc

SEQ ID NO: 4507722 - DNA, 25 bp, Homo sapien
catttctggcctcagagaccggaga

SEQ ID NO: 4507723 - DNA, 25 bp, Homo sapien
gagatcgccccgtgtcatcagttcc

SEQ ID NO: 4507724 - DNA, 25 bp, Homo sapien
ggagataacttttgagatcgccccg

SEQ ID NO: 4507725 - DNA, 25 bp, Homo sapien
cagggctttagatacgtgtgatgca

SEQ ID NO: 4507726 - DNA, 25 bp, Homo sapien
ttaagcatggagaaagacagagggc

SEQ ID NO: 4507727 - DNA, 25 bp, Homo sapien
gggttggttctctacacttggtgac

SEQ ID NO: 4507728 - DNA, 25 bp, Homo sapien
aacacttatcacgtggttatctggg

SEQ ID NO: 4507729 - DNA, 25 bp, Homo sapien
caagcttatttgcacttgctccctg

SEQ ID NO: 4507730 - DNA, 25 bp, Homo sapien
aaaccatcatggagagcatggcacc

SEQ ID NO: 4507731 - DNA, 25 bp, Homo sapien
gaaaccaggacttgctcggaaggaa

SEQ ID NO: 4507732 - DNA, 25 bp, Homo sapien
ggaaacaccaatttgcactctttag

SEQ ID NO: 4507733 - DNA, 25 bp, Homo sapien
ttgctcaggcttggaggtgctagga

SEQ ID NO: 4507734 - DNA, 25 bp, Homo sapien
cttgctcaggcttggaggtgctagg

SEQ ID NO: 4507735 - DNA, 25 bp, Homo sapien
gactgtgaaatcttcggctaccatg

SEQ ID NO: 4507736 - DNA, 25 bp, Homo sapien
gtctctgtggacgaacttattggcg

SEQ ID NO: 4507737 - DNA, 25 bp, Homo sapien
gttgaggtatgccatgccgtctgca

SEQ ID NO: 4507738 - DNA, 25 bp, Homo sapien
taccatgcaattccgggcagcaagg

SEQ ID NO: 4507739 - DNA, 25 bp, Homo sapien
tagatatctcgcgtcataccaaaat

SEQ ID NO: 4507740 - DNA, 25 bp, Homo sapien
tctcatagatatctcgcgtcatacc

SEQ ID NO: 4507741 - DNA, 25 bp, Homo sapien
actcaggagacatccagcgcacggg

SEQ ID NO: 4507742 - DNA, 25 bp, Homo sapien
ggactcaggagacatccagcgcacg

SEQ ID NO: 4507743 - DNA, 25 bp, Homo sapien
gccagtgtggcgatctcccagagga

SEQ ID NO: 4507744 - DNA, 25 bp, Homo sapien
agcatgtcaggacagttgtctggct

SEQ ID NO: 4507745 - DNA, 25 bp, Homo sapien
gacttgctcgttggacaagccctgg

SEQ ID NO: 4507746 - DNA, 25 bp, Homo sapien
ccatgacgaagcgaaggacttgctc

SEQ ID NO: 4507747 - DNA, 25 bp, Homo sapien
agagcacggagggcccaggaagtac

SEQ ID NO: 4507748 - DNA, 25 bp, Homo sapien
gaagagcacggagggcccaggaagt

SEQ ID NO: 4507749 - DNA, 25 bp, Homo sapien
aagagcacggagggcccaggaagta

SEQ ID NO: 4507750 - DNA, 25 bp, Homo sapien
gagcacggagggcccaggaagtacg

SEQ ID NO: 4507751 - DNA, 25 bp, Homo sapien
caggaaggacaacaaggcctccctg

SEQ ID NO: 4507752 - DNA, 25 bp, Homo sapien
tgacctccactgagccacaaaacag

SEQ ID NO: 4507753 - DNA, 25 bp, Homo sapien
ggacacagagcaagtcctccaccaa

SEQ ID NO: 4507754 - DNA, 25 bp, Homo sapien
tgttgtgcgcctgatgactgaactg

SEQ ID NO: 4507755 - DNA, 25 bp, Homo sapien
tggaggtggaccaagtaagaatccc

SEQ ID NO: 4507756 - DNA, 25 bp, Homo sapien
gatcttttactctagggcacagcag

SEQ ID NO: 4507757 - DNA, 25 bp, Homo sapien
tttggtcagaaaggacgtcgtgcct

SEQ ID NO: 4507758 - DNA, 25 bp, Homo sapien
cattaatagtaaaagcccagtcacc

SEQ ID NO: 4507759 - DNA, 25 bp, Homo sapien
gcaacagtctggacacgtggagctg

SEQ ID NO: 4507760 - DNA, 25 bp, Homo sapien
taaggctgaggacgggctttgtcat

SEQ ID NO: 4507761 - DNA, 25 bp, Homo sapien
aatctaaagtacagacccagcaggg

SEQ ID NO: 4507762 - DNA, 25 bp, Homo sapien
gcataaataccgagatctgggctga

SEQ ID NO: 4507763 - DNA, 25 bp, Homo sapien
aagcactcgattcccgcagaaccaa

SEQ ID NO: 4507764 - DNA, 25 bp, Homo sapien
tcccactcaagcactcgattcccgc

SEQ ID NO: 4507765 - DNA, 25 bp, Homo sapien
gcaggagcgcccttcctgtctgtct

SEQ ID NO: 4507766 - DNA, 25 bp, Homo sapien
agcaggagcgcccttcctgtctgtc

SEQ ID NO: 4507767 - DNA, 25 bp, Homo sapien
tcctgaactggacaggctgtgacct

SEQ ID NO: 4507768 - DNA, 25 bp, Homo sapien
gggtcgtcttaggaaccacgcctca

SEQ ID NO: 4507769 - DNA, 25 bp, Homo sapien
aggctggcgccatccttctcgaatg

SEQ ID NO: 4507770 - DNA, 25 bp, Homo sapien
tcctggcagccctcaacagtaaggg

SEQ ID NO: 4507771 - DNA, 25 bp, Homo sapien
cagaagcgtaactgggccaagagca

SEQ ID NO: 4507772 - DNA, 25 bp, Homo sapien
gccaagagcatgagatgtgcttggc

SEQ ID NO: 4507773 - DNA, 25 bp, Homo sapien
ccctgggcagaagcgtaactgggcc

SEQ ID NO: 4507774 - DNA, 25 bp, Homo sapien
ctgggcagaagcgtaactgggccaa

SEQ ID NO: 4507775 - DNA, 25 bp, Homo sapien
gtttgcattgataaaagctggcagc

SEQ ID NO: 4507776 - DNA, 25 bp, Homo sapien
tttgcattgataaaagctggcagct

SEQ ID NO: 4507777 - DNA, 25 bp, Homo sapien
tgcattgataaaagctggcagcttg

SEQ ID NO: 4507778 - DNA, 25 bp, Homo sapien
ttgcattgataaaagctggcagctt

SEQ ID NO: 4507779 - DNA, 25 bp, Homo sapien
agcacctgggctgcaaatacctgtg

SEQ ID NO: 4507780 - DNA, 25 bp, Homo sapien
tgcagagacccagctaaacagactt

SEQ ID NO: 4507781 - DNA, 25 bp, Homo sapien
tgagcgtgaaaccaaagtgccttcc

SEQ ID NO: 4507782 - DNA, 25 bp, Homo sapien
catagttctgaggagtgaccgccaa

SEQ ID NO: 4507783 - DNA, 25 bp, Homo sapien
cccaagaaggactaatccaggtcca

SEQ ID NO: 4507784 - DNA, 25 bp, Homo sapien
aatccaggtccacactgtccatcgt

SEQ ID NO: 4507785 - DNA, 25 bp, Homo sapien
cactgtccatcgtgacagctgttat

SEQ ID NO: 4507786 - DNA, 25 bp, Homo sapien
tccatcgtgacagctgttatctatg

SEQ ID NO: 4507787 - DNA, 25 bp, Homo sapien
cctgcagtggtttcccgcatacaag

SEQ ID NO: 4507788 - DNA, 25 bp, Homo sapien
caggaggcttcatgggccgcctgca

SEQ ID NO: 4507789 - DNA, 25 bp, Homo sapien
cgcatacaagcgtacggcgggagca

SEQ ID NO: 4507790 - DNA, 25 bp, Homo sapien
ttctgcctggatggccaagtggcct

SEQ ID NO: 4507791 - DNA, 25 bp, Homo sapien
ccagcacatgcgcatcagttcaaac

SEQ ID NO: 4507792 - DNA, 25 bp, Homo sapien
ctgtctctcgtcgaagctggcgcgg

SEQ ID NO: 4507793 - DNA, 25 bp, Homo sapien
tagtagaaggagacctcccggaagc

SEQ ID NO: 4507794 - DNA, 25 bp, Homo sapien
tcatgtgggcgtaaggctgtctctc

SEQ ID NO: 4507795 - DNA, 25 bp, Homo sapien
ttgtgtcctgagtgtctgtcgggca

SEQ ID NO: 4507796 - DNA, 25 bp, Homo sapien
taatgacccacggtgtcaggcgggt

SEQ ID NO: 4507797 - DNA, 25 bp, Homo sapien
taatccaaatgcctagtgtctgcgg

SEQ ID NO: 4507798 - DNA, 25 bp, Homo sapien
caacgccagtgcgaaggagttccct

SEQ ID NO: 4507799 - DNA, 25 bp, Homo sapien
tctggttccaaagacaggtcagtcg

SEQ ID NO: 4507800 - DNA, 25 bp, Homo sapien
acctagcactccagcgggcacagcc

SEQ ID NO: 4507801 - DNA, 25 bp, Homo sapien
gggctcttgggccaccgtggcgtct

SEQ ID NO: 4507802 - DNA, 25 bp, Homo sapien
cttgggccaccgtggcgtctgtgct

SEQ ID NO: 4507803 - DNA, 25 bp, Homo sapien
gtgctgcctccacctagcactccag

SEQ ID NO: 4507804 - DNA, 25 bp, Homo sapien
tgctgaccagcaaaaaagccgtata

SEQ ID NO: 4507805 - DNA, 25 bp, Homo sapien
ggaacacgctatgggatagagacta

SEQ ID NO: 4507806 - DNA, 25 bp, Homo sapien
gcaatcaccgtatcccagctttgtt

SEQ ID NO: 4507807 - DNA, 25 bp, Homo sapien
tagagactagagaaagcagtgggac

SEQ ID NO: 4507808 - DNA, 25 bp, Homo sapien
tgttccaaagacaaccagccaggga

SEQ ID NO: 4507809 - DNA, 25 bp, Homo sapien
taccctggggattcgcacagagatg

SEQ ID NO: 4507810 - DNA, 25 bp, Homo sapien
ggtgtgctctggtgccctcgttggc

SEQ ID NO: 4507811 - DNA, 25 bp, Homo sapien
aaccactgctctcttaaggacgaaa

SEQ ID NO: 4507812 - DNA, 25 bp, Homo sapien
ctttgtgctcaatgaatgcagcagc

SEQ ID NO: 4507813 - DNA, 25 bp, Homo sapien
tgtgctcaatgaatgcagcagccat

SEQ ID NO: 4507814 - DNA, 25 bp, Homo sapien
ttgtgctcaatgaatgcagcagcca

SEQ ID NO: 4507815 - DNA, 25 bp, Homo sapien
tttgtgctcaatgaatgcagcagcc

SEQ ID NO: 4507816 - DNA, 25 bp, Homo sapien
aggctgggtgactcttgctctccag

SEQ ID NO: 4507817 - DNA, 25 bp, Homo sapien
tctccagctgctgctgcagctgcac

SEQ ID NO: 4507818 - DNA, 25 bp, Homo sapien
tgctctccagctgctgctgcagctg

SEQ ID NO: 4507819 - DNA, 25 bp, Homo sapien
ttgctctccagctgctgctgcagct

SEQ ID NO: 4507820 - DNA, 25 bp, Homo sapien
tcaggagcctctgcattctggcgca

SEQ ID NO: 4507821 - DNA, 25 bp, Homo sapien
tgagggagaagttgagagggcagcc

SEQ ID NO: 4507822 - DNA, 25 bp, Homo sapien
actggctgtgaggtcaggagcctct

SEQ ID NO: 4507823 - DNA, 25 bp, Homo sapien
gtgtgttctatcagggactggctgt

SEQ ID NO: 4507824 - DNA, 25 bp, Homo sapien
agggagacggaggtacagccctggc

SEQ ID NO: 4507825 - DNA, 25 bp, Homo sapien
gggcgtgacgccacgagcctcggcg

SEQ ID NO: 4507826 - DNA, 25 bp, Homo sapien
ccggccactgggctttccagccgga

SEQ ID NO: 4507827 - DNA, 25 bp, Homo sapien
gaaggtttggtacatctctgtctac

SEQ ID NO: 4507828 - DNA, 25 bp, Homo sapien
ttaggcaaagctgcccgccacactt

SEQ ID NO: 4507829 - DNA, 25 bp, Homo sapien
tcatcagtgcctgtaagagcagctg

SEQ ID NO: 4507830 - DNA, 25 bp, Homo sapien
gaggagccatccacgcttaggcaaa

SEQ ID NO: 4507831 - DNA, 25 bp, Homo sapien
ttaggctggaattgccgaggagcca

SEQ ID NO: 4507832 - DNA, 25 bp, Homo sapien
tctcaatgaccttaagatccccggg

SEQ ID NO: 4507833 - DNA, 25 bp, Homo sapien
gcatttgctatgatgggcactacac

SEQ ID NO: 4507834 - DNA, 25 bp, Homo sapien
tacagtgtggaagaacaaaaccctg

SEQ ID NO: 4507835 - DNA, 25 bp, Homo sapien
cacgagaggagaggccgttattcca

SEQ ID NO: 4507836 - DNA, 25 bp, Homo sapien
caatgttgaccagaaagatgcggac

SEQ ID NO: 4507837 - DNA, 25 bp, Homo sapien
tgacatcccacgaaggagacctggg

SEQ ID NO: 4507838 - DNA, 25 bp, Homo sapien
caaatgcccacggatgactgctgag

SEQ ID NO: 4507839 - DNA, 25 bp, Homo sapien
gaacaaactggcctagaatctggtg

SEQ ID NO: 4507840 - DNA, 25 bp, Homo sapien
tttccatctgttaaagtagctacac

SEQ ID NO: 4507841 - DNA, 25 bp, Homo sapien
agtagctacactccaaagggaaatg

SEQ ID NO: 4507842 - DNA, 25 bp, Homo sapien
agggaaatgaccagtaaaaaatgat

SEQ ID NO: 4507843 - DNA, 25 bp, Homo sapien
tgttaaagtagctacactccaaagg

SEQ ID NO: 4507844 - DNA, 25 bp, Homo sapien
gcagccagaccaatcaagccagatg

SEQ ID NO: 4507845 - DNA, 25 bp, Homo sapien
gcagtcaagtcttcccatgtccatg

SEQ ID NO: 4507846 - DNA, 25 bp, Homo sapien
aagccagatgccgaacggtgccatg

SEQ ID NO: 4507847 - DNA, 25 bp, Homo sapien
taatcatcatgaaaaccattggctg

SEQ ID NO: 4507848 - DNA, 25 bp, Homo sapien
gatacgaggcatgtaagcaaatggc

SEQ ID NO: 4507849 - DNA, 25 bp, Homo sapien
tatgtagcgcaaaaaccccaggtgt

SEQ ID NO: 4507850 - DNA, 25 bp, Homo sapien
tgtgtgtgtgcaacgccaaacatcc

SEQ ID NO: 4507851 - DNA, 25 bp, Homo sapien
gaaagcagacaggtgttttcaccgg

SEQ ID NO: 4507852 - DNA, 25 bp, Homo sapien
atttctggataatatggtatatctc

SEQ ID NO: 4507853 - DNA, 25 bp, Homo sapien
gatttctggataatatggtatatct

SEQ ID NO: 4507854 - DNA, 25 bp, Homo sapien
gaccttgatcttacttggtggaggg

SEQ ID NO: 4507855 - DNA, 25 bp, Homo sapien
ggagtgtttgtcaggcctctctacc

SEQ ID NO: 4507856 - DNA, 25 bp, Homo sapien
tcagatcaagggcacacagtatcag

SEQ ID NO: 4507857 - DNA, 25 bp, Homo sapien
tgacagcactgtccatgatgacctt

SEQ ID NO: 4507858 - DNA, 25 bp, Homo sapien
ccccaactgggtgtactgcataaaa

SEQ ID NO: 4507859 - DNA, 25 bp, Homo sapien
tcctgatgtggagcacaaagattat

SEQ ID NO: 4507860 - DNA, 25 bp, Homo sapien
tctaagtctgacatatttatccatt

SEQ ID NO: 4507861 - DNA, 25 bp, Homo sapien
gcctaaattagctcttctaagtctg

SEQ ID NO: 4507862 - DNA, 25 bp, Homo sapien
tgtccccatacagctgtcactcagg

SEQ ID NO: 4507863 - DNA, 25 bp, Homo sapien
caacataccagaaaggccagcttgg

SEQ ID NO: 4507864 - DNA, 25 bp, Homo sapien
cagctgcagcatcggttttctaggc

SEQ ID NO: 4507865 - DNA, 25 bp, Homo sapien
catgcctccgttggatcaaggtgag

SEQ ID NO: 4507866 - DNA, 25 bp, Homo sapien
gacagcaacagatggtctggtggaa

SEQ ID NO: 4507867 - DNA, 25 bp, Homo sapien
ccctggggcaggtcaagaactgaat

SEQ ID NO: 4507868 - DNA, 25 bp, Homo sapien
tctggtggaacctaagaaggtctgc

SEQ ID NO: 4507869 - DNA, 25 bp, Homo sapien
acctaagaaggtctgcagcatcggg

SEQ ID NO: 4507870 - DNA, 25 bp, Homo sapien
tgacctggtctgcatacgggagaac

SEQ ID NO: 4507871 - DNA, 25 bp, Homo sapien
tttcttcggaagcagcgtgcacgtc

SEQ ID NO: 4507872 - DNA, 25 bp, Homo sapien
actcactgggtaagggcaggctcca

SEQ ID NO: 4507873 - DNA, 25 bp, Homo sapien
ccctgtgaatggagatacgtgcctt

SEQ ID NO: 4507874 - DNA, 25 bp, Homo sapien
caaggccaggtgtcccttcagatgg

SEQ ID NO: 4507875 - DNA, 25 bp, Homo sapien
gccaaggccaggtgtcccttcagat

SEQ ID NO: 4507876 - DNA, 25 bp, Homo sapien
aaggccaggtgtcccttcagatggg

SEQ ID NO: 4507877 - DNA, 25 bp, Homo sapien
gggccaaggccaggtgtcccttcag

SEQ ID NO: 4507878 - DNA, 25 bp, Homo sapien
ggggcctttttagtcactgctacta

SEQ ID NO: 4507879 - DNA, 25 bp, Homo sapien
gggcctttttagtcactgctactac

SEQ ID NO: 4507880 - DNA, 25 bp, Homo sapien
ggcctttttagtcactgctactact

SEQ ID NO: 4507881 - DNA, 25 bp, Homo sapien
tcaggtgaattcatagcagcaacgg

SEQ ID NO: 4507882 - DNA, 25 bp, Homo sapien
tacacggggactgatgcatccttct

SEQ ID NO: 4507883 - DNA, 25 bp, Homo sapien
gtgaattcatagcagcaacgggcaa

SEQ ID NO: 4507884 - DNA, 25 bp, Homo sapien
cctccagcaggtacacggggactga

SEQ ID NO: 4507885 - DNA, 25 bp, Homo sapien
tcattaaagagccatatgctgattt

SEQ ID NO: 4507886 - DNA, 25 bp, Homo sapien
acttcttggtcatgcactgctggtt

SEQ ID NO: 4507887 - DNA, 25 bp, Homo sapien
cttcttggtcatgcactgctggttc

SEQ ID NO: 4507888 - DNA, 25 bp, Homo sapien
ttcttggtcatgcactgctggttca

SEQ ID NO: 4507889 - DNA, 25 bp, Homo sapien
ggcctcatcctgcatcacgtagtga

SEQ ID NO: 4507890 - DNA, 25 bp, Homo sapien
caggaattgtgccagattcgggcct

SEQ ID NO: 4507891 - DNA, 25 bp, Homo sapien
ttgtgccagattcgggcctcatcct

SEQ ID NO: 4507892 - DNA, 25 bp, Homo sapien
cacgtagtgagcatacagctttttt

SEQ ID NO: 4507893 - DNA, 25 bp, Homo sapien
tgtatctctggtttgtacctctatg

SEQ ID NO: 4507894 - DNA, 25 bp, Homo sapien
cttgtatctctggtttgtacctcta

SEQ ID NO: 4507895 - DNA, 25 bp, Homo sapien
tcttgtatctctggtttgtacctct

SEQ ID NO: 4507896 - DNA, 25 bp, Homo sapien
gtatctctggtttgtacctctatgg

SEQ ID NO: 4507897 - DNA, 25 bp, Homo sapien
caaggaggtactatatagagcccat

SEQ ID NO: 4507898 - DNA, 25 bp, Homo sapien
agtcaagaatggaaaagccatcgcc

SEQ ID NO: 4507899 - DNA, 25 bp, Homo sapien
tatagagcccatgaatcaaggatgt

SEQ ID NO: 4507900 - DNA, 25 bp, Homo sapien
catcgccagcaactgtgaggatggg

SEQ ID NO: 4507901 - DNA, 25 bp, Homo sapien
gatgacaaaggctgatgacaagtgc

SEQ ID NO: 4507902 - DNA, 25 bp, Homo sapien
gctgatgacaaaggctgatgacaag

SEQ ID NO: 4507903 - DNA, 25 bp, Homo sapien
tgatgacaagtgcaaggatgagttt

SEQ ID NO: 4507904 - DNA, 25 bp, Homo sapien
caaaggctgatgacaagtgcaagga

SEQ ID NO: 4507905 - DNA, 25 bp, Homo sapien
tcagaggtctgtctccagaaggcca

SEQ ID NO: 4507906 - DNA, 25 bp, Homo sapien
atgatggcagctccgcagggtctga

SEQ ID NO: 4507907 - DNA, 25 bp, Homo sapien
gagacgtgttgcacaagacttggca

SEQ ID NO: 4507908 - DNA, 25 bp, Homo sapien
cactgcccgttacgctgtgtgagac

SEQ ID NO: 4507909 - DNA, 25 bp, Homo sapien
gaagttgtgggcctgagcggaaggg

SEQ ID NO: 4507910 - DNA, 25 bp, Homo sapien
ttgtgggcctgagcggaagggccac

SEQ ID NO: 4507911 - DNA, 25 bp, Homo sapien
agttgtgggcctgagcggaagggcc

SEQ ID NO: 4507912 - DNA, 25 bp, Homo sapien
tgggcctgagcggaagggccacagc

SEQ ID NO: 4507913 - DNA, 25 bp, Homo sapien
tatgtggagaccctgccggtcctgg

SEQ ID NO: 4507914 - DNA, 25 bp, Homo sapien
cacgctaacgggttctgctgtccca

SEQ ID NO: 4507915 - DNA, 25 bp, Homo sapien
tgtcatcgcccaaacctatgtggag

SEQ ID NO: 4507916 - DNA, 25 bp, Homo sapien
agctgtttgttctcagctctttgac

SEQ ID NO: 4507917 - DNA, 25 bp, Homo sapien
cgggcagtcgggtaacagcgggcgg

SEQ ID NO: 4507918 - DNA, 25 bp, Homo sapien
gctcagcgaagggacgccggagagg

SEQ ID NO: 4507919 - DNA, 25 bp, Homo sapien
cggccgcaggtggtcggtgcgggca

SEQ ID NO: 4507920 - DNA, 25 bp, Homo sapien
ggtggcgggctagccaggccgggct

SEQ ID NO: 4507921 - DNA, 25 bp, Homo sapien
tgggacgcgagcgggagagcccagg

SEQ ID NO: 4507922 - DNA, 25 bp, Homo sapien
ctgggacgcgagcgggagagcccag

SEQ ID NO: 4507923 - DNA, 25 bp, Homo sapien
ctcgccgctgccccggaggcccgca

SEQ ID NO: 4507924 - DNA, 25 bp, Homo sapien
tgccctggtcttgtcccggtctcgt

SEQ ID NO: 4507925 - DNA, 25 bp, Homo sapien
cctctccgccgcgacgctccggcct

SEQ ID NO: 4507926 - DNA, 25 bp, Homo sapien
ccggtctcgtcctctccgccgcgac

SEQ ID NO: 4507927 - DNA, 25 bp, Homo sapien
ttcgtgggccgcgtcgaggcctcgg

SEQ ID NO: 4507928 - DNA, 25 bp, Homo sapien
cctccaggagtaggttttcgcgctc

SEQ ID NO: 4507929 - DNA, 25 bp, Homo sapien
acgtagtcatagagccgggcgttga

SEQ ID NO: 4507930 - DNA, 25 bp, Homo sapien
cgcacccgacacacgtagtcataga

SEQ ID NO: 4507931 - DNA, 25 bp, Homo sapien
cgggcgcggaaatgcatggtaaggc

SEQ ID NO: 4507932 - DNA, 25 bp, Homo sapien
gcatggtaaggctggcggcgcgcgc

SEQ ID NO: 4507933 - DNA, 25 bp, Homo sapien
ggaaatgcatggtaaggctggcggc

SEQ ID NO: 4507934 - DNA, 25 bp, Homo sapien
ccggtggcgcgggcgcggaaatgca

SEQ ID NO: 4507935 - DNA, 25 bp, Homo sapien
gctgcaccgtctcccgccacgactc

SEQ ID NO: 4507936 - DNA, 25 bp, Homo sapien
tgcaccgtctcccgccacgactcgg

SEQ ID NO: 4507937 - DNA, 25 bp, Homo sapien
ctgcaccgtctcccgccacgactcg

SEQ ID NO: 4507938 - DNA, 25 bp, Homo sapien
ttcctccgcctggagtctgctctcc

SEQ ID NO: 4507939 - DNA, 25 bp, Homo sapien
tcctccgcctggagtctgctctcct

SEQ ID NO: 4507940 - DNA, 25 bp, Homo sapien
cctccgcctggagtctgctctcctg

SEQ ID NO: 4507941 - DNA, 25 bp, Homo sapien
ccgcagcgccttgcctcctgcgcgc

SEQ ID NO: 4507942 - DNA, 25 bp, Homo sapien
cgcagcgccttgcctcctgcgcgca

SEQ ID NO: 4507943 - DNA, 25 bp, Homo sapien
gcagcgccttgcctcctgcgcgcac

SEQ ID NO: 4507944 - DNA, 25 bp, Homo sapien
gtactcctcgcgcatccgcagcagc

SEQ ID NO: 4507945 - DNA, 25 bp, Homo sapien
cgctcctcggcctgtatcccgtact

SEQ ID NO: 4507946 - DNA, 25 bp, Homo sapien
ctcgcgcatccgcagcagcgcgtcc

SEQ ID NO: 4507947 - DNA, 25 bp, Homo sapien
ctgtatcccgtactcctcgcgcatc

SEQ ID NO: 4507948 - DNA, 25 bp, Homo sapien
cgacggcagcgggtatggggtcagc

SEQ ID NO: 4507949 - DNA, 25 bp, Homo sapien
ggcgacggcagcgggtatggggtca

SEQ ID NO: 4507950 - DNA, 25 bp, Homo sapien
ggcagcgggtatggggtcagcgcgc

SEQ ID NO: 4507951 - DNA, 25 bp, Homo sapien
gggtcagcgcgccatccccgcgcac

SEQ ID NO: 4507952 - DNA, 25 bp, Homo sapien
acgagttccactgaaggtttcatta

SEQ ID NO: 4507953 - DNA, 25 bp, Homo sapien
cgatgatgaaatcttgctccacacc

SEQ ID NO: 4507954 - DNA, 25 bp, Homo sapien
tttgctatttagagaacttttgggc

SEQ ID NO: 4507955 - DNA, 25 bp, Homo sapien
ctatttagagaacttttgggcagca

SEQ ID NO: 4507956 - DNA, 25 bp, Homo sapien
tgggcagcatcacaaccgatgatga

SEQ ID NO: 4507957 - DNA, 25 bp, Homo sapien
gcaggaggtcctgatagtcccgcag

SEQ ID NO: 4507958 - DNA, 25 bp, Homo sapien
catcctccaggcagtcaatcactct

SEQ ID NO: 4507959 - DNA, 25 bp, Homo sapien
gtcagccatggccaaggtgagggtt

SEQ ID NO: 4507960 - DNA, 25 bp, Homo sapien
aggtcctgatagtcccgcagccagt

SEQ ID NO: 4507961 - DNA, 25 bp, Homo sapien
acctccagactgaggccggtcttca

SEQ ID NO: 4507962 - DNA, 25 bp, Homo sapien
cctccagactgaggccggtcttcac

SEQ ID NO: 4507963 - DNA, 25 bp, Homo sapien
cacctccagactgaggccggtcttc

SEQ ID NO: 4507964 - DNA, 25 bp, Homo sapien
tcttctgccaaagcggtttccacag

SEQ ID NO: 4507965 - DNA, 25 bp, Homo sapien
acaccactggagatgaccagacttt

SEQ ID NO: 4507966 - DNA, 25 bp, Homo sapien
taacctctccaggtttaatctgcca

SEQ ID NO: 4507967 - DNA, 25 bp, Homo sapien
ctggagatgaccagactttgactct

SEQ ID NO: 4507968 - DNA, 25 bp, Homo sapien
cagtacatttgagagtccttgggac

SEQ ID NO: 4507969 - DNA, 25 bp, Homo sapien
tgagaaccaataagccacaggatga

SEQ ID NO: 4507970 - DNA, 25 bp, Homo sapien
tccgaatcggagcagtgcagactac

SEQ ID NO: 4507971 - DNA, 25 bp, Homo sapien
taaagaataagggtcagaagagcgc

SEQ ID NO: 4507972 - DNA, 25 bp, Homo sapien
ttcacatcggcagtgagagggtttg

SEQ ID NO: 4507973 - DNA, 25 bp, Homo sapien
aagcacctgctttaccgactctgtg

SEQ ID NO: 4507974 - DNA, 25 bp, Homo sapien
caggtcttcacatcggcagtgagag

SEQ ID NO: 4507975 - DNA, 25 bp, Homo sapien
tcatcatcaattatcatccgattat

SEQ ID NO: 4507976 - DNA, 25 bp, Homo sapien
ccccatgaacacgagagccctgtga

SEQ ID NO: 4507977 - DNA, 25 bp, Homo sapien
ttggcagcttggacaaactgcactg

SEQ ID NO: 4507978 - DNA, 25 bp, Homo sapien
cactgagttgtatttccatctgttg

SEQ ID NO: 4507979 - DNA, 25 bp, Homo sapien
catgaacacgagagccctgtgagca

SEQ ID NO: 4507980 - DNA, 25 bp, Homo sapien
agtacccaacaaggtgatttctttg

SEQ ID NO: 4507981 - DNA, 25 bp, Homo sapien
gtacccaacaaggtgatttctttga

SEQ ID NO: 4507982 - DNA, 25 bp, Homo sapien
cacttataaggcagccagactgcat

SEQ ID NO: 4507983 - DNA, 25 bp, Homo sapien
gcgagccaagcccttctagaaagct

SEQ ID NO: 4507984 - DNA, 25 bp, Homo sapien
gactgcatctgtggtttcaaactgc

SEQ ID NO: 4507985 - DNA, 25 bp, Homo sapien
gacggcagggactgacacttataag

SEQ ID NO: 4507986 - DNA, 25 bp, Homo sapien
gttttcaacgtgctcagcccagatc

SEQ ID NO: 4507987 - DNA, 25 bp, Homo sapien
tcagcccagatcactatctctggat

SEQ ID NO: 4507988 - DNA, 25 bp, Homo sapien
tcaacgtgctcagcccagatcacta

SEQ ID NO: 4507989 - DNA, 25 bp, Homo sapien
agatcactatctctggattactttc

SEQ ID NO: 4507990 - DNA, 25 bp, Homo sapien
tcattttccctctgtagtagtgagt

SEQ ID NO: 4507991 - DNA, 25 bp, Homo sapien
gaaacttgccaaaggtgctttctgc

SEQ ID NO: 4507992 - DNA, 25 bp, Homo sapien
gagtcggtatagtgataggatttgt

SEQ ID NO: 4507993 - DNA, 25 bp, Homo sapien
gaatacagtgccgagctgtgattga

SEQ ID NO: 4507994 - DNA, 25 bp, Homo sapien
gaagaatatcccgagcccaagaagc

SEQ ID NO: 4507995 - DNA, 25 bp, Homo sapien
tatctccggcttttggtctgtcagg

SEQ ID NO: 4507996 - DNA, 25 bp, Homo sapien
acctccaatagatgtgcccgtctga

SEQ ID NO: 4507997 - DNA, 25 bp, Homo sapien
ggtttgactgctgacggcttttccg

SEQ ID NO: 4507998 - DNA, 25 bp, Homo sapien
catcttaggtttctctcctcggaag

SEQ ID NO: 4507999 - DNA, 25 bp, Homo sapien
ttgtctcggcgatcccggtacgact

SEQ ID NO: 4508000 - DNA, 25 bp, Homo sapien
tcgcacgctcttctccttcggtgag

SEQ ID NO: 4508001 - DNA, 25 bp, Homo sapien
tctttcccagaatgacggtcctctc

SEQ ID NO: 4508002 - DNA, 25 bp, Homo sapien
ctggtgcccaacctgaaccgtagct

SEQ ID NO: 4508003 - DNA, 25 bp, Homo sapien
gaatcgccttgcagagaaccagtgg

SEQ ID NO: 4508004 - DNA, 25 bp, Homo sapien
cacaggcgtctgcaaacctttcggg

SEQ ID NO: 4508005 - DNA, 25 bp, Homo sapien
cagcatccttcacaggcgtctgcaa

SEQ ID NO: 4508006 - DNA, 25 bp, Homo sapien
cgctgggacatccaagggcttcaca

SEQ ID NO: 4508007 - DNA, 25 bp, Homo sapien
tgcttaaaaggtagtccaggccagc

SEQ ID NO: 4508008 - DNA, 25 bp, Homo sapien
gccgagttttatgtgccttgcagcc

SEQ ID NO: 4508009 - DNA, 25 bp, Homo sapien
taaccgatcggcatccacagtttgt

SEQ ID NO: 4508010 - DNA, 25 bp, Homo sapien
tgacttaggtcacctcccgcactta

SEQ ID NO: 4508011 - DNA, 25 bp, Homo sapien
agcgtgacatgcctcacagaccggc

SEQ ID NO: 4508012 - DNA, 25 bp, Homo sapien
cgtgacatgcctcacagaccggctg

SEQ ID NO: 4508013 - DNA, 25 bp, Homo sapien
tccggtcgggctcgctgcctgactt

SEQ ID NO: 4508014 - DNA, 25 bp, Homo sapien
gccaaatgtgctgtgcctccctgat

SEQ ID NO: 4508015 - DNA, 25 bp, Homo sapien
tctggacagtggactttgaccggga

SEQ ID NO: 4508016 - DNA, 25 bp, Homo sapien
tgggccaggttctggcgagccccat

SEQ ID NO: 4508017 - DNA, 25 bp, Homo sapien
tccctgatccgtccatatctgcaga

SEQ ID NO: 4508018 - DNA, 25 bp, Homo sapien
tctgtaggacctagtcgaatgtgcc

SEQ ID NO: 4508019 - DNA, 25 bp, Homo sapien
tctttagggcctaactggagttgcc

SEQ ID NO: 4508020 - DNA, 25 bp, Homo sapien
caagcacaaatgttctggacacggg

SEQ ID NO: 4508021 - DNA, 25 bp, Homo sapien
tacccgaggtatgactgtgagtggc

SEQ ID NO: 4508022 - DNA, 25 bp, Homo sapien
gcggatcgcctctacgttactcaca

SEQ ID NO: 4508023 - DNA, 25 bp, Homo sapien
gaggccttaaagctcacaccaactg

SEQ ID NO: 4508024 - DNA, 25 bp, Homo sapien
ctggtcattcctactgtccgcgtct

SEQ ID NO: 4508025 - DNA, 25 bp, Homo sapien
aggaaccacggtcagacacaccgag

SEQ ID NO: 4508026 - DNA, 25 bp, Homo sapien
gagctgcaccttcttatcaaacatg

SEQ ID NO: 4508027 - DNA, 25 bp, Homo sapien
ccgacctttggtctaccattctctg

SEQ ID NO: 4508028 - DNA, 25 bp, Homo sapien
gtctagatagaggagggcaactttc

SEQ ID NO: 4508029 - DNA, 25 bp, Homo sapien
ttcatctgaaatcaccgacctttgg

SEQ ID NO: 4508030 - DNA, 25 bp, Homo sapien
caagccatgtctgtgaccaggtgca

SEQ ID NO: 4508031 - DNA, 25 bp, Homo sapien
gcatctttaagaggcacagtccact

SEQ ID NO: 4508032 - DNA, 25 bp, Homo sapien
aagactggttgtgttccggccccat

SEQ ID NO: 4508033 - DNA, 25 bp, Homo sapien
gagattttcatagactccctcggcc

SEQ ID NO: 4508034 - DNA, 25 bp, Homo sapien
ttagtgctttataaggagagacacc

SEQ ID NO: 4508035 - DNA, 25 bp, Homo sapien
tgctttataaggagagacaccagag

SEQ ID NO: 4508036 - DNA, 25 bp, Homo sapien
gggattagtgctttataaggagaga

SEQ ID NO: 4508037 - DNA, 25 bp, Homo sapien
agtgctttataaggagagacaccag

SEQ ID NO: 4508038 - DNA, 25 bp, Homo sapien
tcaacgaggagatccagtgccagat

SEQ ID NO: 4508039 - DNA, 25 bp, Homo sapien
ccagatcgaggtggatggaacaccc

SEQ ID NO: 4508040 - DNA, 25 bp, Homo sapien
taaactcagtagagccacgacaggg

SEQ ID NO: 4508041 - DNA, 25 bp, Homo sapien
ggacaaacctggatgccacctggag

SEQ ID NO: 4508042 - DNA, 25 bp, Homo sapien
tggccccaacatgcaacagtgagac

SEQ ID NO: 4508043 - DNA, 25 bp, Homo sapien
agtgagaccataagcctcccgtggg

SEQ ID NO: 4508044 - DNA, 25 bp, Homo sapien
cactactgtggctgaaaaacttctc

SEQ ID NO: 4508045 - DNA, 25 bp, Homo sapien
aaagggaaacctgaacacgctgctg

SEQ ID NO: 4508046 - DNA, 25 bp, Homo sapien
caagatcgtattttccggtcaggca

SEQ ID NO: 4508047 - DNA, 25 bp, Homo sapien
tcttttccaggctataacaagggcc

SEQ ID NO: 4508048 - DNA, 25 bp, Homo sapien
tccatttggaaaaccagcggtccca

SEQ ID NO: 4508049 - DNA, 25 bp, Homo sapien
tatggaccgcaggacaaaaggactc

SEQ ID NO: 4508050 - DNA, 25 bp, Homo sapien
tgtgcccaggcttccaatagctgta

SEQ ID NO: 4508051 - DNA, 25 bp, Homo sapien
taaagcaatgctggctcaaccccat

SEQ ID NO: 4508052 - DNA, 25 bp, Homo sapien
aaggtccccgtgcagatttagaaag

SEQ ID NO: 4508053 - DNA, 25 bp, Homo sapien
taaatttctagggtcgcaacagcct

SEQ ID NO: 4508054 - DNA, 25 bp, Homo sapien
tatctgggtggctcagaaaaaccac

SEQ ID NO: 4508055 - DNA, 25 bp, Homo sapien
gcttccacgtagtaaggcttccgaa

SEQ ID NO: 4508056 - DNA, 25 bp, Homo sapien
cccgtggacgtaatctggcattgga

SEQ ID NO: 4508057 - DNA, 25 bp, Homo sapien
tgaaaatggccctgagtaacagctg

SEQ ID NO: 4508058 - DNA, 25 bp, Homo sapien
gccatatttagcattcagctctgtg

SEQ ID NO: 4508059 - DNA, 25 bp, Homo sapien
tggtgcgtgcagttctgatctccac

SEQ ID NO: 4508060 - DNA, 25 bp, Homo sapien
gacggtggctctcgtgtttatcaca

SEQ ID NO: 4508061 - DNA, 25 bp, Homo sapien
cagcagttcctagagctaagcacca

SEQ ID NO: 4508062 - DNA, 25 bp, Homo sapien
caagtgtgcatcttaagcccctgca

SEQ ID NO: 4508063 - DNA, 25 bp, Homo sapien
tgtgcatcttaagcccctgcatcag

SEQ ID NO: 4508064 - DNA, 25 bp, Homo sapien
atcagggtcaccttctgaaccagag

SEQ ID NO: 4508065 - DNA, 25 bp, Homo sapien
agggtcaccttctgaaccagagtct

SEQ ID NO: 4508066 - DNA, 25 bp, Homo sapien
cagaaacttgagcagggctgaacag

SEQ ID NO: 4508067 - DNA, 25 bp, Homo sapien
aaacgcagagccaaggcattgcctg

SEQ ID NO: 4508068 - DNA, 25 bp, Homo sapien
aagaaggtagatgacatctggaaaa

SEQ ID NO: 4508069 - DNA, 25 bp, Homo sapien
gggtggcaaatgataagagagatac

SEQ ID NO: 4508070 - DNA, 25 bp, Homo sapien
gcaggccttgcaggccgctgggaag

SEQ ID NO: 4508071 - DNA, 25 bp, Homo sapien
ctacgtgcaggccttgcaggccgct

SEQ ID NO: 4508072 - DNA, 25 bp, Homo sapien
cttgcaggccgctgggaagcttttc

SEQ ID NO: 4508073 - DNA, 25 bp, Homo sapien
tacgtgcaggccttgcaggccgctg

SEQ ID NO: 4508074 - DNA, 25 bp, Homo sapien
gaggctgttctaatgagcactggag

SEQ ID NO: 4508075 - DNA, 25 bp, Homo sapien
ttccatcccacagttttagggatcg

SEQ ID NO: 4508076 - DNA, 25 bp, Homo sapien
tttagggatcgaatgagatgaactg

SEQ ID NO: 4508077 - DNA, 25 bp, Homo sapien
tggagacaagaggactcagttttct

SEQ ID NO: 4508078 - DNA, 25 bp, Homo sapien
gacataaaggctcttacagatgctc

SEQ ID NO: 4508079 - DNA, 25 bp, Homo sapien
gtctaagttgcattttctctgcttc

SEQ ID NO: 4508080 - DNA, 25 bp, Homo sapien
cataaaggctcttacagatgctcac

SEQ ID NO: 4508081 - DNA, 25 bp, Homo sapien
ctgaggttccttgatgtctaagttg

SEQ ID NO: 4508082 - DNA, 25 bp, Homo sapien
ttgcatacatgatggcgggaggctc

SEQ ID NO: 4508083 - DNA, 25 bp, Homo sapien
tttgcatacatgatggcgggaggct

SEQ ID NO: 4508084 - DNA, 25 bp, Homo sapien
gtgctagcgatctcagtcctccctt

SEQ ID NO: 4508085 - DNA, 25 bp, Homo sapien
tcctgttttatagacataggaacag

SEQ ID NO: 4508086 - DNA, 25 bp, Homo sapien
tgcaaagccctgaagccgtgctagc

SEQ ID NO: 4508087 - DNA, 25 bp, Homo sapien
tgtgtaactaagaacataagatggg

SEQ ID NO: 4508088 - DNA, 25 bp, Homo sapien
gcgcaagcggcgctggaagccaagc

SEQ ID NO: 4508089 - DNA, 25 bp, Homo sapien
gagcgcaagcggcgctggaagccaa

SEQ ID NO: 4508090 - DNA, 25 bp, Homo sapien
ccagcgctccggagcgcaagcggcg

SEQ ID NO: 4508091 - DNA, 25 bp, Homo sapien
agagccagcgctccggagcgcaagc

SEQ ID NO: 4508092 - DNA, 25 bp, Homo sapien
ggtcagagagcctcgccacttgaat

SEQ ID NO: 4508093 - DNA, 25 bp, Homo sapien
cggtatcagggttctcgggtcccag

SEQ ID NO: 4508094 - DNA, 25 bp, Homo sapien
ttgaatcacccgacgaggcggacag

SEQ ID NO: 4508095 - DNA, 25 bp, Homo sapien
acgctttggcaggaccacgtctggg

SEQ ID NO: 4508096 - DNA, 25 bp, Homo sapien
taacgctggagattagagaactata

SEQ ID NO: 4508097 - DNA, 25 bp, Homo sapien
tccccgtactcaatttagtagaata

SEQ ID NO: 4508098 - DNA, 25 bp, Homo sapien
tacgcattccaatttcctaacgctg

SEQ ID NO: 4508099 - DNA, 25 bp, Homo sapien
tctcagctgtggtaacaaacactgg

SEQ ID NO: 4508100 - DNA, 25 bp, Homo sapien
catcaggcacgctgcagcactatat

SEQ ID NO: 4508101 - DNA, 25 bp, Homo sapien
ccatcaggcacgctgcagcactata

SEQ ID NO: 4508102 - DNA, 25 bp, Homo sapien
atatatcccatcaggcacgctgcag

SEQ ID NO: 4508103 - DNA, 25 bp, Homo sapien
gactgaatatatcccatcaggcacg

SEQ ID NO: 4508104 - DNA, 25 bp, Homo sapien
gaaaatggtgcagattcctataatt

SEQ ID NO: 4508105 - DNA, 25 bp, Homo sapien
gtactgcagtccctcatctttcagt

SEQ ID NO: 4508106 - DNA, 25 bp, Homo sapien
tactgcagtccctcatctttcagta

SEQ ID NO: 4508107 - DNA, 25 bp, Homo sapien
gtgcagattcctataatttaagaac

SEQ ID NO: 4508108 - DNA, 25 bp, Homo sapien
agtccctttcgatcgcaagagccac

SEQ ID NO: 4508109 - DNA, 25 bp, Homo sapien
agtctcaagtccctttcgatcgcaa

SEQ ID NO: 4508110 - DNA, 25 bp, Homo sapien
tctcacccccgggttggatcctcac

SEQ ID NO: 4508111 - DNA, 25 bp, Homo sapien
gctggtgagtctcaagtccctttcg

SEQ ID NO: 4508112 - DNA, 25 bp, Homo sapien
gataagtttcatcattctgttaact

SEQ ID NO: 4508113 - DNA, 25 bp, Homo sapien
tctaagttctcttatttgtgatgca

SEQ ID NO: 4508114 - DNA, 25 bp, Homo sapien
ctctaagttctcttatttgtgatgc

SEQ ID NO: 4508115 - DNA, 25 bp, Homo sapien
aatgaattgatgataagtttcatca

SEQ ID NO: 4508116 - DNA, 25 bp, Homo sapien
ctaaggaaaatctctttattttcat

SEQ ID NO: 4508117 - DNA, 25 bp, Homo sapien
taaggaaaatctctttattttcata

SEQ ID NO: 4508118 - DNA, 25 bp, Homo sapien
tctaaggaaaatctctttattttca

SEQ ID NO: 4508119 - DNA, 25 bp, Homo sapien
gtctgtgacatgcagtaggttcttc

SEQ ID NO: 4508120 - DNA, 25 bp, Homo sapien
tctctggtcattcctacaccagtgt

SEQ ID NO: 4508121 - DNA, 25 bp, Homo sapien
accttatcacacttaattttgactg

SEQ ID NO: 4508122 - DNA, 25 bp, Homo sapien
tagtcagtgatatcagccttatctt

SEQ ID NO: 4508123 - DNA, 25 bp, Homo sapien
aaactcgtttgttcaagatttggct

SEQ ID NO: 4508124 - DNA, 25 bp, Homo sapien
aactcgtttgttcaagatttggcta

SEQ ID NO: 4508125 - DNA, 25 bp, Homo sapien
ctcgtttgttcaagatttggctatg

SEQ ID NO: 4508126 - DNA, 25 bp, Homo sapien
cgtttgttcaagatttggctatggt

SEQ ID NO: 4508127 - DNA, 25 bp, Homo sapien
acaaggaagatggaatagaaactga

SEQ ID NO: 4508128 - DNA, 25 bp, Homo sapien
tacaaggaagatggaatagaaactg

SEQ ID NO: 4508129 - DNA, 25 bp, Homo sapien
aagatggaatagaaactgacaccaa

SEQ ID NO: 4508130 - DNA, 25 bp, Homo sapien
ctacaaggaagatggaatagaaact

SEQ ID NO: 4508131 - DNA, 25 bp, Homo sapien
tttgaagtgacaataaccttatctg

SEQ ID NO: 4508132 - DNA, 25 bp, Homo sapien
gtgttttgaagtgacaataacctta

SEQ ID NO: 4508133 - DNA, 25 bp, Homo sapien
gttttgaagtgacaataaccttatc

SEQ ID NO: 4508134 - DNA, 25 bp, Homo sapien
tgtgttttgaagtgacaataacctt

SEQ ID NO: 4508135 - DNA, 25 bp, Homo sapien
cctagagtgtttcctcttgggtcag

SEQ ID NO: 4508136 - DNA, 25 bp, Homo sapien
gtgtttcctcttgggtcagcaatta

SEQ ID NO: 4508137 - DNA, 25 bp, Homo sapien
gagtgtttcctcttgggtcagcaat

SEQ ID NO: 4508138 - DNA, 25 bp, Homo sapien
ccccgtcctagagtgtttcctcttg

SEQ ID NO: 4508139 - DNA, 25 bp, Homo sapien
atggctccttaacagtttcagtctt

SEQ ID NO: 4508140 - DNA, 25 bp, Homo sapien
tcatggctccttaacagtttcagtc

SEQ ID NO: 4508141 - DNA, 25 bp, Homo sapien
ccttcatggctccttaacagtttca

SEQ ID NO: 4508142 - DNA, 25 bp, Homo sapien
ttcatggctccttaacagtttcagt

SEQ ID NO: 4508143 - DNA, 25 bp, Homo sapien
tcctctactgcagcttcatcataag

SEQ ID NO: 4508144 - DNA, 25 bp, Homo sapien
ctactgcagcttcatcataagattc

SEQ ID NO: 4508145 - DNA, 25 bp, Homo sapien
cctctactgcagcttcatcataaga

SEQ ID NO: 4508146 - DNA, 25 bp, Homo sapien
cttcctctactgcagcttcatcata

SEQ ID NO: 4508147 - DNA, 25 bp, Homo sapien
atatcattcataagttcccattcac

SEQ ID NO: 4508148 - DNA, 25 bp, Homo sapien
ggtttgatatcattcataagttccc

SEQ ID NO: 4508149 - DNA, 25 bp, Homo sapien
ctgccatattggtttgatatcattc

SEQ ID NO: 4508150 - DNA, 25 bp, Homo sapien
tgatatcattcataagttcccattc

SEQ ID NO: 4508151 - DNA, 25 bp, Homo sapien
atacaagccacagggtcatcacttt

SEQ ID NO: 4508152 - DNA, 25 bp, Homo sapien
acaagccacagggtcatcactttcc

SEQ ID NO: 4508153 - DNA, 25 bp, Homo sapien
gccacgtggaacaaatgtgggtaca

SEQ ID NO: 4508154 - DNA, 25 bp, Homo sapien
ggccacgtggaacaaatgtgggtac

SEQ ID NO: 4508155 - DNA, 25 bp, Homo sapien
acaaaattcaggttcttaggcatcg

SEQ ID NO: 4508156 - DNA, 25 bp, Homo sapien
ttcaggttcttaggcatcgtatcac

SEQ ID NO: 4508157 - DNA, 25 bp, Homo sapien
taggcatcgtatcacggaagtcatc

SEQ ID NO: 4508158 - DNA, 25 bp, Homo sapien
aggttcttaggcatcgtatcacgga

SEQ ID NO: 4508159 - DNA, 25 bp, Homo sapien
acattcaaagacagaccacctgagt

SEQ ID NO: 4508160 - DNA, 25 bp, Homo sapien
ttcaaagacagaccacctgagtcca

SEQ ID NO: 4508161 - DNA, 25 bp, Homo sapien
aaagacagaccacctgagtccacca

SEQ ID NO: 4508162 - DNA, 25 bp, Homo sapien
cattcaaagacagaccacctgagtc

SEQ ID NO: 4508163 - DNA, 25 bp, Homo sapien
tccagagttttatgaacaagtttct

SEQ ID NO: 4508164 - DNA, 25 bp, Homo sapien
atgtccagagttttatgaacaagtt

SEQ ID NO: 4508165 - DNA, 25 bp, Homo sapien
tcatgtccagagttttatgaacaag

SEQ ID NO: 4508166 - DNA, 25 bp, Homo sapien
cagagttttatgaacaagtttcttc

SEQ ID NO: 4508167 - DNA, 25 bp, Homo sapien
ttctttcaacatcctggtgtaggct

SEQ ID NO: 4508168 - DNA, 25 bp, Homo sapien
tttcaacatcctggtgtaggctagt

SEQ ID NO: 4508169 - DNA, 25 bp, Homo sapien
aacatcctggtgtaggctagtaatg

SEQ ID NO: 4508170 - DNA, 25 bp, Homo sapien
tcaacatcctggtgtaggctagtaa

SEQ ID NO: 4508171 - DNA, 25 bp, Homo sapien
agattcagcctcttttctgctggac

SEQ ID NO: 4508172 - DNA, 25 bp, Homo sapien
gaagattcagcctcttttctgctgg

SEQ ID NO: 4508173 - DNA, 25 bp, Homo sapien
ggagaagattcagcctcttttctgc

SEQ ID NO: 4508174 - DNA, 25 bp, Homo sapien
ctaaacaaatggagaagattcagcc

SEQ ID NO: 4508175 - DNA, 25 bp, Homo sapien
actgagataccatagccttttcaat

SEQ ID NO: 4508176 - DNA, 25 bp, Homo sapien
tttgcatcaggatgtgttcaaactg

SEQ ID NO: 4508177 - DNA, 25 bp, Homo sapien
acatcctgaccgaatcactgctgca

SEQ ID NO: 4508178 - DNA, 25 bp, Homo sapien
tcaggttcttcgtcgggttcttcca

SEQ ID NO: 4508179 - DNA, 25 bp, Homo sapien
tctcctcaggttcttcgtcgggttc

SEQ ID NO: 4508180 - DNA, 25 bp, Homo sapien
cacagtcgataaacgtggttaaatt

SEQ ID NO: 4508181 - DNA, 25 bp, Homo sapien
tcatttctccacagtcgataaacgt

SEQ ID NO: 4508182 - DNA, 25 bp, Homo sapien
tctccacagtcgataaacgtggtta

SEQ ID NO: 4508183 - DNA, 25 bp, Homo sapien
tttctccacagtcgataaacgtggt

SEQ ID NO: 4508184 - DNA, 25 bp, Homo sapien
ggaagcttctgagcaaggttttctg

SEQ ID NO: 4508185 - DNA, 25 bp, Homo sapien
gaagcttctgagcaaggttttctgg

SEQ ID NO: 4508186 - DNA, 25 bp, Homo sapien
ttggaagcttctgagcaaggttttc

SEQ ID NO: 4508187 - DNA, 25 bp, Homo sapien
tggaagcttctgagcaaggttttct

SEQ ID NO: 4508188 - DNA, 25 bp, Homo sapien
ctacaaaaattagctgggcatggtg

SEQ ID NO: 4508189 - DNA, 25 bp, Homo sapien
cctgaccaacatggagaaacctcgt

SEQ ID NO: 4508190 - DNA, 25 bp, Homo sapien
gcacatgcctgtaatcccagctacc

SEQ ID NO: 4508191 - DNA, 25 bp, Homo sapien
ccttaggtgaggagtttgagaccaa

SEQ ID NO: 4508192 - DNA, 25 bp, Homo sapien
tgggtacaagtgattctcctgcctc

SEQ ID NO: 4508193 - DNA, 25 bp, Homo sapien
gtttcagcatgttggtccagctggt

SEQ ID NO: 4508194 - DNA, 25 bp, Homo sapien
gctagagtgccgtggctcgatctct

SEQ ID NO: 4508195 - DNA, 25 bp, Homo sapien
cactgcaacctctgcctcctgggta

SEQ ID NO: 4508196 - DNA, 25 bp, Homo sapien
gtcatgggagatcccaacaccaagc

SEQ ID NO: 4508197 - DNA, 25 bp, Homo sapien
gactgtgtggtcatgggagatccca

SEQ ID NO: 4508198 - DNA, 25 bp, Homo sapien
tgtggtcatgggagatcccaacacc

SEQ ID NO: 4508199 - DNA, 25 bp, Homo sapien
catgggagatcccaacaccaagcac

SEQ ID NO: 4508200 - DNA, 25 bp, Homo sapien
accacaactatgttatttgagtgca

SEQ ID NO: 4508201 - DNA, 25 bp, Homo sapien
caactatgttatttgagtgcaggta

SEQ ID NO: 4508202 - DNA, 25 bp, Homo sapien
aactatgttatttgagtgcaggtat

SEQ ID NO: 4508203 - DNA, 25 bp, Homo sapien
cacaactatgttatttgagtgcagg

SEQ ID NO: 4508204 - DNA, 25 bp, Homo sapien
gacgaccaatttctgggcaaacaat

SEQ ID NO: 4508205 - DNA, 25 bp, Homo sapien
gacattggagttttacaagagaccc

SEQ ID NO: 4508206 - DNA, 25 bp, Homo sapien
gatgacgtaaagctctcagacgacc

SEQ ID NO: 4508207 - DNA, 25 bp, Homo sapien
taaggcattgtcactaagatccaga

SEQ ID NO: 4508208 - DNA, 25 bp, Homo sapien
aaaatatatgacacagtagtacaaa

SEQ ID NO: 4508209 - DNA, 25 bp, Homo sapien
cgcacccaaccttagtattttacag

SEQ ID NO: 4508210 - DNA, 25 bp, Homo sapien
tatctaatggagtttacagcataca

SEQ ID NO: 4508211 - DNA, 25 bp, Homo sapien
ggagtttacagcatacattgaaata

SEQ ID NO: 4508212 - DNA, 25 bp, Homo sapien
gattttacaatagctgatagtttat

SEQ ID NO: 4508213 - DNA, 25 bp, Homo sapien
caatagctgatagtttatctatagt

SEQ ID NO: 4508214 - DNA, 25 bp, Homo sapien
gaaaagtcttagcttcatttgtaaa

SEQ ID NO: 4508215 - DNA, 25 bp, Homo sapien
gaaggacacatcgttcagaaaacaa

SEQ ID NO: 4508216 - DNA, 25 bp, Homo sapien
attccgttgtgggagacttaaatag

SEQ ID NO: 4508217 - DNA, 25 bp, Homo sapien
tcacaggatatcataagcaaaccaa

SEQ ID NO: 4508218 - DNA, 25 bp, Homo sapien
taaaatagatatggtggttggtaat

SEQ ID NO: 4508219 - DNA, 25 bp, Homo sapien
cagagggatcaagtaacaataattt

SEQ ID NO: 4508220 - DNA, 25 bp, Homo sapien
agagtgaaacttattgcccatctca

SEQ ID NO: 4508221 - DNA, 25 bp, Homo sapien
gagtgaaacttattgcccatctcaa

SEQ ID NO: 4508222 - DNA, 25 bp, Homo sapien
caatgtctgggacaacagcaaagag

SEQ ID NO: 4508223 - DNA, 25 bp, Homo sapien
gcaaagtgcaaagctcatgtaacat

SEQ ID NO: 4508224 - DNA, 25 bp, Homo sapien
agggtgccggcataccaaacctgcc

SEQ ID NO: 4508225 - DNA, 25 bp, Homo sapien
caaacctgcccagtcgtgcacagtt

SEQ ID NO: 4508226 - DNA, 25 bp, Homo sapien
gatagtagtagtgactttccactgg

SEQ ID NO: 4508227 - DNA, 25 bp, Homo sapien
acaagcatatggactgtcaatagca

SEQ ID NO: 4508228 - DNA, 25 bp, Homo sapien
tgacactatctaaacagcacctaaa

SEQ ID NO: 4508229 - DNA, 25 bp, Homo sapien
tactgtctgttgatcgctgctgtcc

SEQ ID NO: 4508230 - DNA, 25 bp, Homo sapien
taatcatgactattatcatagttgg

SEQ ID NO: 4508231 - DNA, 25 bp, Homo sapien
cttaatcatgactattatcatagtt

SEQ ID NO: 4508232 - DNA, 25 bp, Homo sapien
atcatgactattatcatagttggtg

SEQ ID NO: 4508233 - DNA, 25 bp, Homo sapien
aatcatgactattatcatagttggt

SEQ ID NO: 4508234 - DNA, 25 bp, Homo sapien
gagtcagcagcatcaataaagtgtt

SEQ ID NO: 4508235 - DNA, 25 bp, Homo sapien
taaagtgttaaagcctcgctagcca

SEQ ID NO: 4508236 - DNA, 25 bp, Homo sapien
gtgttaaagcctcgctagccaccat

SEQ ID NO: 4508237 - DNA, 25 bp, Homo sapien
caataaagtgttaaagcctcgctag

SEQ ID NO: 4508238 - DNA, 25 bp, Homo sapien
aatatatagacatgtaacgagagcc

SEQ ID NO: 4508239 - DNA, 25 bp, Homo sapien
aataacccactcaaatgggaaggct

SEQ ID NO: 4508240 - DNA, 25 bp, Homo sapien
ggaaggctgtcaaccgcataaaaaa

SEQ ID NO: 4508241 - DNA, 25 bp, Homo sapien
tataagaggcaaagacgaatatttc

SEQ ID NO: 4508242 - DNA, 25 bp, Homo sapien
tgtgaaggcttggagaaactcttcc

SEQ ID NO: 4508243 - DNA, 25 bp, Homo sapien
gcatatcacacacaaccgacgaggt

SEQ ID NO: 4508244 - DNA, 25 bp, Homo sapien
aaccgacgaggtgcaagaggagctc

SEQ ID NO: 4508245 - DNA, 25 bp, Homo sapien
tcagagaaggttatgtgaaggcttg

SEQ ID NO: 4508246 - DNA, 25 bp, Homo sapien
cagcccgtgtcaagacaatgatgag

SEQ ID NO: 4508247 - DNA, 25 bp, Homo sapien
tgtcaagacaatgatgagacaaggc

SEQ ID NO: 4508248 - DNA, 25 bp, Homo sapien
acagcccgtgtcaagacaatgatga

SEQ ID NO: 4508249 - DNA, 25 bp, Homo sapien
cccgtgtcaagacaatgatgagaca

SEQ ID NO: 4508250 - DNA, 25 bp, Homo sapien
gaaccagaagtctgtcactatggct

SEQ ID NO: 4508251 - DNA, 25 bp, Homo sapien
taaacatgaatgctgaagtgcagga

SEQ ID NO: 4508252 - DNA, 25 bp, Homo sapien
tgcaaataatccaagctaggtgagt

SEQ ID NO: 4508253 - DNA, 25 bp, Homo sapien
gacacaaagtggtgagtctgaacca

SEQ ID NO: 4508254 - DNA, 25 bp, Homo sapien
tacaaccaaaatcaaaattaggata

SEQ ID NO: 4508255 - DNA, 25 bp, Homo sapien
ccaaaatcaaaattaggataaattg

SEQ ID NO: 4508256 - DNA, 25 bp, Homo sapien
ctacaaccaaaatcaaaattaggat

SEQ ID NO: 4508257 - DNA, 25 bp, Homo sapien
aaatcaaaattaggataaattgcat

SEQ ID NO: 4508258 - DNA, 25 bp, Homo sapien
taaagttagcaaacgattggtagaa

SEQ ID NO: 4508259 - DNA, 25 bp, Homo sapien
gaagcctctcgggtaaagttagcaa

SEQ ID NO: 4508260 - DNA, 25 bp, Homo sapien
agcaaacgattggtagaaatgtcta

SEQ ID NO: 4508261 - DNA, 25 bp, Homo sapien
tgcagctccttcaaatcgccaacct

SEQ ID NO: 4508262 - DNA, 25 bp, Homo sapien
gctggcagagatggcgcggcacata

SEQ ID NO: 4508263 - DNA, 25 bp, Homo sapien
ggcacataccatagacgatttcggt

SEQ ID NO: 4508264 - DNA, 25 bp, Homo sapien
gagatggcgcggcacataccataga

SEQ ID NO: 4508265 - DNA, 25 bp, Homo sapien
tagacgatttcggtccacagtgagg

SEQ ID NO: 4508266 - DNA, 25 bp, Homo sapien
caggaggagcgtaatataaagttaa

SEQ ID NO: 4508267 - DNA, 25 bp, Homo sapien
tggacaatttgtcccagaaagcagg

SEQ ID NO: 4508268 - DNA, 25 bp, Homo sapien
gggttctggacaatttgtcccagaa

SEQ ID NO: 4508269 - DNA, 25 bp, Homo sapien
gaaagcaggaggagcgtaatataaa

SEQ ID NO: 4508270 - DNA, 25 bp, Homo sapien
gctgtaattcctatatacaggcacc

SEQ ID NO: 4508271 - DNA, 25 bp, Homo sapien
aaagaaaagtgctgtaattcctata

SEQ ID NO: 4508272 - DNA, 25 bp, Homo sapien
aagtgctgtaattcctatatacagg

SEQ ID NO: 4508273 - DNA, 25 bp, Homo sapien
tgtaattcctatatacaggcaccat

SEQ ID NO: 4508274 - DNA, 25 bp, Homo sapien
tgttatccacgtatacatactgtag

SEQ ID NO: 4508275 - DNA, 25 bp, Homo sapien
caagcctttcaggtgaatgttgtta

SEQ ID NO: 4508276 - DNA, 25 bp, Homo sapien
ccgatgactttattgtacagataag

SEQ ID NO: 4508277 - DNA, 25 bp, Homo sapien
catactgtagttctcgagatcgacc

SEQ ID NO: 4508278 - DNA, 25 bp, Homo sapien
caagcctacatctaggtcagatgca

SEQ ID NO: 4508279 - DNA, 25 bp, Homo sapien
gcttcagagcttgtacagcacagca

SEQ ID NO: 4508280 - DNA, 25 bp, Homo sapien
ttgtcccacaagtacctaaagctgt

SEQ ID NO: 4508281 - DNA, 25 bp, Homo sapien
gctttgaagctaggttataaaacac

SEQ ID NO: 4508282 - DNA, 25 bp, Homo sapien
catgggatgaacctctctttctggc

SEQ ID NO: 4508283 - DNA, 25 bp, Homo sapien
tccatgaggctagcaaatagtatag

SEQ ID NO: 4508284 - DNA, 25 bp, Homo sapien
caatggtcctcgctcctagtggtca

SEQ ID NO: 4508285 - DNA, 25 bp, Homo sapien
cctcagtaagtatatgtgccaatta

SEQ ID NO: 4508286 - DNA, 25 bp, Homo sapien
ggtagcatatcttgagttttctagg

SEQ ID NO: 4508287 - DNA, 25 bp, Homo sapien
aaacatggtatctctgtactatcca

SEQ ID NO: 4508288 - DNA, 25 bp, Homo sapien
ggtattcaagcatatcacctataaa

SEQ ID NO: 4508289 - DNA, 25 bp, Homo sapien
gtgtggtacaaagataaatgacatt

SEQ ID NO: 4508290 - DNA, 25 bp, Homo sapien
tgttagccttgctggccatttacat

SEQ ID NO: 4508291 - DNA, 25 bp, Homo sapien
tgtaaactgtccacgtccatccctt

SEQ ID NO: 4508292 - DNA, 25 bp, Homo sapien
gaaatgcctccttggttactaatga

SEQ ID NO: 4508293 - DNA, 25 bp, Homo sapien
tgagtttgatcaccttttgttagcc

SEQ ID NO: 4508294 - DNA, 25 bp, Homo sapien
ttttctctcctactacacatacaac

SEQ ID NO: 4508295 - DNA, 25 bp, Homo sapien
catcacaataaatcttacatacatt

SEQ ID NO: 4508296 - DNA, 25 bp, Homo sapien
tcctactacacatacaacatcacaa

SEQ ID NO: 4508297 - DNA, 25 bp, Homo sapien
tactacacatacaacatcacaataa

SEQ ID NO: 4508298 - DNA, 25 bp, Homo sapien
gaagtctttagggtcttgaaaatga

SEQ ID NO: 4508299 - DNA, 25 bp, Homo sapien
cacagtatggtagacaggaaaggga

SEQ ID NO: 4508300 - DNA, 25 bp, Homo sapien
tatgccaatcaagatagatttagag

SEQ ID NO: 4508301 - DNA, 25 bp, Homo sapien
gaaagggactgataagtggcaaaga

SEQ ID NO: 4508302 - DNA, 25 bp, Homo sapien
gatcatgctccgtccctatggcctt

SEQ ID NO: 4508303 - DNA, 25 bp, Homo sapien
aaaacggttcgctgccctgatgaaa

SEQ ID NO: 4508304 - DNA, 25 bp, Homo sapien
aagcagcttcacctcggaaacttga

SEQ ID NO: 4508305 - DNA, 25 bp, Homo sapien
tcggaaacttgaatgggagcaccac

SEQ ID NO: 4508306 - DNA, 25 bp, Homo sapien
ctgtggtaggtatgatacagccctc

SEQ ID NO: 4508307 - DNA, 25 bp, Homo sapien
taggtatgatacagccctctcatag

SEQ ID NO: 4508308 - DNA, 25 bp, Homo sapien
gatacagccctctcatagccaattc

SEQ ID NO: 4508309 - DNA, 25 bp, Homo sapien
caagctgtggtaggtatgatacagc

SEQ ID NO: 4508310 - DNA, 25 bp, Homo sapien
taggctcactacaccgatgacagtg

SEQ ID NO: 4508311 - DNA, 25 bp, Homo sapien
gggtagacgatggtaaacataggct

SEQ ID NO: 4508312 - DNA, 25 bp, Homo sapien
cgatggtaaacataggctcactaca

SEQ ID NO: 4508313 - DNA, 25 bp, Homo sapien
taaacataggctcactacaccgatg

SEQ ID NO: 4508314 - DNA, 25 bp, Homo sapien
tgacttaatgctttcatgcacagcc

SEQ ID NO: 4508315 - DNA, 25 bp, Homo sapien
cctggtgcccacttaggcatgatta

SEQ ID NO: 4508316 - DNA, 25 bp, Homo sapien
tgcctgggtgtaaaccctggtgccc

SEQ ID NO: 4508317 - DNA, 25 bp, Homo sapien
ttgcctgggtgtaaaccctggtgcc

SEQ ID NO: 4508318 - DNA, 25 bp, Homo sapien
tctgccatgtaaggagacgatgaga

SEQ ID NO: 4508319 - DNA, 25 bp, Homo sapien
agaacgcaaccatgctgaccccttg

SEQ ID NO: 4508320 - DNA, 25 bp, Homo sapien
gacgatgagaagttggttgcctgca

SEQ ID NO: 4508321 - DNA, 25 bp, Homo sapien
tgtgctttagtcctaacctctagta

SEQ ID NO: 4508322 - DNA, 25 bp, Homo sapien
gagggaatgtgattttcatgatgtg

SEQ ID NO: 4508323 - DNA, 25 bp, Homo sapien
catctttaggaaagcgaaaaggcaa

SEQ ID NO: 4508324 - DNA, 25 bp, Homo sapien
taggaaagcgaaaaggcaagcatca

SEQ ID NO: 4508325 - DNA, 25 bp, Homo sapien
tattagatacttttgcattacctct

SEQ ID NO: 4508326 - DNA, 25 bp, Homo sapien
caaaatctgggcataaaaccacacc

SEQ ID NO: 4508327 - DNA, 25 bp, Homo sapien
tagagccataaacaggtaggaacac

SEQ ID NO: 4508328 - DNA, 25 bp, Homo sapien
ggaccatataccaagtcacagctga

SEQ ID NO: 4508329 - DNA, 25 bp, Homo sapien
tatacagaacactatccaacagcag

SEQ ID NO: 4508330 - DNA, 25 bp, Homo sapien
ggcacagatgcaattggctccaagt

SEQ ID NO: 4508331 - DNA, 25 bp, Homo sapien
cttgaggaacaacgcagtgctggca

SEQ ID NO: 4508332 - DNA, 25 bp, Homo sapien
aagagttgtatccagaactgcccac

SEQ ID NO: 4508333 - DNA, 25 bp, Homo sapien
cacacacttggtggatccctctgga

SEQ ID NO: 4508334 - DNA, 25 bp, Homo sapien
gatctcaactcaaggcatggacaga

SEQ ID NO: 4508335 - DNA, 25 bp, Homo sapien
taagcttagtgccttgagatctcaa

SEQ ID NO: 4508336 - DNA, 25 bp, Homo sapien
gaacttgagacttgatatgggagcc

SEQ ID NO: 4508337 - DNA, 25 bp, Homo sapien
aagtgggaccctgctaatctgtagc

SEQ ID NO: 4508338 - DNA, 25 bp, Homo sapien
gagagaagaacgctgtgagttcaag

SEQ ID NO: 4508339 - DNA, 25 bp, Homo sapien
tcaagattaaagtctctgattcttt

SEQ ID NO: 4508340 - DNA, 25 bp, Homo sapien
cactggaatcaggtgaagtatgtac

SEQ ID NO: 4508341 - DNA, 25 bp, Homo sapien
ggtcaacaaactgcataatagaaat

SEQ ID NO: 4508342 - DNA, 25 bp, Homo sapien
gagcagcagtaagccacaaaactaa

SEQ ID NO: 4508343 - DNA, 25 bp, Homo sapien
aggtcaaaagtctgcagacactggg

SEQ ID NO: 4508344 - DNA, 25 bp, Homo sapien
ggagcagcagtaagccacaaaacta

SEQ ID NO: 4508345 - DNA, 25 bp, Homo sapien
gcaggtcaaaagtctgcagacactg

SEQ ID NO: 4508346 - DNA, 25 bp, Homo sapien
tgttctccaaggaccggaaacttgc

SEQ ID NO: 4508347 - DNA, 25 bp, Homo sapien
tgggagcctcactttgctgccaact

SEQ ID NO: 4508348 - DNA, 25 bp, Homo sapien
catggtctcagggaaataactctct

SEQ ID NO: 4508349 - DNA, 25 bp, Homo sapien
tactcaagaccattgaggccacggg

SEQ ID NO: 4508350 - DNA, 25 bp, Homo sapien
aactgaatcataaacccatcaaaaa

SEQ ID NO: 4508351 - DNA, 25 bp, Homo sapien
ggaagtagctgaagcctttcacatg

SEQ ID NO: 4508352 - DNA, 25 bp, Homo sapien
gaagtagctgaagcctttcacatgt

SEQ ID NO: 4508353 - DNA, 25 bp, Homo sapien
gaatcataaacccatcaaaaaagaa

SEQ ID NO: 4508354 - DNA, 25 bp, Homo sapien
taagttcaggtgctgtacccaagga

SEQ ID NO: 4508355 - DNA, 25 bp, Homo sapien
tgcagagcctcataagccaactggt

SEQ ID NO: 4508356 - DNA, 25 bp, Homo sapien
tatacaagaaacgagggccaacatg

SEQ ID NO: 4508357 - DNA, 25 bp, Homo sapien
tgcagatacagtgggaacacacggt

SEQ ID NO: 4508358 - DNA, 25 bp, Homo sapien
ttctgggaaatgtaggagaacctca

SEQ ID NO: 4508359 - DNA, 25 bp, Homo sapien
gagccactgccgagacttgattttt

SEQ ID NO: 4508360 - DNA, 25 bp, Homo sapien
caagcaggagtgaatgaaaaccaca

SEQ ID NO: 4508361 - DNA, 25 bp, Homo sapien
gaacctcaatagaagcaagcaggag

SEQ ID NO: 4508362 - DNA, 25 bp, Homo sapien
caatgcaacctcttcctgccgggtt

SEQ ID NO: 4508363 - DNA, 25 bp, Homo sapien
ctcaatgcaacctcttcctgccggg

SEQ ID NO: 4508364 - DNA, 25 bp, Homo sapien
tcaatgcaacctcttcctgccgggt

SEQ ID NO: 4508365 - DNA, 25 bp, Homo sapien
tagagacaccggcatcactttcaga

SEQ ID NO: 4508366 - DNA, 25 bp, Homo sapien
tcaaccgatggtgacagctcaagat

SEQ ID NO: 4508367 - DNA, 25 bp, Homo sapien
tctccaagtctgtgctaagggctct

SEQ ID NO: 4508368 - DNA, 25 bp, Homo sapien
gatgaagatccctagtacacgagtc

SEQ ID NO: 4508369 - DNA, 25 bp, Homo sapien
ttttaactaaagctgcatcccacag

SEQ ID NO: 4508370 - DNA, 25 bp, Homo sapien
cattttctcggtgttcacacagctc

SEQ ID NO: 4508371 - DNA, 25 bp, Homo sapien
tgcggctcgctcttctgcagctgac

SEQ ID NO: 4508372 - DNA, 25 bp, Homo sapien
gtgaccccagatcaacaggccaact

SEQ ID NO: 4508373 - DNA, 25 bp, Homo sapien
ccaggatatcacttagtggtgactg

SEQ ID NO: 4508374 - DNA, 25 bp, Homo sapien
gggtgggctcacttcctagctttca

SEQ ID NO: 4508375 - DNA, 25 bp, Homo sapien
cgggcctggagtgatttttcagttc

SEQ ID NO: 4508376 - DNA, 25 bp, Homo sapien
actttacaaatgtgacgggcctgga

SEQ ID NO: 4508377 - DNA, 25 bp, Homo sapien
cagccagcaaacacctcaccgtctt

SEQ ID NO: 4508378 - DNA, 25 bp, Homo sapien
accgtcttcatgtgtcctgtggctt

SEQ ID NO: 4508379 - DNA, 25 bp, Homo sapien
acctcaccgtcttcatgtgtcctgt

SEQ ID NO: 4508380 - DNA, 25 bp, Homo sapien
gcaaacacctcaccgtcttcatgtg

SEQ ID NO: 4508381 - DNA, 25 bp, Homo sapien
gctggggtggcatccagggtgccca

SEQ ID NO: 4508382 - DNA, 25 bp, Homo sapien
tggggtggcatccagggtgcccatc

SEQ ID NO: 4508383 - DNA, 25 bp, Homo sapien
tggcatccagggtgcccatcaggcc

SEQ ID NO: 4508384 - DNA, 25 bp, Homo sapien
gggtggcatccagggtgcccatcag

SEQ ID NO: 4508385 - DNA, 25 bp, Homo sapien
cacctccccaaggttgactaggtct

SEQ ID NO: 4508386 - DNA, 25 bp, Homo sapien
aaggttgactaggtcttcagagacc

SEQ ID NO: 4508387 - DNA, 25 bp, Homo sapien
ccaaggttgactaggtcttcagaga

SEQ ID NO: 4508388 - DNA, 25 bp, Homo sapien
tccccaaggttgactaggtcttcag

SEQ ID NO: 4508389 - DNA, 25 bp, Homo sapien
atgagtggtgcccatcgtccccgct

SEQ ID NO: 4508390 - DNA, 25 bp, Homo sapien
ggtgcccaccgatgagtggtgccca

SEQ ID NO: 4508391 - DNA, 25 bp, Homo sapien
cctgcggtgcccaccgatgagtggt

SEQ ID NO: 4508392 - DNA, 25 bp, Homo sapien
accgatgagtggtgcccatcgtccc

SEQ ID NO: 4508393 - DNA, 25 bp, Homo sapien
ttaaactgcataccatcaaagaggg

SEQ ID NO: 4508394 - DNA, 25 bp, Homo sapien
ttcgtcctgaatgggcgtggcatcc

SEQ ID NO: 4508395 - DNA, 25 bp, Homo sapien
tgattcctgtcacctagggactggc

SEQ ID NO: 4508396 - DNA, 25 bp, Homo sapien
tgcaatctgagtgtacatgggacct

SEQ ID NO: 4508397 - DNA, 25 bp, Homo sapien
gaggacattcggaggacctagaagc

SEQ ID NO: 4508398 - DNA, 25 bp, Homo sapien
cactggcagagcctgaacgtggcac

SEQ ID NO: 4508399 - DNA, 25 bp, Homo sapien
tgtgtctgggcggtgtgtcttggca

SEQ ID NO: 4508400 - DNA, 25 bp, Homo sapien
ctgaggacattcggaggacctagaa

SEQ ID NO: 4508401 - DNA, 25 bp, Homo sapien
tgcttaatgcaggtgaccgtgagga

SEQ ID NO: 4508402 - DNA, 25 bp, Homo sapien
cttaatgcaggtgaccgtgaggaag

SEQ ID NO: 4508403 - DNA, 25 bp, Homo sapien
taggtgcttaatgcaggtgaccgtg

SEQ ID NO: 4508404 - DNA, 25 bp, Homo sapien
aggtgcttaatgcaggtgaccgtga

SEQ ID NO: 4508405 - DNA, 25 bp, Homo sapien
cttttcagatgctggcgccgtgacc

SEQ ID NO: 4508406 - DNA, 25 bp, Homo sapien
cgccgtgaccaaagacctggctctt

SEQ ID NO: 4508407 - DNA, 25 bp, Homo sapien
gaagtgaccatgagggtcaaatgtt

SEQ ID NO: 4508408 - DNA, 25 bp, Homo sapien
ctggaagtgaccatgagggtcaaat

SEQ ID NO: 4508409 - DNA, 25 bp, Homo sapien
catctgtgctccgtccacgctgctt

SEQ ID NO: 4508410 - DNA, 25 bp, Homo sapien
tccgtccacgctgcttcgtccagcc

SEQ ID NO: 4508411 - DNA, 25 bp, Homo sapien
tcccacgccgatccccagagtagct

SEQ ID NO: 4508412 - DNA, 25 bp, Homo sapien
gagtagctccccgggatgctctctc

SEQ ID NO: 4508413 - DNA, 25 bp, Homo sapien
gactccctgtgaaccaaggctgcac

SEQ ID NO: 4508414 - DNA, 25 bp, Homo sapien
ggggccatttctgccccacacagga

SEQ ID NO: 4508415 - DNA, 25 bp, Homo sapien
aaggctgcacatgcttctgggtgcc

SEQ ID NO: 4508416 - DNA, 25 bp, Homo sapien
gtgaaccaaggctgcacatgcttct

SEQ ID NO: 4508417 - DNA, 25 bp, Homo sapien
cgaatgtggggcttgcgcaggagaa

SEQ ID NO: 4508418 - DNA, 25 bp, Homo sapien
gcgcaggagagcgaatgtggggctt

SEQ ID NO: 4508419 - DNA, 25 bp, Homo sapien
tggggcttgcgcaggagaatctctc

SEQ ID NO: 4508420 - DNA, 25 bp, Homo sapien
tcagggccccccacgggcgcaggag

SEQ ID NO: 4508421 - DNA, 25 bp, Homo sapien
aggtccacaccccacagaggggctg

SEQ ID NO: 4508422 - DNA, 25 bp, Homo sapien
caggtccacaccccacagaggggct

SEQ ID NO: 4508423 - DNA, 25 bp, Homo sapien
ccaggtccacaccccacagaggggc

SEQ ID NO: 4508424 - DNA, 25 bp, Homo sapien
tcccggctcggagaacaagaggctt

SEQ ID NO: 4508425 - DNA, 25 bp, Homo sapien
ggatcagacggcctttcacaattat

SEQ ID NO: 4508426 - DNA, 25 bp, Homo sapien
aacaagaggctttccctgcacctgg

SEQ ID NO: 4508427 - DNA, 25 bp, Homo sapien
tttcacaattatttccaggatctcc

SEQ ID NO: 4508428 - DNA, 25 bp, Homo sapien
ctgcgattaggtggcagggcctctg

SEQ ID NO: 4508429 - DNA, 25 bp, Homo sapien
gcctctgccctgctccaggccgcat

SEQ ID NO: 4508430 - DNA, 25 bp, Homo sapien
gggcctctgccctgctccaggccgc

SEQ ID NO: 4508431 - DNA, 25 bp, Homo sapien
cagggcctctgccctgctccaggcc

SEQ ID NO: 4508432 - DNA, 25 bp, Homo sapien
ctcttcaattctgttgctaccacgg

SEQ ID NO: 4508433 - DNA, 25 bp, Homo sapien
actggctctggaacgagggtccgat

SEQ ID NO: 4508434 - DNA, 25 bp, Homo sapien
tggaacgagggtccgatgtctctgt

SEQ ID NO: 4508435 - DNA, 25 bp, Homo sapien
tcttcaattctgttgctaccacggg

SEQ ID NO: 4508436 - DNA, 25 bp, Homo sapien
cccagcagaggtggcgagtgtcgtg

SEQ ID NO: 4508437 - DNA, 25 bp, Homo sapien
gagtgcgtgggtgccactcgcagct

SEQ ID NO: 4508438 - DNA, 25 bp, Homo sapien
tggcgagtgtcgtggccgaaagacc

SEQ ID NO: 4508439 - DNA, 25 bp, Homo sapien
gtcgtggccgaaagaccaggcccag

SEQ ID NO: 4508440 - DNA, 25 bp, Homo sapien
ccttggttcactgattcgaagaaga

SEQ ID NO: 4508441 - DNA, 25 bp, Homo sapien
taaaattccttggttcactgattcg

SEQ ID NO: 4508442 - DNA, 25 bp, Homo sapien
ctgtactaaaattccttggttcact

SEQ ID NO: 4508443 - DNA, 25 bp, Homo sapien
ggttcactgattcgaagaagaacat

SEQ ID NO: 4508444 - DNA, 25 bp, Homo sapien
ttgggccttgaggcgtgacagttct

SEQ ID NO: 4508445 - DNA, 25 bp, Homo sapien
cttgggccttgaggcgtgacagttc

SEQ ID NO: 4508446 - DNA, 25 bp, Homo sapien
gccttgaggcgtgacagttcttcct

SEQ ID NO: 4508447 - DNA, 25 bp, Homo sapien
gggccttgaggcgtgacagttcttc

SEQ ID NO: 4508448 - DNA, 25 bp, Homo sapien
gtgtgtcgatccctctgccagtact

SEQ ID NO: 4508449 - DNA, 25 bp, Homo sapien
tcctttgtcgggtatgtgtttcgca

SEQ ID NO: 4508450 - DNA, 25 bp, Homo sapien
gaaaaagctgtacttaacccatcaa

SEQ ID NO: 4508451 - DNA, 25 bp, Homo sapien
gatgtccaattgttatagcaccgtt

SEQ ID NO: 4508452 - DNA, 25 bp, Homo sapien
catttcctgtcctctgcgtccgctc

SEQ ID NO: 4508453 - DNA, 25 bp, Homo sapien
tctctggagcgctcctcatctgcag

SEQ ID NO: 4508454 - DNA, 25 bp, Homo sapien
tgcaggccctcgagtgcacagcggc

SEQ ID NO: 4508455 - DNA, 25 bp, Homo sapien
tggtcttatttgtcccaggttcttc

SEQ ID NO: 4508456 - DNA, 25 bp, Homo sapien
ggaagcctgaagacaccagctcagg

SEQ ID NO: 4508457 - DNA, 25 bp, Homo sapien
gaagggaagcctgaagacaccagct

SEQ ID NO: 4508458 - DNA, 25 bp, Homo sapien
ggggggattccagccgctctaccat

SEQ ID NO: 4508459 - DNA, 25 bp, Homo sapien
ctgcagggaagggaagcctgaagac

SEQ ID NO: 4508460 - DNA, 25 bp, Homo sapien
aaggccctctggctatgagctgcag

SEQ ID NO: 4508461 - DNA, 25 bp, Homo sapien
agcgccaaggccctctggctatgag

SEQ ID NO: 4508462 - DNA, 25 bp, Homo sapien
tctggctatgagctgcagacaaggg

SEQ ID NO: 4508463 - DNA, 25 bp, Homo sapien
gccctctggctatgagctgcagaca

SEQ ID NO: 4508464 - DNA, 25 bp, Homo sapien
ccctgtctccaacaccacagcccac

SEQ ID NO: 4508465 - DNA, 25 bp, Homo sapien
cagagaaccaaggggactcctccct

SEQ ID NO: 4508466 - DNA, 25 bp, Homo sapien
tgcaaacctggtgcgcgcagccgct

SEQ ID NO: 4508467 - DNA, 25 bp, Homo sapien
tcacagcatgcacagtgctggtgcc

SEQ ID NO: 4508468 - DNA, 25 bp, Homo sapien
tgcacagtgctggtgcctcgatctg

SEQ ID NO: 4508469 - DNA, 25 bp, Homo sapien
tggtgcctcgatctgcaaacctggt

SEQ ID NO: 4508470 - DNA, 25 bp, Homo sapien
tcaggcctccaagttcccatccagg

SEQ ID NO: 4508471 - DNA, 25 bp, Homo sapien
ctgccggagctctggcccatcccag

SEQ ID NO: 4508472 - DNA, 25 bp, Homo sapien
tccaagttcccatccaggagcagct

SEQ ID NO: 4508473 - DNA, 25 bp, Homo sapien
tgccggagctctggcccatcccagg

SEQ ID NO: 4508474 - DNA, 25 bp, Homo sapien
ggcccgcacagggagcactccgtcc

SEQ ID NO: 4508475 - DNA, 25 bp, Homo sapien
tcacaagtgggcgttccaggtccgg

SEQ ID NO: 4508476 - DNA, 25 bp, Homo sapien
tttgcgccatgacccgaaggtcagc

SEQ ID NO: 4508477 - DNA, 25 bp, Homo sapien
cgcacagggagcactccgtccatgg

SEQ ID NO: 4508478 - DNA, 25 bp, Homo sapien
tcattcagctgaatcttgacggatg

SEQ ID NO: 4508479 - DNA, 25 bp, Homo sapien
agctgaatcttgacggatggccttt

SEQ ID NO: 4508480 - DNA, 25 bp, Homo sapien
ggaggaacaagaggctgaatcggaa

SEQ ID NO: 4508481 - DNA, 25 bp, Homo sapien
ctggaggaacaagaggctgaatcgg

SEQ ID NO: 4508482 - DNA, 25 bp, Homo sapien
aggaacaagaggctgaatcggaaga

SEQ ID NO: 4508483 - DNA, 25 bp, Homo sapien
gaacaagaggctgaatcggaagaac

SEQ ID NO: 4508484 - DNA, 25 bp, Homo sapien
gcgcaagccattttgtaagtgtaca

SEQ ID NO: 4508485 - DNA, 25 bp, Homo sapien
cactggcgtctagtgactattcaca

SEQ ID NO: 4508486 - DNA, 25 bp, Homo sapien
cagagacactgaactccactggcgt

SEQ ID NO: 4508487 - DNA, 25 bp, Homo sapien
acctgggtagcccagacgacaggcg

SEQ ID NO: 4508488 - DNA, 25 bp, Homo sapien
gtaaatacaccaatctagctcaagg

SEQ ID NO: 4508489 - DNA, 25 bp, Homo sapien
ggagtgcaggcgcacgcgcatgact

SEQ ID NO: 4508490 - DNA, 25 bp, Homo sapien
cgcacgcgcatgactggcaggcagc

SEQ ID NO: 4508491 - DNA, 25 bp, Homo sapien
gcgggccagatagagtgccgggtgt

SEQ ID NO: 4508492 - DNA, 25 bp, Homo sapien
ttcatctgctgatatcagcagcgag

SEQ ID NO: 4508493 - DNA, 25 bp, Homo sapien
gctgatatcagcagcgaggcctctc

SEQ ID NO: 4508494 - DNA, 25 bp, Homo sapien
catctgctgatatcagcagcgaggc

SEQ ID NO: 4508495 - DNA, 25 bp, Homo sapien
tctgctgatatcagcagcgaggcct

SEQ ID NO: 4508496 - DNA, 25 bp, Homo sapien
ttagccacagtttccattatcttca

SEQ ID NO: 4508497 - DNA, 25 bp, Homo sapien
tttccattatcttcatgagcagtag

SEQ ID NO: 4508498 - DNA, 25 bp, Homo sapien
cagtttccattatcttcatgagcag

SEQ ID NO: 4508499 - DNA, 25 bp, Homo sapien
tagccacagtttccattatcttcat

SEQ ID NO: 4508500 - DNA, 25 bp, Homo sapien
tcactgaggcggcccggagtcgcac

SEQ ID NO: 4508501 - DNA, 25 bp, Homo sapien
aaggtcactgaggcggcccggagtc

SEQ ID NO: 4508502 - DNA, 25 bp, Homo sapien
gcccggagtcgcacacagtgggaaa

SEQ ID NO: 4508503 - DNA, 25 bp, Homo sapien
aggcggcccggagtcgcacacagtg

SEQ ID NO: 4508504 - DNA, 25 bp, Homo sapien
tttgcctactctacggccagctgag

SEQ ID NO: 4508505 - DNA, 25 bp, Homo sapien
tgtcctatgctctgggcttttttgc

SEQ ID NO: 4508506 - DNA, 25 bp, Homo sapien
gctggcggcctccacgtagtctttg

SEQ ID NO: 4508507 - DNA, 25 bp, Homo sapien
ctttgcggcattctttttaggctca

SEQ ID NO: 4508508 - DNA, 25 bp, Homo sapien
tgcgtcaaagtacagagaagattga

SEQ ID NO: 4508509 - DNA, 25 bp, Homo sapien
tctgcgtcaaagtacagagaagatt

SEQ ID NO: 4508510 - DNA, 25 bp, Homo sapien
tgtctgcgtcaaagtacagagaaga

SEQ ID NO: 4508511 - DNA, 25 bp, Homo sapien
gtgtctgcgtcaaagtacagagaag

SEQ ID NO: 4508512 - DNA, 25 bp, Homo sapien
agtttgccacgtggataacagtcca

SEQ ID NO: 4508513 - DNA, 25 bp, Homo sapien
gtttgccacgtggataacagtccat

SEQ ID NO: 4508514 - DNA, 25 bp, Homo sapien
caagtttgccacgtggataacagtc

SEQ ID NO: 4508515 - DNA, 25 bp, Homo sapien
aagtttgccacgtggataacagtcc

SEQ ID NO: 4508516 - DNA, 25 bp, Homo sapien
tgggttgaagagagccgataaaaat

SEQ ID NO: 4508517 - DNA, 25 bp, Homo sapien
aaatagcagcatcacactgcaagca

SEQ ID NO: 4508518 - DNA, 25 bp, Homo sapien
atagcagcatcacactgcaagcaag

SEQ ID NO: 4508519 - DNA, 25 bp, Homo sapien
cattcgccatgtcaacatgaagcaa

SEQ ID NO: 4508520 - DNA, 25 bp, Homo sapien
gcagagggtacggtgctgtggggtt

SEQ ID NO: 4508521 - DNA, 25 bp, Homo sapien
ggagcagagggtacggtgctgtggg

SEQ ID NO: 4508522 - DNA, 25 bp, Homo sapien
ggaggagcagagggtacggtgctgt

SEQ ID NO: 4508523 - DNA, 25 bp, Homo sapien
gaggagcagagggtacggtgctgtg

SEQ ID NO: 4508524 - DNA, 25 bp, Homo sapien
tgcttctcaggcttagggccttcct

SEQ ID NO: 4508525 - DNA, 25 bp, Homo sapien
aaagcagtcagactgataggggaac

SEQ ID NO: 4508526 - DNA, 25 bp, Homo sapien
cagaagttttcgcatgagaaaagca

SEQ ID NO: 4508527 - DNA, 25 bp, Homo sapien
gtcagactgataggggaactctgct

SEQ ID NO: 4508528 - DNA, 25 bp, Homo sapien
tgtccctacaggttttgtggactcc

SEQ ID NO: 4508529 - DNA, 25 bp, Homo sapien
ttgtggactccaggtcattgtcttc

SEQ ID NO: 4508530 - DNA, 25 bp, Homo sapien
agtaggcgtcccctgtccctacagg

SEQ ID NO: 4508531 - DNA, 25 bp, Homo sapien
tcagtaggcgtcccctgtccctaca

SEQ ID NO: 4508532 - DNA, 25 bp, Homo sapien
tgacactgtggttctcatggaattc

SEQ ID NO: 4508533 - DNA, 25 bp, Homo sapien
gccagccaaccccagatcacagcct

SEQ ID NO: 4508534 - DNA, 25 bp, Homo sapien
tctgaaacaagcctggcttcatcat

SEQ ID NO: 4508535 - DNA, 25 bp, Homo sapien
aagcctggcttcatcataatgactg

SEQ ID NO: 4508536 - DNA, 25 bp, Homo sapien
cagcaacccagtcctctcagcagaa

SEQ ID NO: 4508537 - DNA, 25 bp, Homo sapien
acccagtcctctcagcagaatccgg

SEQ ID NO: 4508538 - DNA, 25 bp, Homo sapien
gcagaatccggggacagtgtttcca

SEQ ID NO: 4508539 - DNA, 25 bp, Homo sapien
cagaatccggggacagtgtttccat

SEQ ID NO: 4508540 - DNA, 25 bp, Homo sapien
gactgtttcttgcagataaggcgca

SEQ ID NO: 4508541 - DNA, 25 bp, Homo sapien
agactgtttcttgcagataaggcgc

SEQ ID NO: 4508542 - DNA, 25 bp, Homo sapien
actgtttcttgcagataaggcgcat

SEQ ID NO: 4508543 - DNA, 25 bp, Homo sapien
cagactgtttcttgcagataaggcg

SEQ ID NO: 4508544 - DNA, 25 bp, Homo sapien
gagatccaaaaggtctcaccctgag

SEQ ID NO: 4508545 - DNA, 25 bp, Homo sapien
gataatcctgggctactattgaaga

SEQ ID NO: 4508546 - DNA, 25 bp, Homo sapien
cctgaaatatcatgtgctgctgcct

SEQ ID NO: 4508547 - DNA, 25 bp, Homo sapien
taataggttccatgtcactgccagc

SEQ ID NO: 4508548 - DNA, 25 bp, Homo sapien
cacgaagccaaatggttgtttgcat

SEQ ID NO: 4508549 - DNA, 25 bp, Homo sapien
gaagatgagaaattcaatcccgcag

SEQ ID NO: 4508550 - DNA, 25 bp, Homo sapien
cagaggtgcctgtgtaatggacacg

SEQ ID NO: 4508551 - DNA, 25 bp, Homo sapien
tctgaagagtttttcggggccacag

SEQ ID NO: 4508552 - DNA, 25 bp, Homo sapien
ccattgttggccctctcatcctgaa

SEQ ID NO: 4508553 - DNA, 25 bp, Homo sapien
ctttaggagatgagccattgttggc

SEQ ID NO: 4508554 - DNA, 25 bp, Homo sapien
tatcgaggtctttaggagatgagcc

SEQ ID NO: 4508555 - DNA, 25 bp, Homo sapien
ctgattatgtttatcgaggtcttta

SEQ ID NO: 4508556 - DNA, 25 bp, Homo sapien
tgaccagcccccgggagcccaggcc

SEQ ID NO: 4508557 - DNA, 25 bp, Homo sapien
ctgaccagcccccgggagcccaggc

SEQ ID NO: 4508558 - DNA, 25 bp, Homo sapien
tccctgaccagcccccgggagccca

SEQ ID NO: 4508559 - DNA, 25 bp, Homo sapien
cctgaccagcccccgggagcccagg

SEQ ID NO: 4508560 - DNA, 25 bp, Homo sapien
acttgatgagggcccgggcgcctcc

SEQ ID NO: 4508561 - DNA, 25 bp, Homo sapien
tcacttgatgagggcccgggcgcct

SEQ ID NO: 4508562 - DNA, 25 bp, Homo sapien
atactggtcacttgatgagggcccg

SEQ ID NO: 4508563 - DNA, 25 bp, Homo sapien
cggcccggcggcgtcgcgccctgcc

SEQ ID NO: 4508564 - DNA, 25 bp, Homo sapien
aagaagatgacggcggcttggcgcc

SEQ ID NO: 4508565 - DNA, 25 bp, Homo sapien
agaagatgacggcggcttggcgccg

SEQ ID NO: 4508566 - DNA, 25 bp, Homo sapien
aagatgacggcggcttggcgccggg

SEQ ID NO: 4508567 - DNA, 25 bp, Homo sapien
ggaagaagatgacggcggcttggcg

SEQ ID NO: 4508568 - DNA, 25 bp, Homo sapien
tccacaaggacgtgggggcggacta

SEQ ID NO: 4508569 - DNA, 25 bp, Homo sapien
caaggacgtgggggcggactatgtt

SEQ ID NO: 4508570 - DNA, 25 bp, Homo sapien
cacaaggacgtgggggcggactatg

SEQ ID NO: 4508571 - DNA, 25 bp, Homo sapien
ccacaaggacgtgggggcggactat

SEQ ID NO: 4508572 - DNA, 25 bp, Homo sapien
cgggactcgccgggacatccgcgca

SEQ ID NO: 4508573 - DNA, 25 bp, Homo sapien
ccgccaccagcgcttcgcgccgccc

SEQ ID NO: 4508574 - DNA, 25 bp, Homo sapien
gcccgccaccagcgcttcgcgccgc

SEQ ID NO: 4508575 - DNA, 25 bp, Homo sapien
cgggcccgccaccagcgcttcgcgc

SEQ ID NO: 4508576 - DNA, 25 bp, Homo sapien
gggcccgccaccagcgcttcgcgcc

SEQ ID NO: 4508577 - DNA, 25 bp, Homo sapien
ctccttcaactttcaaggaggcgac

SEQ ID NO: 4508578 - DNA, 25 bp, Homo sapien
tttcaaggaggcgacgtccaccacc

SEQ ID NO: 4508579 - DNA, 25 bp, Homo sapien
cccgagaactccttcaactttcaag

SEQ ID NO: 4508580 - DNA, 25 bp, Homo sapien
cgagaactccttcaactttcaagga

SEQ ID NO: 4508581 - DNA, 25 bp, Homo sapien
cataaaaagacatgcccgggttggt

SEQ ID NO: 4508582 - DNA, 25 bp, Homo sapien
aatatggtattccacctcacaaagg

SEQ ID NO: 4508583 - DNA, 25 bp, Homo sapien
taagtaccaacctatatcgtgtgct

SEQ ID NO: 4508584 - DNA, 25 bp, Homo sapien
tatatcttagagaccactcccacag

SEQ ID NO: 4508585 - DNA, 25 bp, Homo sapien
tttacttgctaatgaacgaaacagt

SEQ ID NO: 4508586 - DNA, 25 bp, Homo sapien
taattaaagtgatgcccagaaaggt

SEQ ID NO: 4508587 - DNA, 25 bp, Homo sapien
cagagttaaaaaggatctagctatc

SEQ ID NO: 4508588 - DNA, 25 bp, Homo sapien
tcaataactcctggatcagaagcat

SEQ ID NO: 4508589 - DNA, 25 bp, Homo sapien
cttcggtatattgccaaaaatgtat

SEQ ID NO: 4508590 - DNA, 25 bp, Homo sapien
tcctgatatgataccattacttcgg

SEQ ID NO: 4508591 - DNA, 25 bp, Homo sapien
gacattctacaaagtaacgaccagt

SEQ ID NO: 4508592 - DNA, 25 bp, Homo sapien
cccacattaatcataagaaagcatc

SEQ ID NO: 4508593 - DNA, 25 bp, Homo sapien
tttgcaaagcgtaaaatcctgagtc

SEQ ID NO: 4508594 - DNA, 25 bp, Homo sapien
aaaagtcaagggagtgcatcatgca

SEQ ID NO: 4508595 - DNA, 25 bp, Homo sapien
tatctagaccagcagagctacagag

SEQ ID NO: 4508596 - DNA, 25 bp, Homo sapien
taaagccatatgtcgaaagctcagc

SEQ ID NO: 4508597 - DNA, 25 bp, Homo sapien
gccaagaagaatacggagactcacg

SEQ ID NO: 4508598 - DNA, 25 bp, Homo sapien
gcttggatgcacagtcaggacgaca

SEQ ID NO: 4508599 - DNA, 25 bp, Homo sapien
agagggattctagagcagcactgcc

SEQ ID NO: 4508600 - DNA, 25 bp, Homo sapien
tagtaactggtatcggacatgctct

SEQ ID NO: 4508601 - DNA, 25 bp, Homo sapien
ttaactatcaccatcactcccaggg

SEQ ID NO: 4508602 - DNA, 25 bp, Homo sapien
tactaagcatccaacatattccagg

SEQ ID NO: 4508603 - DNA, 25 bp, Homo sapien
gttgtacaagtatgagtctcctcta

SEQ ID NO: 4508604 - DNA, 25 bp, Homo sapien
tatctactcaatatctggcccagga

SEQ ID NO: 4508605 - DNA, 25 bp, Homo sapien
tcaatgacgcgttctgtgacgccat

SEQ ID NO: 4508606 - DNA, 25 bp, Homo sapien
cacctggaaataactttcccctgtg

SEQ ID NO: 4508607 - DNA, 25 bp, Homo sapien
tcaaacgtacacttcaatgacgcgt

SEQ ID NO: 4508608 - DNA, 25 bp, Homo sapien
ctcttatatagatcaaacgtacact

SEQ ID NO: 4508609 - DNA, 25 bp, Homo sapien
taatctaatggtactaaaatgcaga

SEQ ID NO: 4508610 - DNA, 25 bp, Homo sapien
tctgtaatgagacacgctctttaaa

SEQ ID NO: 4508611 - DNA, 25 bp, Homo sapien
gatagttacacatcacagtacatat

SEQ ID NO: 4508612 - DNA, 25 bp, Homo sapien
aaatttagctatttggcccatggca

SEQ ID NO: 4508613 - DNA, 25 bp, Homo sapien
gatagagcaggacattcaggtagaa

SEQ ID NO: 4508614 - DNA, 25 bp, Homo sapien
gctcaatggattaggtgcacaaaca

SEQ ID NO: 4508615 - DNA, 25 bp, Homo sapien
tgacttctcgcaacaactagtgaac

SEQ ID NO: 4508616 - DNA, 25 bp, Homo sapien
tgcatgatccggtgattcaaccaat

SEQ ID NO: 4508617 - DNA, 25 bp, Homo sapien
aatgaatagaagactgatggctgtc

SEQ ID NO: 4508618 - DNA, 25 bp, Homo sapien
gatggctgtctatgattcacattaa

SEQ ID NO: 4508619 - DNA, 25 bp, Homo sapien
cattaataaaggaacactagttatc

SEQ ID NO: 4508620 - DNA, 25 bp, Homo sapien
attgtgaaataattgttatcaccat

SEQ ID NO: 4508621 - DNA, 25 bp, Homo sapien
tgcacttagatatgatccttgcaga

SEQ ID NO: 4508622 - DNA, 25 bp, Homo sapien
aagtgcacttagatatgatccttgc

SEQ ID NO: 4508623 - DNA, 25 bp, Homo sapien
caaaaagtgcacttagatatgatcc

SEQ ID NO: 4508624 - DNA, 25 bp, Homo sapien
tcagcaaaaagtgcacttagatatg

SEQ ID NO: 4508625 - DNA, 25 bp, Homo sapien
tatgagatgatttcagcagcgtcag

SEQ ID NO: 4508626 - DNA, 25 bp, Homo sapien
gagaaactgccactacacaatatta

SEQ ID NO: 4508627 - DNA, 25 bp, Homo sapien
tacaaatttcctcaactgggtctaa

SEQ ID NO: 4508628 - DNA, 25 bp, Homo sapien
gcagcgtcagacaaaatataagaga

SEQ ID NO: 4508629 - DNA, 25 bp, Homo sapien
ggcccaagccagtgaaaggcagtct

SEQ ID NO: 4508630 - DNA, 25 bp, Homo sapien
aaaatgataattggtcgcggcccaa

SEQ ID NO: 4508631 - DNA, 25 bp, Homo sapien
taagggaagaatacctcaaggaagc

SEQ ID NO: 4508632 - DNA, 25 bp, Homo sapien
tgacttcctagggacattggactgt

SEQ ID NO: 4508633 - DNA, 25 bp, Homo sapien
attatctgggttggctcaaagtgaa

SEQ ID NO: 4508634 - DNA, 25 bp, Homo sapien
tctgggttggctcaaagtgaacaca

SEQ ID NO: 4508635 - DNA, 25 bp, Homo sapien
tatctgggttggctcaaagtgaaca

SEQ ID NO: 4508636 - DNA, 25 bp, Homo sapien
tgggttggctcaaagtgaacacatc

SEQ ID NO: 4508637 - DNA, 25 bp, Homo sapien
taaagtggctgagttcccataacct

SEQ ID NO: 4508638 - DNA, 25 bp, Homo sapien
cagattatcacttgttccaggacga

SEQ ID NO: 4508639 - DNA, 25 bp, Homo sapien
ttttcctggccaaagagcatgaacc

SEQ ID NO: 4508640 - DNA, 25 bp, Homo sapien
tctagtgggcatatggtggagccta

SEQ ID NO: 4508641 - DNA, 25 bp, Homo sapien
tattaagtaagacccctcactgtca

SEQ ID NO: 4508642 - DNA, 25 bp, Homo sapien
cacaccaaagtagggagaacataca

SEQ ID NO: 4508643 - DNA, 25 bp, Homo sapien
gttacccagattggaacgcagtagc

SEQ ID NO: 4508644 - DNA, 25 bp, Homo sapien
caaaagtatccaggtttgatagcag

SEQ ID NO: 4508645 - DNA, 25 bp, Homo sapien
caaataccagaaactcagcttatca

SEQ ID NO: 4508646 - DNA, 25 bp, Homo sapien
caagttgctgttaagtctgcataaa

SEQ ID NO: 4508647 - DNA, 25 bp, Homo sapien
cactcaagttgctgttaagtctgca

SEQ ID NO: 4508648 - DNA, 25 bp, Homo sapien
ctcagcttatcagcctactgcaaag

SEQ ID NO: 4508649 - DNA, 25 bp, Homo sapien
tctgaaccgcttgtgggtaagttgc

SEQ ID NO: 4508650 - DNA, 25 bp, Homo sapien
ggtaagttgcatatatcacgccctt

SEQ ID NO: 4508651 - DNA, 25 bp, Homo sapien
caagaacagtatagagaatgcctgc

SEQ ID NO: 4508652 - DNA, 25 bp, Homo sapien
aatgcctgcctattacctagattca

SEQ ID NO: 4508653 - DNA, 25 bp, Homo sapien
aaaggttttctagggccctgctgca

SEQ ID NO: 4508654 - DNA, 25 bp, Homo sapien
ccgccaaggtcgcagatgctaaata

SEQ ID NO: 4508655 - DNA, 25 bp, Homo sapien
gcagtaaatatcaccccgccaaggt

SEQ ID NO: 4508656 - DNA, 25 bp, Homo sapien
cagctagtctgaggcgcaatgcagc

SEQ ID NO: 4508657 - DNA, 25 bp, Homo sapien
ggggggtagagtgagactcaatgtc

SEQ ID NO: 4508658 - DNA, 25 bp, Homo sapien
gtccaagggctacagctgaaatttt

SEQ ID NO: 4508659 - DNA, 25 bp, Homo sapien
aatgcatcgtacacagcttctgtta

SEQ ID NO: 4508660 - DNA, 25 bp, Homo sapien
gcttctgttatttcagcttctagtc

SEQ ID NO: 4508661 - DNA, 25 bp, Homo sapien
ttttcttcaataccctaatgcatcg

SEQ ID NO: 4508662 - DNA, 25 bp, Homo sapien
tatgcgtgtgatttgtattttcttc

SEQ ID NO: 4508663 - DNA, 25 bp, Homo sapien
tgatttgtattttcttccgccccat

SEQ ID NO: 4508664 - DNA, 25 bp, Homo sapien
cgtgtgatttgtattttcttccgcc

SEQ ID NO: 4508665 - DNA, 25 bp, Homo sapien
tgtgatttgtattttcttccgcccc

SEQ ID NO: 4508666 - DNA, 25 bp, Homo sapien
cctcttcttctaatacgggatggga

SEQ ID NO: 4508667 - DNA, 25 bp, Homo sapien
tgagcaagagttacccttgatccct

SEQ ID NO: 4508668 - DNA, 25 bp, Homo sapien
ggaatgcaagggaactctctttact

SEQ ID NO: 4508669 - DNA, 25 bp, Homo sapien
gactgaaggccctaaaagagatgtc

SEQ ID NO: 4508670 - DNA, 25 bp, Homo sapien
gtgctagcatattgaaacagtttgt

SEQ ID NO: 4508671 - DNA, 25 bp, Homo sapien
gaactttgtccatatcagtgctagc

SEQ ID NO: 4508672 - DNA, 25 bp, Homo sapien
caatatccgagttggttctgctttc

SEQ ID NO: 4508673 - DNA, 25 bp, Homo sapien
acagtcacagagcacactaagttca

SEQ ID NO: 4508674 - DNA, 25 bp, Homo sapien
ctgacagttaatgctattaaacaaa

SEQ ID NO: 4508675 - DNA, 25 bp, Homo sapien
ttagatgtacaagtcattctgacag

SEQ ID NO: 4508676 - DNA, 25 bp, Homo sapien
tttcagtattacttgcaattcacgt

SEQ ID NO: 4508677 - DNA, 25 bp, Homo sapien
tcacgtattactagatatgtgttac

SEQ ID NO: 4508678 - DNA, 25 bp, Homo sapien
tgtgaatcatcatcctgctgcttca

SEQ ID NO: 4508679 - DNA, 25 bp, Homo sapien
aatcatcatcctgctgcttcaggct

SEQ ID NO: 4508680 - DNA, 25 bp, Homo sapien
cctgtgaatcatcatcctgctgctt

SEQ ID NO: 4508681 - DNA, 25 bp, Homo sapien
tgaatcatcatcctgctgcttcagg

SEQ ID NO: 4508682 - DNA, 25 bp, Homo sapien
aatttccatataagctgcccctctg

SEQ ID NO: 4508683 - DNA, 25 bp, Homo sapien
gatttcaacttcgtacactaactgc

SEQ ID NO: 4508684 - DNA, 25 bp, Homo sapien
tgcgaactgcacgagcaagggatct

SEQ ID NO: 4508685 - DNA, 25 bp, Homo sapien
gagaatgaaacctactgcgaactgc

SEQ ID NO: 4508686 - DNA, 25 bp, Homo sapien
gattctgggacacaactgatctctg

SEQ ID NO: 4508687 - DNA, 25 bp, Homo sapien
tatagtaaccaatcgccacatgtgg

SEQ ID NO: 4508688 - DNA, 25 bp, Homo sapien
tgttcacatataaggcctagagcta

SEQ ID NO: 4508689 - DNA, 25 bp, Homo sapien
gagaggcaagcgatttaaacagtac

SEQ ID NO: 4508690 - DNA, 25 bp, Homo sapien
tcacagaatgaaggactgatacagc

SEQ ID NO: 4508691 - DNA, 25 bp, Homo sapien
tgtaggacagggtttggcagttcct

SEQ ID NO: 4508692 - DNA, 25 bp, Homo sapien
gagttgatccagataacctagccca

SEQ ID NO: 4508693 - DNA, 25 bp, Homo sapien
ccatacggatggaccttgaaaacat

SEQ ID NO: 4508694 - DNA, 25 bp, Homo sapien
gatggtgggctttcatcaatcctag

SEQ ID NO: 4508695 - DNA, 25 bp, Homo sapien
tctctgcggttatggaaaatctact

SEQ ID NO: 4508696 - DNA, 25 bp, Homo sapien
gaactctaggttgcattctactccc

SEQ ID NO: 4508697 - DNA, 25 bp, Homo sapien
cacatttactctgcatgggatttga

SEQ ID NO: 4508698 - DNA, 25 bp, Homo sapien
ttatcgaaagcaccctactagatgc

SEQ ID NO: 4508699 - DNA, 25 bp, Homo sapien
tggtcattcgatgaagactgcttac

SEQ ID NO: 4508700 - DNA, 25 bp, Homo sapien
gagatcatctggtcattcgatgaag

SEQ ID NO: 4508701 - DNA, 25 bp, Homo sapien
tagatcatcgtccacatgaagactg

SEQ ID NO: 4508702 - DNA, 25 bp, Homo sapien
tgccactgaacggaaaactaaatgg

SEQ ID NO: 4508703 - DNA, 25 bp, Homo sapien
taagagagctgtaatcaggaacaac

SEQ ID NO: 4508704 - DNA, 25 bp, Homo sapien
actaaatggtactgttgtgatcctc

SEQ ID NO: 4508705 - DNA, 25 bp, Homo sapien
caaagggagaacagataagagagct

SEQ ID NO: 4508706 - DNA, 25 bp, Homo sapien
tcattgctatgacacagctgagcag

SEQ ID NO: 4508707 - DNA, 25 bp, Homo sapien
agcagtacatgctccataaacaccg

SEQ ID NO: 4508708 - DNA, 25 bp, Homo sapien
cattccaagctaatagaatcatagc

SEQ ID NO: 4508709 - DNA, 25 bp, Homo sapien
tgaccacccaccttaaatctcattg

SEQ ID NO: 4508710 - DNA, 25 bp, Homo sapien
tttatatactaaacctcttggtgaa

SEQ ID NO: 4508711 - DNA, 25 bp, Homo sapien
tgtacatctgcctctcattttctgg

SEQ ID NO: 4508712 - DNA, 25 bp, Homo sapien
tctggtttatatactaaacctcttg

SEQ ID NO: 4508713 - DNA, 25 bp, Homo sapien
tcattttctggtttatatactaaac

SEQ ID NO: 4508714 - DNA, 25 bp, Homo sapien
tcaaaataagtctggctagtacctc

SEQ ID NO: 4508715 - DNA, 25 bp, Homo sapien
gatgagagaccatggagcccttaat

SEQ ID NO: 4508716 - DNA, 25 bp, Homo sapien
gagttattttgcaaaccagccttgg

SEQ ID NO: 4508717 - DNA, 25 bp, Homo sapien
tcagttgtgcttgcaaggagagtta

SEQ ID NO: 4508718 - DNA, 25 bp, Homo sapien
tacaacactgcagagatggacatta

SEQ ID NO: 4508719 - DNA, 25 bp, Homo sapien
tggaataccattgattgtcaccctg

SEQ ID NO: 4508720 - DNA, 25 bp, Homo sapien
tagaaaacttgtagtagctgcaaat

SEQ ID NO: 4508721 - DNA, 25 bp, Homo sapien
tgtcaccctgtggatactggccact

SEQ ID NO: 4508722 - DNA, 25 bp, Homo sapien
tgtcctgaacggtactacttagatt

SEQ ID NO: 4508723 - DNA, 25 bp, Homo sapien
gcctatgtcctgaacggtactactt

SEQ ID NO: 4508724 - DNA, 25 bp, Homo sapien
tgcatatggctggctcgtttttcca

SEQ ID NO: 4508725 - DNA, 25 bp, Homo sapien
ctgaacggtactacttagattttct

SEQ ID NO: 4508726 - DNA, 25 bp, Homo sapien
catctacattacgtacttctaccac

SEQ ID NO: 4508727 - DNA, 25 bp, Homo sapien
tacgtacttctaccactatccctag

SEQ ID NO: 4508728 - DNA, 25 bp, Homo sapien
acttctaccactatccctagactag

SEQ ID NO: 4508729 - DNA, 25 bp, Homo sapien
tacattacgtacttctaccactatc

SEQ ID NO: 4508730 - DNA, 25 bp, Homo sapien
catttatggtacaaaacgcaggatt

SEQ ID NO: 4508731 - DNA, 25 bp, Homo sapien
catgccaagttatctgattctaggg

SEQ ID NO: 4508732 - DNA, 25 bp, Homo sapien
tcaacgctagttatgtaaggatact

SEQ ID NO: 4508733 - DNA, 25 bp, Homo sapien
tgtattgtttagagcacatgccaag

SEQ ID NO: 4508734 - DNA, 25 bp, Homo sapien
tgaccaactgcagagaaggattagg

SEQ ID NO: 4508735 - DNA, 25 bp, Homo sapien
tacagggttcaacactgaaatggct

SEQ ID NO: 4508736 - DNA, 25 bp, Homo sapien
tgtgcttggccataaaaggtcctgt

SEQ ID NO: 4508737 - DNA, 25 bp, Homo sapien
gatcactgaactagtcccagagaag

SEQ ID NO: 4508738 - DNA, 25 bp, Homo sapien
tatctcctggattatactgactttt

SEQ ID NO: 4508739 - DNA, 25 bp, Homo sapien
tcttgagtgccattaaaatatctcc

SEQ ID NO: 4508740 - DNA, 25 bp, Homo sapien
gagcttgaagatatatggaatattc

SEQ ID NO: 4508741 - DNA, 25 bp, Homo sapien
tagtataatgcaaaaaacagttggt

SEQ ID NO: 4508742 - DNA, 25 bp, Homo sapien
tggactgtgctcaaagtaatcgtca

SEQ ID NO: 4508743 - DNA, 25 bp, Homo sapien
tctgtcctccgagagtggactgtgc

SEQ ID NO: 4508744 - DNA, 25 bp, Homo sapien
ttcatttagtttgctgaatctgtcc

SEQ ID NO: 4508745 - DNA, 25 bp, Homo sapien
tcgtcagcatcagggctctcacaac

SEQ ID NO: 4508746 - DNA, 25 bp, Homo sapien
taatgaagttaacaaaaaggatcaa

SEQ ID NO: 4508747 - DNA, 25 bp, Homo sapien
aaggatcaacaaataaaaagtagag

SEQ ID NO: 4508748 - DNA, 25 bp, Homo sapien
atgaagttaacaaaaaggatcaaca

SEQ ID NO: 4508749 - DNA, 25 bp, Homo sapien
gatcaacaaataaaaagtagaggta

SEQ ID NO: 4508750 - DNA, 25 bp, Homo sapien
tctgtatgtggagttagcacatatg

SEQ ID NO: 4508751 - DNA, 25 bp, Homo sapien
ttagcacatatgaagtatcagggtc

SEQ ID NO: 4508752 - DNA, 25 bp, Homo sapien
gtggagttagcacatatgaagtatc

SEQ ID NO: 4508753 - DNA, 25 bp, Homo sapien
catatgaagtatcagggtctgggct

SEQ ID NO: 4508754 - DNA, 25 bp, Homo sapien
aggtggagagagcatgcttgaatct

SEQ ID NO: 4508755 - DNA, 25 bp, Homo sapien
gagagagcatgcttgaatctgttaa

SEQ ID NO: 4508756 - DNA, 25 bp, Homo sapien
agcatgcttgaatctgttaacgttg

SEQ ID NO: 4508757 - DNA, 25 bp, Homo sapien
gagagcatgcttgaatctgttaacg

SEQ ID NO: 4508758 - DNA, 25 bp, Homo sapien
tccagctccatttggcactgtgagg

SEQ ID NO: 4508759 - DNA, 25 bp, Homo sapien
tccatttggcactgtgaggtctgta

SEQ ID NO: 4508760 - DNA, 25 bp, Homo sapien
gaggtctgtagtgctcaacatccca

SEQ ID NO: 4508761 - DNA, 25 bp, Homo sapien
cactgtgaggtctgtagtgctcaac

SEQ ID NO: 4508762 - DNA, 25 bp, Homo sapien
ttggtactcgtgatgcacaaatgca

SEQ ID NO: 4508763 - DNA, 25 bp, Homo sapien
aaatgctgggtcacacaatacacgt

SEQ ID NO: 4508764 - DNA, 25 bp, Homo sapien
caatacacgtatctgcagcttaggc

SEQ ID NO: 4508765 - DNA, 25 bp, Homo sapien
gcagataatgccaaatggttgcaac

SEQ ID NO: 4508766 - DNA, 25 bp, Homo sapien
cacaaaagcatgcatgagatcatca

SEQ ID NO: 4508767 - DNA, 25 bp, Homo sapien
gagatcatcagtttcaccatgcctt

SEQ ID NO: 4508768 - DNA, 25 bp, Homo sapien
gaatactaccaatgatgaacaacct

SEQ ID NO: 4508769 - DNA, 25 bp, Homo sapien
ttcaggagagattcccaaaaatggg

SEQ ID NO: 4508770 - DNA, 25 bp, Homo sapien
acatgctgctgtcatctcaactcag

SEQ ID NO: 4508771 - DNA, 25 bp, Homo sapien
ggttcgaaggcagtgagttatctca

SEQ ID NO: 4508772 - DNA, 25 bp, Homo sapien
gaaatgtcttgtaagatggacaaca

SEQ ID NO: 4508773 - DNA, 25 bp, Homo sapien
ctgaaagtagaaaagattacagggc

SEQ ID NO: 4508774 - DNA, 25 bp, Homo sapien
catcagtctggctcatatttcaaaa

SEQ ID NO: 4508775 - DNA, 25 bp, Homo sapien
tcttgccacagtttacaaacctagg

SEQ ID NO: 4508776 - DNA, 25 bp, Homo sapien
gaaataatgcattcaagtagctggc

SEQ ID NO: 4508777 - DNA, 25 bp, Homo sapien
gctcttgagcaaaccgcatacccat

SEQ ID NO: 4508778 - DNA, 25 bp, Homo sapien
agaagaattgcctgagccgcagagg

SEQ ID NO: 4508779 - DNA, 25 bp, Homo sapien
cttaccctcacccaattcctcttgt

SEQ ID NO: 4508780 - DNA, 25 bp, Homo sapien
aagaattgcctgagccgcagaggtg

SEQ ID NO: 4508781 - DNA, 25 bp, Homo sapien
ccttaccctcacccaattcctcttg

SEQ ID NO: 4508782 - DNA, 25 bp, Homo sapien
tagctccaatcaaatttggagaagc

SEQ ID NO: 4508783 - DNA, 25 bp, Homo sapien
cagtagctccaatcaaatttggaga

SEQ ID NO: 4508784 - DNA, 25 bp, Homo sapien
caccagtagctccaatcaaatttgg

SEQ ID NO: 4508785 - DNA, 25 bp, Homo sapien
accagtagctccaatcaaatttgga

SEQ ID NO: 4508786 - DNA, 25 bp, Homo sapien
ggggatgacaactcgaagatctggt

SEQ ID NO: 4508787 - DNA, 25 bp, Homo sapien
gggatgacaactcgaagatctggtt

SEQ ID NO: 4508788 - DNA, 25 bp, Homo sapien
ggatgacaactcgaagatctggttt

SEQ ID NO: 4508789 - DNA, 25 bp, Homo sapien
gtgtagattctacggtggcacagaa

SEQ ID NO: 4508790 - DNA, 25 bp, Homo sapien
gaataggtgtagattctacggtggc

SEQ ID NO: 4508791 - DNA, 25 bp, Homo sapien
tattaggaataggtgtagattctac

SEQ ID NO: 4508792 - DNA, 25 bp, Homo sapien
tagattctacggtggcacagaaaat

SEQ ID NO: 4508793 - DNA, 25 bp, Homo sapien
aaatagtttagtgcttctctcacag

SEQ ID NO: 4508794 - DNA, 25 bp, Homo sapien
taaataagtcatggttaatgcttct

SEQ ID NO: 4508795 - DNA, 25 bp, Homo sapien
actgtaccctgcctggtatgtagaa

SEQ ID NO: 4508796 - DNA, 25 bp, Homo sapien
ggttaatgcttctagcctggtaaaa

SEQ ID NO: 4508797 - DNA, 25 bp, Homo sapien
tgacctggactgtaagacttagaga

SEQ ID NO: 4508798 - DNA, 25 bp, Homo sapien
tctgtcagtgtacacctggcctcca

SEQ ID NO: 4508799 - DNA, 25 bp, Homo sapien
cagttggttgccgtgaaatctcagc

SEQ ID NO: 4508800 - DNA, 25 bp, Homo sapien
actcaccctgtgttatactgcggcc

SEQ ID NO: 4508801 - DNA, 25 bp, Homo sapien
tgttgctctggttaccatcagggca

SEQ ID NO: 4508802 - DNA, 25 bp, Homo sapien
gctggactgggtttgagccttactg

SEQ ID NO: 4508803 - DNA, 25 bp, Homo sapien
gctaagctattagtgcaagaatcga

SEQ ID NO: 4508804 - DNA, 25 bp, Homo sapien
taatggtgcatagctcttggatact

SEQ ID NO: 4508805 - DNA, 25 bp, Homo sapien
taacgtatcagtagtggttcaatag

SEQ ID NO: 4508806 - DNA, 25 bp, Homo sapien
tcacagtcaagaggaggctaaagag

SEQ ID NO: 4508807 - DNA, 25 bp, Homo sapien
gtagactcgagtttttgctgggatc

SEQ ID NO: 4508808 - DNA, 25 bp, Homo sapien
gaaagtcttagaaactctcacagtc

SEQ ID NO: 4508809 - DNA, 25 bp, Homo sapien
tagatagccctcaaaagctgaagct

SEQ ID NO: 4508810 - DNA, 25 bp, Homo sapien
tgccggaaaataaaaaagcgcctgc

SEQ ID NO: 4508811 - DNA, 25 bp, Homo sapien
gacataggaatcaagtagatagccc

SEQ ID NO: 4508812 - DNA, 25 bp, Homo sapien
gcccacgagtccatattgatagaaa

SEQ ID NO: 4508813 - DNA, 25 bp, Homo sapien
gacaatcttttaactgacgctttct

SEQ ID NO: 4508814 - DNA, 25 bp, Homo sapien
aatatacacctttagttaccttgag

SEQ ID NO: 4508815 - DNA, 25 bp, Homo sapien
gtgtagagtcaattcctccctccca

SEQ ID NO: 4508816 - DNA, 25 bp, Homo sapien
tgcactagggtttataatatacacc

SEQ ID NO: 4508817 - DNA, 25 bp, Homo sapien
ggtcatgttggtcgagtgttgctca

SEQ ID NO: 4508818 - DNA, 25 bp, Homo sapien
taaactcactgattggtccgaggag

SEQ ID NO: 4508819 - DNA, 25 bp, Homo sapien
tccaaatgctagaagactgaatgct

SEQ ID NO: 4508820 - DNA, 25 bp, Homo sapien
catcactactctagttgggcctcaa

SEQ ID NO: 4508821 - DNA, 25 bp, Homo sapien
tgttcagatcttgtgcccttttaaa

SEQ ID NO: 4508822 - DNA, 25 bp, Homo sapien
tcaattccctaagcctgataatatt

SEQ ID NO: 4508823 - DNA, 25 bp, Homo sapien
ccctaagcctgataatattgagcat

SEQ ID NO: 4508824 - DNA, 25 bp, Homo sapien
tctttttgaagtatgtgttcagatc

SEQ ID NO: 4508825 - DNA, 25 bp, Homo sapien
caagtattgcatatccagtacctga

SEQ ID NO: 4508826 - DNA, 25 bp, Homo sapien
tgaaaggtgagctatgggaccatcc

SEQ ID NO: 4508827 - DNA, 25 bp, Homo sapien
tggactttacttggatttcaccagt

SEQ ID NO: 4508828 - DNA, 25 bp, Homo sapien
gacagcatttacaaagagagctccc

SEQ ID NO: 4508829 - DNA, 25 bp, Homo sapien
ggtgggaccgattacttactctgaa

SEQ ID NO: 4508830 - DNA, 25 bp, Homo sapien
tacatgaagccctaatctggaagaa

SEQ ID NO: 4508831 - DNA, 25 bp, Homo sapien
gagctagcagttataaaacaacagg

SEQ ID NO: 4508832 - DNA, 25 bp, Homo sapien
ttttatttcccgcaggagctagcag

SEQ ID NO: 4508833 - DNA, 25 bp, Homo sapien
cgatctgtatttggaactgtgagaa

SEQ ID NO: 4508834 - DNA, 25 bp, Homo sapien
tgtatttggaactgtgagaatatca

SEQ ID NO: 4508835 - DNA, 25 bp, Homo sapien
ctcatcatgctatcgatctgtattt

SEQ ID NO: 4508836 - DNA, 25 bp, Homo sapien
catgctatcgatctgtatttggaac

SEQ ID NO: 4508837 - DNA, 25 bp, Homo sapien
gttactaagactgttggtactcaca

SEQ ID NO: 4508838 - DNA, 25 bp, Homo sapien
aaagagacgattatatacacaacag

SEQ ID NO: 4508839 - DNA, 25 bp, Homo sapien
cacataagagggataagagagttac

SEQ ID NO: 4508840 - DNA, 25 bp, Homo sapien
tatttggacactagcagctgtctgg

SEQ ID NO: 4508841 - DNA, 25 bp, Homo sapien
caaagggaacattggttagataaca

SEQ ID NO: 4508842 - DNA, 25 bp, Homo sapien
tagaaaaactagagtctgtagtacc

SEQ ID NO: 4508843 - DNA, 25 bp, Homo sapien
ttaaaggctctattccaatgttccc

SEQ ID NO: 4508844 - DNA, 25 bp, Homo sapien
catggacagctactgtttttaaagg

SEQ ID NO: 4508845 - DNA, 25 bp, Homo sapien
aatctgaggaacttcgagggtgaag

SEQ ID NO: 4508846 - DNA, 25 bp, Homo sapien
caacacaacatcgtgtgttacaatc

SEQ ID NO: 4508847 - DNA, 25 bp, Homo sapien
acttcgagggtgaagtcattttcta

SEQ ID NO: 4508848 - DNA, 25 bp, Homo sapien
tcaataatttggagagctatataag

SEQ ID NO: 4508849 - DNA, 25 bp, Homo sapien
ccttgtggttcaggctgtatcatgc

SEQ ID NO: 4508850 - DNA, 25 bp, Homo sapien
gaacccccttgtggttcaggctgta

SEQ ID NO: 4508851 - DNA, 25 bp, Homo sapien
ggatgaaataattccaacgctgaaa

SEQ ID NO: 4508852 - DNA, 25 bp, Homo sapien
gatgaaataattccaacgctgaaaa

SEQ ID NO: 4508853 - DNA, 25 bp, Homo sapien
ttcacagtttcatatgaatgtcatt

SEQ ID NO: 4508854 - DNA, 25 bp, Homo sapien
cacagtttcatatgaatgtcatttt

SEQ ID NO: 4508855 - DNA, 25 bp, Homo sapien
tcacagtttcatatgaatgtcattt

SEQ ID NO: 4508856 - DNA, 25 bp, Homo sapien
atcactttcaatttaagtgacattt

SEQ ID NO: 4508857 - DNA, 25 bp, Homo sapien
gagatcaaaaaagagaaaatgtgtt

SEQ ID NO: 4508858 - DNA, 25 bp, Homo sapien
ctgtgagatcaaaaaagagaaaatg

SEQ ID NO: 4508859 - DNA, 25 bp, Homo sapien
tgagatcaaaaaagagaaaatgtgt

SEQ ID NO: 4508860 - DNA, 25 bp, Homo sapien
tgtgagatcaaaaaagagaaaatgt

SEQ ID NO: 4508861 - DNA, 25 bp, Homo sapien
cttgagaactactgatcctctgggt

SEQ ID NO: 4508862 - DNA, 25 bp, Homo sapien
agtggcttgagaactactgatcctc

SEQ ID NO: 4508863 - DNA, 25 bp, Homo sapien
tgctgagtacacaagtccttgcgga

SEQ ID NO: 4508864 - DNA, 25 bp, Homo sapien
acagacacgactggggtagcaagag

SEQ ID NO: 4508865 - DNA, 25 bp, Homo sapien
gaagcatcaggtgtttggctcagct

SEQ ID NO: 4508866 - DNA, 25 bp, Homo sapien
gctaaaagcactcctacgatcactg

SEQ ID NO: 4508867 - DNA, 25 bp, Homo sapien
ggagaattgaactactgccgtcttc

SEQ ID NO: 4508868 - DNA, 25 bp, Homo sapien
cattgcagtctctgagtaatgggca

SEQ ID NO: 4508869 - DNA, 25 bp, Homo sapien
cattctatacactcccatgggctgg

SEQ ID NO: 4508870 - DNA, 25 bp, Homo sapien
gagttgaagcgacacagctggtgct

SEQ ID NO: 4508871 - DNA, 25 bp, Homo sapien
ggacgttagttatcactcacacggg

SEQ ID NO: 4508872 - DNA, 25 bp, Homo sapien
ggtgtcctagagtatacccagctca

SEQ ID NO: 4508873 - DNA, 25 bp, Homo sapien
tcctggcgagttgaagccttgaagg

SEQ ID NO: 4508874 - DNA, 25 bp, Homo sapien
gtcccagcgacagcattcctggcga

SEQ ID NO: 4508875 - DNA, 25 bp, Homo sapien
gacagcattcctggcgagttgaagc

SEQ ID NO: 4508876 - DNA, 25 bp, Homo sapien
gacaggtcagcgctggtcagtgaat

SEQ ID NO: 4508877 - DNA, 25 bp, Homo sapien
acaagagagctgagggctgcttgtc

SEQ ID NO: 4508878 - DNA, 25 bp, Homo sapien
gagggctgcttgtcctaggtggtgc

SEQ ID NO: 4508879 - DNA, 25 bp, Homo sapien
gagctgagggctgcttgtcctaggt

SEQ ID NO: 4508880 - DNA, 25 bp, Homo sapien
ggtggtgctgctgccaggccgacac

SEQ ID NO: 4508881 - DNA, 25 bp, Homo sapien
cagtcaatggcaagggtggcaggga

SEQ ID NO: 4508882 - DNA, 25 bp, Homo sapien
agcagtcaatggcaagggtggcagg

SEQ ID NO: 4508883 - DNA, 25 bp, Homo sapien
agtcaatggcaagggtggcagggag

SEQ ID NO: 4508884 - DNA, 25 bp, Homo sapien
gcagtcaatggcaagggtggcaggg

SEQ ID NO: 4508885 - DNA, 25 bp, Homo sapien
tcagcatctgctccccatctgctct

SEQ ID NO: 4508886 - DNA, 25 bp, Homo sapien
cttcctcagcatctgctccccatct

SEQ ID NO: 4508887 - DNA, 25 bp, Homo sapien
tcctcagcatctgctccccatctgc

SEQ ID NO: 4508888 - DNA, 25 bp, Homo sapien
ctcagcatctgctccccatctgctc

SEQ ID NO: 4508889 - DNA, 25 bp, Homo sapien
ctgcaaaactgggatgatacagtag

SEQ ID NO: 4508890 - DNA, 25 bp, Homo sapien
tgggtcgtttccttcagtgcttggc

SEQ ID NO: 4508891 - DNA, 25 bp, Homo sapien
gaaatcttatcagagttccccaaga

SEQ ID NO: 4508892 - DNA, 25 bp, Homo sapien
tagagacactgcctgatggaaaagg

SEQ ID NO: 4508893 - DNA, 25 bp, Homo sapien
gatcccgaggaggtgaaatcggttc

SEQ ID NO: 4508894 - DNA, 25 bp, Homo sapien
gaaatcggttcggacttgatgctga

SEQ ID NO: 4508895 - DNA, 25 bp, Homo sapien
gctgatgttttggttggtattaatg

SEQ ID NO: 4508896 - DNA, 25 bp, Homo sapien
ttggaaccctgagataactgccctc

SEQ ID NO: 4508897 - DNA, 25 bp, Homo sapien
gctgctgctggaagcccgatggggt

SEQ ID NO: 4508898 - DNA, 25 bp, Homo sapien
tgctggaagcccgatggggtcatac

SEQ ID NO: 4508899 - DNA, 25 bp, Homo sapien
ctgctggaagcccgatggggtcata

SEQ ID NO: 4508900 - DNA, 25 bp, Homo sapien
tgctgctggaagcccgatggggtca

SEQ ID NO: 4508901 - DNA, 25 bp, Homo sapien
ctgtccacaggggagcgccccattt

SEQ ID NO: 4508902 - DNA, 25 bp, Homo sapien
tgtccacaggggagcgccccatttc

SEQ ID NO: 4508903 - DNA, 25 bp, Homo sapien
tcactgccatcataggagctactag

SEQ ID NO: 4508904 - DNA, 25 bp, Homo sapien
tcggccaagcacaattggagaatgg

SEQ ID NO: 4508905 - DNA, 25 bp, Homo sapien
gagaatggaagtcgccccgtggatc

SEQ ID NO: 4508906 - DNA, 25 bp, Homo sapien
ctcattcgctttacagaagggcttt

SEQ ID NO: 4508907 - DNA, 25 bp, Homo sapien
aagtacaaacatcagcttggaagcc

SEQ ID NO: 4508908 - DNA, 25 bp, Homo sapien
tgcctacagggtgctttgtctgcca

SEQ ID NO: 4508909 - DNA, 25 bp, Homo sapien
tatatatgggtacacgtttctctgc

SEQ ID NO: 4508910 - DNA, 25 bp, Homo sapien
tttgcaacagacacccatgccaggt

SEQ ID NO: 4508911 - DNA, 25 bp, Homo sapien
catctgcagacctacaaggagtttg

SEQ ID NO: 4508912 - DNA, 25 bp, Homo sapien
tataatgatgctcaacccatacagc

SEQ ID NO: 4508913 - DNA, 25 bp, Homo sapien
gattggcggcaatccacaaaaatat

SEQ ID NO: 4508914 - DNA, 25 bp, Homo sapien
tcagagggtcaaggaaaaaagatcc

SEQ ID NO: 4508915 - DNA, 25 bp, Homo sapien
tatgcaggatgaacttaacaccaat

SEQ ID NO: 4508916 - DNA, 25 bp, Homo sapien
gttactgcccaaactgccatgagaa

SEQ ID NO: 4508917 - DNA, 25 bp, Homo sapien
taagagtgtttctccccgcatacca

SEQ ID NO: 4508918 - DNA, 25 bp, Homo sapien
gatcatacctatgtgtcagtcagga

SEQ ID NO: 4508919 - DNA, 25 bp, Homo sapien
catagaaattgtaggtagctgctca

SEQ ID NO: 4508920 - DNA, 25 bp, Homo sapien
tagcttaagatccaatgccaggagt

SEQ ID NO: 4508921 - DNA, 25 bp, Homo sapien
caacagtgacttccactcgcggtgg

SEQ ID NO: 4508922 - DNA, 25 bp, Homo sapien
aacaaagtccagcttgtgccgccaa

SEQ ID NO: 4508923 - DNA, 25 bp, Homo sapien
cacactggacgtatgggaaaaaggt

SEQ ID NO: 4508924 - DNA, 25 bp, Homo sapien
ctttactggagtgagtgcgggagac

SEQ ID NO: 4508925 - DNA, 25 bp, Homo sapien
tactggagtgagtgcgggagacaaa

SEQ ID NO: 4508926 - DNA, 25 bp, Homo sapien
ttactggagtgagtgcgggagacaa

SEQ ID NO: 4508927 - DNA, 25 bp, Homo sapien
tttactggagtgagtgcgggagaca

SEQ ID NO: 4508928 - DNA, 25 bp, Homo sapien
gacccttgttgtaaaaggcgatcag

SEQ ID NO: 4508929 - DNA, 25 bp, Homo sapien
gcgacccttgttgtaaaaggcgatc

SEQ ID NO: 4508930 - DNA, 25 bp, Homo sapien
cccttgttgtaaaaggcgatcagaa

SEQ ID NO: 4508931 - DNA, 25 bp, Homo sapien
cttgttgtaaaaggcgatcagaaca

SEQ ID NO: 4508932 - DNA, 25 bp, Homo sapien
cattcatcaatgtcctgccacttcc

SEQ ID NO: 4508933 - DNA, 25 bp, Homo sapien
tcattcatcaatgtcctgccacttc

SEQ ID NO: 4508934 - DNA, 25 bp, Homo sapien
ttcatcaatgtcctgccacttccct

SEQ ID NO: 4508935 - DNA, 25 bp, Homo sapien
tcatcaatgtcctgccacttccctc

SEQ ID NO: 4508936 - DNA, 25 bp, Homo sapien
cactggtcacgaggccccagtggat

SEQ ID NO: 4508937 - DNA, 25 bp, Homo sapien
tggcctcaataactcctccactagg

SEQ ID NO: 4508938 - DNA, 25 bp, Homo sapien
tcctctatagcccattctggtttcc

SEQ ID NO: 4508939 - DNA, 25 bp, Homo sapien
cagtggatgcatatggttttcctcc

SEQ ID NO: 4508940 - DNA, 25 bp, Homo sapien
tttgttccattttcggcaaggaaga

SEQ ID NO: 4508941 - DNA, 25 bp, Homo sapien
taccatcattctttctcgcgttctt

SEQ ID NO: 4508942 - DNA, 25 bp, Homo sapien
attctttctcgcgttctttgttcca

SEQ ID NO: 4508943 - DNA, 25 bp, Homo sapien
tcggcaaggaagatggacactgctg

SEQ ID NO: 4508944 - DNA, 25 bp, Homo sapien
ttccggttctattctcacggtaatc

SEQ ID NO: 4508945 - DNA, 25 bp, Homo sapien
tacatggttccggttctattctcac

SEQ ID NO: 4508946 - DNA, 25 bp, Homo sapien
tggttccggttctattctcacggta

SEQ ID NO: 4508947 - DNA, 25 bp, Homo sapien
ccacatacatggttccggttctatt

SEQ ID NO: 4508948 - DNA, 25 bp, Homo sapien
ggctcaagggttgaatctttcagat

SEQ ID NO: 4508949 - DNA, 25 bp, Homo sapien
cagattagctccataacctgtatgc

SEQ ID NO: 4508950 - DNA, 25 bp, Homo sapien
ctgaattccacactaggctgggctc

SEQ ID NO: 4508951 - DNA, 25 bp, Homo sapien
tgtatgcttcttatcccagaccaaa

SEQ ID NO: 4508952 - DNA, 25 bp, Homo sapien
tttctttgctgcggccaatttgctc

SEQ ID NO: 4508953 - DNA, 25 bp, Homo sapien
ttctttgctgcggccaatttgctct

SEQ ID NO: 4508954 - DNA, 25 bp, Homo sapien
gcggccaatttgctctgttgagttt

SEQ ID NO: 4508955 - DNA, 25 bp, Homo sapien
gccaatttgctctgttgagtttctt

SEQ ID NO: 4508956 - DNA, 25 bp, Homo sapien
ccggtcggcatagggaccagctgtt

SEQ ID NO: 4508957 - DNA, 25 bp, Homo sapien
caggcatagtcccactaccagtcga

SEQ ID NO: 4508958 - DNA, 25 bp, Homo sapien
tagtcccactaccagtcgatgtggg

SEQ ID NO: 4508959 - DNA, 25 bp, Homo sapien
cacccggtcggcatagggaccagct

SEQ ID NO: 4508960 - DNA, 25 bp, Homo sapien
tccaggtcctctgggttgcttggca

SEQ ID NO: 4508961 - DNA, 25 bp, Homo sapien
tcctctgggttgcttggcatgggcc

SEQ ID NO: 4508962 - DNA, 25 bp, Homo sapien
caggtcctctgggttgcttggcatg

SEQ ID NO: 4508963 - DNA, 25 bp, Homo sapien
tgggttgcttggcatgggccgaggt

SEQ ID NO: 4508964 - DNA, 25 bp, Homo sapien
ctgctgggccgaggccaccaggtga

SEQ ID NO: 4508965 - DNA, 25 bp, Homo sapien
gggccgaggccaccaggtgagccat

SEQ ID NO: 4508966 - DNA, 25 bp, Homo sapien
tgctgggccgaggccaccaggtgag

SEQ ID NO: 4508967 - DNA, 25 bp, Homo sapien
ctgggccgaggccaccaggtgagcc

SEQ ID NO: 4508968 - DNA, 25 bp, Homo sapien
actcacagactggcccctagtcact

SEQ ID NO: 4508969 - DNA, 25 bp, Homo sapien
ctcacagactggcccctagtcactg

SEQ ID NO: 4508970 - DNA, 25 bp, Homo sapien
ccactcacagactggcccctagtca

SEQ ID NO: 4508971 - DNA, 25 bp, Homo sapien
cactcacagactggcccctagtcac

SEQ ID NO: 4508972 - DNA, 25 bp, Homo sapien
atgaatcgaagttctagtttctccg

SEQ ID NO: 4508973 - DNA, 25 bp, Homo sapien
tcgaagttctagtttctccgctcgc

SEQ ID NO: 4508974 - DNA, 25 bp, Homo sapien
gaagttctagtttctccgctcgctc

SEQ ID NO: 4508975 - DNA, 25 bp, Homo sapien
gaatcgaagttctagtttctccgct

SEQ ID NO: 4508976 - DNA, 25 bp, Homo sapien
ggctgtgttctagggtgatgaactt

SEQ ID NO: 4508977 - DNA, 25 bp, Homo sapien
gctgtgttctagggtgatgaacttt

SEQ ID NO: 4508978 - DNA, 25 bp, Homo sapien
tgatgtcctcctccagttgccgcat

SEQ ID NO: 4508979 - DNA, 25 bp, Homo sapien
atgatgtcctcctccagttgccgca

SEQ ID NO: 4508980 - DNA, 25 bp, Homo sapien
tgatgatgtcctcctccagttgccg

SEQ ID NO: 4508981 - DNA, 25 bp, Homo sapien
gcctgatgatgtcctcctccagttg

SEQ ID NO: 4508982 - DNA, 25 bp, Homo sapien
atcttctccagcagctccagcagct

SEQ ID NO: 4508983 - DNA, 25 bp, Homo sapien
aagccgcaacatcttctccagcagc

SEQ ID NO: 4508984 - DNA, 25 bp, Homo sapien
tctccagcagctccagcagcttcac

SEQ ID NO: 4508985 - DNA, 25 bp, Homo sapien
ttctccagcagctccagcagcttca

SEQ ID NO: 4508986 - DNA, 25 bp, Homo sapien
tgctgtgtccctcgttgtagtcacc

SEQ ID NO: 4508987 - DNA, 25 bp, Homo sapien
ctgtgtccctcgttgtagtcaccac

SEQ ID NO: 4508988 - DNA, 25 bp, Homo sapien
gctgtgtccctcgttgtagtcacca

SEQ ID NO: 4508989 - DNA, 25 bp, Homo sapien
acgctgtcagtgaggctcacctcac

SEQ ID NO: 4508990 - DNA, 25 bp, Homo sapien
gtcagtgaggctcacctcacaaaga

SEQ ID NO: 4508991 - DNA, 25 bp, Homo sapien
gctgtcagtgaggctcacctcacaa

SEQ ID NO: 4508992 - DNA, 25 bp, Homo sapien
aagcctgggtgctccacgctgtcag

SEQ ID NO: 4508993 - DNA, 25 bp, Homo sapien
ccagcaaaagaatggcatacgggag

SEQ ID NO: 4508994 - DNA, 25 bp, Homo sapien
cagcaaaagaatggcatacgggagt

SEQ ID NO: 4508995 - DNA, 25 bp, Homo sapien
agcccagcaaaagaatggcatacgg

SEQ ID NO: 4508996 - DNA, 25 bp, Homo sapien
gcaaaagaatggcatacgggagttg

SEQ ID NO: 4508997 - DNA, 25 bp, Homo sapien
aatttcttgagcagctctttgatga

SEQ ID NO: 4508998 - DNA, 25 bp, Homo sapien
ttaaaatttcttgagcagctctttg

SEQ ID NO: 4508999 - DNA, 25 bp, Homo sapien
taaaatttcttgagcagctctttga

SEQ ID NO: 4509000 - DNA, 25 bp, Homo sapien
ttcttgagcagctctttgatgatgg

SEQ ID NO: 4509001 - DNA, 25 bp, Homo sapien
cagggcttctcgttcagtggcacaa

SEQ ID NO: 4509002 - DNA, 25 bp, Homo sapien
ggtgcctgtcttcccggccatggct

SEQ ID NO: 4509003 - DNA, 25 bp, Homo sapien
ggccatggctagatcacgcttctga

SEQ ID NO: 4509004 - DNA, 25 bp, Homo sapien
gggaaatgggaacacaccaggctga

SEQ ID NO: 4509005 - DNA, 25 bp, Homo sapien
gcctctacccgttaggctgccgttg

SEQ ID NO: 4509006 - DNA, 25 bp, Homo sapien
cgttaggctgccgttggtcccgaga

SEQ ID NO: 4509007 - DNA, 25 bp, Homo sapien
aggctgccgttggtcccgagactcc

SEQ ID NO: 4509008 - DNA, 25 bp, Homo sapien
ccgcgcgccccaccgtctgttgcag

SEQ ID NO: 4509009 - DNA, 25 bp, Homo sapien
gcgcccaggcaaaacacgcgagcat

SEQ ID NO: 4509010 - DNA, 25 bp, Homo sapien
tgggctcaaacaacgctggagcgcc

SEQ ID NO: 4509011 - DNA, 25 bp, Homo sapien
atgggtcccaagagggctccggccg

SEQ ID NO: 4509012 - DNA, 25 bp, Homo sapien
acacgcgagcatctcagaggccttt

SEQ ID NO: 4509013 - DNA, 25 bp, Homo sapien
aacgcggtttgaccatgttggccac

SEQ ID NO: 4509014 - DNA, 25 bp, Homo sapien
ggtttgagtgcaatggcttaatctg

SEQ ID NO: 4509015 - DNA, 25 bp, Homo sapien
ccaggtttgagtgcaatggcttaat

SEQ ID NO: 4509016 - DNA, 25 bp, Homo sapien
gcttaatctgggctcactgcaacct

SEQ ID NO: 4509017 - DNA, 25 bp, Homo sapien
aagatgtctggaaaattgactcaaa

SEQ ID NO: 4509018 - DNA, 25 bp, Homo sapien
aattggccgaacacgcgggaacagg

SEQ ID NO: 4509019 - DNA, 25 bp, Homo sapien
tctggaaaattgactcaaaaacaaa

SEQ ID NO: 4509020 - DNA, 25 bp, Homo sapien
aaattggccgaacacgcgggaacag

SEQ ID NO: 4509021 - DNA, 25 bp, Homo sapien
gactgtacaatgagcccttccagaa

SEQ ID NO: 4509022 - DNA, 25 bp, Homo sapien
tgactgtacaatgagcccttccaga

SEQ ID NO: 4509023 - DNA, 25 bp, Homo sapien
agcccagaaggtggaggctaccgtg

SEQ ID NO: 4509024 - DNA, 25 bp, Homo sapien
aggattgagcccagaaggtggaggc

SEQ ID NO: 4509025 - DNA, 25 bp, Homo sapien
gcccagaaggtggaggctaccgtga

SEQ ID NO: 4509026 - DNA, 25 bp, Homo sapien
cagaaggtggaggctaccgtgagct

SEQ ID NO: 4509027 - DNA, 25 bp, Homo sapien
ctggtacttcagcacaaacaaaggc

SEQ ID NO: 4509028 - DNA, 25 bp, Homo sapien
taacgtgaatactaacatggtgaca

SEQ ID NO: 4509029 - DNA, 25 bp, Homo sapien
ggcagtaacaccaaactagtcatgg

SEQ ID NO: 4509030 - DNA, 25 bp, Homo sapien
taacggtgcaaatacaatagtgggt

SEQ ID NO: 4509031 - DNA, 25 bp, Homo sapien
tccatggactttacagccagtgagt

SEQ ID NO: 4509032 - DNA, 25 bp, Homo sapien
ccatggactttacagccagtgagtc

SEQ ID NO: 4509033 - DNA, 25 bp, Homo sapien
ctccatggactttacagccagtgag

SEQ ID NO: 4509034 - DNA, 25 bp, Homo sapien
gttaacataatgctaagttgaggca

SEQ ID NO: 4509035 - DNA, 25 bp, Homo sapien
tagccctcacattaatcaacttagc

SEQ ID NO: 4509036 - DNA, 25 bp, Homo sapien
tagcaccactccattatgaccacat

SEQ ID NO: 4509037 - DNA, 25 bp, Homo sapien
tctaatcttttcaagacccaacata

SEQ ID NO: 4509038 - DNA, 25 bp, Homo sapien
tatcaagatagcagcattttccttc

SEQ ID NO: 4509039 - DNA, 25 bp, Homo sapien
tgctaacttttgtacattttccaaa

SEQ ID NO: 4509040 - DNA, 25 bp, Homo sapien
cctgttcgattgttttgctaacttt

SEQ ID NO: 4509041 - DNA, 25 bp, Homo sapien
tcttcagcttcctgttcgattgttt

SEQ ID NO: 4509042 - DNA, 25 bp, Homo sapien
gaaatcaaataccatggtgaacaca

SEQ ID NO: 4509043 - DNA, 25 bp, Homo sapien
tggaaagtcttcacctaaagtaatg

SEQ ID NO: 4509044 - DNA, 25 bp, Homo sapien
gagggcgatgccttcaatcatagag

SEQ ID NO: 4509045 - DNA, 25 bp, Homo sapien
cataatagtgggatttgcaaagtcc

SEQ ID NO: 4509046 - DNA, 25 bp, Homo sapien
cacgtggaagttgcaagcagggcta

SEQ ID NO: 4509047 - DNA, 25 bp, Homo sapien
tgactccctacctctagacagaaaa

SEQ ID NO: 4509048 - DNA, 25 bp, Homo sapien
tgaatgtccttctcagagggtatgt

SEQ ID NO: 4509049 - DNA, 25 bp, Homo sapien
tacaaactgaagcatactctgatgg

SEQ ID NO: 4509050 - DNA, 25 bp, Homo sapien
gaggttcaatggtgaaagtcatacc

SEQ ID NO: 4509051 - DNA, 25 bp, Homo sapien
tatagctgacattctgagaaaaagg

SEQ ID NO: 4509052 - DNA, 25 bp, Homo sapien
cctggaatgactgggagatcagcta

SEQ ID NO: 4509053 - DNA, 25 bp, Homo sapien
catgttcagctatatgcttgaaggc

SEQ ID NO: 4509054 - DNA, 25 bp, Homo sapien
ggtggcttcacatagagagttagca

SEQ ID NO: 4509055 - DNA, 25 bp, Homo sapien
cagtatttgccaacctgtgtatacc

SEQ ID NO: 4509056 - DNA, 25 bp, Homo sapien
tttgttccattccaactaagctgtg

SEQ ID NO: 4509057 - DNA, 25 bp, Homo sapien
ggccatgctgcataggatcttgcac

SEQ ID NO: 4509058 - DNA, 25 bp, Homo sapien
tataaatcggtggagaggtagtcat

SEQ ID NO: 4509059 - DNA, 25 bp, Homo sapien
gctacatgggggctgaggcacggga

SEQ ID NO: 4509060 - DNA, 25 bp, Homo sapien
agctacatgggggctgaggcacggg

SEQ ID NO: 4509061 - DNA, 25 bp, Homo sapien
atgatggaagccctgtctctaataa

SEQ ID NO: 4509062 - DNA, 25 bp, Homo sapien
caacatgatggaagccctgtctcta

SEQ ID NO: 4509063 - DNA, 25 bp, Homo sapien
agcagtatgtaaaacaggatgttcc

SEQ ID NO: 4509064 - DNA, 25 bp, Homo sapien
caaaagtttcaaagaatcaaccatg

SEQ ID NO: 4509065 - DNA, 25 bp, Homo sapien
caaatgactgtttaatgctcaggac

SEQ ID NO: 4509066 - DNA, 25 bp, Homo sapien
cattctggtgaatactttatagcag

SEQ ID NO: 4509067 - DNA, 25 bp, Homo sapien
ttcacttccatggacgtaggcggta

SEQ ID NO: 4509068 - DNA, 25 bp, Homo sapien
gacgtaggcggtaatcccaagactg

SEQ ID NO: 4509069 - DNA, 25 bp, Homo sapien
tcccaagactggatgactctttgag

SEQ ID NO: 4509070 - DNA, 25 bp, Homo sapien
gactctttgagaatcaggcatcttc

SEQ ID NO: 4509071 - DNA, 25 bp, Homo sapien
gaatgcagttgaccctcgaacagca

SEQ ID NO: 4509072 - DNA, 25 bp, Homo sapien
gaactgtgcaggtgctttacacaca

SEQ ID NO: 4509073 - DNA, 25 bp, Homo sapien
cacttacaatggagtcttttagcaa

SEQ ID NO: 4509074 - DNA, 25 bp, Homo sapien
ttgagctgatttaacatatgcatga

SEQ ID NO: 4509075 - DNA, 25 bp, Homo sapien
caaaggcacttgttattactgttgc

SEQ ID NO: 4509076 - DNA, 25 bp, Homo sapien
tataggagatcgagtggcagaagca

SEQ ID NO: 4509077 - DNA, 25 bp, Homo sapien
gagacatttaacacaggacttggtg

SEQ ID NO: 4509078 - DNA, 25 bp, Homo sapien
gaactttctgcgctgtcactgtcaa

SEQ ID NO: 4509079 - DNA, 25 bp, Homo sapien
agacagatactttagctgcctgatg

SEQ ID NO: 4509080 - DNA, 25 bp, Homo sapien
acagatactttagctgcctgatgtt

SEQ ID NO: 4509081 - DNA, 25 bp, Homo sapien
gccagacagatactttagctgcctg

SEQ ID NO: 4509082 - DNA, 25 bp, Homo sapien
ccagacagatactttagctgcctga

SEQ ID NO: 4509083 - DNA, 25 bp, Homo sapien
gagaaacctgtaaccagggcactta

SEQ ID NO: 4509084 - DNA, 25 bp, Homo sapien
caatgatttaacacgcagtgtcagg

SEQ ID NO: 4509085 - DNA, 25 bp, Homo sapien
aaaactttcaacatggacgtagaga

SEQ ID NO: 4509086 - DNA, 25 bp, Homo sapien
gagttcagtatataatgccaggaaa

SEQ ID NO: 4509087 - DNA, 25 bp, Homo sapien
catctttgataaccctctcatcatt

SEQ ID NO: 4509088 - DNA, 25 bp, Homo sapien
tctttgataaccctctcatcattga

SEQ ID NO: 4509089 - DNA, 25 bp, Homo sapien
tttgataaccctctcatcattgaca

SEQ ID NO: 4509090 - DNA, 25 bp, Homo sapien
gataaccctctcatcattgacatca

SEQ ID NO: 4509091 - DNA, 25 bp, Homo sapien
attgaccactggctcccaatttcat

SEQ ID NO: 4509092 - DNA, 25 bp, Homo sapien
agattgaccactggctcccaatttc

SEQ ID NO: 4509093 - DNA, 25 bp, Homo sapien
catgagattgaccactggctcccaa

SEQ ID NO: 4509094 - DNA, 25 bp, Homo sapien
tgagattgaccactggctcccaatt

SEQ ID NO: 4509095 - DNA, 25 bp, Homo sapien
ttgtgggagcacagcgcttccagga

SEQ ID NO: 4509096 - DNA, 25 bp, Homo sapien
tttgtgggagcacagcgcttccagg

SEQ ID NO: 4509097 - DNA, 25 bp, Homo sapien
tgtgggagcacagcgcttccaggag

SEQ ID NO: 4509098 - DNA, 25 bp, Homo sapien
tgatttccatggacctgtgagccct

SEQ ID NO: 4509099 - DNA, 25 bp, Homo sapien
catcttaacggacgcatttctgtga

SEQ ID NO: 4509100 - DNA, 25 bp, Homo sapien
agaatgagtgcaatgtgtgatccca

SEQ ID NO: 4509101 - DNA, 25 bp, Homo sapien
tgtgatcccagattagattccaggt

SEQ ID NO: 4509102 - DNA, 25 bp, Homo sapien
aaaggaggtgcggtgttctaaatga

SEQ ID NO: 4509103 - DNA, 25 bp, Homo sapien
ctcggcgttcaacgcggcctttgcg

SEQ ID NO: 4509104 - DNA, 25 bp, Homo sapien
ttcccgcttcgttctagagtgaagg

SEQ ID NO: 4509105 - DNA, 25 bp, Homo sapien
gacctgaggcttcccgcttcgttct

SEQ ID NO: 4509106 - DNA, 25 bp, Homo sapien
tgcgcgtgcacctcggcgttcaacg

SEQ ID NO: 4509107 - DNA, 25 bp, Homo sapien
atggaaacactaggtttagcctgca

SEQ ID NO: 4509108 - DNA, 25 bp, Homo sapien
ctatggaaacactaggtttagcctg

SEQ ID NO: 4509109 - DNA, 25 bp, Homo sapien
tatggaaacactaggtttagcctgc

SEQ ID NO: 4509110 - DNA, 25 bp, Homo sapien
atctatggaaacactaggtttagcc

SEQ ID NO: 4509111 - DNA, 25 bp, Homo sapien
gggggtccacaggggcagctgaacc

SEQ ID NO: 4509112 - DNA, 25 bp, Homo sapien
atgaggccaccatctgggggtccac

SEQ ID NO: 4509113 - DNA, 25 bp, Homo sapien
catgaggccaccatctgggggtcca

SEQ ID NO: 4509114 - DNA, 25 bp, Homo sapien
gtccacaggggcagctgaacctcat

SEQ ID NO: 4509115 - DNA, 25 bp, Homo sapien
gctgcaaatgggcatcgtcaggtgt

SEQ ID NO: 4509116 - DNA, 25 bp, Homo sapien
cttggaggaattctgagccatggtt

SEQ ID NO: 4509117 - DNA, 25 bp, Homo sapien
tgcaaatgggcatcgtcaggtgttc

SEQ ID NO: 4509118 - DNA, 25 bp, Homo sapien
tgagcttggaggaattctgagccat

SEQ ID NO: 4509119 - DNA, 25 bp, Homo sapien
ctcagaatctcaaatgacatcaagg

SEQ ID NO: 4509120 - DNA, 25 bp, Homo sapien
cgttgatttccccagttggacactc

SEQ ID NO: 4509121 - DNA, 25 bp, Homo sapien
caaatgacatcaaggccacaaacaa

SEQ ID NO: 4509122 - DNA, 25 bp, Homo sapien
tttccccagttggacactcagaatc

SEQ ID NO: 4509123 - DNA, 25 bp, Homo sapien
aggaattcaaaatagtgaccttaag

SEQ ID NO: 4509124 - DNA, 25 bp, Homo sapien
caaaggaacataataattctcaggc

SEQ ID NO: 4509125 - DNA, 25 bp, Homo sapien
gccaggaaacatgataccaccaaag

SEQ ID NO: 4509126 - DNA, 25 bp, Homo sapien
cagatataagagaatacagatagac

SEQ ID NO: 4509127 - DNA, 25 bp, Homo sapien
gaaggctccagcatgcttatatgat

SEQ ID NO: 4509128 - DNA, 25 bp, Homo sapien
tccagcatgcttatatgattcccaa

SEQ ID NO: 4509129 - DNA, 25 bp, Homo sapien
gctccagcatgcttatatgattccc

SEQ ID NO: 4509130 - DNA, 25 bp, Homo sapien
ggctccagcatgcttatatgattcc

SEQ ID NO: 4509131 - DNA, 25 bp, Homo sapien
ccaacagagataggtgtgtccaggt

SEQ ID NO: 4509132 - DNA, 25 bp, Homo sapien
gctcccccttgccaacagagatagg

SEQ ID NO: 4509133 - DNA, 25 bp, Homo sapien
ccttgccaacagagataggtgtgtc

SEQ ID NO: 4509134 - DNA, 25 bp, Homo sapien
tggctgtcatggtgatagaagctgt

SEQ ID NO: 4509135 - DNA, 25 bp, Homo sapien
catcagcaagtgtcaagtaggcatc

SEQ ID NO: 4509136 - DNA, 25 bp, Homo sapien
caagtgtcaagtaggcatctgttgg

SEQ ID NO: 4509137 - DNA, 25 bp, Homo sapien
gcatctgttggggaccaagcacttc

SEQ ID NO: 4509138 - DNA, 25 bp, Homo sapien
caagctgtccatcagcaagtgtcaa

SEQ ID NO: 4509139 - DNA, 25 bp, Homo sapien
tggcttttaacagccctgttcatgt

SEQ ID NO: 4509140 - DNA, 25 bp, Homo sapien
ggttggcttttaacagccctgttca

SEQ ID NO: 4509141 - DNA, 25 bp, Homo sapien
tctggcgggttggcttttaacagcc

SEQ ID NO: 4509142 - DNA, 25 bp, Homo sapien
ttctggcgggttggcttttaacagc

SEQ ID NO: 4509143 - DNA, 25 bp, Homo sapien
cttgaatcaacgagaagtgttgaga

SEQ ID NO: 4509144 - DNA, 25 bp, Homo sapien
tgaatcaacgagaagtgttgagaaa

SEQ ID NO: 4509145 - DNA, 25 bp, Homo sapien
ttccacttgaatcaacgagaagtgt

SEQ ID NO: 4509146 - DNA, 25 bp, Homo sapien
cacttgaatcaacgagaagtgttga

SEQ ID NO: 4509147 - DNA, 25 bp, Homo sapien
tttattctgaaagccggcgacacca

SEQ ID NO: 4509148 - DNA, 25 bp, Homo sapien
tatatgccagcgaggacagcagtgc

SEQ ID NO: 4509149 - DNA, 25 bp, Homo sapien
cagttcataccacccgcatgggaag

SEQ ID NO: 4509150 - DNA, 25 bp, Homo sapien
tcttgaccacatgagaaccaggacg

SEQ ID NO: 4509151 - DNA, 25 bp, Homo sapien
ttgaaacagtcttctatcaggcagc

SEQ ID NO: 4509152 - DNA, 25 bp, Homo sapien
tgaaacagtcttctatcaggcagct

SEQ ID NO: 4509153 - DNA, 25 bp, Homo sapien
caaacatgtattccataacatcttg

SEQ ID NO: 4509154 - DNA, 25 bp, Homo sapien
tgtattccataacatcttgaaacag

SEQ ID NO: 4509155 - DNA, 25 bp, Homo sapien
tgtaagtggactcatcaaatgcctg

SEQ ID NO: 4509156 - DNA, 25 bp, Homo sapien
cagcaacactcgcagaagaaacgga

SEQ ID NO: 4509157 - DNA, 25 bp, Homo sapien
tatagactgcagtcagggctgcgcc

SEQ ID NO: 4509158 - DNA, 25 bp, Homo sapien
tcttaagtgggcctcatacgtgcca

SEQ ID NO: 4509159 - DNA, 25 bp, Homo sapien
aagaggctgagactgagcgggttga

SEQ ID NO: 4509160 - DNA, 25 bp, Homo sapien
cgggttgaccgtgccagtggctgct

SEQ ID NO: 4509161 - DNA, 25 bp, Homo sapien
tgagcgggttgaccgtgccagtggc

SEQ ID NO: 4509162 - DNA, 25 bp, Homo sapien
gagactgagcgggttgaccgtgcca

SEQ ID NO: 4509163 - DNA, 25 bp, Homo sapien
ttcccccttgacctcctttgctcat

SEQ ID NO: 4509164 - DNA, 25 bp, Homo sapien
tgttttggttgttctcgtaacagag

SEQ ID NO: 4509165 - DNA, 25 bp, Homo sapien
catctgttcaataaaagcagccaca

SEQ ID NO: 4509166 - DNA, 25 bp, Homo sapien
agccacaggtcttcaggactatgca

SEQ ID NO: 4509167 - DNA, 25 bp, Homo sapien
gcatggcacatgttaaagctgtgtt

SEQ ID NO: 4509168 - DNA, 25 bp, Homo sapien
ttcacagatggtgccgtgctcctca

SEQ ID NO: 4509169 - DNA, 25 bp, Homo sapien
aagacaacgttgtctgcgtcgcggg

SEQ ID NO: 4509170 - DNA, 25 bp, Homo sapien
tctctgcacgtagaaccgccggctt

SEQ ID NO: 4509171 - DNA, 25 bp, Homo sapien
cagtgtgctgtagattttcatttcc

SEQ ID NO: 4509172 - DNA, 25 bp, Homo sapien
acattgaataattttgtggggccgg

SEQ ID NO: 4509173 - DNA, 25 bp, Homo sapien
ggacattttctgagatccttgtcaa

SEQ ID NO: 4509174 - DNA, 25 bp, Homo sapien
caggacattttctgagatccttgtc

SEQ ID NO: 4509175 - DNA, 25 bp, Homo sapien
tggggaggtctgcttgtgtgttttc

SEQ ID NO: 4509176 - DNA, 25 bp, Homo sapien
gggtcaccttgcagcttgttgtcag

SEQ ID NO: 4509177 - DNA, 25 bp, Homo sapien
tcaaaatagacccacggagggtcac

SEQ ID NO: 4509178 - DNA, 25 bp, Homo sapien
gaacctgcagcttgcagttaaaggt

SEQ ID NO: 4509179 - DNA, 25 bp, Homo sapien
gctgtgaattcccttgctcgtaaag

SEQ ID NO: 4509180 - DNA, 25 bp, Homo sapien
agacacagccgaacgccagccactg

SEQ ID NO: 4509181 - DNA, 25 bp, Homo sapien
cagccgaacgccagccactgggtca

SEQ ID NO: 4509182 - DNA, 25 bp, Homo sapien
gagatagacacagccgaacgccagc

SEQ ID NO: 4509183 - DNA, 25 bp, Homo sapien
ggagatagacacagccgaacgccag

SEQ ID NO: 4509184 - DNA, 25 bp, Homo sapien
gagaaatgaggagggcgtgcaggca

SEQ ID NO: 4509185 - DNA, 25 bp, Homo sapien
cagagggaccggtgccagcatgtct

SEQ ID NO: 4509186 - DNA, 25 bp, Homo sapien
aggagcaggcgcttgacattggcca

SEQ ID NO: 4509187 - DNA, 25 bp, Homo sapien
gacattggccaaccgagaaatgagg

SEQ ID NO: 4509188 - DNA, 25 bp, Homo sapien
ccgtgtggtggaggataaacctgcc

SEQ ID NO: 4509189 - DNA, 25 bp, Homo sapien
tacttctgtgtcgtttgttgctaca

SEQ ID NO: 4509190 - DNA, 25 bp, Homo sapien
tcctgctggagctcggaggatccgt

SEQ ID NO: 4509191 - DNA, 25 bp, Homo sapien
tatatcgaagctgccgtcattcctg

SEQ ID NO: 4509192 - DNA, 25 bp, Homo sapien
ttctatggagtttcttgcctccatg

SEQ ID NO: 4509193 - DNA, 25 bp, Homo sapien
ttcccaaagagacgcaggatgtggc

SEQ ID NO: 4509194 - DNA, 25 bp, Homo sapien
tagtctcttcgatctttcgcagtgg

SEQ ID NO: 4509195 - DNA, 25 bp, Homo sapien
ttcgcagtggcaccgtagctctgtt

SEQ ID NO: 4509196 - DNA, 25 bp, Homo sapien
tcgggatgacattagctagggcttc

SEQ ID NO: 4509197 - DNA, 25 bp, Homo sapien
gaagccttcagtaaaccttgccagg

SEQ ID NO: 4509198 - DNA, 25 bp, Homo sapien
catgacttcttatagcgccgacggc

SEQ ID NO: 4509199 - DNA, 25 bp, Homo sapien
tttaagttgtctctaggcgagggca

SEQ ID NO: 4509200 - DNA, 25 bp, Homo sapien
cttcatcctgctcagtgtgaagcag

SEQ ID NO: 4509201 - DNA, 25 bp, Homo sapien
tcacgtgtcgctgaagcccagggac

SEQ ID NO: 4509202 - DNA, 25 bp, Homo sapien
tcgctgaagcccagggacgtgctgc

SEQ ID NO: 4509203 - DNA, 25 bp, Homo sapien
aagcccagggacgtgctgcccagca

SEQ ID NO: 4509204 - DNA, 25 bp, Homo sapien
tgcccagcagtgtttccagggagaa

SEQ ID NO: 4509205 - DNA, 25 bp, Homo sapien
tagagtgggaggtttacacggcttc

SEQ ID NO: 4509206 - DNA, 25 bp, Homo sapien
ccgccttgttcgtcctgcggtgttt

SEQ ID NO: 4509207 - DNA, 25 bp, Homo sapien
ccttgttcgtcctgcggtgtttaga

SEQ ID NO: 4509208 - DNA, 25 bp, Homo sapien
tttacacggcttcgccactttctgg

SEQ ID NO: 4509209 - DNA, 25 bp, Homo sapien
ctcctcgacacctggagggttgact

SEQ ID NO: 4509210 - DNA, 25 bp, Homo sapien
gttgactgttagcctggggttttca

SEQ ID NO: 4509211 - DNA, 25 bp, Homo sapien
acctggagggttgactgttagcctg

SEQ ID NO: 4509212 - DNA, 25 bp, Homo sapien
cctcgacacctggagggttgactgt

SEQ ID NO: 4509213 - DNA, 25 bp, Homo sapien
tatagtcgcccctccggggaatgtg

SEQ ID NO: 4509214 - DNA, 25 bp, Homo sapien
tgtgctaaggcagatgatgttaaaa

SEQ ID NO: 4509215 - DNA, 25 bp, Homo sapien
gtgctaaggcagatgatgttaaaat

SEQ ID NO: 4509216 - DNA, 25 bp, Homo sapien
tcgcccctccggggaatgtgctaag

SEQ ID NO: 4509217 - DNA, 25 bp, Homo sapien
tggccaccacgatgcccaacacatc

SEQ ID NO: 4509218 - DNA, 25 bp, Homo sapien
ggccaccacgatgcccaacacatct

SEQ ID NO: 4509219 - DNA, 25 bp, Homo sapien
cacagtggtgatacaccgtcagttt

SEQ ID NO: 4509220 - DNA, 25 bp, Homo sapien
ggaatatgatgaacacagcccacag

SEQ ID NO: 4509221 - DNA, 25 bp, Homo sapien
ctctaagggaatatgatgaacacag

SEQ ID NO: 4509222 - DNA, 25 bp, Homo sapien
agtggtgatacaccgtcagttttac

SEQ ID NO: 4509223 - DNA, 25 bp, Homo sapien
aactcaggagctggcgttcaggagc

SEQ ID NO: 4509224 - DNA, 25 bp, Homo sapien
ccccgagaggtgtctagaacaacgt

SEQ ID NO: 4509225 - DNA, 25 bp, Homo sapien
tgaaagagcttacccttgtcccgag

SEQ ID NO: 4509226 - DNA, 25 bp, Homo sapien
tcatatggtccgagaaatacgagtg

SEQ ID NO: 4509227 - DNA, 25 bp, Homo sapien
tggcgatgattctgaggctggccat

SEQ ID NO: 4509228 - DNA, 25 bp, Homo sapien
tgagacttggtaccatccactttct

SEQ ID NO: 4509229 - DNA, 25 bp, Homo sapien
ccatccactttctgccacgctggcg

SEQ ID NO: 4509230 - DNA, 25 bp, Homo sapien
acgctggcgatgattctgaggctgg

SEQ ID NO: 4509231 - DNA, 25 bp, Homo sapien
ttttggcacagagttttggcttgag

SEQ ID NO: 4509232 - DNA, 25 bp, Homo sapien
tgaaattgtcctgtgccttttggca

SEQ ID NO: 4509233 - DNA, 25 bp, Homo sapien
gaggttcacagcctctacgctggca

SEQ ID NO: 4509234 - DNA, 25 bp, Homo sapien
tacgctggcaactaaactgccgatc

SEQ ID NO: 4509235 - DNA, 25 bp, Homo sapien
cccagcgcagataaagagagtggcc

SEQ ID NO: 4509236 - DNA, 25 bp, Homo sapien
cccccagcgcagataaagagagtgg

SEQ ID NO: 4509237 - DNA, 25 bp, Homo sapien
ccagcgcagataaagagagtggcct

SEQ ID NO: 4509238 - DNA, 25 bp, Homo sapien
cagcgcagataaagagagtggcctc

SEQ ID NO: 4509239 - DNA, 25 bp, Homo sapien
aatacgctggtatcttgtcgtggcc

SEQ ID NO: 4509240 - DNA, 25 bp, Homo sapien
acgctggtatcttgtcgtggccaac

SEQ ID NO: 4509241 - DNA, 25 bp, Homo sapien
tgtaatacgctggtatcttgtcgtg

SEQ ID NO: 4509242 - DNA, 25 bp, Homo sapien
gttgtaatacgctggtatcttgtcg

SEQ ID NO: 4509243 - DNA, 25 bp, Homo sapien
tccgtagctacaaggaaatagtcac

SEQ ID NO: 4509244 - DNA, 25 bp, Homo sapien
gctacaaggaaatagtcacgttgca

SEQ ID NO: 4509245 - DNA, 25 bp, Homo sapien
aatagtcacgttgcaaattgctggg

SEQ ID NO: 4509246 - DNA, 25 bp, Homo sapien
gatgagtcttccgtagctacaagga

SEQ ID NO: 4509247 - DNA, 25 bp, Homo sapien
tctcgtggtctctcacatgtccact

SEQ ID NO: 4509248 - DNA, 25 bp, Homo sapien
tggtctctcacatgtccacttgggc

SEQ ID NO: 4509249 - DNA, 25 bp, Homo sapien
acatgtccacttgggctgggtctgt

SEQ ID NO: 4509250 - DNA, 25 bp, Homo sapien
tctctcacatgtccacttgggctgg

SEQ ID NO: 4509251 - DNA, 25 bp, Homo sapien
gatgatgggtcgatacccgggactt

SEQ ID NO: 4509252 - DNA, 25 bp, Homo sapien
gatacccgggacttgaacctcacat

SEQ ID NO: 4509253 - DNA, 25 bp, Homo sapien
ttcatctccatcaggctttcagagc

SEQ ID NO: 4509254 - DNA, 25 bp, Homo sapien
catgtctggcactattttcatctcc

SEQ ID NO: 4509255 - DNA, 25 bp, Homo sapien
ctctgccacagagctgcgaatgcca

SEQ ID NO: 4509256 - DNA, 25 bp, Homo sapien
cagagctgcgaatgccaaggtaaac

SEQ ID NO: 4509257 - DNA, 25 bp, Homo sapien
ccacagagctgcgaatgccaaggta

SEQ ID NO: 4509258 - DNA, 25 bp, Homo sapien
gccaaggtaaacatatgttttgaga

SEQ ID NO: 4509259 - DNA, 25 bp, Homo sapien
tgtaggcgccagttcacagatgaag

SEQ ID NO: 4509260 - DNA, 25 bp, Homo sapien
ggagctgggaggaacctggctggcc

SEQ ID NO: 4509261 - DNA, 25 bp, Homo sapien
ctgggctcctcaccgggctgcatag

SEQ ID NO: 4509262 - DNA, 25 bp, Homo sapien
gcccgacaccccagttaggcttgtg

SEQ ID NO: 4509263 - DNA, 25 bp, Homo sapien
gctttcagcagggtcgactgcggta

SEQ ID NO: 4509264 - DNA, 25 bp, Homo sapien
gacaggtaggaaagaccacaaccag

SEQ ID NO: 4509265 - DNA, 25 bp, Homo sapien
tcgactgcggtatccctgcaccagt

SEQ ID NO: 4509266 - DNA, 25 bp, Homo sapien
ggagagctgaagagcgttgctttca

SEQ ID NO: 4509267 - DNA, 25 bp, Homo sapien
acttcttcgtcaaatcaactgcata

SEQ ID NO: 4509268 - DNA, 25 bp, Homo sapien
taggagtggcatgtgtccatgtcca

SEQ ID NO: 4509269 - DNA, 25 bp, Homo sapien
gagtggcatgtgtccatgtccacct

SEQ ID NO: 4509270 - DNA, 25 bp, Homo sapien
tcttcgtcaaatcaactgcatagga

SEQ ID NO: 4509271 - DNA, 25 bp, Homo sapien
atgctgatcccggtacacgtggagc

SEQ ID NO: 4509272 - DNA, 25 bp, Homo sapien
ggttgggcacattctggctttgctg

SEQ ID NO: 4509273 - DNA, 25 bp, Homo sapien
agcaggctcactgatctgccgcaca

SEQ ID NO: 4509274 - DNA, 25 bp, Homo sapien
tgagtacagtgatgattggatcccc

SEQ ID NO: 4509275 - DNA, 25 bp, Homo sapien
attcctgacgttgctgaaggcatct

SEQ ID NO: 4509276 - DNA, 25 bp, Homo sapien
cctgacgttgctgaaggcatctggg

SEQ ID NO: 4509277 - DNA, 25 bp, Homo sapien
acattcctgacgttgctgaaggcat

SEQ ID NO: 4509278 - DNA, 25 bp, Homo sapien
ctgacgttgctgaaggcatctgggg

SEQ ID NO: 4509279 - DNA, 25 bp, Homo sapien
gtgacaagagtagaaggagtgtctc

SEQ ID NO: 4509280 - DNA, 25 bp, Homo sapien
ccaaagcccactgccctgtcattct

SEQ ID NO: 4509281 - DNA, 25 bp, Homo sapien
caagagtagaaggagtgtctcttgt

SEQ ID NO: 4509282 - DNA, 25 bp, Homo sapien
gtagaaggagtgtctcttgttctct

SEQ ID NO: 4509283 - DNA, 25 bp, Homo sapien
ttgtgtctgatcgttggagagcgtc

SEQ ID NO: 4509284 - DNA, 25 bp, Homo sapien
ctgcgaaagactgtgtgtaggagct

SEQ ID NO: 4509285 - DNA, 25 bp, Homo sapien
tagctttaagcatccgtagagtatt

SEQ ID NO: 4509286 - DNA, 25 bp, Homo sapien
tccggaatgccaattaggttgtgtc

SEQ ID NO: 4509287 - DNA, 25 bp, Homo sapien
ttagggcttcgtatcccacaaattc

SEQ ID NO: 4509288 - DNA, 25 bp, Homo sapien
tcattttagggcttcgtatcccaca

SEQ ID NO: 4509289 - DNA, 25 bp, Homo sapien
tcgtatcccacaaattcagcttgga

SEQ ID NO: 4509290 - DNA, 25 bp, Homo sapien
tggatttctcggctgattgagttgc

SEQ ID NO: 4509291 - DNA, 25 bp, Homo sapien
ctgctttccagccactgttgtgaca

SEQ ID NO: 4509292 - DNA, 25 bp, Homo sapien
gtggggtgtgcacatttcctctgtt

SEQ ID NO: 4509293 - DNA, 25 bp, Homo sapien
cctctgttgaattcttcatccagag

SEQ ID NO: 4509294 - DNA, 25 bp, Homo sapien
catttcctctgttgaattcttcatc

SEQ ID NO: 4509295 - DNA, 25 bp, Homo sapien
gagtggcccccactctgcacatgtc

SEQ ID NO: 4509296 - DNA, 25 bp, Homo sapien
tgagtggcccccactctgcacatgt

SEQ ID NO: 4509297 - DNA, 25 bp, Homo sapien
gtggcccccactctgcacatgtcag

SEQ ID NO: 4509298 - DNA, 25 bp, Homo sapien
ggcccccactctgcacatgtcagac

SEQ ID NO: 4509299 - DNA, 25 bp, Homo sapien
ccgatatggacttcttaggcttcgc

SEQ ID NO: 4509300 - DNA, 25 bp, Homo sapien
ttgggaattctgatctccacgttgg

SEQ ID NO: 4509301 - DNA, 25 bp, Homo sapien
cttcttaggcttcgctggaatggga

SEQ ID NO: 4509302 - DNA, 25 bp, Homo sapien
aatgggaaggatagcaaggatgacc

SEQ ID NO: 4509303 - DNA, 25 bp, Homo sapien
ctgcgacaggacaatcattagaacc

SEQ ID NO: 4509304 - DNA, 25 bp, Homo sapien
caaagttggcgtttccaaggccctg

SEQ ID NO: 4509305 - DNA, 25 bp, Homo sapien
caaggcttgcatctctaggcttcac

SEQ ID NO: 4509306 - DNA, 25 bp, Homo sapien
ggatgaatgccagacagcccaagat

SEQ ID NO: 4509307 - DNA, 25 bp, Homo sapien
agaagttagtggcaaggcctgtctg

SEQ ID NO: 4509308 - DNA, 25 bp, Homo sapien
tagaagttagtggcaaggcctgtct

SEQ ID NO: 4509309 - DNA, 25 bp, Homo sapien
gaaaccataactcagattgaggtga

SEQ ID NO: 4509310 - DNA, 25 bp, Homo sapien
gatctcagtttgaatgaagcattgg

SEQ ID NO: 4509311 - DNA, 25 bp, Homo sapien
aattcagtggcatccagtacttcca

SEQ ID NO: 4509312 - DNA, 25 bp, Homo sapien
gaagaaggcgatcagccctccagtt

SEQ ID NO: 4509313 - DNA, 25 bp, Homo sapien
ctcagcaagtatccatggaacttga

SEQ ID NO: 4509314 - DNA, 25 bp, Homo sapien
gctttgcgcgtggtgaagcctcagc

SEQ ID NO: 4509315 - DNA, 25 bp, Homo sapien
gaccctcttgccaggctttgcgcgt

SEQ ID NO: 4509316 - DNA, 25 bp, Homo sapien
gaacttgatgttacgctcccaggct

SEQ ID NO: 4509317 - DNA, 25 bp, Homo sapien
aagtcgagaactcctcctcgagcct

SEQ ID NO: 4509318 - DNA, 25 bp, Homo sapien
ccctgaagtcgagaactcctcctcg

SEQ ID NO: 4509319 - DNA, 25 bp, Homo sapien
tgaagtcgagaactcctcctcgagc

SEQ ID NO: 4509320 - DNA, 25 bp, Homo sapien
cctgaagtcgagaactcctcctcga

SEQ ID NO: 4509321 - DNA, 25 bp, Homo sapien
agcggttgaagctgggttttctgca

SEQ ID NO: 4509322 - DNA, 25 bp, Homo sapien
tgccatggaggacgtgagcatgaca

SEQ ID NO: 4509323 - DNA, 25 bp, Homo sapien
tgctgagccagaagcggttgaagct

SEQ ID NO: 4509324 - DNA, 25 bp, Homo sapien
cgtgagcatgacatgtctagcagga

SEQ ID NO: 4509325 - DNA, 25 bp, Homo sapien
ccctgacaaacaggtggctaggtgg

SEQ ID NO: 4509326 - DNA, 25 bp, Homo sapien
gacagtgtattctccaagacgttcc

SEQ ID NO: 4509327 - DNA, 25 bp, Homo sapien
gtggtcaagccggacagtgtattct

SEQ ID NO: 4509328 - DNA, 25 bp, Homo sapien
tattctccaagacgttccctgacaa

SEQ ID NO: 4509329 - DNA, 25 bp, Homo sapien
tcttctgcattttgggctgacgcct

SEQ ID NO: 4509330 - DNA, 25 bp, Homo sapien
gatcagtgcacgtcccgtcttctgg

SEQ ID NO: 4509331 - DNA, 25 bp, Homo sapien
gctattagctgttgccagcccggga

SEQ ID NO: 4509332 - DNA, 25 bp, Homo sapien
tgacgccttgaagctacatgagcaa

SEQ ID NO: 4509333 - DNA, 25 bp, Homo sapien
atgtgttattctgaaattagtgttt

SEQ ID NO: 4509334 - DNA, 25 bp, Homo sapien
cttttgaagttgctatcatctgtga

SEQ ID NO: 4509335 - DNA, 25 bp, Homo sapien
tggcatctgtgcagcattatcaagc

SEQ ID NO: 4509336 - DNA, 25 bp, Homo sapien
tcttcttacttttgaagttgctatc

SEQ ID NO: 4509337 - DNA, 25 bp, Homo sapien
tgactgcgatgtcctcatcagcggg

SEQ ID NO: 4509338 - DNA, 25 bp, Homo sapien
ggcctgacctgactgcgatgtcctc

SEQ ID NO: 4509339 - DNA, 25 bp, Homo sapien
gacctgactgcgatgtcctcatcag

SEQ ID NO: 4509340 - DNA, 25 bp, Homo sapien
gcctgacctgactgcgatgtcctca

SEQ ID NO: 4509341 - DNA, 25 bp, Homo sapien
cacgggctgagtgtctctcgtagat

SEQ ID NO: 4509342 - DNA, 25 bp, Homo sapien
gagcgtgtctcgtagtttcccacgg

SEQ ID NO: 4509343 - DNA, 25 bp, Homo sapien
ggtgagtgtctctcgtaattccaca

SEQ ID NO: 4509344 - DNA, 25 bp, Homo sapien
tgagcgtctctcatagtttctcacg

SEQ ID NO: 4509345 - DNA, 25 bp, Homo sapien
tctgtggtacgctttgatactctta

SEQ ID NO: 4509346 - DNA, 25 bp, Homo sapien
tctcgagtacgtttcccacattgac

SEQ ID NO: 4509347 - DNA, 25 bp, Homo sapien
actgtccccaggttcttagatgtgg

SEQ ID NO: 4509348 - DNA, 25 bp, Homo sapien
ccgaatctgttaagcactgtcccca

SEQ ID NO: 4509349 - DNA, 25 bp, Homo sapien
gatgggcacctacattgtggcagta

SEQ ID NO: 4509350 - DNA, 25 bp, Homo sapien
tgctccttctagatgggcacctaca

SEQ ID NO: 4509351 - DNA, 25 bp, Homo sapien
tctagatgggcacctacattgtggc

SEQ ID NO: 4509352 - DNA, 25 bp, Homo sapien
cttctagatgggcacctacattgtg

SEQ ID NO: 4509353 - DNA, 25 bp, Homo sapien
aggtgcagagaagccgtcgatttct

SEQ ID NO: 4509354 - DNA, 25 bp, Homo sapien
aggcttttgtttgccctgtcttgct

SEQ ID NO: 4509355 - DNA, 25 bp, Homo sapien
ccaggatcccgatgggggattccag

SEQ ID NO: 4509356 - DNA, 25 bp, Homo sapien
gaagccgtcgatttcttttcaggct

SEQ ID NO: 4509357 - DNA, 25 bp, Homo sapien
gcctggcccctttgcataggtggag

SEQ ID NO: 4509358 - DNA, 25 bp, Homo sapien
tggcctggcccctttgcataggtgg

SEQ ID NO: 4509359 - DNA, 25 bp, Homo sapien
cccctttgcataggtggaggaattt

SEQ ID NO: 4509360 - DNA, 25 bp, Homo sapien
tggcccctttgcataggtggaggaa

SEQ ID NO: 4509361 - DNA, 25 bp, Homo sapien
cacctgactgtaaacagccctgggc

SEQ ID NO: 4509362 - DNA, 25 bp, Homo sapien
cctgactgtaaacagccctgggcat

SEQ ID NO: 4509363 - DNA, 25 bp, Homo sapien
gacacctgactgtaaacagccctgg

SEQ ID NO: 4509364 - DNA, 25 bp, Homo sapien
aaggacacctgactgtaaacagccc

SEQ ID NO: 4509365 - DNA, 25 bp, Homo sapien
cccagaaggccatgggccaggcggc

SEQ ID NO: 4509366 - DNA, 25 bp, Homo sapien
ttaaagtgcacactggctggggctg

SEQ ID NO: 4509367 - DNA, 25 bp, Homo sapien
ggccatgggccaggcggctgagtga

SEQ ID NO: 4509368 - DNA, 25 bp, Homo sapien
ctgtccaggtggctcagggaagctc

SEQ ID NO: 4509369 - DNA, 25 bp, Homo sapien
cgccttggccccaatgtagagaaca

SEQ ID NO: 4509370 - DNA, 25 bp, Homo sapien
tatgtcacgggagtacctgtgtacg

SEQ ID NO: 4509371 - DNA, 25 bp, Homo sapien
tgcaccgccgtgtcaaagtgtatgt

SEQ ID NO: 4509372 - DNA, 25 bp, Homo sapien
cccgtccggtctgttgcgacgcaga

SEQ ID NO: 4509373 - DNA, 25 bp, Homo sapien
tttgtagtctagaagcacagcctac

SEQ ID NO: 4509374 - DNA, 25 bp, Homo sapien
gtgttcagtaccacactgtacaggt

SEQ ID NO: 4509375 - DNA, 25 bp, Homo sapien
tgttcagtaccacactgtacaggtt

SEQ ID NO: 4509376 - DNA, 25 bp, Homo sapien
ttgcctacagtgttcagtaccacac

SEQ ID NO: 4509377 - DNA, 25 bp, Homo sapien
cctgactgagggtagaggatctgct

SEQ ID NO: 4509378 - DNA, 25 bp, Homo sapien
gaagggcttgtctctactcatggtg

SEQ ID NO: 4509379 - DNA, 25 bp, Homo sapien
gaaatcatcggaaggcctgactgag

SEQ ID NO: 4509380 - DNA, 25 bp, Homo sapien
cagaagccaggcagtaattccagca

SEQ ID NO: 4509381 - DNA, 25 bp, Homo sapien
tttctcctctcttcgctgtctctct

SEQ ID NO: 4509382 - DNA, 25 bp, Homo sapien
ctcttcgctgtctctctctttccgt

SEQ ID NO: 4509383 - DNA, 25 bp, Homo sapien
cctctcttcgctgtctctctctttc

SEQ ID NO: 4509384 - DNA, 25 bp, Homo sapien
ctttctcctctcttcgctgtctctc

SEQ ID NO: 4509385 - DNA, 25 bp, Homo sapien
ctggctcaggtgaagattgagagct

SEQ ID NO: 4509386 - DNA, 25 bp, Homo sapien
gctcaggtgaagattgagagctggc

SEQ ID NO: 4509387 - DNA, 25 bp, Homo sapien
cacctggctcaggtgaagattgaga

SEQ ID NO: 4509388 - DNA, 25 bp, Homo sapien
ctcaggtgaagattgagagctggca

SEQ ID NO: 4509389 - DNA, 25 bp, Homo sapien
ggttgtaccaccgagaagaggagtc

SEQ ID NO: 4509390 - DNA, 25 bp, Homo sapien
aagctgctggttgtaccaccgagaa

SEQ ID NO: 4509391 - DNA, 25 bp, Homo sapien
gctggtgcggttggtgctgggacct

SEQ ID NO: 4509392 - DNA, 25 bp, Homo sapien
caagctctggatatgtggctgggcc

SEQ ID NO: 4509393 - DNA, 25 bp, Homo sapien
cacagcgtatcagttagggctcagc

SEQ ID NO: 4509394 - DNA, 25 bp, Homo sapien
catttacaagatagacagcccgggt

SEQ ID NO: 4509395 - DNA, 25 bp, Homo sapien
aaactccagtcgtgtgggaatcaca

SEQ ID NO: 4509396 - DNA, 25 bp, Homo sapien
cgagatacatttggaagcacctggc

SEQ ID NO: 4509397 - DNA, 25 bp, Homo sapien
ctctgcagaagaatctgaccccttg

SEQ ID NO: 4509398 - DNA, 25 bp, Homo sapien
tgcagaagaatctgaccccttggcc

SEQ ID NO: 4509399 - DNA, 25 bp, Homo sapien
ctgtcctctgcagaagaatctgacc

SEQ ID NO: 4509400 - DNA, 25 bp, Homo sapien
agggctgtcctctgcagaagaatct

SEQ ID NO: 4509401 - DNA, 25 bp, Homo sapien
tgctaataaaaccttccaccaggtg

SEQ ID NO: 4509402 - DNA, 25 bp, Homo sapien
caagctgccaaactctccctcgtcc

SEQ ID NO: 4509403 - DNA, 25 bp, Homo sapien
aaaccttccaccaggtggctctcat

SEQ ID NO: 4509404 - DNA, 25 bp, Homo sapien
ataaaaccttccaccaggtggctct

SEQ ID NO: 4509405 - DNA, 25 bp, Homo sapien
tctattggaatagtgctcttttcct

SEQ ID NO: 4509406 - DNA, 25 bp, Homo sapien
cgtgtttaacttgcagatggaacat

SEQ ID NO: 4509407 - DNA, 25 bp, Homo sapien
gtgtttaacttgcagatggaacatt

SEQ ID NO: 4509408 - DNA, 25 bp, Homo sapien
ggttttagtcctagctgcagtttca

SEQ ID NO: 4509409 - DNA, 25 bp, Homo sapien
gtctcctgctccacgttttgattca

SEQ ID NO: 4509410 - DNA, 25 bp, Homo sapien
aatcttcattttaacggagtgccat

SEQ ID NO: 4509411 - DNA, 25 bp, Homo sapien
tctggagtgagcagcaaaaatcttc

SEQ ID NO: 4509412 - DNA, 25 bp, Homo sapien
aaatccagagggatcccttctgagc

SEQ ID NO: 4509413 - DNA, 25 bp, Homo sapien
tagtagttgtcaatcctatcggagc

SEQ ID NO: 4509414 - DNA, 25 bp, Homo sapien
tgtcaatcctatcggagccacactc

SEQ ID NO: 4509415 - DNA, 25 bp, Homo sapien
ttgattcatcatctaaggtagtagt

SEQ ID NO: 4509416 - DNA, 25 bp, Homo sapien
tttatatcattcaagcttgcatgac

SEQ ID NO: 4509417 - DNA, 25 bp, Homo sapien
cccatcctattcatccatctaataa

SEQ ID NO: 4509418 - DNA, 25 bp, Homo sapien
ttgcatgacacgcacccatcctatt

SEQ ID NO: 4509419 - DNA, 25 bp, Homo sapien
ggtaaaattgaatataaagagagat

SEQ ID NO: 4509420 - DNA, 25 bp, Homo sapien
tgagtgatgtgagggttccatagcc

SEQ ID NO: 4509421 - DNA, 25 bp, Homo sapien
tactggtcctgttgagtgatgtgag

SEQ ID NO: 4509422 - DNA, 25 bp, Homo sapien
tcagtactggtcctgttgagtgatg

SEQ ID NO: 4509423 - DNA, 25 bp, Homo sapien
ctgttgagtgatgtgagggttccat

SEQ ID NO: 4509424 - DNA, 25 bp, Homo sapien
taaacgaggtctccctttgtagtga

SEQ ID NO: 4509425 - DNA, 25 bp, Homo sapien
tgcctgctggagtgccaagctgata

SEQ ID NO: 4509426 - DNA, 25 bp, Homo sapien
tgatttcaaccacagccactgaatg

SEQ ID NO: 4509427 - DNA, 25 bp, Homo sapien
tggagtgccaagctgataatatttg

SEQ ID NO: 4509428 - DNA, 25 bp, Homo sapien
gctgtacaggtaacatgactgggga

SEQ ID NO: 4509429 - DNA, 25 bp, Homo sapien
tgcaggctgtacaggtaacatgact

SEQ ID NO: 4509430 - DNA, 25 bp, Homo sapien
caaagggaaagcaggcacttcttac

SEQ ID NO: 4509431 - DNA, 25 bp, Homo sapien
aggctgtacaggtaacatgactggg

SEQ ID NO: 4509432 - DNA, 25 bp, Homo sapien
tgcctgcattgaaggataaagccct

SEQ ID NO: 4509433 - DNA, 25 bp, Homo sapien
aaagcccttagaacagtgggtggca

SEQ ID NO: 4509434 - DNA, 25 bp, Homo sapien
gtcgttgtcgggcagttggctctca

SEQ ID NO: 4509435 - DNA, 25 bp, Homo sapien
tgttagctgccattgtcatgatcaa

SEQ ID NO: 4509436 - DNA, 25 bp, Homo sapien
tagattgaaacgtcagctctcccat

SEQ ID NO: 4509437 - DNA, 25 bp, Homo sapien
cacaggttctgtgtagattgaaacg

SEQ ID NO: 4509438 - DNA, 25 bp, Homo sapien
aaagcggttagatagctaagagcac

SEQ ID NO: 4509439 - DNA, 25 bp, Homo sapien
cactggcaatgtgatcttgggtata

SEQ ID NO: 4509440 - DNA, 25 bp, Homo sapien
atctttctcacagagcaaagagcag

SEQ ID NO: 4509441 - DNA, 25 bp, Homo sapien
tggatctttctcacagagcaaagag

SEQ ID NO: 4509442 - DNA, 25 bp, Homo sapien
ctttctcacagagcaaagagcagga

SEQ ID NO: 4509443 - DNA, 25 bp, Homo sapien
cgtaggtggatctttctcacagagc

SEQ ID NO: 4509444 - DNA, 25 bp, Homo sapien
aagagttaaggtacttccaggatca

SEQ ID NO: 4509445 - DNA, 25 bp, Homo sapien
gctccagatcacgtattgcatttag

SEQ ID NO: 4509446 - DNA, 25 bp, Homo sapien
tcactgaggtagataattgttcacc

SEQ ID NO: 4509447 - DNA, 25 bp, Homo sapien
caatacagttatcaatcgcaggaaa

SEQ ID NO: 4509448 - DNA, 25 bp, Homo sapien
catctttaggttgccaaagaagcac

SEQ ID NO: 4509449 - DNA, 25 bp, Homo sapien
gatttcctactttttggtggacagc

SEQ ID NO: 4509450 - DNA, 25 bp, Homo sapien
agcttgttacgtccctgtcttggcc

SEQ ID NO: 4509451 - DNA, 25 bp, Homo sapien
cacagctgtggaggaccagcttgtt

SEQ ID NO: 4509452 - DNA, 25 bp, Homo sapien
gagccttcaggacattgacttttgg

SEQ ID NO: 4509453 - DNA, 25 bp, Homo sapien
ccttcaggacattgacttttggcat

SEQ ID NO: 4509454 - DNA, 25 bp, Homo sapien
ggagccttcaggacattgacttttg

SEQ ID NO: 4509455 - DNA, 25 bp, Homo sapien
ctggagccttcaggacattgacttt

SEQ ID NO: 4509456 - DNA, 25 bp, Homo sapien
gctggatagcattgtctgctccaga

SEQ ID NO: 4509457 - DNA, 25 bp, Homo sapien
cgctgcctcggcaggatgccatctg

SEQ ID NO: 4509458 - DNA, 25 bp, Homo sapien
ctgcctcggcaggatgccatctgct

SEQ ID NO: 4509459 - DNA, 25 bp, Homo sapien
gctgctgctggatagcattgtctgc

SEQ ID NO: 4509460 - DNA, 25 bp, Homo sapien
tgagcactgcctcctggaaagccat

SEQ ID NO: 4509461 - DNA, 25 bp, Homo sapien
ggtgagcactgcctcctggaaagcc

SEQ ID NO: 4509462 - DNA, 25 bp, Homo sapien
tttggtgagcactgcctcctggaaa

SEQ ID NO: 4509463 - DNA, 25 bp, Homo sapien
ttggtgagcactgcctcctggaaag

SEQ ID NO: 4509464 - DNA, 25 bp, Homo sapien
tctgtcaaggtaatgatcaggccaa

SEQ ID NO: 4509465 - DNA, 25 bp, Homo sapien
tcaggccaagataagcccaagcgga

SEQ ID NO: 4509466 - DNA, 25 bp, Homo sapien
tgggcctttggcaatctctgtcaag

SEQ ID NO: 4509467 - DNA, 25 bp, Homo sapien
tgaaggggccttgggagaattccat

SEQ ID NO: 4509468 - DNA, 25 bp, Homo sapien
agccaccagcttacattttacattc

SEQ ID NO: 4509469 - DNA, 25 bp, Homo sapien
cagccaccagcttacattttacatt

SEQ ID NO: 4509470 - DNA, 25 bp, Homo sapien
agctgcttgtggtatatgaagtgct

SEQ ID NO: 4509471 - DNA, 25 bp, Homo sapien
gcttgtggtatatgaagtgctgcat

SEQ ID NO: 4509472 - DNA, 25 bp, Homo sapien
tgtggtatatgaagtgctgcattca

SEQ ID NO: 4509473 - DNA, 25 bp, Homo sapien
gtatatgaagtgctgcattcactca

SEQ ID NO: 4509474 - DNA, 25 bp, Homo sapien
gggtgctttatcttgcgggggctgt

SEQ ID NO: 4509475 - DNA, 25 bp, Homo sapien
tccaagaactaggatctttgtcatc

SEQ ID NO: 4509476 - DNA, 25 bp, Homo sapien
cctcctccaagaactaggatctttg

SEQ ID NO: 4509477 - DNA, 25 bp, Homo sapien
tgtaggctgtacaacaggaaaccct

SEQ ID NO: 4509478 - DNA, 25 bp, Homo sapien
aagaaccggatattcatgctgctgg

SEQ ID NO: 4509479 - DNA, 25 bp, Homo sapien
gaaccggatattcatgctgctggat

SEQ ID NO: 4509480 - DNA, 25 bp, Homo sapien
tctcccggcaccagctgtgcttgct

SEQ ID NO: 4509481 - DNA, 25 bp, Homo sapien
cggatattcatgctgctggatgcct

SEQ ID NO: 4509482 - DNA, 25 bp, Homo sapien
agagactttcaaccctgggccagga

SEQ ID NO: 4509483 - DNA, 25 bp, Homo sapien
caggttatccggcaaagagactttc

SEQ ID NO: 4509484 - DNA, 25 bp, Homo sapien
tccatgtggggatctagaggcatca

SEQ ID NO: 4509485 - DNA, 25 bp, Homo sapien
cctctcatcctataatccatgtggg

SEQ ID NO: 4509486 - DNA, 25 bp, Homo sapien
cctcaatttcaaaactctcattaga

SEQ ID NO: 4509487 - DNA, 25 bp, Homo sapien
tcaatttcaaaactctcattagaaa

SEQ ID NO: 4509488 - DNA, 25 bp, Homo sapien
tctcattagaaaatgtttttaaatc

SEQ ID NO: 4509489 - DNA, 25 bp, Homo sapien
tcattagaaaatgtttttaaatcac

SEQ ID NO: 4509490 - DNA, 25 bp, Homo sapien
cccccgtgtactgggccttgcaaag

SEQ ID NO: 4509491 - DNA, 25 bp, Homo sapien
tgcccagcggttaacaagtttgtaa

SEQ ID NO: 4509492 - DNA, 25 bp, Homo sapien
gcaaagtccgttaggagcgctccag

SEQ ID NO: 4509493 - DNA, 25 bp, Homo sapien
gagtccccgtgctcgcacagatggt

SEQ ID NO: 4509494 - DNA, 25 bp, Homo sapien
ctgtgcagcgcaggtgagccgctta

SEQ ID NO: 4509495 - DNA, 25 bp, Homo sapien
ttcggaatcacggaaggcccaggtg

SEQ ID NO: 4509496 - DNA, 25 bp, Homo sapien
tctcacccagtcacgagtgatggtg

SEQ ID NO: 4509497 - DNA, 25 bp, Homo sapien
gtgcaaacctcagcagtcccgggta

SEQ ID NO: 4509498 - DNA, 25 bp, Homo sapien
tgaaggagaagaccgccaagcattt

SEQ ID NO: 4509499 - DNA, 25 bp, Homo sapien
catttcttcgccctcaagttgatga

SEQ ID NO: 4509500 - DNA, 25 bp, Homo sapien
tcgggcgggtgcacccggtgaagga

SEQ ID NO: 4509501 - DNA, 25 bp, Homo sapien
gccaagcatttcttcgccctcaagt

SEQ ID NO: 4509502 - DNA, 25 bp, Homo sapien
gcctgcaggacttcgacacactggc

SEQ ID NO: 4509503 - DNA, 25 bp, Homo sapien
cctgcaggacttcgacacactggcc

SEQ ID NO: 4509504 - DNA, 25 bp, Homo sapien
cgcctgcaggacttcgacacactgg

SEQ ID NO: 4509505 - DNA, 25 bp, Homo sapien
ctgcaggacttcgacacactggcca

SEQ ID NO: 4509506 - DNA, 25 bp, Homo sapien
cgatgctgggatgcttaggcagtcc

SEQ ID NO: 4509507 - DNA, 25 bp, Homo sapien
caaggcctgcctctagtgaagatgt

SEQ ID NO: 4509508 - DNA, 25 bp, Homo sapien
ggaaacagggctcaacagctctcta

SEQ ID NO: 4509509 - DNA, 25 bp, Homo sapien
taggccaatggtgacatacccaatg

SEQ ID NO: 4509510 - DNA, 25 bp, Homo sapien
tagatatttaaaattactgcaaaag

SEQ ID NO: 4509511 - DNA, 25 bp, Homo sapien
agacagctctggcatccgatgaagt

SEQ ID NO: 4509512 - DNA, 25 bp, Homo sapien
tccagaatagtaactcaggagttca

SEQ ID NO: 4509513 - DNA, 25 bp, Homo sapien
tggttgcattcttggacagacagct

SEQ ID NO: 4509514 - DNA, 25 bp, Homo sapien
gcctcaacgttttgagctgaagtga

SEQ ID NO: 4509515 - DNA, 25 bp, Homo sapien
aatctcaggactagtttaaattcca

SEQ ID NO: 4509516 - DNA, 25 bp, Homo sapien
taagtacagtaattcataattatca

SEQ ID NO: 4509517 - DNA, 25 bp, Homo sapien
aactccttttgtatgcagtgtgtaa

SEQ ID NO: 4509518 - DNA, 25 bp, Homo sapien
cagtaatttaagctgtatgttatcc

SEQ ID NO: 4509519 - DNA, 25 bp, Homo sapien
gaacttatcactagtccagatcatg

SEQ ID NO: 4509520 - DNA, 25 bp, Homo sapien
aatgccgccagaccatcatgtagcg

SEQ ID NO: 4509521 - DNA, 25 bp, Homo sapien
tagcggtggacatgctggctttagc

SEQ ID NO: 4509522 - DNA, 25 bp, Homo sapien
gacctctgtcgtggatctgtgcctg

SEQ ID NO: 4509523 - DNA, 25 bp, Homo sapien
ttatgctctagttggcagcaggcag

SEQ ID NO: 4509524 - DNA, 25 bp, Homo sapien
gagggccaccataaagacagatgca

SEQ ID NO: 4509525 - DNA, 25 bp, Homo sapien
cagatgcagcacagtttggagccca

SEQ ID NO: 4509526 - DNA, 25 bp, Homo sapien
tggagagaatgagcaggttatgctc

SEQ ID NO: 4509527 - DNA, 25 bp, Homo sapien
tgggccagttgtcaaaaaatccaga

SEQ ID NO: 4509528 - DNA, 25 bp, Homo sapien
aaggaggcctgatttacctgagcca

SEQ ID NO: 4509529 - DNA, 25 bp, Homo sapien
cctgagccagcatgataaagaagtc

SEQ ID NO: 4509530 - DNA, 25 bp, Homo sapien
aacagaccaggccaaatcagaatgg

SEQ ID NO: 4509531 - DNA, 25 bp, Homo sapien
tactttctgtgaactacggtggccc

SEQ ID NO: 4509532 - DNA, 25 bp, Homo sapien
gagggactcaaagccgttgctaaga

SEQ ID NO: 4509533 - DNA, 25 bp, Homo sapien
taagagacactattcgccgaaggcg

SEQ ID NO: 4509534 - DNA, 25 bp, Homo sapien
agcttccccgtggtggcttccgagg

SEQ ID NO: 4509535 - DNA, 25 bp, Homo sapien
agtgccagccgtggggtctccggac

SEQ ID NO: 4509536 - DNA, 25 bp, Homo sapien
gggctttcgggatgcactttgcact

SEQ ID NO: 4509537 - DNA, 25 bp, Homo sapien
acggcgaggtcccaggtcatacggg

SEQ ID NO: 4509538 - DNA, 25 bp, Homo sapien
acccaggaggtctcgggacggcgag

SEQ ID NO: 4509539 - DNA, 25 bp, Homo sapien
atccgaacagccgagaaggcaggag

SEQ ID NO: 4509540 - DNA, 25 bp, Homo sapien
cggcgaacatccgaacagccgagaa

SEQ ID NO: 4509541 - DNA, 25 bp, Homo sapien
cttctccattgaagaaataccccag

SEQ ID NO: 4509542 - DNA, 25 bp, Homo sapien
ttcctgatcctcctcggtgcctcac

SEQ ID NO: 4509543 - DNA, 25 bp, Homo sapien
cttcctcctttcagcctcctctaca

SEQ ID NO: 4509544 - DNA, 25 bp, Homo sapien
ttcctcctttcagcctcctctacac

SEQ ID NO: 4509545 - DNA, 25 bp, Homo sapien
cctcctttcagcctcctctacactc

SEQ ID NO: 4509546 - DNA, 25 bp, Homo sapien
tcctttcagcctcctctacactcac

SEQ ID NO: 4509547 - DNA, 25 bp, Homo sapien
tttacagacgatgctggtcagaggc

SEQ ID NO: 4509548 - DNA, 25 bp, Homo sapien
ttctctgataggtgggcagacctct

SEQ ID NO: 4509549 - DNA, 25 bp, Homo sapien
tcttcctgctttcgcgtcttcttca

SEQ ID NO: 4509550 - DNA, 25 bp, Homo sapien
tcgcgtcttcttcagccagctcaaa

SEQ ID NO: 4509551 - DNA, 25 bp, Homo sapien
agtgtcagggaagacggcatgagag

SEQ ID NO: 4509552 - DNA, 25 bp, Homo sapien
gaagtgtcagggaagacggcatgag

SEQ ID NO: 4509553 - DNA, 25 bp, Homo sapien
aagtgtcagggaagacggcatgaga

SEQ ID NO: 4509554 - DNA, 25 bp, Homo sapien
tcaagcctgaagaatccttgtggtt

SEQ ID NO: 4509555 - DNA, 25 bp, Homo sapien
tgaagaatccttgtggttgttgctg

SEQ ID NO: 4509556 - DNA, 25 bp, Homo sapien
ggttgttgctggcttccaactatcc

SEQ ID NO: 4509557 - DNA, 25 bp, Homo sapien
gttgctggcttccaactatccaccg

SEQ ID NO: 4509558 - DNA, 25 bp, Homo sapien
gggcttcaaagtacgtccaggctac

SEQ ID NO: 4509559 - DNA, 25 bp, Homo sapien
cattgtgcacgtacagcatcgtggg

SEQ ID NO: 4509560 - DNA, 25 bp, Homo sapien
tacggattgcctagtaaccattgtg

SEQ ID NO: 4509561 - DNA, 25 bp, Homo sapien
tcccttctcctgatgtacggattgc

SEQ ID NO: 4509562 - DNA, 25 bp, Homo sapien
aggattcattaggttacggggatca

SEQ ID NO: 4509563 - DNA, 25 bp, Homo sapien
ggattcattaggttacggggatcag

SEQ ID NO: 4509564 - DNA, 25 bp, Homo sapien
gattcattaggttacggggatcagc

SEQ ID NO: 4509565 - DNA, 25 bp, Homo sapien
tgttctagaaaaacccgaacacatc

SEQ ID NO: 4509566 - DNA, 25 bp, Homo sapien
gccattcgcatctcggccattcggg

SEQ ID NO: 4509567 - DNA, 25 bp, Homo sapien
agagaaatgaagcagagtccagcca

SEQ ID NO: 4509568 - DNA, 25 bp, Homo sapien
gggaatagccttgttctagcatctt

SEQ ID NO: 4509569 - DNA, 25 bp, Homo sapien
gccatgtggctactcctagtctcag

SEQ ID NO: 4509570 - DNA, 25 bp, Homo sapien
tctgcacctcaaaatgcaaggaagt

SEQ ID NO: 4509571 - DNA, 25 bp, Homo sapien
gttagcatgccttgcaatcagtcca

SEQ ID NO: 4509572 - DNA, 25 bp, Homo sapien
tggtcaactatttcaggcacatagt

SEQ ID NO: 4509573 - DNA, 25 bp, Homo sapien
tttgtgttgtaaggtgaaatgacat

SEQ ID NO: 4509574 - DNA, 25 bp, Homo sapien
tttcctggcgttccacttctatttc

SEQ ID NO: 4509575 - DNA, 25 bp, Homo sapien
ttttgtgttgtaaggtgaaatgaca

SEQ ID NO: 4509576 - DNA, 25 bp, Homo sapien
tttttgtgttgtaaggtgaaatgac

SEQ ID NO: 4509577 - DNA, 25 bp, Homo sapien
tggcagaagtgaaaagcaacaggac

SEQ ID NO: 4509578 - DNA, 25 bp, Homo sapien
catcttggtcttaatgttatgaagc

SEQ ID NO: 4509579 - DNA, 25 bp, Homo sapien
gatttgcttcatttgaaagagacaa

SEQ ID NO: 4509580 - DNA, 25 bp, Homo sapien
tgcatagaattttaaccgttctgac

SEQ ID NO: 4509581 - DNA, 25 bp, Homo sapien
tactaaagcacgaatctgttctccc

SEQ ID NO: 4509582 - DNA, 25 bp, Homo sapien
ggcttacgcccttctgatatgttca

SEQ ID NO: 4509583 - DNA, 25 bp, Homo sapien
ccaaccacgctttatctaggaagtc

SEQ ID NO: 4509584 - DNA, 25 bp, Homo sapien
tactcttcttgccttagggcttacg

SEQ ID NO: 4509585 - DNA, 25 bp, Homo sapien
ctttccaaatgtactctcataaatt

SEQ ID NO: 4509586 - DNA, 25 bp, Homo sapien
tttccaaatgtactctcataaattc

SEQ ID NO: 4509587 - DNA, 25 bp, Homo sapien
atgtactctcataaattcccatcag

SEQ ID NO: 4509588 - DNA, 25 bp, Homo sapien
catcatgacattcggaaaggtgaaa

SEQ ID NO: 4509589 - DNA, 25 bp, Homo sapien
tgcttctctatatttgggcattgag

SEQ ID NO: 4509590 - DNA, 25 bp, Homo sapien
cagaaactgtttcaatatagctcct

SEQ ID NO: 4509591 - DNA, 25 bp, Homo sapien
cattgagaatgcctacgtttgaaaa

SEQ ID NO: 4509592 - DNA, 25 bp, Homo sapien
gccgtgaagcctccgattaagtctt

SEQ ID NO: 4509593 - DNA, 25 bp, Homo sapien
tgaagcctccgattaagtctttaac

SEQ ID NO: 4509594 - DNA, 25 bp, Homo sapien
attaagtctttaactgtaggatcag

SEQ ID NO: 4509595 - DNA, 25 bp, Homo sapien
gtgaagagccgtgaagcctccgatt

SEQ ID NO: 4509596 - DNA, 25 bp, Homo sapien
gcttgacctctctcggataatggcg

SEQ ID NO: 4509597 - DNA, 25 bp, Homo sapien
tgatcacggcgtatcgcaacaggaa

SEQ ID NO: 4509598 - DNA, 25 bp, Homo sapien
taacatcaagcgtgcaatgcgggcc

SEQ ID NO: 4509599 - DNA, 25 bp, Homo sapien
aggagtctgtccgtcttctaagcga

SEQ ID NO: 4509600 - DNA, 25 bp, Homo sapien
ttgtgacttcttgtaagaaatccaa

SEQ ID NO: 4509601 - DNA, 25 bp, Homo sapien
tgtgacttcttgtaagaaatccaaa

SEQ ID NO: 4509602 - DNA, 25 bp, Homo sapien
gtgacttcttgtaagaaatccaaac

SEQ ID NO: 4509603 - DNA, 25 bp, Homo sapien
ccaagcagtggttataggaatgatt

SEQ ID NO: 4509604 - DNA, 25 bp, Homo sapien
tctagtcatcttaagttgcaaaaac

SEQ ID NO: 4509605 - DNA, 25 bp, Homo sapien
taatatctagtcatcttaagttgca

SEQ ID NO: 4509606 - DNA, 25 bp, Homo sapien
agaatgaggcatcgcttaccaagca

SEQ ID NO: 4509607 - DNA, 25 bp, Homo sapien
tgcgtgcctccatgtacagactctg

SEQ ID NO: 4509608 - DNA, 25 bp, Homo sapien
tggtggcaagccagtcctcgctgtt

SEQ ID NO: 4509609 - DNA, 25 bp, Homo sapien
cagactgccaggactactgaggacc

SEQ ID NO: 4509610 - DNA, 25 bp, Homo sapien
acagagagattaggcgacctgccca

SEQ ID NO: 4509611 - DNA, 25 bp, Homo sapien
aaattatgttgaggcacctgaagac

SEQ ID NO: 4509612 - DNA, 25 bp, Homo sapien
actaaattatgttgaggcacctgaa

SEQ ID NO: 4509613 - DNA, 25 bp, Homo sapien
attatgttgaggcacctgaagacaa

SEQ ID NO: 4509614 - DNA, 25 bp, Homo sapien
tatgttgaggcacctgaagacaaag

SEQ ID NO: 4509615 - DNA, 25 bp, Homo sapien
acagctgctccttctagcccatatt

SEQ ID NO: 4509616 - DNA, 25 bp, Homo sapien
gcccatattgttcaccaggaaaaga

SEQ ID NO: 4509617 - DNA, 25 bp, Homo sapien
cttctagcccatattgttcaccagg

SEQ ID NO: 4509618 - DNA, 25 bp, Homo sapien
gctgctccttctagcccatattgtt

SEQ ID NO: 4509619 - DNA, 25 bp, Homo sapien
cagctttgatttagtgctccctgaa

SEQ ID NO: 4509620 - DNA, 25 bp, Homo sapien
cacgcgggctagaagaagctctcag

SEQ ID NO: 4509621 - DNA, 25 bp, Homo sapien
tgaagaccaccatgtggcccctctg

SEQ ID NO: 4509622 - DNA, 25 bp, Homo sapien
tgtccttatacctcggcagtctgcg

SEQ ID NO: 4509623 - DNA, 25 bp, Homo sapien
tgccaactaagcaggacgcagcttt

SEQ ID NO: 4509624 - DNA, 25 bp, Homo sapien
gtttattaccaagccacgggtgcgc

SEQ ID NO: 4509625 - DNA, 25 bp, Homo sapien
agagaagtggctcctccatggatgg

SEQ ID NO: 4509626 - DNA, 25 bp, Homo sapien
acaggtggcgctcattattcaggca

SEQ ID NO: 4509627 - DNA, 25 bp, Homo sapien
gagaacgagggatctgatctgtaac

SEQ ID NO: 4509628 - DNA, 25 bp, Homo sapien
aggagaacgagggatctgatctgta

SEQ ID NO: 4509629 - DNA, 25 bp, Homo sapien
aggaaagaggagaacgagggatctg

SEQ ID NO: 4509630 - DNA, 25 bp, Homo sapien
aaagaggagaacgagggatctgatc

SEQ ID NO: 4509631 - DNA, 25 bp, Homo sapien
taggcatatcagactgtgggatccc

SEQ ID NO: 4509632 - DNA, 25 bp, Homo sapien
aagatggttctttcgtgttgccgtc

SEQ ID NO: 4509633 - DNA, 25 bp, Homo sapien
catacaggttgggagacatcagtaa

SEQ ID NO: 4509634 - DNA, 25 bp, Homo sapien
tcagtaaaacggtctcctacccatg

SEQ ID NO: 4509635 - DNA, 25 bp, Homo sapien
cttgggaccatgaaattagcgtgtg

SEQ ID NO: 4509636 - DNA, 25 bp, Homo sapien
aaatctgcagcgtatcttgggacca

SEQ ID NO: 4509637 - DNA, 25 bp, Homo sapien
cagttgggactaacaaggactccca

SEQ ID NO: 4509638 - DNA, 25 bp, Homo sapien
ggactcccatagtgaccttctctgg

SEQ ID NO: 4509639 - DNA, 25 bp, Homo sapien
tgatcacttgccaataaaaacccgt

SEQ ID NO: 4509640 - DNA, 25 bp, Homo sapien
gaaaaagcgcctcaaggtattctga

SEQ ID NO: 4509641 - DNA, 25 bp, Homo sapien
tgcgccatgtattgttaagagctca

SEQ ID NO: 4509642 - DNA, 25 bp, Homo sapien
tacgagggaagtactttgatcatca

SEQ ID NO: 4509643 - DNA, 25 bp, Homo sapien
cacaggtcctgcaagtttctgggct

SEQ ID NO: 4509644 - DNA, 25 bp, Homo sapien
gaaggcctatacattgtcgaatttt

SEQ ID NO: 4509645 - DNA, 25 bp, Homo sapien
cgaattttaattcggcacaggtcct

SEQ ID NO: 4509646 - DNA, 25 bp, Homo sapien
agttcatcaagtagctttaggtttt

SEQ ID NO: 4509647 - DNA, 25 bp, Homo sapien
cagaaggagtattgcactgcaggca

SEQ ID NO: 4509648 - DNA, 25 bp, Homo sapien
tgtcctcacgggcatgtcaaagctg

SEQ ID NO: 4509649 - DNA, 25 bp, Homo sapien
ttagatgcctaatgcctctgggacc

SEQ ID NO: 4509650 - DNA, 25 bp, Homo sapien
tgcagtgacaactgaagcggcggct

SEQ ID NO: 4509651 - DNA, 25 bp, Homo sapien
aatttcgtatggtccacgccggtca

SEQ ID NO: 4509652 - DNA, 25 bp, Homo sapien
tggctgcctgcgaaagagtctatgc

SEQ ID NO: 4509653 - DNA, 25 bp, Homo sapien
tagaaattcagacgagagaagccct

SEQ ID NO: 4509654 - DNA, 25 bp, Homo sapien
catacgtggaaatcagcccttgtgc

SEQ ID NO: 4509655 - DNA, 25 bp, Homo sapien
caaatagctggacatattaaaaact

SEQ ID NO: 4509656 - DNA, 25 bp, Homo sapien
ccaaatagctggacatattaaaaac

SEQ ID NO: 4509657 - DNA, 25 bp, Homo sapien
caccaaatagctggacatattaaaa

SEQ ID NO: 4509658 - DNA, 25 bp, Homo sapien
ttcaccaaatagctggacatattaa

SEQ ID NO: 4509659 - DNA, 25 bp, Homo sapien
gatcagttggactacatgcagcatt

SEQ ID NO: 4509660 - DNA, 25 bp, Homo sapien
taaagatgtcacagtaaagccagcc

SEQ ID NO: 4509661 - DNA, 25 bp, Homo sapien
tagagacagacatgtggctaccatc

SEQ ID NO: 4509662 - DNA, 25 bp, Homo sapien
tcaccatatgacttcaggcaactcc

SEQ ID NO: 4509663 - DNA, 25 bp, Homo sapien
gaataaagccggaggagtgcgttcc

SEQ ID NO: 4509664 - DNA, 25 bp, Homo sapien
taactgattcttgagtatccgggcc

SEQ ID NO: 4509665 - DNA, 25 bp, Homo sapien
ggatgacccctctatgtgaaccgca

SEQ ID NO: 4509666 - DNA, 25 bp, Homo sapien
gcaatgactgaactatggccctggg

SEQ ID NO: 4509667 - DNA, 25 bp, Homo sapien
tataggatccagtcagctcttctcc

SEQ ID NO: 4509668 - DNA, 25 bp, Homo sapien
cagtaacaaacagtggacaggtagg

SEQ ID NO: 4509669 - DNA, 25 bp, Homo sapien
gacaggtagggatccgtggcccatt

SEQ ID NO: 4509670 - DNA, 25 bp, Homo sapien
agcatcgggtcttgcagcttcccag

SEQ ID NO: 4509671 - DNA, 25 bp, Homo sapien
ggtcaccaggattagccaagccctg

SEQ ID NO: 4509672 - DNA, 25 bp, Homo sapien
ctgtctttccactggatgtcttctt

SEQ ID NO: 4509673 - DNA, 25 bp, Homo sapien
tcttggtggggaatctgctgcaggt

SEQ ID NO: 4509674 - DNA, 25 bp, Homo sapien
tctttccactggatgtcttcttggt

SEQ ID NO: 4509675 - DNA, 25 bp, Homo sapien
gttccacagagtgtacagaaggcat

SEQ ID NO: 4509676 - DNA, 25 bp, Homo sapien
cacagagtgtacagaaggcatggct

SEQ ID NO: 4509677 - DNA, 25 bp, Homo sapien
ttccacagagtgtacagaaggcatg

SEQ ID NO: 4509678 - DNA, 25 bp, Homo sapien
tccacagagtgtacagaaggcatgg

SEQ ID NO: 4509679 - DNA, 25 bp, Homo sapien
aagtgtgaaaattgctgctctcagg

SEQ ID NO: 4509680 - DNA, 25 bp, Homo sapien
ggtgaagcaggtatgtgaatccatc

SEQ ID NO: 4509681 - DNA, 25 bp, Homo sapien
ccagcattatctggagaccactggt

SEQ ID NO: 4509682 - DNA, 25 bp, Homo sapien
tttctgtttcgggaaatagagctag

SEQ ID NO: 4509683 - DNA, 25 bp, Homo sapien
taaggaaatggaaccgttctgcatc

SEQ ID NO: 4509684 - DNA, 25 bp, Homo sapien
tacaactgcacgtgagtctacaatg

SEQ ID NO: 4509685 - DNA, 25 bp, Homo sapien
tatataatagtggacaagacaccag

SEQ ID NO: 4509686 - DNA, 25 bp, Homo sapien
ggccagggtgacagtaatagattta

SEQ ID NO: 4509687 - DNA, 25 bp, Homo sapien
ttccaggttcactgtagcatcctct

SEQ ID NO: 4509688 - DNA, 25 bp, Homo sapien
ctagagctttccaggttcactgtag

SEQ ID NO: 4509689 - DNA, 25 bp, Homo sapien
ctttgtctttgttcttgccgtcttg

SEQ ID NO: 4509690 - DNA, 25 bp, Homo sapien
ttgttcttgccgtcttgctgaaggc

SEQ ID NO: 4509691 - DNA, 25 bp, Homo sapien
acatctggatctttggacgggcccc

SEQ ID NO: 4509692 - DNA, 25 bp, Homo sapien
ggttgttggcgccaaacatctggat

SEQ ID NO: 4509693 - DNA, 25 bp, Homo sapien
agacgccaggatgttgcacttccca

SEQ ID NO: 4509694 - DNA, 25 bp, Homo sapien
cgggcccctaagacgccaggatgtt

SEQ ID NO: 4509695 - DNA, 25 bp, Homo sapien
ggcagaacctgaatgtgggcacgcc

SEQ ID NO: 4509696 - DNA, 25 bp, Homo sapien
tcctgcaggcaacccactctggttt

SEQ ID NO: 4509697 - DNA, 25 bp, Homo sapien
gaaatagaaaccgaaggcatgagcc

SEQ ID NO: 4509698 - DNA, 25 bp, Homo sapien
taaacagactggtatggacacaaat

SEQ ID NO: 4509699 - DNA, 25 bp, Homo sapien
cagtgcctctaaggagctgccagca

SEQ ID NO: 4509700 - DNA, 25 bp, Homo sapien
gcagtggggatgcgccaggcctcct

SEQ ID NO: 4509701 - DNA, 25 bp, Homo sapien
ctccagttctccagggcgcaggctt

SEQ ID NO: 4509702 - DNA, 25 bp, Homo sapien
cagcagtggggatgcgccaggcctc

SEQ ID NO: 4509703 - DNA, 25 bp, Homo sapien
taacatctatggtcacgaggcaaag

SEQ ID NO: 4509704 - DNA, 25 bp, Homo sapien
gactccaggcacctcgcataaatgg

SEQ ID NO: 4509705 - DNA, 25 bp, Homo sapien
aatcgcgcagcattggtccttcgtg

SEQ ID NO: 4509706 - DNA, 25 bp, Homo sapien
cataaaaggaacatgccagggagct

SEQ ID NO: 4509707 - DNA, 25 bp, Homo sapien
tgcacactcacattactgtgcagcc

SEQ ID NO: 4509708 - DNA, 25 bp, Homo sapien
tgccatccgcctccagaactctttc

SEQ ID NO: 4509709 - DNA, 25 bp, Homo sapien
gctttgggactcagattgagccact

SEQ ID NO: 4509710 - DNA, 25 bp, Homo sapien
ggacttcgtcttggtgatcatgtga

SEQ ID NO: 4509711 - DNA, 25 bp, Homo sapien
tgggtgggtacctttccatcagctg

SEQ ID NO: 4509712 - DNA, 25 bp, Homo sapien
tgccagtgcaactagaaaaagcagg

SEQ ID NO: 4509713 - DNA, 25 bp, Homo sapien
aaagcatcattgtggacagcccaga

SEQ ID NO: 4509714 - DNA, 25 bp, Homo sapien
ccagacctgaggctgatggcccaga

SEQ ID NO: 4509715 - DNA, 25 bp, Homo sapien
ctagacactttggccttgggcccag

SEQ ID NO: 4509716 - DNA, 25 bp, Homo sapien
cagataattggacaatctgggccca

SEQ ID NO: 4509717 - DNA, 25 bp, Homo sapien
tctgccatgtgttggcatgcctggg

SEQ ID NO: 4509718 - DNA, 25 bp, Homo sapien
gcgtctttcagaaaactggagggaa

SEQ ID NO: 4509719 - DNA, 25 bp, Homo sapien
aatatgggagcgtctttcagaaaac

SEQ ID NO: 4509720 - DNA, 25 bp, Homo sapien
gttccatgatttgggacagatttca

SEQ ID NO: 4509721 - DNA, 25 bp, Homo sapien
aatgctaaactgtatcctttcgtcc

SEQ ID NO: 4509722 - DNA, 25 bp, Homo sapien
aactgtatcctttcgtccttcatca

SEQ ID NO: 4509723 - DNA, 25 bp, Homo sapien
gggacaagtctgttcaatgctaaac

SEQ ID NO: 4509724 - DNA, 25 bp, Homo sapien
accaagtggacatcaatgggacaag

SEQ ID NO: 4509725 - DNA, 25 bp, Homo sapien
accaagtcgtccttgggcctgcatg

SEQ ID NO: 4509726 - DNA, 25 bp, Homo sapien
agaagtggacaatgccagaaggtga

SEQ ID NO: 4509727 - DNA, 25 bp, Homo sapien
ctcaaagatgagaaaccaagtcgtc

SEQ ID NO: 4509728 - DNA, 25 bp, Homo sapien
tcagaagtggacaatgccagaaggt

SEQ ID NO: 4509729 - DNA, 25 bp, Homo sapien
tgacaccagtaccaccacatgatag

SEQ ID NO: 4509730 - DNA, 25 bp, Homo sapien
caattggctccaatgggctgacacc

SEQ ID NO: 4509731 - DNA, 25 bp, Homo sapien
gacctcagagttctcttggtcgtga

SEQ ID NO: 4509732 - DNA, 25 bp, Homo sapien
tgctgcacagctgttgacctcagag

SEQ ID NO: 4509733 - DNA, 25 bp, Homo sapien
ccgatgacttggcaggcaaaagagc

SEQ ID NO: 4509734 - DNA, 25 bp, Homo sapien
actcggggctagaaactggggcaca

SEQ ID NO: 4509735 - DNA, 25 bp, Homo sapien
cacagcttcccactagaggtgcggg

SEQ ID NO: 4509736 - DNA, 25 bp, Homo sapien
ctcgctgtgactcggggctagaaac

SEQ ID NO: 4509737 - DNA, 25 bp, Homo sapien
gattttcagctagactggcaccaag

SEQ ID NO: 4509738 - DNA, 25 bp, Homo sapien
tattgtggcattctgtccaagggca

SEQ ID NO: 4509739 - DNA, 25 bp, Homo sapien
ggaagtcttccataacctaattgtg

SEQ ID NO: 4509740 - DNA, 25 bp, Homo sapien
caaaaatggtagctggcatcgatca

SEQ ID NO: 4509741 - DNA, 25 bp, Homo sapien
tatacaccccgagtgtgcacacagg

SEQ ID NO: 4509742 - DNA, 25 bp, Homo sapien
tgcatgggcagagaccagtagatgt

SEQ ID NO: 4509743 - DNA, 25 bp, Homo sapien
taagagggccattaaatcaggacat

SEQ ID NO: 4509744 - DNA, 25 bp, Homo sapien
ttcacataaataccgctcccatgag

SEQ ID NO: 4509745 - DNA, 25 bp, Homo sapien
ggctttgtctgctaagatcagagca

SEQ ID NO: 4509746 - DNA, 25 bp, Homo sapien
tcaacaccactgagaactggcatga

SEQ ID NO: 4509747 - DNA, 25 bp, Homo sapien
caatttgcaagctttactgagggac

SEQ ID NO: 4509748 - DNA, 25 bp, Homo sapien
gatgcagagaatgagcgatggcttt

SEQ ID NO: 4509749 - DNA, 25 bp, Homo sapien
gtggctgcagaatttcacttttcgc

SEQ ID NO: 4509750 - DNA, 25 bp, Homo sapien
ttttcgctttatctctgctgtccat

SEQ ID NO: 4509751 - DNA, 25 bp, Homo sapien
cacttttcgctttatctctgctgtc

SEQ ID NO: 4509752 - DNA, 25 bp, Homo sapien
ttcacttttcgctttatctctgctg

SEQ ID NO: 4509753 - DNA, 25 bp, Homo sapien
cctccaggtgtcatctgaggtcatg

SEQ ID NO: 4509754 - DNA, 25 bp, Homo sapien
tccaggtgtcatctgaggtcatgtg

SEQ ID NO: 4509755 - DNA, 25 bp, Homo sapien
ccaggtgtcatctgaggtcatgtgg

SEQ ID NO: 4509756 - DNA, 25 bp, Homo sapien
ctccaggtgtcatctgaggtcatgt

SEQ ID NO: 4509757 - DNA, 25 bp, Homo sapien
tctgtactagcgagttccaaggccc

SEQ ID NO: 4509758 - DNA, 25 bp, Homo sapien
taacttgaaagtcggtctgtactag

SEQ ID NO: 4509759 - DNA, 25 bp, Homo sapien
taaatgacagtcagggcaagaatca

SEQ ID NO: 4509760 - DNA, 25 bp, Homo sapien
gctaatttccctgagacgcatgagg

SEQ ID NO: 4509761 - DNA, 25 bp, Homo sapien
ccgtgagagggttcgcgacagaatc

SEQ ID NO: 4509762 - DNA, 25 bp, Homo sapien
agctgccgtgagagggttcgcgaca

SEQ ID NO: 4509763 - DNA, 25 bp, Homo sapien
cgcgacagaatcaccgcgaagggcg

SEQ ID NO: 4509764 - DNA, 25 bp, Homo sapien
gagagggttcgcgacagaatcaccg

SEQ ID NO: 4509765 - DNA, 25 bp, Homo sapien
ccaggtttcctcgtctggggagcgc

SEQ ID NO: 4509766 - DNA, 25 bp, Homo sapien
ctggctccgggagaccaggtttcct

SEQ ID NO: 4509767 - DNA, 25 bp, Homo sapien
ctcgtctggggagcgcagcagtctc

SEQ ID NO: 4509768 - DNA, 25 bp, Homo sapien
tggctccgggagaccaggtttcctc

SEQ ID NO: 4509769 - DNA, 25 bp, Homo sapien
ttccacctgtgggtgagatcatgca

SEQ ID NO: 4509770 - DNA, 25 bp, Homo sapien
aagattccacctgtgggtgagatca

SEQ ID NO: 4509771 - DNA, 25 bp, Homo sapien
ctttgtttcagttgtttcaactttg

SEQ ID NO: 4509772 - DNA, 25 bp, Homo sapien
gtttcaactttgtcaaaatcatgaa

SEQ ID NO: 4509773 - DNA, 25 bp, Homo sapien
ttttggtggagtccccctctgtcac

SEQ ID NO: 4509774 - DNA, 25 bp, Homo sapien
cctctctcacccattttccaaggtt

SEQ ID NO: 4509775 - DNA, 25 bp, Homo sapien
tttttggtggagtccccctctgtca

SEQ ID NO: 4509776 - DNA, 25 bp, Homo sapien
ctctcacccattttccaaggtttgt

SEQ ID NO: 4509777 - DNA, 25 bp, Homo sapien
agtagaagtacttgataaaaccatc

SEQ ID NO: 4509778 - DNA, 25 bp, Homo sapien
acagcttggagtagttgatataaat

SEQ ID NO: 4509779 - DNA, 25 bp, Homo sapien
ataaatagagtagaagtacttgata

SEQ ID NO: 4509780 - DNA, 25 bp, Homo sapien
cagcttggagtagttgatataaata

SEQ ID NO: 4509781 - DNA, 25 bp, Homo sapien
taactgtcaatacgggctttggccc

SEQ ID NO: 4509782 - DNA, 25 bp, Homo sapien
tctggagatgcctggtttataactg

SEQ ID NO: 4509783 - DNA, 25 bp, Homo sapien
tttggcccacttgcactggacctgg

SEQ ID NO: 4509784 - DNA, 25 bp, Homo sapien
cactgcttgggtcataaagctgtca

SEQ ID NO: 4509785 - DNA, 25 bp, Homo sapien
tccctgctggactctgatacgtact

SEQ ID NO: 4509786 - DNA, 25 bp, Homo sapien
cctgctggactctgatacgtactgc

SEQ ID NO: 4509787 - DNA, 25 bp, Homo sapien
gctggactctgatacgtactgcact

SEQ ID NO: 4509788 - DNA, 25 bp, Homo sapien
tggactctgatacgtactgcactag

SEQ ID NO: 4509789 - DNA, 25 bp, Homo sapien
ttcccctttcaggaggtgcccatgg

SEQ ID NO: 4509790 - DNA, 25 bp, Homo sapien
gagaactttaatcccaatgacagga

SEQ ID NO: 4509791 - DNA, 25 bp, Homo sapien
gggtctaattggtgactggcagtca

SEQ ID NO: 4509792 - DNA, 25 bp, Homo sapien
gaaaccatgaacgtgggtactttga

SEQ ID NO: 4509793 - DNA, 25 bp, Homo sapien
taactgggaaagctcatagcaggga

SEQ ID NO: 4509794 - DNA, 25 bp, Homo sapien
gcataaggtttttccgagatggtaa

SEQ ID NO: 4509795 - DNA, 25 bp, Homo sapien
ggtaatatttggttacagtaagatc

SEQ ID NO: 4509796 - DNA, 25 bp, Homo sapien
tgttatttcacaggaaacccaacag

SEQ ID NO: 4509797 - DNA, 25 bp, Homo sapien
ctcctgcacacacagccagcattct

SEQ ID NO: 4509798 - DNA, 25 bp, Homo sapien
cagcattcttatctgtgatggcttc

SEQ ID NO: 4509799 - DNA, 25 bp, Homo sapien
gcacacacagccagcattcttatct

SEQ ID NO: 4509800 - DNA, 25 bp, Homo sapien
gtgatggcttcaggagggcaccagt

SEQ ID NO: 4509801 - DNA, 25 bp, Homo sapien
tatcaatgagtgctgaggtcacggt

SEQ ID NO: 4509802 - DNA, 25 bp, Homo sapien
gcctgcgttgggttcttacagccat

SEQ ID NO: 4509803 - DNA, 25 bp, Homo sapien
atggacatcctgagccctacggcag

SEQ ID NO: 4509804 - DNA, 25 bp, Homo sapien
tgtgactgctgtattagccatggcg

SEQ ID NO: 4509805 - DNA, 25 bp, Homo sapien
ttacaccggtgtttgggtctgcatt

SEQ ID NO: 4509806 - DNA, 25 bp, Homo sapien
agttacaccggtgtttgggtctgca

SEQ ID NO: 4509807 - DNA, 25 bp, Homo sapien
gttacaccggtgtttgggtctgcat

SEQ ID NO: 4509808 - DNA, 25 bp, Homo sapien
gacgctggacaggaaataatttctg

SEQ ID NO: 4509809 - DNA, 25 bp, Homo sapien
ataggacgctggacaggaaataatt

SEQ ID NO: 4509810 - DNA, 25 bp, Homo sapien
ggacgctggacaggaaataatttct

SEQ ID NO: 4509811 - DNA, 25 bp, Homo sapien
taggacgctggacaggaaataattt

SEQ ID NO: 4509812 - DNA, 25 bp, Homo sapien
ggaggcctcattgctttaccatgca

SEQ ID NO: 4509813 - DNA, 25 bp, Homo sapien
catgacatagaagctggtttgtccc

SEQ ID NO: 4509814 - DNA, 25 bp, Homo sapien
gctttaccatgcagatctctccaat

SEQ ID NO: 4509815 - DNA, 25 bp, Homo sapien
tgctcatgacatagaagctggtttg

SEQ ID NO: 4509816 - DNA, 25 bp, Homo sapien
gagagaggtcatcctaccgtgattc

SEQ ID NO: 4509817 - DNA, 25 bp, Homo sapien
ggtcatcctaccgtgattctggaag

SEQ ID NO: 4509818 - DNA, 25 bp, Homo sapien
ctcaatttcaaagttgcgtggatat

SEQ ID NO: 4509819 - DNA, 25 bp, Homo sapien
gtggatatacgtaacttccaagcag

SEQ ID NO: 4509820 - DNA, 25 bp, Homo sapien
tcatctagttgagcctgagccaagg

SEQ ID NO: 4509821 - DNA, 25 bp, Homo sapien
cctaattcgtcagacaagggcggag

SEQ ID NO: 4509822 - DNA, 25 bp, Homo sapien
ctcccgaggagacgcagaaatgctg

SEQ ID NO: 4509823 - DNA, 25 bp, Homo sapien
cagctttgatgtagggcatggccct

SEQ ID NO: 4509824 - DNA, 25 bp, Homo sapien
ccaagtcatcgctttcaggatctga

SEQ ID NO: 4509825 - DNA, 25 bp, Homo sapien
caagtcatcgctttcaggatctgac

SEQ ID NO: 4509826 - DNA, 25 bp, Homo sapien
acccaagtcatcgctttcaggatct

SEQ ID NO: 4509827 - DNA, 25 bp, Homo sapien
aagtcatcgctttcaggatctgact

SEQ ID NO: 4509828 - DNA, 25 bp, Homo sapien
agcttgtgacgcaacgtacccgaca

SEQ ID NO: 4509829 - DNA, 25 bp, Homo sapien
tctgtaacacggtgaccacaagccc

SEQ ID NO: 4509830 - DNA, 25 bp, Homo sapien
gctgtttagaaaagtgcggctcagg

SEQ ID NO: 4509831 - DNA, 25 bp, Homo sapien
tagaggtctgtacatattgggcaaa

SEQ ID NO: 4509832 - DNA, 25 bp, Homo sapien
gaggagagatggatccttgccttcc

SEQ ID NO: 4509833 - DNA, 25 bp, Homo sapien
ctagggctctgagacataaagcggg

SEQ ID NO: 4509834 - DNA, 25 bp, Homo sapien
gaggaactcttaaaacgaggagaga

SEQ ID NO: 4509835 - DNA, 25 bp, Homo sapien
cagccagggaggctacagccatgag

SEQ ID NO: 4509836 - DNA, 25 bp, Homo sapien
gaaatgtagtgctttagctgcccca

SEQ ID NO: 4509837 - DNA, 25 bp, Homo sapien
gctgccccaataatataagtgtctg

SEQ ID NO: 4509838 - DNA, 25 bp, Homo sapien
cctgagagaaatacggccttgggca

SEQ ID NO: 4509839 - DNA, 25 bp, Homo sapien
aagtcttctgcttacacccgcttgg

SEQ ID NO: 4509840 - DNA, 25 bp, Homo sapien
ggctccttccgagccctggagtcat

SEQ ID NO: 4509841 - DNA, 25 bp, Homo sapien
gaggggctccttccgagccctggag

SEQ ID NO: 4509842 - DNA, 25 bp, Homo sapien
ggggctccttccgagccctggagtc

SEQ ID NO: 4509843 - DNA, 25 bp, Homo sapien
tgaggggctccttccgagccctgga

SEQ ID NO: 4509844 - DNA, 25 bp, Homo sapien
tagccttaagttgtgtaggatttgg

SEQ ID NO: 4509845 - DNA, 25 bp, Homo sapien
taccttgtatatagggactcataag

SEQ ID NO: 4509846 - DNA, 25 bp, Homo sapien
taagctagtccatagaacaatctct

SEQ ID NO: 4509847 - DNA, 25 bp, Homo sapien
ggtacctattacatggattaaatag

SEQ ID NO: 4509848 - DNA, 25 bp, Homo sapien
aataaaagccggcagcattgttgta

SEQ ID NO: 4509849 - DNA, 25 bp, Homo sapien
tgtagccatattgaaagctccaggg

SEQ ID NO: 4509850 - DNA, 25 bp, Homo sapien
ttggcaaaataaaagccggcagcat

SEQ ID NO: 4509851 - DNA, 25 bp, Homo sapien
gccggcagcattgttgtagccatat

SEQ ID NO: 4509852 - DNA, 25 bp, Homo sapien
tccttacagctatacccaagggagt

SEQ ID NO: 4509853 - DNA, 25 bp, Homo sapien
tgaaacgagctcctctttttcttgt

SEQ ID NO: 4509854 - DNA, 25 bp, Homo sapien
tactgtgagaccaaggatagcccaa

SEQ ID NO: 4509855 - DNA, 25 bp, Homo sapien
tgtcagaatggctgaaacgagctcc

SEQ ID NO: 4509856 - DNA, 25 bp, Homo sapien
tcagctatcatgaatttcagcgcat

SEQ ID NO: 4509857 - DNA, 25 bp, Homo sapien
tattattgagcatatctgcaagcac

SEQ ID NO: 4509858 - DNA, 25 bp, Homo sapien
gaatattaggaacaaaacatgggat

SEQ ID NO: 4509859 - DNA, 25 bp, Homo sapien
tataaggtgcatgtcaatgtgcatc

SEQ ID NO: 4509860 - DNA, 25 bp, Homo sapien
cccttggatttttgccatgctgtga

SEQ ID NO: 4509861 - DNA, 25 bp, Homo sapien
tcccttggatttttgccatgctgtg

SEQ ID NO: 4509862 - DNA, 25 bp, Homo sapien
ttcccttggatttttgccatgctgt

SEQ ID NO: 4509863 - DNA, 25 bp, Homo sapien
cttcccttggatttttgccatgctg

SEQ ID NO: 4509864 - DNA, 25 bp, Homo sapien
ggcagaagccaacggagaactcatt

SEQ ID NO: 4509865 - DNA, 25 bp, Homo sapien
gaagaacgtgggtccctgatggccc

SEQ ID NO: 4509866 - DNA, 25 bp, Homo sapien
ttgatgatatcgaggcaggagcacc

SEQ ID NO: 4509867 - DNA, 25 bp, Homo sapien
gcaaatcagtcttggaccaggcaga

SEQ ID NO: 4509868 - DNA, 25 bp, Homo sapien
tacctgagccttgtggagagacgcc

SEQ ID NO: 4509869 - DNA, 25 bp, Homo sapien
ttatttcagatctggtacctgagcc

SEQ ID NO: 4509870 - DNA, 25 bp, Homo sapien
gtctgctgagtaccccttgtgtccc

SEQ ID NO: 4509871 - DNA, 25 bp, Homo sapien
tgaggtctgaagcaaacgtagtgaa

SEQ ID NO: 4509872 - DNA, 25 bp, Homo sapien
gctcggcccggacactgcgcagccc

SEQ ID NO: 4509873 - DNA, 25 bp, Homo sapien
agtctgcggcgcaccggctcggccc

SEQ ID NO: 4509874 - DNA, 25 bp, Homo sapien
ctcggcccggacactgcgcagcccg

SEQ ID NO: 4509875 - DNA, 25 bp, Homo sapien
gtctgcggcgcaccggctcggcccg

SEQ ID NO: 4509876 - DNA, 25 bp, Homo sapien
ggctcctccgcgctccctggcccga

SEQ ID NO: 4509877 - DNA, 25 bp, Homo sapien
ctcctccgcgctccctggcccgagg

SEQ ID NO: 4509878 - DNA, 25 bp, Homo sapien
cctccgcgctccctggcccgaggcg

SEQ ID NO: 4509879 - DNA, 25 bp, Homo sapien
tccgcgctccctggcccgaggcgcc

SEQ ID NO: 4509880 - DNA, 25 bp, Homo sapien
tccaggttgcggatggggcgcggca

SEQ ID NO: 4509881 - DNA, 25 bp, Homo sapien
ttcctgtccggctgcccgttttcca

SEQ ID NO: 4509882 - DNA, 25 bp, Homo sapien
tgtccggctgcccgttttccacggc

SEQ ID NO: 4509883 - DNA, 25 bp, Homo sapien
ccacggccccgttagcggtggccat

SEQ ID NO: 4509884 - DNA, 25 bp, Homo sapien
ggaggctcgggtctcggcggcgccc

SEQ ID NO: 4509885 - DNA, 25 bp, Homo sapien
tcccgcgaaaggtgcggtttctgga

SEQ ID NO: 4509886 - DNA, 25 bp, Homo sapien
cgccccgagtctggctgcccagcgc

SEQ ID NO: 4509887 - DNA, 25 bp, Homo sapien
gatcccgcccgagacgtcccgcgaa

SEQ ID NO: 4509888 - DNA, 25 bp, Homo sapien
gtataaactaagcacggaaggcgcc

SEQ ID NO: 4509889 - DNA, 25 bp, Homo sapien
tgtgtgtaaacaccgggacctctgg

SEQ ID NO: 4509890 - DNA, 25 bp, Homo sapien
gaaattctctaagtgcggtgtcagc

SEQ ID NO: 4509891 - DNA, 25 bp, Homo sapien
gaggctcagccgacattgggaatta

SEQ ID NO: 4509892 - DNA, 25 bp, Homo sapien
agggcactggttggccaccctcagc

SEQ ID NO: 4509893 - DNA, 25 bp, Homo sapien
tgccagggcactggttggccaccct

SEQ ID NO: 4509894 - DNA, 25 bp, Homo sapien
actgtgccagggcactggttggcca

SEQ ID NO: 4509895 - DNA, 25 bp, Homo sapien
tgtgccagggcactggttggccacc

SEQ ID NO: 4509896 - DNA, 25 bp, Homo sapien
gcctcagtcctgcacttcagtttat

SEQ ID NO: 4509897 - DNA, 25 bp, Homo sapien
ggtggcctcactctcggccgcctct

SEQ ID NO: 4509898 - DNA, 25 bp, Homo sapien
tgggcctcagtcctgcacttcagtt

SEQ ID NO: 4509899 - DNA, 25 bp, Homo sapien
gcacttcagtttatcccgctccttc

SEQ ID NO: 4509900 - DNA, 25 bp, Homo sapien
actttttcccactcttggattcgtg

SEQ ID NO: 4509901 - DNA, 25 bp, Homo sapien
actcttggattcgtgccattcattg

SEQ ID NO: 4509902 - DNA, 25 bp, Homo sapien
cacatatttgctcccgagttgaagg

SEQ ID NO: 4509903 - DNA, 25 bp, Homo sapien
tgaagggttacatgtagcaaacttt

SEQ ID NO: 4509904 - DNA, 25 bp, Homo sapien
agaataatcacaacggaaccttctt

SEQ ID NO: 4509905 - DNA, 25 bp, Homo sapien
tagaataatcacaacggaaccttct

SEQ ID NO: 4509906 - DNA, 25 bp, Homo sapien
ttgtgcactgatagaataatcacaa

SEQ ID NO: 4509907 - DNA, 25 bp, Homo sapien
tttgtgcactgatagaataatcaca

SEQ ID NO: 4509908 - DNA, 25 bp, Homo sapien
tcgtggaacagttcgcagacaggga

SEQ ID NO: 4509909 - DNA, 25 bp, Homo sapien
agggaggagcatgaaggccgttttt

SEQ ID NO: 4509910 - DNA, 25 bp, Homo sapien
catcgtggaacagttcgcagacagg

SEQ ID NO: 4509911 - DNA, 25 bp, Homo sapien
agcatgaaggccgtttttctccctt

SEQ ID NO: 4509912 - DNA, 25 bp, Homo sapien
gcgccatggcgagcccctctggaag

SEQ ID NO: 4509913 - DNA, 25 bp, Homo sapien
gcccacgactcagggcatccagccg

SEQ ID NO: 4509914 - DNA, 25 bp, Homo sapien
cggcgccatggcgagcccctctgga

SEQ ID NO: 4509915 - DNA, 25 bp, Homo sapien
agcagccgcccacgactcagggcat

SEQ ID NO: 4509916 - DNA, 25 bp, Homo sapien
ggagctcgagtttctgtgtggatgc

SEQ ID NO: 4509917 - DNA, 25 bp, Homo sapien
tgtggatgcacccttagggaaatgc

SEQ ID NO: 4509918 - DNA, 25 bp, Homo sapien
caagagtacggcctgagagttcctc

SEQ ID NO: 4509919 - DNA, 25 bp, Homo sapien
gaaatgcacccaagagtacggcctg

SEQ ID NO: 4509920 - DNA, 25 bp, Homo sapien
ccggggaacatgtggactggccggg

SEQ ID NO: 4509921 - DNA, 25 bp, Homo sapien
gggaacatgtggactggccgggctg

SEQ ID NO: 4509922 - DNA, 25 bp, Homo sapien
ggaacatgtggactggccgggctga

SEQ ID NO: 4509923 - DNA, 25 bp, Homo sapien
ggggaacatgtggactggccgggct

SEQ ID NO: 4509924 - DNA, 25 bp, Homo sapien
cagcgcactgggttgctaaagacca

SEQ ID NO: 4509925 - DNA, 25 bp, Homo sapien
taggaggcaactacatctgctgaac

SEQ ID NO: 4509926 - DNA, 25 bp, Homo sapien
aaggccacccagtaatgcagcagct

SEQ ID NO: 4509927 - DNA, 25 bp, Homo sapien
cacagggccagcgttagagtgaaag

SEQ ID NO: 4509928 - DNA, 25 bp, Homo sapien
gccaggcggatttaaagctgtgctg

SEQ ID NO: 4509929 - DNA, 25 bp, Homo sapien
gctaaaacatagacatgcaccctct

SEQ ID NO: 4509930 - DNA, 25 bp, Homo sapien
caaaacacctaaagtgggctgcagg

SEQ ID NO: 4509931 - DNA, 25 bp, Homo sapien
ggaaggaacgcacactggcatctga

SEQ ID NO: 4509932 - DNA, 25 bp, Homo sapien
ctgtttcggacatagcttgcttttc

SEQ ID NO: 4509933 - DNA, 25 bp, Homo sapien
tgtctgtttcggacatagcttgctt

SEQ ID NO: 4509934 - DNA, 25 bp, Homo sapien
gatgatgtctgtttcggacatagct

SEQ ID NO: 4509935 - DNA, 25 bp, Homo sapien
tgatgtctgtttcggacatagcttg

SEQ ID NO: 4509936 - DNA, 25 bp, Homo sapien
ttccctgtatccatcgtctccaggg

SEQ ID NO: 4509937 - DNA, 25 bp, Homo sapien
cctccaggtcgatgaaaaaagcatg

SEQ ID NO: 4509938 - DNA, 25 bp, Homo sapien
gtatctgagggttctaatacagccc

SEQ ID NO: 4509939 - DNA, 25 bp, Homo sapien
gaaatggcttccctgtatccatcgt

SEQ ID NO: 4509940 - DNA, 25 bp, Homo sapien
gaaagaaaccaacaagggtgccaga

SEQ ID NO: 4509941 - DNA, 25 bp, Homo sapien
cacttagtccaggttaggaacttca

SEQ ID NO: 4509942 - DNA, 25 bp, Homo sapien
gggtgccagattcaagtcttgtcta

SEQ ID NO: 4509943 - DNA, 25 bp, Homo sapien
cttgtctattatacagagaagtgat

SEQ ID NO: 4509944 - DNA, 25 bp, Homo sapien
accaatgggctcatgcctggtgaag

SEQ ID NO: 4509945 - DNA, 25 bp, Homo sapien
cacagacaccaatgggctcatgcct

SEQ ID NO: 4509946 - DNA, 25 bp, Homo sapien
gagtgatggccccacagacaccaat

SEQ ID NO: 4509947 - DNA, 25 bp, Homo sapien
cctggtgaagcacacgacgttgtca

SEQ ID NO: 4509948 - DNA, 25 bp, Homo sapien
tctgtggcatgcctaaagccggtct

SEQ ID NO: 4509949 - DNA, 25 bp, Homo sapien
tctgggtggtactaataggcagcct

SEQ ID NO: 4509950 - DNA, 25 bp, Homo sapien
tttaaggcccagctaagagaccacc

SEQ ID NO: 4509951 - DNA, 25 bp, Homo sapien
tccatgccacgaagaaaatgcttgt

SEQ ID NO: 4509952 - DNA, 25 bp, Homo sapien
tctttgatcagagagccgagataaa

SEQ ID NO: 4509953 - DNA, 25 bp, Homo sapien
ggtgttcccacagcagagggcgggt

SEQ ID NO: 4509954 - DNA, 25 bp, Homo sapien
tgagaggtgtctgctccgcaggctt

SEQ ID NO: 4509955 - DNA, 25 bp, Homo sapien
gagccgagataaagggcggtgagag

SEQ ID NO: 4509956 - DNA, 25 bp, Homo sapien
gagaaagaacgtgcagtcgccaaac

SEQ ID NO: 4509957 - DNA, 25 bp, Homo sapien
tggaaaattggctcatcaccagctg

SEQ ID NO: 4509958 - DNA, 25 bp, Homo sapien
taagcattctcattaggaccactgg

SEQ ID NO: 4509959 - DNA, 25 bp, Homo sapien
tatgccccacatcaccaaaggaaag

SEQ ID NO: 4509960 - DNA, 25 bp, Homo sapien
gtgagaagaaattgctgctcccact

SEQ ID NO: 4509961 - DNA, 25 bp, Homo sapien
atcttgttgatctgagggtgagaag

SEQ ID NO: 4509962 - DNA, 25 bp, Homo sapien
tgtgggcccgaatcctggcacaatg

SEQ ID NO: 4509963 - DNA, 25 bp, Homo sapien
ctgtggagccggtgaaggcgatctt

SEQ ID NO: 4509964 - DNA, 25 bp, Homo sapien
tccccagcaccctgtgaggagggtt

SEQ ID NO: 4509965 - DNA, 25 bp, Homo sapien
tttccccagcaccctgtgaggaggg

SEQ ID NO: 4509966 - DNA, 25 bp, Homo sapien
cccagcaccctgtgaggagggttac

SEQ ID NO: 4509967 - DNA, 25 bp, Homo sapien
ttccccagcaccctgtgaggagggt

SEQ ID NO: 4509968 - DNA, 25 bp, Homo sapien
cccaggcgtaaacatcagtgaacat

SEQ ID NO: 4509969 - DNA, 25 bp, Homo sapien
ttggcccaggcgtaaacatcagtga

SEQ ID NO: 4509970 - DNA, 25 bp, Homo sapien
cttggcccaggcgtaaacatcagtg

SEQ ID NO: 4509971 - DNA, 25 bp, Homo sapien
ggcccaggcgtaaacatcagtgaac

SEQ ID NO: 4509972 - DNA, 25 bp, Homo sapien
tccaggacagaacacagatcacaat

SEQ ID NO: 4509973 - DNA, 25 bp, Homo sapien
cacacacgatgcaggggttcttccc

SEQ ID NO: 4509974 - DNA, 25 bp, Homo sapien
cgggacgcagcttctttaaccagtt

SEQ ID NO: 4509975 - DNA, 25 bp, Homo sapien
gtcacccgcttcagattgctccggg

SEQ ID NO: 4509976 - DNA, 25 bp, Homo sapien
agcgtccgcacacacgatgcagggg

SEQ ID NO: 4509977 - DNA, 25 bp, Homo sapien
tcccaacttggaactgcccctcctc

SEQ ID NO: 4509978 - DNA, 25 bp, Homo sapien
tggaactgcccctcctccgagataa

SEQ ID NO: 4509979 - DNA, 25 bp, Homo sapien
tccgagataacagactcatttcctg

SEQ ID NO: 4509980 - DNA, 25 bp, Homo sapien
cctcctccgagataacagactcatt

SEQ ID NO: 4509981 - DNA, 25 bp, Homo sapien
ttggttgaagaacactccctgatgg

SEQ ID NO: 4509982 - DNA, 25 bp, Homo sapien
tcagagtagacctgctcctccacga

SEQ ID NO: 4509983 - DNA, 25 bp, Homo sapien
gaggctgccgtgcaacactggcctt

SEQ ID NO: 4509984 - DNA, 25 bp, Homo sapien
gctccgcctgacaaactcagagtag

SEQ ID NO: 4509985 - DNA, 25 bp, Homo sapien
caaagtgagtgactgctgagctcca

SEQ ID NO: 4509986 - DNA, 25 bp, Homo sapien
acaggatgtgccgttttaaagagga

SEQ ID NO: 4509987 - DNA, 25 bp, Homo sapien
tgtaacccacgtgggcttgagggcc

SEQ ID NO: 4509988 - DNA, 25 bp, Homo sapien
tccagagacatgttcctactgcctg

SEQ ID NO: 4509989 - DNA, 25 bp, Homo sapien
gattttgtcgaactgcttttgatca

SEQ ID NO: 4509990 - DNA, 25 bp, Homo sapien
gggtttgatgaagagccccttgtct

SEQ ID NO: 4509991 - DNA, 25 bp, Homo sapien
ttcccactctcgatcagctctaaga

SEQ ID NO: 4509992 - DNA, 25 bp, Homo sapien
tggcaatccgcatgttgtctgtgac

SEQ ID NO: 4509993 - DNA, 25 bp, Homo sapien
ttttttgtgaacacggctgctgtga

SEQ ID NO: 4509994 - DNA, 25 bp, Homo sapien
gaccgttccagactctaaggcagaa

SEQ ID NO: 4509995 - DNA, 25 bp, Homo sapien
tcagtattggttgcactggcccgaa

SEQ ID NO: 4509996 - DNA, 25 bp, Homo sapien
gctgctgtgagtccatagtcggtgc

SEQ ID NO: 4509997 - DNA, 25 bp, Homo sapien
taaagccaccaaatggagcctgtgc

SEQ ID NO: 4509998 - DNA, 25 bp, Homo sapien
cctgtgcatagagggcgttgtagca

SEQ ID NO: 4509999 - DNA, 25 bp, Homo sapien
agccaccaaatggagcctgtgcata

SEQ ID NO: 4510000 - DNA, 25 bp, Homo sapien
catagagggcgttgtagcagttgat

SEQ ID NO: 4510001 - DNA, 25 bp, Homo sapien
caggctgaggatgtaagtgggaagg

SEQ ID NO: 4510002 - DNA, 25 bp, Homo sapien
gaggggggcaggctgaggatgtaag

SEQ ID NO: 4510003 - DNA, 25 bp, Homo sapien
gggcaggctgaggatgtaagtggga

SEQ ID NO: 4510004 - DNA, 25 bp, Homo sapien
ctgaggatgtaagtgggaagggtgg

SEQ ID NO: 4510005 - DNA, 25 bp, Homo sapien
gggagttgtgtgaataatgacaccc

SEQ ID NO: 4510006 - DNA, 25 bp, Homo sapien
cccacatctggcaaaagtacacttt

SEQ ID NO: 4510007 - DNA, 25 bp, Homo sapien
ttcagttctgcctgtgtccccgtcc

SEQ ID NO: 4510008 - DNA, 25 bp, Homo sapien
tgtccccgtccagggagcttttgtc

SEQ ID NO: 4510009 - DNA, 25 bp, Homo sapien
ggaagcgtttgagtctgttcccgct

SEQ ID NO: 4510010 - DNA, 25 bp, Homo sapien
aggaccccaattccacatagactgg

SEQ ID NO: 4510011 - DNA, 25 bp, Homo sapien
catagactggtcaagaacatctgtt

SEQ ID NO: 4510012 - DNA, 25 bp, Homo sapien
tgttcccgctggaagaagtgcaaac

SEQ ID NO: 4510013 - DNA, 25 bp, Homo sapien
tactgatgtccgctgaaggcgaagc

SEQ ID NO: 4510014 - DNA, 25 bp, Homo sapien
gccttggagtatttgctgagagtca

SEQ ID NO: 4510015 - DNA, 25 bp, Homo sapien
atgtccgctgaaggcgaagccagcc

SEQ ID NO: 4510016 - DNA, 25 bp, Homo sapien
actcacaagtgcagacgccttggag

SEQ ID NO: 4510017 - DNA, 25 bp, Homo sapien
tgcaaaggggtttcatggccaacaa

SEQ ID NO: 4510018 - DNA, 25 bp, Homo sapien
gaagtgatgaagcaggggctcacag

SEQ ID NO: 4510019 - DNA, 25 bp, Homo sapien
acagaactcaaatgcaaacaggcca

SEQ ID NO: 4510020 - DNA, 25 bp, Homo sapien
caggccactagagggaggaaatgca

SEQ ID NO: 4510021 - DNA, 25 bp, Homo sapien
cagtgggacatctcctcaatggatt

SEQ ID NO: 4510022 - DNA, 25 bp, Homo sapien
tcactgcagtatgctcagagcctag

SEQ ID NO: 4510023 - DNA, 25 bp, Homo sapien
catgcctggtgaatcaaagatgctc

SEQ ID NO: 4510024 - DNA, 25 bp, Homo sapien
gtttacctctaacaaatgggactga

SEQ ID NO: 4510025 - DNA, 25 bp, Homo sapien
tgtatgcacaaggaagtacatcagc

SEQ ID NO: 4510026 - DNA, 25 bp, Homo sapien
aaagttcctcatgggagatcatcaa

SEQ ID NO: 4510027 - DNA, 25 bp, Homo sapien
cccagtctcaataacgaaatgtagc

SEQ ID NO: 4510028 - DNA, 25 bp, Homo sapien
gaaaatggtgctcaatgccatcatg

SEQ ID NO: 4510029 - DNA, 25 bp, Homo sapien
gacgacctcatggaataatagccag

SEQ ID NO: 4510030 - DNA, 25 bp, Homo sapien
catcattccatcaggccgttggagg

SEQ ID NO: 4510031 - DNA, 25 bp, Homo sapien
taacttttagatggcaattgggagc

SEQ ID NO: 4510032 - DNA, 25 bp, Homo sapien
tagagagcaaaacgagagagcctgg

SEQ ID NO: 4510033 - DNA, 25 bp, Homo sapien
tgtcgccaagtttgatggtgacagt

SEQ ID NO: 4510034 - DNA, 25 bp, Homo sapien
tgtattcggccaaagcgtattcacc

SEQ ID NO: 4510035 - DNA, 25 bp, Homo sapien
ttcacttctgtgtattcggccaaag

SEQ ID NO: 4510036 - DNA, 25 bp, Homo sapien
ggttcttgtcgccaagtttgatggt

SEQ ID NO: 4510037 - DNA, 25 bp, Homo sapien
ggtttgaagccgaatctcacggtca

SEQ ID NO: 4510038 - DNA, 25 bp, Homo sapien
tatctctgacaagggtgataggccc

SEQ ID NO: 4510039 - DNA, 25 bp, Homo sapien
tactggagtcagattcggcaaagca

SEQ ID NO: 4510040 - DNA, 25 bp, Homo sapien
tgtcccgggaaggtcagaaatgtca

SEQ ID NO: 4510041 - DNA, 25 bp, Homo sapien
cattctcgcattgtgggatgcgatc

SEQ ID NO: 4510042 - DNA, 25 bp, Homo sapien
gcattgtgggatgcgatctgcagct

SEQ ID NO: 4510043 - DNA, 25 bp, Homo sapien
tattttatcattctcgcattgtggg

SEQ ID NO: 4510044 - DNA, 25 bp, Homo sapien
gatgcgatctgcagctaggatcgga

SEQ ID NO: 4510045 - DNA, 25 bp, Homo sapien
atttcgcacactgacaccatcacta

SEQ ID NO: 4510046 - DNA, 25 bp, Homo sapien
cgtcaggggcacaatgctgtccgtc

SEQ ID NO: 4510047 - DNA, 25 bp, Homo sapien
tgtccgtcaatcctcatgcagtcct

SEQ ID NO: 4510048 - DNA, 25 bp, Homo sapien
gggcacaatgctgtccgtcaatcct

SEQ ID NO: 4510049 - DNA, 25 bp, Homo sapien
gttcccaggatttagcgcacatctc

SEQ ID NO: 4510050 - DNA, 25 bp, Homo sapien
cgtgttcccttgagcggcttcttgg

SEQ ID NO: 4510051 - DNA, 25 bp, Homo sapien
gggcccctctcctggaaagttatga

SEQ ID NO: 4510052 - DNA, 25 bp, Homo sapien
tgtcgacccggggacaaagcctgct

SEQ ID NO: 4510053 - DNA, 25 bp, Homo sapien
aagaatctgctgctcggtgagtcat

SEQ ID NO: 4510054 - DNA, 25 bp, Homo sapien
tgcggccgtaacagttaaacagacg

SEQ ID NO: 4510055 - DNA, 25 bp, Homo sapien
aagcgttaacgacctgcaatttgca

SEQ ID NO: 4510056 - DNA, 25 bp, Homo sapien
tcatgtgcgtagagctcttcacggg

SEQ ID NO: 4510057 - DNA, 25 bp, Homo sapien
ggccgggcggacacactggcggggc

SEQ ID NO: 4510058 - DNA, 25 bp, Homo sapien
ttcctcaatcctgaggcgggcgggc

SEQ ID NO: 4510059 - DNA, 25 bp, Homo sapien
cagacgcacttcctcaatcctgagg

SEQ ID NO: 4510060 - DNA, 25 bp, Homo sapien
gcgaagagcgcgcagagcaaggccg

SEQ ID NO: 4510061 - DNA, 25 bp, Homo sapien
gcattaaggcgtggactcgtagcca

SEQ ID NO: 4510062 - DNA, 25 bp, Homo sapien
ggtgcattaaggcgtggactcgtag

SEQ ID NO: 4510063 - DNA, 25 bp, Homo sapien
tgcattaaggcgtggactcgtagcc

SEQ ID NO: 4510064 - DNA, 25 bp, Homo sapien
ggggtgcattaaggcgtggactcgt

SEQ ID NO: 4510065 - DNA, 25 bp, Homo sapien
cagcagccgatcttcaaaggcaggt

SEQ ID NO: 4510066 - DNA, 25 bp, Homo sapien
tcccgctgttgtcactgccactgcc

SEQ ID NO: 4510067 - DNA, 25 bp, Homo sapien
cttgcagcagccgatcttcaaaggc

SEQ ID NO: 4510068 - DNA, 25 bp, Homo sapien
cagccgatcttcaaaggcaggtccc

SEQ ID NO: 4510069 - DNA, 25 bp, Homo sapien
taagcgtctccatggcacgttctgg

SEQ ID NO: 4510070 - DNA, 25 bp, Homo sapien
gttctggacacacagctgactcctc

SEQ ID NO: 4510071 - DNA, 25 bp, Homo sapien
cggccccacacaccagtacatgctg

SEQ ID NO: 4510072 - DNA, 25 bp, Homo sapien
ccagtacatgctggggggtctttgc

SEQ ID NO: 4510073 - DNA, 25 bp, Homo sapien
aggcataagcacagccctgtcctta

SEQ ID NO: 4510074 - DNA, 25 bp, Homo sapien
aggcaggcataagcacagccctgtc

SEQ ID NO: 4510075 - DNA, 25 bp, Homo sapien
ggcataagcacagccctgtccttac

SEQ ID NO: 4510076 - DNA, 25 bp, Homo sapien
acccaggcaggcataagcacagccc

SEQ ID NO: 4510077 - DNA, 25 bp, Homo sapien
aacagcaccgatgagcaaagcacag

SEQ ID NO: 4510078 - DNA, 25 bp, Homo sapien
gagggagcactgtaggctttagtcc

SEQ ID NO: 4510079 - DNA, 25 bp, Homo sapien
taaaattgggctttacagagggagc

SEQ ID NO: 4510080 - DNA, 25 bp, Homo sapien
tattcgtctggatgcaaaagaaggc

SEQ ID NO: 4510081 - DNA, 25 bp, Homo sapien
tgaaaatccttgtcgctctgcacag

SEQ ID NO: 4510082 - DNA, 25 bp, Homo sapien
gaatctggacaaactgaacccaagg

SEQ ID NO: 4510083 - DNA, 25 bp, Homo sapien
aagggactcagaattgggacttcca

SEQ ID NO: 4510084 - DNA, 25 bp, Homo sapien
gaacccaagggtggcctgaatagtg

SEQ ID NO: 4510085 - DNA, 25 bp, Homo sapien
cacggctgtgtcaagtccaaactaa

SEQ ID NO: 4510086 - DNA, 25 bp, Homo sapien
tcttaaccttcagggaggagtcagg

SEQ ID NO: 4510087 - DNA, 25 bp, Homo sapien
gaggccctgaaccttccatctctaa

SEQ ID NO: 4510088 - DNA, 25 bp, Homo sapien
ccaggagaatgctcatagtgcactg

SEQ ID NO: 4510089 - DNA, 25 bp, Homo sapien
gcaatgctgacataaacatcctggg

SEQ ID NO: 4510090 - DNA, 25 bp, Homo sapien
taggcacatggagatctagcacact

SEQ ID NO: 4510091 - DNA, 25 bp, Homo sapien
gagcagaggatatactcagtcctaa

SEQ ID NO: 4510092 - DNA, 25 bp, Homo sapien
gcgtttctgcccacgtagcaactat

SEQ ID NO: 4510093 - DNA, 25 bp, Homo sapien
tctttctattgtggtcaccgaatat

SEQ ID NO: 4510094 - DNA, 25 bp, Homo sapien
taattcatcgcaaagtatattctgt

SEQ ID NO: 4510095 - DNA, 25 bp, Homo sapien
ttttttacatataggtagctgctgc

SEQ ID NO: 4510096 - DNA, 25 bp, Homo sapien
tagctgtatcccttaagtgttagcg

SEQ ID NO: 4510097 - DNA, 25 bp, Homo sapien
tacgtacagtatgatgtcaccggaa

SEQ ID NO: 4510098 - DNA, 25 bp, Homo sapien
tgagtgtttctcatcaaagggtagt

SEQ ID NO: 4510099 - DNA, 25 bp, Homo sapien
tactaaattcggtttgctagtgtct

SEQ ID NO: 4510100 - DNA, 25 bp, Homo sapien
aaccaagcttggaatcctaagataa

SEQ ID NO: 4510101 - DNA, 25 bp, Homo sapien
ggaagacttggtttcaagccccagc

SEQ ID NO: 4510102 - DNA, 25 bp, Homo sapien
gacttgcagaatttcccagcgggct

SEQ ID NO: 4510103 - DNA, 25 bp, Homo sapien
tacacaaagagaagcggtgagcaca

SEQ ID NO: 4510104 - DNA, 25 bp, Homo sapien
gaacatttaggatgaggcaccgaga

SEQ ID NO: 4510105 - DNA, 25 bp, Homo sapien
tcagaataaggggctcggatgcggc

SEQ ID NO: 4510106 - DNA, 25 bp, Homo sapien
ataaggggctcggatgcggccatca

SEQ ID NO: 4510107 - DNA, 25 bp, Homo sapien
gaataaggggctcggatgcggccat

SEQ ID NO: 4510108 - DNA, 25 bp, Homo sapien
cagaataaggggctcggatgcggcc

SEQ ID NO: 4510109 - DNA, 25 bp, Homo sapien
cgagccctcgctgggtgcaggagga

SEQ ID NO: 4510110 - DNA, 25 bp, Homo sapien
gcctctcgccctccccgagcttcca

SEQ ID NO: 4510111 - DNA, 25 bp, Homo sapien
ggcggccacggcaggccgagccctc

SEQ ID NO: 4510112 - DNA, 25 bp, Homo sapien
ccgagccctcgctgggtgcaggagg

SEQ ID NO: 4510113 - DNA, 25 bp, Homo sapien
agacaggccacctcccgggggtgtg

SEQ ID NO: 4510114 - DNA, 25 bp, Homo sapien
cgcagctcggaggattctgcagcga

SEQ ID NO: 4510115 - DNA, 25 bp, Homo sapien
gagagccgcgggtctcagccacgct

SEQ ID NO: 4510116 - DNA, 25 bp, Homo sapien
ccgacctcgccgacagcagcggagg

SEQ ID NO: 4510117 - DNA, 25 bp, Homo sapien
ttctgcagcgagaccgccacctgga

SEQ ID NO: 4510118 - DNA, 25 bp, Homo sapien
actgcccgcgtgctcttgagaatca

SEQ ID NO: 4510119 - DNA, 25 bp, Homo sapien
ggcgcggcccgttgcacgatcgcgg

SEQ ID NO: 4510120 - DNA, 25 bp, Homo sapien
ccgttgcacgatcgcgggggcttca

SEQ ID NO: 4510121 - DNA, 25 bp, Homo sapien
gagaatcaccgtggaacacagcagg

SEQ ID NO: 4510122 - DNA, 25 bp, Homo sapien
ggatgccttccgtcctgcgggaccg

SEQ ID NO: 4510123 - DNA, 25 bp, Homo sapien
ttttccagctgggacgcgcactggt

SEQ ID NO: 4510124 - DNA, 25 bp, Homo sapien
cgcctgtacgcggcgcggatgcctt

SEQ ID NO: 4510125 - DNA, 25 bp, Homo sapien
gcgtggacggcttgccgcccgtgtc

SEQ ID NO: 4510126 - DNA, 25 bp, Homo sapien
caccacggctgggttgtcatccgtg

SEQ ID NO: 4510127 - DNA, 25 bp, Homo sapien
gcaattcctgcacaactgccgtgtg

SEQ ID NO: 4510128 - DNA, 25 bp, Homo sapien
taggtagcggaccatctccagatcc

SEQ ID NO: 4510129 - DNA, 25 bp, Homo sapien
gccgtgtgtccaaaatacgctgcca

SEQ ID NO: 4510130 - DNA, 25 bp, Homo sapien
agaagccgctggggactgcagggac

SEQ ID NO: 4510131 - DNA, 25 bp, Homo sapien
agttcagaagccgctggggactgca

SEQ ID NO: 4510132 - DNA, 25 bp, Homo sapien
ccagttcagaagccgctggggactg

SEQ ID NO: 4510133 - DNA, 25 bp, Homo sapien
tcagaagccgctggggactgcaggg

SEQ ID NO: 4510134 - DNA, 25 bp, Homo sapien
acttgatggccgcatacaggggcaa

SEQ ID NO: 4510135 - DNA, 25 bp, Homo sapien
gacagcgtagctctccgggtcagcc

SEQ ID NO: 4510136 - DNA, 25 bp, Homo sapien
gggtcagccccgtgcgtcaggacca

SEQ ID NO: 4510137 - DNA, 25 bp, Homo sapien
ggcaagcgcacgatgacagggaact

SEQ ID NO: 4510138 - DNA, 25 bp, Homo sapien
gtttttcccggataactgctgggca

SEQ ID NO: 4510139 - DNA, 25 bp, Homo sapien
tgtaggaacagaaataggccccatg

SEQ ID NO: 4510140 - DNA, 25 bp, Homo sapien
tcaggactatccagcaagatgtagg

SEQ ID NO: 4510141 - DNA, 25 bp, Homo sapien
gcaagggactggcttcaatgaagta

SEQ ID NO: 4510142 - DNA, 25 bp, Homo sapien
cactccacaggcagtgactactcac

SEQ ID NO: 4510143 - DNA, 25 bp, Homo sapien
acactccacaggcagtgactactca

SEQ ID NO: 4510144 - DNA, 25 bp, Homo sapien
aaacacactccacaggcagtgacta

SEQ ID NO: 4510145 - DNA, 25 bp, Homo sapien
acacactccacaggcagtgactact

SEQ ID NO: 4510146 - DNA, 25 bp, Homo sapien
acccagtctgcaggattctgttaca

SEQ ID NO: 4510147 - DNA, 25 bp, Homo sapien
tcatatcactgcatgaaggccctca

SEQ ID NO: 4510148 - DNA, 25 bp, Homo sapien
tacccagtctgcaggattctgttac

SEQ ID NO: 4510149 - DNA, 25 bp, Homo sapien
tccaccttcatatcactgcatgaag

SEQ ID NO: 4510150 - DNA, 25 bp, Homo sapien
tgctaactgtccagagcaaatgctt

SEQ ID NO: 4510151 - DNA, 25 bp, Homo sapien
taataataagatggaaagttcccca

SEQ ID NO: 4510152 - DNA, 25 bp, Homo sapien
ccccatgttattttgtaaagctagc

SEQ ID NO: 4510153 - DNA, 25 bp, Homo sapien
caagatagatataactgctagagtc

SEQ ID NO: 4510154 - DNA, 25 bp, Homo sapien
tccttcctgactgccggaaccctct

SEQ ID NO: 4510155 - DNA, 25 bp, Homo sapien
tgagtcatccttcctgactgccgga

SEQ ID NO: 4510156 - DNA, 25 bp, Homo sapien
cctctgcccggacccctctctgttc

SEQ ID NO: 4510157 - DNA, 25 bp, Homo sapien
tctgccagcagcaccgaaggaatgt

SEQ ID NO: 4510158 - DNA, 25 bp, Homo sapien
ggtgtgtcaggcagagctcaaccac

SEQ ID NO: 4510159 - DNA, 25 bp, Homo sapien
tattttctccctttgcgggcagagg

SEQ ID NO: 4510160 - DNA, 25 bp, Homo sapien
gactgcttgttgtaccagggctgga

SEQ ID NO: 4510161 - DNA, 25 bp, Homo sapien
taaaaaatactgaccagctggtgtg

SEQ ID NO: 4510162 - DNA, 25 bp, Homo sapien
cagcagtccagaccatacagtgtgg

SEQ ID NO: 4510163 - DNA, 25 bp, Homo sapien
ttagagagtgtgtcccagcagtcca

SEQ ID NO: 4510164 - DNA, 25 bp, Homo sapien
ggaaccttcttcatccaaacaccag

SEQ ID NO: 4510165 - DNA, 25 bp, Homo sapien
accatacagtgtggcctctggaacc

SEQ ID NO: 4510166 - DNA, 25 bp, Homo sapien
tcatgaccctcagagggtaggaaaa

SEQ ID NO: 4510167 - DNA, 25 bp, Homo sapien
cagggtttacttcatgaccctcaga

SEQ ID NO: 4510168 - DNA, 25 bp, Homo sapien
catgaccctcagagggtaggaaaag

SEQ ID NO: 4510169 - DNA, 25 bp, Homo sapien
tgggaacagtccagggtttacttca

SEQ ID NO: 4510170 - DNA, 25 bp, Homo sapien
aatctcctgtcactagttccagctt

SEQ ID NO: 4510171 - DNA, 25 bp, Homo sapien
gttccagcttaggaattttgccaat

SEQ ID NO: 4510172 - DNA, 25 bp, Homo sapien
tcctgtcactagttccagcttagga

SEQ ID NO: 4510173 - DNA, 25 bp, Homo sapien
tccagcttaggaattttgccaatag

SEQ ID NO: 4510174 - DNA, 25 bp, Homo sapien
gcctctgatctatagcgatgccctt

SEQ ID NO: 4510175 - DNA, 25 bp, Homo sapien
tactggcagtgatttgtggggttaa

SEQ ID NO: 4510176 - DNA, 25 bp, Homo sapien
ccagagcagcctctgatctatagcg

SEQ ID NO: 4510177 - DNA, 25 bp, Homo sapien
tatagcgatgccctttgccttccta

SEQ ID NO: 4510178 - DNA, 25 bp, Homo sapien
agatgggaccatttcacacggagag

SEQ ID NO: 4510179 - DNA, 25 bp, Homo sapien
gagatgggaccatttcacacggaga

SEQ ID NO: 4510180 - DNA, 25 bp, Homo sapien
gatgggaccatttcacacggagagc

SEQ ID NO: 4510181 - DNA, 25 bp, Homo sapien
cgagctccgtgatctggcaggagat

SEQ ID NO: 4510182 - DNA, 25 bp, Homo sapien
cagttggcagaaaggtcgagctccg

SEQ ID NO: 4510183 - DNA, 25 bp, Homo sapien
ggaacagatgatttcgtccgatgac

SEQ ID NO: 4510184 - DNA, 25 bp, Homo sapien
tccgatgactgcacgccaggcagct

SEQ ID NO: 4510185 - DNA, 25 bp, Homo sapien
ggaggtgggacaacttgttgctgga

SEQ ID NO: 4510186 - DNA, 25 bp, Homo sapien
tttttgaagttttgagaggtgcaag

SEQ ID NO: 4510187 - DNA, 25 bp, Homo sapien
tttttgaagctgtcagtttttgaag

SEQ ID NO: 4510188 - DNA, 25 bp, Homo sapien
gagggaggtgggacaacttgttgct

SEQ ID NO: 4510189 - DNA, 25 bp, Homo sapien
gaattgagggacttgaaagagtgaa

SEQ ID NO: 4510190 - DNA, 25 bp, Homo sapien
ttcctgtagcttccgtaaacctatc

SEQ ID NO: 4510191 - DNA, 25 bp, Homo sapien
cttccgtaaacctatccagttagtg

SEQ ID NO: 4510192 - DNA, 25 bp, Homo sapien
ttcagagaattgagggacttgaaag

SEQ ID NO: 4510193 - DNA, 25 bp, Homo sapien
ctgacataatgcacctgagggctct

SEQ ID NO: 4510194 - DNA, 25 bp, Homo sapien
tcatgacttttggtgtgatactcac

SEQ ID NO: 4510195 - DNA, 25 bp, Homo sapien
gggatgaactgacataatgcacctg

SEQ ID NO: 4510196 - DNA, 25 bp, Homo sapien
ccagctgagaggcagagttgactgt

SEQ ID NO: 4510197 - DNA, 25 bp, Homo sapien
gcgttttctgagaaatccacatcct

SEQ ID NO: 4510198 - DNA, 25 bp, Homo sapien
gaacttctttgagtgcgttttctga

SEQ ID NO: 4510199 - DNA, 25 bp, Homo sapien
ctttgagtgcgttttctgagaaatc

SEQ ID NO: 4510200 - DNA, 25 bp, Homo sapien
tcaagctggaaaagtcccaggggaa

SEQ ID NO: 4510201 - DNA, 25 bp, Homo sapien
gatccagggttttgagctgcctgca

SEQ ID NO: 4510202 - DNA, 25 bp, Homo sapien
cctgtaacctcaagaacatgagggc

SEQ ID NO: 4510203 - DNA, 25 bp, Homo sapien
ctcttgaggtggaagtgccgccagc

SEQ ID NO: 4510204 - DNA, 25 bp, Homo sapien
gagagatccagggttttgagctgcc

SEQ ID NO: 4510205 - DNA, 25 bp, Homo sapien
cggagcgctggcgacctctggtggt

SEQ ID NO: 4510206 - DNA, 25 bp, Homo sapien
gcttcgttttcagtccatcttcatt

SEQ ID NO: 4510207 - DNA, 25 bp, Homo sapien
aaaggcaatacgcttcgttttcagt

SEQ ID NO: 4510208 - DNA, 25 bp, Homo sapien
cgctggcgacctctggtggtgaaaa

SEQ ID NO: 4510209 - DNA, 25 bp, Homo sapien
tgtatatcagggacttaagccaatt

SEQ ID NO: 4510210 - DNA, 25 bp, Homo sapien
ctccctcatagcaaagttataccta

SEQ ID NO: 4510211 - DNA, 25 bp, Homo sapien
gacttggtttatgatgcttcccact

SEQ ID NO: 4510212 - DNA, 25 bp, Homo sapien
gccaatttgtgttgcaacaatttgt

SEQ ID NO: 4510213 - DNA, 25 bp, Homo sapien
gcacagaggttacagttgttagaca

SEQ ID NO: 4510214 - DNA, 25 bp, Homo sapien
cagagatgcactgaactccatagtt

SEQ ID NO: 4510215 - DNA, 25 bp, Homo sapien
gttacagttgttagacaggaacaca

SEQ ID NO: 4510216 - DNA, 25 bp, Homo sapien
accagagatgcactgaactccatag

SEQ ID NO: 4510217 - DNA, 25 bp, Homo sapien
caaagactcacttaggaaggccgga

SEQ ID NO: 4510218 - DNA, 25 bp, Homo sapien
actgtgtcgaggtggttgtcgttca

SEQ ID NO: 4510219 - DNA, 25 bp, Homo sapien
gctctgataagctcttcagtaggca

SEQ ID NO: 4510220 - DNA, 25 bp, Homo sapien
tcgttcaggcaaaggacttccaaag

SEQ ID NO: 4510221 - DNA, 25 bp, Homo sapien
tgtccaccacgagagaatacacaca

SEQ ID NO: 4510222 - DNA, 25 bp, Homo sapien
ctgaagacagatgtgtccaccacga

SEQ ID NO: 4510223 - DNA, 25 bp, Homo sapien
cacacacgtggctcctgtcagcctc

SEQ ID NO: 4510224 - DNA, 25 bp, Homo sapien
cacgcacacacgtggctcctgtcag

SEQ ID NO: 4510225 - DNA, 25 bp, Homo sapien
aggcacattgctgatggtcaggtct

SEQ ID NO: 4510226 - DNA, 25 bp, Homo sapien
gcacattgctgatggtcaggtcttc

SEQ ID NO: 4510227 - DNA, 25 bp, Homo sapien
ggcacattgctgatggtcaggtctt

SEQ ID NO: 4510228 - DNA, 25 bp, Homo sapien
caggcacattgctgatggtcaggtc

SEQ ID NO: 4510229 - DNA, 25 bp, Homo sapien
ggcctctggagctcccacttggtgg

SEQ ID NO: 4510230 - DNA, 25 bp, Homo sapien
ctgagcacgcaggtaagacagcatt

SEQ ID NO: 4510231 - DNA, 25 bp, Homo sapien
gcacttttccgctttccgcagctga

SEQ ID NO: 4510232 - DNA, 25 bp, Homo sapien
gcgggggacccacgatgatcatctt

SEQ ID NO: 4510233 - DNA, 25 bp, Homo sapien
ggaatggtacacagtggctcctgca

SEQ ID NO: 4510234 - DNA, 25 bp, Homo sapien
aggagtccaagggatgttcctccca

SEQ ID NO: 4510235 - DNA, 25 bp, Homo sapien
taagaaatgattcgctgctcttggc

SEQ ID NO: 4510236 - DNA, 25 bp, Homo sapien
gattcgctgctcttggcagaagctg

SEQ ID NO: 4510237 - DNA, 25 bp, Homo sapien
gagagcggcgggctcagccttcaca

SEQ ID NO: 4510238 - DNA, 25 bp, Homo sapien
gggctcagccttcacaggattgtcc

SEQ ID NO: 4510239 - DNA, 25 bp, Homo sapien
gcggcgggctcagccttcacaggat

SEQ ID NO: 4510240 - DNA, 25 bp, Homo sapien
gcgggctcagccttcacaggattgt

SEQ ID NO: 4510241 - DNA, 25 bp, Homo sapien
gtcccccgatgtcccagacgttgaa

SEQ ID NO: 4510242 - DNA, 25 bp, Homo sapien
cagacgttgaactccacggactcaa

SEQ ID NO: 4510243 - DNA, 25 bp, Homo sapien
tgtcccagacgttgaactccacgga

SEQ ID NO: 4510244 - DNA, 25 bp, Homo sapien
ccgatgtcccagacgttgaactcca

SEQ ID NO: 4510245 - DNA, 25 bp, Homo sapien
cccagcgccaggttccagaccacca

SEQ ID NO: 4510246 - DNA, 25 bp, Homo sapien
cagaccaccacgtacagggccttgt

SEQ ID NO: 4510247 - DNA, 25 bp, Homo sapien
cgtacagggccttgtccgtgaagaa

SEQ ID NO: 4510248 - DNA, 25 bp, Homo sapien
agaagcactggttgacagtggccat

SEQ ID NO: 4510249 - DNA, 25 bp, Homo sapien
ctgcaaagctctgggcactgaaatg

SEQ ID NO: 4510250 - DNA, 25 bp, Homo sapien
caaagctctgggcactgaaatggca

SEQ ID NO: 4510251 - DNA, 25 bp, Homo sapien
gcagggctggcgtctggtgtcctca

SEQ ID NO: 4510252 - DNA, 25 bp, Homo sapien
cagggctggcgtctggtgtcctcac

SEQ ID NO: 4510253 - DNA, 25 bp, Homo sapien
tgccagcacataggcacgcagcgtt

SEQ ID NO: 4510254 - DNA, 25 bp, Homo sapien
cacacggaacttggcttcaattaaa

SEQ ID NO: 4510255 - DNA, 25 bp, Homo sapien
aggcacgcagcgttgcaatcctttc

SEQ ID NO: 4510256 - DNA, 25 bp, Homo sapien
caattaaatccaggtgcgtcccgac

SEQ ID NO: 4510257 - DNA, 25 bp, Homo sapien
ggcagccgatggtgctgcccacgtc

SEQ ID NO: 4510258 - DNA, 25 bp, Homo sapien
cacgtgacgtggaaaatcagctgtc

SEQ ID NO: 4510259 - DNA, 25 bp, Homo sapien
cctgccagtcgctggcagccgatgg

SEQ ID NO: 4510260 - DNA, 25 bp, Homo sapien
cacgtccttcatgctgcacgtgacg

SEQ ID NO: 4510261 - DNA, 25 bp, Homo sapien
tccgtcaggtactgcacgtcgtcgt

SEQ ID NO: 4510262 - DNA, 25 bp, Homo sapien
tagtccttgatgtcgttgtcgggcg

SEQ ID NO: 4510263 - DNA, 25 bp, Homo sapien
gttgtcgggcgtctgctccaccagc

SEQ ID NO: 4510264 - DNA, 25 bp, Homo sapien
gactgcaggtcctcgtagtccttga

SEQ ID NO: 4510265 - DNA, 25 bp, Homo sapien
aaagatcctctgcagacattcggag

SEQ ID NO: 4510266 - DNA, 25 bp, Homo sapien
acgggcagggcgatctcaaacttgg

SEQ ID NO: 4510267 - DNA, 25 bp, Homo sapien
cactgaccgagagcccttaatatta

SEQ ID NO: 4510268 - DNA, 25 bp, Homo sapien
cattcggagagccaaatagggtcga

SEQ ID NO: 4510269 - DNA, 25 bp, Homo sapien
ggaaatcttgttcaggccaccagtg

SEQ ID NO: 4510270 - DNA, 25 bp, Homo sapien
tttcttttaactccctgaacagaga

SEQ ID NO: 4510271 - DNA, 25 bp, Homo sapien
cctggcgtgttaagttgtgtcctca

SEQ ID NO: 4510272 - DNA, 25 bp, Homo sapien
cctacaccttttcaataagtggatt

SEQ ID NO: 4510273 - DNA, 25 bp, Homo sapien
acgcagagtggcgacgtgttctctg

SEQ ID NO: 4510274 - DNA, 25 bp, Homo sapien
aggcctgctccccagaagtctccag

SEQ ID NO: 4510275 - DNA, 25 bp, Homo sapien
gctccccagaagtctccaggtgaca

SEQ ID NO: 4510276 - DNA, 25 bp, Homo sapien
cacccctgtagagatctggagctga

SEQ ID NO: 4510277 - DNA, 25 bp, Homo sapien
gcatcattgcatcggcaagggcttc

SEQ ID NO: 4510278 - DNA, 25 bp, Homo sapien
agggcttcacggctgaaacctggga

SEQ ID NO: 4510279 - DNA, 25 bp, Homo sapien
gaaaaccagcaacggctgcatcctg

SEQ ID NO: 4510280 - DNA, 25 bp, Homo sapien
gaataggcctgttttgtgcggaaga

SEQ ID NO: 4510281 - DNA, 25 bp, Homo sapien
tccaggccaggtttagatggaagga

SEQ ID NO: 4510282 - DNA, 25 bp, Homo sapien
tgtccaggccaggtttagatggaag

SEQ ID NO: 4510283 - DNA, 25 bp, Homo sapien
gtgggtgtccaggccaggtttagat

SEQ ID NO: 4510284 - DNA, 25 bp, Homo sapien
gggtgtccaggccaggtttagatgg

SEQ ID NO: 4510285 - DNA, 25 bp, Homo sapien
aataccctctgaatggtgttggctg

SEQ ID NO: 4510286 - DNA, 25 bp, Homo sapien
taccctctgaatggtgttggctgtg

SEQ ID NO: 4510287 - DNA, 25 bp, Homo sapien
cttaaataccctctgaatggtgttg

SEQ ID NO: 4510288 - DNA, 25 bp, Homo sapien
taaataccctctgaatggtgttggc

SEQ ID NO: 4510289 - DNA, 25 bp, Homo sapien
tttgccagaagccaacgggaacgaa

SEQ ID NO: 4510290 - DNA, 25 bp, Homo sapien
caggctgatcagcatccgtgctata

SEQ ID NO: 4510291 - DNA, 25 bp, Homo sapien
tccgtgctataaacctttgccagaa

SEQ ID NO: 4510292 - DNA, 25 bp, Homo sapien
tgcaggtccatctccgccaggctga

SEQ ID NO: 4510293 - DNA, 25 bp, Homo sapien
gaagggtctgatcgttttaaagctc

SEQ ID NO: 4510294 - DNA, 25 bp, Homo sapien
cagtcggattattggtcgaagggtc

SEQ ID NO: 4510295 - DNA, 25 bp, Homo sapien
gaacgacgagactgtcctgtgcgct

SEQ ID NO: 4510296 - DNA, 25 bp, Homo sapien
gaggaatcgcttctcgaacgacgag

SEQ ID NO: 4510297 - DNA, 25 bp, Homo sapien
aggagcccttcctgccaatagatgg

SEQ ID NO: 4510298 - DNA, 25 bp, Homo sapien
tcactctgaatgtgctacagcgatt

SEQ ID NO: 4510299 - DNA, 25 bp, Homo sapien
tttcctgtaaaactgtaaatggtga

SEQ ID NO: 4510300 - DNA, 25 bp, Homo sapien
cagcgatttctctggtttcctgtaa

SEQ ID NO: 4510301 - DNA, 25 bp, Homo sapien
tgagaagtccctcacttctgattgg

SEQ ID NO: 4510302 - DNA, 25 bp, Homo sapien
tccagttcacgtcggaagattccac

SEQ ID NO: 4510303 - DNA, 25 bp, Homo sapien
gaaaccactgatcaatcaaggaatt

SEQ ID NO: 4510304 - DNA, 25 bp, Homo sapien
gacgtggtccgtgatgaaagccatg

SEQ ID NO: 4510305 - DNA, 25 bp, Homo sapien
cacctgctgtgtggggaacactggc

SEQ ID NO: 4510306 - DNA, 25 bp, Homo sapien
tgtgtggggaacactggctggtggg

SEQ ID NO: 4510307 - DNA, 25 bp, Homo sapien
tgtcaaactgcccagcacctgctgt

SEQ ID NO: 4510308 - DNA, 25 bp, Homo sapien
tgctgtgtggggaacactggctggt

SEQ ID NO: 4510309 - DNA, 25 bp, Homo sapien
gtcttccatgtcgaagtactgcaca

SEQ ID NO: 4510310 - DNA, 25 bp, Homo sapien
gatggccgtcaggacacagtcttcc

SEQ ID NO: 4510311 - DNA, 25 bp, Homo sapien
tactgctccatgagtggcgtcccgt

SEQ ID NO: 4510312 - DNA, 25 bp, Homo sapien
ccgggaagtcggtcatgaacagttc

SEQ ID NO: 4510313 - DNA, 25 bp, Homo sapien
tgccacacacgcccggcatcagcca

SEQ ID NO: 4510314 - DNA, 25 bp, Homo sapien
acacacgcccggcatcagccacatc

SEQ ID NO: 4510315 - DNA, 25 bp, Homo sapien
ccacacacgcccggcatcagccaca

SEQ ID NO: 4510316 - DNA, 25 bp, Homo sapien
ctgccacacacgcccggcatcagcc

SEQ ID NO: 4510317 - DNA, 25 bp, Homo sapien
gcccggtagatgacggtgccactgc

SEQ ID NO: 4510318 - DNA, 25 bp, Homo sapien
gccggtacgttagcaaagttcttga

SEQ ID NO: 4510319 - DNA, 25 bp, Homo sapien
tttgatgtggaagcgcttgacggcc

SEQ ID NO: 4510320 - DNA, 25 bp, Homo sapien
ggacgctgccctcgtcctcgctgtg

SEQ ID NO: 4510321 - DNA, 25 bp, Homo sapien
tcctgccggaactcggagaagttct

SEQ ID NO: 4510322 - DNA, 25 bp, Homo sapien
ttcttcatggcatcggtggcccgca

SEQ ID NO: 4510323 - DNA, 25 bp, Homo sapien
gcgttctcggacagcacggtgttga

SEQ ID NO: 4510324 - DNA, 25 bp, Homo sapien
tggcccgcaggtgcctcagcatggt

SEQ ID NO: 4510325 - DNA, 25 bp, Homo sapien
gctcacagttcgagaacgacctggg

SEQ ID NO: 4510326 - DNA, 25 bp, Homo sapien
gcgtgtgcttgtagctactcgggaa

SEQ ID NO: 4510327 - DNA, 25 bp, Homo sapien
gggatcgactgagctcacagttcga

SEQ ID NO: 4510328 - DNA, 25 bp, Homo sapien
gtgtgcttgtagctactcgggaagt

SEQ ID NO: 4510329 - DNA, 25 bp, Homo sapien
tgacacattctcactattcaccaga

SEQ ID NO: 4510330 - DNA, 25 bp, Homo sapien
cgcctggcccttagatactttatat

SEQ ID NO: 4510331 - DNA, 25 bp, Homo sapien
gatagaaatgctcatcgctgtagct

SEQ ID NO: 4510332 - DNA, 25 bp, Homo sapien
gaattcctggctttaagcgacctgc

SEQ ID NO: 4510333 - DNA, 25 bp, Homo sapien
gagcatgtgtcccaggggtataaag

SEQ ID NO: 4510334 - DNA, 25 bp, Homo sapien
agcatgtgtcccaggggtataaagg

SEQ ID NO: 4510335 - DNA, 25 bp, Homo sapien
gcatgtgtcccaggggtataaagga

SEQ ID NO: 4510336 - DNA, 25 bp, Homo sapien
tatacaatgcgaggcctgatctctg

SEQ ID NO: 4510337 - DNA, 25 bp, Homo sapien
gaaatcccgtagtcagatagcttga

SEQ ID NO: 4510338 - DNA, 25 bp, Homo sapien
cctagggcgccctcatggaatgact

SEQ ID NO: 4510339 - DNA, 25 bp, Homo sapien
tcaagggaccacaccagaatgttgt

SEQ ID NO: 4510340 - DNA, 25 bp, Homo sapien
tgcagtcgccggaactgcacttcct

SEQ ID NO: 4510341 - DNA, 25 bp, Homo sapien
tcgtagagcaccattccataggaga

SEQ ID NO: 4510342 - DNA, 25 bp, Homo sapien
actccatcatgagcgcctgcagtcg

SEQ ID NO: 4510343 - DNA, 25 bp, Homo sapien
ttctctggcttagtgtcccagcact

SEQ ID NO: 4510344 - DNA, 25 bp, Homo sapien
tcaccaccgacagggccagcggtcg

SEQ ID NO: 4510345 - DNA, 25 bp, Homo sapien
caaaacaccacggtgtactcctggc

SEQ ID NO: 4510346 - DNA, 25 bp, Homo sapien
tggctcaccaccgacagggccagcg

SEQ ID NO: 4510347 - DNA, 25 bp, Homo sapien
gcaaaagtcgggtccttcatctggc

SEQ ID NO: 4510348 - DNA, 25 bp, Homo sapien
cggcatcgctgtctcccctcaggct

SEQ ID NO: 4510349 - DNA, 25 bp, Homo sapien
ctgtggcgggcatcctgagcactca

SEQ ID NO: 4510350 - DNA, 25 bp, Homo sapien
gctgtggcgggcatcctgagcactc

SEQ ID NO: 4510351 - DNA, 25 bp, Homo sapien
caggccggctgtccccggcatcgct

SEQ ID NO: 4510352 - DNA, 25 bp, Homo sapien
tctctgtgttcaccaccgtgtagtt

SEQ ID NO: 4510353 - DNA, 25 bp, Homo sapien
ctctgtgttcaccaccgtgtagttc

SEQ ID NO: 4510354 - DNA, 25 bp, Homo sapien
cgacagctggagtatccaaggcctg

SEQ ID NO: 4510355 - DNA, 25 bp, Homo sapien
taataacaggcacggccaagaagca

SEQ ID NO: 4510356 - DNA, 25 bp, Homo sapien
ctttttaataacaggcacggccaag

SEQ ID NO: 4510357 - DNA, 25 bp, Homo sapien
gccaagaagcaggtgacgacagctg

SEQ ID NO: 4510358 - DNA, 25 bp, Homo sapien
cctcctaggcgtggaagtgcatcag

SEQ ID NO: 4510359 - DNA, 25 bp, Homo sapien
taagtctacgtcctaggccaggtgg

SEQ ID NO: 4510360 - DNA, 25 bp, Homo sapien
cctgacatagctaggagacgcctcc

SEQ ID NO: 4510361 - DNA, 25 bp, Homo sapien
tgcaaaccggaaggcactaatgacg

SEQ ID NO: 4510362 - DNA, 25 bp, Homo sapien
gccatttgtaccaacagtccttcca

SEQ ID NO: 4510363 - DNA, 25 bp, Homo sapien
cgtgccatttgtaccaacagtcctt

SEQ ID NO: 4510364 - DNA, 25 bp, Homo sapien
ccatttgtaccaacagtccttccac

SEQ ID NO: 4510365 - DNA, 25 bp, Homo sapien
tgccatttgtaccaacagtccttcc

SEQ ID NO: 4510366 - DNA, 25 bp, Homo sapien
gccccgggtcttgagaactgaatcg

SEQ ID NO: 4510367 - DNA, 25 bp, Homo sapien
gcacaccggcctagacctttgggta

SEQ ID NO: 4510368 - DNA, 25 bp, Homo sapien
aactgaatcggaggccgtctgggaa

SEQ ID NO: 4510369 - DNA, 25 bp, Homo sapien
tcttgtgcatttagtgagggcgcct

SEQ ID NO: 4510370 - DNA, 25 bp, Homo sapien
cactttgtgtcgtgttctcctgcgc

SEQ ID NO: 4510371 - DNA, 25 bp, Homo sapien
ctggtacgggcctggtcccaagctg

SEQ ID NO: 4510372 - DNA, 25 bp, Homo sapien
cagcggtggcctcaataacactttg

SEQ ID NO: 4510373 - DNA, 25 bp, Homo sapien
tattccctctggtcgtgcaggaggt

SEQ ID NO: 4510374 - DNA, 25 bp, Homo sapien
tactcaaccctcttctggaggcctg

SEQ ID NO: 4510375 - DNA, 25 bp, Homo sapien
ggccaaagttgcagggaccttgctg

SEQ ID NO: 4510376 - DNA, 25 bp, Homo sapien
tcatcccagcttacatctatcgaga

SEQ ID NO: 4510377 - DNA, 25 bp, Homo sapien
tatcgagatgcctgtggttcagctg

SEQ ID NO: 4510378 - DNA, 25 bp, Homo sapien
gccagcttcttgcagggcgagcagc

SEQ ID NO: 4510379 - DNA, 25 bp, Homo sapien
agaggcaggacctggtgcccccgcc

SEQ ID NO: 4510380 - DNA, 25 bp, Homo sapien
agggagctgccttctccttgaggcc

SEQ ID NO: 4510381 - DNA, 25 bp, Homo sapien
ttgcagggcgagcagcagggagctg

SEQ ID NO: 4510382 - DNA, 25 bp, Homo sapien
gcctcagggcagcaaatctcttaga

SEQ ID NO: 4510383 - DNA, 25 bp, Homo sapien
ggctactcctaaagaagtgcagctc

SEQ ID NO: 4510384 - DNA, 25 bp, Homo sapien
atctcttagaaaggccggggctact

SEQ ID NO: 4510385 - DNA, 25 bp, Homo sapien
aggcgggcagtcactttccaccagt

SEQ ID NO: 4510386 - DNA, 25 bp, Homo sapien
caaatgaggtctctgacggcgagga

SEQ ID NO: 4510387 - DNA, 25 bp, Homo sapien
tggatcaggatctgcgtgcccagct

SEQ ID NO: 4510388 - DNA, 25 bp, Homo sapien
tatgtagcatgtctgagtcctcgca

SEQ ID NO: 4510389 - DNA, 25 bp, Homo sapien
tgtacatgatgctcacgtccgcgat

SEQ ID NO: 4510390 - DNA, 25 bp, Homo sapien
tcagctctcgggcttttaagacggc

SEQ ID NO: 4510391 - DNA, 25 bp, Homo sapien
ttaagacggcaatgactcggccccg

SEQ ID NO: 4510392 - DNA, 25 bp, Homo sapien
tgggcgccagaatccttctccaggc

SEQ ID NO: 4510393 - DNA, 25 bp, Homo sapien
aatgacgataacatctccaccgcgc

SEQ ID NO: 4510394 - DNA, 25 bp, Homo sapien
cactgcaaccatgtagaccatgtcc

SEQ ID NO: 4510395 - DNA, 25 bp, Homo sapien
gcataccttcacagaggagactggc

SEQ ID NO: 4510396 - DNA, 25 bp, Homo sapien
catgtagaccatgtcccggacaggc

SEQ ID NO: 4510397 - DNA, 25 bp, Homo sapien
tcaaagtgcggggtgtaaacactgt

SEQ ID NO: 4510398 - DNA, 25 bp, Homo sapien
tagaaaatgtcgaactccctggcgc

SEQ ID NO: 4510399 - DNA, 25 bp, Homo sapien
tcttgcgagtgcaagcctccagccg

SEQ ID NO: 4510400 - DNA, 25 bp, Homo sapien
tcctcgtaggactggtagaaaatgt

SEQ ID NO: 4510401 - DNA, 25 bp, Homo sapien
gacggccaggcaccactctgtgttt

SEQ ID NO: 4510402 - DNA, 25 bp, Homo sapien
ccagctctgatgtgtgacagtcatt

SEQ ID NO: 4510403 - DNA, 25 bp, Homo sapien
agccagctctgatgtgtgacagtca

SEQ ID NO: 4510404 - DNA, 25 bp, Homo sapien
gccagctctgatgtgtgacagtcat

SEQ ID NO: 4510405 - DNA, 25 bp, Homo sapien
tgtaaaggctaagcgggtgcactcg

SEQ ID NO: 4510406 - DNA, 25 bp, Homo sapien
gcctgactgctgagatattactgaa

SEQ ID NO: 4510407 - DNA, 25 bp, Homo sapien
gaagtcctgctgattgagtttcccc

SEQ ID NO: 4510408 - DNA, 25 bp, Homo sapien
gcggagggcctctagtgtaattcca

SEQ ID NO: 4510409 - DNA, 25 bp, Homo sapien
ggagagtgggactcctgagaccctg

SEQ ID NO: 4510410 - DNA, 25 bp, Homo sapien
gagagtgggactcctgagaccctgc

SEQ ID NO: 4510411 - DNA, 25 bp, Homo sapien
gggagagtgggactcctgagaccct

SEQ ID NO: 4510412 - DNA, 25 bp, Homo sapien
tattgtcaactctacctatgaggag

SEQ ID NO: 4510413 - DNA, 25 bp, Homo sapien
tgtaattcaattgctgcccatgccc

SEQ ID NO: 4510414 - DNA, 25 bp, Homo sapien
caagccacgaattgcccaactgggt

SEQ ID NO: 4510415 - DNA, 25 bp, Homo sapien
tcctaaaagcagagattcggccagc

SEQ ID NO: 4510416 - DNA, 25 bp, Homo sapien
gtgccctcagagctccatggaatgc

SEQ ID NO: 4510417 - DNA, 25 bp, Homo sapien
tggcttgaacccacaacagggtctt

SEQ ID NO: 4510418 - DNA, 25 bp, Homo sapien
taaaactgccaggagcttccgcgga

SEQ ID NO: 4510419 - DNA, 25 bp, Homo sapien
ataagtccagaatgccctccaaggg

SEQ ID NO: 4510420 - DNA, 25 bp, Homo sapien
agtcggtgccaggaaaaatggtaat

SEQ ID NO: 4510421 - DNA, 25 bp, Homo sapien
tgtgggaggctggattgaagtcggt

SEQ ID NO: 4510422 - DNA, 25 bp, Homo sapien
ttggacagaaggtctacagggtgcg

SEQ ID NO: 4510423 - DNA, 25 bp, Homo sapien
gacagaaggtctacagggtgcggtc

SEQ ID NO: 4510424 - DNA, 25 bp, Homo sapien
ccatctgggcttatatatgcgtgca

SEQ ID NO: 4510425 - DNA, 25 bp, Homo sapien
gggcttatatatgcgtgcaggtcac

SEQ ID NO: 4510426 - DNA, 25 bp, Homo sapien
ttagaattattggtgatgacctgga

SEQ ID NO: 4510427 - DNA, 25 bp, Homo sapien
gaagaaacattcgtcatttagaatt

SEQ ID NO: 4510428 - DNA, 25 bp, Homo sapien
ctagatgacaccaacgacgggacaa

SEQ ID NO: 4510429 - DNA, 25 bp, Homo sapien
gcctcagcgctgtcgcgcatgcggt

SEQ ID NO: 4510430 - DNA, 25 bp, Homo sapien
tccgagtcggcagaacgaggtttct

SEQ ID NO: 4510431 - DNA, 25 bp, Homo sapien
tgaatgcaggatccaaaacggcggc

SEQ ID NO: 4510432 - DNA, 25 bp, Homo sapien
tttcgtttgggcctgacaaggagcc

SEQ ID NO: 4510433 - DNA, 25 bp, Homo sapien
tctctaaggtcgctaggccacagca

SEQ ID NO: 4510434 - DNA, 25 bp, Homo sapien
tgtccctttgtctactcccgatgag

SEQ ID NO: 4510435 - DNA, 25 bp, Homo sapien
tcccgatgagtcagagtagccgatg

SEQ ID NO: 4510436 - DNA, 25 bp, Homo sapien
gcttcatcagtagatgggatctttg

SEQ ID NO: 4510437 - DNA, 25 bp, Homo sapien
cttcatcagtagatgggatctttgc

SEQ ID NO: 4510438 - DNA, 25 bp, Homo sapien
ttggcttcatcagtagatgggatct

SEQ ID NO: 4510439 - DNA, 25 bp, Homo sapien
tggcttcatcagtagatgggatctt

SEQ ID NO: 4510440 - DNA, 25 bp, Homo sapien
ttggcttcatcagtagatgggatct

SEQ ID NO: 4510441 - DNA, 25 bp, Homo sapien
tttgcttcatcggtagatgggatct

SEQ ID NO: 4510442 - DNA, 25 bp, Homo sapien
tggcttcttcggtagatgggatctt

SEQ ID NO: 4510443 - DNA, 25 bp, Homo sapien
tgggtctttgcttcatctgtagatg

SEQ ID NO: 4510444 - DNA, 25 bp, Homo sapien
cttgtggttgacagagccttgccca

SEQ ID NO: 4510445 - DNA, 25 bp, Homo sapien
ctcagacgcctcagttatattaacc

SEQ ID NO: 4510446 - DNA, 25 bp, Homo sapien
tcctacagaagatggcttgtggttg

SEQ ID NO: 4510447 - DNA, 25 bp, Homo sapien
ttgcccactgtaagcaccaggaagc

SEQ ID NO: 4510448 - DNA, 25 bp, Homo sapien
taggtggtgccccaatcagaaagcc

SEQ ID NO: 4510449 - DNA, 25 bp, Homo sapien
gttcaaaccaacagcgacaatagcc

SEQ ID NO: 4510450 - DNA, 25 bp, Homo sapien
cacagtaactgtgagcttctcccca

SEQ ID NO: 4510451 - DNA, 25 bp, Homo sapien
gaagactgaagctatctgaccccgt

SEQ ID NO: 4510452 - DNA, 25 bp, Homo sapien
tccccgtctttctccttgtctttga

SEQ ID NO: 4510453 - DNA, 25 bp, Homo sapien
cgtctttctccttgtctttgaccat

SEQ ID NO: 4510454 - DNA, 25 bp, Homo sapien
agctccccgtctttctccttgtctt

SEQ ID NO: 4510455 - DNA, 25 bp, Homo sapien
cctcagctccccgtctttctccttg

SEQ ID NO: 4510456 - DNA, 25 bp, Homo sapien
aatgggttgtctgggaacttcatca

SEQ ID NO: 4510457 - DNA, 25 bp, Homo sapien
caaaatgggttgtctgggaacttca

SEQ ID NO: 4510458 - DNA, 25 bp, Homo sapien
gtctgggaacttcatcaacttcatg

SEQ ID NO: 4510459 - DNA, 25 bp, Homo sapien
gggttgtctgggaacttcatcaact

SEQ ID NO: 4510460 - DNA, 25 bp, Homo sapien
tttatgctatctgactgataaggtt

SEQ ID NO: 4510461 - DNA, 25 bp, Homo sapien
gttgtctggggactgtttccacacc

SEQ ID NO: 4510462 - DNA, 25 bp, Homo sapien
tatctgactgataaggttgtctggg

SEQ ID NO: 4510463 - DNA, 25 bp, Homo sapien
gctatctgactgataaggttgtctg

SEQ ID NO: 4510464 - DNA, 25 bp, Homo sapien
tgtctctccagcccgtgaagggctc

SEQ ID NO: 4510465 - DNA, 25 bp, Homo sapien
tgaagggctccagtcttggtgtctg

SEQ ID NO: 4510466 - DNA, 25 bp, Homo sapien
ccagtcttggtgtctggaaggctct

SEQ ID NO: 4510467 - DNA, 25 bp, Homo sapien
gtctggaaggctctaatcagcagct

SEQ ID NO: 4510468 - DNA, 25 bp, Homo sapien
tagcagccgtccgtgcactaataca

SEQ ID NO: 4510469 - DNA, 25 bp, Homo sapien
ccgtcgagtgcataatacagccgtg

SEQ ID NO: 4510470 - DNA, 25 bp, Homo sapien
actaatacagccgtgcgggtgggct

SEQ ID NO: 4510471 - DNA, 25 bp, Homo sapien
taatatagccatccttagcagccgt

SEQ ID NO: 4510472 - DNA, 25 bp, Homo sapien
cacgagtctttaaattctggttccg

SEQ ID NO: 4510473 - DNA, 25 bp, Homo sapien
gggagcctcaggttgctcgcgtcac

SEQ ID NO: 4510474 - DNA, 25 bp, Homo sapien
caggttgctcgcgtcacacgagtct

SEQ ID NO: 4510475 - DNA, 25 bp, Homo sapien
gcggcaagacagctgtgcaagtccg

SEQ ID NO: 4510476 - DNA, 25 bp, Homo sapien
ttccgcagcttcgaactgccacaga

SEQ ID NO: 4510477 - DNA, 25 bp, Homo sapien
gtcccggttccccagctgtgctctc

SEQ ID NO: 4510478 - DNA, 25 bp, Homo sapien
gttttgggtacatgcatgtcccggt

SEQ ID NO: 4510479 - DNA, 25 bp, Homo sapien
ttactcagtcgttgccatgttagtt

SEQ ID NO: 4510480 - DNA, 25 bp, Homo sapien
gtatcaccctcaacttgcatccagc

SEQ ID NO: 4510481 - DNA, 25 bp, Homo sapien
ttcctctcttatccgtgtggacagg

SEQ ID NO: 4510482 - DNA, 25 bp, Homo sapien
ctttcctctcttatccgtgtggaca

SEQ ID NO: 4510483 - DNA, 25 bp, Homo sapien
ttctgcacaccatcgtatcaccctc

SEQ ID NO: 4510484 - DNA, 25 bp, Homo sapien
ccacagacggttggccaggccctgt

SEQ ID NO: 4510485 - DNA, 25 bp, Homo sapien
agcacagcattggtttggatcaact

SEQ ID NO: 4510486 - DNA, 25 bp, Homo sapien
tggtttggatcaactccacagacgg

SEQ ID NO: 4510487 - DNA, 25 bp, Homo sapien
tcaactccacagacggttggccagg

SEQ ID NO: 4510488 - DNA, 25 bp, Homo sapien
ttccatcagctcagcgggagaggat

SEQ ID NO: 4510489 - DNA, 25 bp, Homo sapien
gaggtgacatacgtgttccatcagc

SEQ ID NO: 4510490 - DNA, 25 bp, Homo sapien
ggtttccacgtcacacctgatctgg

SEQ ID NO: 4510491 - DNA, 25 bp, Homo sapien
cccagaagtcgggtctctgctgcca

SEQ ID NO: 4510492 - DNA, 25 bp, Homo sapien
gtgggaaaagtatacatttgcaaac

SEQ ID NO: 4510493 - DNA, 25 bp, Homo sapien
ctagtgggaaaagtatacatttgca

SEQ ID NO: 4510494 - DNA, 25 bp, Homo sapien
tagtgggaaaagtatacatttgcaa

SEQ ID NO: 4510495 - DNA, 25 bp, Homo sapien
agtgggaaaagtatacatttgcaaa

SEQ ID NO: 4510496 - DNA, 25 bp, Homo sapien
gatgtggacatgaccagaggcaccg

SEQ ID NO: 4510497 - DNA, 25 bp, Homo sapien
gaagctggcgctcattccaagagat

SEQ ID NO: 4510498 - DNA, 25 bp, Homo sapien
gcgcgttccagacagagggcctgtt

SEQ ID NO: 4510499 - DNA, 25 bp, Homo sapien
tgtgaaaatggcaactccgcagacc

SEQ ID NO: 4510500 - DNA, 25 bp, Homo sapien
tgcctactgcactgaggggcgcctg

SEQ ID NO: 4510501 - DNA, 25 bp, Homo sapien
cccgccctggggaattaggctgcat

SEQ ID NO: 4510502 - DNA, 25 bp, Homo sapien
gtgccctcatcacggaggaagccaa

SEQ ID NO: 4510503 - DNA, 25 bp, Homo sapien
ggcaaggtttcctcttgtgccctca

SEQ ID NO: 4510504 - DNA, 25 bp, Homo sapien
gtctgcggccctgccacacactttc

SEQ ID NO: 4510505 - DNA, 25 bp, Homo sapien
gtggactcggcagttccacaggcac

SEQ ID NO: 4510506 - DNA, 25 bp, Homo sapien
tggactcggcagttccacaggcacc

SEQ ID NO: 4510507 - DNA, 25 bp, Homo sapien
gttcttttgcccagagggtggactc

SEQ ID NO: 4510508 - DNA, 25 bp, Homo sapien
ctggtgctgttcttttgcccagagg

SEQ ID NO: 4510509 - DNA, 25 bp, Homo sapien
gacacgtttgagtgtgcgtccagaa

SEQ ID NO: 4510510 - DNA, 25 bp, Homo sapien
tcaatgacccttggtgaaacctgcc

SEQ ID NO: 4510511 - DNA, 25 bp, Homo sapien
tggtgttcatggaagtactgcctcc

SEQ ID NO: 4510512 - DNA, 25 bp, Homo sapien
cctcttcctgatagcagtgttggtg

SEQ ID NO: 4510513 - DNA, 25 bp, Homo sapien
tggctcctggatagaaatgtcccct

SEQ ID NO: 4510514 - DNA, 25 bp, Homo sapien
caggccccatagaacctgcatttta

SEQ ID NO: 4510515 - DNA, 25 bp, Homo sapien
ttaacaactgcctggcgtggggctg

SEQ ID NO: 4510516 - DNA, 25 bp, Homo sapien
tgagctcgtccttgttcctcatcaa

SEQ ID NO: 4510517 - DNA, 25 bp, Homo sapien
catcctgtctgtgttatgtgggtgg

SEQ ID NO: 4510518 - DNA, 25 bp, Homo sapien
catacaccctaatcaaaacgttggg

SEQ ID NO: 4510519 - DNA, 25 bp, Homo sapien
gttcattcggcctaaatagacctgg

SEQ ID NO: 4510520 - DNA, 25 bp, Homo sapien
gcccagctggccacgtaggttttaa

SEQ ID NO: 4510521 - DNA, 25 bp, Homo sapien
gctgtccgtgtggtgcctccttgca

SEQ ID NO: 4510522 - DNA, 25 bp, Homo sapien
gtgtggtgcctccttgcatggtcat

SEQ ID NO: 4510523 - DNA, 25 bp, Homo sapien
tccgtgtggtgcctccttgcatggt

SEQ ID NO: 4510524 - DNA, 25 bp, Homo sapien
ccgtttgcacgtgttcccgcagctg

SEQ ID NO: 4510525 - DNA, 25 bp, Homo sapien
tgagcagtgacgtagcccataatat

SEQ ID NO: 4510526 - DNA, 25 bp, Homo sapien
caggaaattgcctggagctcagtaa

SEQ ID NO: 4510527 - DNA, 25 bp, Homo sapien
tactacttaagggtcagggacttca

SEQ ID NO: 4510528 - DNA, 25 bp, Homo sapien
ggcgttaaacgcttaatgaccagca

SEQ ID NO: 4510529 - DNA, 25 bp, Homo sapien
gcagaagtgatgtcagagtggtctc

SEQ ID NO: 4510530 - DNA, 25 bp, Homo sapien
ggcaaggaaggagcgtgaagatgca

SEQ ID NO: 4510531 - DNA, 25 bp, Homo sapien
ggaaggagcgtgaagatgcacactc

SEQ ID NO: 4510532 - DNA, 25 bp, Homo sapien
agagagcaggttttgtcaggcaagg

SEQ ID NO: 4510533 - DNA, 25 bp, Homo sapien
ttgaagctttcgagtcactttcact

SEQ ID NO: 4510534 - DNA, 25 bp, Homo sapien
tgaagctttcgagtcactttcactt

SEQ ID NO: 4510535 - DNA, 25 bp, Homo sapien
agctttcgagtcactttcactttta

SEQ ID NO: 4510536 - DNA, 25 bp, Homo sapien
gaagctttcgagtcactttcacttt

SEQ ID NO: 4510537 - DNA, 25 bp, Homo sapien
tttcgggggactgtgttccttgtca

SEQ ID NO: 4510538 - DNA, 25 bp, Homo sapien
gagagggccaaaccaccgtcacaga

SEQ ID NO: 4510539 - DNA, 25 bp, Homo sapien
agacacccgagaggacgcagcagag

SEQ ID NO: 4510540 - DNA, 25 bp, Homo sapien
cagtaacgggatggcttttccagga

SEQ ID NO: 4510541 - DNA, 25 bp, Homo sapien
tgtctccagttgctgatgcagctgt

SEQ ID NO: 4510542 - DNA, 25 bp, Homo sapien
tccagttgctgatgcagctgtaatg

SEQ ID NO: 4510543 - DNA, 25 bp, Homo sapien
ttgtctccagttgctgatgcagctg

SEQ ID NO: 4510544 - DNA, 25 bp, Homo sapien
tctccagttgctgatgcagctgtaa

SEQ ID NO: 4510545 - DNA, 25 bp, Homo sapien
ggagagactcgggagctgcatctgg

SEQ ID NO: 4510546 - DNA, 25 bp, Homo sapien
atagctgagaggcttgcttgcgggc

SEQ ID NO: 4510547 - DNA, 25 bp, Homo sapien
cttgcgggctgcagaagagtgggta

SEQ ID NO: 4510548 - DNA, 25 bp, Homo sapien
aagagtgggtacatcggagagactc

SEQ ID NO: 4510549 - DNA, 25 bp, Homo sapien
agaactgtggcctggcaacatgaga

SEQ ID NO: 4510550 - DNA, 25 bp, Homo sapien
cacagaactgtggcctggcaacatg

SEQ ID NO: 4510551 - DNA, 25 bp, Homo sapien
tccacagaactgtggcctggcaaca

SEQ ID NO: 4510552 - DNA, 25 bp, Homo sapien
tcatccacagaactgtggcctggca

SEQ ID NO: 4510553 - DNA, 25 bp, Homo sapien
tagtttcactccgtggcgcacgagg

SEQ ID NO: 4510554 - DNA, 25 bp, Homo sapien
tgccgactcgagacctggtgggttt

SEQ ID NO: 4510555 - DNA, 25 bp, Homo sapien
ctggtcgttggttctcctgccgact

SEQ ID NO: 4510556 - DNA, 25 bp, Homo sapien
gttttcccttgtctgtctagtttca

SEQ ID NO: 4510557 - DNA, 25 bp, Homo sapien
ccctgctcttaagatgcagttctcc

SEQ ID NO: 4510558 - DNA, 25 bp, Homo sapien
ctgctcttaagatgcagttctcctt

SEQ ID NO: 4510559 - DNA, 25 bp, Homo sapien
tgctcttaagatgcagttctccttt

SEQ ID NO: 4510560 - DNA, 25 bp, Homo sapien
cctgctcttaagatgcagttctcct

SEQ ID NO: 4510561 - DNA, 25 bp, Homo sapien
gatgaaaacaaaggacttttggcag

SEQ ID NO: 4510562 - DNA, 25 bp, Homo sapien
gatgatgaaaacaaaggacttttgg

SEQ ID NO: 4510563 - DNA, 25 bp, Homo sapien
tggcagggggttaaactgacaaaca

SEQ ID NO: 4510564 - DNA, 25 bp, Homo sapien
ctgtagtagatgagatgatgaaaac

SEQ ID NO: 4510565 - DNA, 25 bp, Homo sapien
ctgtagtagacgaggcctgagtccc

SEQ ID NO: 4510566 - DNA, 25 bp, Homo sapien
tctgtagtagacgaggcctgagtcc

SEQ ID NO: 4510567 - DNA, 25 bp, Homo sapien
tgtagtagacgaggcctgagtccca

SEQ ID NO: 4510568 - DNA, 25 bp, Homo sapien
agtcctctgtagtagacgaggcctg

SEQ ID NO: 4510569 - DNA, 25 bp, Homo sapien
gaaatggttccaccattgggtatat

SEQ ID NO: 4510570 - DNA, 25 bp, Homo sapien
tctgaaatggttccaccattgggta

SEQ ID NO: 4510571 - DNA, 25 bp, Homo sapien
ctctgaaatggttccaccattgggt

SEQ ID NO: 4510572 - DNA, 25 bp, Homo sapien
tgaaatggttccaccattgggtata

SEQ ID NO: 4510573 - DNA, 25 bp, Homo sapien
acactgcgtgtatggttagccatcc

SEQ ID NO: 4510574 - DNA, 25 bp, Homo sapien
tgttcgctttactttcagggcagac

SEQ ID NO: 4510575 - DNA, 25 bp, Homo sapien
gatgaattacgctgagtgtcgcctt

SEQ ID NO: 4510576 - DNA, 25 bp, Homo sapien
aacattgcaaggtcttccagggaac

SEQ ID NO: 4510577 - DNA, 25 bp, Homo sapien
cagatagttactttaatctgtgagt

SEQ ID NO: 4510578 - DNA, 25 bp, Homo sapien
gtcgtgcaacttctgagttaccgtg

SEQ ID NO: 4510579 - DNA, 25 bp, Homo sapien
gctttcagaatagttgtcgtgcaac

SEQ ID NO: 4510580 - DNA, 25 bp, Homo sapien
taaatgaaatttgccgaaggaagtc

SEQ ID NO: 4510581 - DNA, 25 bp, Homo sapien
ggttttgaaagtaaatccgcatgac

SEQ ID NO: 4510582 - DNA, 25 bp, Homo sapien
ttgaccagagaaacagccgtatcgg

SEQ ID NO: 4510583 - DNA, 25 bp, Homo sapien
gactctagtgtggtgatagaccatg

SEQ ID NO: 4510584 - DNA, 25 bp, Homo sapien
ccgtatcggaaatcgaggatgagcc

SEQ ID NO: 4510585 - DNA, 25 bp, Homo sapien
ggcgggcgtgcggaacaaagcgccg

SEQ ID NO: 4510586 - DNA, 25 bp, Homo sapien
gggacaggcgccgtgcgaaccgagc

SEQ ID NO: 4510587 - DNA, 25 bp, Homo sapien
cggcgccggctacgaagaggacggg

SEQ ID NO: 4510588 - DNA, 25 bp, Homo sapien
catggtcccctcttaaaggcgcagg

SEQ ID NO: 4510589 - DNA, 25 bp, Homo sapien
tagatgtggatcaccccttagggag

SEQ ID NO: 4510590 - DNA, 25 bp, Homo sapien
gagaaggtatctgaagctcccacag

SEQ ID NO: 4510591 - DNA, 25 bp, Homo sapien
aactttcgttgtatggagacctccg

SEQ ID NO: 4510592 - DNA, 25 bp, Homo sapien
gaaagatccaaggattgccccaggc

SEQ ID NO: 4510593 - DNA, 25 bp, Homo sapien
gactgttaacctaggaactgaggga

SEQ ID NO: 4510594 - DNA, 25 bp, Homo sapien
agggaattgtaagccctcaggctca

SEQ ID NO: 4510595 - DNA, 25 bp, Homo sapien
tctcccagagggagttcccgtatgt

SEQ ID NO: 4510596 - DNA, 25 bp, Homo sapien
taggaaccaggatattgaggaggac

SEQ ID NO: 4510597 - DNA, 25 bp, Homo sapien
gaccgtttaacgtgatccagcagaa

SEQ ID NO: 4510598 - DNA, 25 bp, Homo sapien
caagaagcccggaacatgaaaagtc

SEQ ID NO: 4510599 - DNA, 25 bp, Homo sapien
aatggtcaatgattccctcaacaga

SEQ ID NO: 4510600 - DNA, 25 bp, Homo sapien
tctggaatcactatggaggaccgtt

SEQ ID NO: 4510601 - DNA, 25 bp, Homo sapien
gctccagtcagcaaaaggtatagat

SEQ ID NO: 4510602 - DNA, 25 bp, Homo sapien
catctggcggatgaggctaagaatc

SEQ ID NO: 4510603 - DNA, 25 bp, Homo sapien
ggtaaaggcctctagatgattagca

SEQ ID NO: 4510604 - DNA, 25 bp, Homo sapien
tacgcacgcttttcacagtgactag

SEQ ID NO: 4510605 - DNA, 25 bp, Homo sapien
gacacagtcacaaacgggtcctgag

SEQ ID NO: 4510606 - DNA, 25 bp, Homo sapien
caagtcttgcttttcgaacatggta

SEQ ID NO: 4510607 - DNA, 25 bp, Homo sapien
ttgttgaaatgcttaagactgctgc

SEQ ID NO: 4510608 - DNA, 25 bp, Homo sapien
taataataggccctcttggaacaag

SEQ ID NO: 4510609 - DNA, 25 bp, Homo sapien
taacctactttcgtgcagctccgtg

SEQ ID NO: 4510610 - DNA, 25 bp, Homo sapien
taatgctggctattccgaagttcgc

SEQ ID NO: 4510611 - DNA, 25 bp, Homo sapien
gcctagatacgttcccagcggagaa

SEQ ID NO: 4510612 - DNA, 25 bp, Homo sapien
gaactttcttcagggagctctacca

SEQ ID NO: 4510613 - DNA, 25 bp, Homo sapien
tcctctgagcaaggaggtagataaa

SEQ ID NO: 4510614 - DNA, 25 bp, Homo sapien
tattttagccgtataggtgagggac

SEQ ID NO: 4510615 - DNA, 25 bp, Homo sapien
ccaataatagtctcgtggaactggt

SEQ ID NO: 4510616 - DNA, 25 bp, Homo sapien
tggaactggtaagttgcacagaagg

SEQ ID NO: 4510617 - DNA, 25 bp, Homo sapien
ccacctcgaggtgcgctaatgcatg

SEQ ID NO: 4510618 - DNA, 25 bp, Homo sapien
taaacaccaacgtctggaatcaggg

SEQ ID NO: 4510619 - DNA, 25 bp, Homo sapien
taatgcatgagaaagttcccctcgg

SEQ ID NO: 4510620 - DNA, 25 bp, Homo sapien
tgaactgctggacccttcactgaac

SEQ ID NO: 4510621 - DNA, 25 bp, Homo sapien
tacaatacaaagaaattccctccca

SEQ ID NO: 4510622 - DNA, 25 bp, Homo sapien
aagttgccgatataccctatgaccg

SEQ ID NO: 4510623 - DNA, 25 bp, Homo sapien
ccgccaatacttcagtgggtatttc

SEQ ID NO: 4510624 - DNA, 25 bp, Homo sapien
tgttattcctcatgaggcggaggtt

SEQ ID NO: 4510625 - DNA, 25 bp, Homo sapien
caaatgctgcttgttggctccagtc

SEQ ID NO: 4510626 - DNA, 25 bp, Homo sapien
gatggtgaagtccaaccggctgtgc

SEQ ID NO: 4510627 - DNA, 25 bp, Homo sapien
aatgtcactgggcaaagagacccct

SEQ ID NO: 4510628 - DNA, 25 bp, Homo sapien
tcctcacatgtgacaaagggccagc

SEQ ID NO: 4510629 - DNA, 25 bp, Homo sapien
ggcattggccaaagcatacgagcag

SEQ ID NO: 4510630 - DNA, 25 bp, Homo sapien
aacataaaccagacagagtcccgcc

SEQ ID NO: 4510631 - DNA, 25 bp, Homo sapien
tggcaccccgcctggtgtatgagac

SEQ ID NO: 4510632 - DNA, 25 bp, Homo sapien
cctgccatgaagacggtggtcctca

SEQ ID NO: 4510633 - DNA, 25 bp, Homo sapien
gcagtggtgagaacaacttcctgtg

SEQ ID NO: 4510634 - DNA, 25 bp, Homo sapien
gtgagaacaacttcctgtgtcactg

SEQ ID NO: 4510635 - DNA, 25 bp, Homo sapien
agtggtgagaacaacttcctgtgtc

SEQ ID NO: 4510636 - DNA, 25 bp, Homo sapien
acaacttcctgtgtcactgctgcag

SEQ ID NO: 4510637 - DNA, 25 bp, Homo sapien
gctccgcaggttgttagctcagtca

SEQ ID NO: 4510638 - DNA, 25 bp, Homo sapien
aggaaaggtctcttttggaggcaca

SEQ ID NO: 4510639 - DNA, 25 bp, Homo sapien
tcttttggaggcacatgcaggaagg

SEQ ID NO: 4510640 - DNA, 25 bp, Homo sapien
tccctgctggcgtttttggagctcc

SEQ ID NO: 4510641 - DNA, 25 bp, Homo sapien
taggtatggaattctcatttttacg

SEQ ID NO: 4510642 - DNA, 25 bp, Homo sapien
tttatgccataggtatggaattctc

SEQ ID NO: 4510643 - DNA, 25 bp, Homo sapien
cataggtatggaattctcattttta

SEQ ID NO: 4510644 - DNA, 25 bp, Homo sapien
gtatggaattctcatttttacgtct

SEQ ID NO: 4510645 - DNA, 25 bp, Homo sapien
tgagcttgctactccagccgttacg

SEQ ID NO: 4510646 - DNA, 25 bp, Homo sapien
gcctgcaaggctacgaacggagctg

SEQ ID NO: 4510647 - DNA, 25 bp, Homo sapien
gttgccatccaaaatgcccgagatt

SEQ ID NO: 4510648 - DNA, 25 bp, Homo sapien
catctgtcggagaagtttggctgca

SEQ ID NO: 4510649 - DNA, 25 bp, Homo sapien
tacctcctgtcagattgaacgtggc

SEQ ID NO: 4510650 - DNA, 25 bp, Homo sapien
taattaagtgatctgactgatgcgc

SEQ ID NO: 4510651 - DNA, 25 bp, Homo sapien
tgatgcgctagctccaataatacct

SEQ ID NO: 4510652 - DNA, 25 bp, Homo sapien
taaaggttgagtagcacatcagtca

SEQ ID NO: 4510653 - DNA, 25 bp, Homo sapien
ggtgcttcgtttctgtggtgttcat

SEQ ID NO: 4510654 - DNA, 25 bp, Homo sapien
gggtgcttcgtttctgtggtgttca

SEQ ID NO: 4510655 - DNA, 25 bp, Homo sapien
tgacagagaagacctaggttgccct

SEQ ID NO: 4510656 - DNA, 25 bp, Homo sapien
tatgaactgatctcaaatgggcagg

SEQ ID NO: 4510657 - DNA, 25 bp, Homo sapien
cactggttatgctgtgcccaaagac

SEQ ID NO: 4510658 - DNA, 25 bp, Homo sapien
tgaaaatccgtgtctacccagagct

SEQ ID NO: 4510659 - DNA, 25 bp, Homo sapien
cattaagatctaagcgcgtgatgct

SEQ ID NO: 4510660 - DNA, 25 bp, Homo sapien
gcgtgatgcttgctttcccacacat

SEQ ID NO: 4510661 - DNA, 25 bp, Homo sapien
cagtgttggggaaaatagatgcttc

SEQ ID NO: 4510662 - DNA, 25 bp, Homo sapien
gatgcttcattaagatctaagcgcg

SEQ ID NO: 4510663 - DNA, 25 bp, Homo sapien
gggctgcatgcaggacatgcccata

SEQ ID NO: 4510664 - DNA, 25 bp, Homo sapien
catgcaggacatgcccataaggagc

SEQ ID NO: 4510665 - DNA, 25 bp, Homo sapien
gacatgcccataaggagcgtcgctg

SEQ ID NO: 4510666 - DNA, 25 bp, Homo sapien
cataaggagcgtcgctggctacagc

SEQ ID NO: 4510667 - DNA, 25 bp, Homo sapien
agcctcccacgctggtcacggccct

SEQ ID NO: 4510668 - DNA, 25 bp, Homo sapien
aggtcgctggctgagagagctgcgc

SEQ ID NO: 4510669 - DNA, 25 bp, Homo sapien
ctggtcacggcccttctcttggagg

SEQ ID NO: 4510670 - DNA, 25 bp, Homo sapien
tcttggaggtcgctggctgagagag

SEQ ID NO: 4510671 - DNA, 25 bp, Homo sapien
gcagatgtacgggtgctccatctgg

SEQ ID NO: 4510672 - DNA, 25 bp, Homo sapien
tggtgcagatgtacgggtgctccat

SEQ ID NO: 4510673 - DNA, 25 bp, Homo sapien
gatgtacgggtgctccatctggctc

SEQ ID NO: 4510674 - DNA, 25 bp, Homo sapien
tacttgcgtgtggtgcagatgtacg

SEQ ID NO: 4510675 - DNA, 25 bp, Homo sapien
ttcttggtcgtccacccctgcatgt

SEQ ID NO: 4510676 - DNA, 25 bp, Homo sapien
tggagggagctgttgcttgatagca

SEQ ID NO: 4510677 - DNA, 25 bp, Homo sapien
gttttcctcaaacatgggctgcttc

SEQ ID NO: 4510678 - DNA, 25 bp, Homo sapien
tgggtggttgtctggtctgacggca

SEQ ID NO: 4510679 - DNA, 25 bp, Homo sapien
ccaaatttggagagcgtttagccat

SEQ ID NO: 4510680 - DNA, 25 bp, Homo sapien
aacttctcacaatcaattttatggg

SEQ ID NO: 4510681 - DNA, 25 bp, Homo sapien
cactttaccagcgtgaggtacagaa

SEQ ID NO: 4510682 - DNA, 25 bp, Homo sapien
cccttggtattacattatgcacatg

SEQ ID NO: 4510683 - DNA, 25 bp, Homo sapien
cactttctccatatcgattttatac

SEQ ID NO: 4510684 - DNA, 25 bp, Homo sapien
tcccacccaggagcatggtatgttt

SEQ ID NO: 4510685 - DNA, 25 bp, Homo sapien
cagatgaacttgagaatctgcttgt

SEQ ID NO: 4510686 - DNA, 25 bp, Homo sapien
gattaattgggggagaatgacatct

SEQ ID NO: 4510687 - DNA, 25 bp, Homo sapien
agaagacagggccaaggctgcccat

SEQ ID NO: 4510688 - DNA, 25 bp, Homo sapien
ctgtggcccacagggaagaagacag

SEQ ID NO: 4510689 - DNA, 25 bp, Homo sapien
gggaagaagacagggccaaggctgc

SEQ ID NO: 4510690 - DNA, 25 bp, Homo sapien
gaagaagacagggccaaggctgccc

SEQ ID NO: 4510691 - DNA, 25 bp, Homo sapien
caaagagctttcacacgcactgtcc

SEQ ID NO: 4510692 - DNA, 25 bp, Homo sapien
ttcccaaagagctttcacacgcact

SEQ ID NO: 4510693 - DNA, 25 bp, Homo sapien
gtcccatttccgtcatcggcagagc

SEQ ID NO: 4510694 - DNA, 25 bp, Homo sapien
agctttcacacgcactgtcccattt

SEQ ID NO: 4510695 - DNA, 25 bp, Homo sapien
gagaagcggtgcgtagtcgatgagc

SEQ ID NO: 4510696 - DNA, 25 bp, Homo sapien
ctggtgtggacaccgtccgaggcca

SEQ ID NO: 4510697 - DNA, 25 bp, Homo sapien
cctgattctaaaggcgggctgctca

SEQ ID NO: 4510698 - DNA, 25 bp, Homo sapien
gatagcggcagtccgtggaagccac

SEQ ID NO: 4510699 - DNA, 25 bp, Homo sapien
taagggcccctaatgtagtaacatg

SEQ ID NO: 4510700 - DNA, 25 bp, Homo sapien
gaattccaccggtctttatcagttg

SEQ ID NO: 4510701 - DNA, 25 bp, Homo sapien
agagccgtgcagcacagccatggac

SEQ ID NO: 4510702 - DNA, 25 bp, Homo sapien
cctttgcataaacaaggactgtgtc

SEQ ID NO: 4510703 - DNA, 25 bp, Homo sapien
tacactggagccatagtcccagcat

SEQ ID NO: 4510704 - DNA, 25 bp, Homo sapien
gctgctggtacactggagccatagt

SEQ ID NO: 4510705 - DNA, 25 bp, Homo sapien
cagatgctgctggtacactggagcc

SEQ ID NO: 4510706 - DNA, 25 bp, Homo sapien
cctccagatgctgctggtacactgg

SEQ ID NO: 4510707 - DNA, 25 bp, Homo sapien
ggtgactctggccgtccctgagatg

SEQ ID NO: 4510708 - DNA, 25 bp, Homo sapien
tccctgagatgattgccacctcctt

SEQ ID NO: 4510709 - DNA, 25 bp, Homo sapien
tcaggtgactctggccgtccctgag

SEQ ID NO: 4510710 - DNA, 25 bp, Homo sapien
gactctggccgtccctgagatgatt

SEQ ID NO: 4510711 - DNA, 25 bp, Homo sapien
tctaaaatacctggctcgagcagct

SEQ ID NO: 4510712 - DNA, 25 bp, Homo sapien
gcagattgccgttccttgttatgcc

SEQ ID NO: 4510713 - DNA, 25 bp, Homo sapien
atggacagacgcctctggagacctg

SEQ ID NO: 4510714 - DNA, 25 bp, Homo sapien
caaagcggtttcctatgtgcctcct

SEQ ID NO: 4510715 - DNA, 25 bp, Homo sapien
gtcgcgcttcgggtgctggggtctg

SEQ ID NO: 4510716 - DNA, 25 bp, Homo sapien
cagtcgcgcttcgggtgctggggtc

SEQ ID NO: 4510717 - DNA, 25 bp, Homo sapien
tcagtcgcgcttcgggtgctggggt

SEQ ID NO: 4510718 - DNA, 25 bp, Homo sapien
agtcgcgcttcgggtgctggggtct

SEQ ID NO: 4510719 - DNA, 25 bp, Homo sapien
gtccatactgtgaccactggcccag

SEQ ID NO: 4510720 - DNA, 25 bp, Homo sapien
agttattagtaccaactgctgtctc

SEQ ID NO: 4510721 - DNA, 25 bp, Homo sapien
tggccactcccagttattagtacca

SEQ ID NO: 4510722 - DNA, 25 bp, Homo sapien
cccagcatcaaggacgtggatggcc

SEQ ID NO: 4510723 - DNA, 25 bp, Homo sapien
gggatgtaccagggcaaatgcagca

SEQ ID NO: 4510724 - DNA, 25 bp, Homo sapien
taacggacaggcgtcctatgtcgga

SEQ ID NO: 4510725 - DNA, 25 bp, Homo sapien
aaatgcagcaaagacacagcggtca

SEQ ID NO: 4510726 - DNA, 25 bp, Homo sapien
cagactccttgtgggagaaccccgg

SEQ ID NO: 4510727 - DNA, 25 bp, Homo sapien
ctatggcgtaacttgtaatggctgc

SEQ ID NO: 4510728 - DNA, 25 bp, Homo sapien
aataagtcttctatggcgtaacttg

SEQ ID NO: 4510729 - DNA, 25 bp, Homo sapien
cgtaacttgtaatggctgctcagtg

SEQ ID NO: 4510730 - DNA, 25 bp, Homo sapien
gtgtaccttggcgtagctggcccat

SEQ ID NO: 4510731 - DNA, 25 bp, Homo sapien
tttcttctgcacctatctgttgctg

SEQ ID NO: 4510732 - DNA, 25 bp, Homo sapien
tctgcacctatctgttgctgtcgtt

SEQ ID NO: 4510733 - DNA, 25 bp, Homo sapien
cttctgcacctatctgttgctgtcg

SEQ ID NO: 4510734 - DNA, 25 bp, Homo sapien
cacctatctgttgctgtcgttttaa

SEQ ID NO: 4510735 - DNA, 25 bp, Homo sapien
ttcacttttaccacacgcatcttca

SEQ ID NO: 4510736 - DNA, 25 bp, Homo sapien
tgaagtccgggcctttgacattcag

SEQ ID NO: 4510737 - DNA, 25 bp, Homo sapien
cagaacccttcacttttaccacacg

SEQ ID NO: 4510738 - DNA, 25 bp, Homo sapien
cacacgcatcttcatgaagtccggg

SEQ ID NO: 4510739 - DNA, 25 bp, Homo sapien
ctatcttgtaccccgtcctccagat

SEQ ID NO: 4510740 - DNA, 25 bp, Homo sapien
gcctctgcatgcaccgaccacagcc

SEQ ID NO: 4510741 - DNA, 25 bp, Homo sapien
tgcatgcaccgaccacagccctgtc

SEQ ID NO: 4510742 - DNA, 25 bp, Homo sapien
agccctgtccgaccagcctctgggt

SEQ ID NO: 4510743 - DNA, 25 bp, Homo sapien
ttgccttcaaaaggcccaagttcac

SEQ ID NO: 4510744 - DNA, 25 bp, Homo sapien
tcttgccttcaaaaggcccaagttc

SEQ ID NO: 4510745 - DNA, 25 bp, Homo sapien
gatcattgccggactcttccctggg

SEQ ID NO: 4510746 - DNA, 25 bp, Homo sapien
ccaagttcacctccctgatcattgc

SEQ ID NO: 4510747 - DNA, 25 bp, Homo sapien
tgtggatgcttcacaccctgcgggt

SEQ ID NO: 4510748 - DNA, 25 bp, Homo sapien
cccatcatcccatcaagctgtggtt

SEQ ID NO: 4510749 - DNA, 25 bp, Homo sapien
caagctgtggtttttcctgatgtcc

SEQ ID NO: 4510750 - DNA, 25 bp, Homo sapien
gtggatgcttcacaccctgcgggtc

SEQ ID NO: 4510751 - DNA, 25 bp, Homo sapien
gcttgcctgtttctgacactgggct

SEQ ID NO: 4510752 - DNA, 25 bp, Homo sapien
ctgccacctggacgttgcctgctgg

SEQ ID NO: 4510753 - DNA, 25 bp, Homo sapien
cacctggacgttgcctgctggcttg

SEQ ID NO: 4510754 - DNA, 25 bp, Homo sapien
tggcttgcctgtttctgacactggg

SEQ ID NO: 4510755 - DNA, 25 bp, Homo sapien
ccgatttccccagcccgccggatgt

SEQ ID NO: 4510756 - DNA, 25 bp, Homo sapien
cgatttccccagcccgccggatgta

SEQ ID NO: 4510757 - DNA, 25 bp, Homo sapien
gatttccccagcccgccggatgtac

SEQ ID NO: 4510758 - DNA, 25 bp, Homo sapien
cccgatttccccagcccgccggatg

SEQ ID NO: 4510759 - DNA, 25 bp, Homo sapien
cttcccagacaaaggtaaatcatca

SEQ ID NO: 4510760 - DNA, 25 bp, Homo sapien
ttcccagacaaaggtaaatcatcag

SEQ ID NO: 4510761 - DNA, 25 bp, Homo sapien
cccagacaaaggtaaatcatcagac

SEQ ID NO: 4510762 - DNA, 25 bp, Homo sapien
agacaaaggtaaatcatcagacaga

SEQ ID NO: 4510763 - DNA, 25 bp, Homo sapien
ggtcttggccttgccaccgaccaga

SEQ ID NO: 4510764 - DNA, 25 bp, Homo sapien
gaccagaagccctggtcttgctccc

SEQ ID NO: 4510765 - DNA, 25 bp, Homo sapien
gctcccaccagctgatgtttctcct

SEQ ID NO: 4510766 - DNA, 25 bp, Homo sapien
tctcctgactattgctccgaaggcc

SEQ ID NO: 4510767 - DNA, 25 bp, Homo sapien
gctggactggctgtgcgcggctggc

SEQ ID NO: 4510768 - DNA, 25 bp, Homo sapien
gattggttttcggtctaaggctgtc

SEQ ID NO: 4510769 - DNA, 25 bp, Homo sapien
tgctctgagccaagctggactggct

SEQ ID NO: 4510770 - DNA, 25 bp, Homo sapien
taaggctgtcttggttttatgctct

SEQ ID NO: 4510771 - DNA, 25 bp, Homo sapien
tcggcagatgacataactacatgga

SEQ ID NO: 4510772 - DNA, 25 bp, Homo sapien
aaagagcctggagattaacccctgg

SEQ ID NO: 4510773 - DNA, 25 bp, Homo sapien
taagggagttgatcagcaacagcca

SEQ ID NO: 4510774 - DNA, 25 bp, Homo sapien
tctgagaagacgaaagaaaccattc

SEQ ID NO: 4510775 - DNA, 25 bp, Homo sapien
tcctgccacacttcgctgctgtgcc

SEQ ID NO: 4510776 - DNA, 25 bp, Homo sapien
tgccacacttcgctgctgtgcccag

SEQ ID NO: 4510777 - DNA, 25 bp, Homo sapien
cctggctcctgccacacttcgctgc

SEQ ID NO: 4510778 - DNA, 25 bp, Homo sapien
gctcctgccacacttcgctgctgtg

SEQ ID NO: 4510779 - DNA, 25 bp, Homo sapien
ttgtctctgtagttcttgactctcc

SEQ ID NO: 4510780 - DNA, 25 bp, Homo sapien
tctctgtagttcttgactctccctg

SEQ ID NO: 4510781 - DNA, 25 bp, Homo sapien
tcgtttgtctctgtagttcttgact

SEQ ID NO: 4510782 - DNA, 25 bp, Homo sapien
ctctgtagttcttgactctccctgg

SEQ ID NO: 4510783 - DNA, 25 bp, Homo sapien
gaatgctagcacatctttggagacc

SEQ ID NO: 4510784 - DNA, 25 bp, Homo sapien
tcatcgttatccgtggcagaagcca

SEQ ID NO: 4510785 - DNA, 25 bp, Homo sapien
cacaaggcaggttcgagtttactga

SEQ ID NO: 4510786 - DNA, 25 bp, Homo sapien
gacagggaagcaccgactcataact

SEQ ID NO: 4510787 - DNA, 25 bp, Homo sapien
tggcccggcgtctcggggactcgcg

SEQ ID NO: 4510788 - DNA, 25 bp, Homo sapien
gctgcttgggtgacatgagcgtggc

SEQ ID NO: 4510789 - DNA, 25 bp, Homo sapien
gactcgcgctccctcggtgtccgcg

SEQ ID NO: 4510790 - DNA, 25 bp, Homo sapien
gctccggacccggtgcgcgcgccaa

SEQ ID NO: 4510791 - DNA, 25 bp, Homo sapien
agcagaactcgcgggccgaggacgc

SEQ ID NO: 4510792 - DNA, 25 bp, Homo sapien
cagaactcgcgggccgaggacgcct

SEQ ID NO: 4510793 - DNA, 25 bp, Homo sapien
cccagcagaactcgcgggccgagga

SEQ ID NO: 4510794 - DNA, 25 bp, Homo sapien
ctcccagcagaactcgcgggccgag

SEQ ID NO: 4510795 - DNA, 25 bp, Homo sapien
cctgggggttcacctgcgcggcctg

SEQ ID NO: 4510796 - DNA, 25 bp, Homo sapien
ctgggggttcacctgcgcggcctgg

SEQ ID NO: 4510797 - DNA, 25 bp, Homo sapien
ccacctccattaggggtgactcaca

SEQ ID NO: 4510798 - DNA, 25 bp, Homo sapien
ttctcccacctccattaggggtgac

SEQ ID NO: 4510799 - DNA, 25 bp, Homo sapien
ccaccacgcctcctgttctcccacc

SEQ ID NO: 4510800 - DNA, 25 bp, Homo sapien
cccaccacgcctcctgttctcccac

SEQ ID NO: 4510801 - DNA, 25 bp, Homo sapien
tggcaggagcccttgtgaacatgga

SEQ ID NO: 4510802 - DNA, 25 bp, Homo sapien
catctagtgtagcaaagcgaaggcc

SEQ ID NO: 4510803 - DNA, 25 bp, Homo sapien
gaacgcagggaggtgaagttacatc

SEQ ID NO: 4510804 - DNA, 25 bp, Homo sapien
aaggccatgtgggacgttgatctcc

SEQ ID NO: 4510805 - DNA, 25 bp, Homo sapien
tgtttctgtccaacaagtatggccg

SEQ ID NO: 4510806 - DNA, 25 bp, Homo sapien
aggcagactgagagttctgggtact

SEQ ID NO: 4510807 - DNA, 25 bp, Homo sapien
cagactgagagttctgggtactgtt

SEQ ID NO: 4510808 - DNA, 25 bp, Homo sapien
aagtatggccggttctcctctaggg

SEQ ID NO: 4510809 - DNA, 25 bp, Homo sapien
gacaaatggaaagttcagcccaaaa

SEQ ID NO: 4510810 - DNA, 25 bp, Homo sapien
catcggagtcaagatattgccgggc

SEQ ID NO: 4510811 - DNA, 25 bp, Homo sapien
gaagctggtcttcctacaacatcgg

SEQ ID NO: 4510812 - DNA, 25 bp, Homo sapien
tttagtctcccctcagtacagcagg

SEQ ID NO: 4510813 - DNA, 25 bp, Homo sapien
tcatctccggtatcctgaaggtggt

SEQ ID NO: 4510814 - DNA, 25 bp, Homo sapien
aatgtgcacccaggcatagatgagg

SEQ ID NO: 4510815 - DNA, 25 bp, Homo sapien
gggatgctagtctggcctgctgaac

SEQ ID NO: 4510816 - DNA, 25 bp, Homo sapien
ggtgtccatcagctatttttcaagg

SEQ ID NO: 4510817 - DNA, 25 bp, Homo sapien
gaacctagaagacagggttgtcgac

SEQ ID NO: 4510818 - DNA, 25 bp, Homo sapien
acctagaagacagggttgtcgacat

SEQ ID NO: 4510819 - DNA, 25 bp, Homo sapien
tttgaacctagaagacagggttgtc

SEQ ID NO: 4510820 - DNA, 25 bp, Homo sapien
ttgaacctagaagacagggttgtcg

SEQ ID NO: 4510821 - DNA, 25 bp, Homo sapien
taaatagctgaagacggaatggctg

SEQ ID NO: 4510822 - DNA, 25 bp, Homo sapien
caggaggttgtgacactttaatgct

SEQ ID NO: 4510823 - DNA, 25 bp, Homo sapien
caggaaatttgaaagcaccatgttc

SEQ ID NO: 4510824 - DNA, 25 bp, Homo sapien
caaattacctctcagtcgttgtgaa

SEQ ID NO: 4510825 - DNA, 25 bp, Homo sapien
caaagtttaacaggaagttgctggt

SEQ ID NO: 4510826 - DNA, 25 bp, Homo sapien
cgttggttgctacatccaaagttta

SEQ ID NO: 4510827 - DNA, 25 bp, Homo sapien
accgagggccatatttctcgttggt

SEQ ID NO: 4510828 - DNA, 25 bp, Homo sapien
ccaaagtttaacaggaagttgctgg

SEQ ID NO: 4510829 - DNA, 25 bp, Homo sapien
cacgggcttcagtgagagcatgggc

SEQ ID NO: 4510830 - DNA, 25 bp, Homo sapien
acgggcttcagtgagagcatgggct

SEQ ID NO: 4510831 - DNA, 25 bp, Homo sapien
cgggcttcagtgagagcatgggctg

SEQ ID NO: 4510832 - DNA, 25 bp, Homo sapien
tgcccggctcgaccctggagacacc

SEQ ID NO: 4510833 - DNA, 25 bp, Homo sapien
tgggcctctcgggtctctggcccct

SEQ ID NO: 4510834 - DNA, 25 bp, Homo sapien
tcgcccaccccggagaatggcagtt

SEQ ID NO: 4510835 - DNA, 25 bp, Homo sapien
atggcagttccgtcgcacgcaccat

SEQ ID NO: 4510836 - DNA, 25 bp, Homo sapien
ggagaatggcagttccgtcgcacgc

SEQ ID NO: 4510837 - DNA, 25 bp, Homo sapien
tccactcccgttagctcgtagaact

SEQ ID NO: 4510838 - DNA, 25 bp, Homo sapien
cattccactcccgttagctcgtaga

SEQ ID NO: 4510839 - DNA, 25 bp, Homo sapien
tagctcgtagaactcctcgccactg

SEQ ID NO: 4510840 - DNA, 25 bp, Homo sapien
tcccgttagctcgtagaactcctcg

SEQ ID NO: 4510841 - DNA, 25 bp, Homo sapien
gacacacgcacccgaaccccttcca

SEQ ID NO: 4510842 - DNA, 25 bp, Homo sapien
cacagacacacgcacccgaacccct

SEQ ID NO: 4510843 - DNA, 25 bp, Homo sapien
gaaccccttccacgaaggctgcttg

SEQ ID NO: 4510844 - DNA, 25 bp, Homo sapien
cgaaccccttccacgaaggctgctt

SEQ ID NO: 4510845 - DNA, 25 bp, Homo sapien
tctgtggcgtcgctcgtcctcctag

SEQ ID NO: 4510846 - DNA, 25 bp, Homo sapien
tagttggagagccatgaccctgggc

SEQ ID NO: 4510847 - DNA, 25 bp, Homo sapien
gaacatcactcctagcatctggctg

SEQ ID NO: 4510848 - DNA, 25 bp, Homo sapien
cctgggcactctgcactgttatcct

SEQ ID NO: 4510849 - DNA, 25 bp, Homo sapien
tggtaaaggtaccgaaggcaggaga

SEQ ID NO: 4510850 - DNA, 25 bp, Homo sapien
taaaggtaccgaaggcaggagagca

SEQ ID NO: 4510851 - DNA, 25 bp, Homo sapien
gtaaaggtaccgaaggcaggagagc

SEQ ID NO: 4510852 - DNA, 25 bp, Homo sapien
tccaggtcattgttgtaatcctcca

SEQ ID NO: 4510853 - DNA, 25 bp, Homo sapien
tccagcggcatgaacgtgagctttt

SEQ ID NO: 4510854 - DNA, 25 bp, Homo sapien
agtgctgtgaacaacgctttctaaa

SEQ ID NO: 4510855 - DNA, 25 bp, Homo sapien
tgagaacgtccttgggaagtcctgc

SEQ ID NO: 4510856 - DNA, 25 bp, Homo sapien
tggggagaccctgcgcgcgcggggc

SEQ ID NO: 4510857 - DNA, 25 bp, Homo sapien
actggggagaccctgcgcgcgcggg

SEQ ID NO: 4510858 - DNA, 25 bp, Homo sapien
gaactggggagaccctgcgcgcgcg

SEQ ID NO: 4510859 - DNA, 25 bp, Homo sapien
ctattgggagcacgagtgcagctgg

SEQ ID NO: 4510860 - DNA, 25 bp, Homo sapien
gggcagggaggcccgtgacactggg

SEQ ID NO: 4510861 - DNA, 25 bp, Homo sapien
ccgtccagacggtcttcgtgggcag

SEQ ID NO: 4510862 - DNA, 25 bp, Homo sapien
gccacggcgtggtgagaagcagaga

SEQ ID NO: 4510863 - DNA, 25 bp, Homo sapien
tcagaactggccgtccagacggtct

SEQ ID NO: 4510864 - DNA, 25 bp, Homo sapien
cagaagaatctctctcccttgaagc

SEQ ID NO: 4510865 - DNA, 25 bp, Homo sapien
caggtgcccttccaaagtccagaag

SEQ ID NO: 4510866 - DNA, 25 bp, Homo sapien
aggtgcccttccaaagtccagaaga

SEQ ID NO: 4510867 - DNA, 25 bp, Homo sapien
ccaggtgcccttccaaagtccagaa

SEQ ID NO: 4510868 - DNA, 25 bp, Homo sapien
acaccctgaggatggagcggctgca

SEQ ID NO: 4510869 - DNA, 25 bp, Homo sapien
tgcactcaggctgttcctctgaggg

SEQ ID NO: 4510870 - DNA, 25 bp, Homo sapien
caatgtccccgacaccctgaggatg

SEQ ID NO: 4510871 - DNA, 25 bp, Homo sapien
gcgcaaatgtttgggagctggaggg

SEQ ID NO: 4510872 - DNA, 25 bp, Homo sapien
gactaagaactgcacccgtccttga

SEQ ID NO: 4510873 - DNA, 25 bp, Homo sapien
ttcacgggcccacagtctgaagaac

SEQ ID NO: 4510874 - DNA, 25 bp, Homo sapien
gaagcagccctgtctgcaaaccgtc

SEQ ID NO: 4510875 - DNA, 25 bp, Homo sapien
ggagtttaagctcctgcagaagcag

SEQ ID NO: 4510876 - DNA, 25 bp, Homo sapien
gagaccggcgctccggagcaggctt

SEQ ID NO: 4510877 - DNA, 25 bp, Homo sapien
ccggcgctccggagcaggctttgct

SEQ ID NO: 4510878 - DNA, 25 bp, Homo sapien
ctcacgcacaggagaccggcgctcc

SEQ ID NO: 4510879 - DNA, 25 bp, Homo sapien
acgcacaggagaccggcgctccgga

SEQ ID NO: 4510880 - DNA, 25 bp, Homo sapien
ttaatgaccccagatcgcacgtcct

SEQ ID NO: 4510881 - DNA, 25 bp, Homo sapien
ccaggatcaatgaggagctcttaat

SEQ ID NO: 4510882 - DNA, 25 bp, Homo sapien
ggcccatcaccaggctagcacttgg

SEQ ID NO: 4510883 - DNA, 25 bp, Homo sapien
gagctcttaatgaccccagatcgca

SEQ ID NO: 4510884 - DNA, 25 bp, Homo sapien
cacaatggctgacggtagtgtgccc

SEQ ID NO: 4510885 - DNA, 25 bp, Homo sapien
gctgattggctggaccactggttaa

SEQ ID NO: 4510886 - DNA, 25 bp, Homo sapien
tccgggaaatgcttccacaatggct

SEQ ID NO: 4510887 - DNA, 25 bp, Homo sapien
cttagtaagcctgagagtgggtttc

SEQ ID NO: 4510888 - DNA, 25 bp, Homo sapien
tgggtgagtatccagccaagtggcc

SEQ ID NO: 4510889 - DNA, 25 bp, Homo sapien
tacataagatacagggatccttctc

SEQ ID NO: 4510890 - DNA, 25 bp, Homo sapien
gttacacaatccctgtccttctggg

SEQ ID NO: 4510891 - DNA, 25 bp, Homo sapien
taaaatgggcttgcaatggtgcttc

SEQ ID NO: 4510892 - DNA, 25 bp, Homo sapien
cagacgagctttgacgagtttagca

SEQ ID NO: 4510893 - DNA, 25 bp, Homo sapien
cgcaatttacgggaccacatctggt

SEQ ID NO: 4510894 - DNA, 25 bp, Homo sapien
tgtgtgctttcatagaagtgcccgt

SEQ ID NO: 4510895 - DNA, 25 bp, Homo sapien
taggatattggctcgaaaaagggtc

SEQ ID NO: 4510896 - DNA, 25 bp, Homo sapien
tgcctgtgtttcagcggaagatgag

SEQ ID NO: 4510897 - DNA, 25 bp, Homo sapien
ccatccacagatggttaaatggatc

SEQ ID NO: 4510898 - DNA, 25 bp, Homo sapien
tggatctggatcaaccacctccgag

SEQ ID NO: 4510899 - DNA, 25 bp, Homo sapien
cctgtggctgccctatgccgggtta

SEQ ID NO: 4510900 - DNA, 25 bp, Homo sapien
cagccactggatagcaatgaagttt

SEQ ID NO: 4510901 - DNA, 25 bp, Homo sapien
ggatagcaatgaagtttagcccaga

SEQ ID NO: 4510902 - DNA, 25 bp, Homo sapien
tggagttggtggacacacaataggc

SEQ ID NO: 4510903 - DNA, 25 bp, Homo sapien
ctggtttggagttggtggacacaca

SEQ ID NO: 4510904 - DNA, 25 bp, Homo sapien
gtctgcacactgaaccttgaagaca

SEQ ID NO: 4510905 - DNA, 25 bp, Homo sapien
tcccttagcatcttgcttgtgggag

SEQ ID NO: 4510906 - DNA, 25 bp, Homo sapien
tcctgtctgcacactgaaccttgaa

SEQ ID NO: 4510907 - DNA, 25 bp, Homo sapien
tagcatcttgcttgtgggagaggtt

SEQ ID NO: 4510908 - DNA, 25 bp, Homo sapien
gaattcccgacttagcgacactttg

SEQ ID NO: 4510909 - DNA, 25 bp, Homo sapien
tgaactaggtcagacatcagacgct

SEQ ID NO: 4510910 - DNA, 25 bp, Homo sapien
acatgtggaagccaagccgctgcta

SEQ ID NO: 4510911 - DNA, 25 bp, Homo sapien
tgctaacaggcccatgaattcccga

SEQ ID NO: 4510912 - DNA, 25 bp, Homo sapien
ctgtctggagagtctcttctaagaa

SEQ ID NO: 4510913 - DNA, 25 bp, Homo sapien
gctgtctggagagtctcttctaaga

SEQ ID NO: 4510914 - DNA, 25 bp, Homo sapien
actcagagcggccagaagtcctgct

SEQ ID NO: 4510915 - DNA, 25 bp, Homo sapien
tctgtatttgaggagttggaagcag

SEQ ID NO: 4510916 - DNA, 25 bp, Homo sapien
gaaggctgataaacggcagccgtca

SEQ ID NO: 4510917 - DNA, 25 bp, Homo sapien
gctgagctaagccagtctgtatttg

SEQ ID NO: 4510918 - DNA, 25 bp, Homo sapien
ggaagcaggtgattcgggcacaaat

SEQ ID NO: 4510919 - DNA, 25 bp, Homo sapien
taggatgtgagatactcggctctta

SEQ ID NO: 4510920 - DNA, 25 bp, Homo sapien
ctttaggatgtgagatactcggctc

SEQ ID NO: 4510921 - DNA, 25 bp, Homo sapien
gatgtgagatactcggctcttactg

SEQ ID NO: 4510922 - DNA, 25 bp, Homo sapien
ggatgtgagatactcggctcttact

SEQ ID NO: 4510923 - DNA, 25 bp, Homo sapien
tagactatctgctctcgggcacgga

SEQ ID NO: 4510924 - DNA, 25 bp, Homo sapien
tctgctctcgggcacggaccggcat

SEQ ID NO: 4510925 - DNA, 25 bp, Homo sapien
gtggcatctgggacagccccggtta

SEQ ID NO: 4510926 - DNA, 25 bp, Homo sapien
ggttaaggtctcatagactatctgc

SEQ ID NO: 4510927 - DNA, 25 bp, Homo sapien
tctaccgacatggacatgggcccct

SEQ ID NO: 4510928 - DNA, 25 bp, Homo sapien
gggcgtccctcatgcattctaccga

SEQ ID NO: 4510929 - DNA, 25 bp, Homo sapien
gaccgaatgggcttgggcgtccctc

SEQ ID NO: 4510930 - DNA, 25 bp, Homo sapien
gaggcatctgggaccgaatgggctt

SEQ ID NO: 4510931 - DNA, 25 bp, Homo sapien
acccctgacatgcagccgtctgttt

SEQ ID NO: 4510932 - DNA, 25 bp, Homo sapien
catgcagccgtctgtttaaaatctg

SEQ ID NO: 4510933 - DNA, 25 bp, Homo sapien
tgacatgcagccgtctgtttaaaat

SEQ ID NO: 4510934 - DNA, 25 bp, Homo sapien
tgcaaacacccctgacatgcagccg

SEQ ID NO: 4510935 - DNA, 25 bp, Homo sapien
atgccagcatttccgcagataagcg

SEQ ID NO: 4510936 - DNA, 25 bp, Homo sapien
accgcagaaacagaacagtgcaaat

SEQ ID NO: 4510937 - DNA, 25 bp, Homo sapien
ggaggcaaccgcagaaacagaacag

SEQ ID NO: 4510938 - DNA, 25 bp, Homo sapien
catttccgcagataagcgtggcccg

SEQ ID NO: 4510939 - DNA, 25 bp, Homo sapien
ctaaaggagtatcagcagccaggga

SEQ ID NO: 4510940 - DNA, 25 bp, Homo sapien
ctggctcttggtttagtctggatcc

SEQ ID NO: 4510941 - DNA, 25 bp, Homo sapien
gctcctggctcttggtttagtctgg

SEQ ID NO: 4510942 - DNA, 25 bp, Homo sapien
cctggctcttggtttagtctggatc

SEQ ID NO: 4510943 - DNA, 25 bp, Homo sapien
ctcctggctcttggtttagtctgga

SEQ ID NO: 4510944 - DNA, 25 bp, Homo sapien
cttgtggaagcccaccaacccaaga

SEQ ID NO: 4510945 - DNA, 25 bp, Homo sapien
tccttttgcttgatacgcctgggac

SEQ ID NO: 4510946 - DNA, 25 bp, Homo sapien
ctgaatcgggctggaacttgtggaa

SEQ ID NO: 4510947 - DNA, 25 bp, Homo sapien
cctgggactggagatcttggctgaa

SEQ ID NO: 4510948 - DNA, 25 bp, Homo sapien
cagaggtacagcgccagcccctcct

SEQ ID NO: 4510949 - DNA, 25 bp, Homo sapien
ctcctctgagctccctcggctccag

SEQ ID NO: 4510950 - DNA, 25 bp, Homo sapien
tcggctccaggggtcacagctgctt

SEQ ID NO: 4510951 - DNA, 25 bp, Homo sapien
tcagaggtacagcgccagcccctcc

SEQ ID NO: 4510952 - DNA, 25 bp, Homo sapien
gccaagtgttcctgtcaaaagagtt

SEQ ID NO: 4510953 - DNA, 25 bp, Homo sapien
tcgaggatgtgttaaccctgtgtcc

SEQ ID NO: 4510954 - DNA, 25 bp, Homo sapien
gtcacgccgcttaccttttatccag

SEQ ID NO: 4510955 - DNA, 25 bp, Homo sapien
tgtgtccttttcagggtcacgccgc

SEQ ID NO: 4510956 - DNA, 25 bp, Homo sapien
aaaacgtacttaagccaggagaatg

SEQ ID NO: 4510957 - DNA, 25 bp, Homo sapien
gcccaaatgtagtctgccttgaaaa

SEQ ID NO: 4510958 - DNA, 25 bp, Homo sapien
tattaggctcagcttcagtcatgtg

SEQ ID NO: 4510959 - DNA, 25 bp, Homo sapien
ttagctaattgctgtgactgcagga

SEQ ID NO: 4510960 - DNA, 25 bp, Homo sapien
tactggaagttattagagttagtcc

SEQ ID NO: 4510961 - DNA, 25 bp, Homo sapien
gtttagaatccacctggaattggtc

SEQ ID NO: 4510962 - DNA, 25 bp, Homo sapien
ccctgttgatccgtgtgtgacctct

SEQ ID NO: 4510963 - DNA, 25 bp, Homo sapien
gatggtgtgaggtagattctacttt

SEQ ID NO: 4510964 - DNA, 25 bp, Homo sapien
tgttttccgctgttgtgactgttca

SEQ ID NO: 4510965 - DNA, 25 bp, Homo sapien
taatgcatgttttagaaccgtgtaa

SEQ ID NO: 4510966 - DNA, 25 bp, Homo sapien
taaaatgatttcaggctgtgtgctc

SEQ ID NO: 4510967 - DNA, 25 bp, Homo sapien
ctaggattcatccacgtgacttctc

SEQ ID NO: 4510968 - DNA, 25 bp, Homo sapien
gacacggacactcaatgctgaggag

SEQ ID NO: 4510969 - DNA, 25 bp, Homo sapien
tgctgtaaacgtgcgaacaagagac

SEQ ID NO: 4510970 - DNA, 25 bp, Homo sapien
tagtacttctacgactttggagcca

SEQ ID NO: 4510971 - DNA, 25 bp, Homo sapien
tagagggcacgtgggaaattttcca

SEQ ID NO: 4510972 - DNA, 25 bp, Homo sapien
acagtttggccattcacccgctaaa

SEQ ID NO: 4510973 - DNA, 25 bp, Homo sapien
aagctgctatggacgttagtgagca

SEQ ID NO: 4510974 - DNA, 25 bp, Homo sapien
gccattcacccgctaaaggacattt

SEQ ID NO: 4510975 - DNA, 25 bp, Homo sapien
tggtgttccacgttccacagtgtgg

SEQ ID NO: 4510976 - DNA, 25 bp, Homo sapien
tactagcccttggaggaatatatga

SEQ ID NO: 4510977 - DNA, 25 bp, Homo sapien
tattctagatactagcccttggagg

SEQ ID NO: 4510978 - DNA, 25 bp, Homo sapien
gcccttggaggaatatatgatttgc

SEQ ID NO: 4510979 - DNA, 25 bp, Homo sapien
attgagtgatttgtttccttactgt

SEQ ID NO: 4510980 - DNA, 25 bp, Homo sapien
atgccaatgttgtaccgaggtgtga

SEQ ID NO: 4510981 - DNA, 25 bp, Homo sapien
tgccaatgttgtaccgaggtgtgag

SEQ ID NO: 4510982 - DNA, 25 bp, Homo sapien
ccaatgttgtaccgaggtgtgaggg

SEQ ID NO: 4510983 - DNA, 25 bp, Homo sapien
tatgccaatgttgtaccgaggtgtg

SEQ ID NO: 4510984 - DNA, 25 bp, Homo sapien
ggaacctcgaaagcatcgtactaag

SEQ ID NO: 4510985 - DNA, 25 bp, Homo sapien
tatacacatgaaggaggaacctcga

SEQ ID NO: 4510986 - DNA, 25 bp, Homo sapien
taagtcagagaatgcataaggcacc

SEQ ID NO: 4510987 - DNA, 25 bp, Homo sapien
tgcaaatccgaaactcgccaggact

SEQ ID NO: 4510988 - DNA, 25 bp, Homo sapien
gcatgtgaagggtaaggaagaccac

SEQ ID NO: 4510989 - DNA, 25 bp, Homo sapien
tgaagtcctggaacaataagacagc

SEQ ID NO: 4510990 - DNA, 25 bp, Homo sapien
tgcagtccatacagatgtctcccag

SEQ ID NO: 4510991 - DNA, 25 bp, Homo sapien
cttggttccatagccagtgagggca

SEQ ID NO: 4510992 - DNA, 25 bp, Homo sapien
gcggcggccggagccctcttgggac

SEQ ID NO: 4510993 - DNA, 25 bp, Homo sapien
cggccggagccctcttgggacccat

SEQ ID NO: 4510994 - DNA, 25 bp, Homo sapien
ccgcggcggccggagccctcttggg

SEQ ID NO: 4510995 - DNA, 25 bp, Homo sapien
aggtgggagcccgcggcggccggag

SEQ ID NO: 4510996 - DNA, 25 bp, Homo sapien
accaggagccgcagccgcggctcac

SEQ ID NO: 4510997 - DNA, 25 bp, Homo sapien
cttccacaagaaccaggagccgcag

SEQ ID NO: 4510998 - DNA, 25 bp, Homo sapien
ttccacaagaaccaggagccgcagc

SEQ ID NO: 4510999 - DNA, 25 bp, Homo sapien
aggagccgcagccgcggctcacgct

SEQ ID NO: 4511000 - DNA, 25 bp, Homo sapien
gggaagatgtccctgtcagggttaa

SEQ ID NO: 4511001 - DNA, 25 bp, Homo sapien
gggagaggcgaagccgcgagcgctc

SEQ ID NO: 4511002 - DNA, 25 bp, Homo sapien
ccctcccgccggagatgagggaaga

SEQ ID NO: 4511003 - DNA, 25 bp, Homo sapien
gatgtccctgtcagggttaaggcca

SEQ ID NO: 4511004 - DNA, 25 bp, Homo sapien
cgcccctcctatcggtggcgtcggt

SEQ ID NO: 4511005 - DNA, 25 bp, Homo sapien
cctatcggtggcgtcggtcgcaaag

SEQ ID NO: 4511006 - DNA, 25 bp, Homo sapien
ggcgtcggtcgcaaagggagcagcc

SEQ ID NO: 4511007 - DNA, 25 bp, Homo sapien
caggagccgcccctcctatcggtgg

SEQ ID NO: 4511008 - DNA, 25 bp, Homo sapien
tccagccaactgaagcatgctcttc

SEQ ID NO: 4511009 - DNA, 25 bp, Homo sapien
tttacgtttcttgtctcaacactaa

SEQ ID NO: 4511010 - DNA, 25 bp, Homo sapien
cgtttcttgtctcaacactaacatt

SEQ ID NO: 4511011 - DNA, 25 bp, Homo sapien
tcttcttgacacagttagctctcgg

SEQ ID NO: 4511012 - DNA, 25 bp, Homo sapien
gggaacagagcaaagtagacacaca

SEQ ID NO: 4511013 - DNA, 25 bp, Homo sapien
ggaacagagcaaagtagacacacac

SEQ ID NO: 4511014 - DNA, 25 bp, Homo sapien
cagggaacagagcaaagtagacaca

SEQ ID NO: 4511015 - DNA, 25 bp, Homo sapien
agggaacagagcaaagtagacacac

SEQ ID NO: 4511016 - DNA, 25 bp, Homo sapien
acctggccagagcttgcgccaggct

SEQ ID NO: 4511017 - DNA, 25 bp, Homo sapien
cctggccagagcttgcgccaggctg

SEQ ID NO: 4511018 - DNA, 25 bp, Homo sapien
gacctggccagagcttgcgccaggc

SEQ ID NO: 4511019 - DNA, 25 bp, Homo sapien
tgcctcaagttaccaatccagaaat

SEQ ID NO: 4511020 - DNA, 25 bp, Homo sapien
cacatgctctagatggtttcaggcc

SEQ ID NO: 4511021 - DNA, 25 bp, Homo sapien
atcttagtcctgactctagtgccca

SEQ ID NO: 4511022 - DNA, 25 bp, Homo sapien
gaagcacagagaaaggcaactggcc

SEQ ID NO: 4511023 - DNA, 25 bp, Homo sapien
ggagtgcatgaagctgtgggagcca

SEQ ID NO: 4511024 - DNA, 25 bp, Homo sapien
gtgggagccattctcctcagccttg

SEQ ID NO: 4511025 - DNA, 25 bp, Homo sapien
catggagtgcatgaagctgtgggag

SEQ ID NO: 4511026 - DNA, 25 bp, Homo sapien
ggtggtttccatttgccgctccagc

SEQ ID NO: 4511027 - DNA, 25 bp, Homo sapien
attgtagatcatgatgtgcatgatg

SEQ ID NO: 4511028 - DNA, 25 bp, Homo sapien
gtgcatgatggtcttgggcttcgca

SEQ ID NO: 4511029 - DNA, 25 bp, Homo sapien
tgatggtcttgggcttcgcaccaac

SEQ ID NO: 4511030 - DNA, 25 bp, Homo sapien
catgatggtcttgggcttcgcacca

SEQ ID NO: 4511031 - DNA, 25 bp, Homo sapien
tcccccaggccaacatggccacctg

SEQ ID NO: 4511032 - DNA, 25 bp, Homo sapien
tggacctggtcccatagggctggtc

SEQ ID NO: 4511033 - DNA, 25 bp, Homo sapien
atccccagtgccacaggagccgcct

SEQ ID NO: 4511034 - DNA, 25 bp, Homo sapien
tagggctggtcagcatctcccccag

SEQ ID NO: 4511035 - DNA, 25 bp, Homo sapien
cgttcccacgcgagtgcaggttgga

SEQ ID NO: 4511036 - DNA, 25 bp, Homo sapien
ttcccacgcgagtgcaggttggaca

SEQ ID NO: 4511037 - DNA, 25 bp, Homo sapien
gttcccacgcgagtgcaggttggac

SEQ ID NO: 4511038 - DNA, 25 bp, Homo sapien
tcccacgcgagtgcaggttggacag

SEQ ID NO: 4511039 - DNA, 25 bp, Homo sapien
gttcccacgcgagtgcaggttggac

SEQ ID NO: 4511040 - DNA, 25 bp, Homo sapien
ttcccacgcgagtgcaggttggaca

SEQ ID NO: 4511041 - DNA, 25 bp, Homo sapien
tcccacgcgagtgcaggttggacag

SEQ ID NO: 4511042 - DNA, 25 bp, Homo sapien
gttcccacgcgagtgcaggttggac

SEQ ID NO: 4511043 - DNA, 25 bp, Homo sapien
tcccacgcgagtgcaggttggacag

SEQ ID NO: 4511044 - DNA, 25 bp, Homo sapien
cgttcccacgcgagtgcaggttgga

SEQ ID NO: 4511045 - DNA, 25 bp, Homo sapien
ttcccacgcgagtgcaggttggaca

SEQ ID NO: 4511046 - DNA, 25 bp, Homo sapien
tgcaggttccgacgcgagtacaggt

SEQ ID NO: 4511047 - DNA, 25 bp, Homo sapien
aagtgtctgcaggttccgacgcgag

SEQ ID NO: 4511048 - DNA, 25 bp, Homo sapien
tgtctgcaggttccgacgcgagtac

SEQ ID NO: 4511049 - DNA, 25 bp, Homo sapien
ccacaagtgtctgcaggttccgacg

SEQ ID NO: 4511050 - DNA, 25 bp, Homo sapien
tctgagaagcagcatctcgtcgcac

SEQ ID NO: 4511051 - DNA, 25 bp, Homo sapien
tcgttcccacgccagtgcaggttgg

SEQ ID NO: 4511052 - DNA, 25 bp, Homo sapien
cccacgccagtgcaggttggacagc

SEQ ID NO: 4511053 - DNA, 25 bp, Homo sapien
gttcccacgccagtgcaggttggac

SEQ ID NO: 4511054 - DNA, 25 bp, Homo sapien
tgtctgcaggttccgacgcgagtac

SEQ ID NO: 4511055 - DNA, 25 bp, Homo sapien
aagtgtctgcaggttccgacgcgag

SEQ ID NO: 4511056 - DNA, 25 bp, Homo sapien
tgcaggttccgacgcgagtacaggt

SEQ ID NO: 4511057 - DNA, 25 bp, Homo sapien
ccacaagtgtctgcaggttccgacg

SEQ ID NO: 4511058 - DNA, 25 bp, Homo sapien
cgttcccacgcgagtgcaggttgga

SEQ ID NO: 4511059 - DNA, 25 bp, Homo sapien
gttcccacgcgagtgcaggttggac

SEQ ID NO: 4511060 - DNA, 25 bp, Homo sapien
ttcccacgcgagtgcaggttggaca

SEQ ID NO: 4511061 - DNA, 25 bp, Homo sapien
tcccacgcgagtgcaggttggacag

SEQ ID NO: 4511062 - DNA, 25 bp, Homo sapien
gaactccttggtctgcctgctctgc

SEQ ID NO: 4511063 - DNA, 25 bp, Homo sapien
ctgccgacgcctccacgagtgtctt

SEQ ID NO: 4511064 - DNA, 25 bp, Homo sapien
tgaactccttggtctgcctgctctg

SEQ ID NO: 4511065 - DNA, 25 bp, Homo sapien
ctgctctgccgacgcctccacgagt

SEQ ID NO: 4511066 - DNA, 25 bp, Homo sapien
cgcgagtgcagtttggacagcagct

SEQ ID NO: 4511067 - DNA, 25 bp, Homo sapien
tcgttcccacgcgagtgcagtttgg

SEQ ID NO: 4511068 - DNA, 25 bp, Homo sapien
tcccacgcgagtgcagtttggacag

SEQ ID NO: 4511069 - DNA, 25 bp, Homo sapien
gagtgtcttctcgttcccacgcgag

SEQ ID NO: 4511070 - DNA, 25 bp, Homo sapien
acgcgagtctcgtcacaccgctgtg

SEQ ID NO: 4511071 - DNA, 25 bp, Homo sapien
ctgccgactcctccaggagtgtctt

SEQ ID NO: 4511072 - DNA, 25 bp, Homo sapien
ctcctccaggagtgtcttcttcttc

SEQ ID NO: 4511073 - DNA, 25 bp, Homo sapien
ttcttcccacgcgagtctcgtcaca

SEQ ID NO: 4511074 - DNA, 25 bp, Homo sapien
ctgcaggttccgacgcgagtacagg

SEQ ID NO: 4511075 - DNA, 25 bp, Homo sapien
ccacaagtgtctgcaggttccgacg

SEQ ID NO: 4511076 - DNA, 25 bp, Homo sapien
caagtgtctgcaggttccgacgcga

SEQ ID NO: 4511077 - DNA, 25 bp, Homo sapien
tgcaggttccgacgcgagtacaggt

SEQ ID NO: 4511078 - DNA, 25 bp, Homo sapien
acgcctccacgagtgtctgctcgtt

SEQ ID NO: 4511079 - DNA, 25 bp, Homo sapien
ctgccaacgcctccacgagtgtctg

SEQ ID NO: 4511080 - DNA, 25 bp, Homo sapien
caacgcctccacgagtgtctgctcg

SEQ ID NO: 4511081 - DNA, 25 bp, Homo sapien
gccaacgcctccacgagtgtctgct

SEQ ID NO: 4511082 - DNA, 25 bp, Homo sapien
gagtgtcttctcgttcccacgcgag

SEQ ID NO: 4511083 - DNA, 25 bp, Homo sapien
cgcgagtgcagtttggacagcagct

SEQ ID NO: 4511084 - DNA, 25 bp, Homo sapien
tcgttcccacgcgagtgcagtttgg

SEQ ID NO: 4511085 - DNA, 25 bp, Homo sapien
tcccacgcgagtgcagtttggacag

SEQ ID NO: 4511086 - DNA, 25 bp, Homo sapien
cgcgagtctcgtcacacctctgtgc

SEQ ID NO: 4511087 - DNA, 25 bp, Homo sapien
gcgagtctcgtcacacctctgtgcc

SEQ ID NO: 4511088 - DNA, 25 bp, Homo sapien
cgagtctcgtcacacctctgtgcct

SEQ ID NO: 4511089 - DNA, 25 bp, Homo sapien
gagtctcgtcacacctctgtgcctg

SEQ ID NO: 4511090 - DNA, 25 bp, Homo sapien
gacgcctccacgagtgtctgcaggt

SEQ ID NO: 4511091 - DNA, 25 bp, Homo sapien
tgcaggttccgacgcgagtacaggt

SEQ ID NO: 4511092 - DNA, 25 bp, Homo sapien
ctccacgagtgtctgcaggttccga

SEQ ID NO: 4511093 - DNA, 25 bp, Homo sapien
agtgtctgcaggttccgacgcgagt

SEQ ID NO: 4511094 - DNA, 25 bp, Homo sapien
ctgccaacgcctccacgagtgtctg

SEQ ID NO: 4511095 - DNA, 25 bp, Homo sapien
acgcctccacgagtgtctgctcgtt

SEQ ID NO: 4511096 - DNA, 25 bp, Homo sapien
caacgcctccacgagtgtctgctcg

SEQ ID NO: 4511097 - DNA, 25 bp, Homo sapien
gccaacgcctccacgagtgtctgct

SEQ ID NO: 4511098 - DNA, 25 bp, Homo sapien
actcctccatgagtgtcttctcgtt

SEQ ID NO: 4511099 - DNA, 25 bp, Homo sapien
tccatgagtgtcttctcgttcccac

SEQ ID NO: 4511100 - DNA, 25 bp, Homo sapien
cgactcctccatgagtgtcttctcg

SEQ ID NO: 4511101 - DNA, 25 bp, Homo sapien
tcctccatgagtgtcttctcgttcc

SEQ ID NO: 4511102 - DNA, 25 bp, Homo sapien
ctccacgagtgtctgcaggttccga

SEQ ID NO: 4511103 - DNA, 25 bp, Homo sapien
tgcaggttccgacgcgagtacaggt

SEQ ID NO: 4511104 - DNA, 25 bp, Homo sapien
gacgcctccacgagtgtctgcaggt

SEQ ID NO: 4511105 - DNA, 25 bp, Homo sapien
agtgtctgcaggttccgacgcgagt

SEQ ID NO: 4511106 - DNA, 25 bp, Homo sapien
cgttcccacgcgagtgcaggttgga

SEQ ID NO: 4511107 - DNA, 25 bp, Homo sapien
gttcccacgcgagtgcaggttggac

SEQ ID NO: 4511108 - DNA, 25 bp, Homo sapien
ttcccacgcgagtgcaggttggaca

SEQ ID NO: 4511109 - DNA, 25 bp, Homo sapien
tcccacgcgagtgcaggttggacag

SEQ ID NO: 4511110 - DNA, 25 bp, Homo sapien
tctgctcgttcccacgtgagtacag

SEQ ID NO: 4511111 - DNA, 25 bp, Homo sapien
aagtgtctgcaggttccgacgcgag

SEQ ID NO: 4511112 - DNA, 25 bp, Homo sapien
ccacaagtgtctgcaggttccgacg

SEQ ID NO: 4511113 - DNA, 25 bp, Homo sapien
gagtctcgtcacacctctgtgcctg

SEQ ID NO: 4511114 - DNA, 25 bp, Homo sapien
tgcaggttccgacgcgagtacaggt

SEQ ID NO: 4511115 - DNA, 25 bp, Homo sapien
gacgcctccacgagtgtctgcaggt

SEQ ID NO: 4511116 - DNA, 25 bp, Homo sapien
gagtctcgtcacacctctgtgcctg

SEQ ID NO: 4511117 - DNA, 25 bp, Homo sapien
cacgagtgtctgcaggttccgacgc

SEQ ID NO: 4511118 - DNA, 25 bp, Homo sapien
aagtgtctgcaggttccgacgcgag

SEQ ID NO: 4511119 - DNA, 25 bp, Homo sapien
gtgtctgcaggttccgacgcgagta

SEQ ID NO: 4511120 - DNA, 25 bp, Homo sapien
acaagtgtctgcaggttccgacgcg

SEQ ID NO: 4511121 - DNA, 25 bp, Homo sapien
ccacaagtgtctgcaggttccgacg

SEQ ID NO: 4511122 - DNA, 25 bp, Homo sapien
ttcccacgcgagtgcaggttggaca

SEQ ID NO: 4511123 - DNA, 25 bp, Homo sapien
cgttcccacgcgagtgcaggttgga

SEQ ID NO: 4511124 - DNA, 25 bp, Homo sapien
gttcccacgcgagtgcaggttggac

SEQ ID NO: 4511125 - DNA, 25 bp, Homo sapien
tcccacgcgagtgcaggttggacag

SEQ ID NO: 4511126 - DNA, 25 bp, Homo sapien
tcccacgcgagtgcaggttggacag

SEQ ID NO: 4511127 - DNA, 25 bp, Homo sapien
cgttcccacgcgagtgcaggttgga

SEQ ID NO: 4511128 - DNA, 25 bp, Homo sapien
gttcccacgcgagtgcaggttggac

SEQ ID NO: 4511129 - DNA, 25 bp, Homo sapien
ttcccacgcgagtgcaggttggaca

SEQ ID NO: 4511130 - DNA, 25 bp, Homo sapien
aagtgtctgcaggttccgacgcgag

SEQ ID NO: 4511131 - DNA, 25 bp, Homo sapien
tgtctgcaggttccgacgcgagtac

SEQ ID NO: 4511132 - DNA, 25 bp, Homo sapien
tgcaggttccgacgcgagtacaggt

SEQ ID NO: 4511133 - DNA, 25 bp, Homo sapien
ccacaagtgtctgcaggttccgacg

SEQ ID NO: 4511134 - DNA, 25 bp, Homo sapien
cgttcccacgcgagtgcaggttgga

SEQ ID NO: 4511135 - DNA, 25 bp, Homo sapien
gttcccacgcgagtgcaggttggac

SEQ ID NO: 4511136 - DNA, 25 bp, Homo sapien
tcccacgcgagtgcaggttggacag

SEQ ID NO: 4511137 - DNA, 25 bp, Homo sapien
ttcccacgcgagtgcaggttggaca

SEQ ID NO: 4511138 - DNA, 25 bp, Homo sapien
tgtctgcaggttccgacgcgagtac

SEQ ID NO: 4511139 - DNA, 25 bp, Homo sapien
tgcaggttccgacgcgagtacaggt

SEQ ID NO: 4511140 - DNA, 25 bp, Homo sapien
ccacaagtgtctgcaggttccgacg

SEQ ID NO: 4511141 - DNA, 25 bp, Homo sapien
aagtgtctgcaggttccgacgcgag

SEQ ID NO: 4511142 - DNA, 25 bp, Homo sapien
gttcccacgcgagtgcaggttggac

SEQ ID NO: 4511143 - DNA, 25 bp, Homo sapien
cgttcccacgcgagtgcaggttgga

SEQ ID NO: 4511144 - DNA, 25 bp, Homo sapien
tcccacgcgagtgcaggttggacag

SEQ ID NO: 4511145 - DNA, 25 bp, Homo sapien
ttcccacgcgagtgcaggttggaca

SEQ ID NO: 4511146 - DNA, 25 bp, Homo sapien
tgtctgcaggttccgacgcgagtac

SEQ ID NO: 4511147 - DNA, 25 bp, Homo sapien
aagtgtctgcaggttccgacgcgag

SEQ ID NO: 4511148 - DNA, 25 bp, Homo sapien
tgcaggttccgacgcgagtacaggt

SEQ ID NO: 4511149 - DNA, 25 bp, Homo sapien
ccacaagtgtctgcaggttccgacg

SEQ ID NO: 4511150 - DNA, 25 bp, Homo sapien
gacgccttcacgagtgtcttctcat

SEQ ID NO: 4511151 - DNA, 25 bp, Homo sapien
tgcaggttccgacgcgagtacaggt

SEQ ID NO: 4511152 - DNA, 25 bp, Homo sapien
gacgcctccacgagtgtctgcaggt

SEQ ID NO: 4511153 - DNA, 25 bp, Homo sapien
gagtctcgtcacacctctgtgcctg

SEQ ID NO: 4511154 - DNA, 25 bp, Homo sapien
tgcaggttccgacgcgagtacaggt

SEQ ID NO: 4511155 - DNA, 25 bp, Homo sapien
ctgcaggttccgacgcgagtacagg

SEQ ID NO: 4511156 - DNA, 25 bp, Homo sapien
tcccacgcgagtgcaggttggacag

SEQ ID NO: 4511157 - DNA, 25 bp, Homo sapien
cgttcccacgcgagtgcaggttgga

SEQ ID NO: 4511158 - DNA, 25 bp, Homo sapien
gttcccacgcgagtgcaggttggac

SEQ ID NO: 4511159 - DNA, 25 bp, Homo sapien
ttcccacgcgagtgcaggttggaca

SEQ ID NO: 4511160 - DNA, 25 bp, Homo sapien
caggttggacagcagctctgagaag

SEQ ID NO: 4511161 - DNA, 25 bp, Homo sapien
ggttggacagcagctctgagaagat

SEQ ID NO: 4511162 - DNA, 25 bp, Homo sapien
tgagaagatgaactccttggtctgc

SEQ ID NO: 4511163 - DNA, 25 bp, Homo sapien
tcgttcccacgcgagtacaggttgg

SEQ ID NO: 4511164 - DNA, 25 bp, Homo sapien
gcctgctctgccgacgcctccacga

SEQ ID NO: 4511165 - DNA, 25 bp, Homo sapien
ctgccgacgcctccacgagtgtctt

SEQ ID NO: 4511166 - DNA, 25 bp, Homo sapien
ctgctctgccgacgcctccacgagt

SEQ ID NO: 4511167 - DNA, 25 bp, Homo sapien
ctctgccgacgcctccacgagtgtc

SEQ ID NO: 4511168 - DNA, 25 bp, Homo sapien
gttcccacgcgagtgcaggttggac

SEQ ID NO: 4511169 - DNA, 25 bp, Homo sapien
cgttcccacgcgagtgcaggttgga

SEQ ID NO: 4511170 - DNA, 25 bp, Homo sapien
tcccacgcgagtgcaggttggacag

SEQ ID NO: 4511171 - DNA, 25 bp, Homo sapien
ttcccacgcgagtgcaggttggaca

SEQ ID NO: 4511172 - DNA, 25 bp, Homo sapien
tgtctgcaggttccgatgcgagtac

SEQ ID NO: 4511173 - DNA, 25 bp, Homo sapien
gcaggttccgatgcgagtacaggtt

SEQ ID NO: 4511174 - DNA, 25 bp, Homo sapien
caagtgtctgcaggttccgatgcga

SEQ ID NO: 4511175 - DNA, 25 bp, Homo sapien
ccacaagtgtctgcaggttccgatg

SEQ ID NO: 4511176 - DNA, 25 bp, Homo sapien
gacgccttcacgagtgtcttctcat

SEQ ID NO: 4511177 - DNA, 25 bp, Homo sapien
acgcctccacgagtgtctgctcgtt

SEQ ID NO: 4511178 - DNA, 25 bp, Homo sapien
ccgacgccttcacgagtgtcttctc

SEQ ID NO: 4511179 - DNA, 25 bp, Homo sapien
ccgacgcctccacgagtgtctgctc

SEQ ID NO: 4511180 - DNA, 25 bp, Homo sapien
tgcaggttccgacgcgagtacaggt

SEQ ID NO: 4511181 - DNA, 25 bp, Homo sapien
ccacaagtgtctgcaggttccgacg

SEQ ID NO: 4511182 - DNA, 25 bp, Homo sapien
gagtctcgtcacacctctgtgcctg

SEQ ID NO: 4511183 - DNA, 25 bp, Homo sapien
aagtgtctgcaggttccgacgcgag

SEQ ID NO: 4511184 - DNA, 25 bp, Homo sapien
tcccacgcgagtgcaggttggacag

SEQ ID NO: 4511185 - DNA, 25 bp, Homo sapien
gttcccacgcgagtgcaggttggac

SEQ ID NO: 4511186 - DNA, 25 bp, Homo sapien
ttcccacgcgagtgcaggttggaca

SEQ ID NO: 4511187 - DNA, 25 bp, Homo sapien
gagtgtcttctcgttcccacgcgag

SEQ ID NO: 4511188 - DNA, 25 bp, Homo sapien
tccacgagtgtcttctcgttcccac

SEQ ID NO: 4511189 - DNA, 25 bp, Homo sapien
tctgccgacgcctccacgagtgtct

SEQ ID NO: 4511190 - DNA, 25 bp, Homo sapien
ctgccgacgcctccacgagtgtctt

SEQ ID NO: 4511191 - DNA, 25 bp, Homo sapien
cgttcccacgcgagtgcaggttgga

SEQ ID NO: 4511192 - DNA, 25 bp, Homo sapien
gttcccacgcgagtgcaggttggac

SEQ ID NO: 4511193 - DNA, 25 bp, Homo sapien
tcccacgcgagtgcaggttggacag

SEQ ID NO: 4511194 - DNA, 25 bp, Homo sapien
ttcccacgcgagtgcaggttggaca

SEQ ID NO: 4511195 - DNA, 25 bp, Homo sapien
cccacgcgagtctcgtcacgccgct

SEQ ID NO: 4511196 - DNA, 25 bp, Homo sapien
cttcccacgcgagtctcgtcacgcc

SEQ ID NO: 4511197 - DNA, 25 bp, Homo sapien
acgcgagtctcgtcacgccgctgtg

SEQ ID NO: 4511198 - DNA, 25 bp, Homo sapien
cacgcgagtctcgtcacgccgctgt

SEQ ID NO: 4511199 - DNA, 25 bp, Homo sapien
tgcaggttccgacgcgagtacaggt

SEQ ID NO: 4511200 - DNA, 25 bp, Homo sapien
ctgcaggttccgacgcgagtacagg

SEQ ID NO: 4511201 - DNA, 25 bp, Homo sapien
tcccacgcgagtgcaggttggacag

SEQ ID NO: 4511202 - DNA, 25 bp, Homo sapien
gttcccacgcgagtgcaggttggac

SEQ ID NO: 4511203 - DNA, 25 bp, Homo sapien
ttcccacgcgagtgcaggttggaca

SEQ ID NO: 4511204 - DNA, 25 bp, Homo sapien
aagtgtctgcaggttccgacgcgag

SEQ ID NO: 4511205 - DNA, 25 bp, Homo sapien
tgtctgcaggttccgacgcgagtac

SEQ ID NO: 4511206 - DNA, 25 bp, Homo sapien
tgcaggttccgacgcgagtacaggt

SEQ ID NO: 4511207 - DNA, 25 bp, Homo sapien
ccacaagtgtctgcaggttccgacg

SEQ ID NO: 4511208 - DNA, 25 bp, Homo sapien
acgcctccacgagtgtctgctcgtt

SEQ ID NO: 4511209 - DNA, 25 bp, Homo sapien
ctgccaacgcctccacgagtgtctg

SEQ ID NO: 4511210 - DNA, 25 bp, Homo sapien
gacgccttcacgagtgtcttctcat

SEQ ID NO: 4511211 - DNA, 25 bp, Homo sapien
ccgacgccttcacgagtgtcttctc

SEQ ID NO: 4511212 - DNA, 25 bp, Homo sapien
aagtgtctgcaggttccgacgcgag

SEQ ID NO: 4511213 - DNA, 25 bp, Homo sapien
tgtctgcaggttccgacgcgagtac

SEQ ID NO: 4511214 - DNA, 25 bp, Homo sapien
tctgcaggttccgacgcgagtacag

SEQ ID NO: 4511215 - DNA, 25 bp, Homo sapien
ccacaagtgtctgcaggttccgacg

SEQ ID NO: 4511216 - DNA, 25 bp, Homo sapien
ctgccgacgcctccacgagtgtctt

SEQ ID NO: 4511217 - DNA, 25 bp, Homo sapien
gtgcaggttggacagcagctctgag

SEQ ID NO: 4511218 - DNA, 25 bp, Homo sapien
aagatgaactccttggtctgcctgc

SEQ ID NO: 4511219 - DNA, 25 bp, Homo sapien
gcgagtgcaggttggacagcagctc

SEQ ID NO: 4511220 - DNA, 25 bp, Homo sapien
gcaggttggacagcagctctgagaa

SEQ ID NO: 4511221 - DNA, 25 bp, Homo sapien
cttcccacgcgagtctcgtcacgcc

SEQ ID NO: 4511222 - DNA, 25 bp, Homo sapien
ctccatgagtgtcttctcgttccca

SEQ ID NO: 4511223 - DNA, 25 bp, Homo sapien
tccatgagtgtcttctcgttcccac

SEQ ID NO: 4511224 - DNA, 25 bp, Homo sapien
acgcgagtctcgtcacgccgctgtg

SEQ ID NO: 4511225 - DNA, 25 bp, Homo sapien
tgtctgcaggttccgatgcgagtac

SEQ ID NO: 4511226 - DNA, 25 bp, Homo sapien
gcaggttccgatgcgagtacaggtt

SEQ ID NO: 4511227 - DNA, 25 bp, Homo sapien
caagtgtctgcaggttccgatgcga

SEQ ID NO: 4511228 - DNA, 25 bp, Homo sapien
ccacaagtgtctgcaggttccgatg

SEQ ID NO: 4511229 - DNA, 25 bp, Homo sapien
tctgagaagcagcatctcgtcgcac

SEQ ID NO: 4511230 - DNA, 25 bp, Homo sapien
agctctgagaagcagcatctcgtcg

SEQ ID NO: 4511231 - DNA, 25 bp, Homo sapien
gctctgagaagcagcatctcgtcgc

SEQ ID NO: 4511232 - DNA, 25 bp, Homo sapien
gcagctctgagaagcagcatctcgt

SEQ ID NO: 4511233 - DNA, 25 bp, Homo sapien
gttcccacgcgagtgcaggttggac

SEQ ID NO: 4511234 - DNA, 25 bp, Homo sapien
cgttcccacgcgagtgcaggttgga

SEQ ID NO: 4511235 - DNA, 25 bp, Homo sapien
tcccacgcgagtgcaggttggacag

SEQ ID NO: 4511236 - DNA, 25 bp, Homo sapien
ttcccacgcgagtgcaggttggaca

SEQ ID NO: 4511237 - DNA, 25 bp, Homo sapien
gcctgctctgccgacgcctccacga

SEQ ID NO: 4511238 - DNA, 25 bp, Homo sapien
ctgccgacgcctccacgagtgtctt

SEQ ID NO: 4511239 - DNA, 25 bp, Homo sapien
ctgctctgccgacgcctccacgagt

SEQ ID NO: 4511240 - DNA, 25 bp, Homo sapien
ctctgccgacgcctccacgagtgtc

SEQ ID NO: 4511241 - DNA, 25 bp, Homo sapien
tgtctgcaggttccgacgcgagtac

SEQ ID NO: 4511242 - DNA, 25 bp, Homo sapien
tgcaggttccgacgcgagtacaggt

SEQ ID NO: 4511243 - DNA, 25 bp, Homo sapien
ccacaagtgtctgcaggttccgacg

SEQ ID NO: 4511244 - DNA, 25 bp, Homo sapien
aagtgtctgcaggttccgacgcgag

SEQ ID NO: 4511245 - DNA, 25 bp, Homo sapien
ctggttcccacgcgagggctggttg

SEQ ID NO: 4511246 - DNA, 25 bp, Homo sapien
tctgagaagcagcatctcgtcgcac

SEQ ID NO: 4511247 - DNA, 25 bp, Homo sapien
agctctgagaagcagcatctcgtcg

SEQ ID NO: 4511248 - DNA, 25 bp, Homo sapien
ggttcccacgcgagggctggttgga

SEQ ID NO: 4511249 - DNA, 25 bp, Homo sapien
aagtgtctgcaggttccgacgcgag

SEQ ID NO: 4511250 - DNA, 25 bp, Homo sapien
tgtctgcaggttccgacgcgagtac

SEQ ID NO: 4511251 - DNA, 25 bp, Homo sapien
tgcaggttccgacgcgagtacaggt

SEQ ID NO: 4511252 - DNA, 25 bp, Homo sapien
ccacaagtgtctgcaggttccgacg

SEQ ID NO: 4511253 - DNA, 25 bp, Homo sapien
gagtgtcttctcgttcccacgcaag

SEQ ID NO: 4511254 - DNA, 25 bp, Homo sapien
tcgttcccacgcaagtgcagtttgg

SEQ ID NO: 4511255 - DNA, 25 bp, Homo sapien
cacgcaagtgcagtttggacagcag

SEQ ID NO: 4511256 - DNA, 25 bp, Homo sapien
caagtgcagtttggacagcagctct

SEQ ID NO: 4511257 - DNA, 25 bp, Homo sapien
tgccgactcctccaggagtgtcttc

SEQ ID NO: 4511258 - DNA, 25 bp, Homo sapien
tctgccgactcctccaggagtgtct

SEQ ID NO: 4511259 - DNA, 25 bp, Homo sapien
ccgactcctccaggagtgtcttctt

SEQ ID NO: 4511260 - DNA, 25 bp, Homo sapien
gctctgccgactcctccaggagtgt

SEQ ID NO: 4511261 - DNA, 25 bp, Homo sapien
aagtgtctgcaggttccgacgcgag

SEQ ID NO: 4511262 - DNA, 25 bp, Homo sapien
tgtctgcaggttccgacgcgagtac

SEQ ID NO: 4511263 - DNA, 25 bp, Homo sapien
tgcaggttccgacgcgagtacaggt

SEQ ID NO: 4511264 - DNA, 25 bp, Homo sapien
ccacaagtgtctgcaggttccgacg

SEQ ID NO: 4511265 - DNA, 25 bp, Homo sapien
ttcccacgcgagtgcaggttggaca

SEQ ID NO: 4511266 - DNA, 25 bp, Homo sapien
cgttcccacgcgagtgcaggttgga

SEQ ID NO: 4511267 - DNA, 25 bp, Homo sapien
gttcccacgcgagtgcaggttggac

SEQ ID NO: 4511268 - DNA, 25 bp, Homo sapien
tcccacgcgagtgcaggttggacag

SEQ ID NO: 4511269 - DNA, 25 bp, Homo sapien
gaactccttgttctgcctactctgc

SEQ ID NO: 4511270 - DNA, 25 bp, Homo sapien
tcttcttcttcccacgcgagtctcg

SEQ ID NO: 4511271 - DNA, 25 bp, Homo sapien
ctgccgactcctccaggagtgtctt

SEQ ID NO: 4511272 - DNA, 25 bp, Homo sapien
ctcctccaggagtgtcttcttcttc

SEQ ID NO: 4511273 - DNA, 25 bp, Homo sapien
ggagtgtcttctcgttcccacgcga

SEQ ID NO: 4511274 - DNA, 25 bp, Homo sapien
ccgactcctccaggagtgtcttctt

SEQ ID NO: 4511275 - DNA, 25 bp, Homo sapien
ggagtgtcttcttgtccctacgcga

SEQ ID NO: 4511276 - DNA, 25 bp, Homo sapien
cctacgcgagtgcaggttggacagc

SEQ ID NO: 4511277 - DNA, 25 bp, Homo sapien
gtcgccgatgatgctgagagcctct

SEQ ID NO: 4511278 - DNA, 25 bp, Homo sapien
cacgggcccccgtagctgtgctgat

SEQ ID NO: 4511279 - DNA, 25 bp, Homo sapien
gagagcctctttcagcacgtggtgc

SEQ ID NO: 4511280 - DNA, 25 bp, Homo sapien
ctgtgctgatggtgttcatgttgat

SEQ ID NO: 4511281 - DNA, 25 bp, Homo sapien
tgggtccagccgggacgctctgtac

SEQ ID NO: 4511282 - DNA, 25 bp, Homo sapien
ctgggtccagccgggacgctctgta

SEQ ID NO: 4511283 - DNA, 25 bp, Homo sapien
ctggcggtagtgcttcagcgggggc

SEQ ID NO: 4511284 - DNA, 25 bp, Homo sapien
ggcggtagtgcttcagcgggggcca

SEQ ID NO: 4511285 - DNA, 25 bp, Homo sapien
agcctgctggctggcggtagtgctt

SEQ ID NO: 4511286 - DNA, 25 bp, Homo sapien
ggctggcggtagtgcttcagcgggg

SEQ ID NO: 4511287 - DNA, 25 bp, Homo sapien
gagcctcagcttgttgggggttgca

SEQ ID NO: 4511288 - DNA, 25 bp, Homo sapien
agcctcagcttgttgggggttgcag

SEQ ID NO: 4511289 - DNA, 25 bp, Homo sapien
gggggttgcaggtcacaaaggtgag

SEQ ID NO: 4511290 - DNA, 25 bp, Homo sapien
ttgggggttgcaggtcacaaaggtg

SEQ ID NO: 4511291 - DNA, 25 bp, Homo sapien
cagggcggtgcacccaccgttcaga

SEQ ID NO: 4511292 - DNA, 25 bp, Homo sapien
ggtgcacccaccgttcagagcaatg

SEQ ID NO: 4511293 - DNA, 25 bp, Homo sapien
tttcagggcacccagggcggtgcac

SEQ ID NO: 4511294 - DNA, 25 bp, Homo sapien
cacacgctggcctctttcagggcac

SEQ ID NO: 4511295 - DNA, 25 bp, Homo sapien
aggtgcgggtatggcgaggctcctg

SEQ ID NO: 4511296 - DNA, 25 bp, Homo sapien
gagggcacaggtgcgggtatggcga

SEQ ID NO: 4511297 - DNA, 25 bp, Homo sapien
gcacaggtgcgggtatggcgaggct

SEQ ID NO: 4511298 - DNA, 25 bp, Homo sapien
cgggtatggcgaggctcctgggaaa

SEQ ID NO: 4511299 - DNA, 25 bp, Homo sapien
tgtttagacgttgaaggaggggctg

SEQ ID NO: 4511300 - DNA, 25 bp, Homo sapien
agggatctgtttagacgttgaagga

SEQ ID NO: 4511301 - DNA, 25 bp, Homo sapien
ctgtttagacgttgaaggaggggct

SEQ ID NO: 4511302 - DNA, 25 bp, Homo sapien
gatctgtttagacgttgaaggaggg

SEQ ID NO: 4511303 - DNA, 25 bp, Homo sapien
tcttgttgggccacaagactccaaa

SEQ ID NO: 4511304 - DNA, 25 bp, Homo sapien
ggacagcagggtgactgattcccag

SEQ ID NO: 4511305 - DNA, 25 bp, Homo sapien
aggggacagctttctcttgttgggc

SEQ ID NO: 4511306 - DNA, 25 bp, Homo sapien
acaagactccaaaaggacagcaggg

SEQ ID NO: 4511307 - DNA, 25 bp, Homo sapien
ctagttcaactgaatcaatttgaat

SEQ ID NO: 4511308 - DNA, 25 bp, Homo sapien
tagttcaactgaatcaatttgaatt

SEQ ID NO: 4511309 - DNA, 25 bp, Homo sapien
tttctcgatgacctaaaaaccgatc

SEQ ID NO: 4511310 - DNA, 25 bp, Homo sapien
aaaaaccgatcatttctgaggaacg

SEQ ID NO: 4511311 - DNA, 25 bp, Homo sapien
tctgaggaacgaaaggctcccttcg

SEQ ID NO: 4511312 - DNA, 25 bp, Homo sapien
gctgcagcagttgtactctttctcg

SEQ ID NO: 4511313 - DNA, 25 bp, Homo sapien
ttgtaggtcattagcatgcatatcg

SEQ ID NO: 4511314 - DNA, 25 bp, Homo sapien
gggcctcagcgtcagagtcctgtcc

SEQ ID NO: 4511315 - DNA, 25 bp, Homo sapien
ccctgtttgttctgtgtatgcctct

SEQ ID NO: 4511316 - DNA, 25 bp, Homo sapien
ggtcactgccgagatgtgaacccat

SEQ ID NO: 4511317 - DNA, 25 bp, Homo sapien
aagacagaagccatcagtgagcggg

SEQ ID NO: 4511318 - DNA, 25 bp, Homo sapien
tcagaactcccgcactgaccgtagt

SEQ ID NO: 4511319 - DNA, 25 bp, Homo sapien
gggagcaggtcagaactcccgcact

SEQ ID NO: 4511320 - DNA, 25 bp, Homo sapien
cccgcactgaccgtagtgggattat

SEQ ID NO: 4511321 - DNA, 25 bp, Homo sapien
gaccgtagtgggattatgcctgatc

SEQ ID NO: 4511322 - DNA, 25 bp, Homo sapien
tcaacagagcaaattggccgcagca

SEQ ID NO: 4511323 - DNA, 25 bp, Homo sapien
acagagcaaattggccgcagcaaag

SEQ ID NO: 4511324 - DNA, 25 bp, Homo sapien
agaaactcaacagagcaaattggcc

SEQ ID NO: 4511325 - DNA, 25 bp, Homo sapien
aactcaacagagcaaattggccgca

SEQ ID NO: 4511326 - DNA, 25 bp, Homo sapien
aaagccagcccctcccctgtcccag

SEQ ID NO: 4511327 - DNA, 25 bp, Homo sapien
agccagcccctcccctgtcccagag

SEQ ID NO: 4511328 - DNA, 25 bp, Homo sapien
aaagcaaaagccagcccctcccctg

SEQ ID NO: 4511329 - DNA, 25 bp, Homo sapien
agcaaaagccagcccctcccctgtc

SEQ ID NO: 4511330 - DNA, 25 bp, Homo sapien
cgttatggtgattcaaacagaggct

SEQ ID NO: 4511331 - DNA, 25 bp, Homo sapien
tgtgacgttatggtgattcaaacag

SEQ ID NO: 4511332 - DNA, 25 bp, Homo sapien
agccttgtgacgttatggtgattca

SEQ ID NO: 4511333 - DNA, 25 bp, Homo sapien
gattcaaacagaggcttcatcaaag

SEQ ID NO: 4511334 - DNA, 25 bp, Homo sapien
tcctcacattaggagtagtacgcaa

SEQ ID NO: 4511335 - DNA, 25 bp, Homo sapien
caaggtcttcgaagttacacaaggt

SEQ ID NO: 4511336 - DNA, 25 bp, Homo sapien
agcaacattatgattctagcactgg

SEQ ID NO: 4511337 - DNA, 25 bp, Homo sapien
tggaacagaataacttcatcctcac

SEQ ID NO: 4511338 - DNA, 25 bp, Homo sapien
catgagacgttagttatctggcagc

SEQ ID NO: 4511339 - DNA, 25 bp, Homo sapien
taatgcgggctatagactgggcctc

SEQ ID NO: 4511340 - DNA, 25 bp, Homo sapien
tcacctgtctgaagcctaatgcggg

SEQ ID NO: 4511341 - DNA, 25 bp, Homo sapien
aagcaagcataacgccaggccagat

SEQ ID NO: 4511342 - DNA, 25 bp, Homo sapien
tataaaacaaaatcaacaaaacaga

SEQ ID NO: 4511343 - DNA, 25 bp, Homo sapien
gaccacagagtgattggcttcatcc

SEQ ID NO: 4511344 - DNA, 25 bp, Homo sapien
agttagcacaatgaggagatttccc

SEQ ID NO: 4511345 - DNA, 25 bp, Homo sapien
gatcttccgcgagtcagagagtccc

SEQ ID NO: 4511346 - DNA, 25 bp, Homo sapien
ctgtaaacgagggtcagaggtcaca

SEQ ID NO: 4511347 - DNA, 25 bp, Homo sapien
ttcatgatggtcaggtagtggagag

SEQ ID NO: 4511348 - DNA, 25 bp, Homo sapien
catgatggtcaggtagtggagaggc

SEQ ID NO: 4511349 - DNA, 25 bp, Homo sapien
ctttgtgggttcatgatggtcaggt

SEQ ID NO: 4511350 - DNA, 25 bp, Homo sapien
gatggtcaggtagtggagaggctta

SEQ ID NO: 4511351 - DNA, 25 bp, Homo sapien
gtaggtctctatgcaagccagtttg

SEQ ID NO: 4511352 - DNA, 25 bp, Homo sapien
aacagcaggtctacaacaaaagcca

SEQ ID NO: 4511353 - DNA, 25 bp, Homo sapien
aaaagccaactgaatcactgagtga

SEQ ID NO: 4511354 - DNA, 25 bp, Homo sapien
tggcagtaaccatgaatcccaatgt

SEQ ID NO: 4511355 - DNA, 25 bp, Homo sapien
ctgaagattttttctgaacagtcac

SEQ ID NO: 4511356 - DNA, 25 bp, Homo sapien
gattttactgtaattcacaaactga

SEQ ID NO: 4511357 - DNA, 25 bp, Homo sapien
aactgcatcaaagatggcaaggaat

SEQ ID NO: 4511358 - DNA, 25 bp, Homo sapien
tgagagcatcgtcttctcattgcca

SEQ ID NO: 4511359 - DNA, 25 bp, Homo sapien
tcaaaacgggagtgataactgcatc

SEQ ID NO: 4511360 - DNA, 25 bp, Homo sapien
attccattcattgcctcagactcca

SEQ ID NO: 4511361 - DNA, 25 bp, Homo sapien
ccacagagtgattcattccattcat

SEQ ID NO: 4511362 - DNA, 25 bp, Homo sapien
tcattccattcattgcctcagactc

SEQ ID NO: 4511363 - DNA, 25 bp, Homo sapien
tgataccacagagtgattcattcca

SEQ ID NO: 4511364 - DNA, 25 bp, Homo sapien
ggttacagtgaatacaatgacaagg

SEQ ID NO: 4511365 - DNA, 25 bp, Homo sapien
ttggtgagtcccatgaatacaaatt

SEQ ID NO: 4511366 - DNA, 25 bp, Homo sapien
caatgacaaggtttcccatcatgct

SEQ ID NO: 4511367 - DNA, 25 bp, Homo sapien
atcatgctcgcaaagtagaacaaca

SEQ ID NO: 4511368 - DNA, 25 bp, Homo sapien
gggctgtaattgagcaaaatgccat

SEQ ID NO: 4511369 - DNA, 25 bp, Homo sapien
ggagccgagggagatcacagtaaaa

SEQ ID NO: 4511370 - DNA, 25 bp, Homo sapien
ccaatgagtggataaggccaatgat

SEQ ID NO: 4511371 - DNA, 25 bp, Homo sapien
tacatccccgaaaggagatggcctt

SEQ ID NO: 4511372 - DNA, 25 bp, Homo sapien
tccactattgacagtgaccatgaac

SEQ ID NO: 4511373 - DNA, 25 bp, Homo sapien
cagaaatgagtccactattgacagt

SEQ ID NO: 4511374 - DNA, 25 bp, Homo sapien
actccagttcttgggtgttggtaca

SEQ ID NO: 4511375 - DNA, 25 bp, Homo sapien
cagttcttgggtgttggtacaggca

SEQ ID NO: 4511376 - DNA, 25 bp, Homo sapien
tagaccaccagaagaatgtttccaa

SEQ ID NO: 4511377 - DNA, 25 bp, Homo sapien
gctagaccaccagaagaatgtttcc

SEQ ID NO: 4511378 - DNA, 25 bp, Homo sapien
ctagaccaccagaagaatgtttcca

SEQ ID NO: 4511379 - DNA, 25 bp, Homo sapien
ggctagaccaccagaagaatgtttc

SEQ ID NO: 4511380 - DNA, 25 bp, Homo sapien
gaaaaggagtaataaatgcatcaaa

SEQ ID NO: 4511381 - DNA, 25 bp, Homo sapien
agaaaaggagtaataaatgcatcaa

SEQ ID NO: 4511382 - DNA, 25 bp, Homo sapien
agacgactgcacagtctcctcattg

SEQ ID NO: 4511383 - DNA, 25 bp, Homo sapien
tgtaaaatgcgcaagacgactgcac

SEQ ID NO: 4511384 - DNA, 25 bp, Homo sapien
aaatgcgcaagacgactgcacagtc

SEQ ID NO: 4511385 - DNA, 25 bp, Homo sapien
atctttgtaaaatgcgcaagacgac

SEQ ID NO: 4511386 - DNA, 25 bp, Homo sapien
ctgacaccacggagtgatttgcccc

SEQ ID NO: 4511387 - DNA, 25 bp, Homo sapien
accacggagtgatttgccccaacca

SEQ ID NO: 4511388 - DNA, 25 bp, Homo sapien
acggagtgatttgccccaaccattg

SEQ ID NO: 4511389 - DNA, 25 bp, Homo sapien
gacaccacggagtgatttgccccaa

SEQ ID NO: 4511390 - DNA, 25 bp, Homo sapien
ggatctcccaggaattggtgagtcc

SEQ ID NO: 4511391 - DNA, 25 bp, Homo sapien
cggatctcccaggaattggtgagtc

SEQ ID NO: 4511392 - DNA, 25 bp, Homo sapien
atctcccaggaattggtgagtccca

SEQ ID NO: 4511393 - DNA, 25 bp, Homo sapien
gatctcccaggaattggtgagtccc

SEQ ID NO: 4511394 - DNA, 25 bp, Homo sapien
aagtgacagaggaaacacccaggtc

SEQ ID NO: 4511395 - DNA, 25 bp, Homo sapien
gaggaaacacccaggtcaatgaagg

SEQ ID NO: 4511396 - DNA, 25 bp, Homo sapien
gtgacagaggaaacacccaggtcaa

SEQ ID NO: 4511397 - DNA, 25 bp, Homo sapien
acacccaggtcaatgaaggagaggt

SEQ ID NO: 4511398 - DNA, 25 bp, Homo sapien
acgtggatgaagaagatttgagcga

SEQ ID NO: 4511399 - DNA, 25 bp, Homo sapien
gatgaagaagatttgagcgatgcag

SEQ ID NO: 4511400 - DNA, 25 bp, Homo sapien
aagatttgagcgatgcagcctccaa

SEQ ID NO: 4511401 - DNA, 25 bp, Homo sapien
gaagaagatttgagcgatgcagcct

SEQ ID NO: 4511402 - DNA, 25 bp, Homo sapien
ttgaactacagagtggataaggccg

SEQ ID NO: 4511403 - DNA, 25 bp, Homo sapien
tggataaggccggtcacccaggcag

SEQ ID NO: 4511404 - DNA, 25 bp, Homo sapien
aaaaccaattgaactacagagtgga

SEQ ID NO: 4511405 - DNA, 25 bp, Homo sapien
ccaattgaactacagagtggataag

SEQ ID NO: 4511406 - DNA, 25 bp, Homo sapien
taccacactgacgtgagctgaaagg

SEQ ID NO: 4511407 - DNA, 25 bp, Homo sapien
ggacagagccttggataaaccagct

SEQ ID NO: 4511408 - DNA, 25 bp, Homo sapien
caagtttgatgaaccgaggaaggtc

SEQ ID NO: 4511409 - DNA, 25 bp, Homo sapien
tccagtcggtagctgtctgtgcagg

SEQ ID NO: 4511410 - DNA, 25 bp, Homo sapien
tgcatcaaagatggccagaaactta

SEQ ID NO: 4511411 - DNA, 25 bp, Homo sapien
aaacttatccaggtgtgtggaggga

SEQ ID NO: 4511412 - DNA, 25 bp, Homo sapien
gatttaaaacaggagtgagaactgc

SEQ ID NO: 4511413 - DNA, 25 bp, Homo sapien
gatgataggatttaaaacaggagtg

SEQ ID NO: 4511414 - DNA, 25 bp, Homo sapien
catgacttaggagatcttcctgtga

SEQ ID NO: 4511415 - DNA, 25 bp, Homo sapien
gttgtcggcatacttttctcattgc

SEQ ID NO: 4511416 - DNA, 25 bp, Homo sapien
tgtgatttactagttgtcggcatac

SEQ ID NO: 4511417 - DNA, 25 bp, Homo sapien
aacaagccatgacttaggagatctt

SEQ ID NO: 4511418 - DNA, 25 bp, Homo sapien
aattcagacaccacagactggttgt

SEQ ID NO: 4511419 - DNA, 25 bp, Homo sapien
gagagtcccagcaacacgaattcag

SEQ ID NO: 4511420 - DNA, 25 bp, Homo sapien
ttcagacaccacagactggttgtcc

SEQ ID NO: 4511421 - DNA, 25 bp, Homo sapien
aagaatttgagagtcccagcaacac

SEQ ID NO: 4511422 - DNA, 25 bp, Homo sapien
caccggacacatagaaaagacaaga

SEQ ID NO: 4511423 - DNA, 25 bp, Homo sapien
cacattcttggatgcatgatggtca

SEQ ID NO: 4511424 - DNA, 25 bp, Homo sapien
gagacagccttggatgagcctcctg

SEQ ID NO: 4511425 - DNA, 25 bp, Homo sapien
catcttgcgtgctgcaatggagcaa

SEQ ID NO: 4511426 - DNA, 25 bp, Homo sapien
gaaccgtaagggaacttatcacaga

SEQ ID NO: 4511427 - DNA, 25 bp, Homo sapien
taaaacacttggtctaaccagaatc

SEQ ID NO: 4511428 - DNA, 25 bp, Homo sapien
acctcaaaagcagtatagaaagtca

SEQ ID NO: 4511429 - DNA, 25 bp, Homo sapien
gacaatgcctctgatacaatttaca

SEQ ID NO: 4511430 - DNA, 25 bp, Homo sapien
gaaaatggggaggaaattgtgatta

SEQ ID NO: 4511431 - DNA, 25 bp, Homo sapien
ccagccaactgggctgtggctaaaa

SEQ ID NO: 4511432 - DNA, 25 bp, Homo sapien
gccaactgggctgtggctaaaatta

SEQ ID NO: 4511433 - DNA, 25 bp, Homo sapien
agccaactgggctgtggctaaaatt

SEQ ID NO: 4511434 - DNA, 25 bp, Homo sapien
cagccaactgggctgtggctaaaat

SEQ ID NO: 4511435 - DNA, 25 bp, Homo sapien
tggatctcccatgaatgagtgagtc

SEQ ID NO: 4511436 - DNA, 25 bp, Homo sapien
cccatgaatgagtgagtcccagaaa

SEQ ID NO: 4511437 - DNA, 25 bp, Homo sapien
gaatgagtgagtcccagaaacaaaa

SEQ ID NO: 4511438 - DNA, 25 bp, Homo sapien
gagctggatctcccatgaatgagtg

SEQ ID NO: 4511439 - DNA, 25 bp, Homo sapien
agtaatgcttgccacatagagcaca

SEQ ID NO: 4511440 - DNA, 25 bp, Homo sapien
taagtgagggtcagtggtcacagaa

SEQ ID NO: 4511441 - DNA, 25 bp, Homo sapien
agtgagggtcagtggtcacagaaaa

SEQ ID NO: 4511442 - DNA, 25 bp, Homo sapien
aatgcttgccacatagagcacagag

SEQ ID NO: 4511443 - DNA, 25 bp, Homo sapien
agcaggctcctaagtcaatgaagga

SEQ ID NO: 4511444 - DNA, 25 bp, Homo sapien
gcaggctcctaagtcaatgaaggag

SEQ ID NO: 4511445 - DNA, 25 bp, Homo sapien
gcgctttctgaacaggtcataaatc

SEQ ID NO: 4511446 - DNA, 25 bp, Homo sapien
tgcgctttctgaacaggtcataaat

SEQ ID NO: 4511447 - DNA, 25 bp, Homo sapien
tttgcgctttctgaacaggtcataa

SEQ ID NO: 4511448 - DNA, 25 bp, Homo sapien
gctttctgaacaggtcataaatcgt

SEQ ID NO: 4511449 - DNA, 25 bp, Homo sapien
acgtggatgaagaagatttgagcga

SEQ ID NO: 4511450 - DNA, 25 bp, Homo sapien
gatgaagaagatttgagcgatgcag

SEQ ID NO: 4511451 - DNA, 25 bp, Homo sapien
aagatttgagcgatgcagcctccaa

SEQ ID NO: 4511452 - DNA, 25 bp, Homo sapien
gaagaagatttgagcgatgcagcct

SEQ ID NO: 4511453 - DNA, 25 bp, Homo sapien
ctgtcaaaggccatggctatgagca

SEQ ID NO: 4511454 - DNA, 25 bp, Homo sapien
tgtcaaaggccatggctatgagcag

SEQ ID NO: 4511455 - DNA, 25 bp, Homo sapien
caaaggccatggctatgagcagcac

SEQ ID NO: 4511456 - DNA, 25 bp, Homo sapien
gtcaaaggccatggctatgagcagc

SEQ ID NO: 4511457 - DNA, 25 bp, Homo sapien
aagtatgaagaaagtacccacacag

SEQ ID NO: 4511458 - DNA, 25 bp, Homo sapien
aatgccagttggaacagggagtgac

SEQ ID NO: 4511459 - DNA, 25 bp, Homo sapien
tccatctgtgaattagggtgtggcc

SEQ ID NO: 4511460 - DNA, 25 bp, Homo sapien
taggtgtcggtacaggctagtctga

SEQ ID NO: 4511461 - DNA, 25 bp, Homo sapien
atgagatcttcttgtaaatcactag

SEQ ID NO: 4511462 - DNA, 25 bp, Homo sapien
agatcttcttgtaaatcactagctg

SEQ ID NO: 4511463 - DNA, 25 bp, Homo sapien
tgagatcttcttgtaaatcactagc

SEQ ID NO: 4511464 - DNA, 25 bp, Homo sapien
ttatgagatcttcttgtaaatcact

SEQ ID NO: 4511465 - DNA, 25 bp, Homo sapien
taaatattgcatccacctagccctg

SEQ ID NO: 4511466 - DNA, 25 bp, Homo sapien
gaaattactgcacttagtcacgatg

SEQ ID NO: 4511467 - DNA, 25 bp, Homo sapien
tgaacaagtgctttacccgcagcta

SEQ ID NO: 4511468 - DNA, 25 bp, Homo sapien
gagctggacatgtgtaccttgttcc

SEQ ID NO: 4511469 - DNA, 25 bp, Homo sapien
caaccaatagaagctaaaatgacga

SEQ ID NO: 4511470 - DNA, 25 bp, Homo sapien
tataaaacatcggagaaaagaattg

SEQ ID NO: 4511471 - DNA, 25 bp, Homo sapien
ctaacatacagacaaattcatttgg

SEQ ID NO: 4511472 - DNA, 25 bp, Homo sapien
tgaattaatgggcctaagataacaa

SEQ ID NO: 4511473 - DNA, 25 bp, Homo sapien
gtctaaaacaccgagagaggcactc

SEQ ID NO: 4511474 - DNA, 25 bp, Homo sapien
tgacttttggtctagcaatcctact

SEQ ID NO: 4511475 - DNA, 25 bp, Homo sapien
aaaatttacatggtactgacttttg

SEQ ID NO: 4511476 - DNA, 25 bp, Homo sapien
cacaagtctattcattgaagcattg

SEQ ID NO: 4511477 - DNA, 25 bp, Homo sapien
ctgtcaacagtggctggctcttcat

SEQ ID NO: 4511478 - DNA, 25 bp, Homo sapien
ttactagggttatctggcagggaga

SEQ ID NO: 4511479 - DNA, 25 bp, Homo sapien
gggacccaatatacgacatgttgac

SEQ ID NO: 4511480 - DNA, 25 bp, Homo sapien
tcaattagtaggattacattcaggg

SEQ ID NO: 4511481 - DNA, 25 bp, Homo sapien
tatgatggttactagggttatctgg

SEQ ID NO: 4511482 - DNA, 25 bp, Homo sapien
gaaaggtcaaacattcaacagaggc

SEQ ID NO: 4511483 - DNA, 25 bp, Homo sapien
aacagaggctgtagctagaactgcc

SEQ ID NO: 4511484 - DNA, 25 bp, Homo sapien
tgctattcttccactgtagagaggg

SEQ ID NO: 4511485 - DNA, 25 bp, Homo sapien
tcaatcatgtcaagggctgaacatc

SEQ ID NO: 4511486 - DNA, 25 bp, Homo sapien
ggcctgccctctgtagggtgagaaa

SEQ ID NO: 4511487 - DNA, 25 bp, Homo sapien
ggagaccttacagctctcctgtcac

SEQ ID NO: 4511488 - DNA, 25 bp, Homo sapien
gaagccataaatgcatccttctcgg

SEQ ID NO: 4511489 - DNA, 25 bp, Homo sapien
atgacccactggagaccttacagct

SEQ ID NO: 4511490 - DNA, 25 bp, Homo sapien
tatacaatgtttaatacttacaaga

SEQ ID NO: 4511491 - DNA, 25 bp, Homo sapien
tctttcccttttgtgattggagaaa

SEQ ID NO: 4511492 - DNA, 25 bp, Homo sapien
tacatatacaatgtttaatacttac

SEQ ID NO: 4511493 - DNA, 25 bp, Homo sapien
aaatacatatacaatgtttaatact

SEQ ID NO: 4511494 - DNA, 25 bp, Homo sapien
ccacaagcagcttggtgcctctgaa

SEQ ID NO: 4511495 - DNA, 25 bp, Homo sapien
ctgggtcttccacaattgccgtgct

SEQ ID NO: 4511496 - DNA, 25 bp, Homo sapien
tggattccactgaccacgtgctgga

SEQ ID NO: 4511497 - DNA, 25 bp, Homo sapien
atttctcactaagggaacatccaaa

SEQ ID NO: 4511498 - DNA, 25 bp, Homo sapien
gaagcaaggcggagttgggcagctc

SEQ ID NO: 4511499 - DNA, 25 bp, Homo sapien
tgagtggtagtgatggcggcacaac

SEQ ID NO: 4511500 - DNA, 25 bp, Homo sapien
ttgggcagctcgtgttcaatgggta

SEQ ID NO: 4511501 - DNA, 25 bp, Homo sapien
tggaagggtgctggaaatgagtggt

SEQ ID NO: 4511502 - DNA, 25 bp, Homo sapien
gagcgctgtcctcgtggaccgagtc

SEQ ID NO: 4511503 - DNA, 25 bp, Homo sapien
cgctgtcctcgtggaccgagtcgcg

SEQ ID NO: 4511504 - DNA, 25 bp, Homo sapien
ccggagcgctgtcctcgtggaccga

SEQ ID NO: 4511505 - DNA, 25 bp, Homo sapien
tcctcgtggaccgagtcgcgggcct

SEQ ID NO: 4511506 - DNA, 25 bp, Homo sapien
gaacccaacgcggtgtcagagaagt

SEQ ID NO: 4511507 - DNA, 25 bp, Homo sapien
agcacgcctctttgggaccgcggtt

SEQ ID NO: 4511508 - DNA, 25 bp, Homo sapien
tatactttcgaagtgctcggagccc

SEQ ID NO: 4511509 - DNA, 25 bp, Homo sapien
agaatgtaaaccgtgcactcccagg

SEQ ID NO: 4511510 - DNA, 25 bp, Homo sapien
tggatctgttgtctgaattccaagc

SEQ ID NO: 4511511 - DNA, 25 bp, Homo sapien
gagatcaagcccagacttggatctg

SEQ ID NO: 4511512 - DNA, 25 bp, Homo sapien
catatttgggatatactggatttta

SEQ ID NO: 4511513 - DNA, 25 bp, Homo sapien
acatgctaaaataaccatatttggg

SEQ ID NO: 4511514 - DNA, 25 bp, Homo sapien
gtaagttgccgtctctgaatctgat

SEQ ID NO: 4511515 - DNA, 25 bp, Homo sapien
tgagtaagttgccgtctctgaatct

SEQ ID NO: 4511516 - DNA, 25 bp, Homo sapien
agtaagttgccgtctctgaatctga

SEQ ID NO: 4511517 - DNA, 25 bp, Homo sapien
cttgagtaagttgccgtctctgaat

SEQ ID NO: 4511518 - DNA, 25 bp, Homo sapien
tcagcctgcacagataggggagtag

SEQ ID NO: 4511519 - DNA, 25 bp, Homo sapien
atagcttcagcctgcacagataggg

SEQ ID NO: 4511520 - DNA, 25 bp, Homo sapien
agggtggtgttgagacaacacagcc

SEQ ID NO: 4511521 - DNA, 25 bp, Homo sapien
gagtaggggacagagcatttggtga

SEQ ID NO: 4511522 - DNA, 25 bp, Homo sapien
ctgtgggtgggagccggagcatcac

SEQ ID NO: 4511523 - DNA, 25 bp, Homo sapien
gggtgggagccggagcatcacagcc

SEQ ID NO: 4511524 - DNA, 25 bp, Homo sapien
gtgggtgggagccggagcatcacag

SEQ ID NO: 4511525 - DNA, 25 bp, Homo sapien
tgggagccggagcatcacagccacc

SEQ ID NO: 4511526 - DNA, 25 bp, Homo sapien
gcacggcataggtctgacctgccag

SEQ ID NO: 4511527 - DNA, 25 bp, Homo sapien
gggcacggcataggtctgacctgcc

SEQ ID NO: 4511528 - DNA, 25 bp, Homo sapien
cataggtctgacctgccagggagtg

SEQ ID NO: 4511529 - DNA, 25 bp, Homo sapien
ggcacggcataggtctgacctgcca

SEQ ID NO: 4511530 - DNA, 25 bp, Homo sapien
ttccaagttgggctctcacttcagc

SEQ ID NO: 4511531 - DNA, 25 bp, Homo sapien
agggaagccagatgggttccccagg

SEQ ID NO: 4511532 - DNA, 25 bp, Homo sapien
gactcccaggagtaaaagcttccaa

SEQ ID NO: 4511533 - DNA, 25 bp, Homo sapien
ggactcccaggagtaaaagcttcca

SEQ ID NO: 4511534 - DNA, 25 bp, Homo sapien
gccctccaatgggaggaaaagcatg

SEQ ID NO: 4511535 - DNA, 25 bp, Homo sapien
tgcaggaaaacgtgaaggaataggc

SEQ ID NO: 4511536 - DNA, 25 bp, Homo sapien
gcaggaaaacgtgaaggaataggcc

SEQ ID NO: 4511537 - DNA, 25 bp, Homo sapien
aatattatcaatagaccttgtcaca

SEQ ID NO: 4511538 - DNA, 25 bp, Homo sapien
ccttgtcacaactgttattgaagaa

SEQ ID NO: 4511539 - DNA, 25 bp, Homo sapien
tatcaatagaccttgtcacaactgt

SEQ ID NO: 4511540 - DNA, 25 bp, Homo sapien
tagaccttgtcacaactgttattga

SEQ ID NO: 4511541 - DNA, 25 bp, Homo sapien
tactgggacattcttgacaagctcg

SEQ ID NO: 4511542 - DNA, 25 bp, Homo sapien
aggtaacccctcagtcacttcagtg

SEQ ID NO: 4511543 - DNA, 25 bp, Homo sapien
gagctggatctgagccaaggcatca

SEQ ID NO: 4511544 - DNA, 25 bp, Homo sapien
caaggcatcaactccaaggtaaccc

SEQ ID NO: 4511545 - DNA, 25 bp, Homo sapien
tcatgaatggcaaccaaaggcagtg

SEQ ID NO: 4511546 - DNA, 25 bp, Homo sapien
gaaagacgccaaaaatccagcgctg

SEQ ID NO: 4511547 - DNA, 25 bp, Homo sapien
tgaaggcttcctaggtgccaagcac

SEQ ID NO: 4511548 - DNA, 25 bp, Homo sapien
tacaaggtgccaagtaccaggacag

SEQ ID NO: 4511549 - DNA, 25 bp, Homo sapien
gagctcctcagtctaagccaagtgg

SEQ ID NO: 4511550 - DNA, 25 bp, Homo sapien
tccgaaggctgctctactgattggt

SEQ ID NO: 4511551 - DNA, 25 bp, Homo sapien
gattctgggatagacatgaggacca

SEQ ID NO: 4511552 - DNA, 25 bp, Homo sapien
cccacgcggttcatgctagcaatta

SEQ ID NO: 4511553 - DNA, 25 bp, Homo sapien
cttgagtaatccgtgggccctaact

SEQ ID NO: 4511554 - DNA, 25 bp, Homo sapien
cacaggctcacggaaagtcagcctc

SEQ ID NO: 4511555 - DNA, 25 bp, Homo sapien
gctgtctgtgcttcccatgcagaag

SEQ ID NO: 4511556 - DNA, 25 bp, Homo sapien
tctcatgccccgagagctgagtgca

SEQ ID NO: 4511557 - DNA, 25 bp, Homo sapien
acaggattattagcctgctgtgccc

SEQ ID NO: 4511558 - DNA, 25 bp, Homo sapien
ctgcttccatcctccctggtgcggg

SEQ ID NO: 4511559 - DNA, 25 bp, Homo sapien
catcctccctggtgcggggtgggcc

SEQ ID NO: 4511560 - DNA, 25 bp, Homo sapien
tgcttccatcctccctggtgcgggg

SEQ ID NO: 4511561 - DNA, 25 bp, Homo sapien
ttccatcctccctggtgcggggtgg

SEQ ID NO: 4511562 - DNA, 25 bp, Homo sapien
atccagggggcctctacaaggataa

SEQ ID NO: 4511563 - DNA, 25 bp, Homo sapien
tccagggggcctctacaaggataat

SEQ ID NO: 4511564 - DNA, 25 bp, Homo sapien
tcctgcttctaacagcagagctgcc

SEQ ID NO: 4511565 - DNA, 25 bp, Homo sapien
ctgccatggagaagatcacagaggc

SEQ ID NO: 4511566 - DNA, 25 bp, Homo sapien
tgcacacctcctgcttctaacagca

SEQ ID NO: 4511567 - DNA, 25 bp, Homo sapien
ccatggagaagatcacagaggctgg

SEQ ID NO: 4511568 - DNA, 25 bp, Homo sapien
aggagaccttctctccaatggcctg

SEQ ID NO: 4511569 - DNA, 25 bp, Homo sapien
gcccttgatcttctcaatcttggcc

SEQ ID NO: 4511570 - DNA, 25 bp, Homo sapien
tcaatcttggcctgggccaaggaga

SEQ ID NO: 4511571 - DNA, 25 bp, Homo sapien
tgggccaaggagaccttctctccaa

SEQ ID NO: 4511572 - DNA, 25 bp, Homo sapien
cagggcccgctcgtccagggggcgg

SEQ ID NO: 4511573 - DNA, 25 bp, Homo sapien
agggtcctgggcgcccgtgaagatg

SEQ ID NO: 4511574 - DNA, 25 bp, Homo sapien
cggtgcttgctctggatcctgtggc

SEQ ID NO: 4511575 - DNA, 25 bp, Homo sapien
ggagccatattcctgcaggcgctct

SEQ ID NO: 4511576 - DNA, 25 bp, Homo sapien
tggtgctcacgcacacaggaaagtc

SEQ ID NO: 4511577 - DNA, 25 bp, Homo sapien
ttggtgctcacgcacacaggaaagt

SEQ ID NO: 4511578 - DNA, 25 bp, Homo sapien
agtccctcttctgcatcgtcctcgg

SEQ ID NO: 4511579 - DNA, 25 bp, Homo sapien
aaggagctgacagagctgatgttgc

SEQ ID NO: 4511580 - DNA, 25 bp, Homo sapien
cctcggccctgccctctggccatac

SEQ ID NO: 4511581 - DNA, 25 bp, Homo sapien
cccctcggccctgccctctggccat

SEQ ID NO: 4511582 - DNA, 25 bp, Homo sapien
acccctcggccctgccctctggcca

SEQ ID NO: 4511583 - DNA, 25 bp, Homo sapien
ccctcggccctgccctctggccata

SEQ ID NO: 4511584 - DNA, 25 bp, Homo sapien
acatgggggtcaggcaagctgacac

SEQ ID NO: 4511585 - DNA, 25 bp, Homo sapien
ctgggtccccactaagccaggccgg

SEQ ID NO: 4511586 - DNA, 25 bp, Homo sapien
tgagcccatgttcctctcccacatc

SEQ ID NO: 4511587 - DNA, 25 bp, Homo sapien
ggtcaggcaagctgacacccgctgt

SEQ ID NO: 4511588 - DNA, 25 bp, Homo sapien
tggacaagggggcatcaaacagctt

SEQ ID NO: 4511589 - DNA, 25 bp, Homo sapien
atggacaagggggcatcaaacagct

SEQ ID NO: 4511590 - DNA, 25 bp, Homo sapien
tgatggacaagggggcatcaaacag

SEQ ID NO: 4511591 - DNA, 25 bp, Homo sapien
gatggacaagggggcatcaaacagc

SEQ ID NO: 4511592 - DNA, 25 bp, Homo sapien
cccaggtcagcaatgtacatgaggt

SEQ ID NO: 4511593 - DNA, 25 bp, Homo sapien
tacatgaggtcgttggtaatgccgg

SEQ ID NO: 4511594 - DNA, 25 bp, Homo sapien
cagcaatgtacatgaggtcgttggt

SEQ ID NO: 4511595 - DNA, 25 bp, Homo sapien
tgtacatgaggtcgttggtaatgcc

SEQ ID NO: 4511596 - DNA, 25 bp, Homo sapien
gtggtgttagtaccccatcttgtag

SEQ ID NO: 4511597 - DNA, 25 bp, Homo sapien
ctacaggggccgcggttgagggtgg

SEQ ID NO: 4511598 - DNA, 25 bp, Homo sapien
ggtggtgttagtaccccatcttgta

SEQ ID NO: 4511599 - DNA, 25 bp, Homo sapien
ctgaaggagacgcgctgctgctgct

SEQ ID NO: 4511600 - DNA, 25 bp, Homo sapien
ctgctgtcgtcctgcctggcgcctt

SEQ ID NO: 4511601 - DNA, 25 bp, Homo sapien
tgctgtcgtcctgcctggcgccttg

SEQ ID NO: 4511602 - DNA, 25 bp, Homo sapien
ctgctgctgtcgtcctgcctggcgc

SEQ ID NO: 4511603 - DNA, 25 bp, Homo sapien
gaagtccagagctctacagtttgaa

SEQ ID NO: 4511604 - DNA, 25 bp, Homo sapien
aatccacccgagtgcactgagcacg

SEQ ID NO: 4511605 - DNA, 25 bp, Homo sapien
tgagcacgccagaaatcaggtggcc

SEQ ID NO: 4511606 - DNA, 25 bp, Homo sapien
cctctgccctagaagtgagaagtcc

SEQ ID NO: 4511607 - DNA, 25 bp, Homo sapien
cctgagctagccatgctctgacagt

SEQ ID NO: 4511608 - DNA, 25 bp, Homo sapien
ggcggatggactctagcagagtggc

SEQ ID NO: 4511609 - DNA, 25 bp, Homo sapien
cttctccagctttcgctccttcatg

SEQ ID NO: 4511610 - DNA, 25 bp, Homo sapien
ttctccagctttcgctccttcatgc

SEQ ID NO: 4511611 - DNA, 25 bp, Homo sapien
ccagctttcgctccttcatgctgcg

SEQ ID NO: 4511612 - DNA, 25 bp, Homo sapien
gcaaaagcagcgctgggtacaagct

SEQ ID NO: 4511613 - DNA, 25 bp, Homo sapien
gctcaaaaccatagtgcccagggca

SEQ ID NO: 4511614 - DNA, 25 bp, Homo sapien
gtgtctgcgttcacagcaggcatca

SEQ ID NO: 4511615 - DNA, 25 bp, Homo sapien
tgaccattgccttggaccgctcttg

SEQ ID NO: 4511616 - DNA, 25 bp, Homo sapien
tgaagagttcagtcacatgcgaccg

SEQ ID NO: 4511617 - DNA, 25 bp, Homo sapien
gaagagttcagtcacatgcgaccgg

SEQ ID NO: 4511618 - DNA, 25 bp, Homo sapien
gggtgaagagttcagtcacatgcga

SEQ ID NO: 4511619 - DNA, 25 bp, Homo sapien
agagttcagtcacatgcgaccggtg

SEQ ID NO: 4511620 - DNA, 25 bp, Homo sapien
agtgcccaccttggctcgtggctct

SEQ ID NO: 4511621 - DNA, 25 bp, Homo sapien
tgcccaccttggctcgtggctctca

SEQ ID NO: 4511622 - DNA, 25 bp, Homo sapien
atcaagtgcccaccttggctcgtgg

SEQ ID NO: 4511623 - DNA, 25 bp, Homo sapien
caagtgcccaccttggctcgtggct

SEQ ID NO: 4511624 - DNA, 25 bp, Homo sapien
ccttgcgcctcatgaccagcttgtt

SEQ ID NO: 4511625 - DNA, 25 bp, Homo sapien
tcatgaccagcttgttgaagagatc

SEQ ID NO: 4511626 - DNA, 25 bp, Homo sapien
catgaccagcttgttgaagagatcc

SEQ ID NO: 4511627 - DNA, 25 bp, Homo sapien
gaccagcttgttgaagagatccgac

SEQ ID NO: 4511628 - DNA, 25 bp, Homo sapien
ccagggcgggcagcggccctgcctc

SEQ ID NO: 4511629 - DNA, 25 bp, Homo sapien
aaggtgccggcccagggcgggcagc

SEQ ID NO: 4511630 - DNA, 25 bp, Homo sapien
ggcgggcagcggccctgcctcctac

SEQ ID NO: 4511631 - DNA, 25 bp, Homo sapien
agggcgggcagcggccctgcctcct

SEQ ID NO: 4511632 - DNA, 25 bp, Homo sapien
cagcccccggagacttaaatacagg

SEQ ID NO: 4511633 - DNA, 25 bp, Homo sapien
ccagcccccggagacttaaatacag

SEQ ID NO: 4511634 - DNA, 25 bp, Homo sapien
acacgcgggcaaaggctcctccggg

SEQ ID NO: 4511635 - DNA, 25 bp, Homo sapien
tgacacgcgggcaaaggctcctccg

SEQ ID NO: 4511636 - DNA, 25 bp, Homo sapien
taggattcccagtcgtcctcgtcct

SEQ ID NO: 4511637 - DNA, 25 bp, Homo sapien
gaggagggatggagtctgacacgcg

SEQ ID NO: 4511638 - DNA, 25 bp, Homo sapien
ctgggggggaaggtgtcatggagcc

SEQ ID NO: 4511639 - DNA, 25 bp, Homo sapien
tcagagcaacggcccaagtctgggt

SEQ ID NO: 4511640 - DNA, 25 bp, Homo sapien
gtcagagcaacggcccaagtctggg

SEQ ID NO: 4511641 - DNA, 25 bp, Homo sapien
tctgggtctgggggggaaggtgtca

SEQ ID NO: 4511642 - DNA, 25 bp, Homo sapien
cccctcccaaggaagtaggtctgag

SEQ ID NO: 4511643 - DNA, 25 bp, Homo sapien
tcccaaggaagtaggtctgagcagc

SEQ ID NO: 4511644 - DNA, 25 bp, Homo sapien
ggaagtaggtctgagcagcttgtcc

SEQ ID NO: 4511645 - DNA, 25 bp, Homo sapien
gtaggtctgagcagcttgtcctggc

SEQ ID NO: 4511646 - DNA, 25 bp, Homo sapien
ccttgaagctggtctccacacagtg

SEQ ID NO: 4511647 - DNA, 25 bp, Homo sapien
ctggtctccacacagtgctggttcc

SEQ ID NO: 4511648 - DNA, 25 bp, Homo sapien
gaagctggtctccacacagtgctgg

SEQ ID NO: 4511649 - DNA, 25 bp, Homo sapien
caagccagccttccgctccttgaag

SEQ ID NO: 4511650 - DNA, 25 bp, Homo sapien
aagaacacagtggcgcaggctgggt

SEQ ID NO: 4511651 - DNA, 25 bp, Homo sapien
agttctttattgattggtgtgccgt

SEQ ID NO: 4511652 - DNA, 25 bp, Homo sapien
tattgattggtgtgccgttttctct

SEQ ID NO: 4511653 - DNA, 25 bp, Homo sapien
ctttattgattggtgtgccgttttc

SEQ ID NO: 4511654 - DNA, 25 bp, Homo sapien
tcctgcacagctagagatcctttat

SEQ ID NO: 4511655 - DNA, 25 bp, Homo sapien
gagatcctttattaaaagcacactg

SEQ ID NO: 4511656 - DNA, 25 bp, Homo sapien
ctgcacagctagagatcctttatta

SEQ ID NO: 4511657 - DNA, 25 bp, Homo sapien
tagagatcctttattaaaagcacac

SEQ ID NO: 4511658 - DNA, 25 bp, Homo sapien
tggagtccagagtgttgccaggacc

SEQ ID NO: 4511659 - DNA, 25 bp, Homo sapien
gcagggatcctgctacaaaggtgaa

SEQ ID NO: 4511660 - DNA, 25 bp, Homo sapien
gtccagagtgttgccaggacccagg

SEQ ID NO: 4511661 - DNA, 25 bp, Homo sapien
gatcctgctacaaaggtgaaaccca

SEQ ID NO: 4511662 - DNA, 25 bp, Homo sapien
gagccctcgtggaggtcaaagccac

SEQ ID NO: 4511663 - DNA, 25 bp, Homo sapien
ttctcactgccttttgtctgcccag

SEQ ID NO: 4511664 - DNA, 25 bp, Homo sapien
tgctgtgtggaagttcactcctgcc

SEQ ID NO: 4511665 - DNA, 25 bp, Homo sapien
tccaccaccccgagatcacatttct

SEQ ID NO: 4511666 - DNA, 25 bp, Homo sapien
taagtagtgcttgtgctcatctcct

SEQ ID NO: 4511667 - DNA, 25 bp, Homo sapien
gtgcttgtgctcatctccttggctg

SEQ ID NO: 4511668 - DNA, 25 bp, Homo sapien
ccagtaagtagtgcttgtgctcatc

SEQ ID NO: 4511669 - DNA, 25 bp, Homo sapien
ctaggccagtaagtagtgcttgtgc

SEQ ID NO: 4511670 - DNA, 25 bp, Homo sapien
gacttcaggaaagacatatcgagca

SEQ ID NO: 4511671 - DNA, 25 bp, Homo sapien
ggaaagacatatcgagcaaatgaca

SEQ ID NO: 4511672 - DNA, 25 bp, Homo sapien
gacagcaaccggttgatacgctcta

SEQ ID NO: 4511673 - DNA, 25 bp, Homo sapien
tctagagaaaaatagcagctaccat

SEQ ID NO: 4511674 - DNA, 25 bp, Homo sapien
cttccttaagaccactcaatgttgg

SEQ ID NO: 4511675 - DNA, 25 bp, Homo sapien
cttaagaccactcaatgttggcccc

SEQ ID NO: 4511676 - DNA, 25 bp, Homo sapien
tccttaagaccactcaatgttggcc

SEQ ID NO: 4511677 - DNA, 25 bp, Homo sapien
taagaccactcaatgttggccccat

SEQ ID NO: 4511678 - DNA, 25 bp, Homo sapien
ctttgaaggttagtgacatagcatt

SEQ ID NO: 4511679 - DNA, 25 bp, Homo sapien
catctttgaaggttagtgacatagc

SEQ ID NO: 4511680 - DNA, 25 bp, Homo sapien
tctttgaaggttagtgacatagcat

SEQ ID NO: 4511681 - DNA, 25 bp, Homo sapien
tcatctttgaaggttagtgacatag

SEQ ID NO: 4511682 - DNA, 25 bp, Homo sapien
tcaccactggatttgtgtttgctcc

SEQ ID NO: 4511683 - DNA, 25 bp, Homo sapien
tttgtgtttgctccataaatcttca

SEQ ID NO: 4511684 - DNA, 25 bp, Homo sapien
caacaaacagaactcgagtctgtat

SEQ ID NO: 4511685 - DNA, 25 bp, Homo sapien
gccagtcacctctaaatcgtattgt

SEQ ID NO: 4511686 - DNA, 25 bp, Homo sapien
ggagacatacacacagggagagtac

SEQ ID NO: 4511687 - DNA, 25 bp, Homo sapien
gttaagatacaatcagatgagcctg

SEQ ID NO: 4511688 - DNA, 25 bp, Homo sapien
ggtcaacgctttaggaagacatagc

SEQ ID NO: 4511689 - DNA, 25 bp, Homo sapien
tcccaatatacgctgagatgcaagg

SEQ ID NO: 4511690 - DNA, 25 bp, Homo sapien
gctgtgccagccttctatcccatct

SEQ ID NO: 4511691 - DNA, 25 bp, Homo sapien
caagctgtgccagccttctatccca

SEQ ID NO: 4511692 - DNA, 25 bp, Homo sapien
aagctgtgccagccttctatcccat

SEQ ID NO: 4511693 - DNA, 25 bp, Homo sapien
ccaagctgtgccagccttctatccc

SEQ ID NO: 4511694 - DNA, 25 bp, Homo sapien
tcagcgaggctttttgttgccgcgg

SEQ ID NO: 4511695 - DNA, 25 bp, Homo sapien
gctttttgcccaggcgtttgctgcc

SEQ ID NO: 4511696 - DNA, 25 bp, Homo sapien
ttttgcggctgtttgcgcccgccac

SEQ ID NO: 4511697 - DNA, 25 bp, Homo sapien
gctaaggctttttggcgtcgcgtct

SEQ ID NO: 4511698 - DNA, 25 bp, Homo sapien
gaggatctgaagtctctggtggaca

SEQ ID NO: 4511699 - DNA, 25 bp, Homo sapien
gggaacaggtgatgagacaaagcca

SEQ ID NO: 4511700 - DNA, 25 bp, Homo sapien
aaggagctgaaagagattctctgga

SEQ ID NO: 4511701 - DNA, 25 bp, Homo sapien
aacaaggtatcactggaggatctga

SEQ ID NO: 4511702 - DNA, 25 bp, Homo sapien
gtggtcctgagtcttcctggcggtc

SEQ ID NO: 4511703 - DNA, 25 bp, Homo sapien
ctgagtcttcctggcggtcctgagt

SEQ ID NO: 4511704 - DNA, 25 bp, Homo sapien
cttgagtcccccctgtggtcctgag

SEQ ID NO: 4511705 - DNA, 25 bp, Homo sapien
cctgctcttccctggtggtcttgag

SEQ ID NO: 4511706 - DNA, 25 bp, Homo sapien
gtctttcacagtaatactcagctgt

SEQ ID NO: 4511707 - DNA, 25 bp, Homo sapien
tcctcattgagtctttcacagtaat

SEQ ID NO: 4511708 - DNA, 25 bp, Homo sapien
gccgtggagctgagcttcacagaga

SEQ ID NO: 4511709 - DNA, 25 bp, Homo sapien
cagtaatactcagctgtgtcctggg

SEQ ID NO: 4511710 - DNA, 25 bp, Homo sapien
taccttagcatcaatagtgcataca

SEQ ID NO: 4511711 - DNA, 25 bp, Homo sapien
catatgggattgacaaatgtcaggc

SEQ ID NO: 4511712 - DNA, 25 bp, Homo sapien
tgtcaggcacatctattcagctgtc

SEQ ID NO: 4511713 - DNA, 25 bp, Homo sapien
ttcatcagcccagtctagtcttagc

SEQ ID NO: 4511714 - DNA, 25 bp, Homo sapien
tataggcaacgcttctttctcaggt

SEQ ID NO: 4511715 - DNA, 25 bp, Homo sapien
gccttttgatatgccacctcaatga

SEQ ID NO: 4511716 - DNA, 25 bp, Homo sapien
tttcagttctgtctgtgggactcca

SEQ ID NO: 4511717 - DNA, 25 bp, Homo sapien
taaggactgtctaggtttcatgaac

SEQ ID NO: 4511718 - DNA, 25 bp, Homo sapien
ctgtgcatagcttgtgctgccatca

SEQ ID NO: 4511719 - DNA, 25 bp, Homo sapien
tgtgcatagcttgtgctgccatcac

SEQ ID NO: 4511720 - DNA, 25 bp, Homo sapien
catcagctgtacctgggactgggca

SEQ ID NO: 4511721 - DNA, 25 bp, Homo sapien
cagtgcatacagtagctggtgaagg

SEQ ID NO: 4511722 - DNA, 25 bp, Homo sapien
ctgcatcagctgtacctgggactgg

SEQ ID NO: 4511723 - DNA, 25 bp, Homo sapien
agactgcatcagctgtacctgggac

SEQ ID NO: 4511724 - DNA, 25 bp, Homo sapien
gtggagaggacacaggagtggataa

SEQ ID NO: 4511725 - DNA, 25 bp, Homo sapien
tggagaggacacaggagtggataaa

SEQ ID NO: 4511726 - DNA, 25 bp, Homo sapien
gagaggacacaggagtggataaaac

SEQ ID NO: 4511727 - DNA, 25 bp, Homo sapien
gaggacacaggagtggataaaaccc

SEQ ID NO: 4511728 - DNA, 25 bp, Homo sapien
cagctatgaccaccaaaaacaggat

SEQ ID NO: 4511729 - DNA, 25 bp, Homo sapien
ctgcagctatgaccaccaaaaacag

SEQ ID NO: 4511730 - DNA, 25 bp, Homo sapien
aaaaacaggatcctccaagtccagc

SEQ ID NO: 4511731 - DNA, 25 bp, Homo sapien
ccaaaaacaggatcctccaagtcca

SEQ ID NO: 4511732 - DNA, 25 bp, Homo sapien
ttctctcgcctagacccatctccac

SEQ ID NO: 4511733 - DNA, 25 bp, Homo sapien
tttctctcgcctagacccatctcca

SEQ ID NO: 4511734 - DNA, 25 bp, Homo sapien
tcagagacagcattgtagtaaccag

SEQ ID NO: 4511735 - DNA, 25 bp, Homo sapien
agaaggtcagagacagcattgtagt

SEQ ID NO: 4511736 - DNA, 25 bp, Homo sapien
agacagcattgtagtaaccagtgta

SEQ ID NO: 4511737 - DNA, 25 bp, Homo sapien
ggtcagagacagcattgtagtaacc

SEQ ID NO: 4511738 - DNA, 25 bp, Homo sapien
gtggatgccccatgagaggtaaatc

SEQ ID NO: 4511739 - DNA, 25 bp, Homo sapien
tctaaggccattgacagaggggcca

SEQ ID NO: 4511740 - DNA, 25 bp, Homo sapien
aaccctgtggatgccccatgagagg

SEQ ID NO: 4511741 - DNA, 25 bp, Homo sapien
aaatctaaggccattgacagagggg

SEQ ID NO: 4511742 - DNA, 25 bp, Homo sapien
ggctgtgctcgtggatgtgtctctg

SEQ ID NO: 4511743 - DNA, 25 bp, Homo sapien
gtgctcgtggatgtgtctctggtca

SEQ ID NO: 4511744 - DNA, 25 bp, Homo sapien
tacacggccatgtcgtcagatctca

SEQ ID NO: 4511745 - DNA, 25 bp, Homo sapien
cggccatgtcgtcagatctcaggct

SEQ ID NO: 4511746 - DNA, 25 bp, Homo sapien
tggagcttctgtgggtagtttgtgt

SEQ ID NO: 4511747 - DNA, 25 bp, Homo sapien
ccattgtaagtgttgatccatccca

SEQ ID NO: 4511748 - DNA, 25 bp, Homo sapien
ttaccattgtaagtgttgatccatc

SEQ ID NO: 4511749 - DNA, 25 bp, Homo sapien
gtgggtagtttgtgttaccattgta

SEQ ID NO: 4511750 - DNA, 25 bp, Homo sapien
tagtagctggtaaaggtgtaaccag

SEQ ID NO: 4511751 - DNA, 25 bp, Homo sapien
cagtgcatatagtagctggtaaagg

SEQ ID NO: 4511752 - DNA, 25 bp, Homo sapien
tatagtagctggtaaaggtgtaacc

SEQ ID NO: 4511753 - DNA, 25 bp, Homo sapien
catatagtagctggtaaaggtgtaa

SEQ ID NO: 4511754 - DNA, 25 bp, Homo sapien
ctccagactgcaccagctgcacctg

SEQ ID NO: 4511755 - DNA, 25 bp, Homo sapien
ctcagctccagactgcaccagctgc

SEQ ID NO: 4511756 - DNA, 25 bp, Homo sapien
gctccagactgcaccagctgcacct

SEQ ID NO: 4511757 - DNA, 25 bp, Homo sapien
cagctccagactgcaccagctgcac

SEQ ID NO: 4511758 - DNA, 25 bp, Homo sapien
tgctgccaccaagaaaaggatgctc

SEQ ID NO: 4511759 - DNA, 25 bp, Homo sapien
gctgccaccaagaaaaggatgctcc

SEQ ID NO: 4511760 - DNA, 25 bp, Homo sapien
tgccaccaagaaaaggatgctccag

SEQ ID NO: 4511761 - DNA, 25 bp, Homo sapien
ccaccaagaaaaggatgctccaggt

SEQ ID NO: 4511762 - DNA, 25 bp, Homo sapien
caggactccccttcatggatgactc

SEQ ID NO: 4511763 - DNA, 25 bp, Homo sapien
gactctgaagattgtagactcagtg

SEQ ID NO: 4511764 - DNA, 25 bp, Homo sapien
tttctttcttctgttcacctgaatg

SEQ ID NO: 4511765 - DNA, 25 bp, Homo sapien
ttctgttcacctgaatgtttacaag

SEQ ID NO: 4511766 - DNA, 25 bp, Homo sapien
ctgggacctgtccctatctcagtgg

SEQ ID NO: 4511767 - DNA, 25 bp, Homo sapien
cagtggtcccgagcgctccctggtg

SEQ ID NO: 4511768 - DNA, 25 bp, Homo sapien
ccctatctcagtggtcccgagcgct

SEQ ID NO: 4511769 - DNA, 25 bp, Homo sapien
tctgagaaaggaaaccgccccctgc

SEQ ID NO: 4511770 - DNA, 25 bp, Homo sapien
cagacgcagcatattctgtcgtgta

SEQ ID NO: 4511771 - DNA, 25 bp, Homo sapien
taagtctgcctttcacagacgcagc

SEQ ID NO: 4511772 - DNA, 25 bp, Homo sapien
cctctcttgagatggtaagtctgcc

SEQ ID NO: 4511773 - DNA, 25 bp, Homo sapien
tcttattaaacctaccaactctagc

SEQ ID NO: 4511774 - DNA, 25 bp, Homo sapien
ctgcaaacacagagacaccctggtc

SEQ ID NO: 4511775 - DNA, 25 bp, Homo sapien
gcaaacacagagacaccctggtcag

SEQ ID NO: 4511776 - DNA, 25 bp, Homo sapien
caaacacagagacaccctggtcaga

SEQ ID NO: 4511777 - DNA, 25 bp, Homo sapien
aacacagagacaccctggtcagaaa

SEQ ID NO: 4511778 - DNA, 25 bp, Homo sapien
atgcggcgccaagtgccccctggtt

SEQ ID NO: 4511779 - DNA, 25 bp, Homo sapien
tgagccttgagcctgcctgaccact

SEQ ID NO: 4511780 - DNA, 25 bp, Homo sapien
ctgagcccccatgcggcgccaagtg

SEQ ID NO: 4511781 - DNA, 25 bp, Homo sapien
gctggttcctgagtacttgcttctg

SEQ ID NO: 4511782 - DNA, 25 bp, Homo sapien
acatacatggttgtgcacttgtagc

SEQ ID NO: 4511783 - DNA, 25 bp, Homo sapien
catacatggttgtgcacttgtagct

SEQ ID NO: 4511784 - DNA, 25 bp, Homo sapien
tacatggttgtgcacttgtagctca

SEQ ID NO: 4511785 - DNA, 25 bp, Homo sapien
atacatggttgtgcacttgtagctc

SEQ ID NO: 4511786 - DNA, 25 bp, Homo sapien
catccttatggcagtcgatgggcac

SEQ ID NO: 4511787 - DNA, 25 bp, Homo sapien
tgctgtcccatttcagtaccaactg

SEQ ID NO: 4511788 - DNA, 25 bp, Homo sapien
cgatgggcacttgagttgtattctc

SEQ ID NO: 4511789 - DNA, 25 bp, Homo sapien
cattcgactactgtgagtggtgaca

SEQ ID NO: 4511790 - DNA, 25 bp, Homo sapien
gctccatggctgtttggtggtggct

SEQ ID NO: 4511791 - DNA, 25 bp, Homo sapien
cgggctccatggctgtttggtggtg

SEQ ID NO: 4511792 - DNA, 25 bp, Homo sapien
ttccatgagttttctggggccacca

SEQ ID NO: 4511793 - DNA, 25 bp, Homo sapien
tatgcagcgggctccatggctgttt

SEQ ID NO: 4511794 - DNA, 25 bp, Homo sapien
caagagggttgggatgtctgggagc

SEQ ID NO: 4511795 - DNA, 25 bp, Homo sapien
tctttaaagggagtgccgagcctcc

SEQ ID NO: 4511796 - DNA, 25 bp, Homo sapien
tgcctggatccctcatctttaaagg

SEQ ID NO: 4511797 - DNA, 25 bp, Homo sapien
gagccctgcattctcccgtgatgtt

SEQ ID NO: 4511798 - DNA, 25 bp, Homo sapien
tggctgcattcccatatctgggact

SEQ ID NO: 4511799 - DNA, 25 bp, Homo sapien
tggaggacctgcctcggatgacacc

SEQ ID NO: 4511800 - DNA, 25 bp, Homo sapien
ggggctctgaccctcctgcataggg

SEQ ID NO: 4511801 - DNA, 25 bp, Homo sapien
tgagtaccaggaggagcctgaaggg

SEQ ID NO: 4511802 - DNA, 25 bp, Homo sapien
ttttcctctgggttaatgggattca

SEQ ID NO: 4511803 - DNA, 25 bp, Homo sapien
cacacattccgccccagtgtgtggg

SEQ ID NO: 4511804 - DNA, 25 bp, Homo sapien
ccctctgcgcaggtcagcttcaatg

SEQ ID NO: 4511805 - DNA, 25 bp, Homo sapien
tgggattcatctcctggccccagat

SEQ ID NO: 4511806 - DNA, 25 bp, Homo sapien
cttcctgagggttactgctgagtcc

SEQ ID NO: 4511807 - DNA, 25 bp, Homo sapien
gggatcacagaacagcacctctgct

SEQ ID NO: 4511808 - DNA, 25 bp, Homo sapien
tatggacattttttgctgcggcaac

SEQ ID NO: 4511809 - DNA, 25 bp, Homo sapien
ccttgaagatcccaacaggagccag

SEQ ID NO: 4511810 - DNA, 25 bp, Homo sapien
tcagagctgctctctgggcttggca

SEQ ID NO: 4511811 - DNA, 25 bp, Homo sapien
cagagctgctctctgggcttggcag

SEQ ID NO: 4511812 - DNA, 25 bp, Homo sapien
gagctgctctctgggcttggcagcc

SEQ ID NO: 4511813 - DNA, 25 bp, Homo sapien
gctgctctctgggcttggcagccac

SEQ ID NO: 4511814 - DNA, 25 bp, Homo sapien
ctcaggtgggatcagaagggggggc

SEQ ID NO: 4511815 - DNA, 25 bp, Homo sapien
tgaggccagggtcctacccttcctg

SEQ ID NO: 4511816 - DNA, 25 bp, Homo sapien
ggccagggtcctacccttcctgatg

SEQ ID NO: 4511817 - DNA, 25 bp, Homo sapien
tcaggtgggatcagaagggggggca

SEQ ID NO: 4511818 - DNA, 25 bp, Homo sapien
ttctccaatgtggcctgcacagccc

SEQ ID NO: 4511819 - DNA, 25 bp, Homo sapien
ctccaatgtggcctgcacagcccag

SEQ ID NO: 4511820 - DNA, 25 bp, Homo sapien
tccaatgtggcctgcacagcccagg

SEQ ID NO: 4511821 - DNA, 25 bp, Homo sapien
cttctccaatgtggcctgcacagcc

SEQ ID NO: 4511822 - DNA, 25 bp, Homo sapien
caagcttggtggtcttgcacgggca

SEQ ID NO: 4511823 - DNA, 25 bp, Homo sapien
cttggtggtcttgcacgggcactga

SEQ ID NO: 4511824 - DNA, 25 bp, Homo sapien
gacacaggccctgacacaatgtggg

SEQ ID NO: 4511825 - DNA, 25 bp, Homo sapien
tcccagtgggtccatctgtttaggg

SEQ ID NO: 4511826 - DNA, 25 bp, Homo sapien
ggtggtcctgataagtttgcacatt

SEQ ID NO: 4511827 - DNA, 25 bp, Homo sapien
gtggtggtcctgataagtttgcaca

SEQ ID NO: 4511828 - DNA, 25 bp, Homo sapien
cctgataagtttgcacatttgtggc

SEQ ID NO: 4511829 - DNA, 25 bp, Homo sapien
aagtttgcacatttgtggctgtccc

SEQ ID NO: 4511830 - DNA, 25 bp, Homo sapien
tagccttcttccatgcacagggttc

SEQ ID NO: 4511831 - DNA, 25 bp, Homo sapien
gacgtataaaacaatttcgtgcatg

SEQ ID NO: 4511832 - DNA, 25 bp, Homo sapien
ctggacgtataaaacaatttcgtgc

SEQ ID NO: 4511833 - DNA, 25 bp, Homo sapien
cctggacgtataaaacaatttcgtg

SEQ ID NO: 4511834 - DNA, 25 bp, Homo sapien
tggacgtataaaacaatttcgtgca

SEQ ID NO: 4511835 - DNA, 25 bp, Homo sapien
atcatactccagaccaatacttctc

SEQ ID NO: 4511836 - DNA, 25 bp, Homo sapien
catactccagaccaatacttctcat

SEQ ID NO: 4511837 - DNA, 25 bp, Homo sapien
tcatactccagaccaatacttctca

SEQ ID NO: 4511838 - DNA, 25 bp, Homo sapien
ttggattcatgtggtgcgtctttaa

SEQ ID NO: 4511839 - DNA, 25 bp, Homo sapien
tgtgggcaccgttgcattgggctca

SEQ ID NO: 4511840 - DNA, 25 bp, Homo sapien
catagttggattcatgtggtgcgtc

SEQ ID NO: 4511841 - DNA, 25 bp, Homo sapien
gcaccgttgcattgggctcagccac

SEQ ID NO: 4511842 - DNA, 25 bp, Homo sapien
aaacaacatgttcaaacctgcggga

SEQ ID NO: 4511843 - DNA, 25 bp, Homo sapien
cagccgggaaactgaaggcctttgc

SEQ ID NO: 4511844 - DNA, 25 bp, Homo sapien
agccagccgggaaactgaaggcctt

SEQ ID NO: 4511845 - DNA, 25 bp, Homo sapien
acaacatgttcaaacctgcgggaat

SEQ ID NO: 4511846 - DNA, 25 bp, Homo sapien
aggaggcgtagtgccacaagggacg

SEQ ID NO: 4511847 - DNA, 25 bp, Homo sapien
acggccttgagaacaccggactgga

SEQ ID NO: 4511848 - DNA, 25 bp, Homo sapien
caagggacggccttgagaacaccgg

SEQ ID NO: 4511849 - DNA, 25 bp, Homo sapien
ctcggaggaggcgtagtgccacaag

SEQ ID NO: 4511850 - DNA, 25 bp, Homo sapien
tgacccgcacctctgcctgcctcat

SEQ ID NO: 4511851 - DNA, 25 bp, Homo sapien
taagggtgacccgcacctctgcctg

SEQ ID NO: 4511852 - DNA, 25 bp, Homo sapien
ctaagggtgacccgcacctctgcct

SEQ ID NO: 4511853 - DNA, 25 bp, Homo sapien
gggtgacccgcacctctgcctgcct

SEQ ID NO: 4511854 - DNA, 25 bp, Homo sapien
tgagttttgtgactactgaggacac

SEQ ID NO: 4511855 - DNA, 25 bp, Homo sapien
caaagttgagtatccatctccagag

SEQ ID NO: 4511856 - DNA, 25 bp, Homo sapien
tccagagatgcattcaggatacatc

SEQ ID NO: 4511857 - DNA, 25 bp, Homo sapien
gatacatccggttctccttgcagct

SEQ ID NO: 4511858 - DNA, 25 bp, Homo sapien
catgggcagctttagaatgcctgct

SEQ ID NO: 4511859 - DNA, 25 bp, Homo sapien
cagctttagaatgcctgctactccg

SEQ ID NO: 4511860 - DNA, 25 bp, Homo sapien
gggctcatgggcagctttagaatgc

SEQ ID NO: 4511861 - DNA, 25 bp, Homo sapien
gctttagaatgcctgctactccggg

SEQ ID NO: 4511862 - DNA, 25 bp, Homo sapien
ccaggagctgtactgagcgatggct

SEQ ID NO: 4511863 - DNA, 25 bp, Homo sapien
gagctgtactgagcgatggctgcac

SEQ ID NO: 4511864 - DNA, 25 bp, Homo sapien
tccccaggagctgtactgagcgatg

SEQ ID NO: 4511865 - DNA, 25 bp, Homo sapien
tgtccccaggagctgtactgagcga

SEQ ID NO: 4511866 - DNA, 25 bp, Homo sapien
ctctgcagggctccccccgagcagg

SEQ ID NO: 4511867 - DNA, 25 bp, Homo sapien
gggcccagtgcctctgagagaggtg

SEQ ID NO: 4511868 - DNA, 25 bp, Homo sapien
agagaggtgcccagtgagggctctg

SEQ ID NO: 4511869 - DNA, 25 bp, Homo sapien
ggctctgcagggctccccccgagca

SEQ ID NO: 4511870 - DNA, 25 bp, Homo sapien
ctggttgagcccctgatgcaattga

SEQ ID NO: 4511871 - DNA, 25 bp, Homo sapien
gagaaggacccagctggttgagccc

SEQ ID NO: 4511872 - DNA, 25 bp, Homo sapien
ctgatgcaattgagggcaggcccct

SEQ ID NO: 4511873 - DNA, 25 bp, Homo sapien
ttccagccgcaccaggacaagcttc

SEQ ID NO: 4511874 - DNA, 25 bp, Homo sapien
catacatttgtacgtttgtgggata

SEQ ID NO: 4511875 - DNA, 25 bp, Homo sapien
tggcccctagcatgtcccataagtg

SEQ ID NO: 4511876 - DNA, 25 bp, Homo sapien
cccctagcatgtcccataagtggag

SEQ ID NO: 4511877 - DNA, 25 bp, Homo sapien
tagcatgtcccataagtggagaggg

SEQ ID NO: 4511878 - DNA, 25 bp, Homo sapien
tgctggcccctagcatgtcccataa

SEQ ID NO: 4511879 - DNA, 25 bp, Homo sapien
tggtagatgtcatgccccatcccgg

SEQ ID NO: 4511880 - DNA, 25 bp, Homo sapien
tcccagctgcgtgtgtccatggacg

SEQ ID NO: 4511881 - DNA, 25 bp, Homo sapien
ccgggacttggtagaggccttgctg

SEQ ID NO: 4511882 - DNA, 25 bp, Homo sapien
tctgcttcgagaaggtggatgtctg

SEQ ID NO: 4511883 - DNA, 25 bp, Homo sapien
cctgctggcttcttatcatacatac

SEQ ID NO: 4511884 - DNA, 25 bp, Homo sapien
ggccctgctggcttcttatcataca

SEQ ID NO: 4511885 - DNA, 25 bp, Homo sapien
caggctgaggctgggccggggtggc

SEQ ID NO: 4511886 - DNA, 25 bp, Homo sapien
tgaggctgggccggggtggcgggag

SEQ ID NO: 4511887 - DNA, 25 bp, Homo sapien
gcccttgcggaaggagagctcatcc

SEQ ID NO: 4511888 - DNA, 25 bp, Homo sapien
gactcggccacattgacatagaggg

SEQ ID NO: 4511889 - DNA, 25 bp, Homo sapien
caccgtcatgatgtcgcccttgcgg

SEQ ID NO: 4511890 - DNA, 25 bp, Homo sapien
caagatcttgaggtggttcccaggc

SEQ ID NO: 4511891 - DNA, 25 bp, Homo sapien
ctttggccagcacattcaggtggtt

SEQ ID NO: 4511892 - DNA, 25 bp, Homo sapien
tttggccagcacattcaggtggttc

SEQ ID NO: 4511893 - DNA, 25 bp, Homo sapien
tggccagcacattcaggtggttcat

SEQ ID NO: 4511894 - DNA, 25 bp, Homo sapien
ttggccagcacattcaggtggttca

SEQ ID NO: 4511895 - DNA, 25 bp, Homo sapien
gtgccctcggggctccgagcgcgcc

SEQ ID NO: 4511896 - DNA, 25 bp, Homo sapien
cgagctgcccgggccgcgtgccctc

SEQ ID NO: 4511897 - DNA, 25 bp, Homo sapien
ctcggggctccgagcgcgccgcagc

SEQ ID NO: 4511898 - DNA, 25 bp, Homo sapien
cacaccgagctgcccgggccgcgtg

SEQ ID NO: 4511899 - DNA, 25 bp, Homo sapien
ctgaggacctgttgggaaaccagtt

SEQ ID NO: 4511900 - DNA, 25 bp, Homo sapien
ggactgaggacctgttgggaaacca

SEQ ID NO: 4511901 - DNA, 25 bp, Homo sapien
tctctgggcaatagtgccaggcaaa

SEQ ID NO: 4511902 - DNA, 25 bp, Homo sapien
caaggccatcatctccatgatgtca

SEQ ID NO: 4511903 - DNA, 25 bp, Homo sapien
tggaggcatgaagacctgtagacag

SEQ ID NO: 4511904 - DNA, 25 bp, Homo sapien
cagtgtccaattcagagtttccacg

SEQ ID NO: 4511905 - DNA, 25 bp, Homo sapien
ggaggcatgaagacctgtagacagc

SEQ ID NO: 4511906 - DNA, 25 bp, Homo sapien
gtgtccaattcagagtttccacgca

SEQ ID NO: 4511907 - DNA, 25 bp, Homo sapien
ctgcagaagggctctgaatcttccc

SEQ ID NO: 4511908 - DNA, 25 bp, Homo sapien
cagaagggctctgaatcttcccaga

SEQ ID NO: 4511909 - DNA, 25 bp, Homo sapien
gggcaggcagaaaagtgctgaggct

SEQ ID NO: 4511910 - DNA, 25 bp, Homo sapien
ggctgcagaagggctctgaatcttc

SEQ ID NO: 4511911 - DNA, 25 bp, Homo sapien
atttgagatgaggacgccgggccta

SEQ ID NO: 4511912 - DNA, 25 bp, Homo sapien
tggagccactgccagttggagcctg

SEQ ID NO: 4511913 - DNA, 25 bp, Homo sapien
cctaataatagccaaacggcagcag

SEQ ID NO: 4511914 - DNA, 25 bp, Homo sapien
ataatagccaaacggcagcagaggc

SEQ ID NO: 4511915 - DNA, 25 bp, Homo sapien
tagcacagacactcgatcaatatag

SEQ ID NO: 4511916 - DNA, 25 bp, Homo sapien
tcttgggctcaagaatccctaggct

SEQ ID NO: 4511917 - DNA, 25 bp, Homo sapien
acttagcacagacactcgatcaata

SEQ ID NO: 4511918 - DNA, 25 bp, Homo sapien
tcaagaatccctaggcttatcctcc

SEQ ID NO: 4511919 - DNA, 25 bp, Homo sapien
catatgggctgtggggcgcaactcc

SEQ ID NO: 4511920 - DNA, 25 bp, Homo sapien
gttcctgccctaggggcctccctga

SEQ ID NO: 4511921 - DNA, 25 bp, Homo sapien
gcctccctgactcagcaactgtggg

SEQ ID NO: 4511922 - DNA, 25 bp, Homo sapien
tctgaggcccaaccctcaggcttgg

SEQ ID NO: 4511923 - DNA, 25 bp, Homo sapien
gatgcaaagagttgctgaccgtctg

SEQ ID NO: 4511924 - DNA, 25 bp, Homo sapien
tgaccgtctgcagaaatcctgaacc

SEQ ID NO: 4511925 - DNA, 25 bp, Homo sapien
tgctgaccgtctgcagaaatcctga

SEQ ID NO: 4511926 - DNA, 25 bp, Homo sapien
cagtaggatgcaaagagttgctgac

SEQ ID NO: 4511927 - DNA, 25 bp, Homo sapien
ctcccagtctgctttgaaaggaaca

SEQ ID NO: 4511928 - DNA, 25 bp, Homo sapien
ttgaaaggaacagtaaagcagtccc

SEQ ID NO: 4511929 - DNA, 25 bp, Homo sapien
tctgctttgaaaggaacagtaaagc

SEQ ID NO: 4511930 - DNA, 25 bp, Homo sapien
ccagtctgctttgaaaggaacagta

SEQ ID NO: 4511931 - DNA, 25 bp, Homo sapien
ggtgcatttggtgacaccccaggcg

SEQ ID NO: 4511932 - DNA, 25 bp, Homo sapien
ccaggcggggggggacatccaggct

SEQ ID NO: 4511933 - DNA, 25 bp, Homo sapien
catttggtgacaccccaggcggggg

SEQ ID NO: 4511934 - DNA, 25 bp, Homo sapien
ttagaaggggtctctgggtgcattt

SEQ ID NO: 4511935 - DNA, 25 bp, Homo sapien
ttacaagcggtctctgggtacattt

SEQ ID NO: 4511936 - DNA, 25 bp, Homo sapien
tagaatctgtaccttggattcccag

SEQ ID NO: 4511937 - DNA, 25 bp, Homo sapien
tttagtagaatctgtaccttggatt

SEQ ID NO: 4511938 - DNA, 25 bp, Homo sapien
tacaagcggtctctgggtacatttg

SEQ ID NO: 4511939 - DNA, 25 bp, Homo sapien
acccccaggtttgtccagcttcgct

SEQ ID NO: 4511940 - DNA, 25 bp, Homo sapien
ccacccccaggtttgtccagcttcg

SEQ ID NO: 4511941 - DNA, 25 bp, Homo sapien
caggacaccccactgaggtcagcac

SEQ ID NO: 4511942 - DNA, 25 bp, Homo sapien
ccccaggtttgtccagcttcgctgt

SEQ ID NO: 4511943 - DNA, 25 bp, Homo sapien
ttggcccccgtgcagtgagtgcctg

SEQ ID NO: 4511944 - DNA, 25 bp, Homo sapien
cgcttggcccccgtgcagtgagtgc

SEQ ID NO: 4511945 - DNA, 25 bp, Homo sapien
gatcactggtttcacgcttggcccc

SEQ ID NO: 4511946 - DNA, 25 bp, Homo sapien
ctggagctccggtgaaatttgggct

SEQ ID NO: 4511947 - DNA, 25 bp, Homo sapien
aggtgagggctacttctgttaggcc

SEQ ID NO: 4511948 - DNA, 25 bp, Homo sapien
ttgaggtgagggctacttctgttag

SEQ ID NO: 4511949 - DNA, 25 bp, Homo sapien
agggctacttctgttaggccaccag

SEQ ID NO: 4511950 - DNA, 25 bp, Homo sapien
cttttgaggtgagggctacttctgt

SEQ ID NO: 4511951 - DNA, 25 bp, Homo sapien
caaaaagtgaagcagggacatgaag

SEQ ID NO: 4511952 - DNA, 25 bp, Homo sapien
gggcaggagatcagttactcagcat

SEQ ID NO: 4511953 - DNA, 25 bp, Homo sapien
atgaaggtactcagcctcgtaaagg

SEQ ID NO: 4511954 - DNA, 25 bp, Homo sapien
gcctcgtaaaggcacagcctctaaa

SEQ ID NO: 4511955 - DNA, 25 bp, Homo sapien
aaggtgaataatcctggcaggactc

SEQ ID NO: 4511956 - DNA, 25 bp, Homo sapien
tgaaaggtgaataatcctggcagga

SEQ ID NO: 4511957 - DNA, 25 bp, Homo sapien
atcctggcaggactcttagccttcc

SEQ ID NO: 4511958 - DNA, 25 bp, Homo sapien
gaataatcctggcaggactcttagc

SEQ ID NO: 4511959 - DNA, 25 bp, Homo sapien
catttcatctcatcatttcatctca

SEQ ID NO: 4511960 - DNA, 25 bp, Homo sapien
tttcatctcatcatttcatctcatc

SEQ ID NO: 4511961 - DNA, 25 bp, Homo sapien
tctcatttcatctcatcatttcatc

SEQ ID NO: 4511962 - DNA, 25 bp, Homo sapien
tcatctcatttcatctcatcatttc

SEQ ID NO: 4511963 - DNA, 25 bp, Homo sapien
ttcattattgcatgtcatctcatct

SEQ ID NO: 4511964 - DNA, 25 bp, Homo sapien
tttcatctcatctcgtatcttctca

SEQ ID NO: 4511965 - DNA, 25 bp, Homo sapien
ctcatctcgtatcttctcatctcat

SEQ ID NO: 4511966 - DNA, 25 bp, Homo sapien
caactattttcatcttatctcatca

SEQ ID NO: 4511967 - DNA, 25 bp, Homo sapien
cacaggaaccattgggcccactggg

SEQ ID NO: 4511968 - DNA, 25 bp, Homo sapien
ccaagctggccgggaactgaggtct

SEQ ID NO: 4511969 - DNA, 25 bp, Homo sapien
gcccaagctggccgggaactgaggt

SEQ ID NO: 4511970 - DNA, 25 bp, Homo sapien
agctggccgggaactgaggtctggg

SEQ ID NO: 4511971 - DNA, 25 bp, Homo sapien
gcaaacgctgcgtgccctgccgcat

SEQ ID NO: 4511972 - DNA, 25 bp, Homo sapien
gctcaggattcccatgcaaacgctg

SEQ ID NO: 4511973 - DNA, 25 bp, Homo sapien
gttctggacgcttccacgcacaggg

SEQ ID NO: 4511974 - DNA, 25 bp, Homo sapien
aattcctgttctggacgcttccacg

SEQ ID NO: 4511975 - DNA, 25 bp, Homo sapien
gtccattgtgaagcagcagggcagt

SEQ ID NO: 4511976 - DNA, 25 bp, Homo sapien
gatggcagcctaaacttccagcgca

SEQ ID NO: 4511977 - DNA, 25 bp, Homo sapien
tcctaatggctaatgttgctgacca

SEQ ID NO: 4511978 - DNA, 25 bp, Homo sapien
ggatcatccctctgtcttttggcgg

SEQ ID NO: 4511979 - DNA, 25 bp, Homo sapien
tattccagttgccataacaacccgc

SEQ ID NO: 4511980 - DNA, 25 bp, Homo sapien
ccttcagagaatgtgagtgatgttg

SEQ ID NO: 4511981 - DNA, 25 bp, Homo sapien
cataacaacccgctatatgttggtt

SEQ ID NO: 4511982 - DNA, 25 bp, Homo sapien
actctggtattccagttgccataac

SEQ ID NO: 4511983 - DNA, 25 bp, Homo sapien
aaatctcagtgttccctcaaacaag

SEQ ID NO: 4511984 - DNA, 25 bp, Homo sapien
catgacactaactcttacttttgga

SEQ ID NO: 4511985 - DNA, 25 bp, Homo sapien
gtttgcctcacacatgacactaact

SEQ ID NO: 4511986 - DNA, 25 bp, Homo sapien
caagtcgcagcatgtgtttgcctca

SEQ ID NO: 4511987 - DNA, 25 bp, Homo sapien
agatgtttgactattagaggcttga

SEQ ID NO: 4511988 - DNA, 25 bp, Homo sapien
tttgactattagaggcttgacaagg

SEQ ID NO: 4511989 - DNA, 25 bp, Homo sapien
tgtttgactattagaggcttgacaa

SEQ ID NO: 4511990 - DNA, 25 bp, Homo sapien
agaggaatttcagatgtttgactat

SEQ ID NO: 4511991 - DNA, 25 bp, Homo sapien
tcaaagtgcacagccatcctttact

SEQ ID NO: 4511992 - DNA, 25 bp, Homo sapien
gtcttcaaagtgcacagccatcctt

SEQ ID NO: 4511993 - DNA, 25 bp, Homo sapien
tcttcaaagtgcacagccatccttt

SEQ ID NO: 4511994 - DNA, 25 bp, Homo sapien
ccatcctttactgccccgtgcagca

SEQ ID NO: 4511995 - DNA, 25 bp, Homo sapien
agaactgtctgagttgagaaggctg

SEQ ID NO: 4511996 - DNA, 25 bp, Homo sapien
cattcccacggagtatgtggcactc

SEQ ID NO: 4511997 - DNA, 25 bp, Homo sapien
agccccgaccgatgggaggcacaag

SEQ ID NO: 4511998 - DNA, 25 bp, Homo sapien
catcatcaatggctaagcagatcat

SEQ ID NO: 4511999 - DNA, 25 bp, Homo sapien
gctaagcagatcatggagtacgttt

SEQ ID NO: 4512000 - DNA, 25 bp, Homo sapien
atccacaagctgaatggagacaata

SEQ ID NO: 4512001 - DNA, 25 bp, Homo sapien
cttcagcagcttcataacctcactc

SEQ ID NO: 4512002 - DNA, 25 bp, Homo sapien
cgtcagccacttacaatccacaagc

SEQ ID NO: 4512003 - DNA, 25 bp, Homo sapien
ttcagcagcttcataacctcactca

SEQ ID NO: 4512004 - DNA, 25 bp, Homo sapien
ggttgcttcgaggaggcatccactg

SEQ ID NO: 4512005 - DNA, 25 bp, Homo sapien
cggttgcttcgaggaggcatccact

SEQ ID NO: 4512006 - DNA, 25 bp, Homo sapien
tgtccctttaggtcatttatgtaga

SEQ ID NO: 4512007 - DNA, 25 bp, Homo sapien
tccctttaggtcatttatgtagaga

SEQ ID NO: 4512008 - DNA, 25 bp, Homo sapien
gaagagctgtccctttaggtcattt

SEQ ID NO: 4512009 - DNA, 25 bp, Homo sapien
gagctgtccctttaggtcatttatg

SEQ ID NO: 4512010 - DNA, 25 bp, Homo sapien
ctggggtaatataatgtcaacctct

SEQ ID NO: 4512011 - DNA, 25 bp, Homo sapien
aatataatgtcaacctcttgctcag

SEQ ID NO: 4512012 - DNA, 25 bp, Homo sapien
tataatgtcaacctcttgctcagtt

SEQ ID NO: 4512013 - DNA, 25 bp, Homo sapien
ggtaatataatgtcaacctcttgct

SEQ ID NO: 4512014 - DNA, 25 bp, Homo sapien
ctggtgctgggcgtacgtgagccgg

SEQ ID NO: 4512015 - DNA, 25 bp, Homo sapien
ggagcgttcctgtgcggcacacagc

SEQ ID NO: 4512016 - DNA, 25 bp, Homo sapien
ggcgtggatcaggttcagcaggtca

SEQ ID NO: 4512017 - DNA, 25 bp, Homo sapien
tgtagcacctcaatgctccgcagct

SEQ ID NO: 4512018 - DNA, 25 bp, Homo sapien
acttccccgcagatggaagccagca

SEQ ID NO: 4512019 - DNA, 25 bp, Homo sapien
aggtgggacttccccgcagatggaa

SEQ ID NO: 4512020 - DNA, 25 bp, Homo sapien
gggacttccccgcagatggaagcca

SEQ ID NO: 4512021 - DNA, 25 bp, Homo sapien
gtgggacttccccgcagatggaagc

SEQ ID NO: 4512022 - DNA, 25 bp, Homo sapien
catgatacaggccaccctatggacc

SEQ ID NO: 4512023 - DNA, 25 bp, Homo sapien
cctatggaccccaagggagatggtt

SEQ ID NO: 4512024 - DNA, 25 bp, Homo sapien
ggcctgggtgctatggaacccatga

SEQ ID NO: 4512025 - DNA, 25 bp, Homo sapien
aaacgtttccttccctgttagcatg

SEQ ID NO: 4512026 - DNA, 25 bp, Homo sapien
tggccacgatgacttggaacacccc

SEQ ID NO: 4512027 - DNA, 25 bp, Homo sapien
ttctgaacccaaagtggccacgatg

SEQ ID NO: 4512028 - DNA, 25 bp, Homo sapien
gccctcttcagggacctctctgtgg

SEQ ID NO: 4512029 - DNA, 25 bp, Homo sapien
tcatgacttctgaacccaaagtggc

SEQ ID NO: 4512030 - DNA, 25 bp, Homo sapien
cacatgtggatgcagagggacacac

SEQ ID NO: 4512031 - DNA, 25 bp, Homo sapien
cccacatgtggatgcagagggacac

SEQ ID NO: 4512032 - DNA, 25 bp, Homo sapien
acccacatgtggatgcagagggaca

SEQ ID NO: 4512033 - DNA, 25 bp, Homo sapien
ccacatgtggatgcagagggacaca

SEQ ID NO: 4512034 - DNA, 25 bp, Homo sapien
ggcgctgctgatcattcttcagtgt

SEQ ID NO: 4512035 - DNA, 25 bp, Homo sapien
tgtggtcgtagagctgggacaggca

SEQ ID NO: 4512036 - DNA, 25 bp, Homo sapien
catgtggtcgtagagctgggacagg

SEQ ID NO: 4512037 - DNA, 25 bp, Homo sapien
ggcatgtggtcgtagagctgggaca

SEQ ID NO: 4512038 - DNA, 25 bp, Homo sapien
gaagtagtgggccagcgccgtgtag

SEQ ID NO: 4512039 - DNA, 25 bp, Homo sapien
cagcgccgtgtagtggtgggccttc

SEQ ID NO: 4512040 - DNA, 25 bp, Homo sapien
gctgcgtgcagctgttggtagacct

SEQ ID NO: 4512041 - DNA, 25 bp, Homo sapien
gatgttctctttcaccagcgcctgg

SEQ ID NO: 4512042 - DNA, 25 bp, Homo sapien
ctcatgtcgtaacttggagtatggg

SEQ ID NO: 4512043 - DNA, 25 bp, Homo sapien
cagggctcatgtcgtaacttggagt

SEQ ID NO: 4512044 - DNA, 25 bp, Homo sapien
gggctcatgtcgtaacttggagtat

SEQ ID NO: 4512045 - DNA, 25 bp, Homo sapien
gcagggctcatgtcgtaacttggag

SEQ ID NO: 4512046 - DNA, 25 bp, Homo sapien
tgccaatagcgccacgtcccaatct

SEQ ID NO: 4512047 - DNA, 25 bp, Homo sapien
ccaatagcgccacgtcccaatctgg

SEQ ID NO: 4512048 - DNA, 25 bp, Homo sapien
gcatctgccaatagcgccacgtccc

SEQ ID NO: 4512049 - DNA, 25 bp, Homo sapien
atagcgccacgtcccaatctgggtg

SEQ ID NO: 4512050 - DNA, 25 bp, Homo sapien
ccagaaccccattgagggagtcata

SEQ ID NO: 4512051 - DNA, 25 bp, Homo sapien
ctgaccagaaccccattgagggagt

SEQ ID NO: 4512052 - DNA, 25 bp, Homo sapien
gaccagaaccccattgagggagtca

SEQ ID NO: 4512053 - DNA, 25 bp, Homo sapien
cagaaccccattgagggagtcatac

SEQ ID NO: 4512054 - DNA, 25 bp, Homo sapien
gaaatgcattcagggagtacagatt

SEQ ID NO: 4512055 - DNA, 25 bp, Homo sapien
tgcattcagggagtacagattactt

SEQ ID NO: 4512056 - DNA, 25 bp, Homo sapien
aaagaaatgcattcagggagtacag

SEQ ID NO: 4512057 - DNA, 25 bp, Homo sapien
tgtgaaagaaatgcattcagggagt

SEQ ID NO: 4512058 - DNA, 25 bp, Homo sapien
aagcccagctggatgaagtatgtca

SEQ ID NO: 4512059 - DNA, 25 bp, Homo sapien
tggcctcatcccggctgggcgtccg

SEQ ID NO: 4512060 - DNA, 25 bp, Homo sapien
cctggcctcatcccggctgggcgtc

SEQ ID NO: 4512061 - DNA, 25 bp, Homo sapien
gcctcatcccggctgggcgtccgac

SEQ ID NO: 4512062 - DNA, 25 bp, Homo sapien
tcatcccggctgggcgtccgacaag

SEQ ID NO: 4512063 - DNA, 25 bp, Homo sapien
agccatcttcactgtaatgttccag

SEQ ID NO: 4512064 - DNA, 25 bp, Homo sapien
gccatcttcactgtaatgttccagg

SEQ ID NO: 4512065 - DNA, 25 bp, Homo sapien
gaggatgactgaaaagtcgatgtct

SEQ ID NO: 4512066 - DNA, 25 bp, Homo sapien
ggatgactgaaaagtcgatgtcttt

SEQ ID NO: 4512067 - DNA, 25 bp, Homo sapien
cttgaggatgactgaaaagtcgatg

SEQ ID NO: 4512068 - DNA, 25 bp, Homo sapien
tgaggatgactgaaaagtcgatgtc

SEQ ID NO: 4512069 - DNA, 25 bp, Homo sapien
cagggcgaggggacaatgcagctgt

SEQ ID NO: 4512070 - DNA, 25 bp, Homo sapien
cgaggggacaatgcagctgtaagct

SEQ ID NO: 4512071 - DNA, 25 bp, Homo sapien
gggacaatgcagctgtaagctgaac

SEQ ID NO: 4512072 - DNA, 25 bp, Homo sapien
caatgcagctgtaagctgaacctgg

SEQ ID NO: 4512073 - DNA, 25 bp, Homo sapien
gagatcttcggttcactctgtggga

SEQ ID NO: 4512074 - DNA, 25 bp, Homo sapien
aaatgagagtgtgggacagccgaca

SEQ ID NO: 4512075 - DNA, 25 bp, Homo sapien
cagggaccactccagagatcttcgg

SEQ ID NO: 4512076 - DNA, 25 bp, Homo sapien
tccagaacttgaaccttttggacaa

SEQ ID NO: 4512077 - DNA, 25 bp, Homo sapien
tcacaaagggaagagccagcgagct

SEQ ID NO: 4512078 - DNA, 25 bp, Homo sapien
aagagccagcgagctttcacacact

SEQ ID NO: 4512079 - DNA, 25 bp, Homo sapien
ttcacacactgacacttcccctcca

SEQ ID NO: 4512080 - DNA, 25 bp, Homo sapien
aaagggaagagccagcgagctttca

SEQ ID NO: 4512081 - DNA, 25 bp, Homo sapien
cgcacttgttcccgcacctttgggt

SEQ ID NO: 4512082 - DNA, 25 bp, Homo sapien
ccgcacctttgggttcgcggccact

SEQ ID NO: 4512083 - DNA, 25 bp, Homo sapien
gcatctgcaggtctgagttgaccaa

SEQ ID NO: 4512084 - DNA, 25 bp, Homo sapien
tgtgttctgatagatgcccactgag

SEQ ID NO: 4512085 - DNA, 25 bp, Homo sapien
ggagagaagtgccctcagccaggta

SEQ ID NO: 4512086 - DNA, 25 bp, Homo sapien
gagaagtgccctcagccaggtatcc

SEQ ID NO: 4512087 - DNA, 25 bp, Homo sapien
agagaagtgccctcagccaggtatc

SEQ ID NO: 4512088 - DNA, 25 bp, Homo sapien
gagagaagtgccctcagccaggtat

SEQ ID NO: 4512089 - DNA, 25 bp, Homo sapien
gcagacatgaactctatgacatcct

SEQ ID NO: 4512090 - DNA, 25 bp, Homo sapien
gctgcagacatgaactctatgacat

SEQ ID NO: 4512091 - DNA, 25 bp, Homo sapien
gtgagctgcagacatgaactctatg

SEQ ID NO: 4512092 - DNA, 25 bp, Homo sapien
catgaactctatgacatcctgcaaa

SEQ ID NO: 4512093 - DNA, 25 bp, Homo sapien
tctgtaagtttgccccctcgggtca

SEQ ID NO: 4512094 - DNA, 25 bp, Homo sapien
gcttgggaagccagccttcaggtcc

SEQ ID NO: 4512095 - DNA, 25 bp, Homo sapien
cagccttcaggtcccgctgttttgt

SEQ ID NO: 4512096 - DNA, 25 bp, Homo sapien
cttcaggtcccgctgttttgttatt

SEQ ID NO: 4512097 - DNA, 25 bp, Homo sapien
ccttctgctttccaacaagacgcca

SEQ ID NO: 4512098 - DNA, 25 bp, Homo sapien
ttccttctgctttccaacaagacgc

SEQ ID NO: 4512099 - DNA, 25 bp, Homo sapien
ttctgctttccaacaagacgccaga

SEQ ID NO: 4512100 - DNA, 25 bp, Homo sapien
cttctgctttccaacaagacgccag

SEQ ID NO: 4512101 - DNA, 25 bp, Homo sapien
cctcggtctggaagattccagtaga

SEQ ID NO: 4512102 - DNA, 25 bp, Homo sapien
aggctggttccaggtctgggtgctg

SEQ ID NO: 4512103 - DNA, 25 bp, Homo sapien
ggcctggaggctggttccaggtctg

SEQ ID NO: 4512104 - DNA, 25 bp, Homo sapien
ctgcctcggtctggaagattccagt

SEQ ID NO: 4512105 - DNA, 25 bp, Homo sapien
aaaggcctccctcgtgagcactggc

SEQ ID NO: 4512106 - DNA, 25 bp, Homo sapien
aaaaaggcctccctcgtgagcactg

SEQ ID NO: 4512107 - DNA, 25 bp, Homo sapien
aggcctccctcgtgagcactggcag

SEQ ID NO: 4512108 - DNA, 25 bp, Homo sapien
aggaaaaaggcctccctcgtgagca

SEQ ID NO: 4512109 - DNA, 25 bp, Homo sapien
gggtataaccgtgctgtggactgct

SEQ ID NO: 4512110 - DNA, 25 bp, Homo sapien
ctgggtataaccgtgctgtggactg

SEQ ID NO: 4512111 - DNA, 25 bp, Homo sapien
ctgctgggtataaccgtgctgtgga

SEQ ID NO: 4512112 - DNA, 25 bp, Homo sapien
tgctgggtataaccgtgctgtggac

SEQ ID NO: 4512113 - DNA, 25 bp, Homo sapien
gtctgcagttccagggagcctctcc

SEQ ID NO: 4512114 - DNA, 25 bp, Homo sapien
tgcagttccagggagcctctccctg

SEQ ID NO: 4512115 - DNA, 25 bp, Homo sapien
gcagttccagggagcctctccctgg

SEQ ID NO: 4512116 - DNA, 25 bp, Homo sapien
ccccgagtctccagtttggcctgtg

SEQ ID NO: 4512117 - DNA, 25 bp, Homo sapien
ctgccccgagtctccagtttggcct

SEQ ID NO: 4512118 - DNA, 25 bp, Homo sapien
tggctgccccgagtctccagtttgg

SEQ ID NO: 4512119 - DNA, 25 bp, Homo sapien
ggctgccccgagtctccagtttggc

SEQ ID NO: 4512120 - DNA, 25 bp, Homo sapien
caggatcgatggagcattgactgct

SEQ ID NO: 4512121 - DNA, 25 bp, Homo sapien
gatggagcattgactgctgattgga

SEQ ID NO: 4512122 - DNA, 25 bp, Homo sapien
ggagcattgactgctgattggactc

SEQ ID NO: 4512123 - DNA, 25 bp, Homo sapien
gactcagccaggatcgatggagcat

SEQ ID NO: 4512124 - DNA, 25 bp, Homo sapien
aggaaggagtggttctcctctccct

SEQ ID NO: 4512125 - DNA, 25 bp, Homo sapien
tggccactctgttggacctggccat

SEQ ID NO: 4512126 - DNA, 25 bp, Homo sapien
ctggccactctgttggacctggcca

SEQ ID NO: 4512127 - DNA, 25 bp, Homo sapien
tataaaacccgagtcagtaccaaga

SEQ ID NO: 4512128 - DNA, 25 bp, Homo sapien
ccaagaagagtcaatttattagttt

SEQ ID NO: 4512129 - DNA, 25 bp, Homo sapien
tctataaaacccgagtcagtaccaa

SEQ ID NO: 4512130 - DNA, 25 bp, Homo sapien
ttcttctataaaacccgagtcagta

SEQ ID NO: 4512131 - DNA, 25 bp, Homo sapien
gggtcaagagacctctgccgtgcag

SEQ ID NO: 4512132 - DNA, 25 bp, Homo sapien
cctctgccgtgcaggcctgaagagc

SEQ ID NO: 4512133 - DNA, 25 bp, Homo sapien
ctgggtcaagagacctctgccgtgc

SEQ ID NO: 4512134 - DNA, 25 bp, Homo sapien
tgggtcaagagacctctgccgtgca

SEQ ID NO: 4512135 - DNA, 25 bp, Homo sapien
tgctgctgagctaggggccgcctct

SEQ ID NO: 4512136 - DNA, 25 bp, Homo sapien
tgctgctggtagtgggctctgccct

SEQ ID NO: 4512137 - DNA, 25 bp, Homo sapien
ttaaagtgtccgtgatgtccctgct

SEQ ID NO: 4512138 - DNA, 25 bp, Homo sapien
gctggtctcggggtgtgagctgctg

SEQ ID NO: 4512139 - DNA, 25 bp, Homo sapien
cccaggcattgccagaccacaggat

SEQ ID NO: 4512140 - DNA, 25 bp, Homo sapien
cattgccagaccacaggatctgatg

SEQ ID NO: 4512141 - DNA, 25 bp, Homo sapien
ctgggtaccccaggcattgccagac

SEQ ID NO: 4512142 - DNA, 25 bp, Homo sapien
gggtaccccaggcattgccagacca

SEQ ID NO: 4512143 - DNA, 25 bp, Homo sapien
catgacccaaagtgctgcttgggct

SEQ ID NO: 4512144 - DNA, 25 bp, Homo sapien
aagctgcttcatggtcccaaaccat

SEQ ID NO: 4512145 - DNA, 25 bp, Homo sapien
ctcaaggttgtaattatttgcagcc

SEQ ID NO: 4512146 - DNA, 25 bp, Homo sapien
caagctgcttcatggtcccaaacca

SEQ ID NO: 4512147 - DNA, 25 bp, Homo sapien
gcagacctccttgcttactttgaat

SEQ ID NO: 4512148 - DNA, 25 bp, Homo sapien
ctggagcagcagacctccttgctta

SEQ ID NO: 4512149 - DNA, 25 bp, Homo sapien
gagcagcagacctccttgcttactt

SEQ ID NO: 4512150 - DNA, 25 bp, Homo sapien
cagaggggaaaactgggtggtgaca

SEQ ID NO: 4512151 - DNA, 25 bp, Homo sapien
cttcctggagtgtctcctctttctc

SEQ ID NO: 4512152 - DNA, 25 bp, Homo sapien
ggtcttcctggagtgtctcctcttt

SEQ ID NO: 4512153 - DNA, 25 bp, Homo sapien
ctgcaggtcttcctggagtgtctcc

SEQ ID NO: 4512154 - DNA, 25 bp, Homo sapien
tcctggagtgtctcctctttctctc

SEQ ID NO: 4512155 - DNA, 25 bp, Homo sapien
gtgaggttgatcagtctcccctgga

SEQ ID NO: 4512156 - DNA, 25 bp, Homo sapien
atcagtctcccctggaaggccaaca

SEQ ID NO: 4512157 - DNA, 25 bp, Homo sapien
agtctcccctggaaggccaacagct

SEQ ID NO: 4512158 - DNA, 25 bp, Homo sapien
gttgatcagtctcccctggaaggcc

SEQ ID NO: 4512159 - DNA, 25 bp, Homo sapien
ctagccaaaacctagtgccttggat

SEQ ID NO: 4512160 - DNA, 25 bp, Homo sapien
cctagccaaaacctagtgccttgga

SEQ ID NO: 4512161 - DNA, 25 bp, Homo sapien
aacctagccaaaacctagtgccttg

SEQ ID NO: 4512162 - DNA, 25 bp, Homo sapien
gcaacctagccaaaacctagtgcct

SEQ ID NO: 4512163 - DNA, 25 bp, Homo sapien
tgtgggcatctgtctcctctgcagc

SEQ ID NO: 4512164 - DNA, 25 bp, Homo sapien
tgggcatctgtctcctctgcagcat

SEQ ID NO: 4512165 - DNA, 25 bp, Homo sapien
atggtatccactcaggggcctctgt

SEQ ID NO: 4512166 - DNA, 25 bp, Homo sapien
cacttagtgagcatggtatccactc

SEQ ID NO: 4512167 - DNA, 25 bp, Homo sapien
cacctttgctggacttggcattgag

SEQ ID NO: 4512168 - DNA, 25 bp, Homo sapien
tgatgccacggccttgcgagtgtca

SEQ ID NO: 4512169 - DNA, 25 bp, Homo sapien
tcttttcctgtgtggacctgcagag

SEQ ID NO: 4512170 - DNA, 25 bp, Homo sapien
cagggtacccgtggtcactcagttc

SEQ ID NO: 4512171 - DNA, 25 bp, Homo sapien
accatcaccactttcagtctctgaa

SEQ ID NO: 4512172 - DNA, 25 bp, Homo sapien
gctgagccctggtgagccaggacct

SEQ ID NO: 4512173 - DNA, 25 bp, Homo sapien
cagtgacacctggtgcgttggaggg

SEQ ID NO: 4512174 - DNA, 25 bp, Homo sapien
tgttggtcccatggccatcggtgtt

SEQ ID NO: 4512175 - DNA, 25 bp, Homo sapien
gaagagaatagacccccctccacca

SEQ ID NO: 4512176 - DNA, 25 bp, Homo sapien
gacccacaaaggaacattcaggccg

SEQ ID NO: 4512177 - DNA, 25 bp, Homo sapien
cggttcccgggcattgattcagcac

SEQ ID NO: 4512178 - DNA, 25 bp, Homo sapien
tgggccttggcagcgataacgcctg

SEQ ID NO: 4512179 - DNA, 25 bp, Homo sapien
ccatgagttgtgtccacggcagcct

SEQ ID NO: 4512180 - DNA, 25 bp, Homo sapien
tgaggaggcgccgtgccctccgtgg

SEQ ID NO: 4512181 - DNA, 25 bp, Homo sapien
aaggtctaggctcactccaggaatg

SEQ ID NO: 4512182 - DNA, 25 bp, Homo sapien
ccagacgatggacgcagcgcaaggt

SEQ ID NO: 4512183 - DNA, 25 bp, Homo sapien
agagcccatttggatgaggaggcgc

SEQ ID NO: 4512184 - DNA, 25 bp, Homo sapien
tcccacgcaagagtgtgaaaacccc

SEQ ID NO: 4512185 - DNA, 25 bp, Homo sapien
tcatcacacatatcagccacagaag

SEQ ID NO: 4512186 - DNA, 25 bp, Homo sapien
tcacacatatcagccacagaaggat

SEQ ID NO: 4512187 - DNA, 25 bp, Homo sapien
tctaaagaggttgcacgtcccacgc

SEQ ID NO: 4512188 - DNA, 25 bp, Homo sapien
tctagatcaggcgccgcccctgacc

SEQ ID NO: 4512189 - DNA, 25 bp, Homo sapien
tagatcaggcgccgcccctgacccc

SEQ ID NO: 4512190 - DNA, 25 bp, Homo sapien
ccctgacccccactgctcctcccac

SEQ ID NO: 4512191 - DNA, 25 bp, Homo sapien
gcccctgacccccactgctcctccc

SEQ ID NO: 4512192 - DNA, 25 bp, Homo sapien
tcgcctatcacgcagctgtttgcct

SEQ ID NO: 4512193 - DNA, 25 bp, Homo sapien
aaatgtgtcgcctatcacgcagctg

SEQ ID NO: 4512194 - DNA, 25 bp, Homo sapien
ctgcaaatgtgtcgcctatcacgca

SEQ ID NO: 4512195 - DNA, 25 bp, Homo sapien
tgtgtcgcctatcacgcagctgttt

SEQ ID NO: 4512196 - DNA, 25 bp, Homo sapien
tagcctgaacccaccctgtgatgcc

SEQ ID NO: 4512197 - DNA, 25 bp, Homo sapien
tggtcatagcctgaacccaccctgt

SEQ ID NO: 4512198 - DNA, 25 bp, Homo sapien
ggtggtcatagcctgaacccaccct

SEQ ID NO: 4512199 - DNA, 25 bp, Homo sapien
gtcatagcctgaacccaccctgtga

SEQ ID NO: 4512200 - DNA, 25 bp, Homo sapien
ctcatcgtgttgtccccactttatt

SEQ ID NO: 4512201 - DNA, 25 bp, Homo sapien
tctcatcgtgttgtccccactttat

SEQ ID NO: 4512202 - DNA, 25 bp, Homo sapien
ttgtgtggttatccgtggccacccc

SEQ ID NO: 4512203 - DNA, 25 bp, Homo sapien
tttgtgtggttatccgtggccaccc

SEQ ID NO: 4512204 - DNA, 25 bp, Homo sapien
agggtgtcccctgacctcggtcaat

SEQ ID NO: 4512205 - DNA, 25 bp, Homo sapien
ggagggtgtcccctgacctcggtca

SEQ ID NO: 4512206 - DNA, 25 bp, Homo sapien
tgtcccctgacctcggtcaatggaa

SEQ ID NO: 4512207 - DNA, 25 bp, Homo sapien
gccctgattggccgcctgtccttgg

SEQ ID NO: 4512208 - DNA, 25 bp, Homo sapien
cgactagcaggacagatggtgggcc

SEQ ID NO: 4512209 - DNA, 25 bp, Homo sapien
tccacctcgggctgaactgggatgg

SEQ ID NO: 4512210 - DNA, 25 bp, Homo sapien
ggcccaggccggattctgtcacact

SEQ ID NO: 4512211 - DNA, 25 bp, Homo sapien
ctggcacgtggctggaggtcatcat

SEQ ID NO: 4512212 - DNA, 25 bp, Homo sapien
gcagatgaggggctttgtaggtggg

SEQ ID NO: 4512213 - DNA, 25 bp, Homo sapien
tttgtaggtgggtgggcgactgaag

SEQ ID NO: 4512214 - DNA, 25 bp, Homo sapien
gtgggtgggcgactgaagccccctg

SEQ ID NO: 4512215 - DNA, 25 bp, Homo sapien
cagatgaggggctttgtaggtgggt

SEQ ID NO: 4512216 - DNA, 25 bp, Homo sapien
gggcgctcaggattgggccgggctg

SEQ ID NO: 4512217 - DNA, 25 bp, Homo sapien
cagaagaggggacattgagcccaag

SEQ ID NO: 4512218 - DNA, 25 bp, Homo sapien
agcccaggcgacatcaacggccagc

SEQ ID NO: 4512219 - DNA, 25 bp, Homo sapien
catacgcgtgaggattgcggcacca

SEQ ID NO: 4512220 - DNA, 25 bp, Homo sapien
caacttagtaggtcatggaagcctc

SEQ ID NO: 4512221 - DNA, 25 bp, Homo sapien
ggacccaggatttgagcaacaacac

SEQ ID NO: 4512222 - DNA, 25 bp, Homo sapien
tgacatagtagcagaaggcagccca

SEQ ID NO: 4512223 - DNA, 25 bp, Homo sapien
caggagagactgaacaataccaggc

SEQ ID NO: 4512224 - DNA, 25 bp, Homo sapien
taattgatagccttttggaagctgg

SEQ ID NO: 4512225 - DNA, 25 bp, Homo sapien
atgcttgtttcatgcatggaccgtc

SEQ ID NO: 4512226 - DNA, 25 bp, Homo sapien
ttcatgcatggaccgtcgcttacca

SEQ ID NO: 4512227 - DNA, 25 bp, Homo sapien
tcatttaattgatagccttttggaa

SEQ ID NO: 4512228 - DNA, 25 bp, Homo sapien
tcaccattatcgaagacctactgtg

SEQ ID NO: 4512229 - DNA, 25 bp, Homo sapien
tttatcaccattatcgaagacctac

SEQ ID NO: 4512230 - DNA, 25 bp, Homo sapien
gtttacatgaattgaagtactcatc

SEQ ID NO: 4512231 - DNA, 25 bp, Homo sapien
tttgtttacatgaattgaagtactc

SEQ ID NO: 4512232 - DNA, 25 bp, Homo sapien
aaaatgttgaacagtttcgcagtgc

SEQ ID NO: 4512233 - DNA, 25 bp, Homo sapien
tactgacatttactaagagcactga

SEQ ID NO: 4512234 - DNA, 25 bp, Homo sapien
tgaatctagctgctctcaattgtaa

SEQ ID NO: 4512235 - DNA, 25 bp, Homo sapien
gatttgcgtaattccacacagctag

SEQ ID NO: 4512236 - DNA, 25 bp, Homo sapien
cagtccttgacattgccgctgatca

SEQ ID NO: 4512237 - DNA, 25 bp, Homo sapien
tgtagctatcatcactgaaagaggc

SEQ ID NO: 4512238 - DNA, 25 bp, Homo sapien
gaagcagtacttgttcctgtcatga

SEQ ID NO: 4512239 - DNA, 25 bp, Homo sapien
gatcattaaaccctgtatctccttg

SEQ ID NO: 4512240 - DNA, 25 bp, Homo sapien
tacttcccgccctgaactcaaatta

SEQ ID NO: 4512241 - DNA, 25 bp, Homo sapien
tcaagatatttgagagttgatgtgc

SEQ ID NO: 4512242 - DNA, 25 bp, Homo sapien
ttaatcagctgtggtacttcccgcc

SEQ ID NO: 4512243 - DNA, 25 bp, Homo sapien
gcctccaatttctgtaatcaagata

SEQ ID NO: 4512244 - DNA, 25 bp, Homo sapien
attgccaagacaatctgaaggcaaa

SEQ ID NO: 4512245 - DNA, 25 bp, Homo sapien
tgtgtgtgtctagccatcactctgg

SEQ ID NO: 4512246 - DNA, 25 bp, Homo sapien
gtggtctcaaccacaaccttgttct

SEQ ID NO: 4512247 - DNA, 25 bp, Homo sapien
tattcgtgtccctgaactgtggtct

SEQ ID NO: 4512248 - DNA, 25 bp, Homo sapien
cttgttctccatcaattctatccct

SEQ ID NO: 4512249 - DNA, 25 bp, Homo sapien
taacctatctgccattcaaaggaag

SEQ ID NO: 4512250 - DNA, 25 bp, Homo sapien
ttatgctttgcacctctggaaatcc

SEQ ID NO: 4512251 - DNA, 25 bp, Homo sapien
gatctctagcttcacccctggttag

SEQ ID NO: 4512252 - DNA, 25 bp, Homo sapien
caatcacaatattggaggatcagaa

SEQ ID NO: 4512253 - DNA, 25 bp, Homo sapien
tagaggaagacatcgtgcactgctg

SEQ ID NO: 4512254 - DNA, 25 bp, Homo sapien
agaggaagacatcgtgcactgctgg

SEQ ID NO: 4512255 - DNA, 25 bp, Homo sapien
ggactttgtgccctgtagataacca

SEQ ID NO: 4512256 - DNA, 25 bp, Homo sapien
gcaagagatcaatacaggcaagtgt

SEQ ID NO: 4512257 - DNA, 25 bp, Homo sapien
gggacatgatagtgaacaaaaccag

SEQ ID NO: 4512258 - DNA, 25 bp, Homo sapien
tacggatgttctctaggtgttactg

SEQ ID NO: 4512259 - DNA, 25 bp, Homo sapien
gagcgttgcaaatgtggtgtagcca

SEQ ID NO: 4512260 - DNA, 25 bp, Homo sapien
tgaattgaggaatatcacctagcca

SEQ ID NO: 4512261 - DNA, 25 bp, Homo sapien
cactcagggtgtccttatggcttta

SEQ ID NO: 4512262 - DNA, 25 bp, Homo sapien
tgggtcattaccagctagccatctg

SEQ ID NO: 4512263 - DNA, 25 bp, Homo sapien
ttgtatttacaaggcttgctggcca

SEQ ID NO: 4512264 - DNA, 25 bp, Homo sapien
gctttgtatttacaaggcttgctgg

SEQ ID NO: 4512265 - DNA, 25 bp, Homo sapien
tttgtatttacaaggcttgctggcc

SEQ ID NO: 4512266 - DNA, 25 bp, Homo sapien
catgctttgtatttacaaggcttgc

SEQ ID NO: 4512267 - DNA, 25 bp, Homo sapien
catccactgctaatttgaggctgtt

SEQ ID NO: 4512268 - DNA, 25 bp, Homo sapien
ccgtggaaagcggttgcagaagccc

SEQ ID NO: 4512269 - DNA, 25 bp, Homo sapien
gtaggcatccactgctaatttgagg

SEQ ID NO: 4512270 - DNA, 25 bp, Homo sapien
tggaaagcggttgcagaagcccagt

SEQ ID NO: 4512271 - DNA, 25 bp, Homo sapien
tccttgaaactatcttggagggctg

SEQ ID NO: 4512272 - DNA, 25 bp, Homo sapien
tatctggtgagttgcagttccttga

SEQ ID NO: 4512273 - DNA, 25 bp, Homo sapien
caaggagaatgggacatcactcaaa

SEQ ID NO: 4512274 - DNA, 25 bp, Homo sapien
gcagcagcaggttacttaggcaacc

SEQ ID NO: 4512275 - DNA, 25 bp, Homo sapien
tatagaaagcacttatttgtacttc

SEQ ID NO: 4512276 - DNA, 25 bp, Homo sapien
tttaccttctgttagttccctctgc

SEQ ID NO: 4512277 - DNA, 25 bp, Homo sapien
ccatgtttctaactgtagcctatct

SEQ ID NO: 4512278 - DNA, 25 bp, Homo sapien
attaacacactccaatttcaattga

SEQ ID NO: 4512279 - DNA, 25 bp, Homo sapien
tctccttttcctccaagatttaatg

SEQ ID NO: 4512280 - DNA, 25 bp, Homo sapien
ccttttcctccaagatttaatgtga

SEQ ID NO: 4512281 - DNA, 25 bp, Homo sapien
taatgtgaagtaaaaatcttttata

SEQ ID NO: 4512282 - DNA, 25 bp, Homo sapien
caactcttcttcctccttttctcct

SEQ ID NO: 4512283 - DNA, 25 bp, Homo sapien
aactcttcaattcaagtgatctgct

SEQ ID NO: 4512284 - DNA, 25 bp, Homo sapien
tttgacattgtgacggggccttcct

SEQ ID NO: 4512285 - DNA, 25 bp, Homo sapien
tactgccctaatattaatgagtttt

SEQ ID NO: 4512286 - DNA, 25 bp, Homo sapien
gccttcctaaagacccagagcactt

SEQ ID NO: 4512287 - DNA, 25 bp, Homo sapien
ctttcccctggtaatctcttgtaca

SEQ ID NO: 4512288 - DNA, 25 bp, Homo sapien
catacagagcgtaagtgataattct

SEQ ID NO: 4512289 - DNA, 25 bp, Homo sapien
gtcctttgttgaaggtatgtacaca

SEQ ID NO: 4512290 - DNA, 25 bp, Homo sapien
ttttttaatgaaactctcggcagat

SEQ ID NO: 4512291 - DNA, 25 bp, Homo sapien
catcctgtgtacctcaaattgtgtt

SEQ ID NO: 4512292 - DNA, 25 bp, Homo sapien
gaaataattcatagggcacatcctg

SEQ ID NO: 4512293 - DNA, 25 bp, Homo sapien
caacagtatgctatgagtagttaca

SEQ ID NO: 4512294 - DNA, 25 bp, Homo sapien
caattgcatggataggtcagcatcc

SEQ ID NO: 4512295 - DNA, 25 bp, Homo sapien
cattaaaaagtacgcaaattcaact

SEQ ID NO: 4512296 - DNA, 25 bp, Homo sapien
tacattaaaaagtacgcaaattcaa

SEQ ID NO: 4512297 - DNA, 25 bp, Homo sapien
gctgcacagcattgaagttctcttc

SEQ ID NO: 4512298 - DNA, 25 bp, Homo sapien
gcttaactgtcaaactgaacccagg

SEQ ID NO: 4512299 - DNA, 25 bp, Homo sapien
tgcttgatagcgtcacagggagaaa

SEQ ID NO: 4512300 - DNA, 25 bp, Homo sapien
ggaaacaggtccacgcatatttgaa

SEQ ID NO: 4512301 - DNA, 25 bp, Homo sapien
caccattaaggtaccatgcagagta

SEQ ID NO: 4512302 - DNA, 25 bp, Homo sapien
cctcactgctgtacattacataagt

SEQ ID NO: 4512303 - DNA, 25 bp, Homo sapien
gggatttcccataagtcctctgccc

SEQ ID NO: 4512304 - DNA, 25 bp, Homo sapien
gacagttgttacaaatgatgaacct

SEQ ID NO: 4512305 - DNA, 25 bp, Homo sapien
cgttttcaatcataagggagtattt

SEQ ID NO: 4512306 - DNA, 25 bp, Homo sapien
gtatattggtcccaagtagtgagca

SEQ ID NO: 4512307 - DNA, 25 bp, Homo sapien
gagtgatttcctttagaatgtgtgc

SEQ ID NO: 4512308 - DNA, 25 bp, Homo sapien
gtgtgcagtatctattgttcccatg

SEQ ID NO: 4512309 - DNA, 25 bp, Homo sapien
caaagattttggtaagtcatattcc

SEQ ID NO: 4512310 - DNA, 25 bp, Homo sapien
gatgttcacctaagagttattcagg

SEQ ID NO: 4512311 - DNA, 25 bp, Homo sapien
taaatctagccgttaaatagcagtc

SEQ ID NO: 4512312 - DNA, 25 bp, Homo sapien
catggtattctatgggaaacttttg

SEQ ID NO: 4512313 - DNA, 25 bp, Homo sapien
gagctagtggatcatttggaagtga

SEQ ID NO: 4512314 - DNA, 25 bp, Homo sapien
tcagctctagaatttaagtttggtt

SEQ ID NO: 4512315 - DNA, 25 bp, Homo sapien
tgaattccttgcactgaatttcact

SEQ ID NO: 4512316 - DNA, 25 bp, Homo sapien
tgagggtacactctgactttttgga

SEQ ID NO: 4512317 - DNA, 25 bp, Homo sapien
tgtaaactcaattcatacgtggaaa

SEQ ID NO: 4512318 - DNA, 25 bp, Homo sapien
ttttcttggacacgctgattgatca

SEQ ID NO: 4512319 - DNA, 25 bp, Homo sapien
cagtgtcagacagtatatagacagg

SEQ ID NO: 4512320 - DNA, 25 bp, Homo sapien
ggtagggatgagcaattatagtcca

SEQ ID NO: 4512321 - DNA, 25 bp, Homo sapien
ttaatgtattacacagcaagaaaga

SEQ ID NO: 4512322 - DNA, 25 bp, Homo sapien
gaaagattttggaatgaacatctct

SEQ ID NO: 4512323 - DNA, 25 bp, Homo sapien
taatcctctatgttgccagccatga

SEQ ID NO: 4512324 - DNA, 25 bp, Homo sapien
tttgtctctgatattttgtccagat

SEQ ID NO: 4512325 - DNA, 25 bp, Homo sapien
ctatgcgaacgtcccgtagccctga

SEQ ID NO: 4512326 - DNA, 25 bp, Homo sapien
gagtcctgacgagcctctttgaata

SEQ ID NO: 4512327 - DNA, 25 bp, Homo sapien
cctgacgagcctctttgaataattc

SEQ ID NO: 4512328 - DNA, 25 bp, Homo sapien
cagagtcctgacgagcctctttgaa

SEQ ID NO: 4512329 - DNA, 25 bp, Homo sapien
tgccagagtcctgacgagcctcttt

SEQ ID NO: 4512330 - DNA, 25 bp, Homo sapien
gagcgtttaacccatgctgcatcta

SEQ ID NO: 4512331 - DNA, 25 bp, Homo sapien
taaaaactgtcaaggctgcatggct

SEQ ID NO: 4512332 - DNA, 25 bp, Homo sapien
gcagactatgcacaaacatggttaa

SEQ ID NO: 4512333 - DNA, 25 bp, Homo sapien
aaaaagatcccttcatgaagatgtg

SEQ ID NO: 4512334 - DNA, 25 bp, Homo sapien
ttcacaggagacggctgggtggccg

SEQ ID NO: 4512335 - DNA, 25 bp, Homo sapien
ggggctgcggcccttcaggagacat

SEQ ID NO: 4512336 - DNA, 25 bp, Homo sapien
cagctgctgcaagaggatcatgggg

SEQ ID NO: 4512337 - DNA, 25 bp, Homo sapien
caggagacggctgggtggccgaggc

SEQ ID NO: 4512338 - DNA, 25 bp, Homo sapien
aaggtcaggtgataccactgctcca

SEQ ID NO: 4512339 - DNA, 25 bp, Homo sapien
ggtcaggtgataccactgctccatc

SEQ ID NO: 4512340 - DNA, 25 bp, Homo sapien
caaggtcaggtgataccactgctcc

SEQ ID NO: 4512341 - DNA, 25 bp, Homo sapien
aggtcaggtgataccactgctccat

SEQ ID NO: 4512342 - DNA, 25 bp, Homo sapien
accactcatcgaaaaaccctgagct

SEQ ID NO: 4512343 - DNA, 25 bp, Homo sapien
aaaaccctgagctccaagaagagga

SEQ ID NO: 4512344 - DNA, 25 bp, Homo sapien
aaagactcaccacgttcactcctct

SEQ ID NO: 4512345 - DNA, 25 bp, Homo sapien
gaggagagctgctcaacgtgcttcc

SEQ ID NO: 4512346 - DNA, 25 bp, Homo sapien
ccacagcaataaacatatacagcta

SEQ ID NO: 4512347 - DNA, 25 bp, Homo sapien
aataaacatatacagctagccctcc

SEQ ID NO: 4512348 - DNA, 25 bp, Homo sapien
acatatacagctagccctccgtatc

SEQ ID NO: 4512349 - DNA, 25 bp, Homo sapien
cagcaataaacatatacagctagcc

SEQ ID NO: 4512350 - DNA, 25 bp, Homo sapien
gacttgctgggccaaagtatataaa

SEQ ID NO: 4512351 - DNA, 25 bp, Homo sapien
actcatttcctcagacgcccattag

SEQ ID NO: 4512352 - DNA, 25 bp, Homo sapien
tacaccaactgaaattcccagcagc

SEQ ID NO: 4512353 - DNA, 25 bp, Homo sapien
cccattagatggctacaccaactga

SEQ ID NO: 4512354 - DNA, 25 bp, Homo sapien
tgtgaacagttccagtctcctgaac

SEQ ID NO: 4512355 - DNA, 25 bp, Homo sapien
gtgtgaacagttccagtctcctgaa

SEQ ID NO: 4512356 - DNA, 25 bp, Homo sapien
ctgtgtgaacagttccagtctcctg

SEQ ID NO: 4512357 - DNA, 25 bp, Homo sapien
tgtgtgaacagttccagtctcctga

SEQ ID NO: 4512358 - DNA, 25 bp, Homo sapien
aggatgtatagcttcaactgctggc

SEQ ID NO: 4512359 - DNA, 25 bp, Homo sapien
gctggctgagacaggatctgccgca

SEQ ID NO: 4512360 - DNA, 25 bp, Homo sapien
cagcgcccgacctgctttcaggatg

SEQ ID NO: 4512361 - DNA, 25 bp, Homo sapien
tgctttcaggatgtatagcttcaac

SEQ ID NO: 4512362 - DNA, 25 bp, Homo sapien
tgcaaaggcctgtttagtcgatttc

SEQ ID NO: 4512363 - DNA, 25 bp, Homo sapien
ttccagcgaggttcaccaactgagc

SEQ ID NO: 4512364 - DNA, 25 bp, Homo sapien
gttcacattaaaggccacggcaggg

SEQ ID NO: 4512365 - DNA, 25 bp, Homo sapien
tgagcccagacagacagcatgggct

SEQ ID NO: 4512366 - DNA, 25 bp, Homo sapien
catgggcttaatcctgaaatgccac

SEQ ID NO: 4512367 - DNA, 25 bp, Homo sapien
taaaggcaggatagagatttacaca

SEQ ID NO: 4512368 - DNA, 25 bp, Homo sapien
catcagtgtggtggttactatcttc

SEQ ID NO: 4512369 - DNA, 25 bp, Homo sapien
cagagtgtggccaatatgactaaca

SEQ ID NO: 4512370 - DNA, 25 bp, Homo sapien
ccttcagggtgatgcgagtcatggt

SEQ ID NO: 4512371 - DNA, 25 bp, Homo sapien
ggtgatgcgagtcatggtgacttct

SEQ ID NO: 4512372 - DNA, 25 bp, Homo sapien
gcccttcagggtgatgcgagtcatg

SEQ ID NO: 4512373 - DNA, 25 bp, Homo sapien
cgagtcatggtgacttctccaaagt

SEQ ID NO: 4512374 - DNA, 25 bp, Homo sapien
ttgatgtacttgttgatgagcccat

SEQ ID NO: 4512375 - DNA, 25 bp, Homo sapien
gatgtacttgttgatgagcccattc

SEQ ID NO: 4512376 - DNA, 25 bp, Homo sapien
gtacttgttgatgagcccattccac

SEQ ID NO: 4512377 - DNA, 25 bp, Homo sapien
agcggagctgggagttgatgtactt

SEQ ID NO: 4512378 - DNA, 25 bp, Homo sapien
aagctgctgcaccactcttcaccag

SEQ ID NO: 4512379 - DNA, 25 bp, Homo sapien
aggaaaccaggggagaagctgctgc

SEQ ID NO: 4512380 - DNA, 25 bp, Homo sapien
acagggaagggagacggccactcac

SEQ ID NO: 4512381 - DNA, 25 bp, Homo sapien
tgctgcaccactcttcaccagggca

SEQ ID NO: 4512382 - DNA, 25 bp, Homo sapien
ctgagtgacggcactgcgccgctct

SEQ ID NO: 4512383 - DNA, 25 bp, Homo sapien
aagggagatggccacccacctctga

SEQ ID NO: 4512384 - DNA, 25 bp, Homo sapien
tctgagtgacggcactgcgccgctc

SEQ ID NO: 4512385 - DNA, 25 bp, Homo sapien
cctctgagtgatggcactacacggc

SEQ ID NO: 4512386 - DNA, 25 bp, Homo sapien
cacagggaagggagacggccaccca

SEQ ID NO: 4512387 - DNA, 25 bp, Homo sapien
aggacacagggaagggagacggcca

SEQ ID NO: 4512388 - DNA, 25 bp, Homo sapien
accaggacacagggaagggagacgg

SEQ ID NO: 4512389 - DNA, 25 bp, Homo sapien
gacacagggaagggagacggccacc

SEQ ID NO: 4512390 - DNA, 25 bp, Homo sapien
ctgagtgacggcactgcaccgctct

SEQ ID NO: 4512391 - DNA, 25 bp, Homo sapien
tgcaccgctcttcaccagggtacag

SEQ ID NO: 4512392 - DNA, 25 bp, Homo sapien
tacagggaagggagacggccaccca

SEQ ID NO: 4512393 - DNA, 25 bp, Homo sapien
cgctcttcaccagggtacagggaag

SEQ ID NO: 4512394 - DNA, 25 bp, Homo sapien
ggcactacacggctcttcaccagga

SEQ ID NO: 4512395 - DNA, 25 bp, Homo sapien
gcttgcaacaaatgcacagctaaga

SEQ ID NO: 4512396 - DNA, 25 bp, Homo sapien
cttgcaacaaatgcacagctaagat

SEQ ID NO: 4512397 - DNA, 25 bp, Homo sapien
gcaacattacagatgcatgtgttta

SEQ ID NO: 4512398 - DNA, 25 bp, Homo sapien
tagtgattaggattgtcagggactt

SEQ ID NO: 4512399 - DNA, 25 bp, Homo sapien
tctgttctcataatgcaagtaatca

SEQ ID NO: 4512400 - DNA, 25 bp, Homo sapien
tacagccaggtaattacactcaagt

SEQ ID NO: 4512401 - DNA, 25 bp, Homo sapien
agctccggtgttgctccctgtacac

SEQ ID NO: 4512402 - DNA, 25 bp, Homo sapien
accttcatgagcagcgtgatccact

SEQ ID NO: 4512403 - DNA, 25 bp, Homo sapien
ccttcatgagcagcgtgatccactg

SEQ ID NO: 4512404 - DNA, 25 bp, Homo sapien
accagctccggtgttgctccctgta

SEQ ID NO: 4512405 - DNA, 25 bp, Homo sapien
cctaaagacaaatccctaaagatat

SEQ ID NO: 4512406 - DNA, 25 bp, Homo sapien
tgcttggtaacaagtccctaaagac

SEQ ID NO: 4512407 - DNA, 25 bp, Homo sapien
gggaaaatagacatgcttggtaaca

SEQ ID NO: 4512408 - DNA, 25 bp, Homo sapien
tatattgcagtttgtaaattaattc

SEQ ID NO: 4512409 - DNA, 25 bp, Homo sapien
caggactccactactccctgaatgg

SEQ ID NO: 4512410 - DNA, 25 bp, Homo sapien
tctcatcaatatgtgcggacgctcc

SEQ ID NO: 4512411 - DNA, 25 bp, Homo sapien
catgctctcatggacatacacacac

SEQ ID NO: 4512412 - DNA, 25 bp, Homo sapien
caacacaaacgctcagccacttgcc

SEQ ID NO: 4512413 - DNA, 25 bp, Homo sapien
ctgaatgtagtcacctgcccactca

SEQ ID NO: 4512414 - DNA, 25 bp, Homo sapien
atgtcttgtccgtcattccgctttc

SEQ ID NO: 4512415 - DNA, 25 bp, Homo sapien
gtcttgtccgtcattccgctttcca

SEQ ID NO: 4512416 - DNA, 25 bp, Homo sapien
ttgtccgtcattccgctttccacta

SEQ ID NO: 4512417 - DNA, 25 bp, Homo sapien
tcttgtccgtcattccgctttccac

SEQ ID NO: 4512418 - DNA, 25 bp, Homo sapien
gcagcagtccgcataaagtcttggt

SEQ ID NO: 4512419 - DNA, 25 bp, Homo sapien
ttaatagtgctggtaaacatcattg

SEQ ID NO: 4512420 - DNA, 25 bp, Homo sapien
cagtccgcataaagtcttggtggct

SEQ ID NO: 4512421 - DNA, 25 bp, Homo sapien
cagacaaagagtctgcagtaagtta

SEQ ID NO: 4512422 - DNA, 25 bp, Homo sapien
tgtgtcccactggactcttatccac

SEQ ID NO: 4512423 - DNA, 25 bp, Homo sapien
caatcactcggcctaggcctggagg

SEQ ID NO: 4512424 - DNA, 25 bp, Homo sapien
tgtgtccgaatcctctgctgagggc

SEQ ID NO: 4512425 - DNA, 25 bp, Homo sapien
tgccagcttgaggtcgtaatttcct

SEQ ID NO: 4512426 - DNA, 25 bp, Homo sapien
gtgaacactgccctaacttagctag

SEQ ID NO: 4512427 - DNA, 25 bp, Homo sapien
gctgtggtaagtgacttccacctgg

SEQ ID NO: 4512428 - DNA, 25 bp, Homo sapien
cctaacttagctagggctgtggtaa

SEQ ID NO: 4512429 - DNA, 25 bp, Homo sapien
gacagaccatgggaaggtgaacact

SEQ ID NO: 4512430 - DNA, 25 bp, Homo sapien
agggagctgcacaggagccgtttcc

SEQ ID NO: 4512431 - DNA, 25 bp, Homo sapien
tcttccaaaactgtggcagaagcac

SEQ ID NO: 4512432 - DNA, 25 bp, Homo sapien
ttctggccctgaaacagggagctgc

SEQ ID NO: 4512433 - DNA, 25 bp, Homo sapien
gcattcatatcttcctcaacgctgt

SEQ ID NO: 4512434 - DNA, 25 bp, Homo sapien
aatcaggcgcagtgccgtctgagcg

SEQ ID NO: 4512435 - DNA, 25 bp, Homo sapien
tcaaggttgtttgcgctgtgctgca

SEQ ID NO: 4512436 - DNA, 25 bp, Homo sapien
gaggtcaaggttgtttgcgctgtgc

SEQ ID NO: 4512437 - DNA, 25 bp, Homo sapien
gagcgagggccagcgtgccggaatt

SEQ ID NO: 4512438 - DNA, 25 bp, Homo sapien
gtgggcttgcgggatggtccccaag

SEQ ID NO: 4512439 - DNA, 25 bp, Homo sapien
gatggtccccaagctcggtcccgat

SEQ ID NO: 4512440 - DNA, 25 bp, Homo sapien
agctcggtcccgatgggttctcatt

SEQ ID NO: 4512441 - DNA, 25 bp, Homo sapien
tggtccccaagctcggtcccgatgg

SEQ ID NO: 4512442 - DNA, 25 bp, Homo sapien
agtgagcattggcacccactgacat

SEQ ID NO: 4512443 - DNA, 25 bp, Homo sapien
tgagcattggcacccactgacattt

SEQ ID NO: 4512444 - DNA, 25 bp, Homo sapien
gtgagcattggcacccactgacatt

SEQ ID NO: 4512445 - DNA, 25 bp, Homo sapien
ctagtgagcattggcacccactgac

SEQ ID NO: 4512446 - DNA, 25 bp, Homo sapien
tacagcttgccaaaggtgacttcca

SEQ ID NO: 4512447 - DNA, 25 bp, Homo sapien
cttccagcagcatccgattaaaagg

SEQ ID NO: 4512448 - DNA, 25 bp, Homo sapien
taaagaatttgactcgggacactgc

SEQ ID NO: 4512449 - DNA, 25 bp, Homo sapien
gactcgggacactgccagacttcta

SEQ ID NO: 4512450 - DNA, 25 bp, Homo sapien
aagataaagaatttgactcgggaca

SEQ ID NO: 4512451 - DNA, 25 bp, Homo sapien
aatttgactcgggacactgccagac

SEQ ID NO: 4512452 - DNA, 25 bp, Homo sapien
catccacaaaacatcgcatacggca

SEQ ID NO: 4512453 - DNA, 25 bp, Homo sapien
cacaaaacatcgcatacggcacaga

SEQ ID NO: 4512454 - DNA, 25 bp, Homo sapien
tttgccatccacaaaacatcgcata

SEQ ID NO: 4512455 - DNA, 25 bp, Homo sapien
atcgcatacggcacagatggaagta

SEQ ID NO: 4512456 - DNA, 25 bp, Homo sapien
gtatctatcccttccaggcgaacct

SEQ ID NO: 4512457 - DNA, 25 bp, Homo sapien
ctatcccttccaggcgaacctctgc

SEQ ID NO: 4512458 - DNA, 25 bp, Homo sapien
tcccttccaggcgaacctctgctct

SEQ ID NO: 4512459 - DNA, 25 bp, Homo sapien
atctatcccttccaggcgaacctct

SEQ ID NO: 4512460 - DNA, 25 bp, Homo sapien
caaattcagcaattgtactgaggag

SEQ ID NO: 4512461 - DNA, 25 bp, Homo sapien
ttaagggcaaattcagcaattgtac

SEQ ID NO: 4512462 - DNA, 25 bp, Homo sapien
gaggagtggagactgcggataaaga

SEQ ID NO: 4512463 - DNA, 25 bp, Homo sapien
gggcaaattcagcaattgtactgag

SEQ ID NO: 4512464 - DNA, 25 bp, Homo sapien
tgggtctcttgtccacatttattgg

SEQ ID NO: 4512465 - DNA, 25 bp, Homo sapien
taattgcaatgggtctcttgtccac

SEQ ID NO: 4512466 - DNA, 25 bp, Homo sapien
cacatttattggactatgaggcaaa

SEQ ID NO: 4512467 - DNA, 25 bp, Homo sapien
tgtccacatttattggactatgagg

SEQ ID NO: 4512468 - DNA, 25 bp, Homo sapien
caattcttcacacatgatgtgacac

SEQ ID NO: 4512469 - DNA, 25 bp, Homo sapien
ctagactcgaggctcaggtgcgctg

SEQ ID NO: 4512470 - DNA, 25 bp, Homo sapien
gagagacaccaaagcgtgtgcctag

SEQ ID NO: 4512471 - DNA, 25 bp, Homo sapien
cactgcctgcgtatgtgactggccc

SEQ ID NO: 4512472 - DNA, 25 bp, Homo sapien
tttccttggttctcgaattatcttc

SEQ ID NO: 4512473 - DNA, 25 bp, Homo sapien
ccttggttctcgaattatcttctga

SEQ ID NO: 4512474 - DNA, 25 bp, Homo sapien
gcgcagacctccttgtaagaacggc

SEQ ID NO: 4512475 - DNA, 25 bp, Homo sapien
caaacgttcgatgacaggagcgcag

SEQ ID NO: 4512476 - DNA, 25 bp, Homo sapien
tgcaaagttaaccaggaaaagacaa

SEQ ID NO: 4512477 - DNA, 25 bp, Homo sapien
taacaacaaatatttcagcaactgt

SEQ ID NO: 4512478 - DNA, 25 bp, Homo sapien
gacaactttaacaacaaatatttca

SEQ ID NO: 4512479 - DNA, 25 bp, Homo sapien
ctgcaaagttaaccaggaaaagaca

SEQ ID NO: 4512480 - DNA, 25 bp, Homo sapien
actgacttaggcaacgttctgtgct

SEQ ID NO: 4512481 - DNA, 25 bp, Homo sapien
acattttgcttggtagacaactcta

SEQ ID NO: 4512482 - DNA, 25 bp, Homo sapien
cactgacttaggcaacgttctgtgc

SEQ ID NO: 4512483 - DNA, 25 bp, Homo sapien
tgacttaggcaacgttctgtgcttt

SEQ ID NO: 4512484 - DNA, 25 bp, Homo sapien
tgcatgaactaaagataatgccaca

SEQ ID NO: 4512485 - DNA, 25 bp, Homo sapien
gacatttaaaagaagggcagtgaag

SEQ ID NO: 4512486 - DNA, 25 bp, Homo sapien
aaagacatttaaaagaagggcagtg

SEQ ID NO: 4512487 - DNA, 25 bp, Homo sapien
aagacatttaaaagaagggcagtga

SEQ ID NO: 4512488 - DNA, 25 bp, Homo sapien
acatttaaaagaagggcagtgaagg

SEQ ID NO: 4512489 - DNA, 25 bp, Homo sapien
catgttttaagaggcaacataacag

SEQ ID NO: 4512490 - DNA, 25 bp, Homo sapien
taagaggcaacataacagcaagcga

SEQ ID NO: 4512491 - DNA, 25 bp, Homo sapien
cttcatgttttaagaggcaacataa

SEQ ID NO: 4512492 - DNA, 25 bp, Homo sapien
ggcaacataacagcaagcgaccgac

SEQ ID NO: 4512493 - DNA, 25 bp, Homo sapien
gggaaacatgatcggtgtggtcaaa

SEQ ID NO: 4512494 - DNA, 25 bp, Homo sapien
tgcctacagtacctttctatttgac

SEQ ID NO: 4512495 - DNA, 25 bp, Homo sapien
tcggtgtggtcaaatggcactgcct

SEQ ID NO: 4512496 - DNA, 25 bp, Homo sapien
aatggcactgcctacagtacctttc

SEQ ID NO: 4512497 - DNA, 25 bp, Homo sapien
gcagagtcgagatttgctggcaggt

SEQ ID NO: 4512498 - DNA, 25 bp, Homo sapien
ccgtctgtgggagcagagtcgagat

SEQ ID NO: 4512499 - DNA, 25 bp, Homo sapien
agggcccgtctgtgggagcagagtc

SEQ ID NO: 4512500 - DNA, 25 bp, Homo sapien
agcagagtcgagatttgctggcagg

SEQ ID NO: 4512501 - DNA, 25 bp, Homo sapien
tactgctccaagataagcctctgat

SEQ ID NO: 4512502 - DNA, 25 bp, Homo sapien
ctgtggatcggacccacctgccagg

SEQ ID NO: 4512503 - DNA, 25 bp, Homo sapien
cctctgatcctcctgtggatcggac

SEQ ID NO: 4512504 - DNA, 25 bp, Homo sapien
taatccaatgccgactctctctggc

SEQ ID NO: 4512505 - DNA, 25 bp, Homo sapien
tggcacattcaatctcgacaggaga

SEQ ID NO: 4512506 - DNA, 25 bp, Homo sapien
caggagacagcggtgtgctcattgc

SEQ ID NO: 4512507 - DNA, 25 bp, Homo sapien
tctcgacaggagacagcggtgtgct

SEQ ID NO: 4512508 - DNA, 25 bp, Homo sapien
tcctctctgtgtctatcagaggtga

SEQ ID NO: 4512509 - DNA, 25 bp, Homo sapien
attcccgggtgtcttcaaactgcaa

SEQ ID NO: 4512510 - DNA, 25 bp, Homo sapien
tcccgggtgtcttcaaactgcaaag

SEQ ID NO: 4512511 - DNA, 25 bp, Homo sapien
cccgggtgtcttcaaactgcaaagc

SEQ ID NO: 4512512 - DNA, 25 bp, Homo sapien
cgggtgtcttcaaactgcaaagcag

SEQ ID NO: 4512513 - DNA, 25 bp, Homo sapien
gaatataatgacctcccactgtctc

SEQ ID NO: 4512514 - DNA, 25 bp, Homo sapien
aatataatgacctcccactgtctcc

SEQ ID NO: 4512515 - DNA, 25 bp, Homo sapien
agaatataatgacctcccactgtct

SEQ ID NO: 4512516 - DNA, 25 bp, Homo sapien
cagaatataatgacctcccactgtc

SEQ ID NO: 4512517 - DNA, 25 bp, Homo sapien
ctgttaacgactgtgtctggaagtc

SEQ ID NO: 4512518 - DNA, 25 bp, Homo sapien
cataatgagatacaacagcgtgcat

SEQ ID NO: 4512519 - DNA, 25 bp, Homo sapien
tttctcattgacataatgagataca

SEQ ID NO: 4512520 - DNA, 25 bp, Homo sapien
gacataatgagatacaacagcgtgc

SEQ ID NO: 4512521 - DNA, 25 bp, Homo sapien
tctcattgacataatgagatacaac

SEQ ID NO: 4512522 - DNA, 25 bp, Homo sapien
gacagcctgcgttcagagtatgaag

SEQ ID NO: 4512523 - DNA, 25 bp, Homo sapien
acagcctgcgttcagagtatgaaga

SEQ ID NO: 4512524 - DNA, 25 bp, Homo sapien
cagcctgcgttcagagtatgaagaa

SEQ ID NO: 4512525 - DNA, 25 bp, Homo sapien
gcctgcgttcagagtatgaagaagg

SEQ ID NO: 4512526 - DNA, 25 bp, Homo sapien
agacgtcggagagctacacagagga

SEQ ID NO: 4512527 - DNA, 25 bp, Homo sapien
ctacacagaggaggcatctacaggg

SEQ ID NO: 4512528 - DNA, 25 bp, Homo sapien
gctacacagaggaggcatctacagg

SEQ ID NO: 4512529 - DNA, 25 bp, Homo sapien
cttatgagacgtcggagagctacac

SEQ ID NO: 4512530 - DNA, 25 bp, Homo sapien
caagcctgttgtcttgtggaagggt

SEQ ID NO: 4512531 - DNA, 25 bp, Homo sapien
gccatgacaacaaccgccgtttgtt

SEQ ID NO: 4512532 - DNA, 25 bp, Homo sapien
cgccgtttgttgcagatcaatggca

SEQ ID NO: 4512533 - DNA, 25 bp, Homo sapien
atggcaagcctgttgtcttgtggaa

SEQ ID NO: 4512534 - DNA, 25 bp, Homo sapien
gatgtaactgaaaacgccagagatg

SEQ ID NO: 4512535 - DNA, 25 bp, Homo sapien
catgtttcacttggacatgacacag

SEQ ID NO: 4512536 - DNA, 25 bp, Homo sapien
cccaagtagtctaaagattccaaat

SEQ ID NO: 4512537 - DNA, 25 bp, Homo sapien
gctcaggcagtgtaataccatttga

SEQ ID NO: 4512538 - DNA, 25 bp, Homo sapien
tgtcaaactaatgtggtaagccaac

SEQ ID NO: 4512539 - DNA, 25 bp, Homo sapien
tacaaaacgggaacactgcacatcc

SEQ ID NO: 4512540 - DNA, 25 bp, Homo sapien
tgacgacacacctcagtgagaggac

SEQ ID NO: 4512541 - DNA, 25 bp, Homo sapien
taagtaatcagctacgggtaacatc

SEQ ID NO: 4512542 - DNA, 25 bp, Homo sapien
cacattcttattacatgtgcatgaa

SEQ ID NO: 4512543 - DNA, 25 bp, Homo sapien
gggcttcagacaagcctcagcattg

SEQ ID NO: 4512544 - DNA, 25 bp, Homo sapien
tccacagaatgcaccatattctggg

SEQ ID NO: 4512545 - DNA, 25 bp, Homo sapien
caggggtgcaatcgagattacaggc

SEQ ID NO: 4512546 - DNA, 25 bp, Homo sapien
ctctttgtcattcagatctttcttt

SEQ ID NO: 4512547 - DNA, 25 bp, Homo sapien
cattcagatctttctttgtcccact

SEQ ID NO: 4512548 - DNA, 25 bp, Homo sapien
taggtgcaggagtttcttcttcatc

SEQ ID NO: 4512549 - DNA, 25 bp, Homo sapien
tcagatctttctttgtcccacttgg

SEQ ID NO: 4512550 - DNA, 25 bp, Homo sapien
tgtccctccccgaaatgttacaaca

SEQ ID NO: 4512551 - DNA, 25 bp, Homo sapien
ctccccgaaatgttacaacacacat

SEQ ID NO: 4512552 - DNA, 25 bp, Homo sapien
ctctgcaaatgtccctccccgaaat

SEQ ID NO: 4512553 - DNA, 25 bp, Homo sapien
gcaaatgtccctccccgaaatgtta

SEQ ID NO: 4512554 - DNA, 25 bp, Homo sapien
gtaacagatccagtataattttcat

SEQ ID NO: 4512555 - DNA, 25 bp, Homo sapien
aagaaaccaatatattggccgggcg

SEQ ID NO: 4512556 - DNA, 25 bp, Homo sapien
tcataaagaaaccaatatattggcc

SEQ ID NO: 4512557 - DNA, 25 bp, Homo sapien
ctgtaacagatccagtataattttc

SEQ ID NO: 4512558 - DNA, 25 bp, Homo sapien
tggttctcagtattacaggtgttcg

SEQ ID NO: 4512559 - DNA, 25 bp, Homo sapien
tcagtattacaggtgttcgtacttg

SEQ ID NO: 4512560 - DNA, 25 bp, Homo sapien
tgcaactgctctctcgttaaaaggt

SEQ ID NO: 4512561 - DNA, 25 bp, Homo sapien
cgttaaaaggtgtggttctcagtat

SEQ ID NO: 4512562 - DNA, 25 bp, Homo sapien
ttgattctgttccagtgtatacaat

SEQ ID NO: 4512563 - DNA, 25 bp, Homo sapien
tccgttctgggttgattctgttcca

SEQ ID NO: 4512564 - DNA, 25 bp, Homo sapien
tctgttccagtgtatacaatttctc

SEQ ID NO: 4512565 - DNA, 25 bp, Homo sapien
gttccagtgtatacaatttctccat

SEQ ID NO: 4512566 - DNA, 25 bp, Homo sapien
gaccacagagcccatctcttgtgaa

SEQ ID NO: 4512567 - DNA, 25 bp, Homo sapien
agagcccatctcttgtgaatgcaag

SEQ ID NO: 4512568 - DNA, 25 bp, Homo sapien
acagagcccatctcttgtgaatgca

SEQ ID NO: 4512569 - DNA, 25 bp, Homo sapien
acagaccacagagcccatctcttgt

SEQ ID NO: 4512570 - DNA, 25 bp, Homo sapien
caggtttcgtatgctgtgctgccat

SEQ ID NO: 4512571 - DNA, 25 bp, Homo sapien
cacaggtttcgtatgctgtgctgcc

SEQ ID NO: 4512572 - DNA, 25 bp, Homo sapien
tttttctcttagcctgcctgaaagc

SEQ ID NO: 4512573 - DNA, 25 bp, Homo sapien
gcctgaaagcttgtcaatttatctt

SEQ ID NO: 4512574 - DNA, 25 bp, Homo sapien
atatggcaaaagaggaatctagctt

SEQ ID NO: 4512575 - DNA, 25 bp, Homo sapien
attgatttttagttatagtccattg

SEQ ID NO: 4512576 - DNA, 25 bp, Homo sapien
tatggcaaaagaggaatctagcttc

SEQ ID NO: 4512577 - DNA, 25 bp, Homo sapien
ggcaaaagaggaatctagcttcatt

SEQ ID NO: 4512578 - DNA, 25 bp, Homo sapien
cttagaatccagtcctaaaaacatc

SEQ ID NO: 4512579 - DNA, 25 bp, Homo sapien
tctacatgtcatctatcaacaggat

SEQ ID NO: 4512580 - DNA, 25 bp, Homo sapien
ggattatgaacctgaaagcctgaga

SEQ ID NO: 4512581 - DNA, 25 bp, Homo sapien
aattgttctcttgaggcagcagtat

SEQ ID NO: 4512582 - DNA, 25 bp, Homo sapien
ttttcaaccatttggagtcgaggcg

SEQ ID NO: 4512583 - DNA, 25 bp, Homo sapien
tcaaccatttggagtcgaggcgagc

SEQ ID NO: 4512584 - DNA, 25 bp, Homo sapien
ctgttttcaaccatttggagtcgag

SEQ ID NO: 4512585 - DNA, 25 bp, Homo sapien
accatttggagtcgaggcgagcctg

SEQ ID NO: 4512586 - DNA, 25 bp, Homo sapien
cttttctccagcttcctcccaggtc

SEQ ID NO: 4512587 - DNA, 25 bp, Homo sapien
tccagcttcctcccaggtctcaggc

SEQ ID NO: 4512588 - DNA, 25 bp, Homo sapien
ttttctccagcttcctcccaggtct

SEQ ID NO: 4512589 - DNA, 25 bp, Homo sapien
ttctccagcttcctcccaggtctca

SEQ ID NO: 4512590 - DNA, 25 bp, Homo sapien
ccccgccggcgcgcggacgcagcct

SEQ ID NO: 4512591 - DNA, 25 bp, Homo sapien
gcgcgcggacgcagcctcccaagag

SEQ ID NO: 4512592 - DNA, 25 bp, Homo sapien
ggcgcgcggacgcagcctcccaaga

SEQ ID NO: 4512593 - DNA, 25 bp, Homo sapien
gccggcgcgcggacgcagcctccca

SEQ ID NO: 4512594 - DNA, 25 bp, Homo sapien
tgattggtcaacagtagagggctaa

SEQ ID NO: 4512595 - DNA, 25 bp, Homo sapien
tgaccaggcctaggaggtgatcctg

SEQ ID NO: 4512596 - DNA, 25 bp, Homo sapien
cagaggagcttgttacggattcgcc

SEQ ID NO: 4512597 - DNA, 25 bp, Homo sapien
gacagtctgtagtgctttcccacat

SEQ ID NO: 4512598 - DNA, 25 bp, Homo sapien
gatctgcccttactccaattgtgtg

SEQ ID NO: 4512599 - DNA, 25 bp, Homo sapien
tgaatgtttggcactctcacagggc

SEQ ID NO: 4512600 - DNA, 25 bp, Homo sapien
caaagtagatgaaggcgatctgccc

SEQ ID NO: 4512601 - DNA, 25 bp, Homo sapien
cctaatgagaatttgggtcccagga

SEQ ID NO: 4512602 - DNA, 25 bp, Homo sapien
cttgctgccggcttttacatgttta

SEQ ID NO: 4512603 - DNA, 25 bp, Homo sapien
tcttgtcatgtgctcattagatggc

SEQ ID NO: 4512604 - DNA, 25 bp, Homo sapien
ggcttactcttctccaggccttgct

SEQ ID NO: 4512605 - DNA, 25 bp, Homo sapien
attctaaacagtcacatggcggctt

SEQ ID NO: 4512606 - DNA, 25 bp, Homo sapien
gacccaggtaatggtctcgctgctg

SEQ ID NO: 4512607 - DNA, 25 bp, Homo sapien
caggtgacccaggtaatggtctcgc

SEQ ID NO: 4512608 - DNA, 25 bp, Homo sapien
ggtgacccaggtaatggtctcgctg

SEQ ID NO: 4512609 - DNA, 25 bp, Homo sapien
tgacccaggtaatggtctcgctgct

SEQ ID NO: 4512610 - DNA, 25 bp, Homo sapien
gcctccacatcgtctcctcctgttc

SEQ ID NO: 4512611 - DNA, 25 bp, Homo sapien
acatcgtctcctcctgttcttgcat

SEQ ID NO: 4512612 - DNA, 25 bp, Homo sapien
tcctgcctccacatcgtctcctcct

SEQ ID NO: 4512613 - DNA, 25 bp, Homo sapien
ctgctcccgtatcttcttctcctgc

SEQ ID NO: 4512614 - DNA, 25 bp, Homo sapien
tggttcaggcggttccacaactcgt

SEQ ID NO: 4512615 - DNA, 25 bp, Homo sapien
tgttgctggttcaggcggttccaca

SEQ ID NO: 4512616 - DNA, 25 bp, Homo sapien
ctgttgctggttcaggcggttccac

SEQ ID NO: 4512617 - DNA, 25 bp, Homo sapien
ggcggttccacaactcgttctcttc

SEQ ID NO: 4512618 - DNA, 25 bp, Homo sapien
cagattctacaagttgaagtttttc

SEQ ID NO: 4512619 - DNA, 25 bp, Homo sapien
tagctcctttacgttgagctggatc

SEQ ID NO: 4512620 - DNA, 25 bp, Homo sapien
ttttagctcctttacgttgagctgg

SEQ ID NO: 4512621 - DNA, 25 bp, Homo sapien
aggagcttggccctctccagtttcc

SEQ ID NO: 4512622 - DNA, 25 bp, Homo sapien
tctcctttgttaactcctcaatgta

SEQ ID NO: 4512623 - DNA, 25 bp, Homo sapien
cctctcctttgttaactcctcaatg

SEQ ID NO: 4512624 - DNA, 25 bp, Homo sapien
acagttccagactcagggcgtccct

SEQ ID NO: 4512625 - DNA, 25 bp, Homo sapien
gtgttcctgtacagttccagactca

SEQ ID NO: 4512626 - DNA, 25 bp, Homo sapien
ctgcaaacttccatgaatcatgcag

SEQ ID NO: 4512627 - DNA, 25 bp, Homo sapien
tggctgtagtagagtgccatctgaa

SEQ ID NO: 4512628 - DNA, 25 bp, Homo sapien
tgctggctgtagtagagtgccatct

SEQ ID NO: 4512629 - DNA, 25 bp, Homo sapien
aagctcagttttctgacacgtaagg

SEQ ID NO: 4512630 - DNA, 25 bp, Homo sapien
tgacagcatgctggctgtagtagag

SEQ ID NO: 4512631 - DNA, 25 bp, Homo sapien
tcctgatgttgatggcttgccttct

SEQ ID NO: 4512632 - DNA, 25 bp, Homo sapien
cctccttagggcttcctgatgttga

SEQ ID NO: 4512633 - DNA, 25 bp, Homo sapien
cttagggcttcctgatgttgatggc

SEQ ID NO: 4512634 - DNA, 25 bp, Homo sapien
gcttcctgatgttgatggcttgcct

SEQ ID NO: 4512635 - DNA, 25 bp, Homo sapien
cactagggttggtctggggatgatg

SEQ ID NO: 4512636 - DNA, 25 bp, Homo sapien
ttgctgctgtaccaacactagggtt

SEQ ID NO: 4512637 - DNA, 25 bp, Homo sapien
tctttttggtgtcgcttgctgctgt

SEQ ID NO: 4512638 - DNA, 25 bp, Homo sapien
ttctttttggtgtcgcttgctgctg

SEQ ID NO: 4512639 - DNA, 25 bp, Homo sapien
gttccttggcctcggccaatttgct

SEQ ID NO: 4512640 - DNA, 25 bp, Homo sapien
ctgttccttggcctcggccaatttg

SEQ ID NO: 4512641 - DNA, 25 bp, Homo sapien
tcggccaatttgctctgtctggttt

SEQ ID NO: 4512642 - DNA, 25 bp, Homo sapien
tccttggcctcggccaatttgctct

SEQ ID NO: 4512643 - DNA, 25 bp, Homo sapien
ctttggacatcataggatgggtagg

SEQ ID NO: 4512644 - DNA, 25 bp, Homo sapien
taggggtgtggccttcatgcttgaa

SEQ ID NO: 4512645 - DNA, 25 bp, Homo sapien
gcgtaaccagggctgcactagaatg

SEQ ID NO: 4512646 - DNA, 25 bp, Homo sapien
gtaaccagggctgcactagaatgca

SEQ ID NO: 4512647 - DNA, 25 bp, Homo sapien
gtgtggccttcatgcttgaagccca

SEQ ID NO: 4512648 - DNA, 25 bp, Homo sapien
aacctccatatcccgagatcaagcg

SEQ ID NO: 4512649 - DNA, 25 bp, Homo sapien
catatcccgagatcaagcgattccc

SEQ ID NO: 4512650 - DNA, 25 bp, Homo sapien
gaggaagttttaccatcttggacag

SEQ ID NO: 4512651 - DNA, 25 bp, Homo sapien
agagaggaagttttaccatcttgga

SEQ ID NO: 4512652 - DNA, 25 bp, Homo sapien
gtcacttcccccacatgcagccaag

SEQ ID NO: 4512653 - DNA, 25 bp, Homo sapien
cggacagcatggtcaaagtgcaggc

SEQ ID NO: 4512654 - DNA, 25 bp, Homo sapien
cacttcccccacatgcagccaaggc

SEQ ID NO: 4512655 - DNA, 25 bp, Homo sapien
ctgtcacttcccccacatgcagcca

SEQ ID NO: 4512656 - DNA, 25 bp, Homo sapien
gccatcagcctctgtttctgaacca

SEQ ID NO: 4512657 - DNA, 25 bp, Homo sapien
catttcaggattgtcaccacccata

SEQ ID NO: 4512658 - DNA, 25 bp, Homo sapien
gaaccagcctcttcatgctcctgtt

SEQ ID NO: 4512659 - DNA, 25 bp, Homo sapien
cctctaaatcttctaggtcctcctg

SEQ ID NO: 4512660 - DNA, 25 bp, Homo sapien
tgggagaagactgatatcttcatct

SEQ ID NO: 4512661 - DNA, 25 bp, Homo sapien
ggagaagactgatatcttcatcttt

SEQ ID NO: 4512662 - DNA, 25 bp, Homo sapien
tctgggagaagactgatatcttcat

SEQ ID NO: 4512663 - DNA, 25 bp, Homo sapien
ctctgggagaagactgatatcttca

SEQ ID NO: 4512664 - DNA, 25 bp, Homo sapien
cagttgttgcaaagcctgctcatca

SEQ ID NO: 4512665 - DNA, 25 bp, Homo sapien
ctttggttccaatccatcttgaaac

SEQ ID NO: 4512666 - DNA, 25 bp, Homo sapien
agggctgccatggattctaccattc

SEQ ID NO: 4512667 - DNA, 25 bp, Homo sapien
attctggaagcactgtaaaattgct

SEQ ID NO: 4512668 - DNA, 25 bp, Homo sapien
gtgtccacgtgcgaccgcagtcgca

SEQ ID NO: 4512669 - DNA, 25 bp, Homo sapien
acccgtgtccacgtgcgaccgcagt

SEQ ID NO: 4512670 - DNA, 25 bp, Homo sapien
ccgtgtccacgtgcgaccgcagtcg

SEQ ID NO: 4512671 - DNA, 25 bp, Homo sapien
tgcaacccgtgtccacgtgcgaccg

SEQ ID NO: 4512672 - DNA, 25 bp, Homo sapien
tgaggatgcactcgggccagccagt

SEQ ID NO: 4512673 - DNA, 25 bp, Homo sapien
gtgaggatgcactcgggccagccag

SEQ ID NO: 4512674 - DNA, 25 bp, Homo sapien
actcgggccagccagtggctttgcc

SEQ ID NO: 4512675 - DNA, 25 bp, Homo sapien
tgcactcgggccagccagtggcttt

SEQ ID NO: 4512676 - DNA, 25 bp, Homo sapien
cagggtccgtcagcgccaggcccat

SEQ ID NO: 4512677 - DNA, 25 bp, Homo sapien
gacaccgctccagggtccgtcagcg

SEQ ID NO: 4512678 - DNA, 25 bp, Homo sapien
tccagggtccgtcagcgccaggccc

SEQ ID NO: 4512679 - DNA, 25 bp, Homo sapien
ctccctcagacaccgctccagggtc

SEQ ID NO: 4512680 - DNA, 25 bp, Homo sapien
gtgggggctcgaatcttcttattca

SEQ ID NO: 4512681 - DNA, 25 bp, Homo sapien
gggggctcgaatcttcttattcaga

SEQ ID NO: 4512682 - DNA, 25 bp, Homo sapien
tcagtgggggctcgaatcttcttat

SEQ ID NO: 4512683 - DNA, 25 bp, Homo sapien
cctcagtgggggctcgaatcttctt

SEQ ID NO: 4512684 - DNA, 25 bp, Homo sapien
tgcaaaacttttgccggtcaaacat

SEQ ID NO: 4512685 - DNA, 25 bp, Homo sapien
cattcgcatttgagaaaccacgtcc

SEQ ID NO: 4512686 - DNA, 25 bp, Homo sapien
ctaggcgtgagaagtgccttgattt

SEQ ID NO: 4512687 - DNA, 25 bp, Homo sapien
tctgccaatacttgcacaggctctg

SEQ ID NO: 4512688 - DNA, 25 bp, Homo sapien
gaagcctctcccaagtggcgcggtc

SEQ ID NO: 4512689 - DNA, 25 bp, Homo sapien
cggaagcctctcccaagtggcgcgg

SEQ ID NO: 4512690 - DNA, 25 bp, Homo sapien
ctcccaagtggcgcggtccgcaagg

SEQ ID NO: 4512691 - DNA, 25 bp, Homo sapien
ctccggaagcctctcccaagtggcg

SEQ ID NO: 4512692 - DNA, 25 bp, Homo sapien
agcttgggcgcaggcgccgctggct

SEQ ID NO: 4512693 - DNA, 25 bp, Homo sapien
ttgggcgcaggcgccgctggctcac

SEQ ID NO: 4512694 - DNA, 25 bp, Homo sapien
ctacagcttgggcgcaggcgccgct

SEQ ID NO: 4512695 - DNA, 25 bp, Homo sapien
acagcttgggcgcaggcgccgctgg

SEQ ID NO: 4512696 - DNA, 25 bp, Homo sapien
cactggcccgagttctgcgaggctg

SEQ ID NO: 4512697 - DNA, 25 bp, Homo sapien
tgaagaaagatagggccgctggcag

SEQ ID NO: 4512698 - DNA, 25 bp, Homo sapien
gctcccctgggacgccgtaggatcg

SEQ ID NO: 4512699 - DNA, 25 bp, Homo sapien
agccacggcgacactggcccgagtt

SEQ ID NO: 4512700 - DNA, 25 bp, Homo sapien
tggccaggccgtccgagggagtccg

SEQ ID NO: 4512701 - DNA, 25 bp, Homo sapien
agggagtccggaccccactccgcag

SEQ ID NO: 4512702 - DNA, 25 bp, Homo sapien
ccactccgcagcctacagagatggg

SEQ ID NO: 4512703 - DNA, 25 bp, Homo sapien
cacggtgacatttggccctggttct

SEQ ID NO: 4512704 - DNA, 25 bp, Homo sapien
taagtggcaggttctcggccctgtg

SEQ ID NO: 4512705 - DNA, 25 bp, Homo sapien
agtggcaggttctcggccctgtgta

SEQ ID NO: 4512706 - DNA, 25 bp, Homo sapien
ggattaagtggcaggttctcggccc

SEQ ID NO: 4512707 - DNA, 25 bp, Homo sapien
tcggccctgtgtagccgccatcggg

SEQ ID NO: 4512708 - DNA, 25 bp, Homo sapien
tctggcttggctctagccaccggga

SEQ ID NO: 4512709 - DNA, 25 bp, Homo sapien
tgcaggcgggcttagaggttcccca

SEQ ID NO: 4512710 - DNA, 25 bp, Homo sapien
ttctgagatgttacgagtgcaggcg

SEQ ID NO: 4512711 - DNA, 25 bp, Homo sapien
gggaggcctgcggatcgccagggcg

SEQ ID NO: 4512712 - DNA, 25 bp, Homo sapien
ctcgggagttgacaggcggctgcta

SEQ ID NO: 4512713 - DNA, 25 bp, Homo sapien
gttctgcgacgctggcagcgcgacc

SEQ ID NO: 4512714 - DNA, 25 bp, Homo sapien
agcgcgaccgggctcgggagttgac

SEQ ID NO: 4512715 - DNA, 25 bp, Homo sapien
cagccgccgggacatctgaccccgg

SEQ ID NO: 4512716 - DNA, 25 bp, Homo sapien
tctttatgaacccatagtgtatcag

SEQ ID NO: 4512717 - DNA, 25 bp, Homo sapien
tgtatcagtgatccagccattattg

SEQ ID NO: 4512718 - DNA, 25 bp, Homo sapien
gcattgaaccagagggcctaacgtg

SEQ ID NO: 4512719 - DNA, 25 bp, Homo sapien
cagagggcctaacgtgaggtgaaca

SEQ ID NO: 4512720 - DNA, 25 bp, Homo sapien
atcctgggtcccatagatgttgggc

SEQ ID NO: 4512721 - DNA, 25 bp, Homo sapien
gatcctgggtcccatagatgttggg

SEQ ID NO: 4512722 - DNA, 25 bp, Homo sapien
gtgacaccagggcgtgttcgaaaca

SEQ ID NO: 4512723 - DNA, 25 bp, Homo sapien
caccagggcgtgttcgaaacaggtc

SEQ ID NO: 4512724 - DNA, 25 bp, Homo sapien
aagtgacaccagggcgtgttcgaaa

SEQ ID NO: 4512725 - DNA, 25 bp, Homo sapien
gacaccagggcgtgttcgaaacagg

SEQ ID NO: 4512726 - DNA, 25 bp, Homo sapien
gagccctctgaggaactggctcctg

SEQ ID NO: 4512727 - DNA, 25 bp, Homo sapien
ggcagagccctctgaggaactggct

SEQ ID NO: 4512728 - DNA, 25 bp, Homo sapien
cagagccctctgaggaactggctcc

SEQ ID NO: 4512729 - DNA, 25 bp, Homo sapien
gggcagagccctctgaggaactggc

SEQ ID NO: 4512730 - DNA, 25 bp, Homo sapien
aatgtgtcccttgccagcacctggg

SEQ ID NO: 4512731 - DNA, 25 bp, Homo sapien
ccagtaccaggacgaagggagtgca

SEQ ID NO: 4512732 - DNA, 25 bp, Homo sapien
tgagccccaatgtgtcccttgccag

SEQ ID NO: 4512733 - DNA, 25 bp, Homo sapien
gggactgtccctgccaaccatgtga

SEQ ID NO: 4512734 - DNA, 25 bp, Homo sapien
cctgtgattcctgaccacagagtcc

SEQ ID NO: 4512735 - DNA, 25 bp, Homo sapien
tcctgtgattcctgaccacagagtc

SEQ ID NO: 4512736 - DNA, 25 bp, Homo sapien
caccccccagtccgtgacgcccctg

SEQ ID NO: 4512737 - DNA, 25 bp, Homo sapien
cccagtccgtgacgcccctgtagac

SEQ ID NO: 4512738 - DNA, 25 bp, Homo sapien
ccgtgacgcccctgtagacccatcc

SEQ ID NO: 4512739 - DNA, 25 bp, Homo sapien
cgtgacgcccctgtagacccatccc

SEQ ID NO: 4512740 - DNA, 25 bp, Homo sapien
cctatttccctcgtgtgggcagggt

SEQ ID NO: 4512741 - DNA, 25 bp, Homo sapien
gatggtctgggcttcatcagccatg

SEQ ID NO: 4512742 - DNA, 25 bp, Homo sapien
gctgtccataaacaaccttgctggg

SEQ ID NO: 4512743 - DNA, 25 bp, Homo sapien
gatttgccccataactctgatgatg

SEQ ID NO: 4512744 - DNA, 25 bp, Homo sapien
ctaagtgggtggcctgtatgtggct

SEQ ID NO: 4512745 - DNA, 25 bp, Homo sapien
aagtgggtggcctgtatgtggctgg

SEQ ID NO: 4512746 - DNA, 25 bp, Homo sapien
tgggagcatgtccacatggcggcct

SEQ ID NO: 4512747 - DNA, 25 bp, Homo sapien
ctgggagcatgtccacatggcggcc

SEQ ID NO: 4512748 - DNA, 25 bp, Homo sapien
agtccacctgcactatgagcgcaat

SEQ ID NO: 4512749 - DNA, 25 bp, Homo sapien
tgagtccacctgcactatgagcgca

SEQ ID NO: 4512750 - DNA, 25 bp, Homo sapien
acctgcactatgagcgcaatctcac

SEQ ID NO: 4512751 - DNA, 25 bp, Homo sapien
tccacctgcactatgagcgcaatct

SEQ ID NO: 4512752 - DNA, 25 bp, Homo sapien
gggactgagaagatgccctgccctc

SEQ ID NO: 4512753 - DNA, 25 bp, Homo sapien
cctacaaggttgcatatgggggact

SEQ ID NO: 4512754 - DNA, 25 bp, Homo sapien
cacactcccctcgagtctgggtttc

SEQ ID NO: 4512755 - DNA, 25 bp, Homo sapien
cagagaggcctctgattgctcatgg

SEQ ID NO: 4512756 - DNA, 25 bp, Homo sapien
gttctattgtctcctggaccattct

SEQ ID NO: 4512757 - DNA, 25 bp, Homo sapien
acttgcttgttgttctattgtctcc

SEQ ID NO: 4512758 - DNA, 25 bp, Homo sapien
ctattgtctcctggaccattctggg

SEQ ID NO: 4512759 - DNA, 25 bp, Homo sapien
gctgacttgcttgttgttctattgt

SEQ ID NO: 4512760 - DNA, 25 bp, Homo sapien
ccgatggtacagagtgctcattctg

SEQ ID NO: 4512761 - DNA, 25 bp, Homo sapien
tctgctctaagtggtcccacatggc

SEQ ID NO: 4512762 - DNA, 25 bp, Homo sapien
ttctgctctaagtggtcccacatgg

SEQ ID NO: 4512763 - DNA, 25 bp, Homo sapien
tttatccgatggtacagagtgctca

SEQ ID NO: 4512764 - DNA, 25 bp, Homo sapien
actgctctcttggagatgagtctcc

SEQ ID NO: 4512765 - DNA, 25 bp, Homo sapien
gtgatgtcatctgcgggtagtctgc

SEQ ID NO: 4512766 - DNA, 25 bp, Homo sapien
gcagcttctgcacgttgggatggaa

SEQ ID NO: 4512767 - DNA, 25 bp, Homo sapien
tgtggtaggtttgccacgttccaga

SEQ ID NO: 4512768 - DNA, 25 bp, Homo sapien
catatgtggccggactgcagggcat

SEQ ID NO: 4512769 - DNA, 25 bp, Homo sapien
aaaagcatatgtggccggactgcag

SEQ ID NO: 4512770 - DNA, 25 bp, Homo sapien
tatgtggccggactgcagggcattt

SEQ ID NO: 4512771 - DNA, 25 bp, Homo sapien
atatgtggccggactgcagggcatt

SEQ ID NO: 4512772 - DNA, 25 bp, Homo sapien
gccagaggaactgggggagtccttg

SEQ ID NO: 4512773 - DNA, 25 bp, Homo sapien
aggccagaggaactgggggagtcct

SEQ ID NO: 4512774 - DNA, 25 bp, Homo sapien
gtttgtacatatcacccagggctct

SEQ ID NO: 4512775 - DNA, 25 bp, Homo sapien
ggtttgtacatatcacccagggctc

SEQ ID NO: 4512776 - DNA, 25 bp, Homo sapien
ttgtacatatcacccagggctctcc

SEQ ID NO: 4512777 - DNA, 25 bp, Homo sapien
tccacctaagggcagatgggagcca

SEQ ID NO: 4512778 - DNA, 25 bp, Homo sapien
tccagaaggttggtcaggtcctgag

SEQ ID NO: 4512779 - DNA, 25 bp, Homo sapien
ttccagaaggttggtcaggtcctga

SEQ ID NO: 4512780 - DNA, 25 bp, Homo sapien
aattcagagctgggatcttctttct

SEQ ID NO: 4512781 - DNA, 25 bp, Homo sapien
agagctgggatcttctttctgctcc

SEQ ID NO: 4512782 - DNA, 25 bp, Homo sapien
tgctcctgggcctcccctctctctt

SEQ ID NO: 4512783 - DNA, 25 bp, Homo sapien
tcagagctgggatcttctttctgct

SEQ ID NO: 4512784 - DNA, 25 bp, Homo sapien
tccgctgaaggcatacccaggctca

SEQ ID NO: 4512785 - DNA, 25 bp, Homo sapien
tctgtgtgactccaccctggatatc

SEQ ID NO: 4512786 - DNA, 25 bp, Homo sapien
tcttagggaaatgcaagcaggggtt

SEQ ID NO: 4512787 - DNA, 25 bp, Homo sapien
aggcctacaggcacctctgagctgc

SEQ ID NO: 4512788 - DNA, 25 bp, Homo sapien
tcctcttcctcccatgcgggggtga

SEQ ID NO: 4512789 - DNA, 25 bp, Homo sapien
ctcttcctcccatgcgggggtgagg

SEQ ID NO: 4512790 - DNA, 25 bp, Homo sapien
gctcctcttcctcccatgcgggggt

SEQ ID NO: 4512791 - DNA, 25 bp, Homo sapien
tgctcctcttcctcccatgcggggg

SEQ ID NO: 4512792 - DNA, 25 bp, Homo sapien
gtggcactagggctcttcagaggaa

SEQ ID NO: 4512793 - DNA, 25 bp, Homo sapien
tttccatctgaagtgcaatgttgcc

SEQ ID NO: 4512794 - DNA, 25 bp, Homo sapien
ccatctgaagtgcaatgttgccttc

SEQ ID NO: 4512795 - DNA, 25 bp, Homo sapien
ctgaagtgcaatgttgccttcaagc

SEQ ID NO: 4512796 - DNA, 25 bp, Homo sapien
tgttgccttcaagcaactgagccct

SEQ ID NO: 4512797 - DNA, 25 bp, Homo sapien
gtgccagtccctcaatctcctgcat

SEQ ID NO: 4512798 - DNA, 25 bp, Homo sapien
ctgtgccagtccctcaatctcctgc

SEQ ID NO: 4512799 - DNA, 25 bp, Homo sapien
tctgtgccagtccctcaatctcctg

SEQ ID NO: 4512800 - DNA, 25 bp, Homo sapien
tgtgccagtccctcaatctcctgca

SEQ ID NO: 4512801 - DNA, 25 bp, Homo sapien
agctgttccacagtcgacttcaggg

SEQ ID NO: 4512802 - DNA, 25 bp, Homo sapien
acagtcgacttcagggtccctgaga

SEQ ID NO: 4512803 - DNA, 25 bp, Homo sapien
gatccagcagggttctggtagctga

SEQ ID NO: 4512804 - DNA, 25 bp, Homo sapien
gagatgatccagcagggttctggta

SEQ ID NO: 4512805 - DNA, 25 bp, Homo sapien
gcaaagggagacacgcggtcccagt

SEQ ID NO: 4512806 - DNA, 25 bp, Homo sapien
gcagggaggctagaacacggccaca

SEQ ID NO: 4512807 - DNA, 25 bp, Homo sapien
cgaaggacagccttctgcacccaca

SEQ ID NO: 4512808 - DNA, 25 bp, Homo sapien
gactgagtcaacacacgaaggacag

SEQ ID NO: 4512809 - DNA, 25 bp, Homo sapien
tggaaagatccagaaatggcagttt

SEQ ID NO: 4512810 - DNA, 25 bp, Homo sapien
ctaatctgcgaagtgcagaggcagg

SEQ ID NO: 4512811 - DNA, 25 bp, Homo sapien
cttgtggaactttatgtctaactgg

SEQ ID NO: 4512812 - DNA, 25 bp, Homo sapien
agttttcactaatctgcgaagtgca

SEQ ID NO: 4512813 - DNA, 25 bp, Homo sapien
agcaggagggccccgtagaggcagc

SEQ ID NO: 4512814 - DNA, 25 bp, Homo sapien
acagcctgtccacccacaacgctca

SEQ ID NO: 4512815 - DNA, 25 bp, Homo sapien
tgaagtcttccctggggtgtactct

SEQ ID NO: 4512816 - DNA, 25 bp, Homo sapien
gcatccacatgcctgaaaccctgga

SEQ ID NO: 4512817 - DNA, 25 bp, Homo sapien
gatgcgctcattattgtccctagaa

SEQ ID NO: 4512818 - DNA, 25 bp, Homo sapien
tatctggttgtctggcgatgcgctc

SEQ ID NO: 4512819 - DNA, 25 bp, Homo sapien
tctggcgatgcgctcattattgtcc

SEQ ID NO: 4512820 - DNA, 25 bp, Homo sapien
ggttgtctggcgatgcgctcattat

SEQ ID NO: 4512821 - DNA, 25 bp, Homo sapien
cagcatgaggctgtagaactggctc

SEQ ID NO: 4512822 - DNA, 25 bp, Homo sapien
gaggctgtagaactggctcagttcc

SEQ ID NO: 4512823 - DNA, 25 bp, Homo sapien
gctccagcatgaggctgtagaactg

SEQ ID NO: 4512824 - DNA, 25 bp, Homo sapien
catgaggctgtagaactggctcagt

SEQ ID NO: 4512825 - DNA, 25 bp, Homo sapien
tggacatacagccatttcttaagac

SEQ ID NO: 4512826 - DNA, 25 bp, Homo sapien
gagtttttcaggtggtagtggcaca

SEQ ID NO: 4512827 - DNA, 25 bp, Homo sapien
tagtggcacagagggcaggtctcct

SEQ ID NO: 4512828 - DNA, 25 bp, Homo sapien
ggtctcctggacatacagccatttc

SEQ ID NO: 4512829 - DNA, 25 bp, Homo sapien
tggaaaaaatgaacgcaaggcgtga

SEQ ID NO: 4512830 - DNA, 25 bp, Homo sapien
ggaaaaaatgaacgcaaggcgtgat

SEQ ID NO: 4512831 - DNA, 25 bp, Homo sapien
catggaaaaaatgaacgcaaggcgt

SEQ ID NO: 4512832 - DNA, 25 bp, Homo sapien
aaaaatgaacgcaaggcgtgatcac

SEQ ID NO: 4512833 - DNA, 25 bp, Homo sapien
aaacagattcttatcgaaggagtta

SEQ ID NO: 4512834 - DNA, 25 bp, Homo sapien
caaacagattcttatcgaaggagtt

SEQ ID NO: 4512835 - DNA, 25 bp, Homo sapien
aacagattcttatcgaaggagttac

SEQ ID NO: 4512836 - DNA, 25 bp, Homo sapien
ccaaacagattcttatcgaaggagt

SEQ ID NO: 4512837 - DNA, 25 bp, Homo sapien
caaatatcattgtgtttctcaagct

SEQ ID NO: 4512838 - DNA, 25 bp, Homo sapien
tgctctttcgtagcaatgggtaacg

SEQ ID NO: 4512839 - DNA, 25 bp, Homo sapien
tgggtaacgatttaatcttattcac

SEQ ID NO: 4512840 - DNA, 25 bp, Homo sapien
tttctcaagctgctctttcgtagca

SEQ ID NO: 4512841 - DNA, 25 bp, Homo sapien
aagccacacgttatagtaggaatga

SEQ ID NO: 4512842 - DNA, 25 bp, Homo sapien
gaagccacacgttatagtaggaatg

SEQ ID NO: 4512843 - DNA, 25 bp, Homo sapien
gccacacgttatagtaggaatgaat

SEQ ID NO: 4512844 - DNA, 25 bp, Homo sapien
ccacacgttatagtaggaatgaatg

SEQ ID NO: 4512845 - DNA, 25 bp, Homo sapien
ggccaccatacagacggccgcaaga

SEQ ID NO: 4512846 - DNA, 25 bp, Homo sapien
gcaataggccaccatacagacggcc

SEQ ID NO: 4512847 - DNA, 25 bp, Homo sapien
aataggccaccatacagacggccgc

SEQ ID NO: 4512848 - DNA, 25 bp, Homo sapien
gacgcaataggccaccatacagacg

SEQ ID NO: 4512849 - DNA, 25 bp, Homo sapien
aagaatgctgctggaaataatgata

SEQ ID NO: 4512850 - DNA, 25 bp, Homo sapien
aaaaactggcaaatcatataagcca

SEQ ID NO: 4512851 - DNA, 25 bp, Homo sapien
aaaactggcaaatcatataagccat

SEQ ID NO: 4512852 - DNA, 25 bp, Homo sapien
gaggtaagaatgctgctggaaataa

SEQ ID NO: 4512853 - DNA, 25 bp, Homo sapien
acccaaaagagagtaaggagtgctg

SEQ ID NO: 4512854 - DNA, 25 bp, Homo sapien
acaacctgcagttctatcagcccag

SEQ ID NO: 4512855 - DNA, 25 bp, Homo sapien
tgaaagctcgataaccctgcaagta

SEQ ID NO: 4512856 - DNA, 25 bp, Homo sapien
tctgcactgccaggattaacagcgt

SEQ ID NO: 4512857 - DNA, 25 bp, Homo sapien
tgcaatacttgtcagaaaaaggaaa

SEQ ID NO: 4512858 - DNA, 25 bp, Homo sapien
cagaaaaaggaaaagaagcctctca

SEQ ID NO: 4512859 - DNA, 25 bp, Homo sapien
gcaatacttgtcagaaaaaggaaaa

SEQ ID NO: 4512860 - DNA, 25 bp, Homo sapien
tctcgagtactgaaataggagtaaa

SEQ ID NO: 4512861 - DNA, 25 bp, Homo sapien
ggctgatctcgagtactgaaatagg

SEQ ID NO: 4512862 - DNA, 25 bp, Homo sapien
catgaaaagaacagggactaccagt

SEQ ID NO: 4512863 - DNA, 25 bp, Homo sapien
gaacagggactaccagttgattcca

SEQ ID NO: 4512864 - DNA, 25 bp, Homo sapien
ggtgagaaggccatatacctccact

SEQ ID NO: 4512865 - DNA, 25 bp, Homo sapien
aaggtgagaaggccatatacctcca

SEQ ID NO: 4512866 - DNA, 25 bp, Homo sapien
ccaaggtgagaaggccatatacctc

SEQ ID NO: 4512867 - DNA, 25 bp, Homo sapien
tgagaaggccatatacctccactac

SEQ ID NO: 4512868 - DNA, 25 bp, Homo sapien
gcagatttagcaaggttataaggta

SEQ ID NO: 4512869 - DNA, 25 bp, Homo sapien
gagaacttccaatccagtaaaaatc

SEQ ID NO: 4512870 - DNA, 25 bp, Homo sapien
cagagtcgtgctagcagaggaagca

SEQ ID NO: 4512871 - DNA, 25 bp, Homo sapien
tgaaaacagccaaatctgctttgtt

SEQ ID NO: 4512872 - DNA, 25 bp, Homo sapien
caggagcataaagtacacaccacca

SEQ ID NO: 4512873 - DNA, 25 bp, Homo sapien
ctattaaggctgtggtaaaccgatt

SEQ ID NO: 4512874 - DNA, 25 bp, Homo sapien
cacaggagcataaagtacacaccac

SEQ ID NO: 4512875 - DNA, 25 bp, Homo sapien
ttaaggctgtggtaaaccgattcat

SEQ ID NO: 4512876 - DNA, 25 bp, Homo sapien
agagaggttctaaatacattggtcc

SEQ ID NO: 4512877 - DNA, 25 bp, Homo sapien
aggttctaaatacattggtccctca

SEQ ID NO: 4512878 - DNA, 25 bp, Homo sapien
agagagaggttctaaatacattggt

SEQ ID NO: 4512879 - DNA, 25 bp, Homo sapien
gagaggttctaaatacattggtccc

SEQ ID NO: 4512880 - DNA, 25 bp, Homo sapien
gtgtctttcccaggtaagataatac

SEQ ID NO: 4512881 - DNA, 25 bp, Homo sapien
ggcagtgtctttcccaggtaagata

SEQ ID NO: 4512882 - DNA, 25 bp, Homo sapien
tgtctttcccaggtaagataatact

SEQ ID NO: 4512883 - DNA, 25 bp, Homo sapien
cagtgtctttcccaggtaagataat

SEQ ID NO: 4512884 - DNA, 25 bp, Homo sapien
cagtaatccgcttgaggaacccggg

SEQ ID NO: 4512885 - DNA, 25 bp, Homo sapien
cagtgcagggtattgatcacggaga

SEQ ID NO: 4512886 - DNA, 25 bp, Homo sapien
gtgcaaagaggaacgtccccaccca

SEQ ID NO: 4512887 - DNA, 25 bp, Homo sapien
taatgtgtccatgcgggtttgtcag

SEQ ID NO: 4512888 - DNA, 25 bp, Homo sapien
gcctgtcgcccccagtgtatgtagt

SEQ ID NO: 4512889 - DNA, 25 bp, Homo sapien
gggcctgtcgcccccagtgtatgta

SEQ ID NO: 4512890 - DNA, 25 bp, Homo sapien
cccagtgtatgtagtggaaggtgaa

SEQ ID NO: 4512891 - DNA, 25 bp, Homo sapien
tcgcccccagtgtatgtagtggaag

SEQ ID NO: 4512892 - DNA, 25 bp, Homo sapien
ccagactgcaccgattggacctggg

SEQ ID NO: 4512893 - DNA, 25 bp, Homo sapien
gactgcaccgattggacctgggaat

SEQ ID NO: 4512894 - DNA, 25 bp, Homo sapien
accgattggacctgggaatgggcac

SEQ ID NO: 4512895 - DNA, 25 bp, Homo sapien
ctgcaccgattggacctgggaatgg

SEQ ID NO: 4512896 - DNA, 25 bp, Homo sapien
ctgcagatgccccatgagaagtaaa

SEQ ID NO: 4512897 - DNA, 25 bp, Homo sapien
aaccctgcagatgccccatgagaag

SEQ ID NO: 4512898 - DNA, 25 bp, Homo sapien
ccctgcagatgccccatgagaagta

SEQ ID NO: 4512899 - DNA, 25 bp, Homo sapien
gcagatgccccatgagaagtaaatc

SEQ ID NO: 4512900 - DNA, 25 bp, Homo sapien
tgctgcacagacaactgaaaccagg

SEQ ID NO: 4512901 - DNA, 25 bp, Homo sapien
tagcttcagagatcacgagtgacgt

SEQ ID NO: 4512902 - DNA, 25 bp, Homo sapien
taagtggcaccacgcagatatagct

SEQ ID NO: 4512903 - DNA, 25 bp, Homo sapien
gcttttgggaacctgtggctatgca

SEQ ID NO: 4512904 - DNA, 25 bp, Homo sapien
aacagtcggcggtaaattcatagaa

SEQ ID NO: 4512905 - DNA, 25 bp, Homo sapien
taaacaagagctatcaaaccataaa

SEQ ID NO: 4512906 - DNA, 25 bp, Homo sapien
caagaagttctgtaggtgagtagat

SEQ ID NO: 4512907 - DNA, 25 bp, Homo sapien
aactaggaacactcaagaagttctg

SEQ ID NO: 4512908 - DNA, 25 bp, Homo sapien
taaagaaagtgcacgtcagaactgt

SEQ ID NO: 4512909 - DNA, 25 bp, Homo sapien
aagaggtgccaagtgacctcagaaa

SEQ ID NO: 4512910 - DNA, 25 bp, Homo sapien
gatattctggagaagtccaaacaca

SEQ ID NO: 4512911 - DNA, 25 bp, Homo sapien
cagcataaagggttaattccaattc

SEQ ID NO: 4512912 - DNA, 25 bp, Homo sapien
tcctttcatagcagaatggtatgca

SEQ ID NO: 4512913 - DNA, 25 bp, Homo sapien
cattcatgtggtattaacttagggc

SEQ ID NO: 4512914 - DNA, 25 bp, Homo sapien
tcctcacggttggagtgcgaggtta

SEQ ID NO: 4512915 - DNA, 25 bp, Homo sapien
cctagagtcattacctgagaggttc

SEQ ID NO: 4512916 - DNA, 25 bp, Homo sapien
tatagtcgatttaaaaaagcaagac

SEQ ID NO: 4512917 - DNA, 25 bp, Homo sapien
taaagctatagtagctgtgcaaatt

SEQ ID NO: 4512918 - DNA, 25 bp, Homo sapien
tatagtagctgtgcaaatttcagac

SEQ ID NO: 4512919 - DNA, 25 bp, Homo sapien
cttagctatgcacaagaaagttact

SEQ ID NO: 4512920 - DNA, 25 bp, Homo sapien
caccatgcacggaagggtgtcctgg

SEQ ID NO: 4512921 - DNA, 25 bp, Homo sapien
tggaggctgctgaaccacgattatg

SEQ ID NO: 4512922 - DNA, 25 bp, Homo sapien
tgtcagtgacaccatgcacggaagg

SEQ ID NO: 4512923 - DNA, 25 bp, Homo sapien
tgtgatttacagaacgtgacaaaag

SEQ ID NO: 4512924 - DNA, 25 bp, Homo sapien
gctgaaattgtgaaagtgaaacacc

SEQ ID NO: 4512925 - DNA, 25 bp, Homo sapien
aattgtgaaagtgaaacaccatggc

SEQ ID NO: 4512926 - DNA, 25 bp, Homo sapien
tgcaatcagtgaaggaagctgaaat

SEQ ID NO: 4512927 - DNA, 25 bp, Homo sapien
ctgcaatcagtgaaggaagctgaaa

SEQ ID NO: 4512928 - DNA, 25 bp, Homo sapien
tgtgccagatgatgttgtgttctgc

SEQ ID NO: 4512929 - DNA, 25 bp, Homo sapien
taggtgcacttgggcacccaaaccg

SEQ ID NO: 4512930 - DNA, 25 bp, Homo sapien
tgcacttgggcacccaaaccggaaa

SEQ ID NO: 4512931 - DNA, 25 bp, Homo sapien
tgccagatgatgttgtgttctgcaa

SEQ ID NO: 4512932 - DNA, 25 bp, Homo sapien
agctctgtcttcaggaatctttggc

SEQ ID NO: 4512933 - DNA, 25 bp, Homo sapien
ctctcagatgagttgcagatcaggc

SEQ ID NO: 4512934 - DNA, 25 bp, Homo sapien
agagacccacttgagtacatggcat

SEQ ID NO: 4512935 - DNA, 25 bp, Homo sapien
cagatgagttgcagatcaggcagga

SEQ ID NO: 4512936 - DNA, 25 bp, Homo sapien
cctgggatcttgtagctagtgtgga

SEQ ID NO: 4512937 - DNA, 25 bp, Homo sapien
caggagcagcaagtgcacaattgac

SEQ ID NO: 4512938 - DNA, 25 bp, Homo sapien
gacatgggcttgtgcctgggatctt

SEQ ID NO: 4512939 - DNA, 25 bp, Homo sapien
gcaagtactctaccccaggaagcag

SEQ ID NO: 4512940 - DNA, 25 bp, Homo sapien
tgttcagaatcgttaaccaccgttg

SEQ ID NO: 4512941 - DNA, 25 bp, Homo sapien
gagccagtgctgttcagaatcgtta

SEQ ID NO: 4512942 - DNA, 25 bp, Homo sapien
gaatcgttaaccaccgttgctgcct

SEQ ID NO: 4512943 - DNA, 25 bp, Homo sapien
tgctgttcagaatcgttaaccaccg

SEQ ID NO: 4512944 - DNA, 25 bp, Homo sapien
acattaaagccaccagtaactgtag

SEQ ID NO: 4512945 - DNA, 25 bp, Homo sapien
gaaaagagatgtggccacgcatgag

SEQ ID NO: 4512946 - DNA, 25 bp, Homo sapien
gcaagactggtaacattggctacct

SEQ ID NO: 4512947 - DNA, 25 bp, Homo sapien
tgaaacacctatgtgtatgcatgag

SEQ ID NO: 4512948 - DNA, 25 bp, Homo sapien
tctacgaaaactagtgtagtgcaca

SEQ ID NO: 4512949 - DNA, 25 bp, Homo sapien
ctagagccagtgaggcctcagggac

SEQ ID NO: 4512950 - DNA, 25 bp, Homo sapien
cagtgaggcctcagggacacgggtt

SEQ ID NO: 4512951 - DNA, 25 bp, Homo sapien
tagagccagtgaggcctcagggaca

SEQ ID NO: 4512952 - DNA, 25 bp, Homo sapien
agccagtgaggcctcagggacacgg

SEQ ID NO: 4512953 - DNA, 25 bp, Homo sapien
gagacagtagaggtcaggaggatgg

SEQ ID NO: 4512954 - DNA, 25 bp, Homo sapien
gatacccaggatcttatagagccag

SEQ ID NO: 4512955 - DNA, 25 bp, Homo sapien
tggtgatacccaggatcttatagag

SEQ ID NO: 4512956 - DNA, 25 bp, Homo sapien
cccaggatcttatagagccagaggc

SEQ ID NO: 4512957 - DNA, 25 bp, Homo sapien
taggactaaaccaatcaggccactt

SEQ ID NO: 4512958 - DNA, 25 bp, Homo sapien
catatccaccaagcaaaccagggct

SEQ ID NO: 4512959 - DNA, 25 bp, Homo sapien
taagaagtttgaggctaggtcgagc

SEQ ID NO: 4512960 - DNA, 25 bp, Homo sapien
ggtcctactggccaaatctcgagca

SEQ ID NO: 4512961 - DNA, 25 bp, Homo sapien
cccagtagtaatattttaaggtgtg

SEQ ID NO: 4512962 - DNA, 25 bp, Homo sapien
agatggtagcagttccaataaattc

SEQ ID NO: 4512963 - DNA, 25 bp, Homo sapien
gtggtgtagatggtagcagttccaa

SEQ ID NO: 4512964 - DNA, 25 bp, Homo sapien
ctgtcagcaggattaataacccagt

SEQ ID NO: 4512965 - DNA, 25 bp, Homo sapien
tgacggaggagaatgggctgaacca

SEQ ID NO: 4512966 - DNA, 25 bp, Homo sapien
acggaggagaatgggctgaaccagg

SEQ ID NO: 4512967 - DNA, 25 bp, Homo sapien
aggctgacggaggagaatgggctga

SEQ ID NO: 4512968 - DNA, 25 bp, Homo sapien
gctgacggaggagaatgggctgaac

SEQ ID NO: 4512969 - DNA, 25 bp, Homo sapien
agatggctgggttaataaacaaaat

SEQ ID NO: 4512970 - DNA, 25 bp, Homo sapien
tgctccaagacaggtctagttatat

SEQ ID NO: 4512971 - DNA, 25 bp, Homo sapien
aaagctgcttcagcaaaggtactcc

SEQ ID NO: 4512972 - DNA, 25 bp, Homo sapien
ggtctagttatatgaactcttgatg

SEQ ID NO: 4512973 - DNA, 25 bp, Homo sapien
gcatgttacctttacctcttagaag

SEQ ID NO: 4512974 - DNA, 25 bp, Homo sapien
tgtcttcctgatccctaccctaatt

SEQ ID NO: 4512975 - DNA, 25 bp, Homo sapien
gaacttggaccatgatattaaaagg

SEQ ID NO: 4512976 - DNA, 25 bp, Homo sapien
tgtattataaaatcaggctgaccat

SEQ ID NO: 4512977 - DNA, 25 bp, Homo sapien
cttgcatggctactgaacttttaag

SEQ ID NO: 4512978 - DNA, 25 bp, Homo sapien
ctgttcttgcatggctactgaactt

SEQ ID NO: 4512979 - DNA, 25 bp, Homo sapien
ctgaacttttaagtagttcaaccag

SEQ ID NO: 4512980 - DNA, 25 bp, Homo sapien
gcatggctactgaacttttaagtag

SEQ ID NO: 4512981 - DNA, 25 bp, Homo sapien
aattctgtgtactgccatacaaaat

SEQ ID NO: 4512982 - DNA, 25 bp, Homo sapien
tactgccatacaaaatttctctcca

SEQ ID NO: 4512983 - DNA, 25 bp, Homo sapien
atgcatcggattgttgcagggctca

SEQ ID NO: 4512984 - DNA, 25 bp, Homo sapien
cggattgttgcagggctcacaataa

SEQ ID NO: 4512985 - DNA, 25 bp, Homo sapien
caacttcctgtctagaacgcatcag

SEQ ID NO: 4512986 - DNA, 25 bp, Homo sapien
taaaagatacttcagcccattccta

SEQ ID NO: 4512987 - DNA, 25 bp, Homo sapien
tccaacttccctagatacaaaggca

SEQ ID NO: 4512988 - DNA, 25 bp, Homo sapien
tatatctcctacatacaacttcctg

SEQ ID NO: 4512989 - DNA, 25 bp, Homo sapien
cataagataccagttgtccattaac

SEQ ID NO: 4512990 - DNA, 25 bp, Homo sapien
catgccaagccatatcaccataaga

SEQ ID NO: 4512991 - DNA, 25 bp, Homo sapien
tcatttgtgttaacatgccaagcca

SEQ ID NO: 4512992 - DNA, 25 bp, Homo sapien
ctccatcgattgtaaatgtggacaa

SEQ ID NO: 4512993 - DNA, 25 bp, Homo sapien
cttgtcacgctggtgactgggtggc

SEQ ID NO: 4512994 - DNA, 25 bp, Homo sapien
attgaaggcactcacatccaccttc

SEQ ID NO: 4512995 - DNA, 25 bp, Homo sapien
gcaggcatcagtttcattgaaggca

SEQ ID NO: 4512996 - DNA, 25 bp, Homo sapien
gctggtgactgggtggcaggcatca

SEQ ID NO: 4512997 - DNA, 25 bp, Homo sapien
cggtcacggggtagctcttcctcta

SEQ ID NO: 4512998 - DNA, 25 bp, Homo sapien
ccagttctctaagccggtcacgggg

SEQ ID NO: 4512999 - DNA, 25 bp, Homo sapien
aaccacagcgaaacagtgtcccacg

SEQ ID NO: 4513000 - DNA, 25 bp, Homo sapien
gcgaggcgaaccaaccagagccagg

SEQ ID NO: 4513001 - DNA, 25 bp, Homo sapien
gaaataagactggtaaagtctccaa

SEQ ID NO: 4513002 - DNA, 25 bp, Homo sapien
acagcaattgtttagctacaaaatg

SEQ ID NO: 4513003 - DNA, 25 bp, Homo sapien
tcttacagtgtaggaacagcaattg

SEQ ID NO: 4513004 - DNA, 25 bp, Homo sapien
tctccaagaaactttcaggattcct

SEQ ID NO: 4513005 - DNA, 25 bp, Homo sapien
gcagagtcatggtggtaattacagt

SEQ ID NO: 4513006 - DNA, 25 bp, Homo sapien
tcagttttgtacatgggccacgaga

SEQ ID NO: 4513007 - DNA, 25 bp, Homo sapien
tgtcatgcccatcttagaggccaca

SEQ ID NO: 4513008 - DNA, 25 bp, Homo sapien
aaaagagacccatatacatgtagca

SEQ ID NO: 4513009 - DNA, 25 bp, Homo sapien
aaatacagcagttaatgtcaatgta

SEQ ID NO: 4513010 - DNA, 25 bp, Homo sapien
gcagttaatgtcaatgtataacaat

SEQ ID NO: 4513011 - DNA, 25 bp, Homo sapien
tatttctagccctgaaagaacaaaa

SEQ ID NO: 4513012 - DNA, 25 bp, Homo sapien
tacagcagttaatgtcaatgtataa

SEQ ID NO: 4513013 - DNA, 25 bp, Homo sapien
tactcatttactattctaggtagga

SEQ ID NO: 4513014 - DNA, 25 bp, Homo sapien
tctaagcagcttaacatttatatgt

SEQ ID NO: 4513015 - DNA, 25 bp, Homo sapien
acagttggtggttactagactctaa

SEQ ID NO: 4513016 - DNA, 25 bp, Homo sapien
ttactattctaggtaggataaaatg

SEQ ID NO: 4513017 - DNA, 25 bp, Homo sapien
tgaagtgaggccttggcacatagtc

SEQ ID NO: 4513018 - DNA, 25 bp, Homo sapien
gaagtgaggccttggcacatagtca

SEQ ID NO: 4513019 - DNA, 25 bp, Homo sapien
aagtgaggccttggcacatagtcag

SEQ ID NO: 4513020 - DNA, 25 bp, Homo sapien
ctgaagtgaggccttggcacatagt

SEQ ID NO: 4513021 - DNA, 25 bp, Homo sapien
gccgcctccaagtctctacagttga

SEQ ID NO: 4513022 - DNA, 25 bp, Homo sapien
ttttacattaatagtctctacctat

SEQ ID NO: 4513023 - DNA, 25 bp, Homo sapien
tccaagtctctacagttgatttcct

SEQ ID NO: 4513024 - DNA, 25 bp, Homo sapien
atgacctggagcaatgccgccgcct

SEQ ID NO: 4513025 - DNA, 25 bp, Homo sapien
gggggtatctgtgaggtgagagagg

SEQ ID NO: 4513026 - DNA, 25 bp, Homo sapien
ggggtatctgtgaggtgagagagga

SEQ ID NO: 4513027 - DNA, 25 bp, Homo sapien
ggaagaaatacacggtcaatgggaa

SEQ ID NO: 4513028 - DNA, 25 bp, Homo sapien
aaatgggaagaaatacacggtcaat

SEQ ID NO: 4513029 - DNA, 25 bp, Homo sapien
gaaatacacggtcaatgggaatctt

SEQ ID NO: 4513030 - DNA, 25 bp, Homo sapien
tgggaagaaatacacggtcaatggg

SEQ ID NO: 4513031 - DNA, 25 bp, Homo sapien
tcatatactaaaaggcttcttgtag

SEQ ID NO: 4513032 - DNA, 25 bp, Homo sapien
ctaaggctagtgattcagtccacaa

SEQ ID NO: 4513033 - DNA, 25 bp, Homo sapien
caggttatgcagaccatttctttaa

SEQ ID NO: 4513034 - DNA, 25 bp, Homo sapien
tctttcattcaggttatgcagacca

SEQ ID NO: 4513035 - DNA, 25 bp, Homo sapien
gctattaggcacaaggccctcaagg

SEQ ID NO: 4513036 - DNA, 25 bp, Homo sapien
gaccatacattgactttagggccat

SEQ ID NO: 4513037 - DNA, 25 bp, Homo sapien
agagaccatacattgactttagggc

SEQ ID NO: 4513038 - DNA, 25 bp, Homo sapien
gtcagtgagcttaaccgatccttcc

SEQ ID NO: 4513039 - DNA, 25 bp, Homo sapien
taccagaatctcattaatgatcaat

SEQ ID NO: 4513040 - DNA, 25 bp, Homo sapien
taattctttcattaccagaatctca

SEQ ID NO: 4513041 - DNA, 25 bp, Homo sapien
ttaccagaatctcattaatgatcaa

SEQ ID NO: 4513042 - DNA, 25 bp, Homo sapien
actgtccaagaagttaactatgttg

SEQ ID NO: 4513043 - DNA, 25 bp, Homo sapien
aattaatttgtttgatagcaacctt

SEQ ID NO: 4513044 - DNA, 25 bp, Homo sapien
gtaaattaatttgtttgatagcaac

SEQ ID NO: 4513045 - DNA, 25 bp, Homo sapien
taaattaatttgtttgatagcaacc

SEQ ID NO: 4513046 - DNA, 25 bp, Homo sapien
ctgtaaattaatttgtttgatagca

SEQ ID NO: 4513047 - DNA, 25 bp, Homo sapien
cagtgcaacgtcagtagcagtgaaa

SEQ ID NO: 4513048 - DNA, 25 bp, Homo sapien
agtgcaacgtcagtagcagtgaaaa

SEQ ID NO: 4513049 - DNA, 25 bp, Homo sapien
tgtaccagaagccccttgtccaatt

SEQ ID NO: 4513050 - DNA, 25 bp, Homo sapien
ctgtaccagaagccccttgtccaat

SEQ ID NO: 4513051 - DNA, 25 bp, Homo sapien
tccaattttttcatatcttgtatat

SEQ ID NO: 4513052 - DNA, 25 bp, Homo sapien
ttgtccaattttttcatatcttgta

SEQ ID NO: 4513053 - DNA, 25 bp, Homo sapien
atttcatatgatccggtggtggggc

SEQ ID NO: 4513054 - DNA, 25 bp, Homo sapien
tgttggagtcgtagacatccagcac

SEQ ID NO: 4513055 - DNA, 25 bp, Homo sapien
catatgatccggtggtggggcaata

SEQ ID NO: 4513056 - DNA, 25 bp, Homo sapien
tggagtcgtagacatccagcacagc

SEQ ID NO: 4513057 - DNA, 25 bp, Homo sapien
agatgattttatgcctgggcttttt

SEQ ID NO: 4513058 - DNA, 25 bp, Homo sapien
ggtttcaaactgtgattggctgaca

SEQ ID NO: 4513059 - DNA, 25 bp, Homo sapien
tatggagatgattttatgcctgggc

SEQ ID NO: 4513060 - DNA, 25 bp, Homo sapien
aggtttcaaactgtgattggctgac

SEQ ID NO: 4513061 - DNA, 25 bp, Homo sapien
catgaagtgttcctacaaccaggct

SEQ ID NO: 4513062 - DNA, 25 bp, Homo sapien
gaaggacaacaaatcagtggcaggg

SEQ ID NO: 4513063 - DNA, 25 bp, Homo sapien
tcttcaggagcgatcacagcaatgt

SEQ ID NO: 4513064 - DNA, 25 bp, Homo sapien
gacactaccagaagcgagtcatcga

SEQ ID NO: 4513065 - DNA, 25 bp, Homo sapien
tccagccagactacagaagcagaaa

SEQ ID NO: 4513066 - DNA, 25 bp, Homo sapien
tctgaagtccctgcaacattgtgat

SEQ ID NO: 4513067 - DNA, 25 bp, Homo sapien
cttttctgttgccttatcagtgata

SEQ ID NO: 4513068 - DNA, 25 bp, Homo sapien
cattgtgattattccaactggcaga

SEQ ID NO: 4513069 - DNA, 25 bp, Homo sapien
gagctcgaccgctgaggtcccgttc

SEQ ID NO: 4513070 - DNA, 25 bp, Homo sapien
agggtcccggccgagctcgaccgct

SEQ ID NO: 4513071 - DNA, 25 bp, Homo sapien
gtcccggccgagctcgaccgctgag

SEQ ID NO: 4513072 - DNA, 25 bp, Homo sapien
ggccgagctcgaccgctgaggtccc

SEQ ID NO: 4513073 - DNA, 25 bp, Homo sapien
gcccgccacggcacagcctcctcct

SEQ ID NO: 4513074 - DNA, 25 bp, Homo sapien
gcagcaggacatggcaaggcccgcc

SEQ ID NO: 4513075 - DNA, 25 bp, Homo sapien
caggcagcaggacatggcaaggccc

SEQ ID NO: 4513076 - DNA, 25 bp, Homo sapien
caggacatggcaaggcccgccacgg

SEQ ID NO: 4513077 - DNA, 25 bp, Homo sapien
tagggcgtctggtccggctgctact

SEQ ID NO: 4513078 - DNA, 25 bp, Homo sapien
tgcagcagcggccacacagagtgca

SEQ ID NO: 4513079 - DNA, 25 bp, Homo sapien
gcgcagggcagcgactgagctacta

SEQ ID NO: 4513080 - DNA, 25 bp, Homo sapien
gagccgggcgacgagcggagacgcg

SEQ ID NO: 4513081 - DNA, 25 bp, Homo sapien
cagcacgctggaaaaccggaggagt

SEQ ID NO: 4513082 - DNA, 25 bp, Homo sapien
cccgtcatgggagaaagcactgtga

SEQ ID NO: 4513083 - DNA, 25 bp, Homo sapien
tcaggatgctgatgatgccctcaag

SEQ ID NO: 4513084 - DNA, 25 bp, Homo sapien
gtaagtcaattaccagtgcccacgg

SEQ ID NO: 4513085 - DNA, 25 bp, Homo sapien
tctgagtcaccccagctaatggctg

SEQ ID NO: 4513086 - DNA, 25 bp, Homo sapien
gaccgacctaacacgagctatgcag

SEQ ID NO: 4513087 - DNA, 25 bp, Homo sapien
ggtaacgttactgcagccactgatg

SEQ ID NO: 4513088 - DNA, 25 bp, Homo sapien
caatgggcctttgacagggactagc

SEQ ID NO: 4513089 - DNA, 25 bp, Homo sapien
caaatggtcactcttgcttgtccca

SEQ ID NO: 4513090 - DNA, 25 bp, Homo sapien
cccatgtcactaatctctggcgaga

SEQ ID NO: 4513091 - DNA, 25 bp, Homo sapien
tgatttcaatgtaaacagtggctcc

SEQ ID NO: 4513092 - DNA, 25 bp, Homo sapien
gtggctccacctgggagtgtatccc

SEQ ID NO: 4513093 - DNA, 25 bp, Homo sapien
cagggtcgcacaggtaatgattgcc

SEQ ID NO: 4513094 - DNA, 25 bp, Homo sapien
gtcgcacaggtaatgattgccaccc

SEQ ID NO: 4513095 - DNA, 25 bp, Homo sapien
gggtcgcacaggtaatgattgccac

SEQ ID NO: 4513096 - DNA, 25 bp, Homo sapien
tcgcacaggtaatgattgccacccc

SEQ ID NO: 4513097 - DNA, 25 bp, Homo sapien
tcaaatgctgtgtaccgggaggtac

SEQ ID NO: 4513098 - DNA, 25 bp, Homo sapien
cccgcacttgtccacatgccatcaa

SEQ ID NO: 4513099 - DNA, 25 bp, Homo sapien
tctgctaacaccacggtccaggtgg

SEQ ID NO: 4513100 - DNA, 25 bp, Homo sapien
agcacccggagcttgttttttcaga

SEQ ID NO: 4513101 - DNA, 25 bp, Homo sapien
tatgcaggatatagatgcccctcag

SEQ ID NO: 4513102 - DNA, 25 bp, Homo sapien
tatagatgcccctcagaggtcctgg

SEQ ID NO: 4513103 - DNA, 25 bp, Homo sapien
atatagatgcccctcagaggtcctg

SEQ ID NO: 4513104 - DNA, 25 bp, Homo sapien
ctagatatgcaggatatagatgccc

SEQ ID NO: 4513105 - DNA, 25 bp, Homo sapien
gtctttgtcctgatgggtagaactt

SEQ ID NO: 4513106 - DNA, 25 bp, Homo sapien
tctttgtcctgatgggtagaacttt

SEQ ID NO: 4513107 - DNA, 25 bp, Homo sapien
tcagcagattgtaagcctgaagctg

SEQ ID NO: 4513108 - DNA, 25 bp, Homo sapien
agcagattgtaagcctgaagctgcc

SEQ ID NO: 4513109 - DNA, 25 bp, Homo sapien
ttgtcagcagattgtaagcctgaag

SEQ ID NO: 4513110 - DNA, 25 bp, Homo sapien
tgtcagcagattgtaagcctgaagc

SEQ ID NO: 4513111 - DNA, 25 bp, Homo sapien
ggcctctgctcctttatgactcccc

SEQ ID NO: 4513112 - DNA, 25 bp, Homo sapien
ctgctcctttatgactccccttcct

SEQ ID NO: 4513113 - DNA, 25 bp, Homo sapien
cttcctcagtgacccagagcaccct

SEQ ID NO: 4513114 - DNA, 25 bp, Homo sapien
ccccttcctcagtgacccagagcac

SEQ ID NO: 4513115 - DNA, 25 bp, Homo sapien
gatgcagagggtacgctgatgactt

SEQ ID NO: 4513116 - DNA, 25 bp, Homo sapien
agggtacgctgatgacttctgctgg

SEQ ID NO: 4513117 - DNA, 25 bp, Homo sapien
aaagcaaatccgtgggatgcagagg

SEQ ID NO: 4513118 - DNA, 25 bp, Homo sapien
aaacaaagcaaatccgtgggatgca

SEQ ID NO: 4513119 - DNA, 25 bp, Homo sapien
tggtcctccggccctgaacgtggac

SEQ ID NO: 4513120 - DNA, 25 bp, Homo sapien
ccctgaacgtggacctggtgtgaca

SEQ ID NO: 4513121 - DNA, 25 bp, Homo sapien
gtgggcacccggctgagggacaagc

SEQ ID NO: 4513122 - DNA, 25 bp, Homo sapien
gctgccagtgggcacccggctgagg

SEQ ID NO: 4513123 - DNA, 25 bp, Homo sapien
gcaccgcatgtcctggggtccttct

SEQ ID NO: 4513124 - DNA, 25 bp, Homo sapien
ctgcaccgcatgtcctggggtcctt

SEQ ID NO: 4513125 - DNA, 25 bp, Homo sapien
ccgtctgcaccgcatgtcctggggt

SEQ ID NO: 4513126 - DNA, 25 bp, Homo sapien
accgcatgtcctggggtccttcttt

SEQ ID NO: 4513127 - DNA, 25 bp, Homo sapien
aaccagtgtcccgactgtgacttac

SEQ ID NO: 4513128 - DNA, 25 bp, Homo sapien
gggacacacaaggactttcacatcg

SEQ ID NO: 4513129 - DNA, 25 bp, Homo sapien
cacacaaggactttcacatcgaggc

SEQ ID NO: 4513130 - DNA, 25 bp, Homo sapien
gtgtcccgactgtgacttacttccc

SEQ ID NO: 4513131 - DNA, 25 bp, Homo sapien
gagctgctccgggggccgcgggaaa

SEQ ID NO: 4513132 - DNA, 25 bp, Homo sapien
gggccgcgggaaacttatcagcatc

SEQ ID NO: 4513133 - DNA, 25 bp, Homo sapien
agagctgctccgggggccgcgggaa

SEQ ID NO: 4513134 - DNA, 25 bp, Homo sapien
gggggccgcgggaaacttatcagca

SEQ ID NO: 4513135 - DNA, 25 bp, Homo sapien
tcacagctccagggcctggtcgcac

SEQ ID NO: 4513136 - DNA, 25 bp, Homo sapien
gcagcgggcactcggccgggaagca

SEQ ID NO: 4513137 - DNA, 25 bp, Homo sapien
tgaccctccagcctgcgcagcgggc

SEQ ID NO: 4513138 - DNA, 25 bp, Homo sapien
ctggcgctgcaggatccgcgcctga

SEQ ID NO: 4513139 - DNA, 25 bp, Homo sapien
ggccgggaagcacctctccagcagg

SEQ ID NO: 4513140 - DNA, 25 bp, Homo sapien
ctcagcaccacgttcacgcgcccgc

SEQ ID NO: 4513141 - DNA, 25 bp, Homo sapien
tcagcaccacgttcacgcgcccgcg

SEQ ID NO: 4513142 - DNA, 25 bp, Homo sapien
cagcaccacgttcacgcgcccgcgc

SEQ ID NO: 4513143 - DNA, 25 bp, Homo sapien
ctcctccggactcagcgcctccaac

SEQ ID NO: 4513144 - DNA, 25 bp, Homo sapien
gccggcgcgggccagcgcgtccccc

SEQ ID NO: 4513145 - DNA, 25 bp, Homo sapien
cagggccaccgggaggcggccggcg

SEQ ID NO: 4513146 - DNA, 25 bp, Homo sapien
cgggccagcgcgtcccccagcctca

SEQ ID NO: 4513147 - DNA, 25 bp, Homo sapien
cagcctcaggcaccggccgcggtcg

SEQ ID NO: 4513148 - DNA, 25 bp, Homo sapien
ccggcgctttctggtacttgctcgc

SEQ ID NO: 4513149 - DNA, 25 bp, Homo sapien
gcccggcgctttctggtacttgctc

SEQ ID NO: 4513150 - DNA, 25 bp, Homo sapien
cggcgctttctggtacttgctcgcg

SEQ ID NO: 4513151 - DNA, 25 bp, Homo sapien
cccggcgctttctggtacttgctcg

SEQ ID NO: 4513152 - DNA, 25 bp, Homo sapien
tgttccatgcgcagtagagaagact

SEQ ID NO: 4513153 - DNA, 25 bp, Homo sapien
tttaggtccttcaatatagagggca

SEQ ID NO: 4513154 - DNA, 25 bp, Homo sapien
ggactttttctgctgtatttcgtaa

SEQ ID NO: 4513155 - DNA, 25 bp, Homo sapien
ttatttctacaaacttccctctgag

SEQ ID NO: 4513156 - DNA, 25 bp, Homo sapien
ttttagcattagagagagtccaaat

SEQ ID NO: 4513157 - DNA, 25 bp, Homo sapien
cattagagagagtccaaatcccacg

SEQ ID NO: 4513158 - DNA, 25 bp, Homo sapien
gagagtccaaatcccacgttagaca

SEQ ID NO: 4513159 - DNA, 25 bp, Homo sapien
tccaaatcccacgttagacataagt

SEQ ID NO: 4513160 - DNA, 25 bp, Homo sapien
gcttccgtgagaggatcaccccttg

SEQ ID NO: 4513161 - DNA, 25 bp, Homo sapien
taaagaccacaggagagtttgggcg

SEQ ID NO: 4513162 - DNA, 25 bp, Homo sapien
aggtgcccatcacccttcaccgttt

SEQ ID NO: 4513163 - DNA, 25 bp, Homo sapien
tcaccgtttcagcaatatggatctt

SEQ ID NO: 4513164 - DNA, 25 bp, Homo sapien
caacttagttgtcctgaggtgccca

SEQ ID NO: 4513165 - DNA, 25 bp, Homo sapien
tgcatacacggtcacagtgctaccc

SEQ ID NO: 4513166 - DNA, 25 bp, Homo sapien
ccagatagcctgatttccctgcctt

SEQ ID NO: 4513167 - DNA, 25 bp, Homo sapien
tggtggcacacaaggtttgactact

SEQ ID NO: 4513168 - DNA, 25 bp, Homo sapien
tagcctgatgcccttatcaacaaag

SEQ ID NO: 4513169 - DNA, 25 bp, Homo sapien
tagcaattaggaagagaagtcccat

SEQ ID NO: 4513170 - DNA, 25 bp, Homo sapien
tattttagcaattaggaagagaagt

SEQ ID NO: 4513171 - DNA, 25 bp, Homo sapien
ttttagcaattaggaagagaagtcc

SEQ ID NO: 4513172 - DNA, 25 bp, Homo sapien
ttagcaattaggaagagaagtccca

SEQ ID NO: 4513173 - DNA, 25 bp, Homo sapien
cactgcctgctcttaagtgtctaga

SEQ ID NO: 4513174 - DNA, 25 bp, Homo sapien
aaagccagtccctcgacattgttac

SEQ ID NO: 4513175 - DNA, 25 bp, Homo sapien
taaccacagcaagatggctatgtaa

SEQ ID NO: 4513176 - DNA, 25 bp, Homo sapien
tggatgtgccctgtcatgcatgtga

SEQ ID NO: 4513177 - DNA, 25 bp, Homo sapien
actacctaggtagtgttattattat

SEQ ID NO: 4513178 - DNA, 25 bp, Homo sapien
actcatgtgagttggcggactttgg

SEQ ID NO: 4513179 - DNA, 25 bp, Homo sapien
tcagctctgagcttattagagccca

SEQ ID NO: 4513180 - DNA, 25 bp, Homo sapien
agagcccaccgttttgcatgaataa

SEQ ID NO: 4513181 - DNA, 25 bp, Homo sapien
taagggagatacaataagtccactc

SEQ ID NO: 4513182 - DNA, 25 bp, Homo sapien
atcttaagggagatacaataagtcc

SEQ ID NO: 4513183 - DNA, 25 bp, Homo sapien
gggagatacaataagtccactctct

SEQ ID NO: 4513184 - DNA, 25 bp, Homo sapien
gatacaataagtccactctcttctc

SEQ ID NO: 4513185 - DNA, 25 bp, Homo sapien
gaaagccagcatttagttggggact

SEQ ID NO: 4513186 - DNA, 25 bp, Homo sapien
ttagttggggactatgagatactac

SEQ ID NO: 4513187 - DNA, 25 bp, Homo sapien
agagcactgaaaccgaagagccact

SEQ ID NO: 4513188 - DNA, 25 bp, Homo sapien
aacatagagcactgaaaccgaagag

SEQ ID NO: 4513189 - DNA, 25 bp, Homo sapien
atttagaccagaataggttttcata

SEQ ID NO: 4513190 - DNA, 25 bp, Homo sapien
tttagaccagaataggttttcatat

SEQ ID NO: 4513191 - DNA, 25 bp, Homo sapien
tctgaggagtgcgttcaaagtcttc

SEQ ID NO: 4513192 - DNA, 25 bp, Homo sapien
gggcagctaccttagcaggtgggag

SEQ ID NO: 4513193 - DNA, 25 bp, Homo sapien
tcttctctgcgctttttacgacagc

SEQ ID NO: 4513194 - DNA, 25 bp, Homo sapien
ccattcgacttagattaggggcagc

SEQ ID NO: 4513195 - DNA, 25 bp, Homo sapien
tataatggctcctgcaattagtcca

SEQ ID NO: 4513196 - DNA, 25 bp, Homo sapien
ataatggctcctgcaattagtccag

SEQ ID NO: 4513197 - DNA, 25 bp, Homo sapien
ctataatggctcctgcaattagtcc

SEQ ID NO: 4513198 - DNA, 25 bp, Homo sapien
cgcaacaggcactgatcagagccca

SEQ ID NO: 4513199 - DNA, 25 bp, Homo sapien
acgcaacaggcactgatcagagccc

SEQ ID NO: 4513200 - DNA, 25 bp, Homo sapien
gcaacaggcactgatcagagcccac

SEQ ID NO: 4513201 - DNA, 25 bp, Homo sapien
atgtacagctgtatgtcccagagta

SEQ ID NO: 4513202 - DNA, 25 bp, Homo sapien
ctgatgtacagctgtatgtcccaga

SEQ ID NO: 4513203 - DNA, 25 bp, Homo sapien
ctgtttctgatgtacagctgtatgt

SEQ ID NO: 4513204 - DNA, 25 bp, Homo sapien
tctgtttctgatgtacagctgtatg

SEQ ID NO: 4513205 - DNA, 25 bp, Homo sapien
gcatttttacagatataacagatga

SEQ ID NO: 4513206 - DNA, 25 bp, Homo sapien
tttacagatataacagatgaagtca

SEQ ID NO: 4513207 - DNA, 25 bp, Homo sapien
gatataacagatgaagtcatttctg

SEQ ID NO: 4513208 - DNA, 25 bp, Homo sapien
cagatataacagatgaagtcatttc

SEQ ID NO: 4513209 - DNA, 25 bp, Homo sapien
tgtaatggaagtgaaccttcttttg

SEQ ID NO: 4513210 - DNA, 25 bp, Homo sapien
gacaatttttgccactcatactgta

SEQ ID NO: 4513211 - DNA, 25 bp, Homo sapien
tctgtgagtcagacaatttttgcca

SEQ ID NO: 4513212 - DNA, 25 bp, Homo sapien
actcatactgtaatggaagtgaacc

SEQ ID NO: 4513213 - DNA, 25 bp, Homo sapien
actaagcgtaaatttgcatggcaga

SEQ ID NO: 4513214 - DNA, 25 bp, Homo sapien
ccaacctctgatgaaatccgcgact

SEQ ID NO: 4513215 - DNA, 25 bp, Homo sapien
ctccaacctctgatgaaatccgcga

SEQ ID NO: 4513216 - DNA, 25 bp, Homo sapien
tccaacctctgatgaaatccgcgac

SEQ ID NO: 4513217 - DNA, 25 bp, Homo sapien
gaagcgcagcaggagcgccacggtg

SEQ ID NO: 4513218 - DNA, 25 bp, Homo sapien
aagcgcagcaggagcgccacggtgg

SEQ ID NO: 4513219 - DNA, 25 bp, Homo sapien
caggagcacgaagcgcagcaggagc

SEQ ID NO: 4513220 - DNA, 25 bp, Homo sapien
ctgcacaggagcacgaagcgcagca

SEQ ID NO: 4513221 - DNA, 25 bp, Homo sapien
cgcctggcgcactcaaggtagagaa

SEQ ID NO: 4513222 - DNA, 25 bp, Homo sapien
ggtagagaaaatcttaaagactcca

SEQ ID NO: 4513223 - DNA, 25 bp, Homo sapien
ccgcgcctggcgcactcaaggtaga

SEQ ID NO: 4513224 - DNA, 25 bp, Homo sapien
caggtaggcggctctcgctccaggt

SEQ ID NO: 4513225 - DNA, 25 bp, Homo sapien
taggaaacactgtaaccaaatgttc

SEQ ID NO: 4513226 - DNA, 25 bp, Homo sapien
tgttccaacatgatataatccctga

SEQ ID NO: 4513227 - DNA, 25 bp, Homo sapien
ggaaacactgtaaccaaatgttcca

SEQ ID NO: 4513228 - DNA, 25 bp, Homo sapien
tttggcctgatggaaggcggcgccc

SEQ ID NO: 4513229 - DNA, 25 bp, Homo sapien
ctgcaggcgacctcaacgtggagct

SEQ ID NO: 4513230 - DNA, 25 bp, Homo sapien
gcaccaggcacctgcggattggcct

SEQ ID NO: 4513231 - DNA, 25 bp, Homo sapien
ccgctgcctggtaagcggggaccaa

SEQ ID NO: 4513232 - DNA, 25 bp, Homo sapien
aacaacggcgtcaagctggctgaca

SEQ ID NO: 4513233 - DNA, 25 bp, Homo sapien
ctgtccttccgcactcaggagcggg

SEQ ID NO: 4513234 - DNA, 25 bp, Homo sapien
tccaggaggaacaacggcgtcaagc

SEQ ID NO: 4513235 - DNA, 25 bp, Homo sapien
ctgtctgtccttccgcactcaggag

SEQ ID NO: 4513236 - DNA, 25 bp, Homo sapien
tatccaaccagaggagtcacacaca

SEQ ID NO: 4513237 - DNA, 25 bp, Homo sapien
tgtcctaagtcctttgtgtgccgtg

SEQ ID NO: 4513238 - DNA, 25 bp, Homo sapien
gggaaggtcatctttgtcgcggaaa

SEQ ID NO: 4513239 - DNA, 25 bp, Homo sapien
tctgtttggttggagatcggccgtt

SEQ ID NO: 4513240 - DNA, 25 bp, Homo sapien
ggcttgagggccggcggagccgcag

SEQ ID NO: 4513241 - DNA, 25 bp, Homo sapien
cttgagggccggcggagccgcaggc

SEQ ID NO: 4513242 - DNA, 25 bp, Homo sapien
gcttgagggccggcggagccgcagg

SEQ ID NO: 4513243 - DNA, 25 bp, Homo sapien
ttgagggccggcggagccgcaggct

SEQ ID NO: 4513244 - DNA, 25 bp, Homo sapien
ggtcgcctatctgggacctcagcgc

SEQ ID NO: 4513245 - DNA, 25 bp, Homo sapien
ggcaccccgccagggtcgcctatct

SEQ ID NO: 4513246 - DNA, 25 bp, Homo sapien
cgccagggtcgcctatctgggacct

SEQ ID NO: 4513247 - DNA, 25 bp, Homo sapien
gcggaccaagctaggggtgccaggg

SEQ ID NO: 4513248 - DNA, 25 bp, Homo sapien
caatgttaacgtcagatcgctgggt

SEQ ID NO: 4513249 - DNA, 25 bp, Homo sapien
atgttaacgtcagatcgctgggtac

SEQ ID NO: 4513250 - DNA, 25 bp, Homo sapien
acagccaatgttaacgtcagatcgc

SEQ ID NO: 4513251 - DNA, 25 bp, Homo sapien
gccaatgttaacgtcagatcgctgg

SEQ ID NO: 4513252 - DNA, 25 bp, Homo sapien
cctttatgaaatatctttcaactgc

SEQ ID NO: 4513253 - DNA, 25 bp, Homo sapien
ttcctttatgaaatatctttcaact

SEQ ID NO: 4513254 - DNA, 25 bp, Homo sapien
tatgaaatatctttcaactgcattt

SEQ ID NO: 4513255 - DNA, 25 bp, Homo sapien
tttatgaaatatctttcaactgcat

SEQ ID NO: 4513256 - DNA, 25 bp, Homo sapien
acagaacaaaaattaataggagaca

SEQ ID NO: 4513257 - DNA, 25 bp, Homo sapien
caacagaacaaaaattaataggaga

SEQ ID NO: 4513258 - DNA, 25 bp, Homo sapien
gagatgccatacaaacttgagtcaa

SEQ ID NO: 4513259 - DNA, 25 bp, Homo sapien
gatggtatgcatgtgttaatatgtt

SEQ ID NO: 4513260 - DNA, 25 bp, Homo sapien
tgatggtatgcatgtgttaatatgt

SEQ ID NO: 4513261 - DNA, 25 bp, Homo sapien
gtgatggtatgcatgtgttaatatg

SEQ ID NO: 4513262 - DNA, 25 bp, Homo sapien
tagtgatggtatgcatgtgttaata

SEQ ID NO: 4513263 - DNA, 25 bp, Homo sapien
gcagaggatgtaatctcatgtcaat

SEQ ID NO: 4513264 - DNA, 25 bp, Homo sapien
ggcagaggatgtaatctcatgtcaa

SEQ ID NO: 4513265 - DNA, 25 bp, Homo sapien
ttttagcctcctcaagatttttaca

SEQ ID NO: 4513266 - DNA, 25 bp, Homo sapien
tttagcctcctcaagatttttacat

SEQ ID NO: 4513267 - DNA, 25 bp, Homo sapien
tgttgaataccttgattgttttgag

SEQ ID NO: 4513268 - DNA, 25 bp, Homo sapien
ttgaataccttgattgttttgagtc

SEQ ID NO: 4513269 - DNA, 25 bp, Homo sapien
cagcacccagatataaatccacata

SEQ ID NO: 4513270 - DNA, 25 bp, Homo sapien
atggctgctacatctgctccaggca

SEQ ID NO: 4513271 - DNA, 25 bp, Homo sapien
ctcagactgttggaacctggccatc

SEQ ID NO: 4513272 - DNA, 25 bp, Homo sapien
gacagtttggccttgcctggcgtgc

SEQ ID NO: 4513273 - DNA, 25 bp, Homo sapien
acaggctccagctaccgatacgctg

SEQ ID NO: 4513274 - DNA, 25 bp, Homo sapien
ttaggcaaagttctaagtccggtca

SEQ ID NO: 4513275 - DNA, 25 bp, Homo sapien
aggcaaagttctaagtccggtcagg

SEQ ID NO: 4513276 - DNA, 25 bp, Homo sapien
gcattaggcaaagttctaagtccgg

SEQ ID NO: 4513277 - DNA, 25 bp, Homo sapien
gcaaagttctaagtccggtcagggc

SEQ ID NO: 4513278 - DNA, 25 bp, Homo sapien
ctgtgtggccccatttgtagcacag

SEQ ID NO: 4513279 - DNA, 25 bp, Homo sapien
caagctggcgcaaagagaaaccagc

SEQ ID NO: 4513280 - DNA, 25 bp, Homo sapien
ccccatttgtagcacagttgttgta

SEQ ID NO: 4513281 - DNA, 25 bp, Homo sapien
gtgtggccccatttgtagcacagtt

SEQ ID NO: 4513282 - DNA, 25 bp, Homo sapien
gccggtcagggtacatcacttcttc

SEQ ID NO: 4513283 - DNA, 25 bp, Homo sapien
gtcagggtacatcacttcttctacc

SEQ ID NO: 4513284 - DNA, 25 bp, Homo sapien
tgccggtcagggtacatcacttctt

SEQ ID NO: 4513285 - DNA, 25 bp, Homo sapien
cggtcagggtacatcacttcttcta

SEQ ID NO: 4513286 - DNA, 25 bp, Homo sapien
tttgtagcacagctgttgtactgag

SEQ ID NO: 4513287 - DNA, 25 bp, Homo sapien
tgtgtggttccatttgtagcacagc

SEQ ID NO: 4513288 - DNA, 25 bp, Homo sapien
acagctgttgtactgaggcttgtgc

SEQ ID NO: 4513289 - DNA, 25 bp, Homo sapien
tagcacagctgttgtactgaggctt

SEQ ID NO: 4513290 - DNA, 25 bp, Homo sapien
ctcactcacagctggtcggtgtaca

SEQ ID NO: 4513291 - DNA, 25 bp, Homo sapien
tcacttcttctacccaagaggtaga

SEQ ID NO: 4513292 - DNA, 25 bp, Homo sapien
tcttctacccaagaggtagagcccc

SEQ ID NO: 4513293 - DNA, 25 bp, Homo sapien
gctggtcggtgtacatcacttcttc

SEQ ID NO: 4513294 - DNA, 25 bp, Homo sapien
tgcttttcctcaggcctctgctcca

SEQ ID NO: 4513295 - DNA, 25 bp, Homo sapien
gcttttcctcaggcctctgctccat

SEQ ID NO: 4513296 - DNA, 25 bp, Homo sapien
ctgcttttcctcaggcctctgctcc

SEQ ID NO: 4513297 - DNA, 25 bp, Homo sapien
cccacaatttggagcattctttgga

SEQ ID NO: 4513298 - DNA, 25 bp, Homo sapien
gcttttttgcagacttatgtatgtg

SEQ ID NO: 4513299 - DNA, 25 bp, Homo sapien
gatttgatcctctcgtcatgctgtc

SEQ ID NO: 4513300 - DNA, 25 bp, Homo sapien
ttttgagcctatgtagggcactgca

SEQ ID NO: 4513301 - DNA, 25 bp, Homo sapien
ttattggtatagtctgctttgtcag

SEQ ID NO: 4513302 - DNA, 25 bp, Homo sapien
gtctgatggaattccctttgcaggt

SEQ ID NO: 4513303 - DNA, 25 bp, Homo sapien
taagtctgatggaattccctttgca

SEQ ID NO: 4513304 - DNA, 25 bp, Homo sapien
ctgctaagtctgatggaattccctt

SEQ ID NO: 4513305 - DNA, 25 bp, Homo sapien
gctaagtctgatggaattccctttg

SEQ ID NO: 4513306 - DNA, 25 bp, Homo sapien
tcacgcaagagatcttcttctttct

SEQ ID NO: 4513307 - DNA, 25 bp, Homo sapien
ggttttcgttaatgcttcttcattc

SEQ ID NO: 4513308 - DNA, 25 bp, Homo sapien
gctgttttcacgcaagagatcttct

SEQ ID NO: 4513309 - DNA, 25 bp, Homo sapien
gttttcacgcaagagatcttcttct

SEQ ID NO: 4513310 - DNA, 25 bp, Homo sapien
ttccttttcagccacttctatctgc

SEQ ID NO: 4513311 - DNA, 25 bp, Homo sapien
ctgcttttgtttattagtcagaatc

SEQ ID NO: 4513312 - DNA, 25 bp, Homo sapien
cagaaagttgtttctgggtatcatt

SEQ ID NO: 4513313 - DNA, 25 bp, Homo sapien
ttgtttattagtcagaatctcatct

SEQ ID NO: 4513314 - DNA, 25 bp, Homo sapien
ggtaatcccacaggattacttccat

SEQ ID NO: 4513315 - DNA, 25 bp, Homo sapien
atcccacaggattacttccatgctt

SEQ ID NO: 4513316 - DNA, 25 bp, Homo sapien
ctggtaatcccacaggattacttcc

SEQ ID NO: 4513317 - DNA, 25 bp, Homo sapien
aggttttctggtaatcccacaggat

SEQ ID NO: 4513318 - DNA, 25 bp, Homo sapien
tggaagtttgatattaaggatggtt

SEQ ID NO: 4513319 - DNA, 25 bp, Homo sapien
gagtggaagtttgatattaaggatg

SEQ ID NO: 4513320 - DNA, 25 bp, Homo sapien
cttgagtggaagtttgatattaagg

SEQ ID NO: 4513321 - DNA, 25 bp, Homo sapien
aagtttgatattaaggatggttatc

SEQ ID NO: 4513322 - DNA, 25 bp, Homo sapien
tctatcacagtccttatttatttct

SEQ ID NO: 4513323 - DNA, 25 bp, Homo sapien
tatcacagtccttatttatttctgg

SEQ ID NO: 4513324 - DNA, 25 bp, Homo sapien
ctctctatcacagtccttatttatt

SEQ ID NO: 4513325 - DNA, 25 bp, Homo sapien
tcacagtccttatttatttctggtt

SEQ ID NO: 4513326 - DNA, 25 bp, Homo sapien
gactttaagcctttgtgactcttcc

SEQ ID NO: 4513327 - DNA, 25 bp, Homo sapien
ctctggctggctattttcactgact

SEQ ID NO: 4513328 - DNA, 25 bp, Homo sapien
ctggctggctattttcactgacttt

SEQ ID NO: 4513329 - DNA, 25 bp, Homo sapien
tttcactgactttaagcctttgtga

SEQ ID NO: 4513330 - DNA, 25 bp, Homo sapien
tacaggcacacaccatcatgcccag

SEQ ID NO: 4513331 - DNA, 25 bp, Homo sapien
tctcagtctcctgagaagctgtgat

SEQ ID NO: 4513332 - DNA, 25 bp, Homo sapien
ctgtctcagtctcctgagaagctgt

SEQ ID NO: 4513333 - DNA, 25 bp, Homo sapien
acaccatcatgcccagctaattttt

SEQ ID NO: 4513334 - DNA, 25 bp, Homo sapien
catgggcaggtgaaaaccttagaat

SEQ ID NO: 4513335 - DNA, 25 bp, Homo sapien
tatagatgactactgcaaaagcttc

SEQ ID NO: 4513336 - DNA, 25 bp, Homo sapien
aatcccagcaaactataggccacag

SEQ ID NO: 4513337 - DNA, 25 bp, Homo sapien
agttttataggagctcagtcatgcc

SEQ ID NO: 4513338 - DNA, 25 bp, Homo sapien
ttcactcggcatcctgtcttttgca

SEQ ID NO: 4513339 - DNA, 25 bp, Homo sapien
cttttgcagttgttgctcttcctgc

SEQ ID NO: 4513340 - DNA, 25 bp, Homo sapien
tgcaaagttcactcggcatcctgtc

SEQ ID NO: 4513341 - DNA, 25 bp, Homo sapien
aagttcactcggcatcctgtctttt

SEQ ID NO: 4513342 - DNA, 25 bp, Homo sapien
ctggattgctgttttcagaagagat

SEQ ID NO: 4513343 - DNA, 25 bp, Homo sapien
ctttatagtcagaaagtaattcaca

SEQ ID NO: 4513344 - DNA, 25 bp, Homo sapien
gttttcagaagagatttttagcatc

SEQ ID NO: 4513345 - DNA, 25 bp, Homo sapien
tttctttatagtcagaaagtaattc

SEQ ID NO: 4513346 - DNA, 25 bp, Homo sapien
tgctgcctccttatgcagaagccgt

SEQ ID NO: 4513347 - DNA, 25 bp, Homo sapien
atgcagaagccgtgctaactttctc

SEQ ID NO: 4513348 - DNA, 25 bp, Homo sapien
gaagccgtgctaactttctctgtat

SEQ ID NO: 4513349 - DNA, 25 bp, Homo sapien
gcagaagccgtgctaactttctctg

SEQ ID NO: 4513350 - DNA, 25 bp, Homo sapien
ttaacccacgtgagattctgagaat

SEQ ID NO: 4513351 - DNA, 25 bp, Homo sapien
tctgagaattctcttcaatggcttc

SEQ ID NO: 4513352 - DNA, 25 bp, Homo sapien
gatagatcttgagaagatacatcaa

SEQ ID NO: 4513353 - DNA, 25 bp, Homo sapien
cgtctgtccagatagatcttgagaa

SEQ ID NO: 4513354 - DNA, 25 bp, Homo sapien
tctggccgtctgtccagatagatct

SEQ ID NO: 4513355 - DNA, 25 bp, Homo sapien
acagcatactctctggccgtctgtc

SEQ ID NO: 4513356 - DNA, 25 bp, Homo sapien
ttttgttcatgtacgccaagcaaaa

SEQ ID NO: 4513357 - DNA, 25 bp, Homo sapien
tttttgttcatgtacgccaagcaaa

SEQ ID NO: 4513358 - DNA, 25 bp, Homo sapien
tttgttcatgtacgccaagcaaaag

SEQ ID NO: 4513359 - DNA, 25 bp, Homo sapien
catactcatcttgaatatttccatc

SEQ ID NO: 4513360 - DNA, 25 bp, Homo sapien
atcttgaatatttccatcagcgcca

SEQ ID NO: 4513361 - DNA, 25 bp, Homo sapien
tgtagatagcatagtgtagagcggt

SEQ ID NO: 4513362 - DNA, 25 bp, Homo sapien
atatttccatcagcgccatgttcca

SEQ ID NO: 4513363 - DNA, 25 bp, Homo sapien
taacacacattcatcttcctggcat

SEQ ID NO: 4513364 - DNA, 25 bp, Homo sapien
acattcatcttcctggcattgtacg

SEQ ID NO: 4513365 - DNA, 25 bp, Homo sapien
attcatcttcctggcattgtacggc

SEQ ID NO: 4513366 - DNA, 25 bp, Homo sapien
acacattcatcttcctggcattgta

SEQ ID NO: 4513367 - DNA, 25 bp, Homo sapien
tgacatcgtctgtccagcaggagtt

SEQ ID NO: 4513368 - DNA, 25 bp, Homo sapien
ttgacatcgtctgtccagcaggagt

SEQ ID NO: 4513369 - DNA, 25 bp, Homo sapien
gcaaagtacatctctgcatgccgac

SEQ ID NO: 4513370 - DNA, 25 bp, Homo sapien
aaagtacatctctgcatgccgacat

SEQ ID NO: 4513371 - DNA, 25 bp, Homo sapien
tacagcaaagtacatctctgcatgc

SEQ ID NO: 4513372 - DNA, 25 bp, Homo sapien
ttgatacagcaaagtacatctctgc

SEQ ID NO: 4513373 - DNA, 25 bp, Homo sapien
tccccaagtgcccacgttgctcttg

SEQ ID NO: 4513374 - DNA, 25 bp, Homo sapien
gacgtggtacctcggctccatgaag

SEQ ID NO: 4513375 - DNA, 25 bp, Homo sapien
tgcttgtccctcttgttcatgtcag

SEQ ID NO: 4513376 - DNA, 25 bp, Homo sapien
gctgtcgtcgtagtctccccaagtg

SEQ ID NO: 4513377 - DNA, 25 bp, Homo sapien
caggggaagcagtgacagcaccact

SEQ ID NO: 4513378 - DNA, 25 bp, Homo sapien
gggaagcagtgacagcaccacttgc

SEQ ID NO: 4513379 - DNA, 25 bp, Homo sapien
gaagcagtgacagcaccacttgccc

SEQ ID NO: 4513380 - DNA, 25 bp, Homo sapien
ccacttgcccatcttgctcctgagt

SEQ ID NO: 4513381 - DNA, 25 bp, Homo sapien
cataaaggagttgtcatggtctcca

SEQ ID NO: 4513382 - DNA, 25 bp, Homo sapien
ttcataaaggagttgtcatggtctc

SEQ ID NO: 4513383 - DNA, 25 bp, Homo sapien
agaagtgcccacattgctcgtgccg

SEQ ID NO: 4513384 - DNA, 25 bp, Homo sapien
gtcttcataaaggagttgtcatggt

SEQ ID NO: 4513385 - DNA, 25 bp, Homo sapien
agaggcagcgggcattgaacaaacc

SEQ ID NO: 4513386 - DNA, 25 bp, Homo sapien
acagcagaggcagcgggcattgaac

SEQ ID NO: 4513387 - DNA, 25 bp, Homo sapien
cgggcattgaacaaacctcagccac

SEQ ID NO: 4513388 - DNA, 25 bp, Homo sapien
ggcagcgggcattgaacaaacctca

SEQ ID NO: 4513389 - DNA, 25 bp, Homo sapien
agatcgcgtctaccaaccagtttca

SEQ ID NO: 4513390 - DNA, 25 bp, Homo sapien
cagtcaagggaatgccaaacccagc

SEQ ID NO: 4513391 - DNA, 25 bp, Homo sapien
tcaccaactagcaggaaaccctggg

SEQ ID NO: 4513392 - DNA, 25 bp, Homo sapien
gaatgcgagggaggaaacgccaatc

SEQ ID NO: 4513393 - DNA, 25 bp, Homo sapien
cgcgaagcgaagtgtacccgttaca

SEQ ID NO: 4513394 - DNA, 25 bp, Homo sapien
aggaacgcgaagcgaagtgtacccg

SEQ ID NO: 4513395 - DNA, 25 bp, Homo sapien
atctcctgaattaaacctgatattt

SEQ ID NO: 4513396 - DNA, 25 bp, Homo sapien
tctcctgaattaaacctgatatttt

SEQ ID NO: 4513397 - DNA, 25 bp, Homo sapien
aattcttaccaagacgatatgtgtt

SEQ ID NO: 4513398 - DNA, 25 bp, Homo sapien
ccaagacgatatgtgttgtgttgac

SEQ ID NO: 4513399 - DNA, 25 bp, Homo sapien
ccagctattttaggctctgacactg

SEQ ID NO: 4513400 - DNA, 25 bp, Homo sapien
gctattttaggctctgacactgaaa

SEQ ID NO: 4513401 - DNA, 25 bp, Homo sapien
tatgctgtttaatcctgagaggcga

SEQ ID NO: 4513402 - DNA, 25 bp, Homo sapien
aaacacacactgaatgactttgtgt

SEQ ID NO: 4513403 - DNA, 25 bp, Homo sapien
ctttgtgtgacaagctgtgaagttt

SEQ ID NO: 4513404 - DNA, 25 bp, Homo sapien
gagcagctgtcgctggtaattctaa

SEQ ID NO: 4513405 - DNA, 25 bp, Homo sapien
tacactgtattaggtgtaactggaa

SEQ ID NO: 4513406 - DNA, 25 bp, Homo sapien
gaatttctggaatgtgccgaagtac

SEQ ID NO: 4513407 - DNA, 25 bp, Homo sapien
tactagtgggtaacttagatttgga

SEQ ID NO: 4513408 - DNA, 25 bp, Homo sapien
taggtgtaactggaaaactgagagg

SEQ ID NO: 4513409 - DNA, 25 bp, Homo sapien
gagctgactgaagggccgctgcggt

SEQ ID NO: 4513410 - DNA, 25 bp, Homo sapien
ttcctgcggcccagagactgcttga

SEQ ID NO: 4513411 - DNA, 25 bp, Homo sapien
ggaaggaaaagcaggcgctggtgcg

SEQ ID NO: 4513412 - DNA, 25 bp, Homo sapien
cgccgggaaggttggcgctggcagc

SEQ ID NO: 4513413 - DNA, 25 bp, Homo sapien
tccaccggccggcacgcaaggtgag

SEQ ID NO: 4513414 - DNA, 25 bp, Homo sapien
aggatgcaccgtcacctatggctcg

SEQ ID NO: 4513415 - DNA, 25 bp, Homo sapien
ggaggatgcaccgtcacctatggct

SEQ ID NO: 4513416 - DNA, 25 bp, Homo sapien
cgcaaggtgagctctgcgtgcgccc

SEQ ID NO: 4513417 - DNA, 25 bp, Homo sapien
gctggcgttgcgctctgctcggact

SEQ ID NO: 4513418 - DNA, 25 bp, Homo sapien
tggaccacctggaaggcccgggtca

SEQ ID NO: 4513419 - DNA, 25 bp, Homo sapien
gcacatgggtcagccggtaggaact

SEQ ID NO: 4513420 - DNA, 25 bp, Homo sapien
gccgtaggagcgagatggaccacct

SEQ ID NO: 4513421 - DNA, 25 bp, Homo sapien
ggtttcccgcatgcagcgccgcgtg

SEQ ID NO: 4513422 - DNA, 25 bp, Homo sapien
ttttgtccgggtcaggcagaccagc

SEQ ID NO: 4513423 - DNA, 25 bp, Homo sapien
tggcgagcctctgtggaggtcaggg

SEQ ID NO: 4513424 - DNA, 25 bp, Homo sapien
tcaggggaccgtagcctctcctggg

SEQ ID NO: 4513425 - DNA, 25 bp, Homo sapien
tctgcttggatttgatacggtggtt

SEQ ID NO: 4513426 - DNA, 25 bp, Homo sapien
ggtggttagtgcagcccatagtcca

SEQ ID NO: 4513427 - DNA, 25 bp, Homo sapien
ggaaaattccttgcgtgcagctgtg

SEQ ID NO: 4513428 - DNA, 25 bp, Homo sapien
taggttacagcagggaaggacagcc

SEQ ID NO: 4513429 - DNA, 25 bp, Homo sapien
aaagcctgccattgtctttgagatt

SEQ ID NO: 4513430 - DNA, 25 bp, Homo sapien
caggtgctgctaatggtttcgcctc

SEQ ID NO: 4513431 - DNA, 25 bp, Homo sapien
caaaagcctgccattgtctttgaga

SEQ ID NO: 4513432 - DNA, 25 bp, Homo sapien
tggtttcgcctctggcccttctgta

SEQ ID NO: 4513433 - DNA, 25 bp, Homo sapien
ttgtacatgcccaccgagaaactca

SEQ ID NO: 4513434 - DNA, 25 bp, Homo sapien
tgcccatggcaacgttgaggaggtt

SEQ ID NO: 4513435 - DNA, 25 bp, Homo sapien
cttgtacatgcccaccgagaaactc

SEQ ID NO: 4513436 - DNA, 25 bp, Homo sapien
cggtcatatgcccatggcaacgttg

SEQ ID NO: 4513437 - DNA, 25 bp, Homo sapien
ggctcttgcctctgcaaagatcctt

SEQ ID NO: 4513438 - DNA, 25 bp, Homo sapien
tgaaggtaccaggatctcctgtagt

SEQ ID NO: 4513439 - DNA, 25 bp, Homo sapien
tgcctctgcaaagatccttaggtag

SEQ ID NO: 4513440 - DNA, 25 bp, Homo sapien
aaggtaccaggatctcctgtagttc

SEQ ID NO: 4513441 - DNA, 25 bp, Homo sapien
tcaggctactactaacaggaaaact

SEQ ID NO: 4513442 - DNA, 25 bp, Homo sapien
ccacagtgtaaaagatcaggctact

SEQ ID NO: 4513443 - DNA, 25 bp, Homo sapien
gaaaaacagtcctctgattatggag

SEQ ID NO: 4513444 - DNA, 25 bp, Homo sapien
ttactgacatgcaaattgatctggg

SEQ ID NO: 4513445 - DNA, 25 bp, Homo sapien
tcaggtagaaagatgcctcatattt

SEQ ID NO: 4513446 - DNA, 25 bp, Homo sapien
gattcaaagagctgtggagacaaga

SEQ ID NO: 4513447 - DNA, 25 bp, Homo sapien
cctcctcaggtagaaagatgcctca

SEQ ID NO: 4513448 - DNA, 25 bp, Homo sapien
caccctcctcaggtagaaagatgcc

SEQ ID NO: 4513449 - DNA, 25 bp, Homo sapien
atttgatgttgagtatgggttgagt

SEQ ID NO: 4513450 - DNA, 25 bp, Homo sapien
tgatattgagaaaggtgtgagctcc

SEQ ID NO: 4513451 - DNA, 25 bp, Homo sapien
gaaaggtgtgagctcctggtaaaag

SEQ ID NO: 4513452 - DNA, 25 bp, Homo sapien
tatgggttgagtgtctgttaaaagc

SEQ ID NO: 4513453 - DNA, 25 bp, Homo sapien
ataaaagctttgctgcattctttac

SEQ ID NO: 4513454 - DNA, 25 bp, Homo sapien
gataaaagctttgctgcattcttta

SEQ ID NO: 4513455 - DNA, 25 bp, Homo sapien
tagataaaagctttgctgcattctt

SEQ ID NO: 4513456 - DNA, 25 bp, Homo sapien
ctagataaaagctttgctgcattct

SEQ ID NO: 4513457 - DNA, 25 bp, Homo sapien
gagtaaggtgtgaagctctgttaaa

SEQ ID NO: 4513458 - DNA, 25 bp, Homo sapien
cacattttttgacacttgaaaggtt

SEQ ID NO: 4513459 - DNA, 25 bp, Homo sapien
tttgccacattttttgacacttgaa

SEQ ID NO: 4513460 - DNA, 25 bp, Homo sapien
tctttatgtgtgaagtgtttctctc

SEQ ID NO: 4513461 - DNA, 25 bp, Homo sapien
gtatgagcttctattaaaggctttg

SEQ ID NO: 4513462 - DNA, 25 bp, Homo sapien
ctctgatgttaagtaaggtatgagc

SEQ ID NO: 4513463 - DNA, 25 bp, Homo sapien
ctgatgttaagtaaggtatgagcct

SEQ ID NO: 4513464 - DNA, 25 bp, Homo sapien
tctgatgttaagtaaggtatgagcc

SEQ ID NO: 4513465 - DNA, 25 bp, Homo sapien
ctgttaaaagctttgccacattcct

SEQ ID NO: 4513466 - DNA, 25 bp, Homo sapien
gttaaaagctttgccacattcctta

SEQ ID NO: 4513467 - DNA, 25 bp, Homo sapien
ttaaaagctttgccacattccttac

SEQ ID NO: 4513468 - DNA, 25 bp, Homo sapien
tgttaaaagctttgccacattcctt

SEQ ID NO: 4513469 - DNA, 25 bp, Homo sapien
ttttgaggatgggttagaagtttca

SEQ ID NO: 4513470 - DNA, 25 bp, Homo sapien
tatgtctcttcagatgtgactgact

SEQ ID NO: 4513471 - DNA, 25 bp, Homo sapien
atgtctcttcagatgtgactgacta

SEQ ID NO: 4513472 - DNA, 25 bp, Homo sapien
tgtctcttcagatgtgactgactaa

SEQ ID NO: 4513473 - DNA, 25 bp, Homo sapien
ttgaggattgataaaacactttctc

SEQ ID NO: 4513474 - DNA, 25 bp, Homo sapien
tgataaaacactttctcacattcat

SEQ ID NO: 4513475 - DNA, 25 bp, Homo sapien
ctttgaggattgataaaacactttc

SEQ ID NO: 4513476 - DNA, 25 bp, Homo sapien
gaggattgataaaacactttctcac

SEQ ID NO: 4513477 - DNA, 25 bp, Homo sapien
tcagttatggtatctctcagggaag

SEQ ID NO: 4513478 - DNA, 25 bp, Homo sapien
tgaagatactgatggcggctcagtt

SEQ ID NO: 4513479 - DNA, 25 bp, Homo sapien
aaactggcttcttccctagagagtg

SEQ ID NO: 4513480 - DNA, 25 bp, Homo sapien
aactggcttcttccctagagagtgg

SEQ ID NO: 4513481 - DNA, 25 bp, Homo sapien
acatgtccttttcatgatgagtttc

SEQ ID NO: 4513482 - DNA, 25 bp, Homo sapien
acacacatgtccttttcatgatgag

SEQ ID NO: 4513483 - DNA, 25 bp, Homo sapien
cacacatgtccttttcatgatgagt

SEQ ID NO: 4513484 - DNA, 25 bp, Homo sapien
gattaatgacacacatgtccttttc

SEQ ID NO: 4513485 - DNA, 25 bp, Homo sapien
aaggaccagcagcatgtgctaatac

SEQ ID NO: 4513486 - DNA, 25 bp, Homo sapien
tcgtcttcgtgctgtgctcacaagg

SEQ ID NO: 4513487 - DNA, 25 bp, Homo sapien
gcatttctcgtcttcgtgctgtgct

SEQ ID NO: 4513488 - DNA, 25 bp, Homo sapien
gcatgtgctaatactgactgtctgc

SEQ ID NO: 4513489 - DNA, 25 bp, Homo sapien
gctttggaattcccagcttggtaaa

SEQ ID NO: 4513490 - DNA, 25 bp, Homo sapien
ctccttgcaacataaaaaattggct

SEQ ID NO: 4513491 - DNA, 25 bp, Homo sapien
taatgttttcaaagccttgatctct

SEQ ID NO: 4513492 - DNA, 25 bp, Homo sapien
gatctcttctttttcacatacctga

SEQ ID NO: 4513493 - DNA, 25 bp, Homo sapien
ccggtatgtatctgccacaggtttg

SEQ ID NO: 4513494 - DNA, 25 bp, Homo sapien
aagtgttgccatttatcaaaaggtc

SEQ ID NO: 4513495 - DNA, 25 bp, Homo sapien
tgtgctctggaggaccgaggtatac

SEQ ID NO: 4513496 - DNA, 25 bp, Homo sapien
caaaaggtcatcttccaacagcttt

SEQ ID NO: 4513497 - DNA, 25 bp, Homo sapien
tcactgctgaaggaaaggctatgat

SEQ ID NO: 4513498 - DNA, 25 bp, Homo sapien
cactgctgaaggaaaggctatgatt

SEQ ID NO: 4513499 - DNA, 25 bp, Homo sapien
ggagtagatgatgtaaagcgagcac

SEQ ID NO: 4513500 - DNA, 25 bp, Homo sapien
gttccggagtagatgatgtaaagcg

SEQ ID NO: 4513501 - DNA, 25 bp, Homo sapien
caaaatcattgaaaggccgcatatg

SEQ ID NO: 4513502 - DNA, 25 bp, Homo sapien
tgtgaagagaacatgattggcaata

SEQ ID NO: 4513503 - DNA, 25 bp, Homo sapien
atacagtgagacaatatcaggattc

SEQ ID NO: 4513504 - DNA, 25 bp, Homo sapien
gctgcactgatactgttctgaggga

SEQ ID NO: 4513505 - DNA, 25 bp, Homo sapien
tacagtgagacaatatcaggattca

SEQ ID NO: 4513506 - DNA, 25 bp, Homo sapien
tggagggatgggaattcttgggcac

SEQ ID NO: 4513507 - DNA, 25 bp, Homo sapien
ccatggagggatgggaattcttggg

SEQ ID NO: 4513508 - DNA, 25 bp, Homo sapien
gaaccatggagggatgggaattctt

SEQ ID NO: 4513509 - DNA, 25 bp, Homo sapien
ctattatttgaaccatggagggatg

SEQ ID NO: 4513510 - DNA, 25 bp, Homo sapien
agagtctgaatggagtcagtctgcc

SEQ ID NO: 4513511 - DNA, 25 bp, Homo sapien
tgtctcagaggagagtctgaatgga

SEQ ID NO: 4513512 - DNA, 25 bp, Homo sapien
aggagagtctgaatggagtcagtct

SEQ ID NO: 4513513 - DNA, 25 bp, Homo sapien
tcagaggagagtctgaatggagtca

SEQ ID NO: 4513514 - DNA, 25 bp, Homo sapien
tggccagagccatcgctatagggag

SEQ ID NO: 4513515 - DNA, 25 bp, Homo sapien
ctgtgaccagttccaccaattgctc

SEQ ID NO: 4513516 - DNA, 25 bp, Homo sapien
cactgtgaccagttccaccaattgc

SEQ ID NO: 4513517 - DNA, 25 bp, Homo sapien
caattgctcaaacccatcagccaat

SEQ ID NO: 4513518 - DNA, 25 bp, Homo sapien
accaattgctcaaacccatcagcca

SEQ ID NO: 4513519 - DNA, 25 bp, Homo sapien
tggagatccttgtagtaccctaaac

SEQ ID NO: 4513520 - DNA, 25 bp, Homo sapien
tgtgccttgttgagggattttcatc

SEQ ID NO: 4513521 - DNA, 25 bp, Homo sapien
ctggagatccttgtagtaccctaaa

SEQ ID NO: 4513522 - DNA, 25 bp, Homo sapien
agtgcatgagaccaccgtctatgct

SEQ ID NO: 4513523 - DNA, 25 bp, Homo sapien
ggactgcacagtgcctccgtgatgc

SEQ ID NO: 4513524 - DNA, 25 bp, Homo sapien
actgcacagtgcctccgtgatgcca

SEQ ID NO: 4513525 - DNA, 25 bp, Homo sapien
gaccaccgtctatgctggcactaag

SEQ ID NO: 4513526 - DNA, 25 bp, Homo sapien
tgtcccctttggcttccatcaattc

SEQ ID NO: 4513527 - DNA, 25 bp, Homo sapien
agaaataactgtgtcccctttggct

SEQ ID NO: 4513528 - DNA, 25 bp, Homo sapien
cccctttggcttccatcaattccac

SEQ ID NO: 4513529 - DNA, 25 bp, Homo sapien
gtgtcccctttggcttccatcaatt

SEQ ID NO: 4513530 - DNA, 25 bp, Homo sapien
actactgcttccatgcttgcctggt

SEQ ID NO: 4513531 - DNA, 25 bp, Homo sapien
tactgcttccatgcttgcctggtcc

SEQ ID NO: 4513532 - DNA, 25 bp, Homo sapien
ttccatgcttgcctggtccaaatct

SEQ ID NO: 4513533 - DNA, 25 bp, Homo sapien
gaaactactgcttccatgcttgcct

SEQ ID NO: 4513534 - DNA, 25 bp, Homo sapien
tttgatgttcccataacccagactg

SEQ ID NO: 4513535 - DNA, 25 bp, Homo sapien
aacccagactgtcaggtattctaca

SEQ ID NO: 4513536 - DNA, 25 bp, Homo sapien
cccagactgtcaggtattctacaat

SEQ ID NO: 4513537 - DNA, 25 bp, Homo sapien
gactgtcaggtattctacaatctta

SEQ ID NO: 4513538 - DNA, 25 bp, Homo sapien
catcgttacttcaaccaactgacac

SEQ ID NO: 4513539 - DNA, 25 bp, Homo sapien
gttacttcaaccaactgacacagtt

SEQ ID NO: 4513540 - DNA, 25 bp, Homo sapien
tgccatcgttacttcaaccaactga

SEQ ID NO: 4513541 - DNA, 25 bp, Homo sapien
cttgccatcgttacttcaaccaact

SEQ ID NO: 4513542 - DNA, 25 bp, Homo sapien
gtatgattatctagcaagttcttca

SEQ ID NO: 4513543 - DNA, 25 bp, Homo sapien
atagcatcagataaagagcaggact

SEQ ID NO: 4513544 - DNA, 25 bp, Homo sapien
tgtccttgggagtcaaaaaacttgc

SEQ ID NO: 4513545 - DNA, 25 bp, Homo sapien
ggacaacagctgatccatacatttg

SEQ ID NO: 4513546 - DNA, 25 bp, Homo sapien
ccaggtccttaacattggcccgtat

SEQ ID NO: 4513547 - DNA, 25 bp, Homo sapien
catggaaccctgacattcactgact

SEQ ID NO: 4513548 - DNA, 25 bp, Homo sapien
tgtcagacaaatctgcgcgtcctcc

SEQ ID NO: 4513549 - DNA, 25 bp, Homo sapien
gtgtcagacaaatctgcgcgtcctc

SEQ ID NO: 4513550 - DNA, 25 bp, Homo sapien
agacaaatctgcgcgtcctcctcca

SEQ ID NO: 4513551 - DNA, 25 bp, Homo sapien
cttttctgaaaattctgtgaaacac

SEQ ID NO: 4513552 - DNA, 25 bp, Homo sapien
tgttgctccttttctgaaaattctg

SEQ ID NO: 4513553 - DNA, 25 bp, Homo sapien
ctctgttgctccttttctgaaaatt

SEQ ID NO: 4513554 - DNA, 25 bp, Homo sapien
ttttctgaaaattctgtgaaacacc

SEQ ID NO: 4513555 - DNA, 25 bp, Homo sapien
tgcttgttcccattttgcatgtgta

SEQ ID NO: 4513556 - DNA, 25 bp, Homo sapien
tggcttttggatagttaaagattag

SEQ ID NO: 4513557 - DNA, 25 bp, Homo sapien
taaagattagttttgttgcttgttc

SEQ ID NO: 4513558 - DNA, 25 bp, Homo sapien
ctggctgtcatccattttggctttt

SEQ ID NO: 4513559 - DNA, 25 bp, Homo sapien
caaacttgatgtataataagtactc

SEQ ID NO: 4513560 - DNA, 25 bp, Homo sapien
gatattacacttctaacacgcacat

SEQ ID NO: 4513561 - DNA, 25 bp, Homo sapien
tactcagatattacacttctaacac

SEQ ID NO: 4513562 - DNA, 25 bp, Homo sapien
cttctaacacgcacatatcttggat

SEQ ID NO: 4513563 - DNA, 25 bp, Homo sapien
gaaacaggacatggcaaccagaaca

SEQ ID NO: 4513564 - DNA, 25 bp, Homo sapien
caggacatggcaaccagaacagctt

SEQ ID NO: 4513565 - DNA, 25 bp, Homo sapien
acaggacatggcaaccagaacagct

SEQ ID NO: 4513566 - DNA, 25 bp, Homo sapien
gtttggtctgcccttgttggcaaat

SEQ ID NO: 4513567 - DNA, 25 bp, Homo sapien
ggtctgcccttgttggcaaatcggg

SEQ ID NO: 4513568 - DNA, 25 bp, Homo sapien
gtacagcgccacacttctagtttgg

SEQ ID NO: 4513569 - DNA, 25 bp, Homo sapien
tacagcgccacacttctagtttggt

SEQ ID NO: 4513570 - DNA, 25 bp, Homo sapien
tgcagcaacaatgggctttgatcaa

SEQ ID NO: 4513571 - DNA, 25 bp, Homo sapien
agtctgttgtgcagcaacaatgggc

SEQ ID NO: 4513572 - DNA, 25 bp, Homo sapien
gttgtgcagcaacaatgggctttga

SEQ ID NO: 4513573 - DNA, 25 bp, Homo sapien
tctgttgtgcagcaacaatgggctt

SEQ ID NO: 4513574 - DNA, 25 bp, Homo sapien
agattatcttcaaaaggattatatt

SEQ ID NO: 4513575 - DNA, 25 bp, Homo sapien
tattattaggcttattagacacaga

SEQ ID NO: 4513576 - DNA, 25 bp, Homo sapien
ttttgtccttgcagattatcttcaa

SEQ ID NO: 4513577 - DNA, 25 bp, Homo sapien
taggcttattagacacagaattaag

SEQ ID NO: 4513578 - DNA, 25 bp, Homo sapien
ttcctggagatctgctgtgtcagtt

SEQ ID NO: 4513579 - DNA, 25 bp, Homo sapien
tactggccaatttctccttcctgga

SEQ ID NO: 4513580 - DNA, 25 bp, Homo sapien
ccttcctggagatctgctgtgtcag

SEQ ID NO: 4513581 - DNA, 25 bp, Homo sapien
ctggagatctgctgtgtcagttctg

SEQ ID NO: 4513582 - DNA, 25 bp, Homo sapien
gctccggttctacttcttctccatg

SEQ ID NO: 4513583 - DNA, 25 bp, Homo sapien
ctggctgcctgctccggttctactt

SEQ ID NO: 4513584 - DNA, 25 bp, Homo sapien
aatggcagccaatctcatctcccag

SEQ ID NO: 4513585 - DNA, 25 bp, Homo sapien
cagagcatctcctgtgctggctgcc

SEQ ID NO: 4513586 - DNA, 25 bp, Homo sapien
atctgtcattaaacagattaggcat

SEQ ID NO: 4513587 - DNA, 25 bp, Homo sapien
aatctgtcattaaacagattaggca

SEQ ID NO: 4513588 - DNA, 25 bp, Homo sapien
taatctgtcattaaacagattaggc

SEQ ID NO: 4513589 - DNA, 25 bp, Homo sapien
ctaatctgtcattaaacagattagg

SEQ ID NO: 4513590 - DNA, 25 bp, Homo sapien
agcttggggaagaagggcatgtggc

SEQ ID NO: 4513591 - DNA, 25 bp, Homo sapien
gggaagaagggcatgtggcgcgccc

SEQ ID NO: 4513592 - DNA, 25 bp, Homo sapien
aagaagggcatgtggcgcgcccact

SEQ ID NO: 4513593 - DNA, 25 bp, Homo sapien
agaagggcatgtggcgcgcccactc

SEQ ID NO: 4513594 - DNA, 25 bp, Homo sapien
gaaagctttgttcctgcctgagcca

SEQ ID NO: 4513595 - DNA, 25 bp, Homo sapien
gcaaaactaagatatgggacccaag

SEQ ID NO: 4513596 - DNA, 25 bp, Homo sapien
cagtgccagcaatggtcccaggtta

SEQ ID NO: 4513597 - DNA, 25 bp, Homo sapien
cagaaaggcactcgggacataagca

SEQ ID NO: 4513598 - DNA, 25 bp, Homo sapien
gtagaagaactggagcaggcagcca

SEQ ID NO: 4513599 - DNA, 25 bp, Homo sapien
ggagatgagattggccaacattttg

SEQ ID NO: 4513600 - DNA, 25 bp, Homo sapien
atggagaagtagaagaactggagca

SEQ ID NO: 4513601 - DNA, 25 bp, Homo sapien
gccagcataggagatgctcttgata

SEQ ID NO: 4513602 - DNA, 25 bp, Homo sapien
agaactaatgcagcagatctccagg

SEQ ID NO: 4513603 - DNA, 25 bp, Homo sapien
ttctggcttgaccacacagcgcaga

SEQ ID NO: 4513604 - DNA, 25 bp, Homo sapien
aattagccaagaggatgtacatagg

SEQ ID NO: 4513605 - DNA, 25 bp, Homo sapien
gatgtgttacccatgagggtcagaa

SEQ ID NO: 4513606 - DNA, 25 bp, Homo sapien
tatttttatggcatgagttgtattg

SEQ ID NO: 4513607 - DNA, 25 bp, Homo sapien
gaggtgtgatacttttaatgtgctg

SEQ ID NO: 4513608 - DNA, 25 bp, Homo sapien
cctgcatctcaaggataaatctctc

SEQ ID NO: 4513609 - DNA, 25 bp, Homo sapien
tgtgagtatttaagtttgttgagaa

SEQ ID NO: 4513610 - DNA, 25 bp, Homo sapien
gctgctgatcaacaggctccagaaa

SEQ ID NO: 4513611 - DNA, 25 bp, Homo sapien
cgggtaaaacggtggtagctgtgca

SEQ ID NO: 4513612 - DNA, 25 bp, Homo sapien
gtaaaacggtggtagctgtgcagct

SEQ ID NO: 4513613 - DNA, 25 bp, Homo sapien
ctgctgatcaacaggctccagaaac

SEQ ID NO: 4513614 - DNA, 25 bp, Homo sapien
gccaccaagtggtaggtggccagcc

SEQ ID NO: 4513615 - DNA, 25 bp, Homo sapien
caccaagtggtaggtggccagccct

SEQ ID NO: 4513616 - DNA, 25 bp, Homo sapien
ccaagtggtaggtggccagccctac

SEQ ID NO: 4513617 - DNA, 25 bp, Homo sapien
ctgcgttggccaccaagtggtaggt

SEQ ID NO: 4513618 - DNA, 25 bp, Homo sapien
gctccatggctgtttggtggtggct

SEQ ID NO: 4513619 - DNA, 25 bp, Homo sapien
cgggctccatggctgtttggtggtg

SEQ ID NO: 4513620 - DNA, 25 bp, Homo sapien
tatgcagcgggctccatggctgttt

SEQ ID NO: 4513621 - DNA, 25 bp, Homo sapien
ttccatgagttttctggggccacca

SEQ ID NO: 4513622 - DNA, 25 bp, Homo sapien
cacacattccgccccagtgtgtggg

SEQ ID NO: 4513623 - DNA, 25 bp, Homo sapien
ccctctgcgcaggtcagcttcaatg

SEQ ID NO: 4513624 - DNA, 25 bp, Homo sapien
ttttcctctgggttaatgggattca

SEQ ID NO: 4513625 - DNA, 25 bp, Homo sapien
tgggattcatctcctggccccagat

SEQ ID NO: 4513626 - DNA, 25 bp, Homo sapien
tggacattttttgctgcggcaactg

SEQ ID NO: 4513627 - DNA, 25 bp, Homo sapien
acattttttgctgcggcaactgtgg

SEQ ID NO: 4513628 - DNA, 25 bp, Homo sapien
ctatggacattttttgctgcggcaa

SEQ ID NO: 4513629 - DNA, 25 bp, Homo sapien
tatggacattttttgctgcggcaac

SEQ ID NO: 4513630 - DNA, 25 bp, Homo sapien
cttcctgagggttactgctgagtcc

SEQ ID NO: 4513631 - DNA, 25 bp, Homo sapien
gggatcacagaacagcacctctgct

SEQ ID NO: 4513632 - DNA, 25 bp, Homo sapien
gtttcattgtgacgaagcctcctat

SEQ ID NO: 4513633 - DNA, 25 bp, Homo sapien
ccttgaagatcccaacaggagccag

SEQ ID NO: 4513634 - DNA, 25 bp, Homo sapien
tcctgatgccgtgatgcttggtggc

SEQ ID NO: 4513635 - DNA, 25 bp, Homo sapien
ctccagtcctgctgcgccttgaggg

SEQ ID NO: 4513636 - DNA, 25 bp, Homo sapien
ccttcctgatgccgtgatgcttggt

SEQ ID NO: 4513637 - DNA, 25 bp, Homo sapien
ctgctgcgccttgaggggaacccag

SEQ ID NO: 4513638 - DNA, 25 bp, Homo sapien
agtgtgcatccccatatccgtcctc

SEQ ID NO: 4513639 - DNA, 25 bp, Homo sapien
tcatggagtgtgtcctggtccatgt

SEQ ID NO: 4513640 - DNA, 25 bp, Homo sapien
tccatctccaaggagaggctcctca

SEQ ID NO: 4513641 - DNA, 25 bp, Homo sapien
tccatgtggtccacgtgtctccatc

SEQ ID NO: 4513642 - DNA, 25 bp, Homo sapien
tgggaaggtcatccagtccagactc

SEQ ID NO: 4513643 - DNA, 25 bp, Homo sapien
actgaggctcaaagtgctggtgcca

SEQ ID NO: 4513644 - DNA, 25 bp, Homo sapien
taaggcctcgtggtgactgctgtct

SEQ ID NO: 4513645 - DNA, 25 bp, Homo sapien
tgctcgggaaaggtcagaggtcact

SEQ ID NO: 4513646 - DNA, 25 bp, Homo sapien
taatctgcaacgtgcatgagggcat

SEQ ID NO: 4513647 - DNA, 25 bp, Homo sapien
ttgcaagtgcaaggccagtggagtt

SEQ ID NO: 4513648 - DNA, 25 bp, Homo sapien
caaggccagtggagttaatctgcaa

SEQ ID NO: 4513649 - DNA, 25 bp, Homo sapien
agcctccagcgttgcaagtgcaagg

SEQ ID NO: 4513650 - DNA, 25 bp, Homo sapien
ttctccaatgtggcctgcacagccc

SEQ ID NO: 4513651 - DNA, 25 bp, Homo sapien
tccaatgtggcctgcacagcccagg

SEQ ID NO: 4513652 - DNA, 25 bp, Homo sapien
ctccaatgtggcctgcacagcccag

SEQ ID NO: 4513653 - DNA, 25 bp, Homo sapien
cttctccaatgtggcctgcacagcc

SEQ ID NO: 4513654 - DNA, 25 bp, Homo sapien
caagcttggtggtcttgcacgggca

SEQ ID NO: 4513655 - DNA, 25 bp, Homo sapien
cttggtggtcttgcacgggcactga

SEQ ID NO: 4513656 - DNA, 25 bp, Homo sapien
gacacaggccctgacacaatgtggg

SEQ ID NO: 4513657 - DNA, 25 bp, Homo sapien
tcccagtgggtccatctgtttaggg

SEQ ID NO: 4513658 - DNA, 25 bp, Homo sapien
ggtggtcctgataagtttgcacatt

SEQ ID NO: 4513659 - DNA, 25 bp, Homo sapien
gtggtggtcctgataagtttgcaca

SEQ ID NO: 4513660 - DNA, 25 bp, Homo sapien
cctgataagtttgcacatttgtggc

SEQ ID NO: 4513661 - DNA, 25 bp, Homo sapien
aagtttgcacatttgtggctgtccc

SEQ ID NO: 4513662 - DNA, 25 bp, Homo sapien
tagccttcttccatgcacagggttc

SEQ ID NO: 4513663 - DNA, 25 bp, Homo sapien
agtttgtacagcactctcctatatg

SEQ ID NO: 4513664 - DNA, 25 bp, Homo sapien
attatacacaggagaaagtgttttg

SEQ ID NO: 4513665 - DNA, 25 bp, Homo sapien
ggtttcattatacacaggagaaagt

SEQ ID NO: 4513666 - DNA, 25 bp, Homo sapien
atacacaggagaaagtgttttgaaa

SEQ ID NO: 4513667 - DNA, 25 bp, Homo sapien
tcattatacacaggagaaagtgttt

SEQ ID NO: 4513668 - DNA, 25 bp, Homo sapien
gacgtataaaacaatttcgtgcatg

SEQ ID NO: 4513669 - DNA, 25 bp, Homo sapien
ctggacgtataaaacaatttcgtgc

SEQ ID NO: 4513670 - DNA, 25 bp, Homo sapien
ggacgtataaaacaatttcgtgcat

SEQ ID NO: 4513671 - DNA, 25 bp, Homo sapien
tggacgtataaaacaatttcgtgca

SEQ ID NO: 4513672 - DNA, 25 bp, Homo sapien
catactccagaccaatacttctcat

SEQ ID NO: 4513673 - DNA, 25 bp, Homo sapien
atcatactccagaccaatacttctc

SEQ ID NO: 4513674 - DNA, 25 bp, Homo sapien
tcatactccagaccaatacttctca

SEQ ID NO: 4513675 - DNA, 25 bp, Homo sapien
tgtgggcaccgttgcattgggctca

SEQ ID NO: 4513676 - DNA, 25 bp, Homo sapien
catagttggattcatgtggtgcgtc

SEQ ID NO: 4513677 - DNA, 25 bp, Homo sapien
gcaccgttgcattgggctcagccac

SEQ ID NO: 4513678 - DNA, 25 bp, Homo sapien
ttggattcatgtggtgcgtctttaa

SEQ ID NO: 4513679 - DNA, 25 bp, Homo sapien
cgaggtagtagcagtctggtggaat

SEQ ID NO: 4513680 - DNA, 25 bp, Homo sapien
gtagtagcagtctggtggaatgtag

SEQ ID NO: 4513681 - DNA, 25 bp, Homo sapien
gccgaggtagtagcagtctggtgga

SEQ ID NO: 4513682 - DNA, 25 bp, Homo sapien
gtctggtggaatgtaggggccatcc

SEQ ID NO: 4513683 - DNA, 25 bp, Homo sapien
agccagccgggaaactgaaggcctt

SEQ ID NO: 4513684 - DNA, 25 bp, Homo sapien
cagccgggaaactgaaggcctttgc

SEQ ID NO: 4513685 - DNA, 25 bp, Homo sapien
ccagccgggaaactgaaggcctttg

SEQ ID NO: 4513686 - DNA, 25 bp, Homo sapien
acaagggacggccttgagaacaccg

SEQ ID NO: 4513687 - DNA, 25 bp, Homo sapien
caagggacggccttgagaacaccgg

SEQ ID NO: 4513688 - DNA, 25 bp, Homo sapien
ctcggaggaggcgtagtgccacaag

SEQ ID NO: 4513689 - DNA, 25 bp, Homo sapien
aggaggcgtagtgccacaagggacg

SEQ ID NO: 4513690 - DNA, 25 bp, Homo sapien
ccctaagggtgacccgcacctctgc

SEQ ID NO: 4513691 - DNA, 25 bp, Homo sapien
gccctaagggtgacccgcacctctg

SEQ ID NO: 4513692 - DNA, 25 bp, Homo sapien
ctggagccaggagcgcccagagccc

SEQ ID NO: 4513693 - DNA, 25 bp, Homo sapien
taagggtgacccgcacctctgcctg

SEQ ID NO: 4513694 - DNA, 25 bp, Homo sapien
tcgcaggcaatctccgtgtcccatg

SEQ ID NO: 4513695 - DNA, 25 bp, Homo sapien
tcagacgtgacgatatgggggtgct

SEQ ID NO: 4513696 - DNA, 25 bp, Homo sapien
aggtgcagccgtaggaggggcaaag

SEQ ID NO: 4513697 - DNA, 25 bp, Homo sapien
ggggcaaagccctcgcaggcaatct

SEQ ID NO: 4513698 - DNA, 25 bp, Homo sapien
caaagttgagtatccatctccagag

SEQ ID NO: 4513699 - DNA, 25 bp, Homo sapien
tgagttttgtgactactgaggacac

SEQ ID NO: 4513700 - DNA, 25 bp, Homo sapien
tccagagatgcattcaggatacatc

SEQ ID NO: 4513701 - DNA, 25 bp, Homo sapien
gatacatccggttctccttgcagct

SEQ ID NO: 4513702 - DNA, 25 bp, Homo sapien
gaaatgagaatgcaaacatctgcct

SEQ ID NO: 4513703 - DNA, 25 bp, Homo sapien
atgagaatgcaaacatctgcctcca

SEQ ID NO: 4513704 - DNA, 25 bp, Homo sapien
attccatgtcccgtggtccctctat

SEQ ID NO: 4513705 - DNA, 25 bp, Homo sapien
aacgattccatgtcccgtggtccct

SEQ ID NO: 4513706 - DNA, 25 bp, Homo sapien
catgggcagctttagaatgcctgct

SEQ ID NO: 4513707 - DNA, 25 bp, Homo sapien
cagctttagaatgcctgctactccg

SEQ ID NO: 4513708 - DNA, 25 bp, Homo sapien
gggctcatgggcagctttagaatgc

SEQ ID NO: 4513709 - DNA, 25 bp, Homo sapien
gctttagaatgcctgctactccggg

SEQ ID NO: 4513710 - DNA, 25 bp, Homo sapien
ccaggagctgtactgagcgatggct

SEQ ID NO: 4513711 - DNA, 25 bp, Homo sapien
gagctgtactgagcgatggctgcac

SEQ ID NO: 4513712 - DNA, 25 bp, Homo sapien
tccccaggagctgtactgagcgatg

SEQ ID NO: 4513713 - DNA, 25 bp, Homo sapien
tgtccccaggagctgtactgagcga

SEQ ID NO: 4513714 - DNA, 25 bp, Homo sapien
ggctctgcagggctccccccgagca

SEQ ID NO: 4513715 - DNA, 25 bp, Homo sapien
agagaggtgcccagtgagggctctg

SEQ ID NO: 4513716 - DNA, 25 bp, Homo sapien
ctctgcagggctccccccgagcagg

SEQ ID NO: 4513717 - DNA, 25 bp, Homo sapien
gggcccagtgcctctgagagaggtg

SEQ ID NO: 4513718 - DNA, 25 bp, Homo sapien
ctggttgagcccctgatgcaattga

SEQ ID NO: 4513719 - DNA, 25 bp, Homo sapien
ttccagccgcaccaggacaagcttc

SEQ ID NO: 4513720 - DNA, 25 bp, Homo sapien
gagaaggacccagctggttgagccc

SEQ ID NO: 4513721 - DNA, 25 bp, Homo sapien
ctgatgcaattgagggcaggcccct

SEQ ID NO: 4513722 - DNA, 25 bp, Homo sapien
catacatttgtacgtttgtgggata

SEQ ID NO: 4513723 - DNA, 25 bp, Homo sapien
tggcccctagcatgtcccataagtg

SEQ ID NO: 4513724 - DNA, 25 bp, Homo sapien
cccctagcatgtcccataagtggag

SEQ ID NO: 4513725 - DNA, 25 bp, Homo sapien
tagcatgtcccataagtggagaggg

SEQ ID NO: 4513726 - DNA, 25 bp, Homo sapien
tgctggcccctagcatgtcccataa

SEQ ID NO: 4513727 - DNA, 25 bp, Homo sapien
tctgcttcgagaaggtggatgtctg

SEQ ID NO: 4513728 - DNA, 25 bp, Homo sapien
tggtagatgtcatgccccatcccgg

SEQ ID NO: 4513729 - DNA, 25 bp, Homo sapien
ccgggacttggtagaggccttgctg

SEQ ID NO: 4513730 - DNA, 25 bp, Homo sapien
tcccagctgcgtgtgtccatggacg

SEQ ID NO: 4513731 - DNA, 25 bp, Homo sapien
cctgctggcttcttatcatacatac

SEQ ID NO: 4513732 - DNA, 25 bp, Homo sapien
ggccctgctggcttcttatcataca

SEQ ID NO: 4513733 - DNA, 25 bp, Homo sapien
caggctgaggctgggccggggtggc

SEQ ID NO: 4513734 - DNA, 25 bp, Homo sapien
tgaggctgggccggggtggcgggag

SEQ ID NO: 4513735 - DNA, 25 bp, Homo sapien
gcccttgcggaaggagagctcatcc

SEQ ID NO: 4513736 - DNA, 25 bp, Homo sapien
gcatgatgccctggcgcccgtgcag

SEQ ID NO: 4513737 - DNA, 25 bp, Homo sapien
caccgtcatgatgtcgcccttgcgg

SEQ ID NO: 4513738 - DNA, 25 bp, Homo sapien
caagatcttgaggtggttcccaggc

SEQ ID NO: 4513739 - DNA, 25 bp, Homo sapien
ctttggccagcacattcaggtggtt

SEQ ID NO: 4513740 - DNA, 25 bp, Homo sapien
tttggccagcacattcaggtggttc

SEQ ID NO: 4513741 - DNA, 25 bp, Homo sapien
tggccagcacattcaggtggttcat

SEQ ID NO: 4513742 - DNA, 25 bp, Homo sapien
ttggccagcacattcaggtggttca

SEQ ID NO: 4513743 - DNA, 25 bp, Homo sapien
cgagctgcccgggccgcgtgccctc

SEQ ID NO: 4513744 - DNA, 25 bp, Homo sapien
ctcggggctccgagcgcgccgcagc

SEQ ID NO: 4513745 - DNA, 25 bp, Homo sapien
gtgccctcggggctccgagcgcgcc

SEQ ID NO: 4513746 - DNA, 25 bp, Homo sapien
cacaccgagctgcccgggccgcgtg

SEQ ID NO: 4513747 - DNA, 25 bp, Homo sapien
ctgaggacctgttgggaaaccagtt

SEQ ID NO: 4513748 - DNA, 25 bp, Homo sapien
ggactgaggacctgttgggaaacca

SEQ ID NO: 4513749 - DNA, 25 bp, Homo sapien
tctctgggcaatagtgccaggcaaa

SEQ ID NO: 4513750 - DNA, 25 bp, Homo sapien
caaggccatcatctccatgatgtca

SEQ ID NO: 4513751 - DNA, 25 bp, Homo sapien
tggaggcatgaagacctgtagacag

SEQ ID NO: 4513752 - DNA, 25 bp, Homo sapien
cagtgtccaattcagagtttccacg

SEQ ID NO: 4513753 - DNA, 25 bp, Homo sapien
ggaggcatgaagacctgtagacagc

SEQ ID NO: 4513754 - DNA, 25 bp, Homo sapien
gtgtccaattcagagtttccacgca

SEQ ID NO: 4513755 - DNA, 25 bp, Homo sapien
cagaagggctctgaatcttcccaga

SEQ ID NO: 4513756 - DNA, 25 bp, Homo sapien
gggcaggcagaaaagtgctgaggct

SEQ ID NO: 4513757 - DNA, 25 bp, Homo sapien
ctgcagaagggctctgaatcttccc

SEQ ID NO: 4513758 - DNA, 25 bp, Homo sapien
ggctgcagaagggctctgaatcttc

SEQ ID NO: 4513759 - DNA, 25 bp, Homo sapien
tggagccactgccagttggagcctg

SEQ ID NO: 4513760 - DNA, 25 bp, Homo sapien
atttgagatgaggacgccgggccta

SEQ ID NO: 4513761 - DNA, 25 bp, Homo sapien
cctaataatagccaaacggcagcag

SEQ ID NO: 4513762 - DNA, 25 bp, Homo sapien
ataatagccaaacggcagcagaggc

SEQ ID NO: 4513763 - DNA, 25 bp, Homo sapien
tagcacagacactcgatcaatatag

SEQ ID NO: 4513764 - DNA, 25 bp, Homo sapien
tcttgggctcaagaatccctaggct

SEQ ID NO: 4513765 - DNA, 25 bp, Homo sapien
acttagcacagacactcgatcaata

SEQ ID NO: 4513766 - DNA, 25 bp, Homo sapien
tcaagaatccctaggcttatcctcc

SEQ ID NO: 4513767 - DNA, 25 bp, Homo sapien
aacataaaatgagtgcctctcatcc

SEQ ID NO: 4513768 - DNA, 25 bp, Homo sapien
tactgaaagagaacataaaatgagt

SEQ ID NO: 4513769 - DNA, 25 bp, Homo sapien
aaagagaacataaaatgagtgcctc

SEQ ID NO: 4513770 - DNA, 25 bp, Homo sapien
gaacataaaatgagtgcctctcatc

SEQ ID NO: 4513771 - DNA, 25 bp, Homo sapien
ttacaagcggtctctgggtacattt

SEQ ID NO: 4513772 - DNA, 25 bp, Homo sapien
tagaatctgtaccttggattcccag

SEQ ID NO: 4513773 - DNA, 25 bp, Homo sapien
tttagtagaatctgtaccttggatt

SEQ ID NO: 4513774 - DNA, 25 bp, Homo sapien
tacaagcggtctctgggtacatttg

SEQ ID NO: 4513775 - DNA, 25 bp, Homo sapien
acccccaggtttgtccagcttcgct

SEQ ID NO: 4513776 - DNA, 25 bp, Homo sapien
ccacccccaggtttgtccagcttcg

SEQ ID NO: 4513777 - DNA, 25 bp, Homo sapien
caggacaccccactgaggtcagcac

SEQ ID NO: 4513778 - DNA, 25 bp, Homo sapien
ccccaggtttgtccagcttcgctgt

SEQ ID NO: 4513779 - DNA, 25 bp, Homo sapien
ctataaccttttgtggccggcaaga

SEQ ID NO: 4513780 - DNA, 25 bp, Homo sapien
cacattcggtggaattctggctata

SEQ ID NO: 4513781 - DNA, 25 bp, Homo sapien
cacagaaagaccacattcggtggaa

SEQ ID NO: 4513782 - DNA, 25 bp, Homo sapien
ccggcaagaaggatcaccaagctgt

SEQ ID NO: 4513783 - DNA, 25 bp, Homo sapien
cgcttggcccccgtgcagtgagtgc

SEQ ID NO: 4513784 - DNA, 25 bp, Homo sapien
gatcactggtttcacgcttggcccc

SEQ ID NO: 4513785 - DNA, 25 bp, Homo sapien
ggtttcacgcttggcccccgtgcag

SEQ ID NO: 4513786 - DNA, 25 bp, Homo sapien
actggtttcacgcttggcccccgtg

SEQ ID NO: 4513787 - DNA, 25 bp, Homo sapien
ctggagctccggtgaaatttgggct

SEQ ID NO: 4513788 - DNA, 25 bp, Homo sapien
aggtgagggctacttctgttaggcc

SEQ ID NO: 4513789 - DNA, 25 bp, Homo sapien
cttttgaggtgagggctacttctgt

SEQ ID NO: 4513790 - DNA, 25 bp, Homo sapien
ttgaggtgagggctacttctgttag

SEQ ID NO: 4513791 - DNA, 25 bp, Homo sapien
agggctacttctgttaggccaccag

SEQ ID NO: 4513792 - DNA, 25 bp, Homo sapien
gcctcgtaaaggcacagcctctaaa

SEQ ID NO: 4513793 - DNA, 25 bp, Homo sapien
gggcaggagatcagttactcagcat

SEQ ID NO: 4513794 - DNA, 25 bp, Homo sapien
caaaaagtgaagcagggacatgaag

SEQ ID NO: 4513795 - DNA, 25 bp, Homo sapien
atgaaggtactcagcctcgtaaagg

SEQ ID NO: 4513796 - DNA, 25 bp, Homo sapien
aaggtgaataatcctggcaggactc

SEQ ID NO: 4513797 - DNA, 25 bp, Homo sapien
tgaaaggtgaataatcctggcagga

SEQ ID NO: 4513798 - DNA, 25 bp, Homo sapien
atcctggcaggactcttagccttcc

SEQ ID NO: 4513799 - DNA, 25 bp, Homo sapien
gaataatcctggcaggactcttagc

SEQ ID NO: 4513800 - DNA, 25 bp, Homo sapien
gcccaagctggccgggaactgaggt

SEQ ID NO: 4513801 - DNA, 25 bp, Homo sapien
ccaagctggccgggaactgaggtct

SEQ ID NO: 4513802 - DNA, 25 bp, Homo sapien
agctggccgggaactgaggtctggg

SEQ ID NO: 4513803 - DNA, 25 bp, Homo sapien
gctggagacaccacagcacgcagct

SEQ ID NO: 4513804 - DNA, 25 bp, Homo sapien
tgttccggacgcttccacgcacagg

SEQ ID NO: 4513805 - DNA, 25 bp, Homo sapien
tgccatgctcaggattcccatgcaa

SEQ ID NO: 4513806 - DNA, 25 bp, Homo sapien
gcaaacgctgcgtgccctgccgcat

SEQ ID NO: 4513807 - DNA, 25 bp, Homo sapien
aggattcccatgcaaacgctgcgtg

SEQ ID NO: 4513808 - DNA, 25 bp, Homo sapien
ggatgacagttgatggagcccagaa

SEQ ID NO: 4513809 - DNA, 25 bp, Homo sapien
cttcccacgaatccaaaccttggag

SEQ ID NO: 4513810 - DNA, 25 bp, Homo sapien
ccagaacctaagaggacccctgaga

SEQ ID NO: 4513811 - DNA, 25 bp, Homo sapien
ttggagatgccatcaaagggatgac

SEQ ID NO: 4513812 - DNA, 25 bp, Homo sapien
caccagctagaaggacaggggcgtt

SEQ ID NO: 4513813 - DNA, 25 bp, Homo sapien
gcagttgaccatacccagggaacag

SEQ ID NO: 4513814 - DNA, 25 bp, Homo sapien
caaggaaggtgtcaactggggccta

SEQ ID NO: 4513815 - DNA, 25 bp, Homo sapien
agcaaagagggccccagtcatcctg

SEQ ID NO: 4513816 - DNA, 25 bp, Homo sapien
ccttcagagaatgtgagtgatgttg

SEQ ID NO: 4513817 - DNA, 25 bp, Homo sapien
cataacaacccgctatatgttggtt

SEQ ID NO: 4513818 - DNA, 25 bp, Homo sapien
actctggtattccagttgccataac

SEQ ID NO: 4513819 - DNA, 25 bp, Homo sapien
tattccagttgccataacaacccgc

SEQ ID NO: 4513820 - DNA, 25 bp, Homo sapien
agcttggggaagaagggcatgtggc

SEQ ID NO: 4513821 - DNA, 25 bp, Homo sapien
gggaagaagggcatgtggcgcgccc

SEQ ID NO: 4513822 - DNA, 25 bp, Homo sapien
aagaagggcatgtggcgcgcccact

SEQ ID NO: 4513823 - DNA, 25 bp, Homo sapien
agaagggcatgtggcgcgcccactc

SEQ ID NO: 4513824 - DNA, 25 bp, Homo sapien
gaaagctttgttcctgcctgagcca

SEQ ID NO: 4513825 - DNA, 25 bp, Homo sapien
cagtgccagcaatggtcccaggtta

SEQ ID NO: 4513826 - DNA, 25 bp, Homo sapien
cagaaaggcactcgggacataagca

SEQ ID NO: 4513827 - DNA, 25 bp, Homo sapien
gcaaaactaagatatgggacccaag

SEQ ID NO: 4513828 - DNA, 25 bp, Homo sapien
actgtgggataatgcaaaggtcgac

SEQ ID NO: 4513829 - DNA, 25 bp, Homo sapien
taaggaaccgatcaaaggacatcac

SEQ ID NO: 4513830 - DNA, 25 bp, Homo sapien
taatcggacacacaggtggtgagtc

SEQ ID NO: 4513831 - DNA, 25 bp, Homo sapien
gaaagtagccttctgcagcacacat

SEQ ID NO: 4513832 - DNA, 25 bp, Homo sapien
tgctcttgatatgggagatgagatt

SEQ ID NO: 4513833 - DNA, 25 bp, Homo sapien
gccagcataggagatgctcttgata

SEQ ID NO: 4513834 - DNA, 25 bp, Homo sapien
gagatgctcttgatatgggagatga

SEQ ID NO: 4513835 - DNA, 25 bp, Homo sapien
gcataggagatgctcttgatatggg

SEQ ID NO: 4513836 - DNA, 25 bp, Homo sapien
agaactaatgcagcagatctccagg

SEQ ID NO: 4513837 - DNA, 25 bp, Homo sapien
ttctggcttgaccacacagcgcaga

SEQ ID NO: 4513838 - DNA, 25 bp, Homo sapien
aattagccaagaggatgtacatagg

SEQ ID NO: 4513839 - DNA, 25 bp, Homo sapien
gatgtgttacccatgagggtcagaa

SEQ ID NO: 4513840 - DNA, 25 bp, Homo sapien
tgtgagtatttaagtttgttgagaa

SEQ ID NO: 4513841 - DNA, 25 bp, Homo sapien
tatttttatggcatgagttgtattg

SEQ ID NO: 4513842 - DNA, 25 bp, Homo sapien
gaggtgtgatacttttaatgtgctg

SEQ ID NO: 4513843 - DNA, 25 bp, Homo sapien
cctgcatctcaaggataaatctctc

SEQ ID NO: 4513844 - DNA, 25 bp, Homo sapien
gtaaagcggtggtagctgtgcagct

SEQ ID NO: 4513845 - DNA, 25 bp, Homo sapien
tgctgctgatcaacaggctccagaa

SEQ ID NO: 4513846 - DNA, 25 bp, Homo sapien
ctgctgatcaacaggctccagaaac

SEQ ID NO: 4513847 - DNA, 25 bp, Homo sapien
ctaccgggtaaagcggtggtagctg

SEQ ID NO: 4513848 - DNA, 25 bp, Homo sapien
gccaccaagtggtaggtggccagcc

SEQ ID NO: 4513849 - DNA, 25 bp, Homo sapien
ccaagtggtaggtggccagccctac

SEQ ID NO: 4513850 - DNA, 25 bp, Homo sapien
ctgcgttggccaccaagtggtaggt

SEQ ID NO: 4513851 - DNA, 25 bp, Homo sapien
caccaagtggtaggtggccagccct

SEQ ID NO: 4513852 - DNA, 25 bp, Homo sapien
aaggcttatctagcggctgtttacc

SEQ ID NO: 4513853 - DNA, 25 bp, Homo sapien
caaggcttatctagcggctgtttac

SEQ ID NO: 4513854 - DNA, 25 bp, Homo sapien
aggcttatctagcggctgtttacct

SEQ ID NO: 4513855 - DNA, 25 bp, Homo sapien
acaaggcttatctagcggctgttta

SEQ ID NO: 4513856 - DNA, 25 bp, Homo sapien
gagtataggatccaataataaagag

SEQ ID NO: 4513857 - DNA, 25 bp, Homo sapien
gctttcaggacaagagtataggatc

SEQ ID NO: 4513858 - DNA, 25 bp, Homo sapien
caggacaagagtataggatccaata

SEQ ID NO: 4513859 - DNA, 25 bp, Homo sapien
taggatccaataataaagaggaagt

SEQ ID NO: 4513860 - DNA, 25 bp, Homo sapien
gcaaaacagttggattcttggggca

SEQ ID NO: 4513861 - DNA, 25 bp, Homo sapien
gtagcaaaacagttggattcttggg

SEQ ID NO: 4513862 - DNA, 25 bp, Homo sapien
gtgtagcaaaacagttggattcttg

SEQ ID NO: 4513863 - DNA, 25 bp, Homo sapien
aaaacagttggattcttggggcaga

SEQ ID NO: 4513864 - DNA, 25 bp, Homo sapien
acccagcacagtatgaccagtttgg

SEQ ID NO: 4513865 - DNA, 25 bp, Homo sapien
cacagaaatccacaaacccagcaca

SEQ ID NO: 4513866 - DNA, 25 bp, Homo sapien
cacaaacccagcacagtatgaccag

SEQ ID NO: 4513867 - DNA, 25 bp, Homo sapien
atccacaaacccagcacagtatgac

SEQ ID NO: 4513868 - DNA, 25 bp, Homo sapien
gatttattaggatagtgcaagggat

SEQ ID NO: 4513869 - DNA, 25 bp, Homo sapien
ttattaggatagtgcaagggatggc

SEQ ID NO: 4513870 - DNA, 25 bp, Homo sapien
tagtgcaagggatggcagataacaa

SEQ ID NO: 4513871 - DNA, 25 bp, Homo sapien
tgcaagggatggcagataacaaggt

SEQ ID NO: 4513872 - DNA, 25 bp, Homo sapien
cttgggaactgtagaagagacatac

SEQ ID NO: 4513873 - DNA, 25 bp, Homo sapien
tcttgggaactgtagaagagacata

SEQ ID NO: 4513874 - DNA, 25 bp, Homo sapien
catcttgggaactgtagaagagaca

SEQ ID NO: 4513875 - DNA, 25 bp, Homo sapien
ctgaaaggaagttgaccaacatctt

SEQ ID NO: 4513876 - DNA, 25 bp, Homo sapien
ggagaaatttcccaggaacatgtac

SEQ ID NO: 4513877 - DNA, 25 bp, Homo sapien
gagaaatttcccaggaacatgtaca

SEQ ID NO: 4513878 - DNA, 25 bp, Homo sapien
aaaggagaaatttcccaggaacatg

SEQ ID NO: 4513879 - DNA, 25 bp, Homo sapien
catatctctaaaaaggagaaatttc

SEQ ID NO: 4513880 - DNA, 25 bp, Homo sapien
ccacagggcgcaagcaatggctcca

SEQ ID NO: 4513881 - DNA, 25 bp, Homo sapien
cggtcacaccacagggcgcaagcaa

SEQ ID NO: 4513882 - DNA, 25 bp, Homo sapien
ggtcacaccacagggcgcaagcaat

SEQ ID NO: 4513883 - DNA, 25 bp, Homo sapien
acaccacagggcgcaagcaatggct

SEQ ID NO: 4513884 - DNA, 25 bp, Homo sapien
caaaaaatcttccagaagacacagt

SEQ ID NO: 4513885 - DNA, 25 bp, Homo sapien
cagacggattccaaaaaatcttcca

SEQ ID NO: 4513886 - DNA, 25 bp, Homo sapien
tccaaaaaatcttccagaagacaca

SEQ ID NO: 4513887 - DNA, 25 bp, Homo sapien
attccaaaaaatcttccagaagaca

SEQ ID NO: 4513888 - DNA, 25 bp, Homo sapien
catttttactgggtgtgctgatcca

SEQ ID NO: 4513889 - DNA, 25 bp, Homo sapien
ctgggtgtgctgatccaggactaac

SEQ ID NO: 4513890 - DNA, 25 bp, Homo sapien
tactgggtgtgctgatccaggacta

SEQ ID NO: 4513891 - DNA, 25 bp, Homo sapien
tttactgggtgtgctgatccaggac

SEQ ID NO: 4513892 - DNA, 25 bp, Homo sapien
aaggtgacaactgccaaatgagagg

SEQ ID NO: 4513893 - DNA, 25 bp, Homo sapien
catcttcaatgggacgggatcacaa

SEQ ID NO: 4513894 - DNA, 25 bp, Homo sapien
cagcatcttcaatgggacgggatca

SEQ ID NO: 4513895 - DNA, 25 bp, Homo sapien
caatgggacgggatcacaaataaaa

SEQ ID NO: 4513896 - DNA, 25 bp, Homo sapien
tcttcaatgggacgggatcacaaat

SEQ ID NO: 4513897 - DNA, 25 bp, Homo sapien
ctgtgaaatgagaatcaccagagtt

SEQ ID NO: 4513898 - DNA, 25 bp, Homo sapien
atcaccagagttaggaagattacaa

SEQ ID NO: 4513899 - DNA, 25 bp, Homo sapien
gtgaaatgagaatcaccagagttag

SEQ ID NO: 4513900 - DNA, 25 bp, Homo sapien
caccagagttaggaagattacaaag

SEQ ID NO: 4513901 - DNA, 25 bp, Homo sapien
tttagtcatgatgcatggataacgt

SEQ ID NO: 4513902 - DNA, 25 bp, Homo sapien
gtttagttgcagtaacataacatat

SEQ ID NO: 4513903 - DNA, 25 bp, Homo sapien
cagtttagttgcagtaacataacat

SEQ ID NO: 4513904 - DNA, 25 bp, Homo sapien
acttgtttagtcatgatgcatggat

SEQ ID NO: 4513905 - DNA, 25 bp, Homo sapien
caatgaactggacaacttctactgt

SEQ ID NO: 4513906 - DNA, 25 bp, Homo sapien
ggccccaatgaactggacaacttct

SEQ ID NO: 4513907 - DNA, 25 bp, Homo sapien
tgtggccccaatgaactggacaact

SEQ ID NO: 4513908 - DNA, 25 bp, Homo sapien
gcctttctgtggccccaatgaactg

SEQ ID NO: 4513909 - DNA, 25 bp, Homo sapien
tttgatgatgcataaagattgcgga

SEQ ID NO: 4513910 - DNA, 25 bp, Homo sapien
tttctctcagggttttgatgatgca

SEQ ID NO: 4513911 - DNA, 25 bp, Homo sapien
tgcataaagattgcggagagtttct

SEQ ID NO: 4513912 - DNA, 25 bp, Homo sapien
gattgcggagagtttcttccctttg

SEQ ID NO: 4513913 - DNA, 25 bp, Homo sapien
ttacttcttatagttcttcaggatg

SEQ ID NO: 4513914 - DNA, 25 bp, Homo sapien
tacttcttatagttcttcaggatga

SEQ ID NO: 4513915 - DNA, 25 bp, Homo sapien
cttcttatagttcttcaggatgatc

SEQ ID NO: 4513916 - DNA, 25 bp, Homo sapien
ttcttatagttcttcaggatgatct

SEQ ID NO: 4513917 - DNA, 25 bp, Homo sapien
tgtgtgtctgcttgtagtaagccat

SEQ ID NO: 4513918 - DNA, 25 bp, Homo sapien
cttgctaccagattcctggaaaaca

SEQ ID NO: 4513919 - DNA, 25 bp, Homo sapien
tcaagctggcttgcaccgacatgtt

SEQ ID NO: 4513920 - DNA, 25 bp, Homo sapien
caactgtcatgaactctagagcctg

SEQ ID NO: 4513921 - DNA, 25 bp, Homo sapien
tatccaggtggtcctcatcatccgc

SEQ ID NO: 4513922 - DNA, 25 bp, Homo sapien
catacgagcgtcttcttctgaggca

SEQ ID NO: 4513923 - DNA, 25 bp, Homo sapien
agccttagaatgtctgctcctccgg

SEQ ID NO: 4513924 - DNA, 25 bp, Homo sapien
ccagttgcagggctcacgggcagcc

SEQ ID NO: 4513925 - DNA, 25 bp, Homo sapien
ttgcagggctcacgggcagccttag

SEQ ID NO: 4513926 - DNA, 25 bp, Homo sapien
tcacgggcagccttagaatgtctgc

SEQ ID NO: 4513927 - DNA, 25 bp, Homo sapien
gagctgtactgagcgatggctgcac

SEQ ID NO: 4513928 - DNA, 25 bp, Homo sapien
tgtccccaggagctgtactgagcga

SEQ ID NO: 4513929 - DNA, 25 bp, Homo sapien
tgcacctgctcagttacctgtgggg

SEQ ID NO: 4513930 - DNA, 25 bp, Homo sapien
tgctcagttacctgtggggcccagt

SEQ ID NO: 4513931 - DNA, 25 bp, Homo sapien
tgagggaaatcagcaggaggtaggg

SEQ ID NO: 4513932 - DNA, 25 bp, Homo sapien
gggaaatcagcaggaggtaggggct

SEQ ID NO: 4513933 - DNA, 25 bp, Homo sapien
agggaaatcagcaggaggtaggggc

SEQ ID NO: 4513934 - DNA, 25 bp, Homo sapien
ctgagggaaatcagcaggaggtagg

SEQ ID NO: 4513935 - DNA, 25 bp, Homo sapien
aggaatgactcatgtggccattcag

SEQ ID NO: 4513936 - DNA, 25 bp, Homo sapien
tcctctgctcgggttctctactgtc

SEQ ID NO: 4513937 - DNA, 25 bp, Homo sapien
cgggttctctactgtccagggcagg

SEQ ID NO: 4513938 - DNA, 25 bp, Homo sapien
ggagggccatcctctgctcgggttc

SEQ ID NO: 4513939 - DNA, 25 bp, Homo sapien
tctgggcccacactctgctcaaagt

SEQ ID NO: 4513940 - DNA, 25 bp, Homo sapien
agctcatgtccctgacctgtggcct

SEQ ID NO: 4513941 - DNA, 25 bp, Homo sapien
tgggcccacactctgctcaaagttc

SEQ ID NO: 4513942 - DNA, 25 bp, Homo sapien
agcgctgagctcatgtccctgacct

SEQ ID NO: 4513943 - DNA, 25 bp, Homo sapien
agatggcggggcactcagaagaggg

SEQ ID NO: 4513944 - DNA, 25 bp, Homo sapien
atggcggggcactcagaagagggag

SEQ ID NO: 4513945 - DNA, 25 bp, Homo sapien
gatggcggggcactcagaagaggga

SEQ ID NO: 4513946 - DNA, 25 bp, Homo sapien
agtctcaggacctggagagcacctc

SEQ ID NO: 4513947 - DNA, 25 bp, Homo sapien
ctggaactgtaagccttgcccagaa

SEQ ID NO: 4513948 - DNA, 25 bp, Homo sapien
actgaagtctcaggacctggagagc

SEQ ID NO: 4513949 - DNA, 25 bp, Homo sapien
ggggctggatcctcctggaactgta

SEQ ID NO: 4513950 - DNA, 25 bp, Homo sapien
gcctgatgatgagccaggacaggaa

SEQ ID NO: 4513951 - DNA, 25 bp, Homo sapien
taatatttcccctctattgctcctc

SEQ ID NO: 4513952 - DNA, 25 bp, Homo sapien
gctcctctttccctaaggtctcgag

SEQ ID NO: 4513953 - DNA, 25 bp, Homo sapien
ctaaggtctcgagttcctctgagcc

SEQ ID NO: 4513954 - DNA, 25 bp, Homo sapien
aacaataaacacctttattacatgg

SEQ ID NO: 4513955 - DNA, 25 bp, Homo sapien
acaataaacacctttattacatggg

SEQ ID NO: 4513956 - DNA, 25 bp, Homo sapien
aaacaataaacacctttattacatg

SEQ ID NO: 4513957 - DNA, 25 bp, Homo sapien
tctttgccctctagcacatacccat

SEQ ID NO: 4513958 - DNA, 25 bp, Homo sapien
taagatagaactccaactctttgcc

SEQ ID NO: 4513959 - DNA, 25 bp, Homo sapien
gatagaactccaactctttgccctc

SEQ ID NO: 4513960 - DNA, 25 bp, Homo sapien
tttcctaagatagaactccaactct

SEQ ID NO: 4513961 - DNA, 25 bp, Homo sapien
gttttatgagcacaacattctgagc

SEQ ID NO: 4513962 - DNA, 25 bp, Homo sapien
tatgagcacaacattctgagcccca

SEQ ID NO: 4513963 - DNA, 25 bp, Homo sapien
tccctggttttgtggcacttgtgcc

SEQ ID NO: 4513964 - DNA, 25 bp, Homo sapien
caagagatgtccatcgctcggcact

SEQ ID NO: 4513965 - DNA, 25 bp, Homo sapien
ttattaatgacatactgtaaacaac

SEQ ID NO: 4513966 - DNA, 25 bp, Homo sapien
tctgtgcatagtttgtgccaccact

SEQ ID NO: 4513967 - DNA, 25 bp, Homo sapien
ccctttcatttctcagccccagcac

SEQ ID NO: 4513968 - DNA, 25 bp, Homo sapien
tgccaccactgttagggttgatccg

SEQ ID NO: 4513969 - DNA, 25 bp, Homo sapien
gcatatagtagtcggtgaagatgta

SEQ ID NO: 4513970 - DNA, 25 bp, Homo sapien
cgcacccagtgcatatagtagtcgg

SEQ ID NO: 4513971 - DNA, 25 bp, Homo sapien
cagtgcatatagtagtcggtgaaga

SEQ ID NO: 4513972 - DNA, 25 bp, Homo sapien
tgtcgcacccagtgcatatagtagt

SEQ ID NO: 4513973 - DNA, 25 bp, Homo sapien
agtggatgagatctccctggactgg

SEQ ID NO: 4513974 - DNA, 25 bp, Homo sapien
tggatgagatctccctggactggac

SEQ ID NO: 4513975 - DNA, 25 bp, Homo sapien
gatgagatctccctggactggactc

SEQ ID NO: 4513976 - DNA, 25 bp, Homo sapien
gtggatgagatctccctggactgga

SEQ ID NO: 4513977 - DNA, 25 bp, Homo sapien
aggagctgagctctcaggggattct

SEQ ID NO: 4513978 - DNA, 25 bp, Homo sapien
gaagaggatcctccaggtccagtcc

SEQ ID NO: 4513979 - DNA, 25 bp, Homo sapien
aagaggatcctccaggtccagtcca

SEQ ID NO: 4513980 - DNA, 25 bp, Homo sapien
gtgaggagctgagctctcaggggat

SEQ ID NO: 4513981 - DNA, 25 bp, Homo sapien
aacttcctcatctggtgtcttgtgg

SEQ ID NO: 4513982 - DNA, 25 bp, Homo sapien
caggggaaatccaccaaagcatgtg

SEQ ID NO: 4513983 - DNA, 25 bp, Homo sapien
aatgcctggatgcacctccactacc

SEQ ID NO: 4513984 - DNA, 25 bp, Homo sapien
cggacaacttcctcatctggtgtct

SEQ ID NO: 4513985 - DNA, 25 bp, Homo sapien
taaatatattagtcccatgtcccat

SEQ ID NO: 4513986 - DNA, 25 bp, Homo sapien
gcaggaacccaaactgtgattaacc

SEQ ID NO: 4513987 - DNA, 25 bp, Homo sapien
tataacagatagagacttcgacact

SEQ ID NO: 4513988 - DNA, 25 bp, Homo sapien
aactcggagatggatgtgaacacac

SEQ ID NO: 4513989 - DNA, 25 bp, Homo sapien
tgagcaccccttggtgtcctcagtg

SEQ ID NO: 4513990 - DNA, 25 bp, Homo sapien
ctagtggttcctgaacctcccctgg

SEQ ID NO: 4513991 - DNA, 25 bp, Homo sapien
gagtgtcctctggtcgttctgagca

SEQ ID NO: 4513992 - DNA, 25 bp, Homo sapien
tgaccgcccgctggtgtcatgagcg

SEQ ID NO: 4513993 - DNA, 25 bp, Homo sapien
gtggttctgagaatcctctggtgtc

SEQ ID NO: 4513994 - DNA, 25 bp, Homo sapien
tctgagaatcctctggtgtcctgag

SEQ ID NO: 4513995 - DNA, 25 bp, Homo sapien
ggttctgagaatcctctggtgtcct

SEQ ID NO: 4513996 - DNA, 25 bp, Homo sapien
tgagaatcctctggtgtcctgagca

SEQ ID NO: 4513997 - DNA, 25 bp, Homo sapien
cctggtgtcaacaccccttagtggt

SEQ ID NO: 4513998 - DNA, 25 bp, Homo sapien
caacaccccttagtggttctgagca

SEQ ID NO: 4513999 - DNA, 25 bp, Homo sapien
acaccccttagtggttctgagcagc

SEQ ID NO: 4514000 - DNA, 25 bp, Homo sapien
gtgtcaacaccccttagtggttctg

SEQ ID NO: 4514001 - DNA, 25 bp, Homo sapien
ctgagggcccctttgtggtcctgag

SEQ ID NO: 4514002 - DNA, 25 bp, Homo sapien
agggcccctttgtggtcctgagcgc

SEQ ID NO: 4514003 - DNA, 25 bp, Homo sapien
gcccctttgtggtcctgagcgcccc

SEQ ID NO: 4514004 - DNA, 25 bp, Homo sapien
tgagggcccctttgtggtcctgagc

SEQ ID NO: 4514005 - DNA, 25 bp, Homo sapien
accctccctgatggttctgagtgcc

SEQ ID NO: 4514006 - DNA, 25 bp, Homo sapien
gtggttctgtgcaccctccctgatg

SEQ ID NO: 4514007 - DNA, 25 bp, Homo sapien
tggtggttctgtgcaccctccctga

SEQ ID NO: 4514008 - DNA, 25 bp, Homo sapien
tggttctgtgcaccctccctgatgg

SEQ ID NO: 4514009 - DNA, 25 bp, Homo sapien
cactaatgttgacggggatgagaag

SEQ ID NO: 4514010 - DNA, 25 bp, Homo sapien
ggccactaatgttgacggggatgag

SEQ ID NO: 4514011 - DNA, 25 bp, Homo sapien
taatgttgacggggatgagaaggga

SEQ ID NO: 4514012 - DNA, 25 bp, Homo sapien
ctgttttacaaaggccactaatgtt

SEQ ID NO: 4514013 - DNA, 25 bp, Homo sapien
tatttacaacactgattcagaaatt

SEQ ID NO: 4514014 - DNA, 25 bp, Homo sapien
atatttacaacactgattcagaaat

SEQ ID NO: 4514015 - DNA, 25 bp, Homo sapien
cagatacctacagaggaagttctgt

SEQ ID NO: 4514016 - DNA, 25 bp, Homo sapien
gggcctggcgcatccagttcataaa

SEQ ID NO: 4514017 - DNA, 25 bp, Homo sapien
ggcgcatccagttcataaagtagtc

SEQ ID NO: 4514018 - DNA, 25 bp, Homo sapien
gcctggcgcatccagttcataaagt

SEQ ID NO: 4514019 - DNA, 25 bp, Homo sapien
cgcatccagttcataaagtagtcgg

SEQ ID NO: 4514020 - DNA, 25 bp, Homo sapien
ctacaccagttggacctgggagtgg

SEQ ID NO: 4514021 - DNA, 25 bp, Homo sapien
tacaccagttggacctgggagtggg

SEQ ID NO: 4514022 - DNA, 25 bp, Homo sapien
ctgccaccaaaaagaggatcctcca

SEQ ID NO: 4514023 - DNA, 25 bp, Homo sapien
aaaaagaggatcctccaggtccagt

SEQ ID NO: 4514024 - DNA, 25 bp, Homo sapien
ggctgctgccaccaaaaagaggatc

SEQ ID NO: 4514025 - DNA, 25 bp, Homo sapien
aaagaggatcctccaggtccagtcc

SEQ ID NO: 4514026 - DNA, 25 bp, Homo sapien
ggagggatgtggttgttgggtgatg

SEQ ID NO: 4514027 - DNA, 25 bp, Homo sapien
gggatgtggttgttgggtgatgctc

SEQ ID NO: 4514028 - DNA, 25 bp, Homo sapien
agggatgtggttgttgggtgatgct

SEQ ID NO: 4514029 - DNA, 25 bp, Homo sapien
gagggatgtggttgttgggtgatgc

SEQ ID NO: 4514030 - DNA, 25 bp, Homo sapien
cgagttggtgcagcctgcactgaac

SEQ ID NO: 4514031 - DNA, 25 bp, Homo sapien
tggtgcagcctgcactgaactgctg

SEQ ID NO: 4514032 - DNA, 25 bp, Homo sapien
agttggtgcagcctgcactgaactg

SEQ ID NO: 4514033 - DNA, 25 bp, Homo sapien
gtgcagcctgcactgaactgctgac

SEQ ID NO: 4514034 - DNA, 25 bp, Homo sapien
ggcagaacccttgggactcttgatg

SEQ ID NO: 4514035 - DNA, 25 bp, Homo sapien
cttgatgggcatcttttcaggagca

SEQ ID NO: 4514036 - DNA, 25 bp, Homo sapien
cactcccagaggcacatcaaggaag

SEQ ID NO: 4514037 - DNA, 25 bp, Homo sapien
cacaggaaccgttccaggaacaggg

SEQ ID NO: 4514038 - DNA, 25 bp, Homo sapien
tgacactgtacacagaaccagggaa

SEQ ID NO: 4514039 - DNA, 25 bp, Homo sapien
gtgacactgtacacagaaccaggga

SEQ ID NO: 4514040 - DNA, 25 bp, Homo sapien
gacactgtacacagaaccagggaag

SEQ ID NO: 4514041 - DNA, 25 bp, Homo sapien
tggctttgttcatactggtttcccc

SEQ ID NO: 4514042 - DNA, 25 bp, Homo sapien
tggtttccccggccgtctggtcatc

SEQ ID NO: 4514043 - DNA, 25 bp, Homo sapien
aagtggctttgttcatactggtttc

SEQ ID NO: 4514044 - DNA, 25 bp, Homo sapien
gaaagtggctttgttcatactggtt

SEQ ID NO: 4514045 - DNA, 25 bp, Homo sapien
ccggcctcatgctctgtgggccccg

SEQ ID NO: 4514046 - DNA, 25 bp, Homo sapien
cagcacctgcgtccgcgccctccgc

SEQ ID NO: 4514047 - DNA, 25 bp, Homo sapien
ctcatgctctgtgggccccgcgccc

SEQ ID NO: 4514048 - DNA, 25 bp, Homo sapien
tgctggtcctgagcagcacctgcgt

SEQ ID NO: 4514049 - DNA, 25 bp, Homo sapien
tggggctcccactatgatagatttc

SEQ ID NO: 4514050 - DNA, 25 bp, Homo sapien
tctccgaaggcttcaccagtcctgg

SEQ ID NO: 4514051 - DNA, 25 bp, Homo sapien
tgagggacagggtctccgaaggctt

SEQ ID NO: 4514052 - DNA, 25 bp, Homo sapien
cagggtctccgaaggcttcaccagt

SEQ ID NO: 4514053 - DNA, 25 bp, Homo sapien
agtcctgggcccgactcctgcagct

SEQ ID NO: 4514054 - DNA, 25 bp, Homo sapien
tcatgtctggatccctgagatactc

SEQ ID NO: 4514055 - DNA, 25 bp, Homo sapien
aggagaaagaaccacaggtgtttca

SEQ ID NO: 4514056 - DNA, 25 bp, Homo sapien
ctgggagctgccaccaggaggagaa

SEQ ID NO: 4514057 - DNA, 25 bp, Homo sapien
aggaggagaaagaaccacaggtgtt

SEQ ID NO: 4514058 - DNA, 25 bp, Homo sapien
ccaggaggagaaagaaccacaggtg

SEQ ID NO: 4514059 - DNA, 25 bp, Homo sapien
catgaatgtgtgtagcagtagagtt

SEQ ID NO: 4514060 - DNA, 25 bp, Homo sapien
gaatgtgtgtagcagtagagttatc

SEQ ID NO: 4514061 - DNA, 25 bp, Homo sapien
tgtgtgtagcagtagagttatcaga

SEQ ID NO: 4514062 - DNA, 25 bp, Homo sapien
ctccatgaatgtgtgtagcagtaga

SEQ ID NO: 4514063 - DNA, 25 bp, Homo sapien
tcaaaaacaaaaggatgaggtgtgc

SEQ ID NO: 4514064 - DNA, 25 bp, Homo sapien
taataaagcggtggtgacatgaaca

SEQ ID NO: 4514065 - DNA, 25 bp, Homo sapien
gaaaaacggctaatcctatgtatga

SEQ ID NO: 4514066 - DNA, 25 bp, Homo sapien
tgagctcctagcacctaataaagcg

SEQ ID NO: 4514067 - DNA, 25 bp, Homo sapien
aatttgcttacagaataaatgttgt

SEQ ID NO: 4514068 - DNA, 25 bp, Homo sapien
aattcaatccctgaaatttgcttac

SEQ ID NO: 4514069 - DNA, 25 bp, Homo sapien
tctaataatctttgtcatctcctcc

SEQ ID NO: 4514070 - DNA, 25 bp, Homo sapien
tctttagtgacttaatgttattttc

SEQ ID NO: 4514071 - DNA, 25 bp, Homo sapien
atggacgtgtccctggttatggtga

SEQ ID NO: 4514072 - DNA, 25 bp, Homo sapien
attgccagcattgatccatcccatc

SEQ ID NO: 4514073 - DNA, 25 bp, Homo sapien
tgtgttaccattgccagcattgatc

SEQ ID NO: 4514074 - DNA, 25 bp, Homo sapien
acttctgtgcatatgttgtgttacc

SEQ ID NO: 4514075 - DNA, 25 bp, Homo sapien
acacccagtgcataaagttgttggt

SEQ ID NO: 4514076 - DNA, 25 bp, Homo sapien
cacacccagtgcataaagttgttgg

SEQ ID NO: 4514077 - DNA, 25 bp, Homo sapien
agactgcaccaactggtcctgagag

SEQ ID NO: 4514078 - DNA, 25 bp, Homo sapien
gactgcaccaactggtcctgagagt

SEQ ID NO: 4514079 - DNA, 25 bp, Homo sapien
ccagactgcaccaactggtcctgag

SEQ ID NO: 4514080 - DNA, 25 bp, Homo sapien
actgcaccaactggtcctgagagtg

SEQ ID NO: 4514081 - DNA, 25 bp, Homo sapien
tccagtccacggtgaggcactgagc

SEQ ID NO: 4514082 - DNA, 25 bp, Homo sapien
tccacggtgaggcactgagctctaa

SEQ ID NO: 4514083 - DNA, 25 bp, Homo sapien
acggtgaggcactgagctctaagga

SEQ ID NO: 4514084 - DNA, 25 bp, Homo sapien
caggtccagtccacggtgaggcact

SEQ ID NO: 4514085 - DNA, 25 bp, Homo sapien
tgatgtccctctgagatctactggg

SEQ ID NO: 4514086 - DNA, 25 bp, Homo sapien
tctactgggccctcctgagacagtg

SEQ ID NO: 4514087 - DNA, 25 bp, Homo sapien
tggaaaggtgactgctgatgtccct

SEQ ID NO: 4514088 - DNA, 25 bp, Homo sapien
acagtgtctccagcacgtgcctcat

SEQ ID NO: 4514089 - DNA, 25 bp, Homo sapien
caggatcttcaatagaaacgctctt

SEQ ID NO: 4514090 - DNA, 25 bp, Homo sapien
gatcttcaatagaaacgctcttgtt

SEQ ID NO: 4514091 - DNA, 25 bp, Homo sapien
ggatcttcaatagaaacgctcttgt

SEQ ID NO: 4514092 - DNA, 25 bp, Homo sapien
aggatcttcaatagaaacgctcttg

SEQ ID NO: 4514093 - DNA, 25 bp, Homo sapien
tagtctgctcagtgctacacacaga

SEQ ID NO: 4514094 - DNA, 25 bp, Homo sapien
tagtgcatcggagtgtgaaagcttc

SEQ ID NO: 4514095 - DNA, 25 bp, Homo sapien
gttgggctcataacataggacacat

SEQ ID NO: 4514096 - DNA, 25 bp, Homo sapien
cacacagaggtagctaatagaggat

SEQ ID NO: 4514097 - DNA, 25 bp, Homo sapien
gccttattatttaacgttatcaaca

SEQ ID NO: 4514098 - DNA, 25 bp, Homo sapien
ggatgtcaattcacaggtttatgaa

SEQ ID NO: 4514099 - DNA, 25 bp, Homo sapien
agcaacgggagagaaggaagtccca

SEQ ID NO: 4514100 - DNA, 25 bp, Homo sapien
agtgagtctctacacaacacagtgg

SEQ ID NO: 4514101 - DNA, 25 bp, Homo sapien
tgcattcccaagtgagtctctacac

SEQ ID NO: 4514102 - DNA, 25 bp, Homo sapien
agaaggaagtcccatcagcctctcc

SEQ ID NO: 4514103 - DNA, 25 bp, Homo sapien
gcaggagccacagtctgagccccac

SEQ ID NO: 4514104 - DNA, 25 bp, Homo sapien
tgcaggagccacagtctgagcccca

SEQ ID NO: 4514105 - DNA, 25 bp, Homo sapien
ctgcaggagccacagtctgagcccc

SEQ ID NO: 4514106 - DNA, 25 bp, Homo sapien
gaaagggcttgagcagtggactttt

SEQ ID NO: 4514107 - DNA, 25 bp, Homo sapien
gctgcagggaaagggcttgagcagt

SEQ ID NO: 4514108 - DNA, 25 bp, Homo sapien
gcagtggactttttacagcaagaac

SEQ ID NO: 4514109 - DNA, 25 bp, Homo sapien
ggactttttacagcaagaaccacat

SEQ ID NO: 4514110 - DNA, 25 bp, Homo sapien
tcagagacgtagagctaggcacagc

SEQ ID NO: 4514111 - DNA, 25 bp, Homo sapien
agagggattgttctgcatttagtgc

SEQ ID NO: 4514112 - DNA, 25 bp, Homo sapien
cctggtgaccactggcagagggatt

SEQ ID NO: 4514113 - DNA, 25 bp, Homo sapien
catttagtgcctgtaagaaggtttc

SEQ ID NO: 4514114 - DNA, 25 bp, Homo sapien
ccacaccctggcagtaaaccagcct

SEQ ID NO: 4514115 - DNA, 25 bp, Homo sapien
tggcagtaaaccagcctctcatctc

SEQ ID NO: 4514116 - DNA, 25 bp, Homo sapien
atgtagatgtagaggcagccccaca

SEQ ID NO: 4514117 - DNA, 25 bp, Homo sapien
ctggaggaaacatgtagatgtagag

SEQ ID NO: 4514118 - DNA, 25 bp, Homo sapien
ctgctcttcccctggtggtcttgag

SEQ ID NO: 4514119 - DNA, 25 bp, Homo sapien
tcctgagtcttgctggcggtcctca

SEQ ID NO: 4514120 - DNA, 25 bp, Homo sapien
tggtcctgagtcttgctggcggtcc

SEQ ID NO: 4514121 - DNA, 25 bp, Homo sapien
tggtggtcttgagtcccccttgtgg

SEQ ID NO: 4514122 - DNA, 25 bp, Homo sapien
cctcctgcttctttcgggttcccag

SEQ ID NO: 4514123 - DNA, 25 bp, Homo sapien
tcctgcttctttcgggttcccagct

SEQ ID NO: 4514124 - DNA, 25 bp, Homo sapien
tgcttctttcgggttcccagctgga

SEQ ID NO: 4514125 - DNA, 25 bp, Homo sapien
ctcctgcttctttcgggttcccagc

SEQ ID NO: 4514126 - DNA, 25 bp, Homo sapien
ctgaagtgtgttgggagtggctgga

SEQ ID NO: 4514127 - DNA, 25 bp, Homo sapien
tgaagtgtgttgggagtggctggaa

SEQ ID NO: 4514128 - DNA, 25 bp, Homo sapien
tggccacgacagctgatagaaggct

SEQ ID NO: 4514129 - DNA, 25 bp, Homo sapien
gaaggctgtgacctgagtgcaagcc

SEQ ID NO: 4514130 - DNA, 25 bp, Homo sapien
gaagaggtggccacgacagctgata

SEQ ID NO: 4514131 - DNA, 25 bp, Homo sapien
cagctgatagaaggctgtgacctga

SEQ ID NO: 4514132 - DNA, 25 bp, Homo sapien
cttctgtatgtgagaccgtgctgct

SEQ ID NO: 4514133 - DNA, 25 bp, Homo sapien
tgagaccgtgctgcttgccaaaagc

SEQ ID NO: 4514134 - DNA, 25 bp, Homo sapien
ccaaaagctgttagttccttccatt

SEQ ID NO: 4514135 - DNA, 25 bp, Homo sapien
aaagctgttagttccttccattctg

SEQ ID NO: 4514136 - DNA, 25 bp, Homo sapien
tcagctttgtccatgcgctggactg

SEQ ID NO: 4514137 - DNA, 25 bp, Homo sapien
caggtagtcataaggacccatgcaa

SEQ ID NO: 4514138 - DNA, 25 bp, Homo sapien
tattgccagcaggtagtcataagga

SEQ ID NO: 4514139 - DNA, 25 bp, Homo sapien
tccatgcgctggactgaatattgcc

SEQ ID NO: 4514140 - DNA, 25 bp, Homo sapien
atctcgttagattgtccagtggcca

SEQ ID NO: 4514141 - DNA, 25 bp, Homo sapien
tcagcatcggcatgtgacagtaagt

SEQ ID NO: 4514142 - DNA, 25 bp, Homo sapien
cagcaaacgcagagcttccgggtgt

SEQ ID NO: 4514143 - DNA, 25 bp, Homo sapien
gcttgatcacataccacctgcatgg

SEQ ID NO: 4514144 - DNA, 25 bp, Homo sapien
taagtacagttggttcctccctgag

SEQ ID NO: 4514145 - DNA, 25 bp, Homo sapien
tgcagtgatgagacccacaaagggc

SEQ ID NO: 4514146 - DNA, 25 bp, Homo sapien
gccctgggccagtaaacatttgaga

SEQ ID NO: 4514147 - DNA, 25 bp, Homo sapien
tgcagttcagggaagaaacggagct

SEQ ID NO: 4514148 - DNA, 25 bp, Homo sapien
gagtgagctgagtcgacaccaggtg

SEQ ID NO: 4514149 - DNA, 25 bp, Homo sapien
aagacaaggaagaggcatagctcag

SEQ ID NO: 4514150 - DNA, 25 bp, Homo sapien
cgagcctgctctgtccgcaatgcag

SEQ ID NO: 4514151 - DNA, 25 bp, Homo sapien
ctttttatccccactataagacaag

SEQ ID NO: 4514152 - DNA, 25 bp, Homo sapien
caaatgttttctcgagagtcagggc

SEQ ID NO: 4514153 - DNA, 25 bp, Homo sapien
ttatacgacaatggactttggctgc

SEQ ID NO: 4514154 - DNA, 25 bp, Homo sapien
gccagaggatgctcatggtccagcc

SEQ ID NO: 4514155 - DNA, 25 bp, Homo sapien
cactgatttagggatgtgaccggca

SEQ ID NO: 4514156 - DNA, 25 bp, Homo sapien
tgagtggctgtggaccgtctcccgc

SEQ ID NO: 4514157 - DNA, 25 bp, Homo sapien
tggaggcttggcgttgtgcagcaat

SEQ ID NO: 4514158 - DNA, 25 bp, Homo sapien
ctttggtggcctctgtgtaagctga

SEQ ID NO: 4514159 - DNA, 25 bp, Homo sapien
tgaggtttggcgtcctgtcctgccg

SEQ ID NO: 4514160 - DNA, 25 bp, Homo sapien
gggcatggatccagcaagggaagtg

SEQ ID NO: 4514161 - DNA, 25 bp, Homo sapien
gggtgcggccacatgtgtcagagct

SEQ ID NO: 4514162 - DNA, 25 bp, Homo sapien
tccagcaagggaagtgttgcgagaa

SEQ ID NO: 4514163 - DNA, 25 bp, Homo sapien
caggctgaaggaatccatgctgggg

SEQ ID NO: 4514164 - DNA, 25 bp, Homo sapien
gagacagcacccctcttgtgccttg

SEQ ID NO: 4514165 - DNA, 25 bp, Homo sapien
gcatgagacggaactccaggaaagg

SEQ ID NO: 4514166 - DNA, 25 bp, Homo sapien
cagattcttgagcaatctgtccctg

SEQ ID NO: 4514167 - DNA, 25 bp, Homo sapien
ctgaaacgtaggcatgagacggaac

SEQ ID NO: 4514168 - DNA, 25 bp, Homo sapien
tctcgccggcgccttctgttccact

SEQ ID NO: 4514169 - DNA, 25 bp, Homo sapien
ccccatctaaagctggcatctcagc

SEQ ID NO: 4514170 - DNA, 25 bp, Homo sapien
tgttgtaagtccccccatctaaagc

SEQ ID NO: 4514171 - DNA, 25 bp, Homo sapien
gctggcctgagaaccataccctccc

SEQ ID NO: 4514172 - DNA, 25 bp, Homo sapien
cattgaattgcgtttcctgcagact

SEQ ID NO: 4514173 - DNA, 25 bp, Homo sapien
cctcagggcccgttggcccattgaa

SEQ ID NO: 4514174 - DNA, 25 bp, Homo sapien
ggcccgttggcccattgaattgcgt

SEQ ID NO: 4514175 - DNA, 25 bp, Homo sapien
ctccatccctcagggcccgttggcc

SEQ ID NO: 4514176 - DNA, 25 bp, Homo sapien
ttttctggaactccgctgagaatct

SEQ ID NO: 4514177 - DNA, 25 bp, Homo sapien
ccgcttcctctgagataaacattcc

SEQ ID NO: 4514178 - DNA, 25 bp, Homo sapien
tgaaaggagcttttccgcttcctct

SEQ ID NO: 4514179 - DNA, 25 bp, Homo sapien
catttcttctgagccggccagccaa

SEQ ID NO: 4514180 - DNA, 25 bp, Homo sapien
gccagcttccacaggaacacatggg

SEQ ID NO: 4514181 - DNA, 25 bp, Homo sapien
catgggggggctttactgtgtctta

SEQ ID NO: 4514182 - DNA, 25 bp, Homo sapien
ctgtgccagcctcctagtgaagagc

SEQ ID NO: 4514183 - DNA, 25 bp, Homo sapien
ctggtttatgtgtattggcatggcc

SEQ ID NO: 4514184 - DNA, 25 bp, Homo sapien
gctgtggctcaaatgcaagggcaaa

SEQ ID NO: 4514185 - DNA, 25 bp, Homo sapien
tgctgtggctcaaatgcaagggcaa

SEQ ID NO: 4514186 - DNA, 25 bp, Homo sapien
gagctgctgtggctcaaatgcaagg

SEQ ID NO: 4514187 - DNA, 25 bp, Homo sapien
gctgctgtggctcaaatgcaagggc

SEQ ID NO: 4514188 - DNA, 25 bp, Homo sapien
ccaaaggggactatgagaaatcacc

SEQ ID NO: 4514189 - DNA, 25 bp, Homo sapien
ccagaaagaacatgtgtgtatgtca

SEQ ID NO: 4514190 - DNA, 25 bp, Homo sapien
tgtcatctttgctgaagctggccaa

SEQ ID NO: 4514191 - DNA, 25 bp, Homo sapien
caaacgaataaaaccaaggtcagca

SEQ ID NO: 4514192 - DNA, 25 bp, Homo sapien
acaaaaacgcctcgccgtgcagaaa

SEQ ID NO: 4514193 - DNA, 25 bp, Homo sapien
gcaggtctgccacggacaaaaacgc

SEQ ID NO: 4514194 - DNA, 25 bp, Homo sapien
aaagacacccgggtaagcaggtctg

SEQ ID NO: 4514195 - DNA, 25 bp, Homo sapien
gattgcccatttatgactctaggtg

SEQ ID NO: 4514196 - DNA, 25 bp, Homo sapien
atccctcctctcgtagggtcctagg

SEQ ID NO: 4514197 - DNA, 25 bp, Homo sapien
cctgtcccactctgagtcttcttct

SEQ ID NO: 4514198 - DNA, 25 bp, Homo sapien
cacttccagcccccgtcacttaagg

SEQ ID NO: 4514199 - DNA, 25 bp, Homo sapien
tccagatccctcctctcgtagggtc

SEQ ID NO: 4514200 - DNA, 25 bp, Homo sapien
tgcaatcctccggtgccaatgcaag

SEQ ID NO: 4514201 - DNA, 25 bp, Homo sapien
tgtttgcattttctcggtttggcga

SEQ ID NO: 4514202 - DNA, 25 bp, Homo sapien
tcctccggtgccaatgcaagtgcca

SEQ ID NO: 4514203 - DNA, 25 bp, Homo sapien
tgtgtttgcattttctcggtttggc

SEQ ID NO: 4514204 - DNA, 25 bp, Homo sapien
agaacgggccgcctgagccaatcag

SEQ ID NO: 4514205 - DNA, 25 bp, Homo sapien
acccggcacaatcacgggcggagaa

SEQ ID NO: 4514206 - DNA, 25 bp, Homo sapien
ctgacggccgccgagagactagagg

SEQ ID NO: 4514207 - DNA, 25 bp, Homo sapien
cggtggctccaatatgatccatagc

SEQ ID NO: 4514208 - DNA, 25 bp, Homo sapien
ctcggagatcaaggccaacaacccg

SEQ ID NO: 4514209 - DNA, 25 bp, Homo sapien
tcttcggctcgtgcctggaggacct

SEQ ID NO: 4514210 - DNA, 25 bp, Homo sapien
tgtgcatgccgctcgaggtccgctt

SEQ ID NO: 4514211 - DNA, 25 bp, Homo sapien
gcaaggactaccactcgctgcgcga

SEQ ID NO: 4514212 - DNA, 25 bp, Homo sapien
acggacgaggtggtgcgcagcaagc

SEQ ID NO: 4514213 - DNA, 25 bp, Homo sapien
ctgacggacgaggtggtgcgcagca

SEQ ID NO: 4514214 - DNA, 25 bp, Homo sapien
ggacgaggtggtgcgcagcaagctg

SEQ ID NO: 4514215 - DNA, 25 bp, Homo sapien
cgaggtggtgcgcagcaagctgctg

SEQ ID NO: 4514216 - DNA, 25 bp, Homo sapien
acgagggccgcacgggcgatgagtt

SEQ ID NO: 4514217 - DNA, 25 bp, Homo sapien
tcatccacaactacgggctgcagct

SEQ ID NO: 4514218 - DNA, 25 bp, Homo sapien
tgctgccgttcaccatgtcctccaa

SEQ ID NO: 4514219 - DNA, 25 bp, Homo sapien
ggagctcacgcagatccagagcagc

SEQ ID NO: 4514220 - DNA, 25 bp, Homo sapien
tgaacggcggcgggggccacctgcc

SEQ ID NO: 4514221 - DNA, 25 bp, Homo sapien
aacggcggcgggggccacctgcctg

SEQ ID NO: 4514222 - DNA, 25 bp, Homo sapien
cggcggcgggggccacctgcctggc

SEQ ID NO: 4514223 - DNA, 25 bp, Homo sapien
ctgaacggcggcgggggccacctgc

SEQ ID NO: 4514224 - DNA, 25 bp, Homo sapien
agcggtgcgggagacgtccgcggtc

SEQ ID NO: 4514225 - DNA, 25 bp, Homo sapien
aggatccgcgggagcggtgcgggag

SEQ ID NO: 4514226 - DNA, 25 bp, Homo sapien
ggagacgtccgcggtcagagctcac

SEQ ID NO: 4514227 - DNA, 25 bp, Homo sapien
ctccgcctcgcgccccttgggcagg

SEQ ID NO: 4514228 - DNA, 25 bp, Homo sapien
tcacttagccggctgcaaacgcgat

SEQ ID NO: 4514229 - DNA, 25 bp, Homo sapien
tgagctgctcactccatacaggtgg

SEQ ID NO: 4514230 - DNA, 25 bp, Homo sapien
acattgcggcgccttggtttcccca

SEQ ID NO: 4514231 - DNA, 25 bp, Homo sapien
cccttgggtgacagataacacacat

SEQ ID NO: 4514232 - DNA, 25 bp, Homo sapien
tctgtggaccgctggcgtacgtgtc

SEQ ID NO: 4514233 - DNA, 25 bp, Homo sapien
taggtgcggtgtgcagagctgtgta

SEQ ID NO: 4514234 - DNA, 25 bp, Homo sapien
cacctggtagattgctaggtgcggt

SEQ ID NO: 4514235 - DNA, 25 bp, Homo sapien
gcatcctctgtggaccgctggcgta

SEQ ID NO: 4514236 - DNA, 25 bp, Homo sapien
cttacgggtcttagcatgatgtgcc

SEQ ID NO: 4514237 - DNA, 25 bp, Homo sapien
ttgtgtcactggaatggtcctggtc

SEQ ID NO: 4514238 - DNA, 25 bp, Homo sapien
ttagtctctaacatcagttcccttg

SEQ ID NO: 4514239 - DNA, 25 bp, Homo sapien
ggtcaaatgcatgcaggagcctcat

SEQ ID NO: 4514240 - DNA, 25 bp, Homo sapien
actggttacctgtgatacccccatc

SEQ ID NO: 4514241 - DNA, 25 bp, Homo sapien
gtgatacccccatccccattattgg

SEQ ID NO: 4514242 - DNA, 25 bp, Homo sapien
cccatccccattattggttcgtaga

SEQ ID NO: 4514243 - DNA, 25 bp, Homo sapien
cattattggttcgtagataccagtc

SEQ ID NO: 4514244 - DNA, 25 bp, Homo sapien
gatttgctttgtatacctagtaacc

SEQ ID NO: 4514245 - DNA, 25 bp, Homo sapien
tatgtactttttaggcacgaactga

SEQ ID NO: 4514246 - DNA, 25 bp, Homo sapien
gaatcatagacttttagcacatacc

SEQ ID NO: 4514247 - DNA, 25 bp, Homo sapien
tagcttgcacatagtcggtaccaaa

SEQ ID NO: 4514248 - DNA, 25 bp, Homo sapien
cacatctactatgtgtgagccataa

SEQ ID NO: 4514249 - DNA, 25 bp, Homo sapien
catgttggcaatgggtaatggctac

SEQ ID NO: 4514250 - DNA, 25 bp, Homo sapien
tgcccggccgttttgcacagatttt

SEQ ID NO: 4514251 - DNA, 25 bp, Homo sapien
aaggtgccatcgttccacattcctg

SEQ ID NO: 4514252 - DNA, 25 bp, Homo sapien
aggactgttcgtctctctggaatat

SEQ ID NO: 4514253 - DNA, 25 bp, Homo sapien
tctctggaatattagtatcgtaagc

SEQ ID NO: 4514254 - DNA, 25 bp, Homo sapien
attcaaaatcaaggactgttcgtct

SEQ ID NO: 4514255 - DNA, 25 bp, Homo sapien
aatcaaggactgttcgtctctctgg

SEQ ID NO: 4514256 - DNA, 25 bp, Homo sapien
catatactttaacacaggtatgtcc

SEQ ID NO: 4514257 - DNA, 25 bp, Homo sapien
gagtccatgcaggcaatgtttgcta

SEQ ID NO: 4514258 - DNA, 25 bp, Homo sapien
gtggctgatttacttccatatactt

SEQ ID NO: 4514259 - DNA, 25 bp, Homo sapien
tcagatcaatggcaggccaagaaag

SEQ ID NO: 4514260 - DNA, 25 bp, Homo sapien
tatcaataatctgatttatcacagg

SEQ ID NO: 4514261 - DNA, 25 bp, Homo sapien
ttatcaataatctgatttatcacag

SEQ ID NO: 4514262 - DNA, 25 bp, Homo sapien
aaagctgcccgcatgatggtatttt

SEQ ID NO: 4514263 - DNA, 25 bp, Homo sapien
tgtaacctttgagaacttagaagag

SEQ ID NO: 4514264 - DNA, 25 bp, Homo sapien
gatcttttcttacaggatgcttagt

SEQ ID NO: 4514265 - DNA, 25 bp, Homo sapien
aactacatgatgttaaattccctgc

SEQ ID NO: 4514266 - DNA, 25 bp, Homo sapien
ttcattagttttctgtatatcccat

SEQ ID NO: 4514267 - DNA, 25 bp, Homo sapien
gcaaccatattagcattcttaatgg

SEQ ID NO: 4514268 - DNA, 25 bp, Homo sapien
caagaacagcaaccatattagcatt

SEQ ID NO: 4514269 - DNA, 25 bp, Homo sapien
ctgtatatcccatttggttttgaaa

SEQ ID NO: 4514270 - DNA, 25 bp, Homo sapien
ttcatctaggagaagaattttggga

SEQ ID NO: 4514271 - DNA, 25 bp, Homo sapien
cttcatctaggagaagaattttggg

SEQ ID NO: 4514272 - DNA, 25 bp, Homo sapien
ctgagaggagaacacccttttctcc

SEQ ID NO: 4514273 - DNA, 25 bp, Homo sapien
cggatcaagaccactgcattggcca

SEQ ID NO: 4514274 - DNA, 25 bp, Homo sapien
aattccggatcaagaccactgcatt

SEQ ID NO: 4514275 - DNA, 25 bp, Homo sapien
tccggatcaagaccactgcattggc

SEQ ID NO: 4514276 - DNA, 25 bp, Homo sapien
gggaaattccggatcaagaccactg

SEQ ID NO: 4514277 - DNA, 25 bp, Homo sapien
catcagcaccataagcaatgttctc

SEQ ID NO: 4514278 - DNA, 25 bp, Homo sapien
atcagcaccataagcaatgttctca

SEQ ID NO: 4514279 - DNA, 25 bp, Homo sapien
gacggatgtcatggccatcaagact

SEQ ID NO: 4514280 - DNA, 25 bp, Homo sapien
ccagtgccgtgacagatcctgacgg

SEQ ID NO: 4514281 - DNA, 25 bp, Homo sapien
ccgtgacagatcctgacggaatgga

SEQ ID NO: 4514282 - DNA, 25 bp, Homo sapien
gtttagctgacggatgtcatggcca

SEQ ID NO: 4514283 - DNA, 25 bp, Homo sapien
gggcaagcgggatcggcaaaatgca

SEQ ID NO: 4514284 - DNA, 25 bp, Homo sapien
aagcgggatcggcaaaatgcacgtt

SEQ ID NO: 4514285 - DNA, 25 bp, Homo sapien
caagcgggatcggcaaaatgcacgt

SEQ ID NO: 4514286 - DNA, 25 bp, Homo sapien
ggcaagcgggatcggcaaaatgcac

SEQ ID NO: 4514287 - DNA, 25 bp, Homo sapien
gaagcttttctcatttaagataacc

SEQ ID NO: 4514288 - DNA, 25 bp, Homo sapien
ggaagcttttctcatttaagataac

SEQ ID NO: 4514289 - DNA, 25 bp, Homo sapien
ctggaagcttttctcatttaagata

SEQ ID NO: 4514290 - DNA, 25 bp, Homo sapien
agcttttctcatttaagataaccct

SEQ ID NO: 4514291 - DNA, 25 bp, Homo sapien
caatcaggtttccggacagcctagt

SEQ ID NO: 4514292 - DNA, 25 bp, Homo sapien
ttgctgactacatcacatggtccac

SEQ ID NO: 4514293 - DNA, 25 bp, Homo sapien
ttccggacagcctagttctccaaag

SEQ ID NO: 4514294 - DNA, 25 bp, Homo sapien
tgactacatcacatggtccactttg

SEQ ID NO: 4514295 - DNA, 25 bp, Homo sapien
ctttggtcagtttccgtagatatcg

SEQ ID NO: 4514296 - DNA, 25 bp, Homo sapien
cccgattaggtgagacacaaaacat

SEQ ID NO: 4514297 - DNA, 25 bp, Homo sapien
ggttaatcaattcccctgtgccagc

SEQ ID NO: 4514298 - DNA, 25 bp, Homo sapien
acgaatggcattggcggcagcacca

SEQ ID NO: 4514299 - DNA, 25 bp, Homo sapien
cagaggcgggtcaggttgtcgctgt

SEQ ID NO: 4514300 - DNA, 25 bp, Homo sapien
tgaagtttgcatgaggtagacacga

SEQ ID NO: 4514301 - DNA, 25 bp, Homo sapien
tgaggtagacacgaatggcattggc

SEQ ID NO: 4514302 - DNA, 25 bp, Homo sapien
tccccaggaagaaaggggcagacat

SEQ ID NO: 4514303 - DNA, 25 bp, Homo sapien
ttccccaggaagaaaggggcagaca

SEQ ID NO: 4514304 - DNA, 25 bp, Homo sapien
gtccgggcgccatgggtcgtagccg

SEQ ID NO: 4514305 - DNA, 25 bp, Homo sapien
ggcgccatgggtcgtagccgctggt

SEQ ID NO: 4514306 - DNA, 25 bp, Homo sapien
ccatgggtcgtagccgctggtcgtc

SEQ ID NO: 4514307 - DNA, 25 bp, Homo sapien
tcccggcctccgagagtccgggcgc

SEQ ID NO: 4514308 - DNA, 25 bp, Homo sapien
cgcccggccggcaagagccccgcac

SEQ ID NO: 4514309 - DNA, 25 bp, Homo sapien
ccatagccgcgccagcctcggggca

SEQ ID NO: 4514310 - DNA, 25 bp, Homo sapien
gcgatatggactgggggcgcggctg

SEQ ID NO: 4514311 - DNA, 25 bp, Homo sapien
gggcagtgaagggcgatatggactg

SEQ ID NO: 4514312 - DNA, 25 bp, Homo sapien
gcagtgaagggcgatatggactggg

SEQ ID NO: 4514313 - DNA, 25 bp, Homo sapien
cttaagttatagtcatgcgatttcc

SEQ ID NO: 4514314 - DNA, 25 bp, Homo sapien
tatagtcatgcgatttccattcttt

SEQ ID NO: 4514315 - DNA, 25 bp, Homo sapien
agttatagtcatgcgatttccattc

SEQ ID NO: 4514316 - DNA, 25 bp, Homo sapien
taagttatagtcatgcgatttccat

SEQ ID NO: 4514317 - DNA, 25 bp, Homo sapien
aatttggaagagtccgttgaagtca

SEQ ID NO: 4514318 - DNA, 25 bp, Homo sapien
tcggcaaaatcgtactgctgctctc

SEQ ID NO: 4514319 - DNA, 25 bp, Homo sapien
tattccatcggcaaaatcgtactgc

SEQ ID NO: 4514320 - DNA, 25 bp, Homo sapien
cacaaggacccgatatttgcactct

SEQ ID NO: 4514321 - DNA, 25 bp, Homo sapien
tataaaagtatcatgaggatgccaa

SEQ ID NO: 4514322 - DNA, 25 bp, Homo sapien
tgttaatgtcgtatttataaaagta

SEQ ID NO: 4514323 - DNA, 25 bp, Homo sapien
aaaagtatcatgaggatgccaactg

SEQ ID NO: 4514324 - DNA, 25 bp, Homo sapien
ctgttaatgtcgtatttataaaagt

SEQ ID NO: 4514325 - DNA, 25 bp, Homo sapien
agcactaattcttggcaacagaaca

SEQ ID NO: 4514326 - DNA, 25 bp, Homo sapien
tacaatagtacagcactaattcttg

SEQ ID NO: 4514327 - DNA, 25 bp, Homo sapien
agtacagcactaattcttggcaaca

SEQ ID NO: 4514328 - DNA, 25 bp, Homo sapien
ctaaaggaactacaatagtacagca

SEQ ID NO: 4514329 - DNA, 25 bp, Homo sapien
tcttggcagccaagcccagcaaaag

SEQ ID NO: 4514330 - DNA, 25 bp, Homo sapien
caagcccagcaaaagaatggcacac

SEQ ID NO: 4514331 - DNA, 25 bp, Homo sapien
ccttcttcttggcagccaagcccag

SEQ ID NO: 4514332 - DNA, 25 bp, Homo sapien
tcttcttggcagccaagcccagcaa

SEQ ID NO: 4514333 - DNA, 25 bp, Homo sapien
ctccttgcacaggctccacgctgtc

SEQ ID NO: 4514334 - DNA, 25 bp, Homo sapien
tccttgcacaggctccacgctgtca

SEQ ID NO: 4514335 - DNA, 25 bp, Homo sapien
ccatgcttgtgggcagccccaagct

SEQ ID NO: 4514336 - DNA, 25 bp, Homo sapien
catgcttgtgggcagccccaagctc

SEQ ID NO: 4514337 - DNA, 25 bp, Homo sapien
caccatgcttgtgggcagccccaag

SEQ ID NO: 4514338 - DNA, 25 bp, Homo sapien
accatgcttgtgggcagccccaagc

SEQ ID NO: 4514339 - DNA, 25 bp, Homo sapien
tcctggactgggctcatgagcaggg

SEQ ID NO: 4514340 - DNA, 25 bp, Homo sapien
ctggggctcctggactgggctcatg

SEQ ID NO: 4514341 - DNA, 25 bp, Homo sapien
gggctcctggactgggctcatgagc

SEQ ID NO: 4514342 - DNA, 25 bp, Homo sapien
ggctcctggactgggctcatgagca

SEQ ID NO: 4514343 - DNA, 25 bp, Homo sapien
aatttgctgtgtcccttgtagtcgc

SEQ ID NO: 4514344 - DNA, 25 bp, Homo sapien
caagaatttgctgtgtcccttgtag

SEQ ID NO: 4514345 - DNA, 25 bp, Homo sapien
agaatttgctgtgtcccttgtagtc

SEQ ID NO: 4514346 - DNA, 25 bp, Homo sapien
ttgctgtgtcccttgtagtcgccac

SEQ ID NO: 4514347 - DNA, 25 bp, Homo sapien
tctcctgcagctccagcagcttcac

SEQ ID NO: 4514348 - DNA, 25 bp, Homo sapien
catctcctgcagctccagcagcttc

SEQ ID NO: 4514349 - DNA, 25 bp, Homo sapien
cagctgcaacaccatctcctgcagc

SEQ ID NO: 4514350 - DNA, 25 bp, Homo sapien
accatctcctgcagctccagcagct

SEQ ID NO: 4514351 - DNA, 25 bp, Homo sapien
gggtgctcagctgtcacgctgctgc

SEQ ID NO: 4514352 - DNA, 25 bp, Homo sapien
tgctgccagcgctcaccgtcacagc

SEQ ID NO: 4514353 - DNA, 25 bp, Homo sapien
ctgtcacgctgctgccagcgctcac

SEQ ID NO: 4514354 - DNA, 25 bp, Homo sapien
ccccgcagagatgttgcacactcta

SEQ ID NO: 4514355 - DNA, 25 bp, Homo sapien
ctgtccagggccagcctgatggtgt

SEQ ID NO: 4514356 - DNA, 25 bp, Homo sapien
tcatctcctccctgtccagggccag

SEQ ID NO: 4514357 - DNA, 25 bp, Homo sapien
catctcctccctgtccagggccagc

SEQ ID NO: 4514358 - DNA, 25 bp, Homo sapien
tccctgtccagggccagcctgatgg

SEQ ID NO: 4514359 - DNA, 25 bp, Homo sapien
catccctctctgtagtactggaaga

SEQ ID NO: 4514360 - DNA, 25 bp, Homo sapien
cctctctgtagtactggaagaatcc

SEQ ID NO: 4514361 - DNA, 25 bp, Homo sapien
tggcatccctctctgtagtactgga

SEQ ID NO: 4514362 - DNA, 25 bp, Homo sapien
tgatggcatccctctctgtagtact

SEQ ID NO: 4514363 - DNA, 25 bp, Homo sapien
ctgccctcaggtggcattttcaagt

SEQ ID NO: 4514364 - DNA, 25 bp, Homo sapien
cccaggccctggggctgggaccgct

SEQ ID NO: 4514365 - DNA, 25 bp, Homo sapien
tcgcccccaggccctggggctggga

SEQ ID NO: 4514366 - DNA, 25 bp, Homo sapien
ggctgggaccgctgcctctggctcc

SEQ ID NO: 4514367 - DNA, 25 bp, Homo sapien
aggccctggggctgggaccgctgcc

SEQ ID NO: 4514368 - DNA, 25 bp, Homo sapien
tttcacctgctcttgtaactgtgcc

SEQ ID NO: 4514369 - DNA, 25 bp, Homo sapien
cctgctcttgtaactgtgcctgctt

SEQ ID NO: 4514370 - DNA, 25 bp, Homo sapien
gctctttcacctgctcttgtaactg

SEQ ID NO: 4514371 - DNA, 25 bp, Homo sapien
gcctgcttctcctgggcactagctc

SEQ ID NO: 4514372 - DNA, 25 bp, Homo sapien
ctgagggcaagatgtgagcattctt

SEQ ID NO: 4514373 - DNA, 25 bp, Homo sapien
catggcctccctgctctccaggtcc

SEQ ID NO: 4514374 - DNA, 25 bp, Homo sapien
atggcctccctgctctccaggtcct

SEQ ID NO: 4514375 - DNA, 25 bp, Homo sapien
gggccgaggtgcctcctccccctca

SEQ ID NO: 4514376 - DNA, 25 bp, Homo sapien
ctgtccagatgttctcctccgtgtc

SEQ ID NO: 4514377 - DNA, 25 bp, Homo sapien
cactgtccagatgttctcctccgtg

SEQ ID NO: 4514378 - DNA, 25 bp, Homo sapien
tgggacactcggcatgggccgaggt

SEQ ID NO: 4514379 - DNA, 25 bp, Homo sapien
gcacattcccactactggtcggtgc

SEQ ID NO: 4514380 - DNA, 25 bp, Homo sapien
acttagtgcaggcacccggttagta

SEQ ID NO: 4514381 - DNA, 25 bp, Homo sapien
ttagtgcaggcacccggttagtata

SEQ ID NO: 4514382 - DNA, 25 bp, Homo sapien
cattcccactactggtcggtgcggg

SEQ ID NO: 4514383 - DNA, 25 bp, Homo sapien
ctcaactgggccgttagctgctgtt

SEQ ID NO: 4514384 - DNA, 25 bp, Homo sapien
actgggccgttagctgctgtttctg

SEQ ID NO: 4514385 - DNA, 25 bp, Homo sapien
gctggctggcagcttccagacgctc

SEQ ID NO: 4514386 - DNA, 25 bp, Homo sapien
caactgggccgttagctgctgtttc

SEQ ID NO: 4514387 - DNA, 25 bp, Homo sapien
ttttggcaggccatctcggccaccg

SEQ ID NO: 4514388 - DNA, 25 bp, Homo sapien
gctgctgcagctggttcattagctg

SEQ ID NO: 4514389 - DNA, 25 bp, Homo sapien
tgcagtcactgcctgtacagcgcct

SEQ ID NO: 4514390 - DNA, 25 bp, Homo sapien
gctggttcattagctgggtctgctg

SEQ ID NO: 4514391 - DNA, 25 bp, Homo sapien
ctgctgctgataggtggccacgtac

SEQ ID NO: 4514392 - DNA, 25 bp, Homo sapien
gtgacccaggtaatggtctggctgc

SEQ ID NO: 4514393 - DNA, 25 bp, Homo sapien
tgcaggtgacccaggtaatggtctg

SEQ ID NO: 4514394 - DNA, 25 bp, Homo sapien
tgacccaggtaatggtctggctgct

SEQ ID NO: 4514395 - DNA, 25 bp, Homo sapien
caggtgacccaggtaatggtctggc

SEQ ID NO: 4514396 - DNA, 25 bp, Homo sapien
aagtgactgcctccctttcctagaa

SEQ ID NO: 4514397 - DNA, 25 bp, Homo sapien
tggccccttactccaggcctaagtg

SEQ ID NO: 4514398 - DNA, 25 bp, Homo sapien
tctgggcccattaatagggtagcga

SEQ ID NO: 4514399 - DNA, 25 bp, Homo sapien
cgtggtggctggtttccagattctg

SEQ ID NO: 4514400 - DNA, 25 bp, Homo sapien
gaagactgttataccactctgtctc

SEQ ID NO: 4514401 - DNA, 25 bp, Homo sapien
taagaagactgttataccactctgt

SEQ ID NO: 4514402 - DNA, 25 bp, Homo sapien
gcataagaagactgttataccactc

SEQ ID NO: 4514403 - DNA, 25 bp, Homo sapien
gtctggcataagaagactgttatac

SEQ ID NO: 4514404 - DNA, 25 bp, Homo sapien
ctgcccccgggctggagctgcctct

SEQ ID NO: 4514405 - DNA, 25 bp, Homo sapien
agctgcctctggcctggcacctccc

SEQ ID NO: 4514406 - DNA, 25 bp, Homo sapien
tgcctctggcctggcacctcccctc

SEQ ID NO: 4514407 - DNA, 25 bp, Homo sapien
tcccctccccagaggctggtgccca

SEQ ID NO: 4514408 - DNA, 25 bp, Homo sapien
ctccaactgtagtacgctcttgttc

SEQ ID NO: 4514409 - DNA, 25 bp, Homo sapien
ccaactgtagtacgctcttgttctc

SEQ ID NO: 4514410 - DNA, 25 bp, Homo sapien
tgctccaactgtagtacgctcttgt

SEQ ID NO: 4514411 - DNA, 25 bp, Homo sapien
aactgtagtacgctcttgttctcat

SEQ ID NO: 4514412 - DNA, 25 bp, Homo sapien
cacaggtgcctttaggagtaacatt

SEQ ID NO: 4514413 - DNA, 25 bp, Homo sapien
caggtgcctttaggagtaacatttc

SEQ ID NO: 4514414 - DNA, 25 bp, Homo sapien
ctcacaggtgcctttaggagtaaca

SEQ ID NO: 4514415 - DNA, 25 bp, Homo sapien
tcacaggtgcctttaggagtaacat

SEQ ID NO: 4514416 - DNA, 25 bp, Homo sapien
ctgtggctcggccagctgccgaagc

SEQ ID NO: 4514417 - DNA, 25 bp, Homo sapien
gccagctgccgaagcctctcctcct

SEQ ID NO: 4514418 - DNA, 25 bp, Homo sapien
ggctcggccagctgccgaagcctct

SEQ ID NO: 4514419 - DNA, 25 bp, Homo sapien
ctcggccagctgccgaagcctctcc

SEQ ID NO: 4514420 - DNA, 25 bp, Homo sapien
tccttttgcccctcattcaggagac

SEQ ID NO: 4514421 - DNA, 25 bp, Homo sapien
ccgaagcctctccttttgcccctca

SEQ ID NO: 4514422 - DNA, 25 bp, Homo sapien
gcctctccttttgcccctcattcag

SEQ ID NO: 4514423 - DNA, 25 bp, Homo sapien
cgaagcctctccttttgcccctcat

SEQ ID NO: 4514424 - DNA, 25 bp, Homo sapien
agcgctcctgccactctctctagtt

SEQ ID NO: 4514425 - DNA, 25 bp, Homo sapien
tggagcgctcctgccactctctcta

SEQ ID NO: 4514426 - DNA, 25 bp, Homo sapien
cctggagcgctcctgccactctctc

SEQ ID NO: 4514427 - DNA, 25 bp, Homo sapien
ctctagttccttcctcaggtgctgc

SEQ ID NO: 4514428 - DNA, 25 bp, Homo sapien
tctctacccgatatttatcatgctt

SEQ ID NO: 4514429 - DNA, 25 bp, Homo sapien
ctctacccgatatttatcatgcttc

SEQ ID NO: 4514430 - DNA, 25 bp, Homo sapien
tttagatgttcagcatattcatccc

SEQ ID NO: 4514431 - DNA, 25 bp, Homo sapien
tagatgttcagcatattcatccctc

SEQ ID NO: 4514432 - DNA, 25 bp, Homo sapien
ccctctctagctggacttctttaag

SEQ ID NO: 4514433 - DNA, 25 bp, Homo sapien
ggacttctttaagtgactccttcaa

SEQ ID NO: 4514434 - DNA, 25 bp, Homo sapien
ttccactccatacgtgctttactgc

SEQ ID NO: 4514435 - DNA, 25 bp, Homo sapien
atacgtgctttactgcggctggaga

SEQ ID NO: 4514436 - DNA, 25 bp, Homo sapien
cagctgcgctttcagcagtgcctgc

SEQ ID NO: 4514437 - DNA, 25 bp, Homo sapien
tccatacgtgctttactgcggctgg

SEQ ID NO: 4514438 - DNA, 25 bp, Homo sapien
tcttctgtgtggcggtgacagcaga

SEQ ID NO: 4514439 - DNA, 25 bp, Homo sapien
tctgtgtggcggtgacagcagagag

SEQ ID NO: 4514440 - DNA, 25 bp, Homo sapien
gagcccgctctaactctcctttacg

SEQ ID NO: 4514441 - DNA, 25 bp, Homo sapien
ttcttctgtgtggcggtgacagcag

SEQ ID NO: 4514442 - DNA, 25 bp, Homo sapien
tgttgcagacggacggccagatcct

SEQ ID NO: 4514443 - DNA, 25 bp, Homo sapien
caatgaatgttgcagacggacggcc

SEQ ID NO: 4514444 - DNA, 25 bp, Homo sapien
gaatgttgcagacggacggccagat

SEQ ID NO: 4514445 - DNA, 25 bp, Homo sapien
aatgaatgttgcagacggacggcca

SEQ ID NO: 4514446 - DNA, 25 bp, Homo sapien
cttcaaagtatctgagagaatgttt

SEQ ID NO: 4514447 - DNA, 25 bp, Homo sapien
cgtgtggtacaggtccgtatttagt

SEQ ID NO: 4514448 - DNA, 25 bp, Homo sapien
tccctttctgtatgttcaatctctg

SEQ ID NO: 4514449 - DNA, 25 bp, Homo sapien
cctttctgtatgttcaatctctgga

SEQ ID NO: 4514450 - DNA, 25 bp, Homo sapien
tttccctttctgtatgttcaatctc

SEQ ID NO: 4514451 - DNA, 25 bp, Homo sapien
ctctagctccctttcggctttctgt

SEQ ID NO: 4514452 - DNA, 25 bp, Homo sapien
ctagctccctttcggctttctgttt

SEQ ID NO: 4514453 - DNA, 25 bp, Homo sapien
ctccctttcggctttctgtttctcg

SEQ ID NO: 4514454 - DNA, 25 bp, Homo sapien
ctgtttctcgttgtttgctttcttt

SEQ ID NO: 4514455 - DNA, 25 bp, Homo sapien
gagatggtactgcaagagacatgtc

SEQ ID NO: 4514456 - DNA, 25 bp, Homo sapien
tggtactgcaagagacatgtcccca

SEQ ID NO: 4514457 - DNA, 25 bp, Homo sapien
gatggtactgcaagagacatgtccc

SEQ ID NO: 4514458 - DNA, 25 bp, Homo sapien
atggtactgcaagagacatgtcccc

SEQ ID NO: 4514459 - DNA, 25 bp, Homo sapien
ttccagctgatgttccacttgtttc

SEQ ID NO: 4514460 - DNA, 25 bp, Homo sapien
cttccagctgatgttccacttgttt

SEQ ID NO: 4514461 - DNA, 25 bp, Homo sapien
tcttccagctgatgttccacttgtt

SEQ ID NO: 4514462 - DNA, 25 bp, Homo sapien
ttcttccagctgatgttccacttgt

SEQ ID NO: 4514463 - DNA, 25 bp, Homo sapien
gactgacttttacggacctcgagtc

SEQ ID NO: 4514464 - DNA, 25 bp, Homo sapien
tgactgacttttacggacctcgagt

SEQ ID NO: 4514465 - DNA, 25 bp, Homo sapien
ctgacttttacggacctcgagtctg

SEQ ID NO: 4514466 - DNA, 25 bp, Homo sapien
tgacttttacggacctcgagtctgg

SEQ ID NO: 4514467 - DNA, 25 bp, Homo sapien
ggctggggtgtgtgtggactgtctc

SEQ ID NO: 4514468 - DNA, 25 bp, Homo sapien
ggaggagtggggggagaggtagaga

SEQ ID NO: 4514469 - DNA, 25 bp, Homo sapien
tagagagagcaatcattagggctgg

SEQ ID NO: 4514470 - DNA, 25 bp, Homo sapien
ctggcagaggggcaccccgtcccac

SEQ ID NO: 4514471 - DNA, 25 bp, Homo sapien
gagggctgccctgcagggtcactgc

SEQ ID NO: 4514472 - DNA, 25 bp, Homo sapien
ggaggttggagggctgccctgcagg

SEQ ID NO: 4514473 - DNA, 25 bp, Homo sapien
gaggaggaggttggagggctgccct

SEQ ID NO: 4514474 - DNA, 25 bp, Homo sapien
agggctgccctgcagggtcactgca

SEQ ID NO: 4514475 - DNA, 25 bp, Homo sapien
atgatgtagggctctccccgtggat

SEQ ID NO: 4514476 - DNA, 25 bp, Homo sapien
tagggctctccccgtggatacctgt

SEQ ID NO: 4514477 - DNA, 25 bp, Homo sapien
atgtagggctctccccgtggatacc

SEQ ID NO: 4514478 - DNA, 25 bp, Homo sapien
agggctctccccgtggatacctgtt

SEQ ID NO: 4514479 - DNA, 25 bp, Homo sapien
accacagcaccctgcggccctttca

SEQ ID NO: 4514480 - DNA, 25 bp, Homo sapien
agcaccctgcggccctttcagtgac

SEQ ID NO: 4514481 - DNA, 25 bp, Homo sapien
acagcaccctgcggccctttcagtg

SEQ ID NO: 4514482 - DNA, 25 bp, Homo sapien
ccacagcaccctgcggccctttcag

SEQ ID NO: 4514483 - DNA, 25 bp, Homo sapien
accagaagtggctgtctcatggatg

SEQ ID NO: 4514484 - DNA, 25 bp, Homo sapien
agaagtggctgtctcatggatgctg

SEQ ID NO: 4514485 - DNA, 25 bp, Homo sapien
acaccagggctgtttctctgccaat

SEQ ID NO: 4514486 - DNA, 25 bp, Homo sapien
aacaccagggctgtttctctgccaa

SEQ ID NO: 4514487 - DNA, 25 bp, Homo sapien
ctggcagcagtcttgtcgttggaga

SEQ ID NO: 4514488 - DNA, 25 bp, Homo sapien
actctggcagcagtcttgtcgttgg

SEQ ID NO: 4514489 - DNA, 25 bp, Homo sapien
ctctggcagcagtcttgtcgttgga

SEQ ID NO: 4514490 - DNA, 25 bp, Homo sapien
tctggcagcagtcttgtcgttggag

SEQ ID NO: 4514491 - DNA, 25 bp, Homo sapien
ggctgctgccaatttactttgtcga

SEQ ID NO: 4514492 - DNA, 25 bp, Homo sapien
ctgccaatttactttgtcgagtttc

SEQ ID NO: 4514493 - DNA, 25 bp, Homo sapien
ctgctgccaatttactttgtcgagt

SEQ ID NO: 4514494 - DNA, 25 bp, Homo sapien
ctcttggctgctgccaatttacttt

SEQ ID NO: 4514495 - DNA, 25 bp, Homo sapien
gtgggaatctggcaccccatcatcc

SEQ ID NO: 4514496 - DNA, 25 bp, Homo sapien
gattcatggaagtttgcaggagagt

SEQ ID NO: 4514497 - DNA, 25 bp, Homo sapien
gcctgcatgattcatggaagtttgc

SEQ ID NO: 4514498 - DNA, 25 bp, Homo sapien
gcatgattcatggaagtttgcagga

SEQ ID NO: 4514499 - DNA, 25 bp, Homo sapien
ttcaccctcactagggcggcagctg

SEQ ID NO: 4514500 - DNA, 25 bp, Homo sapien
aatgtaactcgcctgccggttcacc

SEQ ID NO: 4514501 - DNA, 25 bp, Homo sapien
gctgggctcacccattaagcaagaa

SEQ ID NO: 4514502 - DNA, 25 bp, Homo sapien
tttcagaaatgtaactcgcctgccg

SEQ ID NO: 4514503 - DNA, 25 bp, Homo sapien
cagagctgcttccaggggaggggtt

SEQ ID NO: 4514504 - DNA, 25 bp, Homo sapien
tcagagctgcttccaggggaggggt

SEQ ID NO: 4514505 - DNA, 25 bp, Homo sapien
tgcttccaggggaggggttctaatc

SEQ ID NO: 4514506 - DNA, 25 bp, Homo sapien
agctgcttccaggggaggggttcta

SEQ ID NO: 4514507 - DNA, 25 bp, Homo sapien
ctgggtcagtagacgcttcactgcc

SEQ ID NO: 4514508 - DNA, 25 bp, Homo sapien
tgtggtcctgcgcctacacctgggc

SEQ ID NO: 4514509 - DNA, 25 bp, Homo sapien
gcctgggtcagtagacgcttcactg

SEQ ID NO: 4514510 - DNA, 25 bp, Homo sapien
ccgcctgggtcagtagacgcttcac

SEQ ID NO: 4514511 - DNA, 25 bp, Homo sapien
ctgcaaagagtagggagcctgtaag

SEQ ID NO: 4514512 - DNA, 25 bp, Homo sapien
cctgtaaggtcacctgttgagcaag

SEQ ID NO: 4514513 - DNA, 25 bp, Homo sapien
caaagagtagggagcctgtaaggtc

SEQ ID NO: 4514514 - DNA, 25 bp, Homo sapien
gagtagggagcctgtaaggtcacct

SEQ ID NO: 4514515 - DNA, 25 bp, Homo sapien
gagagcgccgtctggatggagatga

SEQ ID NO: 4514516 - DNA, 25 bp, Homo sapien
atcagtttctgctcggcatgggcca

SEQ ID NO: 4514517 - DNA, 25 bp, Homo sapien
ggccagggagagcgccgtctggatg

SEQ ID NO: 4514518 - DNA, 25 bp, Homo sapien
tcagtttctgctcggcatgggccat

SEQ ID NO: 4514519 - DNA, 25 bp, Homo sapien
ctgggtaaacacacagacatgctgg

SEQ ID NO: 4514520 - DNA, 25 bp, Homo sapien
gagtaccccggaagccagcctgtag

SEQ ID NO: 4514521 - DNA, 25 bp, Homo sapien
aggccagctgcttgagtaccccgga

SEQ ID NO: 4514522 - DNA, 25 bp, Homo sapien
ctgcttgagtaccccggaagccagc

SEQ ID NO: 4514523 - DNA, 25 bp, Homo sapien
agcctgtagccccaggctacagctg

SEQ ID NO: 4514524 - DNA, 25 bp, Homo sapien
ggcctctcaggcattcggctgaccc

SEQ ID NO: 4514525 - DNA, 25 bp, Homo sapien
gcctctcaggcattcggctgaccct

SEQ ID NO: 4514526 - DNA, 25 bp, Homo sapien
ctttgggcctgtccggcctctcagg

SEQ ID NO: 4514527 - DNA, 25 bp, Homo sapien
cggcctctcaggcattcggctgacc

SEQ ID NO: 4514528 - DNA, 25 bp, Homo sapien
acagcatggtcaaagcgtaggctct

SEQ ID NO: 4514529 - DNA, 25 bp, Homo sapien
tcaaagcgtaggctctcctccagga

SEQ ID NO: 4514530 - DNA, 25 bp, Homo sapien
tggtcaaagcgtaggctctcctcca

SEQ ID NO: 4514531 - DNA, 25 bp, Homo sapien
agcatggtcaaagcgtaggctctcc

SEQ ID NO: 4514532 - DNA, 25 bp, Homo sapien
cagccaaggcttttttctaacaact

SEQ ID NO: 4514533 - DNA, 25 bp, Homo sapien
acatgcagccaaggcttttttctaa

SEQ ID NO: 4514534 - DNA, 25 bp, Homo sapien
tgcagccaaggcttttttctaacaa

SEQ ID NO: 4514535 - DNA, 25 bp, Homo sapien
atgcagccaaggcttttttctaaca

SEQ ID NO: 4514536 - DNA, 25 bp, Homo sapien
ttgaacagcaacatttcacggttat

SEQ ID NO: 4514537 - DNA, 25 bp, Homo sapien
tggcaattgaacagcaacatttcac

SEQ ID NO: 4514538 - DNA, 25 bp, Homo sapien
caattgaacagcaacatttcacggt

SEQ ID NO: 4514539 - DNA, 25 bp, Homo sapien
cttggcaattgaacagcaacatttc

SEQ ID NO: 4514540 - DNA, 25 bp, Homo sapien
ctttccacataatggtgttacttac

SEQ ID NO: 4514541 - DNA, 25 bp, Homo sapien
cagggccctttccacataatggtgt

SEQ ID NO: 4514542 - DNA, 25 bp, Homo sapien
ggccctttccacataatggtgttac

SEQ ID NO: 4514543 - DNA, 25 bp, Homo sapien
agagccagggccctttccacataat

SEQ ID NO: 4514544 - DNA, 25 bp, Homo sapien
aggtctagaggattaaggtgcttgt

SEQ ID NO: 4514545 - DNA, 25 bp, Homo sapien
caggtctagaggattaaggtgcttg

SEQ ID NO: 4514546 - DNA, 25 bp, Homo sapien
ctcctcatagttcttccctgggtct

SEQ ID NO: 4514547 - DNA, 25 bp, Homo sapien
tcctcatagttcttccctgggtctt

SEQ ID NO: 4514548 - DNA, 25 bp, Homo sapien
tccctgggtcttccttagcaaagcc

SEQ ID NO: 4514549 - DNA, 25 bp, Homo sapien
atccaccgtgggctcgctcacatac

SEQ ID NO: 4514550 - DNA, 25 bp, Homo sapien
tctggtatcttctggtgtggactat

SEQ ID NO: 4514551 - DNA, 25 bp, Homo sapien
tcttctggtgtggactatgctctcc

SEQ ID NO: 4514552 - DNA, 25 bp, Homo sapien
ggacctctgaaggactgaaacatcc

SEQ ID NO: 4514553 - DNA, 25 bp, Homo sapien
ataaaggtgattgaaaccatgtccc

SEQ ID NO: 4514554 - DNA, 25 bp, Homo sapien
tgcttaataaaggtgattgaaacca

SEQ ID NO: 4514555 - DNA, 25 bp, Homo sapien
aggcagtcagggtgaatgccagcat

SEQ ID NO: 4514556 - DNA, 25 bp, Homo sapien
taataaaggtgattgaaaccatgtc

SEQ ID NO: 4514557 - DNA, 25 bp, Homo sapien
ttttccacaagcctcgtcagcacaa

SEQ ID NO: 4514558 - DNA, 25 bp, Homo sapien
ccattttccacaagcctcgtcagca

SEQ ID NO: 4514559 - DNA, 25 bp, Homo sapien
attttccacaagcctcgtcagcaca

SEQ ID NO: 4514560 - DNA, 25 bp, Homo sapien
tccattttccacaagcctcgtcagc

SEQ ID NO: 4514561 - DNA, 25 bp, Homo sapien
gttgatgaactcagtagcaaaagtc

SEQ ID NO: 4514562 - DNA, 25 bp, Homo sapien
gaactcagtagcaaaagtcacgtca

SEQ ID NO: 4514563 - DNA, 25 bp, Homo sapien
agtagcaaaagtcacgtcagcagag

SEQ ID NO: 4514564 - DNA, 25 bp, Homo sapien
tcagtagcaaaagtcacgtcagcag

SEQ ID NO: 4514565 - DNA, 25 bp, Homo sapien
ccaagcaaggcccacattgattttg

SEQ ID NO: 4514566 - DNA, 25 bp, Homo sapien
gcctttccctatattaacctgttca

SEQ ID NO: 4514567 - DNA, 25 bp, Homo sapien
tatattaacctgttcagtgatgtac

SEQ ID NO: 4514568 - DNA, 25 bp, Homo sapien
tcatctgcatgacggagggtgtaat

SEQ ID NO: 4514569 - DNA, 25 bp, Homo sapien
acttccttgataatggatgccaggg

SEQ ID NO: 4514570 - DNA, 25 bp, Homo sapien
aaacttccttgataatggatgccag

SEQ ID NO: 4514571 - DNA, 25 bp, Homo sapien
caaacttccttgataatggatgcca

SEQ ID NO: 4514572 - DNA, 25 bp, Homo sapien
aacttccttgataatggatgccagg

SEQ ID NO: 4514573 - DNA, 25 bp, Homo sapien
aggagctgggcattagcatctggac

SEQ ID NO: 4514574 - DNA, 25 bp, Homo sapien
gctgggcattagcatctggacactc

SEQ ID NO: 4514575 - DNA, 25 bp, Homo sapien
cagccagaatttgatcccaggttat

SEQ ID NO: 4514576 - DNA, 25 bp, Homo sapien
tccactgtctacaggtgggccacgg

SEQ ID NO: 4514577 - DNA, 25 bp, Homo sapien
gaagccaaggtcttaggactgatcc

SEQ ID NO: 4514578 - DNA, 25 bp, Homo sapien
taagtagcaggctcagtgtcacaca

SEQ ID NO: 4514579 - DNA, 25 bp, Homo sapien
tctgacagcagggttggaaaatcca

SEQ ID NO: 4514580 - DNA, 25 bp, Homo sapien
gctgcttcacggagctggagtctga

SEQ ID NO: 4514581 - DNA, 25 bp, Homo sapien
tggagtctgacagcagggttggaaa

SEQ ID NO: 4514582 - DNA, 25 bp, Homo sapien
agtgactgctgcttcacggagctgg

SEQ ID NO: 4514583 - DNA, 25 bp, Homo sapien
tcattctgatctaagcaaagctgct

SEQ ID NO: 4514584 - DNA, 25 bp, Homo sapien
caatcgaagggtaagtcagtgtgta

SEQ ID NO: 4514585 - DNA, 25 bp, Homo sapien
taacggaggaatttctaaatgcacc

SEQ ID NO: 4514586 - DNA, 25 bp, Homo sapien
aatgcaccacttcccagtataaagg

SEQ ID NO: 4514587 - DNA, 25 bp, Homo sapien
caaacagcagttatgtggagacacc

SEQ ID NO: 4514588 - DNA, 25 bp, Homo sapien
caatctggtgtagaaagcatttccc

SEQ ID NO: 4514589 - DNA, 25 bp, Homo sapien
tgtcagactctccttcaaacagcag

SEQ ID NO: 4514590 - DNA, 25 bp, Homo sapien
ttcatgatacatattgccacaggag

SEQ ID NO: 4514591 - DNA, 25 bp, Homo sapien
gatgggaaggtaactgtgagaaaca

SEQ ID NO: 4514592 - DNA, 25 bp, Homo sapien
aatctcatttcaggttactttcagg

SEQ ID NO: 4514593 - DNA, 25 bp, Homo sapien
gaactcgttcttgcttcctcacatg

SEQ ID NO: 4514594 - DNA, 25 bp, Homo sapien
aaatgtcctgggcatactgtcatga

SEQ ID NO: 4514595 - DNA, 25 bp, Homo sapien
cattcaggttggtagaatacttgca

SEQ ID NO: 4514596 - DNA, 25 bp, Homo sapien
tacaaaacctgttgttgatccagaa

SEQ ID NO: 4514597 - DNA, 25 bp, Homo sapien
gaatcctgccttacgaatgccagag

SEQ ID NO: 4514598 - DNA, 25 bp, Homo sapien
ttcttaatggaaggaggagatacca

SEQ ID NO: 4514599 - DNA, 25 bp, Homo sapien
catttctcaggaaccactgatggga

SEQ ID NO: 4514600 - DNA, 25 bp, Homo sapien
ggaacttgtggatgaagcactgcac

SEQ ID NO: 4514601 - DNA, 25 bp, Homo sapien
gctaaaaattctgactagtgcctgt

SEQ ID NO: 4514602 - DNA, 25 bp, Homo sapien
cacagtgcctctggtgtagaagcag

SEQ ID NO: 4514603 - DNA, 25 bp, Homo sapien
tgaccctcagctacaaggtatatgc

SEQ ID NO: 4514604 - DNA, 25 bp, Homo sapien
tgtttcataggtcccatggcccgtg

SEQ ID NO: 4514605 - DNA, 25 bp, Homo sapien
tgtatgaaccgtgttttctgctaac

SEQ ID NO: 4514606 - DNA, 25 bp, Homo sapien
catatcttagatggtctgaccctca

SEQ ID NO: 4514607 - DNA, 25 bp, Homo sapien
ccgtcagtgtttctgccaggcgtca

SEQ ID NO: 4514608 - DNA, 25 bp, Homo sapien
gtgccaggaccacatccgtcagtgt

SEQ ID NO: 4514609 - DNA, 25 bp, Homo sapien
tccagaggcactgaggttcggttcc

SEQ ID NO: 4514610 - DNA, 25 bp, Homo sapien
tgctcagttcggaccacaaaaagaa

SEQ ID NO: 4514611 - DNA, 25 bp, Homo sapien
tagaaacagggtatgttagccaggc

SEQ ID NO: 4514612 - DNA, 25 bp, Homo sapien
catacttaattgacccatttatttt

SEQ ID NO: 4514613 - DNA, 25 bp, Homo sapien
tagtgccccttgagttgaattctac

SEQ ID NO: 4514614 - DNA, 25 bp, Homo sapien
caaatgtcctttttatcactgatag

SEQ ID NO: 4514615 - DNA, 25 bp, Homo sapien
tcgtccgtcggactccggaatgagg

SEQ ID NO: 4514616 - DNA, 25 bp, Homo sapien
tattaagtccagtcagggagcggct

SEQ ID NO: 4514617 - DNA, 25 bp, Homo sapien
gacggtgtcagctccgctattaagt

SEQ ID NO: 4514618 - DNA, 25 bp, Homo sapien
ctgattgagcccagcgccgcgtggt

SEQ ID NO: 4514619 - DNA, 25 bp, Homo sapien
ctgcgggtggccagcggttttccaa

SEQ ID NO: 4514620 - DNA, 25 bp, Homo sapien
tgctatgcttgacagcttggcggca

SEQ ID NO: 4514621 - DNA, 25 bp, Homo sapien
gctgccttttccctgcgggtggcca

SEQ ID NO: 4514622 - DNA, 25 bp, Homo sapien
gcttgacagcttggcggcagagtcc

SEQ ID NO: 4514623 - DNA, 25 bp, Homo sapien
gggcttcgcagggattataggctaa

SEQ ID NO: 4514624 - DNA, 25 bp, Homo sapien
ctggctaaattttggttggttgttg

SEQ ID NO: 4514625 - DNA, 25 bp, Homo sapien
cctgcctgggcttcgcagggattat

SEQ ID NO: 4514626 - DNA, 25 bp, Homo sapien
tgcagccttgcccttttgggcttaa

SEQ ID NO: 4514627 - DNA, 25 bp, Homo sapien
caccacgtgcagctactttttattt

SEQ ID NO: 4514628 - DNA, 25 bp, Homo sapien
ccacgtgcagctactttttatttta

SEQ ID NO: 4514629 - DNA, 25 bp, Homo sapien
tgagccaccacgtgcagctactttt

SEQ ID NO: 4514630 - DNA, 25 bp, Homo sapien
tgtgagccaccacgtgcagctactt

SEQ ID NO: 4514631 - DNA, 25 bp, Homo sapien
gtcccaaccgatgctagagccagtg

SEQ ID NO: 4514632 - DNA, 25 bp, Homo sapien
tgaacatgcgccaccgtctgtgtgt

SEQ ID NO: 4514633 - DNA, 25 bp, Homo sapien
tgattttgggaactgcggcgtcccc

SEQ ID NO: 4514634 - DNA, 25 bp, Homo sapien
cagtgtgtgcaccagatgctagcga

SEQ ID NO: 4514635 - DNA, 25 bp, Homo sapien
gagcgagggtctcggtgggctgtca

SEQ ID NO: 4514636 - DNA, 25 bp, Homo sapien
gatgtaggaggcagcgttgctgtgt

SEQ ID NO: 4514637 - DNA, 25 bp, Homo sapien
acatgctgccaagcgggttcccttt

SEQ ID NO: 4514638 - DNA, 25 bp, Homo sapien
ttctccacaaacttggagcgagggt

SEQ ID NO: 4514639 - DNA, 25 bp, Homo sapien
gcctttctgcagcctgttgttggcc

SEQ ID NO: 4514640 - DNA, 25 bp, Homo sapien
cctttctgcagcctgttgttggcca

SEQ ID NO: 4514641 - DNA, 25 bp, Homo sapien
gggtgcagactcttagttgagaaat

SEQ ID NO: 4514642 - DNA, 25 bp, Homo sapien
agactcttagttgagaaatcttcag

SEQ ID NO: 4514643 - DNA, 25 bp, Homo sapien
tctcagagccatggactcctgctgc

SEQ ID NO: 4514644 - DNA, 25 bp, Homo sapien
gatggggcgcccctgaactctcaga

SEQ ID NO: 4514645 - DNA, 25 bp, Homo sapien
ttatcgcctttgatcccctgggcca

SEQ ID NO: 4514646 - DNA, 25 bp, Homo sapien
caagcccttgttgatggggcgcccc

SEQ ID NO: 4514647 - DNA, 25 bp, Homo sapien
tctgcaggacgtctccggcaaggtg

SEQ ID NO: 4514648 - DNA, 25 bp, Homo sapien
agaagctccccgttaggtccctgct

SEQ ID NO: 4514649 - DNA, 25 bp, Homo sapien
gcttatggagctcctgtctctgcag

SEQ ID NO: 4514650 - DNA, 25 bp, Homo sapien
gggatgttctgtggcaccgcctgct

SEQ ID NO: 4514651 - DNA, 25 bp, Homo sapien
ctgggacatcccagagcacgagccc

SEQ ID NO: 4514652 - DNA, 25 bp, Homo sapien
tgggacatcccagagcacgagcccg

SEQ ID NO: 4514653 - DNA, 25 bp, Homo sapien
ctggtggatggcacagcgggtcctc

SEQ ID NO: 4514654 - DNA, 25 bp, Homo sapien
tggggcagtgggactggtggatggc

SEQ ID NO: 4514655 - DNA, 25 bp, Homo sapien
gtggatggcacagcgggtcctccat

SEQ ID NO: 4514656 - DNA, 25 bp, Homo sapien
gggcagtgggactggtggatggcac

SEQ ID NO: 4514657 - DNA, 25 bp, Homo sapien
gcggtgcggccggtgcctctgttct

SEQ ID NO: 4514658 - DNA, 25 bp, Homo sapien
cggtgcggccggtgcctctgttctc

SEQ ID NO: 4514659 - DNA, 25 bp, Homo sapien
caatgtgcagacgtggcccgtgcac

SEQ ID NO: 4514660 - DNA, 25 bp, Homo sapien
ggcatttggtgacactcggcgcgct

SEQ ID NO: 4514661 - DNA, 25 bp, Homo sapien
tgagcaccatcccagcaatgtgcag

SEQ ID NO: 4514662 - DNA, 25 bp, Homo sapien
tcgtggtcacactgcgcttccagat

SEQ ID NO: 4514663 - DNA, 25 bp, Homo sapien
tacagacagtctcgccgtgtgggcc

SEQ ID NO: 4514664 - DNA, 25 bp, Homo sapien
tgtacagacagtctcgccgtgtggg

SEQ ID NO: 4514665 - DNA, 25 bp, Homo sapien
tttgtacagacagtctcgccgtgtg

SEQ ID NO: 4514666 - DNA, 25 bp, Homo sapien
gacagtctcgccgtgtgggccaggc

SEQ ID NO: 4514667 - DNA, 25 bp, Homo sapien
cagcagagtctgtcttgaactgagc

SEQ ID NO: 4514668 - DNA, 25 bp, Homo sapien
actgtatcaggcacgggcagcagag

SEQ ID NO: 4514669 - DNA, 25 bp, Homo sapien
tagtctactgggaaaccggacactg

SEQ ID NO: 4514670 - DNA, 25 bp, Homo sapien
tgacagctgtcatcctgagccagtc

SEQ ID NO: 4514671 - DNA, 25 bp, Homo sapien
cggcttctcggctaccagggtatcg

SEQ ID NO: 4514672 - DNA, 25 bp, Homo sapien
tacaagtcagtagactcagacccgc

SEQ ID NO: 4514673 - DNA, 25 bp, Homo sapien
cagctaccggaacttcgtgggacct

SEQ ID NO: 4514674 - DNA, 25 bp, Homo sapien
gagctgctgaaggtcgtcaagagcc

SEQ ID NO: 4514675 - DNA, 25 bp, Homo sapien
ggaataggcctatcaattgtgcgca

SEQ ID NO: 4514676 - DNA, 25 bp, Homo sapien
gctttagccgaattggaggtcctgg

SEQ ID NO: 4514677 - DNA, 25 bp, Homo sapien
taggtagaaccagcttttcaaagcg

SEQ ID NO: 4514678 - DNA, 25 bp, Homo sapien
gggtctgtcagagtatcccgtcaca

SEQ ID NO: 4514679 - DNA, 25 bp, Homo sapien
cgaaccatcctgttacactgccaaa

SEQ ID NO: 4514680 - DNA, 25 bp, Homo sapien
taaaaatgcttttggtaatgtgaat

SEQ ID NO: 4514681 - DNA, 25 bp, Homo sapien
agtgacatgaagcctaacaaacaat

SEQ ID NO: 4514682 - DNA, 25 bp, Homo sapien
atcctgttacactgccaaactcact

SEQ ID NO: 4514683 - DNA, 25 bp, Homo sapien
tataaggcttaattatataccaaat

SEQ ID NO: 4514684 - DNA, 25 bp, Homo sapien
ccttaggtataagacaatctcaagt

SEQ ID NO: 4514685 - DNA, 25 bp, Homo sapien
tcttagaaactacagaataggatga

SEQ ID NO: 4514686 - DNA, 25 bp, Homo sapien
tagaggtggtagctgtgcttatctt

SEQ ID NO: 4514687 - DNA, 25 bp, Homo sapien
aaaagggagtttccacgcagccagt

SEQ ID NO: 4514688 - DNA, 25 bp, Homo sapien
ttggcgctggcgcaccactgggtaa

SEQ ID NO: 4514689 - DNA, 25 bp, Homo sapien
gctgcatgggataccagcaccattg

SEQ ID NO: 4514690 - DNA, 25 bp, Homo sapien
gctggaacaggcgaacactttcttc

SEQ ID NO: 4514691 - DNA, 25 bp, Homo sapien
gctcttaagcaaagtacttggtaca

SEQ ID NO: 4514692 - DNA, 25 bp, Homo sapien
ttgttctaagcattcagacttttag

SEQ ID NO: 4514693 - DNA, 25 bp, Homo sapien
ccatcgacttcttcataaacaaaca

SEQ ID NO: 4514694 - DNA, 25 bp, Homo sapien
tagtggcccaaaggagctcttaagc

SEQ ID NO: 4514695 - DNA, 25 bp, Homo sapien
caggcatcatgggattagggtaact

SEQ ID NO: 4514696 - DNA, 25 bp, Homo sapien
taactgaagaataaacccagccagg

SEQ ID NO: 4514697 - DNA, 25 bp, Homo sapien
gctaaggccatcgaatgctcagagg

SEQ ID NO: 4514698 - DNA, 25 bp, Homo sapien
aaacggtaatcaaggttccaggcat

SEQ ID NO: 4514699 - DNA, 25 bp, Homo sapien
aaagccttacatggtcagggattga

SEQ ID NO: 4514700 - DNA, 25 bp, Homo sapien
tcatcatcaaacaaacaggagccac

SEQ ID NO: 4514701 - DNA, 25 bp, Homo sapien
ccaatcatcatcaaacaaacaggag

SEQ ID NO: 4514702 - DNA, 25 bp, Homo sapien
tccttcattcagtaacttagttttc

SEQ ID NO: 4514703 - DNA, 25 bp, Homo sapien
tgtcattagtgcattcggcttttgg

SEQ ID NO: 4514704 - DNA, 25 bp, Homo sapien
gtcattagtgcattcggcttttgga

SEQ ID NO: 4514705 - DNA, 25 bp, Homo sapien
ctgtcattagtgcattcggcttttg

SEQ ID NO: 4514706 - DNA, 25 bp, Homo sapien
aggtcattttagtgagctaccattg

SEQ ID NO: 4514707 - DNA, 25 bp, Homo sapien
tcttggtccaaattagtgaaatctt

SEQ ID NO: 4514708 - DNA, 25 bp, Homo sapien
cattctgatgatattcaaattcact

SEQ ID NO: 4514709 - DNA, 25 bp, Homo sapien
gaaatcgtcatgtgctgaggtcatt

SEQ ID NO: 4514710 - DNA, 25 bp, Homo sapien
tcacagattaacctttaattacacc

SEQ ID NO: 4514711 - DNA, 25 bp, Homo sapien
caatcacagattaacctttaattac

SEQ ID NO: 4514712 - DNA, 25 bp, Homo sapien
taacaatcacagattaacctttaat

SEQ ID NO: 4514713 - DNA, 25 bp, Homo sapien
aatcacagattaacctttaattaca

SEQ ID NO: 4514714 - DNA, 25 bp, Homo sapien
tgaaaacgcgccgattacagagcag

SEQ ID NO: 4514715 - DNA, 25 bp, Homo sapien
gacatcgtcaacaggcatatcttgc

SEQ ID NO: 4514716 - DNA, 25 bp, Homo sapien
gctccttgatagcaatgcccaggcc

SEQ ID NO: 4514717 - DNA, 25 bp, Homo sapien
gaggacccaccacgaagattaatat

SEQ ID NO: 4514718 - DNA, 25 bp, Homo sapien
tttcatttaaagtctcaatctcctc

SEQ ID NO: 4514719 - DNA, 25 bp, Homo sapien
gattaagtctttcattgagaaagta

SEQ ID NO: 4514720 - DNA, 25 bp, Homo sapien
tttggagcatgaatgaccataactg

SEQ ID NO: 4514721 - DNA, 25 bp, Homo sapien
caaacacccaattttcccatgaaga

SEQ ID NO: 4514722 - DNA, 25 bp, Homo sapien
tgcctatgcacagaagtaacttttt

SEQ ID NO: 4514723 - DNA, 25 bp, Homo sapien
agtgtaaaaagcgaagttctccagg

SEQ ID NO: 4514724 - DNA, 25 bp, Homo sapien
tcgaagtagaactagtactggctct

SEQ ID NO: 4514725 - DNA, 25 bp, Homo sapien
tactggctctgaatacaagcaagac

SEQ ID NO: 4514726 - DNA, 25 bp, Homo sapien
agtggctggtgcaaacgcatacgca

SEQ ID NO: 4514727 - DNA, 25 bp, Homo sapien
cttactagcacgctgagagctccta

SEQ ID NO: 4514728 - DNA, 25 bp, Homo sapien
aacgcatacgcagcgaagttggcca

SEQ ID NO: 4514729 - DNA, 25 bp, Homo sapien
gctcctagtggagtcactagagtgg

SEQ ID NO: 4514730 - DNA, 25 bp, Homo sapien
tggctgcaatgtctcaaatatcttt

SEQ ID NO: 4514731 - DNA, 25 bp, Homo sapien
taatgccagaaccttagaactcttc

SEQ ID NO: 4514732 - DNA, 25 bp, Homo sapien
tacgtgtatgcttaacctgtgaagt

SEQ ID NO: 4514733 - DNA, 25 bp, Homo sapien
aattcaatcaaggaatttggctgca

SEQ ID NO: 4514734 - DNA, 25 bp, Homo sapien
gcttcacctcggaagacacacatca

SEQ ID NO: 4514735 - DNA, 25 bp, Homo sapien
caccgttttgaactgcactaattca

SEQ ID NO: 4514736 - DNA, 25 bp, Homo sapien
agtgagcaatccaaggaatcaggaa

SEQ ID NO: 4514737 - DNA, 25 bp, Homo sapien
tcttggatcacaccgttttgaactg

SEQ ID NO: 4514738 - DNA, 25 bp, Homo sapien
agccttgtcgttccatttaaatgca

SEQ ID NO: 4514739 - DNA, 25 bp, Homo sapien
ggtacgacaaatagaaagacttgaa

SEQ ID NO: 4514740 - DNA, 25 bp, Homo sapien
taaatgcactatgagggtacgacaa

SEQ ID NO: 4514741 - DNA, 25 bp, Homo sapien
gcacaggcctatcaaacatgtttta

SEQ ID NO: 4514742 - DNA, 25 bp, Homo sapien
cttaagatatgcatggccaccttga

SEQ ID NO: 4514743 - DNA, 25 bp, Homo sapien
accattccttaagatatgcatggcc

SEQ ID NO: 4514744 - DNA, 25 bp, Homo sapien
ttgacagcagtccagcccaccacaa

SEQ ID NO: 4514745 - DNA, 25 bp, Homo sapien
ccacaaccattccttaagatatgca

SEQ ID NO: 4514746 - DNA, 25 bp, Homo sapien
acttgggcattggtccctgtttcca

SEQ ID NO: 4514747 - DNA, 25 bp, Homo sapien
actgcaggactgagtagttaactaa

SEQ ID NO: 4514748 - DNA, 25 bp, Homo sapien
gaaaaggttggatattacttgggca

SEQ ID NO: 4514749 - DNA, 25 bp, Homo sapien
cacgcccagcctaaccatggactct

SEQ ID NO: 4514750 - DNA, 25 bp, Homo sapien
aggaatgaagatgtggtcttgtaca

SEQ ID NO: 4514751 - DNA, 25 bp, Homo sapien
gatgtggtcttgtacaaagaacctg

SEQ ID NO: 4514752 - DNA, 25 bp, Homo sapien
tggtcttgtacaaagaacctgtgca

SEQ ID NO: 4514753 - DNA, 25 bp, Homo sapien
gaggaatgaagatgtggtcttgtac

SEQ ID NO: 4514754 - DNA, 25 bp, Homo sapien
acttcctccaatgaaaatgctggag

SEQ ID NO: 4514755 - DNA, 25 bp, Homo sapien
ctggcaagtcgaaggaggccctttt

SEQ ID NO: 4514756 - DNA, 25 bp, Homo sapien
aacttcctccaatgaaaatgctgga

SEQ ID NO: 4514757 - DNA, 25 bp, Homo sapien
cttcctccaatgaaaatgctggagc

SEQ ID NO: 4514758 - DNA, 25 bp, Homo sapien
agccaatcccagaccaatatagaag

SEQ ID NO: 4514759 - DNA, 25 bp, Homo sapien
gccaatcccagaccaatatagaagt

SEQ ID NO: 4514760 - DNA, 25 bp, Homo sapien
ctggtactagaggcagaatgaagca

SEQ ID NO: 4514761 - DNA, 25 bp, Homo sapien
tggtactagaggcagaatgaagcag

SEQ ID NO: 4514762 - DNA, 25 bp, Homo sapien
cagaacagagaaaccgctggtacta

SEQ ID NO: 4514763 - DNA, 25 bp, Homo sapien
cagagaaaccgctggtactagaggc

SEQ ID NO: 4514764 - DNA, 25 bp, Homo sapien
ttcttcaaattatggcaaaagatag

SEQ ID NO: 4514765 - DNA, 25 bp, Homo sapien
tttcataaactctgatcccatattt

SEQ ID NO: 4514766 - DNA, 25 bp, Homo sapien
caaattatggcaaaagataggatca

SEQ ID NO: 4514767 - DNA, 25 bp, Homo sapien
aagataggatcatgctataaaacca

SEQ ID NO: 4514768 - DNA, 25 bp, Homo sapien
ttgtggtgagccaagattacaccat

SEQ ID NO: 4514769 - DNA, 25 bp, Homo sapien
gaggttgtggtgagccaagattaca

SEQ ID NO: 4514770 - DNA, 25 bp, Homo sapien
agaggttgtggtgagccaagattac

SEQ ID NO: 4514771 - DNA, 25 bp, Homo sapien
ggttgtggtgagccaagattacacc

SEQ ID NO: 4514772 - DNA, 25 bp, Homo sapien
gcttcactattctcagacctggtcc

SEQ ID NO: 4514773 - DNA, 25 bp, Homo sapien
tctctgtaactgaaggtctatcaca

SEQ ID NO: 4514774 - DNA, 25 bp, Homo sapien
tgaaggtctatcacagccgggagag

SEQ ID NO: 4514775 - DNA, 25 bp, Homo sapien
catcagagggaatgtcctgaaagga

SEQ ID NO: 4514776 - DNA, 25 bp, Homo sapien
gtgatccaacagccttggcctccta

SEQ ID NO: 4514777 - DNA, 25 bp, Homo sapien
tgatccaacagccttggcctcctaa

SEQ ID NO: 4514778 - DNA, 25 bp, Homo sapien
gagatgttaagtaacacgtcacaca

SEQ ID NO: 4514779 - DNA, 25 bp, Homo sapien
gaagcagaactataatccaggcctc

SEQ ID NO: 4514780 - DNA, 25 bp, Homo sapien
cagaactataatccaggcctcctca

SEQ ID NO: 4514781 - DNA, 25 bp, Homo sapien
cacgtcacacagctgaggtagcaga

SEQ ID NO: 4514782 - DNA, 25 bp, Homo sapien
cataccatatttcacacatcctgtg

SEQ ID NO: 4514783 - DNA, 25 bp, Homo sapien
gcactctgctgctattctaacctgc

SEQ ID NO: 4514784 - DNA, 25 bp, Homo sapien
atcctgtgttctaccccggtcagca

SEQ ID NO: 4514785 - DNA, 25 bp, Homo sapien
ccagcctagatcttatttccccata

SEQ ID NO: 4514786 - DNA, 25 bp, Homo sapien
taatatggtctctcttatgaaaaaa

SEQ ID NO: 4514787 - DNA, 25 bp, Homo sapien
ctcatttcctcgtaaataccaccct

SEQ ID NO: 4514788 - DNA, 25 bp, Homo sapien
gtcttaaaccctggccgagtagctc

SEQ ID NO: 4514789 - DNA, 25 bp, Homo sapien
agtttaatatggtctctcttatgaa

SEQ ID NO: 4514790 - DNA, 25 bp, Homo sapien
atttggttactagccttcatactca

SEQ ID NO: 4514791 - DNA, 25 bp, Homo sapien
ggttactagccttcatactcatttt

SEQ ID NO: 4514792 - DNA, 25 bp, Homo sapien
tagccttcatactcattttgccaac

SEQ ID NO: 4514793 - DNA, 25 bp, Homo sapien
ttataatttggttactagccttcat

SEQ ID NO: 4514794 - DNA, 25 bp, Homo sapien
cagtcaggctcaaaacgtcacagca

SEQ ID NO: 4514795 - DNA, 25 bp, Homo sapien
tactggaatggaaactctcgactct

SEQ ID NO: 4514796 - DNA, 25 bp, Homo sapien
taaccgggcacatggctatacacag

SEQ ID NO: 4514797 - DNA, 25 bp, Homo sapien
ttatgatccccgcagcagctgaagc

SEQ ID NO: 4514798 - DNA, 25 bp, Homo sapien
cgtgggactgaacggcaatccgatt

SEQ ID NO: 4514799 - DNA, 25 bp, Homo sapien
tgaacttaatgaacatgcgtccccg

SEQ ID NO: 4514800 - DNA, 25 bp, Homo sapien
gattcacggtgggtttcctcactga

SEQ ID NO: 4514801 - DNA, 25 bp, Homo sapien
gaggattacaggaaaaccgcttcag

SEQ ID NO: 4514802 - DNA, 25 bp, Homo sapien
tgaaaggaaggagtggcgacctcac

SEQ ID NO: 4514803 - DNA, 25 bp, Homo sapien
ctgaaaggaaggagtggcgacctca

SEQ ID NO: 4514804 - DNA, 25 bp, Homo sapien
gcgcggcttcccctcgccggcgcag

SEQ ID NO: 4514805 - DNA, 25 bp, Homo sapien
ggccgcgcggcttcccctcgccggc

SEQ ID NO: 4514806 - DNA, 25 bp, Homo sapien
gcgcagccttgggcaccgcggctca

SEQ ID NO: 4514807 - DNA, 25 bp, Homo sapien
cagccttgggcaccgcggctcacac

SEQ ID NO: 4514808 - DNA, 25 bp, Homo sapien
gccttcgtcgccgtccagtgggaga

SEQ ID NO: 4514809 - DNA, 25 bp, Homo sapien
cgtccagtgggagatgcgagcattc

SEQ ID NO: 4514810 - DNA, 25 bp, Homo sapien
ttcgtcgccgtccagtgggagatgc

SEQ ID NO: 4514811 - DNA, 25 bp, Homo sapien
acaggccgcccagtcctgcgctcgc

SEQ ID NO: 4514812 - DNA, 25 bp, Homo sapien
gtcaccaccgctgccgggacctagg

SEQ ID NO: 4514813 - DNA, 25 bp, Homo sapien
caaggacaacctccggcaccgccgt

SEQ ID NO: 4514814 - DNA, 25 bp, Homo sapien
acctaggcgcggctaaatgacgcaa

SEQ ID NO: 4514815 - DNA, 25 bp, Homo sapien
gagaagcgccgaggaaaacctgcca

SEQ ID NO: 4514816 - DNA, 25 bp, Homo sapien
tttttcagaatacagacctcggccg

SEQ ID NO: 4514817 - DNA, 25 bp, Homo sapien
caaatgagtcgtggtagtgggccaa

SEQ ID NO: 4514818 - DNA, 25 bp, Homo sapien
taatccatgctgtcgggaacagacc

SEQ ID NO: 4514819 - DNA, 25 bp, Homo sapien
gtttgggagccctgacattcgcctg

SEQ ID NO: 4514820 - DNA, 25 bp, Homo sapien
gaaaattagactgttcaaccactgg

SEQ ID NO: 4514821 - DNA, 25 bp, Homo sapien
gaagctagcctaacctcaattgtgt

SEQ ID NO: 4514822 - DNA, 25 bp, Homo sapien
tgctgagataaaacactggccatga

SEQ ID NO: 4514823 - DNA, 25 bp, Homo sapien
tgaaagattctaactgtcccaggac

SEQ ID NO: 4514824 - DNA, 25 bp, Homo sapien
gtacagtgccagagttcaagacaac

SEQ ID NO: 4514825 - DNA, 25 bp, Homo sapien
cctgcggtattcagtgcggtcacat

SEQ ID NO: 4514826 - DNA, 25 bp, Homo sapien
caattctaacaccatgatcgaggac

SEQ ID NO: 4514827 - DNA, 25 bp, Homo sapien
tgaaaagtcatcctgccagtggaac

SEQ ID NO: 4514828 - DNA, 25 bp, Homo sapien
tccactcccggaagaggatggctga

SEQ ID NO: 4514829 - DNA, 25 bp, Homo sapien
taaacacgacgtagtagatggcccc

SEQ ID NO: 4514830 - DNA, 25 bp, Homo sapien
aactggacgatgatgctgcagccga

SEQ ID NO: 4514831 - DNA, 25 bp, Homo sapien
tgtataaggacaatccccacggaga

SEQ ID NO: 4514832 - DNA, 25 bp, Homo sapien
agcacgatgcacaggtagcccacaa

SEQ ID NO: 4514833 - DNA, 25 bp, Homo sapien
gcagcacgatgcacaggtagcccac

SEQ ID NO: 4514834 - DNA, 25 bp, Homo sapien
gagcagcacgatgcacaggtagccc

SEQ ID NO: 4514835 - DNA, 25 bp, Homo sapien
gcacgatgcacaggtagcccacaaa

SEQ ID NO: 4514836 - DNA, 25 bp, Homo sapien
caggagataggaagctaaaatggac

SEQ ID NO: 4514837 - DNA, 25 bp, Homo sapien
agtggataatcagcacgacggagcc

SEQ ID NO: 4514838 - DNA, 25 bp, Homo sapien
cagcctgagttgtcacactctcaga

SEQ ID NO: 4514839 - DNA, 25 bp, Homo sapien
gcacgacggagcctgcacagcttag

SEQ ID NO: 4514840 - DNA, 25 bp, Homo sapien
aatactaatatctatgctacatgga

SEQ ID NO: 4514841 - DNA, 25 bp, Homo sapien
gctacatggaaaagtagggtacaaa

SEQ ID NO: 4514842 - DNA, 25 bp, Homo sapien
tagtaattgcagtagtagaagtagt

SEQ ID NO: 4514843 - DNA, 25 bp, Homo sapien
ttccatgtataaccactacgtagtt

SEQ ID NO: 4514844 - DNA, 25 bp, Homo sapien
catggtgattattctattgctgtgg

SEQ ID NO: 4514845 - DNA, 25 bp, Homo sapien
gcctagcatattgagagttttcgtc

SEQ ID NO: 4514846 - DNA, 25 bp, Homo sapien
ggagcagtggttcaatgtcaattca

SEQ ID NO: 4514847 - DNA, 25 bp, Homo sapien
tggatccaactggttagtattttgt

SEQ ID NO: 4514848 - DNA, 25 bp, Homo sapien
acaggctttttatccagaacaccat

SEQ ID NO: 4514849 - DNA, 25 bp, Homo sapien
ttttatccagaacaccatctgacat

SEQ ID NO: 4514850 - DNA, 25 bp, Homo sapien
gggattccaagttgaagacaggctt

SEQ ID NO: 4514851 - DNA, 25 bp, Homo sapien
tccaagttgaagacaggctttttat

SEQ ID NO: 4514852 - DNA, 25 bp, Homo sapien
tatgtgttcacgagaaaaatgtgcc

SEQ ID NO: 4514853 - DNA, 25 bp, Homo sapien
tcaaggcgtcgcatgtgaaaaacat

SEQ ID NO: 4514854 - DNA, 25 bp, Homo sapien
tcagagccatccgaaacacaaaggg

SEQ ID NO: 4514855 - DNA, 25 bp, Homo sapien
tcaatgtgccacgtgccaagatcac

SEQ ID NO: 4514856 - DNA, 25 bp, Homo sapien
tcaatacacccatcatggacacact

SEQ ID NO: 4514857 - DNA, 25 bp, Homo sapien
cgtgactctaaggtgtaaacttcaa

SEQ ID NO: 4514858 - DNA, 25 bp, Homo sapien
gtaaacttcaatacacccatcatgg

SEQ ID NO: 4514859 - DNA, 25 bp, Homo sapien
ttaatgcctacgtgactctaaggtg

SEQ ID NO: 4514860 - DNA, 25 bp, Homo sapien
ggtgtcagaagactctctagtctct

SEQ ID NO: 4514861 - DNA, 25 bp, Homo sapien
cccaataaaacaccaactcagtcat

SEQ ID NO: 4514862 - DNA, 25 bp, Homo sapien
tctagtctctaagatgtactccagg

SEQ ID NO: 4514863 - DNA, 25 bp, Homo sapien
cattttgcttaatgagttctcagaa

SEQ ID NO: 4514864 - DNA, 25 bp, Homo sapien
cgaacggtactccaagggcgcccag

SEQ ID NO: 4514865 - DNA, 25 bp, Homo sapien
ccgtggggaccgccgtgtaagccag

SEQ ID NO: 4514866 - DNA, 25 bp, Homo sapien
tggggaccgccgtgtaagccaggaa

SEQ ID NO: 4514867 - DNA, 25 bp, Homo sapien
ggaagtttccaatctggccaacagc

SEQ ID NO: 4514868 - DNA, 25 bp, Homo sapien
tcacaaggatactacttgcaattac

SEQ ID NO: 4514869 - DNA, 25 bp, Homo sapien
agaaaatcacaaggatactacttgc

SEQ ID NO: 4514870 - DNA, 25 bp, Homo sapien
aaatcacaaggatactacttgcaat

SEQ ID NO: 4514871 - DNA, 25 bp, Homo sapien
caaggatactacttgcaattacaga

SEQ ID NO: 4514872 - DNA, 25 bp, Homo sapien
gcccaccacacaatgtctgttaaat

SEQ ID NO: 4514873 - DNA, 25 bp, Homo sapien
agcccaccacacaatgtctgttaaa

SEQ ID NO: 4514874 - DNA, 25 bp, Homo sapien
cacacaatgtctgttaaataggaag

SEQ ID NO: 4514875 - DNA, 25 bp, Homo sapien
caccacacaatgtctgttaaatagg

SEQ ID NO: 4514876 - DNA, 25 bp, Homo sapien
ctgacatttgacctgagacttgccg

SEQ ID NO: 4514877 - DNA, 25 bp, Homo sapien
catttgacctgagacttgccggcat

SEQ ID NO: 4514878 - DNA, 25 bp, Homo sapien
tgacatttgacctgagacttgccgg

SEQ ID NO: 4514879 - DNA, 25 bp, Homo sapien
gacatttgacctgagacttgccggc

SEQ ID NO: 4514880 - DNA, 25 bp, Homo sapien
attaagcaagtcaggtttttctcca

SEQ ID NO: 4514881 - DNA, 25 bp, Homo sapien
gcatccacagacattaagcaagtca

SEQ ID NO: 4514882 - DNA, 25 bp, Homo sapien
tctgcatccacagacattaagcaag

SEQ ID NO: 4514883 - DNA, 25 bp, Homo sapien
cagacattaagcaagtcaggttttt

SEQ ID NO: 4514884 - DNA, 25 bp, Homo sapien
aagacagctccgaaatcctttcata

SEQ ID NO: 4514885 - DNA, 25 bp, Homo sapien
agacagctccgaaatcctttcataa

SEQ ID NO: 4514886 - DNA, 25 bp, Homo sapien
acagcatgtcatccaaaagcatggc

SEQ ID NO: 4514887 - DNA, 25 bp, Homo sapien
agcatggcaaagaagtttgtaggca

SEQ ID NO: 4514888 - DNA, 25 bp, Homo sapien
catggcaaagaagtttgtaggcagc

SEQ ID NO: 4514889 - DNA, 25 bp, Homo sapien
aaagcatggcaaagaagtttgtagg

SEQ ID NO: 4514890 - DNA, 25 bp, Homo sapien
catttggtgcaggtctaaggcgcag

SEQ ID NO: 4514891 - DNA, 25 bp, Homo sapien
agcgggctccgtaagagcaccccag

SEQ ID NO: 4514892 - DNA, 25 bp, Homo sapien
gtctaaggcgcagcgggctccgtaa

SEQ ID NO: 4514893 - DNA, 25 bp, Homo sapien
ttgtattcatttggtgcaggtctaa

SEQ ID NO: 4514894 - DNA, 25 bp, Homo sapien
ctgaagcggcgcttccaggcgggcg

SEQ ID NO: 4514895 - DNA, 25 bp, Homo sapien
cgctgggctcgagcaccccagcacc

SEQ ID NO: 4514896 - DNA, 25 bp, Homo sapien
agcgggccgcgcatcggctgaagcg

SEQ ID NO: 4514897 - DNA, 25 bp, Homo sapien
cccagcaccgcgtccgcaggaggct

SEQ ID NO: 4514898 - DNA, 25 bp, Homo sapien
ccgttcaccaggctcgacacgacgg

SEQ ID NO: 4514899 - DNA, 25 bp, Homo sapien
acgcacgatgcccttcttctgtagc

SEQ ID NO: 4514900 - DNA, 25 bp, Homo sapien
tagcacgaacgtggacccgttcacc

SEQ ID NO: 4514901 - DNA, 25 bp, Homo sapien
ctcgccgcttggcacgcacgatgcc

SEQ ID NO: 4514902 - DNA, 25 bp, Homo sapien
tccgcccgcgcccgccctccgagcc

SEQ ID NO: 4514903 - DNA, 25 bp, Homo sapien
gccatttactgcaggagcgaggtga

SEQ ID NO: 4514904 - DNA, 25 bp, Homo sapien
ctcaggcgctatgggagtagactgt

SEQ ID NO: 4514905 - DNA, 25 bp, Homo sapien
tacccgtaatgttcactgtggtctg

SEQ ID NO: 4514906 - DNA, 25 bp, Homo sapien
tgtgcgaagtgacaggaagacatcc

SEQ ID NO: 4514907 - DNA, 25 bp, Homo sapien
tatctgtgtctcagccactgaaaaa

SEQ ID NO: 4514908 - DNA, 25 bp, Homo sapien
agtaagcacatagaatctttaaagg

SEQ ID NO: 4514909 - DNA, 25 bp, Homo sapien
taaacaaacatcagtaagcacatag

SEQ ID NO: 4514910 - DNA, 25 bp, Homo sapien
ggatgcatttaacacactggaccta

SEQ ID NO: 4514911 - DNA, 25 bp, Homo sapien
taatcacagtggaactataagtttg

SEQ ID NO: 4514912 - DNA, 25 bp, Homo sapien
tattttcaatcattgagaagacaca

SEQ ID NO: 4514913 - DNA, 25 bp, Homo sapien
tacatatccttttcaagtgcagaag

SEQ ID NO: 4514914 - DNA, 25 bp, Homo sapien
ggtacactacgctcaacatgcagaa

SEQ ID NO: 4514915 - DNA, 25 bp, Homo sapien
tgtgaacataagtacaaaactacca

SEQ ID NO: 4514916 - DNA, 25 bp, Homo sapien
tcaacattcaaaagccaatcactgt

SEQ ID NO: 4514917 - DNA, 25 bp, Homo sapien
taattccagaaatgcaatgttcaac

SEQ ID NO: 4514918 - DNA, 25 bp, Homo sapien
gaactaggagcaagcccatctcaac

SEQ ID NO: 4514919 - DNA, 25 bp, Homo sapien
gcctgctgtaagctcccctcctctt

SEQ ID NO: 4514920 - DNA, 25 bp, Homo sapien
ttgtgttaatccctagtccagggcc

SEQ ID NO: 4514921 - DNA, 25 bp, Homo sapien
agggcctgctgtaagctcccctcct

SEQ ID NO: 4514922 - DNA, 25 bp, Homo sapien
tttgtgttaatccctagtccagggc

SEQ ID NO: 4514923 - DNA, 25 bp, Homo sapien
aaaggcccaggatcataccatacga

SEQ ID NO: 4514924 - DNA, 25 bp, Homo sapien
cagaaacaacagaacggagctcagc

SEQ ID NO: 4514925 - DNA, 25 bp, Homo sapien
tttgctcacgacatgaccgctgggt

SEQ ID NO: 4514926 - DNA, 25 bp, Homo sapien
caagccctaaggaggcagctagagg

SEQ ID NO: 4514927 - DNA, 25 bp, Homo sapien
gcaggaggagcagatgcggaagcag

SEQ ID NO: 4514928 - DNA, 25 bp, Homo sapien
agcaggaggagcagatgcggaagca

SEQ ID NO: 4514929 - DNA, 25 bp, Homo sapien
gaagcaggaggagcagatgcggaag

SEQ ID NO: 4514930 - DNA, 25 bp, Homo sapien
gagcaggaggagcagatgcggaagc

SEQ ID NO: 4514931 - DNA, 25 bp, Homo sapien
gagctgccaccagaagaggggttct

SEQ ID NO: 4514932 - DNA, 25 bp, Homo sapien
tgccaccagaagaggggttctaacc

SEQ ID NO: 4514933 - DNA, 25 bp, Homo sapien
gctgccaccagaagaggggttctaa

SEQ ID NO: 4514934 - DNA, 25 bp, Homo sapien
agagctgccaccagaagaggggttc

SEQ ID NO: 4514935 - DNA, 25 bp, Homo sapien
tagaaaaggagcgtcagatcaagct

SEQ ID NO: 4514936 - DNA, 25 bp, Homo sapien
aagttatttagaaaaggagcgtcag

SEQ ID NO: 4514937 - DNA, 25 bp, Homo sapien
ttatttagaaaaggagcgtcagatc

SEQ ID NO: 4514938 - DNA, 25 bp, Homo sapien
ggagcgtcagatcaagctttccaaa

SEQ ID NO: 4514939 - DNA, 25 bp, Homo sapien
ggtgcaggagtttcgtcttcatctt

SEQ ID NO: 4514940 - DNA, 25 bp, Homo sapien
ctttgttccacttggttcgacacta

SEQ ID NO: 4514941 - DNA, 25 bp, Homo sapien
ctggttgcttgacccacacccaggt

SEQ ID NO: 4514942 - DNA, 25 bp, Homo sapien
cacccaggtctccagaattgacttg

SEQ ID NO: 4514943 - DNA, 25 bp, Homo sapien
tgcaaactaaaacagccacttcgga

SEQ ID NO: 4514944 - DNA, 25 bp, Homo sapien
gaaaacagttcagcacatgacccaa

SEQ ID NO: 4514945 - DNA, 25 bp, Homo sapien
aaacgtgacagattgccagtgggaa

SEQ ID NO: 4514946 - DNA, 25 bp, Homo sapien
agcaacagaaacgtgacagattgcc

SEQ ID NO: 4514947 - DNA, 25 bp, Homo sapien
caaccattcggtgtcaaggcgagcc

SEQ ID NO: 4514948 - DNA, 25 bp, Homo sapien
gttttcaaccattcggtgtcaaggc

SEQ ID NO: 4514949 - DNA, 25 bp, Homo sapien
ccattcggtgtcaaggcgagcctgg

SEQ ID NO: 4514950 - DNA, 25 bp, Homo sapien
ttcaaccattcggtgtcaaggcgag

SEQ ID NO: 4514951 - DNA, 25 bp, Homo sapien
ctccagcttcctcccagttctcagg

SEQ ID NO: 4514952 - DNA, 25 bp, Homo sapien
tccagcttcctcccagttctcaggc

SEQ ID NO: 4514953 - DNA, 25 bp, Homo sapien
cttttctccagcttcctcccagttc

SEQ ID NO: 4514954 - DNA, 25 bp, Homo sapien
ttctccagcttcctcccagttctca

SEQ ID NO: 4514955 - DNA, 25 bp, Homo sapien
cctgaattatttgaacttagcacca

SEQ ID NO: 4514956 - DNA, 25 bp, Homo sapien
ccagaaggcgggatttccgcggcac

SEQ ID NO: 4514957 - DNA, 25 bp, Homo sapien
ggaagtcagtttctcaccacctgaa

SEQ ID NO: 4514958 - DNA, 25 bp, Homo sapien
cgcactcctacggaagtcagtttct

SEQ ID NO: 4514959 - DNA, 25 bp, Homo sapien
ctccccggtttaggtgcctcagcct

SEQ ID NO: 4514960 - DNA, 25 bp, Homo sapien
ccaaaggatgaacccaagaggttct

SEQ ID NO: 4514961 - DNA, 25 bp, Homo sapien
gttctccaaaggatgaacccaagag

SEQ ID NO: 4514962 - DNA, 25 bp, Homo sapien
aaggatgaacccaagaggttcttgt

SEQ ID NO: 4514963 - DNA, 25 bp, Homo sapien
tttccatgatatcaggttctccaaa

SEQ ID NO: 4514964 - DNA, 25 bp, Homo sapien
caaaggcatttcgacaaataatata

SEQ ID NO: 4514965 - DNA, 25 bp, Homo sapien
gcatttcgacaaataatataatcca

SEQ ID NO: 4514966 - DNA, 25 bp, Homo sapien
ggcatttcgacaaataatataatcc

SEQ ID NO: 4514967 - DNA, 25 bp, Homo sapien
atgcaaaggcatttcgacaaataat

SEQ ID NO: 4514968 - DNA, 25 bp, Homo sapien
ctatgaattgggttgcaaggatttc

SEQ ID NO: 4514969 - DNA, 25 bp, Homo sapien
gaacctgaccaggatttcagtcaac

SEQ ID NO: 4514970 - DNA, 25 bp, Homo sapien
tgaccaggatttcagtcaactcatt

SEQ ID NO: 4514971 - DNA, 25 bp, Homo sapien
gaccaggatttcagtcaactcattg

SEQ ID NO: 4514972 - DNA, 25 bp, Homo sapien
cctgaccaggatttcagtcaactca

SEQ ID NO: 4514973 - DNA, 25 bp, Homo sapien
tcttaagttagcttcattattagat

SEQ ID NO: 4514974 - DNA, 25 bp, Homo sapien
cttaagttagcttcattattagatt

SEQ ID NO: 4514975 - DNA, 25 bp, Homo sapien
ttgcttgtcatgtcaaaattcacag

SEQ ID NO: 4514976 - DNA, 25 bp, Homo sapien
gttgtaagacctccatagactcgat

SEQ ID NO: 4514977 - DNA, 25 bp, Homo sapien
tagactcgatctagttcagtaacag

SEQ ID NO: 4514978 - DNA, 25 bp, Homo sapien
tgagccagggctgtcaaaaacttgc

SEQ ID NO: 4514979 - DNA, 25 bp, Homo sapien
tttggcctcgtttacatccgtatct

SEQ ID NO: 4514980 - DNA, 25 bp, Homo sapien
tggcctcgtttacatccgtatcttc

SEQ ID NO: 4514981 - DNA, 25 bp, Homo sapien
cctcgtttacatccgtatcttctaa

SEQ ID NO: 4514982 - DNA, 25 bp, Homo sapien
ttttggcctcgtttacatccgtatc

SEQ ID NO: 4514983 - DNA, 25 bp, Homo sapien
gaagggatggcagcattcagctcag

SEQ ID NO: 4514984 - DNA, 25 bp, Homo sapien
agaagggatggcagcattcagctca

SEQ ID NO: 4514985 - DNA, 25 bp, Homo sapien
ggtctttgctggattagcagaaggg

SEQ ID NO: 4514986 - DNA, 25 bp, Homo sapien
gtctttgctggattagcagaaggga

SEQ ID NO: 4514987 - DNA, 25 bp, Homo sapien
gctcttaaaggcttatacagttcat

SEQ ID NO: 4514988 - DNA, 25 bp, Homo sapien
ctgctcttaaaggcttatacagttc

SEQ ID NO: 4514989 - DNA, 25 bp, Homo sapien
tcttaaaggcttatacagttcattg

SEQ ID NO: 4514990 - DNA, 25 bp, Homo sapien
tgctcttaaaggcttatacagttca

SEQ ID NO: 4514991 - DNA, 25 bp, Homo sapien
ctcatctaggatttctctatttcat

SEQ ID NO: 4514992 - DNA, 25 bp, Homo sapien
tgcagcaattcaggcagttctttaa

SEQ ID NO: 4514993 - DNA, 25 bp, Homo sapien
tctctatttcattgcagcaattcag

SEQ ID NO: 4514994 - DNA, 25 bp, Homo sapien
ctaggatttctctatttcattgcag

SEQ ID NO: 4514995 - DNA, 25 bp, Homo sapien
atttagtcaatatagactgaggtac

SEQ ID NO: 4514996 - DNA, 25 bp, Homo sapien
gatttagtcaatatagactgaggta

SEQ ID NO: 4514997 - DNA, 25 bp, Homo sapien
tagactgaggtacagtgtctccaga

SEQ ID NO: 4514998 - DNA, 25 bp, Homo sapien
tcatctgagcaattgatctgttaac

SEQ ID NO: 4514999 - DNA, 25 bp, Homo sapien
ctctcatctgagcaattgatctgtt

SEQ ID NO: 4515000 - DNA, 25 bp, Homo sapien
ctcatctgagcaattgatctgttaa

SEQ ID NO: 4515001 - DNA, 25 bp, Homo sapien
gcttctctcatctgagcaattgatc

SEQ ID NO: 4515002 - DNA, 25 bp, Homo sapien
gtgactgcgtcagttgcaagagcac

SEQ ID NO: 4515003 - DNA, 25 bp, Homo sapien
gtgctgcagtgactgcgtcagttgc

SEQ ID NO: 4515004 - DNA, 25 bp, Homo sapien
tgcagtgactgcgtcagttgcaaga

SEQ ID NO: 4515005 - DNA, 25 bp, Homo sapien
cagtgactgcgtcagttgcaagagc

SEQ ID NO: 4515006 - DNA, 25 bp, Homo sapien
cagccaggggagtaacgtggcactc

SEQ ID NO: 4515007 - DNA, 25 bp, Homo sapien
gccaggggagtaacgtggcactcac

SEQ ID NO: 4515008 - DNA, 25 bp, Homo sapien
agccaggggagtaacgtggcactca

SEQ ID NO: 4515009 - DNA, 25 bp, Homo sapien
ttgccaacttgctgaggaacgagta

SEQ ID NO: 4515010 - DNA, 25 bp, Homo sapien
gccaacttgctgaggaacgagtaac

SEQ ID NO: 4515011 - DNA, 25 bp, Homo sapien
tgttttgccaacttgctgaggaacg

SEQ ID NO: 4515012 - DNA, 25 bp, Homo sapien
cagcatgatatctgttttgccaact

SEQ ID NO: 4515013 - DNA, 25 bp, Homo sapien
taagaccagcctcgggctaaaccca

SEQ ID NO: 4515014 - DNA, 25 bp, Homo sapien
aaacagtcgctgcatctaagaccag

SEQ ID NO: 4515015 - DNA, 25 bp, Homo sapien
ctgaaacagtcgctgcatctaagac

SEQ ID NO: 4515016 - DNA, 25 bp, Homo sapien
tctaagaccagcctcgggctaaacc

SEQ ID NO: 4515017 - DNA, 25 bp, Homo sapien
ttggcacgaagcttttgaggggagc

SEQ ID NO: 4515018 - DNA, 25 bp, Homo sapien
tggcacgaagcttttgaggggagca

SEQ ID NO: 4515019 - DNA, 25 bp, Homo sapien
ggaaccatccccgtccagatggtgc

SEQ ID NO: 4515020 - DNA, 25 bp, Homo sapien
tggggaaccatccccgtccagatgg

SEQ ID NO: 4515021 - DNA, 25 bp, Homo sapien
gaacaggcccacgtagaacatagag

SEQ ID NO: 4515022 - DNA, 25 bp, Homo sapien
tccgagtcagcatcgtaaaggcccg

SEQ ID NO: 4515023 - DNA, 25 bp, Homo sapien
tcagcacattgacgaagaacaggcc

SEQ ID NO: 4515024 - DNA, 25 bp, Homo sapien
tcaaagacgtcgagctccgagtcag

SEQ ID NO: 4515025 - DNA, 25 bp, Homo sapien
gcggcggcccggcgatcccggcgaa

SEQ ID NO: 4515026 - DNA, 25 bp, Homo sapien
gcagccggtggcaagggcggcggcg

SEQ ID NO: 4515027 - DNA, 25 bp, Homo sapien
gcggcggcggcccggcgatcccggc

SEQ ID NO: 4515028 - DNA, 25 bp, Homo sapien
caagggcggcggcggcccggcgatc

SEQ ID NO: 4515029 - DNA, 25 bp, Homo sapien
ccaaggctctttcgaccgccgtgaa

SEQ ID NO: 4515030 - DNA, 25 bp, Homo sapien
tgaagtggcgggcccccttgaagtg

SEQ ID NO: 4515031 - DNA, 25 bp, Homo sapien
ccccaaggctctttcgaccgccgtg

SEQ ID NO: 4515032 - DNA, 25 bp, Homo sapien
aggctctttcgaccgccgtgaagtg

SEQ ID NO: 4515033 - DNA, 25 bp, Homo sapien
tgacaagctcgtttgcatacatgtt

SEQ ID NO: 4515034 - DNA, 25 bp, Homo sapien
gacaagctcgtttgcatacatgttt

SEQ ID NO: 4515035 - DNA, 25 bp, Homo sapien
caagctcgtttgcatacatgtttat

SEQ ID NO: 4515036 - DNA, 25 bp, Homo sapien
tctgacaagctcgtttgcatacatg

SEQ ID NO: 4515037 - DNA, 25 bp, Homo sapien
cttcctttcctcaatgccatgcagt

SEQ ID NO: 4515038 - DNA, 25 bp, Homo sapien
ccactgaataataatacacgaaagc

SEQ ID NO: 4515039 - DNA, 25 bp, Homo sapien
atttacagggttctgcgcatgacac

SEQ ID NO: 4515040 - DNA, 25 bp, Homo sapien
ggttctgcgcatgacactgcatctg

SEQ ID NO: 4515041 - DNA, 25 bp, Homo sapien
gcgaggatttttcagtactactgta

SEQ ID NO: 4515042 - DNA, 25 bp, Homo sapien
gcagtttttttgtgttcggtggcgc

SEQ ID NO: 4515043 - DNA, 25 bp, Homo sapien
ttttgtgttcggtggcgctctgaaa

SEQ ID NO: 4515044 - DNA, 25 bp, Homo sapien
aacctaaattgcgaggatttttcag

SEQ ID NO: 4515045 - DNA, 25 bp, Homo sapien
gaaaagtcatcatatggacagaggc

SEQ ID NO: 4515046 - DNA, 25 bp, Homo sapien
taagtcctatagacgggaagtccat

SEQ ID NO: 4515047 - DNA, 25 bp, Homo sapien
gattacaaggaaacgatgaccggca

SEQ ID NO: 4515048 - DNA, 25 bp, Homo sapien
cgttagcaagggtgtcgtaagtcct

SEQ ID NO: 4515049 - DNA, 25 bp, Homo sapien
agctcagccctgtcgtcatggaact

SEQ ID NO: 4515050 - DNA, 25 bp, Homo sapien
gccagctcagccctgtcgtcatgga

SEQ ID NO: 4515051 - DNA, 25 bp, Homo sapien
tcagccctgtcgtcatggaactcat

SEQ ID NO: 4515052 - DNA, 25 bp, Homo sapien
agccctgtcgtcatggaactcattt

SEQ ID NO: 4515053 - DNA, 25 bp, Homo sapien
aagtttcaggcatccgggcatttga

SEQ ID NO: 4515054 - DNA, 25 bp, Homo sapien
caggcatccgggcatttgagaggcc

SEQ ID NO: 4515055 - DNA, 25 bp, Homo sapien
ccgggcatttgagaggccaagaagt

SEQ ID NO: 4515056 - DNA, 25 bp, Homo sapien
catccgggcatttgagaggccaaga

SEQ ID NO: 4515057 - DNA, 25 bp, Homo sapien
tagtaaacatcacttaaacacaatt

SEQ ID NO: 4515058 - DNA, 25 bp, Homo sapien
aaatagtcactagcttgggcacagt

SEQ ID NO: 4515059 - DNA, 25 bp, Homo sapien
taaatatatctgcacatatacatgt

SEQ ID NO: 4515060 - DNA, 25 bp, Homo sapien
aagtgattaacaagggagggtaatg

SEQ ID NO: 4515061 - DNA, 25 bp, Homo sapien
atacatatatggttatgcagagata

SEQ ID NO: 4515062 - DNA, 25 bp, Homo sapien
tatatggttatgcagagataacaca

SEQ ID NO: 4515063 - DNA, 25 bp, Homo sapien
atatggttatgcagagataacacac

SEQ ID NO: 4515064 - DNA, 25 bp, Homo sapien
tctgactgaaattaaaactctggac

SEQ ID NO: 4515065 - DNA, 25 bp, Homo sapien
cctctgcaagatggagcatatgtag

SEQ ID NO: 4515066 - DNA, 25 bp, Homo sapien
gaagctgctgtcatgatactagctg

SEQ ID NO: 4515067 - DNA, 25 bp, Homo sapien
gaatcacggaggtgagtctttctca

SEQ ID NO: 4515068 - DNA, 25 bp, Homo sapien
gctcaacagatataaattgcaacat

SEQ ID NO: 4515069 - DNA, 25 bp, Homo sapien
gcaacattattaggtagatgaagaa

SEQ ID NO: 4515070 - DNA, 25 bp, Homo sapien
cattcaaagctcaacagatataaat

SEQ ID NO: 4515071 - DNA, 25 bp, Homo sapien
gaagaataaacgtgtcatttcagca

SEQ ID NO: 4515072 - DNA, 25 bp, Homo sapien
tagccagatcagtaatgtagggaaa

SEQ ID NO: 4515073 - DNA, 25 bp, Homo sapien
gaaaagggaacttatcctgatagag

SEQ ID NO: 4515074 - DNA, 25 bp, Homo sapien
cagacaacagtctatgtaaaagtat

SEQ ID NO: 4515075 - DNA, 25 bp, Homo sapien
caactttatactgatagtcctagcc

SEQ ID NO: 4515076 - DNA, 25 bp, Homo sapien
aaaattacagactgaggatcatttt

SEQ ID NO: 4515077 - DNA, 25 bp, Homo sapien
tattgatataccagaaataatgtta

SEQ ID NO: 4515078 - DNA, 25 bp, Homo sapien
catgttctgaatgacctgttcttaa

SEQ ID NO: 4515079 - DNA, 25 bp, Homo sapien
catcatcctcttaagtatatacttt

SEQ ID NO: 4515080 - DNA, 25 bp, Homo sapien
tcaattgttggagtgtttgacgttc

SEQ ID NO: 4515081 - DNA, 25 bp, Homo sapien
tgtttgacgttcttggttgatccat

SEQ ID NO: 4515082 - DNA, 25 bp, Homo sapien
tctttaaatgctctcaattgttgga

SEQ ID NO: 4515083 - DNA, 25 bp, Homo sapien
atgctctcaattgttggagtgtttg

SEQ ID NO: 4515084 - DNA, 25 bp, Homo sapien
tttgctcctttttatcttgtctctt

SEQ ID NO: 4515085 - DNA, 25 bp, Homo sapien
tgctcctttttatcttgtctctttt

SEQ ID NO: 4515086 - DNA, 25 bp, Homo sapien
ttttgctcctttttatcttgtctct

SEQ ID NO: 4515087 - DNA, 25 bp, Homo sapien
cttttgctcctttttatcttgtctc

SEQ ID NO: 4515088 - DNA, 25 bp, Homo sapien
aggtccagggcagcgcaactccagt

SEQ ID NO: 4515089 - DNA, 25 bp, Homo sapien
gcatgtcacgctacacaaacataga

SEQ ID NO: 4515090 - DNA, 25 bp, Homo sapien
gaggtgaattggctgacagctgcag

SEQ ID NO: 4515091 - DNA, 25 bp, Homo sapien
tccagtttccacaagtctaggcctg

SEQ ID NO: 4515092 - DNA, 25 bp, Homo sapien
tctgagccaatgattttcttcgcac

SEQ ID NO: 4515093 - DNA, 25 bp, Homo sapien
gccaatgattttcttcgcactgatc

SEQ ID NO: 4515094 - DNA, 25 bp, Homo sapien
gcaatctgagccaatgattttcttc

SEQ ID NO: 4515095 - DNA, 25 bp, Homo sapien
tgatgctgacgagaatatcttatgc

SEQ ID NO: 4515096 - DNA, 25 bp, Homo sapien
ttaatattagttctggtgcggccca

SEQ ID NO: 4515097 - DNA, 25 bp, Homo sapien
caaatcacctacatggtttttagtg

SEQ ID NO: 4515098 - DNA, 25 bp, Homo sapien
tgttaccctggtatagcataaaagg

SEQ ID NO: 4515099 - DNA, 25 bp, Homo sapien
catttgggcgtagtgtaaggcattc

SEQ ID NO: 4515100 - DNA, 25 bp, Homo sapien
ctgtggtccgggggtggtggctcac

SEQ ID NO: 4515101 - DNA, 25 bp, Homo sapien
gccaaggtgggcggatcacttgagg

SEQ ID NO: 4515102 - DNA, 25 bp, Homo sapien
caagacgagcctagccgacatggcg

SEQ ID NO: 4515103 - DNA, 25 bp, Homo sapien
acctgtaatcccaggactttgggag

SEQ ID NO: 4515104 - DNA, 25 bp, Homo sapien
gatcctgccccgtttaatagactcc

SEQ ID NO: 4515105 - DNA, 25 bp, Homo sapien
cacagatcctgccccgtttaataga

SEQ ID NO: 4515106 - DNA, 25 bp, Homo sapien
cagatcctgccccgtttaatagact

SEQ ID NO: 4515107 - DNA, 25 bp, Homo sapien
acacagatcctgccccgtttaatag

SEQ ID NO: 4515108 - DNA, 25 bp, Homo sapien
tccgaattcttatcgtcctgcagcc

SEQ ID NO: 4515109 - DNA, 25 bp, Homo sapien
tgactaagttcctctggactttcac

SEQ ID NO: 4515110 - DNA, 25 bp, Homo sapien
tcacttccgaattcttatcgtcctg

SEQ ID NO: 4515111 - DNA, 25 bp, Homo sapien
ccccaccacagtcaatgactaagtt

SEQ ID NO: 4515112 - DNA, 25 bp, Homo sapien
atggatcgtaatagacaacttcatc

SEQ ID NO: 4515113 - DNA, 25 bp, Homo sapien
aaattgcaaagaccactattctccc

SEQ ID NO: 4515114 - DNA, 25 bp, Homo sapien
tgcaaagaccactattctccccaaa

SEQ ID NO: 4515115 - DNA, 25 bp, Homo sapien
caaagaccactattctccccaaagt

SEQ ID NO: 4515116 - DNA, 25 bp, Homo sapien
gttttgaacttgattctaaatttca

SEQ ID NO: 4515117 - DNA, 25 bp, Homo sapien
tatatatctgctatgcacccctaaa

SEQ ID NO: 4515118 - DNA, 25 bp, Homo sapien
gctatgcacccctaaacattaaaaa

SEQ ID NO: 4515119 - DNA, 25 bp, Homo sapien
aaaagatgttactgaactggttatg

SEQ ID NO: 4515120 - DNA, 25 bp, Homo sapien
caaattgttaccactaagtatctgt

SEQ ID NO: 4515121 - DNA, 25 bp, Homo sapien
ccaactgtgtagtaagcagtatttc

SEQ ID NO: 4515122 - DNA, 25 bp, Homo sapien
caactgtgtagtaagcagtatttct

SEQ ID NO: 4515123 - DNA, 25 bp, Homo sapien
aactgtgtagtaagcagtatttctt

SEQ ID NO: 4515124 - DNA, 25 bp, Homo sapien
gctattttctattccttgttccgta

SEQ ID NO: 4515125 - DNA, 25 bp, Homo sapien
tcaagtacagtacccacttcaatac

SEQ ID NO: 4515126 - DNA, 25 bp, Homo sapien
tactgggcttggtgttactataaag

SEQ ID NO: 4515127 - DNA, 25 bp, Homo sapien
agagcaaataggaaagaaacacttt

SEQ ID NO: 4515128 - DNA, 25 bp, Homo sapien
taaccttccataggagatggtgttg

SEQ ID NO: 4515129 - DNA, 25 bp, Homo sapien
ctttatgtctaaccttccataggag

SEQ ID NO: 4515130 - DNA, 25 bp, Homo sapien
aaactttatgtctaaccttccatag

SEQ ID NO: 4515131 - DNA, 25 bp, Homo sapien
tgtctaaccttccataggagatggt

SEQ ID NO: 4515132 - DNA, 25 bp, Homo sapien
cagacagtgtggaataacagacact

SEQ ID NO: 4515133 - DNA, 25 bp, Homo sapien
gggagctaagtagtgtatacacaga

SEQ ID NO: 4515134 - DNA, 25 bp, Homo sapien
aaatacaagtgtgctttaccacatg

SEQ ID NO: 4515135 - DNA, 25 bp, Homo sapien
taggtgatgattacgctaaaagccc

SEQ ID NO: 4515136 - DNA, 25 bp, Homo sapien
tccaacctgggaattgctgtggccc

SEQ ID NO: 4515137 - DNA, 25 bp, Homo sapien
ccaacctgggaattgctgtggccca

SEQ ID NO: 4515138 - DNA, 25 bp, Homo sapien
ttatattttggcacacttgcttcca

SEQ ID NO: 4515139 - DNA, 25 bp, Homo sapien
agacaggctcatatggatagtttga

SEQ ID NO: 4515140 - DNA, 25 bp, Homo sapien
catatggatagtttgaccaaaaaac

SEQ ID NO: 4515141 - DNA, 25 bp, Homo sapien
gtttctatgactagctagacagaca

SEQ ID NO: 4515142 - DNA, 25 bp, Homo sapien
acacgtatctgcgtatagcattttt

SEQ ID NO: 4515143 - DNA, 25 bp, Homo sapien
gtatctgcgtatagcattttttaga

SEQ ID NO: 4515144 - DNA, 25 bp, Homo sapien
ttacacgtatctgcgtatagcattt

SEQ ID NO: 4515145 - DNA, 25 bp, Homo sapien
cacgtatctgcgtatagcatttttt

SEQ ID NO: 4515146 - DNA, 25 bp, Homo sapien
acccttctaggacctaggtcatcct

SEQ ID NO: 4515147 - DNA, 25 bp, Homo sapien
actacccttctaggacctaggtcat

SEQ ID NO: 4515148 - DNA, 25 bp, Homo sapien
tacccttctaggacctaggtcatcc

SEQ ID NO: 4515149 - DNA, 25 bp, Homo sapien
ccttctaggacctaggtcatcctca

SEQ ID NO: 4515150 - DNA, 25 bp, Homo sapien
cagacagaagggaaaattatcttag

SEQ ID NO: 4515151 - DNA, 25 bp, Homo sapien
ctacagacagaagggaaaattatct

SEQ ID NO: 4515152 - DNA, 25 bp, Homo sapien
cagaagggaaaattatcttagtaag

SEQ ID NO: 4515153 - DNA, 25 bp, Homo sapien
gacagaagggaaaattatcttagta

SEQ ID NO: 4515154 - DNA, 25 bp, Homo sapien
gcacatgaataaggctctaagctga

SEQ ID NO: 4515155 - DNA, 25 bp, Homo sapien
aataaggctctaagctgagcaccac

SEQ ID NO: 4515156 - DNA, 25 bp, Homo sapien
catgaataaggctctaagctgagca

SEQ ID NO: 4515157 - DNA, 25 bp, Homo sapien
tgcacatgaataaggctctaagctg

SEQ ID NO: 4515158 - DNA, 25 bp, Homo sapien
tggaagaacgtggttgccacggtaa

SEQ ID NO: 4515159 - DNA, 25 bp, Homo sapien
tactggaagaacgtggttgccacgg

SEQ ID NO: 4515160 - DNA, 25 bp, Homo sapien
ctggaagaacgtggttgccacggta

SEQ ID NO: 4515161 - DNA, 25 bp, Homo sapien
agtactggaagaacgtggttgccac

SEQ ID NO: 4515162 - DNA, 25 bp, Homo sapien
tgttattctttcctacatggatggg

SEQ ID NO: 4515163 - DNA, 25 bp, Homo sapien
gtgtagtccgtgttattctttccta

SEQ ID NO: 4515164 - DNA, 25 bp, Homo sapien
acccaagcgcggtcaaacgccggcg

SEQ ID NO: 4515165 - DNA, 25 bp, Homo sapien
agtccgtgttattctttcctacatg

SEQ ID NO: 4515166 - DNA, 25 bp, Homo sapien
ctgacgcagccgcgcgtccgcctcg

SEQ ID NO: 4515167 - DNA, 25 bp, Homo sapien
acgcagccgcgcgtccgcctcgacc

SEQ ID NO: 4515168 - DNA, 25 bp, Homo sapien
gcagccgcgcgtccgcctcgaccca

SEQ ID NO: 4515169 - DNA, 25 bp, Homo sapien
tgacgcagccgcgcgtccgcctcga

SEQ ID NO: 4515170 - DNA, 25 bp, Homo sapien
cgaagagagcgtcgcgcacggtggc

SEQ ID NO: 4515171 - DNA, 25 bp, Homo sapien
ttagccgcgaagagagcgtcgcgca

SEQ ID NO: 4515172 - DNA, 25 bp, Homo sapien
gccgcgaagagagcgtcgcgcacgg

SEQ ID NO: 4515173 - DNA, 25 bp, Homo sapien
cgcgaagagagcgtcgcgcacggtg

SEQ ID NO: 4515174 - DNA, 25 bp, Homo sapien
acgcgcgccggccacagcagcgccc

SEQ ID NO: 4515175 - DNA, 25 bp, Homo sapien
gcccacgcgcgccggccacagcagc

SEQ ID NO: 4515176 - DNA, 25 bp, Homo sapien
ccggggcccacgcgcgccggccaca

SEQ ID NO: 4515177 - DNA, 25 bp, Homo sapien
tgcagtgccgcctcgccggggccca

SEQ ID NO: 4515178 - DNA, 25 bp, Homo sapien
cggcagccgtgggaagcagtgttcc

SEQ ID NO: 4515179 - DNA, 25 bp, Homo sapien
cagccgtgggaagcagtgttccaga

SEQ ID NO: 4515180 - DNA, 25 bp, Homo sapien
cgcccacgtccagctccggcggcag

SEQ ID NO: 4515181 - DNA, 25 bp, Homo sapien
ggcggcagccgtgggaagcagtgtt

SEQ ID NO: 4515182 - DNA, 25 bp, Homo sapien
ccgcggccgagagccggccggccca

SEQ ID NO: 4515183 - DNA, 25 bp, Homo sapien
cgcggccgagagccggccggcccag

SEQ ID NO: 4515184 - DNA, 25 bp, Homo sapien
ggcggcctcgggcttgtgctccagc

SEQ ID NO: 4515185 - DNA, 25 bp, Homo sapien
gcggcctcgggcttgtgctccagcc

SEQ ID NO: 4515186 - DNA, 25 bp, Homo sapien
acggcggcctcgggcttgtgctcca

SEQ ID NO: 4515187 - DNA, 25 bp, Homo sapien
ggcctcgggcttgtgctccagcccc

SEQ ID NO: 4515188 - DNA, 25 bp, Homo sapien
ttgccctccgcgccgttccaagcca

SEQ ID NO: 4515189 - DNA, 25 bp, Homo sapien
aacttgccctccgcgccgttccaag

SEQ ID NO: 4515190 - DNA, 25 bp, Homo sapien
caaacttgccctccgcgccgttcca

SEQ ID NO: 4515191 - DNA, 25 bp, Homo sapien
agcaaacttgccctccgcgccgttc

SEQ ID NO: 4515192 - DNA, 25 bp, Homo sapien
caggaagcgcaaccggtgcccctgg

SEQ ID NO: 4515193 - DNA, 25 bp, Homo sapien
gcccctggggatcggcgaagaggcc

SEQ ID NO: 4515194 - DNA, 25 bp, Homo sapien
agcgcaaccggtgcccctggggatc

SEQ ID NO: 4515195 - DNA, 25 bp, Homo sapien
ggcgaagaggccctcccggagcggc

SEQ ID NO: 4515196 - DNA, 25 bp, Homo sapien
gcggccctagggcttggcgggcgcg

SEQ ID NO: 4515197 - DNA, 25 bp, Homo sapien
ggcgcgggcctgacctcgtcgcacc

SEQ ID NO: 4515198 - DNA, 25 bp, Homo sapien
gcgcgggcctgacctcgtcgcaccg

SEQ ID NO: 4515199 - DNA, 25 bp, Homo sapien
gcggcagcggccctagggcttggcg

SEQ ID NO: 4515200 - DNA, 25 bp, Homo sapien
ttgcattcctctataaatgttaatg

SEQ ID NO: 4515201 - DNA, 25 bp, Homo sapien
tattgtttatttctatggcaccatt

SEQ ID NO: 4515202 - DNA, 25 bp, Homo sapien
tggcaccattacactatgctatcac

SEQ ID NO: 4515203 - DNA, 25 bp, Homo sapien
tgaaacctcaagaccatgactgaaa

SEQ ID NO: 4515204 - DNA, 25 bp, Homo sapien
gccttggattcaagggcactcccta

SEQ ID NO: 4515205 - DNA, 25 bp, Homo sapien
caatgtgaaaggatgccagtgggcc

SEQ ID NO: 4515206 - DNA, 25 bp, Homo sapien
tgagatgagccaaagctgtggtcca

SEQ ID NO: 4515207 - DNA, 25 bp, Homo sapien
ggtccaggacttcttttcagcccag

SEQ ID NO: 4515208 - DNA, 25 bp, Homo sapien
caacatgactgctggaagaaggctc

SEQ ID NO: 4515209 - DNA, 25 bp, Homo sapien
cgtttccttgcaacatgactgctgg

SEQ ID NO: 4515210 - DNA, 25 bp, Homo sapien
ttccttgcaacatgactgctggaag

SEQ ID NO: 4515211 - DNA, 25 bp, Homo sapien
ccttgcaacatgactgctggaagaa

SEQ ID NO: 4515212 - DNA, 25 bp, Homo sapien
ggaggcagacaccaagttctggggt

SEQ ID NO: 4515213 - DNA, 25 bp, Homo sapien
aggcagacaccaagttctggggtct

SEQ ID NO: 4515214 - DNA, 25 bp, Homo sapien
gaggcagacaccaagttctggggtc

SEQ ID NO: 4515215 - DNA, 25 bp, Homo sapien
ttctccatgacttgaaaatgccacc

SEQ ID NO: 4515216 - DNA, 25 bp, Homo sapien
ccacctgagggcaggtcgctgccga

SEQ ID NO: 4515217 - DNA, 25 bp, Homo sapien
cgctgccgagatgtgactgcaatat

SEQ ID NO: 4515218 - DNA, 25 bp, Homo sapien
gctccagagcagctttatggaccac

SEQ ID NO: 4515219 - DNA, 25 bp, Homo sapien
gccaaagatgcagcactgggaggag

SEQ ID NO: 4515220 - DNA, 25 bp, Homo sapien
cttttatcagaaccagggggccgtg

SEQ ID NO: 4515221 - DNA, 25 bp, Homo sapien
tactttgtagtgtggatgtaccact

SEQ ID NO: 4515222 - DNA, 25 bp, Homo sapien
ccaggctgatatcgggctcaggcga

SEQ ID NO: 4515223 - DNA, 25 bp, Homo sapien
tctcttagagatcacttcatatctg

SEQ ID NO: 4515224 - DNA, 25 bp, Homo sapien
gcatccggcccattttgcacctttt

SEQ ID NO: 4515225 - DNA, 25 bp, Homo sapien
tattacttgtaaacaaaattctgtc

SEQ ID NO: 4515226 - DNA, 25 bp, Homo sapien
tacttgtaaacaaaattctgtcaaa

SEQ ID NO: 4515227 - DNA, 25 bp, Homo sapien
acaaaattctgtcaaaaacctgaca

SEQ ID NO: 4515228 - DNA, 25 bp, Homo sapien
tctgtcaaaaacctgacaaattaaa

SEQ ID NO: 4515229 - DNA, 25 bp, Homo sapien
ctgtgcccacaggagtagcagtgct

SEQ ID NO: 4515230 - DNA, 25 bp, Homo sapien
tgagtctgatagtaatgaaaaagga

SEQ ID NO: 4515231 - DNA, 25 bp, Homo sapien
gttcccatgtattaaacaaggtggc

SEQ ID NO: 4515232 - DNA, 25 bp, Homo sapien
gctatgaaacccacgtagtcggaca

SEQ ID NO: 4515233 - DNA, 25 bp, Homo sapien
ccaatgagaatctctgaacatcatc

SEQ ID NO: 4515234 - DNA, 25 bp, Homo sapien
tgagtagatctcaatataattctga

SEQ ID NO: 4515235 - DNA, 25 bp, Homo sapien
ttccacaacaacagagtcatgcaag

SEQ ID NO: 4515236 - DNA, 25 bp, Homo sapien
tgaggaattgccaaggacccagagc

SEQ ID NO: 4515237 - DNA, 25 bp, Homo sapien
gagctaacacaacatgaatttggaa

SEQ ID NO: 4515238 - DNA, 25 bp, Homo sapien
gaacttgggcctcgccccaggacca

SEQ ID NO: 4515239 - DNA, 25 bp, Homo sapien
taaacgtcctccccgtcacagtgtg

SEQ ID NO: 4515240 - DNA, 25 bp, Homo sapien
cccggcgtgattgtgacctgtcata

SEQ ID NO: 4515241 - DNA, 25 bp, Homo sapien
tgtggacatggtacgtaaacgtcct

SEQ ID NO: 4515242 - DNA, 25 bp, Homo sapien
cctattgtaactgggtcattttgaa

SEQ ID NO: 4515243 - DNA, 25 bp, Homo sapien
ctttaaaggatattgagtcgggatt

SEQ ID NO: 4515244 - DNA, 25 bp, Homo sapien
ttcctattgtaactgggtcattttg

SEQ ID NO: 4515245 - DNA, 25 bp, Homo sapien
ttgagtcgggattagtgacaatagt

SEQ ID NO: 4515246 - DNA, 25 bp, Homo sapien
tgtttgggcgagatttataggaagt

SEQ ID NO: 4515247 - DNA, 25 bp, Homo sapien
tttgggcgagatttataggaagtgt

SEQ ID NO: 4515248 - DNA, 25 bp, Homo sapien
ctttcctgtttgggcgagatttata

SEQ ID NO: 4515249 - DNA, 25 bp, Homo sapien
tcctgtttgggcgagatttatagga

SEQ ID NO: 4515250 - DNA, 25 bp, Homo sapien
gctcctactgcaaggtattaacaag

SEQ ID NO: 4515251 - DNA, 25 bp, Homo sapien
tgctaactggtgaggaggcacccat

SEQ ID NO: 4515252 - DNA, 25 bp, Homo sapien
gaagcatatgctatgaccggcttgt

SEQ ID NO: 4515253 - DNA, 25 bp, Homo sapien
gagctagtgcctgacaagtgttaca

SEQ ID NO: 4515254 - DNA, 25 bp, Homo sapien
caagtgaaattgctaatggacattt

SEQ ID NO: 4515255 - DNA, 25 bp, Homo sapien
acaagtttgtgtatggacatccact

SEQ ID NO: 4515256 - DNA, 25 bp, Homo sapien
tttttgactatgcaagtgaaattgc

SEQ ID NO: 4515257 - DNA, 25 bp, Homo sapien
gctaatggacatttccatacaagtt

SEQ ID NO: 4515258 - DNA, 25 bp, Homo sapien
cagtattcagtcttctaacccatga

SEQ ID NO: 4515259 - DNA, 25 bp, Homo sapien
gcctgaactcaggttgcaacagttt

SEQ ID NO: 4515260 - DNA, 25 bp, Homo sapien
gcaaggatggattcacagtattcag

SEQ ID NO: 4515261 - DNA, 25 bp, Homo sapien
tctgtaagtcaatgtgcaaggatgg

SEQ ID NO: 4515262 - DNA, 25 bp, Homo sapien
cactgtggtccacaataagtatttc

SEQ ID NO: 4515263 - DNA, 25 bp, Homo sapien
gatggttgtgcaacactgtacttaa

SEQ ID NO: 4515264 - DNA, 25 bp, Homo sapien
cagagtttctgatcggagtggtgaa

SEQ ID NO: 4515265 - DNA, 25 bp, Homo sapien
gtcatcagcgggtaggaccgtcact

SEQ ID NO: 4515266 - DNA, 25 bp, Homo sapien
ttttggtcttgaaacacgtttcaca

SEQ ID NO: 4515267 - DNA, 25 bp, Homo sapien
aatctggatccattgataggaaaca

SEQ ID NO: 4515268 - DNA, 25 bp, Homo sapien
tgcctggtattgtgttttttggtct

SEQ ID NO: 4515269 - DNA, 25 bp, Homo sapien
aaatgtatgcctggtattgtgtttt

SEQ ID NO: 4515270 - DNA, 25 bp, Homo sapien
accaactccatttctgatagcaacc

SEQ ID NO: 4515271 - DNA, 25 bp, Homo sapien
agccaggacacaacagaaatcacct

SEQ ID NO: 4515272 - DNA, 25 bp, Homo sapien
ggacacaacagaaatcacctgatcc

SEQ ID NO: 4515273 - DNA, 25 bp, Homo sapien
cagaaatcacctgatccatcttcct

SEQ ID NO: 4515274 - DNA, 25 bp, Homo sapien
caacagaaatcacctgatccatctt

SEQ ID NO: 4515275 - DNA, 25 bp, Homo sapien
catcctttgataagagcaacgtgtc

SEQ ID NO: 4515276 - DNA, 25 bp, Homo sapien
tggccatgaggcgacaatcgttaaa

SEQ ID NO: 4515277 - DNA, 25 bp, Homo sapien
taatatatgatgtcagcgcctggtt

SEQ ID NO: 4515278 - DNA, 25 bp, Homo sapien
cgttaaagccaggtaatgagcacat

SEQ ID NO: 4515279 - DNA, 25 bp, Homo sapien
gctctaggaacctctcaccactggg

SEQ ID NO: 4515280 - DNA, 25 bp, Homo sapien
taacatgagaagctctaggaacctc

SEQ ID NO: 4515281 - DNA, 25 bp, Homo sapien
catgagaagctctaggaacctctca

SEQ ID NO: 4515282 - DNA, 25 bp, Homo sapien
gagaagctctaggaacctctcacca

SEQ ID NO: 4515283 - DNA, 25 bp, Homo sapien
ggaatttaattacccagatgatatt

SEQ ID NO: 4515284 - DNA, 25 bp, Homo sapien
gaatttaattacccagatgatatta

SEQ ID NO: 4515285 - DNA, 25 bp, Homo sapien
aatttaattacccagatgatattac

SEQ ID NO: 4515286 - DNA, 25 bp, Homo sapien
aggaatttaattacccagatgatat

SEQ ID NO: 4515287 - DNA, 25 bp, Homo sapien
tgacagaggctttgacccgcacttt

SEQ ID NO: 4515288 - DNA, 25 bp, Homo sapien
ttcacaacccccacactctgatgag

SEQ ID NO: 4515289 - DNA, 25 bp, Homo sapien
cagaggctttgacccgcactttatc

SEQ ID NO: 4515290 - DNA, 25 bp, Homo sapien
aacccccacactctgatgagtcaca

SEQ ID NO: 4515291 - DNA, 25 bp, Homo sapien
gatcatgcaatccatctctgtccag

SEQ ID NO: 4515292 - DNA, 25 bp, Homo sapien
ttgagatcatgcaatccatctctgt

SEQ ID NO: 4515293 - DNA, 25 bp, Homo sapien
agtcacactgcacattgagatcatg

SEQ ID NO: 4515294 - DNA, 25 bp, Homo sapien
cacactgcacattgagatcatgcaa

SEQ ID NO: 4515295 - DNA, 25 bp, Homo sapien
cacttcttcgtatgttcggcagcat

SEQ ID NO: 4515296 - DNA, 25 bp, Homo sapien
tcttcgtatgttcggcagcatctaa

SEQ ID NO: 4515297 - DNA, 25 bp, Homo sapien
ttcgcacacttcttcgtatgttcgg

SEQ ID NO: 4515298 - DNA, 25 bp, Homo sapien
cacacttcttcgtatgttcggcagc

SEQ ID NO: 4515299 - DNA, 25 bp, Homo sapien
gctgacaagacctaacccacccaaa

SEQ ID NO: 4515300 - DNA, 25 bp, Homo sapien
agcaggctgacaagacctaacccac

SEQ ID NO: 4515301 - DNA, 25 bp, Homo sapien
aggctgacaagacctaacccaccca

SEQ ID NO: 4515302 - DNA, 25 bp, Homo sapien
caggctgacaagacctaacccaccc

SEQ ID NO: 4515303 - DNA, 25 bp, Homo sapien
cctatgaagcttcctgcctgagatt

SEQ ID NO: 4515304 - DNA, 25 bp, Homo sapien
agatggggccggagggagtacatgc

SEQ ID NO: 4515305 - DNA, 25 bp, Homo sapien
tgcctatgaagcttcctgcctgaga

SEQ ID NO: 4515306 - DNA, 25 bp, Homo sapien
gccggagggagtacatgcctatgaa

SEQ ID NO: 4515307 - DNA, 25 bp, Homo sapien
tctgacacaacaggattagggtctt

SEQ ID NO: 4515308 - DNA, 25 bp, Homo sapien
gaagtcccgactcctaatgtggcag

SEQ ID NO: 4515309 - DNA, 25 bp, Homo sapien
gaaggagggttactatgaaatgaat

SEQ ID NO: 4515310 - DNA, 25 bp, Homo sapien
gagaggaagatgttagccacaagga

SEQ ID NO: 4515311 - DNA, 25 bp, Homo sapien
tgacatatatacaggtgaaatgaga

SEQ ID NO: 4515312 - DNA, 25 bp, Homo sapien
gacatatatacaggtgaaatgagat

SEQ ID NO: 4515313 - DNA, 25 bp, Homo sapien
tcattacccaagaaaccagctcggt

SEQ ID NO: 4515314 - DNA, 25 bp, Homo sapien
cattacccaagaaaccagctcggtt

SEQ ID NO: 4515315 - DNA, 25 bp, Homo sapien
atcattacccaagaaaccagctcgg

SEQ ID NO: 4515316 - DNA, 25 bp, Homo sapien
tcctcgtcagaatactcgtcggaca

SEQ ID NO: 4515317 - DNA, 25 bp, Homo sapien
tctgagagctccgtgacctgtatgt

SEQ ID NO: 4515318 - DNA, 25 bp, Homo sapien
gaatactcgtcggacaccgtgtctg

SEQ ID NO: 4515319 - DNA, 25 bp, Homo sapien
acctgtatgtcggagtggtccagca

SEQ ID NO: 4515320 - DNA, 25 bp, Homo sapien
gtggactccacaacggccagtgcag

SEQ ID NO: 4515321 - DNA, 25 bp, Homo sapien
tggactccacaacggccagtgcagc

SEQ ID NO: 4515322 - DNA, 25 bp, Homo sapien
ttcacaggagacggctgggtggccg

SEQ ID NO: 4515323 - DNA, 25 bp, Homo sapien
cagctgctgcaagaggatcatgggg

SEQ ID NO: 4515324 - DNA, 25 bp, Homo sapien
tgctgcaagaggatcatggggggct

SEQ ID NO: 4515325 - DNA, 25 bp, Homo sapien
caggagacggctgggtggccgaggc

SEQ ID NO: 4515326 - DNA, 25 bp, Homo sapien
aaggtcaggtgataccactgctcca

SEQ ID NO: 4515327 - DNA, 25 bp, Homo sapien
ggtcaggtgataccactgctccatc

SEQ ID NO: 4515328 - DNA, 25 bp, Homo sapien
caaggtcaggtgataccactgctcc

SEQ ID NO: 4515329 - DNA, 25 bp, Homo sapien
aggtcaggtgataccactgctccat

SEQ ID NO: 4515330 - DNA, 25 bp, Homo sapien
aataaacatatacagctagccctcc

SEQ ID NO: 4515331 - DNA, 25 bp, Homo sapien
acatatacagctagccctccgtatc

SEQ ID NO: 4515332 - DNA, 25 bp, Homo sapien
cagcaataaacatatacagctagcc

SEQ ID NO: 4515333 - DNA, 25 bp, Homo sapien
ccacagcaataaacatatacagcta

SEQ ID NO: 4515334 - DNA, 25 bp, Homo sapien
aaagtatttcggaggatgtgcatag

SEQ ID NO: 4515335 - DNA, 25 bp, Homo sapien
ttttaaagtatttcggaggatgtgc

SEQ ID NO: 4515336 - DNA, 25 bp, Homo sapien
gcaaatactacaccattttatagaa

SEQ ID NO: 4515337 - DNA, 25 bp, Homo sapien
aatactacaccattttatagaaggg

SEQ ID NO: 4515338 - DNA, 25 bp, Homo sapien
agaactgcaggcgtctgccaccttg

SEQ ID NO: 4515339 - DNA, 25 bp, Homo sapien
atgccttttcgtgtgataaagtccc

SEQ ID NO: 4515340 - DNA, 25 bp, Homo sapien
tgcccaggtggtgaatacattatct

SEQ ID NO: 4515341 - DNA, 25 bp, Homo sapien
gcattacatgcagccaccactatgc

SEQ ID NO: 4515342 - DNA, 25 bp, Homo sapien
gcaggccacgtgtctgttttgtaca

SEQ ID NO: 4515343 - DNA, 25 bp, Homo sapien
tggttgctgggcaggccacgtgtct

SEQ ID NO: 4515344 - DNA, 25 bp, Homo sapien
tttctactgcccttcttataaagat

SEQ ID NO: 4515345 - DNA, 25 bp, Homo sapien
atgaactgattattcacttcctttg

SEQ ID NO: 4515346 - DNA, 25 bp, Homo sapien
tgtgtgaacagttccagtctcctga

SEQ ID NO: 4515347 - DNA, 25 bp, Homo sapien
gtgtgaacagttccagtctcctgaa

SEQ ID NO: 4515348 - DNA, 25 bp, Homo sapien
ctgtgtgaacagttccagtctcctg

SEQ ID NO: 4515349 - DNA, 25 bp, Homo sapien
tgtgaacagttccagtctcctgaac

SEQ ID NO: 4515350 - DNA, 25 bp, Homo sapien
cagcgcccgacctgctttcaggatg

SEQ ID NO: 4515351 - DNA, 25 bp, Homo sapien
tgctttcaggatgtatagcttcaac

SEQ ID NO: 4515352 - DNA, 25 bp, Homo sapien
gctggctgagacaggatctgccgca

SEQ ID NO: 4515353 - DNA, 25 bp, Homo sapien
aggatgtatagcttcaactgctggc

SEQ ID NO: 4515354 - DNA, 25 bp, Homo sapien
cacacgagtttaagacggcagctat

SEQ ID NO: 4515355 - DNA, 25 bp, Homo sapien
gcagctatttcatcaagaagcgcca

SEQ ID NO: 4515356 - DNA, 25 bp, Homo sapien
taagacggcagctatttcatcaaga

SEQ ID NO: 4515357 - DNA, 25 bp, Homo sapien
tttcatcaagaagcgccatgtactg

SEQ ID NO: 4515358 - DNA, 25 bp, Homo sapien
tgcaaaggcctgtttagtcgatttc

SEQ ID NO: 4515359 - DNA, 25 bp, Homo sapien
tgagcccagacagacagcatgggct

SEQ ID NO: 4515360 - DNA, 25 bp, Homo sapien
ttccagcgaggttcaccaactgagc

SEQ ID NO: 4515361 - DNA, 25 bp, Homo sapien
gttcacattaaaggccacggcaggg

SEQ ID NO: 4515362 - DNA, 25 bp, Homo sapien
ccttgattcacagattaagatgaca

SEQ ID NO: 4515363 - DNA, 25 bp, Homo sapien
taagattgcacttgggctacatcaa

SEQ ID NO: 4515364 - DNA, 25 bp, Homo sapien
tgcagagggccgacaacattgtgcc

SEQ ID NO: 4515365 - DNA, 25 bp, Homo sapien
tgctacattaagtcacgtcactcaa

SEQ ID NO: 4515366 - DNA, 25 bp, Homo sapien
ggtgatgcgagtcatggtgacttct

SEQ ID NO: 4515367 - DNA, 25 bp, Homo sapien
ccttcagggtgatgcgagtcatggt

SEQ ID NO: 4515368 - DNA, 25 bp, Homo sapien
gcccttcagggtgatgcgagtcatg

SEQ ID NO: 4515369 - DNA, 25 bp, Homo sapien
cgagtcatggtgacttctccaaagt

SEQ ID NO: 4515370 - DNA, 25 bp, Homo sapien
ttgatgtacttgttgatgagcccat

SEQ ID NO: 4515371 - DNA, 25 bp, Homo sapien
gtacttgttgatgagcccattccac

SEQ ID NO: 4515372 - DNA, 25 bp, Homo sapien
agcggagctgggagttgatgtactt

SEQ ID NO: 4515373 - DNA, 25 bp, Homo sapien
gatgtacttgttgatgagcccattc

SEQ ID NO: 4515374 - DNA, 25 bp, Homo sapien
tcacctctgagtgacggcactacac

SEQ ID NO: 4515375 - DNA, 25 bp, Homo sapien
ggcactacacggctcttcaccagga

SEQ ID NO: 4515376 - DNA, 25 bp, Homo sapien
aaaccaggggagaagctgctgcacc

SEQ ID NO: 4515377 - DNA, 25 bp, Homo sapien
tgctgcaccactcttcaccagggca

SEQ ID NO: 4515378 - DNA, 25 bp, Homo sapien
cttgcaacaaatgcacagctaagat

SEQ ID NO: 4515379 - DNA, 25 bp, Homo sapien
gcttgcaacaaatgcacagctaaga

SEQ ID NO: 4515380 - DNA, 25 bp, Homo sapien
ttataggcactcaccaccaagcccg

SEQ ID NO: 4515381 - DNA, 25 bp, Homo sapien
agtagctgggattataggcactcac

SEQ ID NO: 4515382 - DNA, 25 bp, Homo sapien
caagcccggctcattttttttggat

SEQ ID NO: 4515383 - DNA, 25 bp, Homo sapien
cgattctccttgcttcagcttcctg

SEQ ID NO: 4515384 - DNA, 25 bp, Homo sapien
accagctccggtgttgctccctgta

SEQ ID NO: 4515385 - DNA, 25 bp, Homo sapien
accttcatgagcagcgtgatccact

SEQ ID NO: 4515386 - DNA, 25 bp, Homo sapien
agctccggtgttgctccctgtacac

SEQ ID NO: 4515387 - DNA, 25 bp, Homo sapien
ccttcatgagcagcgtgatccactg

SEQ ID NO: 4515388 - DNA, 25 bp, Homo sapien
ttgtccgtcgttccgctttccacta

SEQ ID NO: 4515389 - DNA, 25 bp, Homo sapien
tcttgtccgtcgttccgctttccac

SEQ ID NO: 4515390 - DNA, 25 bp, Homo sapien
gtcttgtccgtcgttccgctttcca

SEQ ID NO: 4515391 - DNA, 25 bp, Homo sapien
atgtcttgtccgtcgttccgctttc

SEQ ID NO: 4515392 - DNA, 25 bp, Homo sapien
cagacaaagagtctgcagtaagtta

SEQ ID NO: 4515393 - DNA, 25 bp, Homo sapien
gcagcagtccgcataaagtcttggt

SEQ ID NO: 4515394 - DNA, 25 bp, Homo sapien
ttaatagtgctggtaaacatcattg

SEQ ID NO: 4515395 - DNA, 25 bp, Homo sapien
cagtccgcataaagtcttggtggct

SEQ ID NO: 4515396 - DNA, 25 bp, Homo sapien
gccttggactaaacaccttcctgag

SEQ ID NO: 4515397 - DNA, 25 bp, Homo sapien
caactggacagtttgtaggctgcct

SEQ ID NO: 4515398 - DNA, 25 bp, Homo sapien
tgacatcccattctaaggcccagat

SEQ ID NO: 4515399 - DNA, 25 bp, Homo sapien
tgcaggtgtgtcctgacatcccatt

SEQ ID NO: 4515400 - DNA, 25 bp, Homo sapien
caatcactcggcctaggcctggagg

SEQ ID NO: 4515401 - DNA, 25 bp, Homo sapien
tgccagcttgaggtcgtattttcct

SEQ ID NO: 4515402 - DNA, 25 bp, Homo sapien
tgtgtccgaatcctctgctgagggc

SEQ ID NO: 4515403 - DNA, 25 bp, Homo sapien
tgtgtcccactggactcttatccac

SEQ ID NO: 4515404 - DNA, 25 bp, Homo sapien
catatcttcctcaacgctgtcacaa

SEQ ID NO: 4515405 - DNA, 25 bp, Homo sapien
agggagctgcacaggagccgtttcc

SEQ ID NO: 4515406 - DNA, 25 bp, Homo sapien
ttctggccctgaaacagggagctgc

SEQ ID NO: 4515407 - DNA, 25 bp, Homo sapien
ccttgggcagaagcattcatatctt

SEQ ID NO: 4515408 - DNA, 25 bp, Homo sapien
aatcaggcgcagtgccgtctgagcg

SEQ ID NO: 4515409 - DNA, 25 bp, Homo sapien
cccaggctcggtcccgatgggttct

SEQ ID NO: 4515410 - DNA, 25 bp, Homo sapien
gaggtcaaggttgtttgcgctgtgc

SEQ ID NO: 4515411 - DNA, 25 bp, Homo sapien
gagcgagggccagcgtgccggaatt

SEQ ID NO: 4515412 - DNA, 25 bp, Homo sapien
tgagcattggcacccactgacattt

SEQ ID NO: 4515413 - DNA, 25 bp, Homo sapien
ctaatgagcattggcacccactgac

SEQ ID NO: 4515414 - DNA, 25 bp, Homo sapien
aatgagcattggcacccactgacat

SEQ ID NO: 4515415 - DNA, 25 bp, Homo sapien
atgagcattggcacccactgacatt

SEQ ID NO: 4515416 - DNA, 25 bp, Homo sapien
cttccagcagcatccgattaaaagg

SEQ ID NO: 4515417 - DNA, 25 bp, Homo sapien
tacagcttgccaaaggtgacttcca

SEQ ID NO: 4515418 - DNA, 25 bp, Homo sapien
taaagaatttgactcgggacactgc

SEQ ID NO: 4515419 - DNA, 25 bp, Homo sapien
gactcgggacactgccagacttcta

SEQ ID NO: 4515420 - DNA, 25 bp, Homo sapien
aagataaagaatttgactcgggaca

SEQ ID NO: 4515421 - DNA, 25 bp, Homo sapien
aatttgactcgggacactgccagac

SEQ ID NO: 4515422 - DNA, 25 bp, Homo sapien
cacaaaacatcgcatacggcacaga

SEQ ID NO: 4515423 - DNA, 25 bp, Homo sapien
atcgcatacggcacagatggaagta

SEQ ID NO: 4515424 - DNA, 25 bp, Homo sapien
tttgccatccacaaaacatcgcata

SEQ ID NO: 4515425 - DNA, 25 bp, Homo sapien
catccacaaaacatcgcatacggca

SEQ ID NO: 4515426 - DNA, 25 bp, Homo sapien
gtatctatcccttccaggcgaacct

SEQ ID NO: 4515427 - DNA, 25 bp, Homo sapien
ctatcccttccaggcgaacctctgc

SEQ ID NO: 4515428 - DNA, 25 bp, Homo sapien
tcccttccaggcgaacctctgctct

SEQ ID NO: 4515429 - DNA, 25 bp, Homo sapien
atctatcccttccaggcgaacctct

SEQ ID NO: 4515430 - DNA, 25 bp, Homo sapien
caaattcagcaattgtactgaggag

SEQ ID NO: 4515431 - DNA, 25 bp, Homo sapien
gaggagtggagactgcggataaaga

SEQ ID NO: 4515432 - DNA, 25 bp, Homo sapien
gggcaaattcagcaattgtactgag

SEQ ID NO: 4515433 - DNA, 25 bp, Homo sapien
ttaagggcaaattcagcaattgtac

SEQ ID NO: 4515434 - DNA, 25 bp, Homo sapien
tgggtctcttgtccacatttattgg

SEQ ID NO: 4515435 - DNA, 25 bp, Homo sapien
taattgcaatgggtctcttgtccac

SEQ ID NO: 4515436 - DNA, 25 bp, Homo sapien
tgtccacatttattggactatgagg

SEQ ID NO: 4515437 - DNA, 25 bp, Homo sapien
cacatttattggactatgaggcaaa

SEQ ID NO: 4515438 - DNA, 25 bp, Homo sapien
gcgcagacctccttgtaagaacggc

SEQ ID NO: 4515439 - DNA, 25 bp, Homo sapien
aatctcaaacgtttgatgacaggag

SEQ ID NO: 4515440 - DNA, 25 bp, Homo sapien
tttccttggttctcgaattatcttc

SEQ ID NO: 4515441 - DNA, 25 bp, Homo sapien
ccttggttctcgaattatcttctga

SEQ ID NO: 4515442 - DNA, 25 bp, Homo sapien
taacaacaaatatttcagcaactgt

SEQ ID NO: 4515443 - DNA, 25 bp, Homo sapien
gacaactttaacaacaaatatttca

SEQ ID NO: 4515444 - DNA, 25 bp, Homo sapien
ctgcaaagttaaccaggaaaagaca

SEQ ID NO: 4515445 - DNA, 25 bp, Homo sapien
tgcaaagttaaccaggaaaagacaa

SEQ ID NO: 4515446 - DNA, 25 bp, Homo sapien
acattttgcttggtagacaactcta

SEQ ID NO: 4515447 - DNA, 25 bp, Homo sapien
tgacttaggcaacgttctgtgcttt

SEQ ID NO: 4515448 - DNA, 25 bp, Homo sapien
cactgacttaggcaacgttctgtgc

SEQ ID NO: 4515449 - DNA, 25 bp, Homo sapien
tgcatgaactaaagataatgccaca

SEQ ID NO: 4515450 - DNA, 25 bp, Homo sapien
catgttttaagaggcaacataacag

SEQ ID NO: 4515451 - DNA, 25 bp, Homo sapien
taagaggcaacataacagcaagcga

SEQ ID NO: 4515452 - DNA, 25 bp, Homo sapien
cttcatgttttaagaggcaacataa

SEQ ID NO: 4515453 - DNA, 25 bp, Homo sapien
ggcaacataacagcaagcgaccgac

SEQ ID NO: 4515454 - DNA, 25 bp, Homo sapien
tgcctacagtacctttctatttgac

SEQ ID NO: 4515455 - DNA, 25 bp, Homo sapien
tcggtgtggtcaaatggcactgcct

SEQ ID NO: 4515456 - DNA, 25 bp, Homo sapien
gggaaacatgatcggtgtggtcaaa

SEQ ID NO: 4515457 - DNA, 25 bp, Homo sapien
aatggcactgcctacagtacctttc

SEQ ID NO: 4515458 - DNA, 25 bp, Homo sapien
agcagagtcgagatttgctggcagg

SEQ ID NO: 4515459 - DNA, 25 bp, Homo sapien
gcagagtcgagatttgctggcaggt

SEQ ID NO: 4515460 - DNA, 25 bp, Homo sapien
ccgtctgtgggagcagagtcgagat

SEQ ID NO: 4515461 - DNA, 25 bp, Homo sapien
agggcccgtctgtgggagcagagtc

SEQ ID NO: 4515462 - DNA, 25 bp, Homo sapien
caggagacagcggtgtgctcattgc

SEQ ID NO: 4515463 - DNA, 25 bp, Homo sapien
tggcacattcaatctcgacaggaga

SEQ ID NO: 4515464 - DNA, 25 bp, Homo sapien
tctcgacaggagacagcggtgtgct

SEQ ID NO: 4515465 - DNA, 25 bp, Homo sapien
tcctctctgtgtctatcagaggtga

SEQ ID NO: 4515466 - DNA, 25 bp, Homo sapien
tcccgggtgtcttcaaactgcaaag

SEQ ID NO: 4515467 - DNA, 25 bp, Homo sapien
cccgggtgtcttcaaactgcaaagc

SEQ ID NO: 4515468 - DNA, 25 bp, Homo sapien
attcccgggtgtcttcaaactgcaa

SEQ ID NO: 4515469 - DNA, 25 bp, Homo sapien
cgggtgtcttcaaactgcaaagcag

SEQ ID NO: 4515470 - DNA, 25 bp, Homo sapien
gaatataatgacctcccactgtctc

SEQ ID NO: 4515471 - DNA, 25 bp, Homo sapien
cagaatataatgacctcccactgtc

SEQ ID NO: 4515472 - DNA, 25 bp, Homo sapien
aatataatgacctcccactgtctcc

SEQ ID NO: 4515473 - DNA, 25 bp, Homo sapien
agaatataatgacctcccactgtct

SEQ ID NO: 4515474 - DNA, 25 bp, Homo sapien
ctgttaacgactgtgtctggaagtc

SEQ ID NO: 4515475 - DNA, 25 bp, Homo sapien
agagaacaaggaggttacagaggag

SEQ ID NO: 4515476 - DNA, 25 bp, Homo sapien
gccagagaacaaggaggttacagag

SEQ ID NO: 4515477 - DNA, 25 bp, Homo sapien
ccagagaacaaggaggttacagagg

SEQ ID NO: 4515478 - DNA, 25 bp, Homo sapien
cagagaacaaggaggttacagagga

SEQ ID NO: 4515479 - DNA, 25 bp, Homo sapien
ggattactgttctgcactggcaaag

SEQ ID NO: 4515480 - DNA, 25 bp, Homo sapien
ctggattcaaaactaggattactgt

SEQ ID NO: 4515481 - DNA, 25 bp, Homo sapien
ttcaaaactaggattactgttctgc

SEQ ID NO: 4515482 - DNA, 25 bp, Homo sapien
aaactaggattactgttctgcactg

SEQ ID NO: 4515483 - DNA, 25 bp, Homo sapien
cataatgagatacaacagcgtgcat

SEQ ID NO: 4515484 - DNA, 25 bp, Homo sapien
tttctcattgacataatgagataca

SEQ ID NO: 4515485 - DNA, 25 bp, Homo sapien
gacataatgagatacaacagcgtgc

SEQ ID NO: 4515486 - DNA, 25 bp, Homo sapien
tctcattgacataatgagatacaac

SEQ ID NO: 4515487 - DNA, 25 bp, Homo sapien
aggtcctcagcgggcctgcacccta

SEQ ID NO: 4515488 - DNA, 25 bp, Homo sapien
attatactgtcactactataaccag

SEQ ID NO: 4515489 - DNA, 25 bp, Homo sapien
cacatgcaaatcactaccattacta

SEQ ID NO: 4515490 - DNA, 25 bp, Homo sapien
taatacataattatactgtcactac

SEQ ID NO: 4515491 - DNA, 25 bp, Homo sapien
gcctgcgttcagagtatgaagaagg

SEQ ID NO: 4515492 - DNA, 25 bp, Homo sapien
gacagcctgcgttcagagtatgaag

SEQ ID NO: 4515493 - DNA, 25 bp, Homo sapien
acagcctgcgttcagagtatgaaga

SEQ ID NO: 4515494 - DNA, 25 bp, Homo sapien
cagcctgcgttcagagtatgaagaa

SEQ ID NO: 4515495 - DNA, 25 bp, Homo sapien
ggggctgtggataaaggggagctct

SEQ ID NO: 4515496 - DNA, 25 bp, Homo sapien
agacgtcggagagctacacagagga

SEQ ID NO: 4515497 - DNA, 25 bp, Homo sapien
ctacacagaggaggcatctacaggg

SEQ ID NO: 4515498 - DNA, 25 bp, Homo sapien
gctacacagaggaggcatctacagg

SEQ ID NO: 4515499 - DNA, 25 bp, Homo sapien
cttatgagacgtcggagagctacac

SEQ ID NO: 4515500 - DNA, 25 bp, Homo sapien
gccatgacaacaaccgccgtttgtt

SEQ ID NO: 4515501 - DNA, 25 bp, Homo sapien
caagcctgttgtcttgtggaagggt

SEQ ID NO: 4515502 - DNA, 25 bp, Homo sapien
cgccgtttgttgcagatcaatggca

SEQ ID NO: 4515503 - DNA, 25 bp, Homo sapien
atggcaagcctgttgtcttgtggaa

SEQ ID NO: 4515504 - DNA, 25 bp, Homo sapien
aagcagagcttccaaataaaccgat

SEQ ID NO: 4515505 - DNA, 25 bp, Homo sapien
aaataaaccgattaaagctgccctg

SEQ ID NO: 4515506 - DNA, 25 bp, Homo sapien
taaagctgccctgagtcaataagcc

SEQ ID NO: 4515507 - DNA, 25 bp, Homo sapien
cctgagtcaataagccgggctttaa

SEQ ID NO: 4515508 - DNA, 25 bp, Homo sapien
taaaatccatggacttatgggacat

SEQ ID NO: 4515509 - DNA, 25 bp, Homo sapien
ctaaaatccatggacttatgggaca

SEQ ID NO: 4515510 - DNA, 25 bp, Homo sapien
tgacgacacacctcagtgagaggac

SEQ ID NO: 4515511 - DNA, 25 bp, Homo sapien
tgtcaaactaatgtggtaagccaac

SEQ ID NO: 4515512 - DNA, 25 bp, Homo sapien
tacaaaacgggaacactgcacatcc

SEQ ID NO: 4515513 - DNA, 25 bp, Homo sapien
taagtaatcagctacgggtaacatc

SEQ ID NO: 4515514 - DNA, 25 bp, Homo sapien
tccacagaatgcaccatattctggg

SEQ ID NO: 4515515 - DNA, 25 bp, Homo sapien
cacattcttattacatgtgcatgaa

SEQ ID NO: 4515516 - DNA, 25 bp, Homo sapien
gggcttcagacaagcctcagcattg

SEQ ID NO: 4515517 - DNA, 25 bp, Homo sapien
caggggtgcaatcgagattacaggc

SEQ ID NO: 4515518 - DNA, 25 bp, Homo sapien
ctctttgtcattcagatctttcttt

SEQ ID NO: 4515519 - DNA, 25 bp, Homo sapien
cattcagatctttctttgtcccact

SEQ ID NO: 4515520 - DNA, 25 bp, Homo sapien
taggtgcaggagtttcttcttcatc

SEQ ID NO: 4515521 - DNA, 25 bp, Homo sapien
tcagatctttctttgtcccacttgg

SEQ ID NO: 4515522 - DNA, 25 bp, Homo sapien
cgttagcctctgcaaatgtccctcc

SEQ ID NO: 4515523 - DNA, 25 bp, Homo sapien
ctccccgaaaagttacaacacacat

SEQ ID NO: 4515524 - DNA, 25 bp, Homo sapien
ctctgcaaatgtccctccccgaaaa

SEQ ID NO: 4515525 - DNA, 25 bp, Homo sapien
ctgcaaatgtccctccccgaaaagt

SEQ ID NO: 4515526 - DNA, 25 bp, Homo sapien
aagaaaccaatatattggccgggcg

SEQ ID NO: 4515527 - DNA, 25 bp, Homo sapien
gtaacagatccagtataattttcat

SEQ ID NO: 4515528 - DNA, 25 bp, Homo sapien
tcataaagaaaccaatatattggcc

SEQ ID NO: 4515529 - DNA, 25 bp, Homo sapien
ctgtaacagatccagtataattttc

SEQ ID NO: 4515530 - DNA, 25 bp, Homo sapien
tccgttctgggttgattctgttcca

SEQ ID NO: 4515531 - DNA, 25 bp, Homo sapien
gttccagtgtatacaatttctccat

SEQ ID NO: 4515532 - DNA, 25 bp, Homo sapien
ttgattctgttccagtgtatacaat

SEQ ID NO: 4515533 - DNA, 25 bp, Homo sapien
tctgttccagtgtatacaatttctc

SEQ ID NO: 4515534 - DNA, 25 bp, Homo sapien
atttcattccacagaccacagagcc

SEQ ID NO: 4515535 - DNA, 25 bp, Homo sapien
tcattccacagaccacagagcccat

SEQ ID NO: 4515536 - DNA, 25 bp, Homo sapien
accatttcattccacagaccacaga

SEQ ID NO: 4515537 - DNA, 25 bp, Homo sapien
ctttaaccatttcattccacagacc

SEQ ID NO: 4515538 - DNA, 25 bp, Homo sapien
caggtttcgtatgctgtgctgccat

SEQ ID NO: 4515539 - DNA, 25 bp, Homo sapien
cacaggtttcgtatgctgtgctgcc

SEQ ID NO: 4515540 - DNA, 25 bp, Homo sapien
tttttctcttagcctgcctgaaagc

SEQ ID NO: 4515541 - DNA, 25 bp, Homo sapien
gcctgaaagcttgtcaatttatctt

SEQ ID NO: 4515542 - DNA, 25 bp, Homo sapien
ctagggattgcactcaatcggtaga

SEQ ID NO: 4515543 - DNA, 25 bp, Homo sapien
ggtattttgctagggattgcactca

SEQ ID NO: 4515544 - DNA, 25 bp, Homo sapien
caccgtagatgtgcggatttgtttc

SEQ ID NO: 4515545 - DNA, 25 bp, Homo sapien
tctttttaattacgagagcttcggc

SEQ ID NO: 4515546 - DNA, 25 bp, Homo sapien
gagattacagaattcacagacaagg

SEQ ID NO: 4515547 - DNA, 25 bp, Homo sapien
gtggatcagcctaacaaacctcaga

SEQ ID NO: 4515548 - DNA, 25 bp, Homo sapien
tacaccaagcatcaggtggagtcct

SEQ ID NO: 4515549 - DNA, 25 bp, Homo sapien
gatggatgagattaacagaactgca

SEQ ID NO: 4515550 - DNA, 25 bp, Homo sapien
tcaaccatttggagtcgaggcgagc

SEQ ID NO: 4515551 - DNA, 25 bp, Homo sapien
accatttggagtcgaggcgagcctg

SEQ ID NO: 4515552 - DNA, 25 bp, Homo sapien
ttttcaaccatttggagtcgaggcg

SEQ ID NO: 4515553 - DNA, 25 bp, Homo sapien
ctgttttcaaccatttggagtcgag

SEQ ID NO: 4515554 - DNA, 25 bp, Homo sapien
tccagcttcctcccaggtctcaggc

SEQ ID NO: 4515555 - DNA, 25 bp, Homo sapien
cttttctccagcttcctcccaggtc

SEQ ID NO: 4515556 - DNA, 25 bp, Homo sapien
ttttctccagcttcctcccaggtct

SEQ ID NO: 4515557 - DNA, 25 bp, Homo sapien
ttctccagcttcctcccaggtctca

SEQ ID NO: 4515558 - DNA, 25 bp, Homo sapien
aagagccgctggctcagccggcgcc

SEQ ID NO: 4515559 - DNA, 25 bp, Homo sapien
agcctcccaagagccgctggctcag

SEQ ID NO: 4515560 - DNA, 25 bp, Homo sapien
cggcgcccgcgatcccggcgcctct

SEQ ID NO: 4515561 - DNA, 25 bp, Homo sapien
cgcgcggacgcagcctcccaagagc

SEQ ID NO: 4515562 - DNA, 25 bp, Homo sapien
gatctgcccttactccaattgtgtg

SEQ ID NO: 4515563 - DNA, 25 bp, Homo sapien
tgaatgtttggcactctcacagggc

SEQ ID NO: 4515564 - DNA, 25 bp, Homo sapien
caaagtagatgaaggcgatctgccc

SEQ ID NO: 4515565 - DNA, 25 bp, Homo sapien
cctaatgagaatttgggtcccagga

SEQ ID NO: 4515566 - DNA, 25 bp, Homo sapien
gacccaggtaatggtctcgctgctg

SEQ ID NO: 4515567 - DNA, 25 bp, Homo sapien
caggtgacccaggtaatggtctcgc

SEQ ID NO: 4515568 - DNA, 25 bp, Homo sapien
ggtgacccaggtaatggtctcgctg

SEQ ID NO: 4515569 - DNA, 25 bp, Homo sapien
tgacccaggtaatggtctcgctgct

SEQ ID NO: 4515570 - DNA, 25 bp, Homo sapien
cagattctacaagttgaagtttttc

SEQ ID NO: 4515571 - DNA, 25 bp, Homo sapien
tagctcctttacgttgagctggatc

SEQ ID NO: 4515572 - DNA, 25 bp, Homo sapien
ttttagctcctttacgttgagctgg

SEQ ID NO: 4515573 - DNA, 25 bp, Homo sapien
aggagcttggccctctccagtttcc

SEQ ID NO: 4515574 - DNA, 25 bp, Homo sapien
gtgttcctgtacagttccagactca

SEQ ID NO: 4515575 - DNA, 25 bp, Homo sapien
cctctcctttgttaactcctcaatg

SEQ ID NO: 4515576 - DNA, 25 bp, Homo sapien
acagttccagactcagggcgtccct

SEQ ID NO: 4515577 - DNA, 25 bp, Homo sapien
tctcctttgttaactcctcaatgta

SEQ ID NO: 4515578 - DNA, 25 bp, Homo sapien
ctgcaaacttccatgaatcatgcag

SEQ ID NO: 4515579 - DNA, 25 bp, Homo sapien
tgctggctgtagtagagtgccatct

SEQ ID NO: 4515580 - DNA, 25 bp, Homo sapien
tggctgtagtagagtgccatctgaa

SEQ ID NO: 4515581 - DNA, 25 bp, Homo sapien
catgctggctgtagtagagtgccat

SEQ ID NO: 4515582 - DNA, 25 bp, Homo sapien
tgacagcatgctggctgtagtagag

SEQ ID NO: 4515583 - DNA, 25 bp, Homo sapien
gatgttggtggcttgccttctgttc

SEQ ID NO: 4515584 - DNA, 25 bp, Homo sapien
tccctccttagggcttcctgatgtt

SEQ ID NO: 4515585 - DNA, 25 bp, Homo sapien
tctagctccctccttagggcttcct

SEQ ID NO: 4515586 - DNA, 25 bp, Homo sapien
ctccttagggcttcctgatgttggt

SEQ ID NO: 4515587 - DNA, 25 bp, Homo sapien
cactagggttggtctggggatgatg

SEQ ID NO: 4515588 - DNA, 25 bp, Homo sapien
gctgctgtaccaacactagggttgg

SEQ ID NO: 4515589 - DNA, 25 bp, Homo sapien
gttgtctcagggctagtgccattat

SEQ ID NO: 4515590 - DNA, 25 bp, Homo sapien
ttctttttggtgtcgcttgctgctg

SEQ ID NO: 4515591 - DNA, 25 bp, Homo sapien
tgctctgtctggtttctttggacat

SEQ ID NO: 4515592 - DNA, 25 bp, Homo sapien
ctgttccttggcctcggccaatttg

SEQ ID NO: 4515593 - DNA, 25 bp, Homo sapien
tgttccttggcctcggccaatttgc

SEQ ID NO: 4515594 - DNA, 25 bp, Homo sapien
atttgctctgtctggtttctttgga

SEQ ID NO: 4515595 - DNA, 25 bp, Homo sapien
taggatgggtagggaggtggggatg

SEQ ID NO: 4515596 - DNA, 25 bp, Homo sapien
cataggatgggtagggaggtgggga

SEQ ID NO: 4515597 - DNA, 25 bp, Homo sapien
ataggatgggtagggaggtggggat

SEQ ID NO: 4515598 - DNA, 25 bp, Homo sapien
gcagccaaggcttttttctaacaac

SEQ ID NO: 4515599 - DNA, 25 bp, Homo sapien
cagccaaggcttttttctaacaact

SEQ ID NO: 4515600 - DNA, 25 bp, Homo sapien
taacaactctttttctaaagatgta

SEQ ID NO: 4515601 - DNA, 25 bp, Homo sapien
tctaacaactctttttctaaagatg

SEQ ID NO: 4515602 - DNA, 25 bp, Homo sapien
attgtcaccacccatatctgacaca

SEQ ID NO: 4515603 - DNA, 25 bp, Homo sapien
cctccttctctaaatcttctaggtc

SEQ ID NO: 4515604 - DNA, 25 bp, Homo sapien
ccatatctgacacatcctcctcctt

SEQ ID NO: 4515605 - DNA, 25 bp, Homo sapien
tctctaaatcttctaggtcctcctg

SEQ ID NO: 4515606 - DNA, 25 bp, Homo sapien
ctgggagaagactgatatcttcatc

SEQ ID NO: 4515607 - DNA, 25 bp, Homo sapien
ggagaagactgatatcttcatcttt

SEQ ID NO: 4515608 - DNA, 25 bp, Homo sapien
tgggagaagactgatatcttcatct

SEQ ID NO: 4515609 - DNA, 25 bp, Homo sapien
gggagaagactgatatcttcatctt

SEQ ID NO: 4515610 - DNA, 25 bp, Homo sapien
agagctgccatggattctaccattc

SEQ ID NO: 4515611 - DNA, 25 bp, Homo sapien
attctggaagcactgtaaaattgct

SEQ ID NO: 4515612 - DNA, 25 bp, Homo sapien
gtaaagagctgccatggattctacc

SEQ ID NO: 4515613 - DNA, 25 bp, Homo sapien
ctttggttccaatccatcttgaaac

SEQ ID NO: 4515614 - DNA, 25 bp, Homo sapien
gtgtccacgtgcgaccgcagtcgca

SEQ ID NO: 4515615 - DNA, 25 bp, Homo sapien
tgcaacccgtgtccacgtgcgaccg

SEQ ID NO: 4515616 - DNA, 25 bp, Homo sapien
acccgtgtccacgtgcgaccgcagt

SEQ ID NO: 4515617 - DNA, 25 bp, Homo sapien
ccgtgtccacgtgcgaccgcagtcg

SEQ ID NO: 4515618 - DNA, 25 bp, Homo sapien
tgaggatgcactcgggccagccagt

SEQ ID NO: 4515619 - DNA, 25 bp, Homo sapien
gtgaggatgcactcgggccagccag

SEQ ID NO: 4515620 - DNA, 25 bp, Homo sapien
actcgggccagccagtggctttgcc

SEQ ID NO: 4515621 - DNA, 25 bp, Homo sapien
tgcactcgggccagccagtggcttt

SEQ ID NO: 4515622 - DNA, 25 bp, Homo sapien
cagggtccgtcagcgccaggcccat

SEQ ID NO: 4515623 - DNA, 25 bp, Homo sapien
gacaccgctccagggtccgtcagcg

SEQ ID NO: 4515624 - DNA, 25 bp, Homo sapien
ctccctcagacaccgctccagggtc

SEQ ID NO: 4515625 - DNA, 25 bp, Homo sapien
tccagggtccgtcagcgccaggccc

SEQ ID NO: 4515626 - DNA, 25 bp, Homo sapien
attcagccaagtattggtattcttc

SEQ ID NO: 4515627 - DNA, 25 bp, Homo sapien
tcagccaagtattggtattcttcct

SEQ ID NO: 4515628 - DNA, 25 bp, Homo sapien
ttcagccaagtattggtattcttcc

SEQ ID NO: 4515629 - DNA, 25 bp, Homo sapien
gaagcctctcccaagtggcgcggtc

SEQ ID NO: 4515630 - DNA, 25 bp, Homo sapien
aaggggcggctacagcttgggcgca

SEQ ID NO: 4515631 - DNA, 25 bp, Homo sapien
gcgcggtccgcaaggggcggctaca

SEQ ID NO: 4515632 - DNA, 25 bp, Homo sapien
ctccggaagcctctcccaagtggcg

SEQ ID NO: 4515633 - DNA, 25 bp, Homo sapien
tgaagaaagatagggccgctggcag

SEQ ID NO: 4515634 - DNA, 25 bp, Homo sapien
gctcccctgggacgccgtaggatcg

SEQ ID NO: 4515635 - DNA, 25 bp, Homo sapien
gggacgccgtaggatcgcaggcgcg

SEQ ID NO: 4515636 - DNA, 25 bp, Homo sapien
cctgggacgccgtaggatcgcaggc

SEQ ID NO: 4515637 - DNA, 25 bp, Homo sapien
cactggcccgagttctgcgaggctg

SEQ ID NO: 4515638 - DNA, 25 bp, Homo sapien
cacggcgacactggcccgagttctg

SEQ ID NO: 4515639 - DNA, 25 bp, Homo sapien
agccacggcgacactggcccgagtt

SEQ ID NO: 4515640 - DNA, 25 bp, Homo sapien
cgacactggcccgagttctgcgagg

SEQ ID NO: 4515641 - DNA, 25 bp, Homo sapien
gggaggcctgcggatcgccagggcg

SEQ ID NO: 4515642 - DNA, 25 bp, Homo sapien
tctggcttggctctagccaccggga

SEQ ID NO: 4515643 - DNA, 25 bp, Homo sapien
tgcaggcgggcttagaggttcccca

SEQ ID NO: 4515644 - DNA, 25 bp, Homo sapien
ttctgagatgttacgagtgcaggcg

SEQ ID NO: 4515645 - DNA, 25 bp, Homo sapien
gttctgcgacgctggcagcgcgacc

SEQ ID NO: 4515646 - DNA, 25 bp, Homo sapien
ctcgggagttgacaggcggctgcta

SEQ ID NO: 4515647 - DNA, 25 bp, Homo sapien
agcgcgaccgggctcgggagttgac

SEQ ID NO: 4515648 - DNA, 25 bp, Homo sapien
cagccgccgggacatctgaccccgg

SEQ ID NO: 4515649 - DNA, 25 bp, Homo sapien
ggaggtcgcctttgtggcgactgac

SEQ ID NO: 4515650 - DNA, 25 bp, Homo sapien
cctgggcgtggaggtcgcctttgtg

SEQ ID NO: 4515651 - DNA, 25 bp, Homo sapien
tgctatgttcctggtagtagtgact

SEQ ID NO: 4515652 - DNA, 25 bp, Homo sapien
atctctctgctatgttcctggtagt

SEQ ID NO: 4515653 - DNA, 25 bp, Homo sapien
cctatttccctcgtgtgggcagggt

SEQ ID NO: 4515654 - DNA, 25 bp, Homo sapien
gatggtctgggcttcatcagccatg

SEQ ID NO: 4515655 - DNA, 25 bp, Homo sapien
gctgtccataaacaaccttgctggg

SEQ ID NO: 4515656 - DNA, 25 bp, Homo sapien
gatttgccccataactctgatgatg

SEQ ID NO: 4515657 - DNA, 25 bp, Homo sapien
ctaagtgggtggcctgtatgtggct

SEQ ID NO: 4515658 - DNA, 25 bp, Homo sapien
aagtgggtggcctgtatgtggctgg

SEQ ID NO: 4515659 - DNA, 25 bp, Homo sapien
ctgggagcatgtccacatggcggcc

SEQ ID NO: 4515660 - DNA, 25 bp, Homo sapien
tgggagcatgtccacatggcggcct

SEQ ID NO: 4515661 - DNA, 25 bp, Homo sapien
caacacagattgtagacactgaggg

SEQ ID NO: 4515662 - DNA, 25 bp, Homo sapien
cagatccacctgaacacttcctgat

SEQ ID NO: 4515663 - DNA, 25 bp, Homo sapien
agctgccctggatcctgagcaacac

SEQ ID NO: 4515664 - DNA, 25 bp, Homo sapien
tgacaacctgtgctttcaggcacag

SEQ ID NO: 4515665 - DNA, 25 bp, Homo sapien
tgagctcttgcagggctctgctatg

SEQ ID NO: 4515666 - DNA, 25 bp, Homo sapien
gctctgctatgacaggggtctcctg

SEQ ID NO: 4515667 - DNA, 25 bp, Homo sapien
tcttgcagggctctgctatgacagg

SEQ ID NO: 4515668 - DNA, 25 bp, Homo sapien
gctgagctcttgcagggctctgcta

SEQ ID NO: 4515669 - DNA, 25 bp, Homo sapien
gggactgagaagatgccctgccctc

SEQ ID NO: 4515670 - DNA, 25 bp, Homo sapien
cctacaaggttgcatatgggggact

SEQ ID NO: 4515671 - DNA, 25 bp, Homo sapien
cacactcccctcgagtctgggtttc

SEQ ID NO: 4515672 - DNA, 25 bp, Homo sapien
cagagaggcctctgattgctcatgg

SEQ ID NO: 4515673 - DNA, 25 bp, Homo sapien
cccacatggccatggcgtcagagac

SEQ ID NO: 4515674 - DNA, 25 bp, Homo sapien
tccgatggtacagagtgctcattct

SEQ ID NO: 4515675 - DNA, 25 bp, Homo sapien
tctgctctaagtggtcccacatggc

SEQ ID NO: 4515676 - DNA, 25 bp, Homo sapien
tttatccgatggtacagagtgctca

SEQ ID NO: 4515677 - DNA, 25 bp, Homo sapien
actgctctcttggagatgagtctcc

SEQ ID NO: 4515678 - DNA, 25 bp, Homo sapien
gtgatgtcatctgcgggtagtctgc

SEQ ID NO: 4515679 - DNA, 25 bp, Homo sapien
gcagcttctgcacgttgggatggaa

SEQ ID NO: 4515680 - DNA, 25 bp, Homo sapien
tgtggtaggtttgccacgttccaga

SEQ ID NO: 4515681 - DNA, 25 bp, Homo sapien
gtttgtacatatcacccagggctct

SEQ ID NO: 4515682 - DNA, 25 bp, Homo sapien
aaaagcatatgtggccggactgcag

SEQ ID NO: 4515683 - DNA, 25 bp, Homo sapien
agaaggtcattgtgtctggtgacag

SEQ ID NO: 4515684 - DNA, 25 bp, Homo sapien
tccacctaagggcagatgggagcca

SEQ ID NO: 4515685 - DNA, 25 bp, Homo sapien
ttccagaaggttggtcaggtcctga

SEQ ID NO: 4515686 - DNA, 25 bp, Homo sapien
tccagaaggttggtcaggtcctgag

SEQ ID NO: 4515687 - DNA, 25 bp, Homo sapien
gtggcactagggctcttcagaggaa

SEQ ID NO: 4515688 - DNA, 25 bp, Homo sapien
gtgccagtccctcaatctcctgcat

SEQ ID NO: 4515689 - DNA, 25 bp, Homo sapien
ctgtgccagtccctcaatctcctgc

SEQ ID NO: 4515690 - DNA, 25 bp, Homo sapien
tctgtgccagtccctcaatctcctg

SEQ ID NO: 4515691 - DNA, 25 bp, Homo sapien
tgtgccagtccctcaatctcctgca

SEQ ID NO: 4515692 - DNA, 25 bp, Homo sapien
agctgttccacagtcgacttcaggg

SEQ ID NO: 4515693 - DNA, 25 bp, Homo sapien
acagtcgacttcagggtccctgaga

SEQ ID NO: 4515694 - DNA, 25 bp, Homo sapien
gatccagcagggttctggtagctga

SEQ ID NO: 4515695 - DNA, 25 bp, Homo sapien
gagatgatccagcagggttctggta

SEQ ID NO: 4515696 - DNA, 25 bp, Homo sapien
gcaagtggcgatcagtgaccaacca

SEQ ID NO: 4515697 - DNA, 25 bp, Homo sapien
tacatgaacaccaggagcaagtggc

SEQ ID NO: 4515698 - DNA, 25 bp, Homo sapien
gacagcctcggaagtaccattcaga

SEQ ID NO: 4515699 - DNA, 25 bp, Homo sapien
taaaaactggaagagtggattggcc

SEQ ID NO: 4515700 - DNA, 25 bp, Homo sapien
tgaaaccttctcattttctgttgtt

SEQ ID NO: 4515701 - DNA, 25 bp, Homo sapien
ctgaaaccttctcattttctgttgt

SEQ ID NO: 4515702 - DNA, 25 bp, Homo sapien
gatgcgctcattattgtccctagaa

SEQ ID NO: 4515703 - DNA, 25 bp, Homo sapien
tatctggttgtctggcgatgcgctc

SEQ ID NO: 4515704 - DNA, 25 bp, Homo sapien
tctggcgatgcgctcattattgtcc

SEQ ID NO: 4515705 - DNA, 25 bp, Homo sapien
ggttgtctggcgatgcgctcattat

SEQ ID NO: 4515706 - DNA, 25 bp, Homo sapien
cagcatgaggctgtagaactggctc

SEQ ID NO: 4515707 - DNA, 25 bp, Homo sapien
gaggctgtagaactggctcagttcc

SEQ ID NO: 4515708 - DNA, 25 bp, Homo sapien
gctccagcatgaggctgtagaactg

SEQ ID NO: 4515709 - DNA, 25 bp, Homo sapien
catgaggctgtagaactggctcagt

SEQ ID NO: 4515710 - DNA, 25 bp, Homo sapien
tggaaaaaatgaacgcaaggcgtga

SEQ ID NO: 4515711 - DNA, 25 bp, Homo sapien
ggaaaaaatgaacgcaaggcgtgat

SEQ ID NO: 4515712 - DNA, 25 bp, Homo sapien
aaaaatgaacgcaaggcgtgatcac

SEQ ID NO: 4515713 - DNA, 25 bp, Homo sapien
catggaaaaaatgaacgcaaggcgt

SEQ ID NO: 4515714 - DNA, 25 bp, Homo sapien
caaacagattcttatcgaaggagtt

SEQ ID NO: 4515715 - DNA, 25 bp, Homo sapien
aaacagattcttatcgaaggagtta

SEQ ID NO: 4515716 - DNA, 25 bp, Homo sapien
aacagattcttatcgaaggagttac

SEQ ID NO: 4515717 - DNA, 25 bp, Homo sapien
ccaaacagattcttatcgaaggagt

SEQ ID NO: 4515718 - DNA, 25 bp, Homo sapien
caaatatcattgtgtttctcaagct

SEQ ID NO: 4515719 - DNA, 25 bp, Homo sapien
tgctctttcgtagcaatgggtaacg

SEQ ID NO: 4515720 - DNA, 25 bp, Homo sapien
tttctcaagctgctctttcgtagca

SEQ ID NO: 4515721 - DNA, 25 bp, Homo sapien
tgggtaacgatttaatcttattcac

SEQ ID NO: 4515722 - DNA, 25 bp, Homo sapien
aagccacacgttatagtaggaatga

SEQ ID NO: 4515723 - DNA, 25 bp, Homo sapien
ccacacgttatagtaggaatgaatg

SEQ ID NO: 4515724 - DNA, 25 bp, Homo sapien
gaagccacacgttatagtaggaatg

SEQ ID NO: 4515725 - DNA, 25 bp, Homo sapien
gccacacgttatagtaggaatgaat

SEQ ID NO: 4515726 - DNA, 25 bp, Homo sapien
gatggtctctgagacgcaataggcc

SEQ ID NO: 4515727 - DNA, 25 bp, Homo sapien
tctctgagacgcaataggccaccat

SEQ ID NO: 4515728 - DNA, 25 bp, Homo sapien
tctgagacgcaataggccaccatac

SEQ ID NO: 4515729 - DNA, 25 bp, Homo sapien
ctccaaagatggtctctgagacgca

SEQ ID NO: 4515730 - DNA, 25 bp, Homo sapien
atcatccatgttttccaccggctct

SEQ ID NO: 4515731 - DNA, 25 bp, Homo sapien
agacggccgcaagaaactccagcag

SEQ ID NO: 4515732 - DNA, 25 bp, Homo sapien
tccagcaggtggtaagtgccattca

SEQ ID NO: 4515733 - DNA, 25 bp, Homo sapien
ggtggtaagtgccattcacatagta

SEQ ID NO: 4515734 - DNA, 25 bp, Homo sapien
aagaatgctgctggaaataatgata

SEQ ID NO: 4515735 - DNA, 25 bp, Homo sapien
aaaaactggcaaatcatataagcca

SEQ ID NO: 4515736 - DNA, 25 bp, Homo sapien
aaaactggcaaatcatataagccat

SEQ ID NO: 4515737 - DNA, 25 bp, Homo sapien
gaggtaagaatgctgctggaaataa

SEQ ID NO: 4515738 - DNA, 25 bp, Homo sapien
acccaaaagagagtaaggagtgctg

SEQ ID NO: 4515739 - DNA, 25 bp, Homo sapien
acaacctgcagttctatcagcccag

SEQ ID NO: 4515740 - DNA, 25 bp, Homo sapien
tgaaagctcgataaccctgcaagta

SEQ ID NO: 4515741 - DNA, 25 bp, Homo sapien
tctgcactgccaggattaacagcgt

SEQ ID NO: 4515742 - DNA, 25 bp, Homo sapien
tgcaatacttgtcagaaaaaggaaa

SEQ ID NO: 4515743 - DNA, 25 bp, Homo sapien
cagaaaaaggaaaagaagcctctca

SEQ ID NO: 4515744 - DNA, 25 bp, Homo sapien
gcaatacttgtcagaaaaaggaaaa

SEQ ID NO: 4515745 - DNA, 25 bp, Homo sapien
tctcgagtactgaaataggagtaaa

SEQ ID NO: 4515746 - DNA, 25 bp, Homo sapien
catgaaaagaacagggactaccagt

SEQ ID NO: 4515747 - DNA, 25 bp, Homo sapien
ggctgatctcgagtactgaaatagg

SEQ ID NO: 4515748 - DNA, 25 bp, Homo sapien
gaacagggactaccagttgattcca

SEQ ID NO: 4515749 - DNA, 25 bp, Homo sapien
ggtgagaaggccatatacctccact

SEQ ID NO: 4515750 - DNA, 25 bp, Homo sapien
ccaaggtgagaaggccatatacctc

SEQ ID NO: 4515751 - DNA, 25 bp, Homo sapien
aaggtgagaaggccatatacctcca

SEQ ID NO: 4515752 - DNA, 25 bp, Homo sapien
tgagaaggccatatacctccactac

SEQ ID NO: 4515753 - DNA, 25 bp, Homo sapien
tattaaggctgtggtaaaccgattc

SEQ ID NO: 4515754 - DNA, 25 bp, Homo sapien
gagaacttccaatccagtaaaaatc

SEQ ID NO: 4515755 - DNA, 25 bp, Homo sapien
cagagtcgtgctagcagaggaagca

SEQ ID NO: 4515756 - DNA, 25 bp, Homo sapien
cacaggagcataaagtacacaccac

SEQ ID NO: 4515757 - DNA, 25 bp, Homo sapien
accgcagttcactccgaacgtagtc

SEQ ID NO: 4515758 - DNA, 25 bp, Homo sapien
aaaccgcagttcactccgaacgtag

SEQ ID NO: 4515759 - DNA, 25 bp, Homo sapien
ggcaaaccgcagttcactccgaacg

SEQ ID NO: 4515760 - DNA, 25 bp, Homo sapien
tggtccctcataggcaaaccgcagt

SEQ ID NO: 4515761 - DNA, 25 bp, Homo sapien
taatgtgtccatgcgggtttgtcag

SEQ ID NO: 4515762 - DNA, 25 bp, Homo sapien
cagtaatccgcttgaggaacccggg

SEQ ID NO: 4515763 - DNA, 25 bp, Homo sapien
cagtgcagggtattgatcacggaga

SEQ ID NO: 4515764 - DNA, 25 bp, Homo sapien
gtgcaaagaggaacgtccccaccca

SEQ ID NO: 4515765 - DNA, 25 bp, Homo sapien
tgtctgtagacgtgtcccaggtcgt

SEQ ID NO: 4515766 - DNA, 25 bp, Homo sapien
gctgtgtctgtagacgtgtcccagg

SEQ ID NO: 4515767 - DNA, 25 bp, Homo sapien
tagacgtgtcccaggtcgtggtgac

SEQ ID NO: 4515768 - DNA, 25 bp, Homo sapien
ctgtagacgtgtcccaggtcgtggt

SEQ ID NO: 4515769 - DNA, 25 bp, Homo sapien
ccagactgcaccgattggacctggg

SEQ ID NO: 4515770 - DNA, 25 bp, Homo sapien
gactgcaccgattggacctgggaat

SEQ ID NO: 4515771 - DNA, 25 bp, Homo sapien
accgattggacctgggaatgggcac

SEQ ID NO: 4515772 - DNA, 25 bp, Homo sapien
ctgcaccgattggacctgggaatgg

SEQ ID NO: 4515773 - DNA, 25 bp, Homo sapien
ctgcagatgccccatgagaagtaaa

SEQ ID NO: 4515774 - DNA, 25 bp, Homo sapien
aaccctgcagatgccccatgagaag

SEQ ID NO: 4515775 - DNA, 25 bp, Homo sapien
ccctgcagatgccccatgagaagta

SEQ ID NO: 4515776 - DNA, 25 bp, Homo sapien
gcagatgccccatgagaagtaaatc

SEQ ID NO: 4515777 - DNA, 25 bp, Homo sapien
tgggtaagcctggtcaaagcggctc

SEQ ID NO: 4515778 - DNA, 25 bp, Homo sapien
gatggaaattttgagagagcaggca

SEQ ID NO: 4515779 - DNA, 25 bp, Homo sapien
tatcttcaaaggaggtgggttccat

SEQ ID NO: 4515780 - DNA, 25 bp, Homo sapien
gagtgcgggacagcatgaaagcaca

SEQ ID NO: 4515781 - DNA, 25 bp, Homo sapien
gacccaggtaatggtctcgctgctg

SEQ ID NO: 4515782 - DNA, 25 bp, Homo sapien
tgacccaggtaatggtctcgctgct

SEQ ID NO: 4515783 - DNA, 25 bp, Homo sapien
ggtgacccaggtaatggtctcgctg

SEQ ID NO: 4515784 - DNA, 25 bp, Homo sapien
caggtgacccaggtaatggtctcgc

SEQ ID NO: 4515785 - DNA, 25 bp, Homo sapien
ctgttgctggttcaggcggttccac

SEQ ID NO: 4515786 - DNA, 25 bp, Homo sapien
tggttcaggcggttccacaactcgt

SEQ ID NO: 4515787 - DNA, 25 bp, Homo sapien
tgttgctggttcaggcggttccaca

SEQ ID NO: 4515788 - DNA, 25 bp, Homo sapien
ggcggttccacaactcgttctcttc

SEQ ID NO: 4515789 - DNA, 25 bp, Homo sapien
tagctcctttacgttgagctggatc

SEQ ID NO: 4515790 - DNA, 25 bp, Homo sapien
ttttagctcctttacgttgagctgg

SEQ ID NO: 4515791 - DNA, 25 bp, Homo sapien
aggagcttggccctctccagtttcc

SEQ ID NO: 4515792 - DNA, 25 bp, Homo sapien
cagattctacaagttgaagtttttc

SEQ ID NO: 4515793 - DNA, 25 bp, Homo sapien
cctctcctttgttaactcctcaatg

SEQ ID NO: 4515794 - DNA, 25 bp, Homo sapien
tctcctttgttaactcctcaatgta

SEQ ID NO: 4515795 - DNA, 25 bp, Homo sapien
acagttccagactcagggcgtccct

SEQ ID NO: 4515796 - DNA, 25 bp, Homo sapien
gtgttcctgtacagttccagactca

SEQ ID NO: 4515797 - DNA, 25 bp, Homo sapien
atctgcgaagctgggctcccaaggg

SEQ ID NO: 4515798 - DNA, 25 bp, Homo sapien
cgaagctgggctcccaagggacggg

SEQ ID NO: 4515799 - DNA, 25 bp, Homo sapien
tgcgaagctgggctcccaagggacg

SEQ ID NO: 4515800 - DNA, 25 bp, Homo sapien
tccatctgcgaagctgggctcccaa

SEQ ID NO: 4515801 - DNA, 25 bp, Homo sapien
ctgcaaacttccatgaatcatgcag

SEQ ID NO: 4515802 - DNA, 25 bp, Homo sapien
tggctgtagtagagtgccatctgaa

SEQ ID NO: 4515803 - DNA, 25 bp, Homo sapien
tgctggctgtagtagagtgccatct

SEQ ID NO: 4515804 - DNA, 25 bp, Homo sapien
catgctggctgtagtagagtgccat

SEQ ID NO: 4515805 - DNA, 25 bp, Homo sapien
tgacagcatgctggctgtagtagag

SEQ ID NO: 4515806 - DNA, 25 bp, Homo sapien
tccctccttagggcttcctgatgtt

SEQ ID NO: 4515807 - DNA, 25 bp, Homo sapien
gatgttggtggcttgccttctgttc

SEQ ID NO: 4515808 - DNA, 25 bp, Homo sapien
ctccttagggcttcctgatgttggt

SEQ ID NO: 4515809 - DNA, 25 bp, Homo sapien
tctagctccctccttagggcttcct

SEQ ID NO: 4515810 - DNA, 25 bp, Homo sapien
cactagggttggtctggggatgatg

SEQ ID NO: 4515811 - DNA, 25 bp, Homo sapien
ttctttttggtgtcgcttgctgctg

SEQ ID NO: 4515812 - DNA, 25 bp, Homo sapien
ttgctgctgtaccaacactagggtt

SEQ ID NO: 4515813 - DNA, 25 bp, Homo sapien
tctttttggtgtcgcttgctgctgt

SEQ ID NO: 4515814 - DNA, 25 bp, Homo sapien
cacactgtcaaggtctgtggtaagg

SEQ ID NO: 4515815 - DNA, 25 bp, Homo sapien
tcacactgtcaaggtctgtggtaag

SEQ ID NO: 4515816 - DNA, 25 bp, Homo sapien
ctttggacatcataggatgggtagg

SEQ ID NO: 4515817 - DNA, 25 bp, Homo sapien
taggggtgtggccttcatgcttgaa

SEQ ID NO: 4515818 - DNA, 25 bp, Homo sapien
gtaaccagggctgcactagaatgca

SEQ ID NO: 4515819 - DNA, 25 bp, Homo sapien
gcgtaaccagggctgcactagaatg

SEQ ID NO: 4515820 - DNA, 25 bp, Homo sapien
gtgtggccttcatgcttgaagccca

SEQ ID NO: 4515821 - DNA, 25 bp, Homo sapien
atcctctgtttaatgataccttcca

SEQ ID NO: 4515822 - DNA, 25 bp, Homo sapien
tctcttatcctctgtttaatgatac

SEQ ID NO: 4515823 - DNA, 25 bp, Homo sapien
tgataccttccagttgaaaggtgtt

SEQ ID NO: 4515824 - DNA, 25 bp, Homo sapien
tcttatcctctgtttaatgatacct

SEQ ID NO: 4515825 - DNA, 25 bp, Homo sapien
ccatccggacagcatggtcaaagtg

SEQ ID NO: 4515826 - DNA, 25 bp, Homo sapien
ccaggaggctcttctctggtctctt

SEQ ID NO: 4515827 - DNA, 25 bp, Homo sapien
cggacagcatggtcaaagtgcaggc

SEQ ID NO: 4515828 - DNA, 25 bp, Homo sapien
tggtcaaagtgcaggctctcctcca

SEQ ID NO: 4515829 - DNA, 25 bp, Homo sapien
gcagccaaggcttttttctaacaac

SEQ ID NO: 4515830 - DNA, 25 bp, Homo sapien
taacaactctttttctaaagatgta

SEQ ID NO: 4515831 - DNA, 25 bp, Homo sapien
cagccaaggcttttttctaacaact

SEQ ID NO: 4515832 - DNA, 25 bp, Homo sapien
tctaacaactctttttctaaagatg

SEQ ID NO: 4515833 - DNA, 25 bp, Homo sapien
gccatcagcctctgtttctgaacca

SEQ ID NO: 4515834 - DNA, 25 bp, Homo sapien
cctctaaatcttctaggtcctcctg

SEQ ID NO: 4515835 - DNA, 25 bp, Homo sapien
catttcaggattgtcaccacccata

SEQ ID NO: 4515836 - DNA, 25 bp, Homo sapien
gaaccagcctcttcatgctcctgtt

SEQ ID NO: 4515837 - DNA, 25 bp, Homo sapien
ctctgggagaagactgatatcttca

SEQ ID NO: 4515838 - DNA, 25 bp, Homo sapien
ggagaagactgatatcttcatcttt

SEQ ID NO: 4515839 - DNA, 25 bp, Homo sapien
tgggagaagactgatatcttcatct

SEQ ID NO: 4515840 - DNA, 25 bp, Homo sapien
tctgggagaagactgatatcttcat

SEQ ID NO: 4515841 - DNA, 25 bp, Homo sapien
aactttggttccaatccagcttgaa

SEQ ID NO: 4515842 - DNA, 25 bp, Homo sapien
taaagagctgccatggattctacca

SEQ ID NO: 4515843 - DNA, 25 bp, Homo sapien
attctggaagcactgtaaaattgct

SEQ ID NO: 4515844 - DNA, 25 bp, Homo sapien
agtgaactttggttccaatccagct

SEQ ID NO: 4515845 - DNA, 25 bp, Homo sapien
acccgtgtccacgtgcgaccgcagt

SEQ ID NO: 4515846 - DNA, 25 bp, Homo sapien
ccgtgtccacgtgcgaccgcagtcg

SEQ ID NO: 4515847 - DNA, 25 bp, Homo sapien
tgcaacccgtgtccacgtgcgaccg

SEQ ID NO: 4515848 - DNA, 25 bp, Homo sapien
gtgtccacgtgcgaccgcagtcgca

SEQ ID NO: 4515849 - DNA, 25 bp, Homo sapien
actcgggccagccagtggctttgcc

SEQ ID NO: 4515850 - DNA, 25 bp, Homo sapien
gtgaggatgcactcgggccagccag

SEQ ID NO: 4515851 - DNA, 25 bp, Homo sapien
tgaggatgcactcgggccagccagt

SEQ ID NO: 4515852 - DNA, 25 bp, Homo sapien
tgcactcgggccagccagtggcttt

SEQ ID NO: 4515853 - DNA, 25 bp, Homo sapien
gacaccgctccagggtccgtcagcg

SEQ ID NO: 4515854 - DNA, 25 bp, Homo sapien
cagggtccgtcagcgccaggcccat

SEQ ID NO: 4515855 - DNA, 25 bp, Homo sapien
tccagggtccgtcagcgccaggccc

SEQ ID NO: 4515856 - DNA, 25 bp, Homo sapien
ctccctcagacaccgctccagggtc

SEQ ID NO: 4515857 - DNA, 25 bp, Homo sapien
cttacaacaagtcaatttcatagtc

SEQ ID NO: 4515858 - DNA, 25 bp, Homo sapien
tcatagtccgtttccctggtccttc

SEQ ID NO: 4515859 - DNA, 25 bp, Homo sapien
taagtccgaaacttacaacaagtca

SEQ ID NO: 4515860 - DNA, 25 bp, Homo sapien
gtccttccacagcaacctctggcat

SEQ ID NO: 4515861 - DNA, 25 bp, Homo sapien
cttgagcgtttcgtagttagaaact

SEQ ID NO: 4515862 - DNA, 25 bp, Homo sapien
agggcatacccccttgagcgtttcg

SEQ ID NO: 4515863 - DNA, 25 bp, Homo sapien
tttcgtagttagaaacttgtgtgca

SEQ ID NO: 4515864 - DNA, 25 bp, Homo sapien
tagttagaaacttgtgtgcagcttc

SEQ ID NO: 4515865 - DNA, 25 bp, Homo sapien
ggtgccgtcctgctgttcatattgt

SEQ ID NO: 4515866 - DNA, 25 bp, Homo sapien
tctcctcaaggtgccgtcctgctgt

SEQ ID NO: 4515867 - DNA, 25 bp, Homo sapien
atgctctcctcaaggtgccgtcctg

SEQ ID NO: 4515868 - DNA, 25 bp, Homo sapien
caaggtgccgtcctgctgttcatat

SEQ ID NO: 4515869 - DNA, 25 bp, Homo sapien
ctctttgaagttcccgacacatggt

SEQ ID NO: 4515870 - DNA, 25 bp, Homo sapien
gaacagtcctgccacgctctttgaa

SEQ ID NO: 4515871 - DNA, 25 bp, Homo sapien
caggaagcatctggacgaacagtcc

SEQ ID NO: 4515872 - DNA, 25 bp, Homo sapien
gacacatggtaaccaagacctgagg

SEQ ID NO: 4515873 - DNA, 25 bp, Homo sapien
gccacgatgggtcagctcctcagtg

SEQ ID NO: 4515874 - DNA, 25 bp, Homo sapien
gctcctcagtgcagagctgagccct

SEQ ID NO: 4515875 - DNA, 25 bp, Homo sapien
ctgccacgatgggtcagctcctcag

SEQ ID NO: 4515876 - DNA, 25 bp, Homo sapien
gagctgagccctggtgttaagtggc

SEQ ID NO: 4515877 - DNA, 25 bp, Homo sapien
tgtgcaagcgtggacttgagcaaag

SEQ ID NO: 4515878 - DNA, 25 bp, Homo sapien
gtggacttgagcaaagcgaagcctt

SEQ ID NO: 4515879 - DNA, 25 bp, Homo sapien
cctgtgtgtgcaagcgtggacttga

SEQ ID NO: 4515880 - DNA, 25 bp, Homo sapien
caagcgtggacttgagcaaagcgaa

SEQ ID NO: 4515881 - DNA, 25 bp, Homo sapien
gtcttcccatatttccaataacaac

SEQ ID NO: 4515882 - DNA, 25 bp, Homo sapien
caaccagagaaccagttacccgcct

SEQ ID NO: 4515883 - DNA, 25 bp, Homo sapien
cttttccgtggacacgtcttcccat

SEQ ID NO: 4515884 - DNA, 25 bp, Homo sapien
tgtgccaggcccgtgcaacttttcc

SEQ ID NO: 4515885 - DNA, 25 bp, Homo sapien
aggcattttcccagattcctgccat

SEQ ID NO: 4515886 - DNA, 25 bp, Homo sapien
cgaggcattttcccagattcctgcc

SEQ ID NO: 4515887 - DNA, 25 bp, Homo sapien
gaggcattttcccagattcctgcca

SEQ ID NO: 4515888 - DNA, 25 bp, Homo sapien
cttaaactcctggccctgagtgatc

SEQ ID NO: 4515889 - DNA, 25 bp, Homo sapien
agacagggtcacgccatattgccca

SEQ ID NO: 4515890 - DNA, 25 bp, Homo sapien
caggtgcccaccaccccgcctgcta

SEQ ID NO: 4515891 - DNA, 25 bp, Homo sapien
tttcatagagacagggtcacgccat

SEQ ID NO: 4515892 - DNA, 25 bp, Homo sapien
cacctggtaatgagatcacttgtaa

SEQ ID NO: 4515893 - DNA, 25 bp, Homo sapien
gtttgcctctggttcagctcataca

SEQ ID NO: 4515894 - DNA, 25 bp, Homo sapien
ctcagccagcctatgtgtcttcaca

SEQ ID NO: 4515895 - DNA, 25 bp, Homo sapien
tatgaattacaggatattgaagcca

SEQ ID NO: 4515896 - DNA, 25 bp, Homo sapien
cccttttgtgaggaggctgcgtcgt

SEQ ID NO: 4515897 - DNA, 25 bp, Homo sapien
gcctggcactcacaccgtttgctga

SEQ ID NO: 4515898 - DNA, 25 bp, Homo sapien
gcacttgaagtgtgtctatcatagc

SEQ ID NO: 4515899 - DNA, 25 bp, Homo sapien
cagaaggtgagtctagggttcctgt

SEQ ID NO: 4515900 - DNA, 25 bp, Homo sapien
gaggccctcagggtcagctgaatgc

SEQ ID NO: 4515901 - DNA, 25 bp, Homo sapien
ctggtggtcaagatgagggagaggc

SEQ ID NO: 4515902 - DNA, 25 bp, Homo sapien
gagaggccctcagggtcagctgaat

SEQ ID NO: 4515903 - DNA, 25 bp, Homo sapien
tcagagcccgtagctggtggtcaag

SEQ ID NO: 4515904 - DNA, 25 bp, Homo sapien
ctcagactatattcacacagtgaca

SEQ ID NO: 4515905 - DNA, 25 bp, Homo sapien
attcacacagtgacatggcggctta

SEQ ID NO: 4515906 - DNA, 25 bp, Homo sapien
gtgacatggcggcttatgcttctgt

SEQ ID NO: 4515907 - DNA, 25 bp, Homo sapien
catggcggcttatgcttctgtaggc

SEQ ID NO: 4515908 - DNA, 25 bp, Homo sapien
tgctgggcgttcttcatcccacaaa

SEQ ID NO: 4515909 - DNA, 25 bp, Homo sapien
ctgctgggcgttcttcatcccacaa

SEQ ID NO: 4515910 - DNA, 25 bp, Homo sapien
gcactgctgggcgttcttcatccca

SEQ ID NO: 4515911 - DNA, 25 bp, Homo sapien
tgggcactgctgggcgttcttcatc

SEQ ID NO: 4515912 - DNA, 25 bp, Homo sapien
tgccagtgtggctcatattacaaag

SEQ ID NO: 4515913 - DNA, 25 bp, Homo sapien
ccagtgtggctcatattacaaagaa

SEQ ID NO: 4515914 - DNA, 25 bp, Homo sapien
cactgccagtgtggctcatattaca

SEQ ID NO: 4515915 - DNA, 25 bp, Homo sapien
ccacactgccagtgtggctcatatt

SEQ ID NO: 4515916 - DNA, 25 bp, Homo sapien
tttctgatctcgtatcctctcctcc

SEQ ID NO: 4515917 - DNA, 25 bp, Homo sapien
tctctttctgatctcgtatcctctc

SEQ ID NO: 4515918 - DNA, 25 bp, Homo sapien
tctgagcaccgctcctcgtgctctg

SEQ ID NO: 4515919 - DNA, 25 bp, Homo sapien
gctctgagcaccgctcctcgtgctc

SEQ ID NO: 4515920 - DNA, 25 bp, Homo sapien
ctgcccccacatcttctcctcctgc

SEQ ID NO: 4515921 - DNA, 25 bp, Homo sapien
gcatcttctccacctgctgccacat

SEQ ID NO: 4515922 - DNA, 25 bp, Homo sapien
tcctcctgcgtcttcttcttctccc

SEQ ID NO: 4515923 - DNA, 25 bp, Homo sapien
tctcctcctggccccgcatcttctc

SEQ ID NO: 4515924 - DNA, 25 bp, Homo sapien
ttcttctcccgcatcttctccacct

SEQ ID NO: 4515925 - DNA, 25 bp, Homo sapien
ccttctggtcccacatcttctgctc

SEQ ID NO: 4515926 - DNA, 25 bp, Homo sapien
cctctccttctggtcccacatcttc

SEQ ID NO: 4515927 - DNA, 25 bp, Homo sapien
tcgtcctgctcccacatcctctcct

SEQ ID NO: 4515928 - DNA, 25 bp, Homo sapien
tctccttctggtcccacatcttctg

SEQ ID NO: 4515929 - DNA, 25 bp, Homo sapien
tggtcccacatcttctgctcctgat

SEQ ID NO: 4515930 - DNA, 25 bp, Homo sapien
tctgctcctgatcccgcatcttctc

SEQ ID NO: 4515931 - DNA, 25 bp, Homo sapien
gcatcttctcgtgttcccacagctt

SEQ ID NO: 4515932 - DNA, 25 bp, Homo sapien
tcctgcatcttctcgtgttcccaca

SEQ ID NO: 4515933 - DNA, 25 bp, Homo sapien
ctgctcccgcatcttctcctgccgc

SEQ ID NO: 4515934 - DNA, 25 bp, Homo sapien
cctggtcccgcgtcttcttctcctg

SEQ ID NO: 4515935 - DNA, 25 bp, Homo sapien
tctccttctgttccggcagcctctg

SEQ ID NO: 4515936 - DNA, 25 bp, Homo sapien
ttctccttctgttccggcagcctct

SEQ ID NO: 4515937 - DNA, 25 bp, Homo sapien
tcctcctggtcccgcgtcttcttct

SEQ ID NO: 4515938 - DNA, 25 bp, Homo sapien
ctccttctcctgctctcgcagcctc

SEQ ID NO: 4515939 - DNA, 25 bp, Homo sapien
cctgctcccgcagcttcttctgctc

SEQ ID NO: 4515940 - DNA, 25 bp, Homo sapien
cgcagcttcttctgctcccgcagct

SEQ ID NO: 4515941 - DNA, 25 bp, Homo sapien
gcagcctcttctcctgtctccgcat

SEQ ID NO: 4515942 - DNA, 25 bp, Homo sapien
tcttttcctgctcccgtagctcctc

SEQ ID NO: 4515943 - DNA, 25 bp, Homo sapien
ctcctcctgcaaagtgttggtttga

SEQ ID NO: 4515944 - DNA, 25 bp, Homo sapien
ttcccctcctgctcccgcagtctct

SEQ ID NO: 4515945 - DNA, 25 bp, Homo sapien
acatctcctcctgcaaagtgttggt

SEQ ID NO: 4515946 - DNA, 25 bp, Homo sapien
gaccatggtcctagctggatgggtc

SEQ ID NO: 4515947 - DNA, 25 bp, Homo sapien
ccatggtcctagctggatgggtctc

SEQ ID NO: 4515948 - DNA, 25 bp, Homo sapien
tagaccatggtcctagctggatggg

SEQ ID NO: 4515949 - DNA, 25 bp, Homo sapien
cctagaccatggtcctagctggatg

SEQ ID NO: 4515950 - DNA, 25 bp, Homo sapien
aacccctggggctgcagccgctcac

SEQ ID NO: 4515951 - DNA, 25 bp, Homo sapien
tgtggcagcaggaacttggccctct

SEQ ID NO: 4515952 - DNA, 25 bp, Homo sapien
cttcttcagctcctcattggttatg

SEQ ID NO: 4515953 - DNA, 25 bp, Homo sapien
ttttagctccttcacgttgagctgg

SEQ ID NO: 4515954 - DNA, 25 bp, Homo sapien
cctttttagctccttcacgttgagc

SEQ ID NO: 4515955 - DNA, 25 bp, Homo sapien
acagttccagactcagggcgtccct

SEQ ID NO: 4515956 - DNA, 25 bp, Homo sapien
gtgttcctgtacagttccagactca

SEQ ID NO: 4515957 - DNA, 25 bp, Homo sapien
tctcctttgttaactcctcgatgta

SEQ ID NO: 4515958 - DNA, 25 bp, Homo sapien
cctgtacagttccagactcagggcg

SEQ ID NO: 4515959 - DNA, 25 bp, Homo sapien
caggaatgatgcaagcggccggcga

SEQ ID NO: 4515960 - DNA, 25 bp, Homo sapien
atgcaagcggccggcgagatccttg

SEQ ID NO: 4515961 - DNA, 25 bp, Homo sapien
aatgatgcaagcggccggcgagatc

SEQ ID NO: 4515962 - DNA, 25 bp, Homo sapien
gccaggaatgatgcaagcggccggc

SEQ ID NO: 4515963 - DNA, 25 bp, Homo sapien
tgagaattcgtattgtatgatcctg

SEQ ID NO: 4515964 - DNA, 25 bp, Homo sapien
acacgtgagaattcgtattgtatga

SEQ ID NO: 4515965 - DNA, 25 bp, Homo sapien
cgtgagaattcgtattgtatgatcc

SEQ ID NO: 4515966 - DNA, 25 bp, Homo sapien
cacgtgagaattcgtattgtatgat

SEQ ID NO: 4515967 - DNA, 25 bp, Homo sapien
tatctcccgccttagggcttcctga

SEQ ID NO: 4515968 - DNA, 25 bp, Homo sapien
cccgccttagggcttcctgatgttg

SEQ ID NO: 4515969 - DNA, 25 bp, Homo sapien
tctcccgccttagggcttcctgatg

SEQ ID NO: 4515970 - DNA, 25 bp, Homo sapien
tctatctcccgccttagggcttcct

SEQ ID NO: 4515971 - DNA, 25 bp, Homo sapien
ttcagctgcgctcggttctgttgtg

SEQ ID NO: 4515972 - DNA, 25 bp, Homo sapien
ttctttcagctgcgctcggttctgt

SEQ ID NO: 4515973 - DNA, 25 bp, Homo sapien
ctttcagctgcgctcggttctgttg

SEQ ID NO: 4515974 - DNA, 25 bp, Homo sapien
tcagctgcgctcggttctgttgtgt

SEQ ID NO: 4515975 - DNA, 25 bp, Homo sapien
ggtgaatggcaaccctccgaagtgg

SEQ ID NO: 4515976 - DNA, 25 bp, Homo sapien
aatggcaaccctccgaagtggttgt

SEQ ID NO: 4515977 - DNA, 25 bp, Homo sapien
tcttggcctcagccaatttgttctg

SEQ ID NO: 4515978 - DNA, 25 bp, Homo sapien
ttttcttggcctcagccaatttgtt

SEQ ID NO: 4515979 - DNA, 25 bp, Homo sapien
atttgttctgtctggttttttctga

SEQ ID NO: 4515980 - DNA, 25 bp, Homo sapien
gttctgtctggttttttctgacatc

SEQ ID NO: 4515981 - DNA, 25 bp, Homo sapien
acaaggatacacctccagtcacgta

SEQ ID NO: 4515982 - DNA, 25 bp, Homo sapien
ggacaaggatacacctccagtcacg

SEQ ID NO: 4515983 - DNA, 25 bp, Homo sapien
gacaaggatacacctccagtcacgt

SEQ ID NO: 4515984 - DNA, 25 bp, Homo sapien
caaggatacacctccagtcacgtac

SEQ ID NO: 4515985 - DNA, 25 bp, Homo sapien
cacgcagctatgtgactgagccaga

SEQ ID NO: 4515986 - DNA, 25 bp, Homo sapien
gccagaggaggtgtaaccagggctg

SEQ ID NO: 4515987 - DNA, 25 bp, Homo sapien
gagccagaggaggtgtaaccagggc

SEQ ID NO: 4515988 - DNA, 25 bp, Homo sapien
cagaggaggtgtaaccagggctgca

SEQ ID NO: 4515989 - DNA, 25 bp, Homo sapien
gtaagtcctcaaagttgcaggccat

SEQ ID NO: 4515990 - DNA, 25 bp, Homo sapien
ccaagtatttggaacactcacaaga

SEQ ID NO: 4515991 - DNA, 25 bp, Homo sapien
tctgaatattagcatagagataaat

SEQ ID NO: 4515992 - DNA, 25 bp, Homo sapien
gctgggactcttggcttccaagtat

SEQ ID NO: 4515993 - DNA, 25 bp, Homo sapien
tgcgatcactgctagtctggatttc

SEQ ID NO: 4515994 - DNA, 25 bp, Homo sapien
gttttgtagttgcatcccatctagg

SEQ ID NO: 4515995 - DNA, 25 bp, Homo sapien
tcttaattataaggcatgctcccca

SEQ ID NO: 4515996 - DNA, 25 bp, Homo sapien
tcatgaaggcagtcataatcctgtc

SEQ ID NO: 4515997 - DNA, 25 bp, Homo sapien
gcatatcttgcagggctatctgaga

SEQ ID NO: 4515998 - DNA, 25 bp, Homo sapien
tatggggccaaatttcccaagaagc

SEQ ID NO: 4515999 - DNA, 25 bp, Homo sapien
gcctagacaaagtatggggccaaat

SEQ ID NO: 4516000 - DNA, 25 bp, Homo sapien
gactgcctagacaaagtatggggcc

SEQ ID NO: 4516001 - DNA, 25 bp, Homo sapien
gagcagggactgcctagacaaagta

SEQ ID NO: 4516002 - DNA, 25 bp, Homo sapien
ggagagagacctcaaattagaaaga

SEQ ID NO: 4516003 - DNA, 25 bp, Homo sapien
agagagacctcaaattagaaagaaa

SEQ ID NO: 4516004 - DNA, 25 bp, Homo sapien
agccacttcaggagagagacctcaa

SEQ ID NO: 4516005 - DNA, 25 bp, Homo sapien
aagaaaccataaattatccgggcat

SEQ ID NO: 4516006 - DNA, 25 bp, Homo sapien
gttgcccccacaggaagtgtccgcc

SEQ ID NO: 4516007 - DNA, 25 bp, Homo sapien
tgcccccacaggaagtgtccgccat

SEQ ID NO: 4516008 - DNA, 25 bp, Homo sapien
ttgcccccacaggaagtgtccgcca

SEQ ID NO: 4516009 - DNA, 25 bp, Homo sapien
ggagaactgtcgctattcgcacgac

SEQ ID NO: 4516010 - DNA, 25 bp, Homo sapien
aaataccggagaggttctggcacca

SEQ ID NO: 4516011 - DNA, 25 bp, Homo sapien
gaagcagcggcatttggacaaagca

SEQ ID NO: 4516012 - DNA, 25 bp, Homo sapien
tattatatacatgggcagtgcaagg

SEQ ID NO: 4516013 - DNA, 25 bp, Homo sapien
tcaatgactcggaaatttaagagaa

SEQ ID NO: 4516014 - DNA, 25 bp, Homo sapien
tacatagcctcagaatatacaaaga

SEQ ID NO: 4516015 - DNA, 25 bp, Homo sapien
tgcgctgtcaccgacaaagtgaatt

SEQ ID NO: 4516016 - DNA, 25 bp, Homo sapien
taaggcacaggtattagtagagaaa

SEQ ID NO: 4516017 - DNA, 25 bp, Homo sapien
ctcattggatgtagtggtctgatga

SEQ ID NO: 4516018 - DNA, 25 bp, Homo sapien
aatgggagatgaagtcaaatccgtc

SEQ ID NO: 4516019 - DNA, 25 bp, Homo sapien
tagtggtctgatgagtttcagttcc

SEQ ID NO: 4516020 - DNA, 25 bp, Homo sapien
ccaagtaaaactgaggaggttatgg

SEQ ID NO: 4516021 - DNA, 25 bp, Homo sapien
accctgttgtcgatccttctctctg

SEQ ID NO: 4516022 - DNA, 25 bp, Homo sapien
cctcaatgtcgggaaccctgttgtc

SEQ ID NO: 4516023 - DNA, 25 bp, Homo sapien
tcgggaaccctgttgtcgatccttc

SEQ ID NO: 4516024 - DNA, 25 bp, Homo sapien
ctttatccgtccctcaatgtcggga

SEQ ID NO: 4516025 - DNA, 25 bp, Homo sapien
gctccacaccatgggtgaccacatt

SEQ ID NO: 4516026 - DNA, 25 bp, Homo sapien
caggagtcaaaggttaatccaataa

SEQ ID NO: 4516027 - DNA, 25 bp, Homo sapien
agtcaaaggttaatccaataacagg

SEQ ID NO: 4516028 - DNA, 25 bp, Homo sapien
acaccatgggtgaccacattgccac

SEQ ID NO: 4516029 - DNA, 25 bp, Homo sapien
tcatagctacccataaaagacaagg

SEQ ID NO: 4516030 - DNA, 25 bp, Homo sapien
ggtcaaggcattcccatgacagtga

SEQ ID NO: 4516031 - DNA, 25 bp, Homo sapien
cattctcacaggatacatccccagg

SEQ ID NO: 4516032 - DNA, 25 bp, Homo sapien
catgtggtctccaatggtcaaggca

SEQ ID NO: 4516033 - DNA, 25 bp, Homo sapien
gaatcttgttttcgaattttctctg

SEQ ID NO: 4516034 - DNA, 25 bp, Homo sapien
ctgcctgcctggactgggatgcttt

SEQ ID NO: 4516035 - DNA, 25 bp, Homo sapien
gcctgcctggactgggatgctttct

SEQ ID NO: 4516036 - DNA, 25 bp, Homo sapien
tgttgtaggtctttcttccactgcc

SEQ ID NO: 4516037 - DNA, 25 bp, Homo sapien
ggaaacacaggagcgagatctctgc

SEQ ID NO: 4516038 - DNA, 25 bp, Homo sapien
ccaaacgtacactcgtggaactgga

SEQ ID NO: 4516039 - DNA, 25 bp, Homo sapien
taccagaaatgagatggatagcttc

SEQ ID NO: 4516040 - DNA, 25 bp, Homo sapien
aacagaacagtagccgattgaaatc

SEQ ID NO: 4516041 - DNA, 25 bp, Homo sapien
gaactcatactctgcgggctcagtg

SEQ ID NO: 4516042 - DNA, 25 bp, Homo sapien
tggtttccaggaatgctcgagggcc

SEQ ID NO: 4516043 - DNA, 25 bp, Homo sapien
ccaagggagacaagggctgtgcctc

SEQ ID NO: 4516044 - DNA, 25 bp, Homo sapien
actggatcccggagagacacttgcg

SEQ ID NO: 4516045 - DNA, 25 bp, Homo sapien
agccactcaggatcctggaggtgct

SEQ ID NO: 4516046 - DNA, 25 bp, Homo sapien
ctgggctttcagagagacccagggc

SEQ ID NO: 4516047 - DNA, 25 bp, Homo sapien
cactcaggatcctggaggtgctagg

SEQ ID NO: 4516048 - DNA, 25 bp, Homo sapien
aggatcctggaggtgctagggccct

SEQ ID NO: 4516049 - DNA, 25 bp, Homo sapien
catcaatgatttagcggagcccagg

SEQ ID NO: 4516050 - DNA, 25 bp, Homo sapien
tcatgaaaggctagcgtgtggccac

SEQ ID NO: 4516051 - DNA, 25 bp, Homo sapien
cctggatagggctttggacctccca

SEQ ID NO: 4516052 - DNA, 25 bp, Homo sapien
ggagcccctgcggtctatagaagag

SEQ ID NO: 4516053 - DNA, 25 bp, Homo sapien
ttgacgttggaatctcgtgtggcac

SEQ ID NO: 4516054 - DNA, 25 bp, Homo sapien
cattgacgttggaatctcgtgtggc

SEQ ID NO: 4516055 - DNA, 25 bp, Homo sapien
tggaattccattgacgttggaatct

SEQ ID NO: 4516056 - DNA, 25 bp, Homo sapien
ttccattgacgttggaatctcgtgt

SEQ ID NO: 4516057 - DNA, 25 bp, Homo sapien
cctgtcgcaccggtggtgggccagg

SEQ ID NO: 4516058 - DNA, 25 bp, Homo sapien
aggtgacctgcgtggtctgccaagt

SEQ ID NO: 4516059 - DNA, 25 bp, Homo sapien
ggagcccttataacttgagactgga

SEQ ID NO: 4516060 - DNA, 25 bp, Homo sapien
ccagatgatggaagggcagtgcaca

SEQ ID NO: 4516061 - DNA, 25 bp, Homo sapien
aggctgggtcatcggagctctcgca

SEQ ID NO: 4516062 - DNA, 25 bp, Homo sapien
tgccatcggtgctcctgaagctgga

SEQ ID NO: 4516063 - DNA, 25 bp, Homo sapien
gggccgccggctgtgccatcggtgc

SEQ ID NO: 4516064 - DNA, 25 bp, Homo sapien
cgccggctgtgccatcggtgctcct

SEQ ID NO: 4516065 - DNA, 25 bp, Homo sapien
tggacctggaggcttggccatcggt

SEQ ID NO: 4516066 - DNA, 25 bp, Homo sapien
aggctgggccatcggtgtacccgga

SEQ ID NO: 4516067 - DNA, 25 bp, Homo sapien
tggaccatcggtgctcccggagcag

SEQ ID NO: 4516068 - DNA, 25 bp, Homo sapien
tggaccatcaggactcccggagtca

SEQ ID NO: 4516069 - DNA, 25 bp, Homo sapien
gatgggccatgggagctccgggagc

SEQ ID NO: 4516070 - DNA, 25 bp, Homo sapien
ggaggaggatgggccattggggtcc

SEQ ID NO: 4516071 - DNA, 25 bp, Homo sapien
atgggccatgggagctccgggagct

SEQ ID NO: 4516072 - DNA, 25 bp, Homo sapien
gcatcagaaccgtagggcggctata

SEQ ID NO: 4516073 - DNA, 25 bp, Homo sapien
caagtcaattggaggtggatcccaa

SEQ ID NO: 4516074 - DNA, 25 bp, Homo sapien
cagctggtgggtcttttcctcggac

SEQ ID NO: 4516075 - DNA, 25 bp, Homo sapien
gcggccaatgaagcctgcaagtcaa

SEQ ID NO: 4516076 - DNA, 25 bp, Homo sapien
gagaatgcctacgtggctgttcaga

SEQ ID NO: 4516077 - DNA, 25 bp, Homo sapien
gaatgcctacgtggctgttcagagg

SEQ ID NO: 4516078 - DNA, 25 bp, Homo sapien
aagagaatgcctacgtggctgttca

SEQ ID NO: 4516079 - DNA, 25 bp, Homo sapien
agaagagaatgcctacgtggctgtt

SEQ ID NO: 4516080 - DNA, 25 bp, Homo sapien
gggtgcccatgagaatgcatcttcc

SEQ ID NO: 4516081 - DNA, 25 bp, Homo sapien
tctgctgggtctactaagaatggag

SEQ ID NO: 4516082 - DNA, 25 bp, Homo sapien
cacccttcactaacagcctggagag

SEQ ID NO: 4516083 - DNA, 25 bp, Homo sapien
tccaagtacacccaaggaaatttgc

SEQ ID NO: 4516084 - DNA, 25 bp, Homo sapien
ggccttgctgcattggtattgtaat

SEQ ID NO: 4516085 - DNA, 25 bp, Homo sapien
gccttgctgcattggtattgtaatt

SEQ ID NO: 4516086 - DNA, 25 bp, Homo sapien
ttgctgcattggtattgtaattgtt

SEQ ID NO: 4516087 - DNA, 25 bp, Homo sapien
ccttgctgcattggtattgtaattg

SEQ ID NO: 4516088 - DNA, 25 bp, Homo sapien
caattgagccacaaatataccctcc

SEQ ID NO: 4516089 - DNA, 25 bp, Homo sapien
cctccattcctcaattgagccacaa

SEQ ID NO: 4516090 - DNA, 25 bp, Homo sapien
ttgagccacaaatataccctccttc

SEQ ID NO: 4516091 - DNA, 25 bp, Homo sapien
aattgagccacaaatataccctcct

SEQ ID NO: 4516092 - DNA, 25 bp, Homo sapien
tcttcatctcttagcagactctcaa

SEQ ID NO: 4516093 - DNA, 25 bp, Homo sapien
atcttcatctcttagcagactctca

SEQ ID NO: 4516094 - DNA, 25 bp, Homo sapien
catcttcatctcttagcagactctc

SEQ ID NO: 4516095 - DNA, 25 bp, Homo sapien
ttcatctcttagcagactctcaact

SEQ ID NO: 4516096 - DNA, 25 bp, Homo sapien
gattacagacaatcttactgttttg

SEQ ID NO: 4516097 - DNA, 25 bp, Homo sapien
gagaattgtctcattcccaaccata

SEQ ID NO: 4516098 - DNA, 25 bp, Homo sapien
tcatgagtagcgatttttcccaccc

SEQ ID NO: 4516099 - DNA, 25 bp, Homo sapien
tcacaaatttaggagtaatcatgag

SEQ ID NO: 4516100 - DNA, 25 bp, Homo sapien
atcacaagaatctttaatgtttact

SEQ ID NO: 4516101 - DNA, 25 bp, Homo sapien
cacaagaatctttaatgtttacttt

SEQ ID NO: 4516102 - DNA, 25 bp, Homo sapien
taatgtttactttaaagttgactca

SEQ ID NO: 4516103 - DNA, 25 bp, Homo sapien
atgtttactttaaagttgactcacg

SEQ ID NO: 4516104 - DNA, 25 bp, Homo sapien
caaattagtgtactccacgagggtg

SEQ ID NO: 4516105 - DNA, 25 bp, Homo sapien
tccaagaaaggtagcacaaaagcga

SEQ ID NO: 4516106 - DNA, 25 bp, Homo sapien
gagaccagtccagttcaaattagtg

SEQ ID NO: 4516107 - DNA, 25 bp, Homo sapien
taaaagttacacgtgaatactgcac

SEQ ID NO: 4516108 - DNA, 25 bp, Homo sapien
cagagcttctctgtatcgggagggc

SEQ ID NO: 4516109 - DNA, 25 bp, Homo sapien
caaaagaactcgtattcgggcggct

SEQ ID NO: 4516110 - DNA, 25 bp, Homo sapien
catcttggtgatttcgcggctggcc

SEQ ID NO: 4516111 - DNA, 25 bp, Homo sapien
caaactccatggtgtgcaggctggt

SEQ ID NO: 4516112 - DNA, 25 bp, Homo sapien
ctctgcgtccaggagctcttcgagc

SEQ ID NO: 4516113 - DNA, 25 bp, Homo sapien
tccaggagctcttcgagcctgcgct

SEQ ID NO: 4516114 - DNA, 25 bp, Homo sapien
tccctccgcggattcctggagagga

SEQ ID NO: 4516115 - DNA, 25 bp, Homo sapien
gctccctccgcggattcctggagag

SEQ ID NO: 4516116 - DNA, 25 bp, Homo sapien
cttgggcagagtcctcggttagtac

SEQ ID NO: 4516117 - DNA, 25 bp, Homo sapien
agctcgaacaatagtccatccttca

SEQ ID NO: 4516118 - DNA, 25 bp, Homo sapien
tgctttcagctcagttataaattta

SEQ ID NO: 4516119 - DNA, 25 bp, Homo sapien
tttaggccagtaatgcacagctcga

SEQ ID NO: 4516120 - DNA, 25 bp, Homo sapien
ggactaaagtccagtttacatctga

SEQ ID NO: 4516121 - DNA, 25 bp, Homo sapien
ggagcatatttggtcaatcctggag

SEQ ID NO: 4516122 - DNA, 25 bp, Homo sapien
gctgagaatgagttaaaagtgcccc

SEQ ID NO: 4516123 - DNA, 25 bp, Homo sapien
aattgtgacatgactaactcaggag

SEQ ID NO: 4516124 - DNA, 25 bp, Homo sapien
gaaacagagggctaatgcgctgccg

SEQ ID NO: 4516125 - DNA, 25 bp, Homo sapien
gacaacctgcgtagtgatggctcag

SEQ ID NO: 4516126 - DNA, 25 bp, Homo sapien
tatttgtgggtactgtgcaccagag

SEQ ID NO: 4516127 - DNA, 25 bp, Homo sapien
caccagagcggattaattgggcacc

SEQ ID NO: 4516128 - DNA, 25 bp, Homo sapien
tgagaaagcgtatgttcaatgtttt

SEQ ID NO: 4516129 - DNA, 25 bp, Homo sapien
aagcgtatgttcaatgttttgccta

SEQ ID NO: 4516130 - DNA, 25 bp, Homo sapien
atcaaatggtgtggtcgtttttttg

SEQ ID NO: 4516131 - DNA, 25 bp, Homo sapien
tagccattgccataaatgtagtagt

SEQ ID NO: 4516132 - DNA, 25 bp, Homo sapien
agtggctgacctaatatgtattccc

SEQ ID NO: 4516133 - DNA, 25 bp, Homo sapien
gcaggcgccatgctacccttttgtg

SEQ ID NO: 4516134 - DNA, 25 bp, Homo sapien
gccatgctacccttttgtgtatcct

SEQ ID NO: 4516135 - DNA, 25 bp, Homo sapien
ggcgccatgctacccttttgtgtat

SEQ ID NO: 4516136 - DNA, 25 bp, Homo sapien
ttgtgcaggcgccatgctacccttt

SEQ ID NO: 4516137 - DNA, 25 bp, Homo sapien
aggaacagagttgaagggctaaggg

SEQ ID NO: 4516138 - DNA, 25 bp, Homo sapien
ctaaggggtcgggtgtgtgtggctc

SEQ ID NO: 4516139 - DNA, 25 bp, Homo sapien
ttgctactacccacacatttgtgct

SEQ ID NO: 4516140 - DNA, 25 bp, Homo sapien
ccacacatttgtgctaagcaggaac

SEQ ID NO: 4516141 - DNA, 25 bp, Homo sapien
cagggaaactgcagagtcgtgattc

SEQ ID NO: 4516142 - DNA, 25 bp, Homo sapien
gatactggtccgttctttctggcgc

SEQ ID NO: 4516143 - DNA, 25 bp, Homo sapien
tactgtgaaactggtgaatcggtgt

SEQ ID NO: 4516144 - DNA, 25 bp, Homo sapien
tgtcctttctgggaggcgtcctctt

SEQ ID NO: 4516145 - DNA, 25 bp, Homo sapien
gagcaggtctctagtcggtcatact

SEQ ID NO: 4516146 - DNA, 25 bp, Homo sapien
tagacaaccttatttcaaccatccc

SEQ ID NO: 4516147 - DNA, 25 bp, Homo sapien
ttccttggccacatgagaattgggc

SEQ ID NO: 4516148 - DNA, 25 bp, Homo sapien
tctagtcggtcatactctgagattc

SEQ ID NO: 4516149 - DNA, 25 bp, Homo sapien
gctgtggaatccgtgtggcaaatgt

SEQ ID NO: 4516150 - DNA, 25 bp, Homo sapien
cgtattcgtctgtgcctctgggttg

SEQ ID NO: 4516151 - DNA, 25 bp, Homo sapien
ctgtgtgcatcttcctgcagcgtat

SEQ ID NO: 4516152 - DNA, 25 bp, Homo sapien
tcagcatgaaatgtgctgctgctct

SEQ ID NO: 4516153 - DNA, 25 bp, Homo sapien
cttatttggagcttggtgcacagtg

SEQ ID NO: 4516154 - DNA, 25 bp, Homo sapien
tatttggagcttggtgcacagtgga

SEQ ID NO: 4516155 - DNA, 25 bp, Homo sapien
tttggagcttggtgcacagtggaac

SEQ ID NO: 4516156 - DNA, 25 bp, Homo sapien
tggagcttggtgcacagtggaacac

SEQ ID NO: 4516157 - DNA, 25 bp, Homo sapien
catattcacttctactgtccagagt

SEQ ID NO: 4516158 - DNA, 25 bp, Homo sapien
tattactcccgtttctccatattca

SEQ ID NO: 4516159 - DNA, 25 bp, Homo sapien
caaagagtctttggtgggattccgc

SEQ ID NO: 4516160 - DNA, 25 bp, Homo sapien
caggactagacgttgtctgaaatgg

SEQ ID NO: 4516161 - DNA, 25 bp, Homo sapien
tggaaacagtcatcgagtgggatga

SEQ ID NO: 4516162 - DNA, 25 bp, Homo sapien
tcaggcaaatgctagtgcatgcata

SEQ ID NO: 4516163 - DNA, 25 bp, Homo sapien
tcatcgagtgggatgacaacttgga

SEQ ID NO: 4516164 - DNA, 25 bp, Homo sapien
atccatgtagatttcctttctgaga

SEQ ID NO: 4516165 - DNA, 25 bp, Homo sapien
tgacacaaaaccatgtaccatgtcc

SEQ ID NO: 4516166 - DNA, 25 bp, Homo sapien
accatgtaccatgtccacttctttc

SEQ ID NO: 4516167 - DNA, 25 bp, Homo sapien
ggttgctttgggaatgaacagcacg

SEQ ID NO: 4516168 - DNA, 25 bp, Homo sapien
tgaacagcacgtagcctgacacaaa

SEQ ID NO: 4516169 - DNA, 25 bp, Homo sapien
tctgcttttgaattgagtcatcccc

SEQ ID NO: 4516170 - DNA, 25 bp, Homo sapien
gacgagcagggacacttgtgctttc

SEQ ID NO: 4516171 - DNA, 25 bp, Homo sapien
caaaagtaactaggccttccgcctg

SEQ ID NO: 4516172 - DNA, 25 bp, Homo sapien
aggatttagcgaggacacagaagcg

SEQ ID NO: 4516173 - DNA, 25 bp, Homo sapien
gcaacacagaacgttcaagccacat

SEQ ID NO: 4516174 - DNA, 25 bp, Homo sapien
gccaccattttgaaaggccttcatc

SEQ ID NO: 4516175 - DNA, 25 bp, Homo sapien
acaggtgcttaggtgatgtcgcagc

SEQ ID NO: 4516176 - DNA, 25 bp, Homo sapien
catttgcgtagggaaacgggtctca

SEQ ID NO: 4516177 - DNA, 25 bp, Homo sapien
tgcggctgcgctagtttggcaactt

SEQ ID NO: 4516178 - DNA, 25 bp, Homo sapien
ctagtttggcaacttccagaaagct

SEQ ID NO: 4516179 - DNA, 25 bp, Homo sapien
ggctgcgctagtttggcaacttcca

SEQ ID NO: 4516180 - DNA, 25 bp, Homo sapien
cactttgcggctgcgctagtttggc

SEQ ID NO: 4516181 - DNA, 25 bp, Homo sapien
ctccatgggttcattcactgtgtgc

SEQ ID NO: 4516182 - DNA, 25 bp, Homo sapien
gatgtctgtaggagcctccatgggt

SEQ ID NO: 4516183 - DNA, 25 bp, Homo sapien
tgtgtgccactgaatgaaagattta

SEQ ID NO: 4516184 - DNA, 25 bp, Homo sapien
attcactgtgtgccactgaatgaaa

SEQ ID NO: 4516185 - DNA, 25 bp, Homo sapien
gaagagggcagtggattggaaggac

SEQ ID NO: 4516186 - DNA, 25 bp, Homo sapien
gaaggaccgctgggatgagtaatac

SEQ ID NO: 4516187 - DNA, 25 bp, Homo sapien
agacaccaaactgtaggtggaagaa

SEQ ID NO: 4516188 - DNA, 25 bp, Homo sapien
caccaaactgtaggtggaagaactg

SEQ ID NO: 4516189 - DNA, 25 bp, Homo sapien
aaaacaaccacaacactggcgattc

SEQ ID NO: 4516190 - DNA, 25 bp, Homo sapien
tcactagtctgagggtcagtaacca

SEQ ID NO: 4516191 - DNA, 25 bp, Homo sapien
agactccttattaccctgtcactag

SEQ ID NO: 4516192 - DNA, 25 bp, Homo sapien
caacactggcgattctctttcgctt

SEQ ID NO: 4516193 - DNA, 25 bp, Homo sapien
caaagataggtgcatttacctccca

SEQ ID NO: 4516194 - DNA, 25 bp, Homo sapien
ttcttcaaagataggtgcatttacc

SEQ ID NO: 4516195 - DNA, 25 bp, Homo sapien
aggtgcatttacctcccatatctca

SEQ ID NO: 4516196 - DNA, 25 bp, Homo sapien
tttacctcccatatctcagagactc

SEQ ID NO: 4516197 - DNA, 25 bp, Homo sapien
gaactttctactctgagagcagcag

SEQ ID NO: 4516198 - DNA, 25 bp, Homo sapien
ttaggaactttctactctgagagca

SEQ ID NO: 4516199 - DNA, 25 bp, Homo sapien
taggaactttctactctgagagcag

SEQ ID NO: 4516200 - DNA, 25 bp, Homo sapien
ggaactttctactctgagagcagca

SEQ ID NO: 4516201 - DNA, 25 bp, Homo sapien
cgtgtctcccttggaagcacagatg

SEQ ID NO: 4516202 - DNA, 25 bp, Homo sapien
gctccgatggttggtcctgctcctt

SEQ ID NO: 4516203 - DNA, 25 bp, Homo sapien
aagcacagatgctccgatggttggt

SEQ ID NO: 4516204 - DNA, 25 bp, Homo sapien
ctctgcgtgtctcccttggaagcac

SEQ ID NO: 4516205 - DNA, 25 bp, Homo sapien
tctctgaggtcgattgggcaattcc

SEQ ID NO: 4516206 - DNA, 25 bp, Homo sapien
ttctctctgaggtcgattgggcaat

SEQ ID NO: 4516207 - DNA, 25 bp, Homo sapien
ctctctgaggtcgattgggcaattc

SEQ ID NO: 4516208 - DNA, 25 bp, Homo sapien
tctgaggtcgattgggcaattccat

SEQ ID NO: 4516209 - DNA, 25 bp, Homo sapien
gcctgtcatacttgattccttgtac

SEQ ID NO: 4516210 - DNA, 25 bp, Homo sapien
aaagctgtatgcattgcctgtcata

SEQ ID NO: 4516211 - DNA, 25 bp, Homo sapien
tcatacttgattccttgtaccacat

SEQ ID NO: 4516212 - DNA, 25 bp, Homo sapien
tatgcattgcctgtcatacttgatt

SEQ ID NO: 4516213 - DNA, 25 bp, Homo sapien
tataacttagtataaagagcaactc

SEQ ID NO: 4516214 - DNA, 25 bp, Homo sapien
gatataacttagtataaagagcaac

SEQ ID NO: 4516215 - DNA, 25 bp, Homo sapien
cttgatataacttagtataaagagc

SEQ ID NO: 4516216 - DNA, 25 bp, Homo sapien
tgatataacttagtataaagagcaa

SEQ ID NO: 4516217 - DNA, 25 bp, Homo sapien
gaggcttttgggcatcagcaggtgg

SEQ ID NO: 4516218 - DNA, 25 bp, Homo sapien
tccaagctcctcatacccactaatc

SEQ ID NO: 4516219 - DNA, 25 bp, Homo sapien
aagctcctcatacccactaatcttt

SEQ ID NO: 4516220 - DNA, 25 bp, Homo sapien
tgttccaagctcctcatacccacta

SEQ ID NO: 4516221 - DNA, 25 bp, Homo sapien
gttccaagctcctcatacccactaa

SEQ ID NO: 4516222 - DNA, 25 bp, Homo sapien
agcaagtcctcgagccaggagcatc

SEQ ID NO: 4516223 - DNA, 25 bp, Homo sapien
acagcaagtcctcgagccaggagca

SEQ ID NO: 4516224 - DNA, 25 bp, Homo sapien
caagtcctcgagccaggagcatccc

SEQ ID NO: 4516225 - DNA, 25 bp, Homo sapien
tacagcaagtcctcgagccaggagc

SEQ ID NO: 4516226 - DNA, 25 bp, Homo sapien
caggtatcataaggcacttcatggg

SEQ ID NO: 4516227 - DNA, 25 bp, Homo sapien
tcaggaaatatttgcttgccttctc

SEQ ID NO: 4516228 - DNA, 25 bp, Homo sapien
agtccgttattctggcatagggcca

SEQ ID NO: 4516229 - DNA, 25 bp, Homo sapien
agctactggtgttaaggaggctgta

SEQ ID NO: 4516230 - DNA, 25 bp, Homo sapien
ggttagttattctgtggtagtcaga

SEQ ID NO: 4516231 - DNA, 25 bp, Homo sapien
tgtcgtgatattggctgactgcagt

SEQ ID NO: 4516232 - DNA, 25 bp, Homo sapien
gaagcactggtgatctggtgatgct

SEQ ID NO: 4516233 - DNA, 25 bp, Homo sapien
ttttacttcactaatccatggttag

SEQ ID NO: 4516234 - DNA, 25 bp, Homo sapien
tacaccaatactctcagctggactt

SEQ ID NO: 4516235 - DNA, 25 bp, Homo sapien
taaaaatctccatgcctttcaccta

SEQ ID NO: 4516236 - DNA, 25 bp, Homo sapien
atcagtggctttagagtttcagaat

SEQ ID NO: 4516237 - DNA, 25 bp, Homo sapien
caacagtttcttagttgctaacaga

SEQ ID NO: 4516238 - DNA, 25 bp, Homo sapien
caccagcatggcacatgtatacata

SEQ ID NO: 4516239 - DNA, 25 bp, Homo sapien
ctaatgctagatgacacattagtgg

SEQ ID NO: 4516240 - DNA, 25 bp, Homo sapien
agatgacacattagtgggtgcagcg

SEQ ID NO: 4516241 - DNA, 25 bp, Homo sapien
tggcacatgtatacatatgtaacta

SEQ ID NO: 4516242 - DNA, 25 bp, Homo sapien
gacaaagatggacaagcgagcaggc

SEQ ID NO: 4516243 - DNA, 25 bp, Homo sapien
tgtgataagccatgtccaattgcca

SEQ ID NO: 4516244 - DNA, 25 bp, Homo sapien
tctgagggtcttccagagtccgtgc

SEQ ID NO: 4516245 - DNA, 25 bp, Homo sapien
gcgagcaggcctttgtatcactaaa

SEQ ID NO: 4516246 - DNA, 25 bp, Homo sapien
ccatcttgatagtgccagaccatag

SEQ ID NO: 4516247 - DNA, 25 bp, Homo sapien
gtatcttgagttatggtccacctgg

SEQ ID NO: 4516248 - DNA, 25 bp, Homo sapien
agttcacaaggttggactgagggca

SEQ ID NO: 4516249 - DNA, 25 bp, Homo sapien
cagaccataggtatccatccagagg

SEQ ID NO: 4516250 - DNA, 25 bp, Homo sapien
tcaaggttctacttgaagactgagg

SEQ ID NO: 4516251 - DNA, 25 bp, Homo sapien
gagagagacaataccacagctgggc

SEQ ID NO: 4516252 - DNA, 25 bp, Homo sapien
cattgtgtgagtttcgccagcatac

SEQ ID NO: 4516253 - DNA, 25 bp, Homo sapien
tttgcttcaaggttacatcctgaga

SEQ ID NO: 4516254 - DNA, 25 bp, Homo sapien
taacggttctcaggtcttgggcaaa

SEQ ID NO: 4516255 - DNA, 25 bp, Homo sapien
tggtagcatcaaggcaatccggtcc

SEQ ID NO: 4516256 - DNA, 25 bp, Homo sapien
ggtaattcctttgctccggccatgg

SEQ ID NO: 4516257 - DNA, 25 bp, Homo sapien
ctttagatgtccagagaagggcctc

SEQ ID NO: 4516258 - DNA, 25 bp, Homo sapien
tcagactgcacagtcccggacagat

SEQ ID NO: 4516259 - DNA, 25 bp, Homo sapien
tgactccaagtggagcaaagcccag

SEQ ID NO: 4516260 - DNA, 25 bp, Homo sapien
agatgccctcctgtcaatcagctga

SEQ ID NO: 4516261 - DNA, 25 bp, Homo sapien
gcccaggtcttgacgtagatacaga

SEQ ID NO: 4516262 - DNA, 25 bp, Homo sapien
cagtggtgagaaaggttgccaagca

SEQ ID NO: 4516263 - DNA, 25 bp, Homo sapien
tgagaaaggttgccaagcagtgcca

SEQ ID NO: 4516264 - DNA, 25 bp, Homo sapien
gtggtgagaaaggttgccaagcagt

SEQ ID NO: 4516265 - DNA, 25 bp, Homo sapien
ggtgagaaaggttgccaagcagtgc

SEQ ID NO: 4516266 - DNA, 25 bp, Homo sapien
ccacgtttatggttgaaacttctgt

SEQ ID NO: 4516267 - DNA, 25 bp, Homo sapien
cttgcctcgatttttctgatgcaga

SEQ ID NO: 4516268 - DNA, 25 bp, Homo sapien
gtgttccagaggcttgcctcgattt

SEQ ID NO: 4516269 - DNA, 25 bp, Homo sapien
gggtcattcctagtgaggcttcctg

SEQ ID NO: 4516270 - DNA, 25 bp, Homo sapien
cccgtatggcagtaccgcagtggga

SEQ ID NO: 4516271 - DNA, 25 bp, Homo sapien
aagggtcccgtatggcagtaccgca

SEQ ID NO: 4516272 - DNA, 25 bp, Homo sapien
agtgctaagggtcccgtatggcagt

SEQ ID NO: 4516273 - DNA, 25 bp, Homo sapien
gctaagggtcccgtatggcagtacc

SEQ ID NO: 4516274 - DNA, 25 bp, Homo sapien
taagaagaaatattggaagcaggcc

SEQ ID NO: 4516275 - DNA, 25 bp, Homo sapien
tgcaggatctgcatgactcgatgga

SEQ ID NO: 4516276 - DNA, 25 bp, Homo sapien
tagtcttgggtcactcgttagcctg

SEQ ID NO: 4516277 - DNA, 25 bp, Homo sapien
ttattcccgagcttagcaatgtggg

SEQ ID NO: 4516278 - DNA, 25 bp, Homo sapien
gaggagaaaactcggatctgcaggc

SEQ ID NO: 4516279 - DNA, 25 bp, Homo sapien
tggaggagaaaactcggatctgcag

SEQ ID NO: 4516280 - DNA, 25 bp, Homo sapien
ccatggaggagaaaactcggatctg

SEQ ID NO: 4516281 - DNA, 25 bp, Homo sapien
gagaaaactcggatctgcaggctcc

SEQ ID NO: 4516282 - DNA, 25 bp, Homo sapien
tggagggcggtgatcagaaggcgcg

SEQ ID NO: 4516283 - DNA, 25 bp, Homo sapien
gcttctctgcgaagcgcgcttgttc

SEQ ID NO: 4516284 - DNA, 25 bp, Homo sapien
gagatctacaggagaactcagggcg

SEQ ID NO: 4516285 - DNA, 25 bp, Homo sapien
tctgcgttgggctttctggtcgctt

SEQ ID NO: 4516286 - DNA, 25 bp, Homo sapien
ggtgcctgcctgtgtcgtcgtccct

SEQ ID NO: 4516287 - DNA, 25 bp, Homo sapien
tcttcaaacctcaggatttctccgt

SEQ ID NO: 4516288 - DNA, 25 bp, Homo sapien
tcaaacctcaggatttctccgtgtt

SEQ ID NO: 4516289 - DNA, 25 bp, Homo sapien
gtgtcgtcgtccctgtttgttcttc

SEQ ID NO: 4516290 - DNA, 25 bp, Homo sapien
atgccacagagacacacttccagga

SEQ ID NO: 4516291 - DNA, 25 bp, Homo sapien
ccacagagacacacttccaggatct

SEQ ID NO: 4516292 - DNA, 25 bp, Homo sapien
gatgcatgccacagagacacacttc

SEQ ID NO: 4516293 - DNA, 25 bp, Homo sapien
tgcatgccacagagacacacttcca

SEQ ID NO: 4516294 - DNA, 25 bp, Homo sapien
actgaagtgccttcagttatttcag

SEQ ID NO: 4516295 - DNA, 25 bp, Homo sapien
cttgtacacggcagtcagggagaga

SEQ ID NO: 4516296 - DNA, 25 bp, Homo sapien
catgttttccaaggaaaagcaacac

SEQ ID NO: 4516297 - DNA, 25 bp, Homo sapien
gggctgtcttgtacacggcagtcag

SEQ ID NO: 4516298 - DNA, 25 bp, Homo sapien
tcccttccccggcggaatgccacca

SEQ ID NO: 4516299 - DNA, 25 bp, Homo sapien
ttccccggcggaatgccaccaagaa

SEQ ID NO: 4516300 - DNA, 25 bp, Homo sapien
ccggcggaatgccaccaagaaccaa

SEQ ID NO: 4516301 - DNA, 25 bp, Homo sapien
cggcggaatgccaccaagaaccaac

SEQ ID NO: 4516302 - DNA, 25 bp, Homo sapien
cttccagagactaggtgatgggcca

SEQ ID NO: 4516303 - DNA, 25 bp, Homo sapien
cagagactaggtgatgggccacatc

SEQ ID NO: 4516304 - DNA, 25 bp, Homo sapien
aagtgcttccagagactaggtgatg

SEQ ID NO: 4516305 - DNA, 25 bp, Homo sapien
tgcttccagagactaggtgatgggc

SEQ ID NO: 4516306 - DNA, 25 bp, Homo sapien
acacaggtacacttgcttcaggaag

SEQ ID NO: 4516307 - DNA, 25 bp, Homo sapien
cacaggtacacttgcttcaggaaga

SEQ ID NO: 4516308 - DNA, 25 bp, Homo sapien
gaacacaggtacacttgcttcagga

SEQ ID NO: 4516309 - DNA, 25 bp, Homo sapien
aacacaggtacacttgcttcaggaa

SEQ ID NO: 4516310 - DNA, 25 bp, Homo sapien
gctccttaatcgactttgactgtga

SEQ ID NO: 4516311 - DNA, 25 bp, Homo sapien
gttaagggtacagactgcaacagct

SEQ ID NO: 4516312 - DNA, 25 bp, Homo sapien
aagacttatgttccacttcctaggg

SEQ ID NO: 4516313 - DNA, 25 bp, Homo sapien
taatcacctgaatgagatagttcca

SEQ ID NO: 4516314 - DNA, 25 bp, Homo sapien
ggcaaaccagtgcagcaggtgactt

SEQ ID NO: 4516315 - DNA, 25 bp, Homo sapien
catgtggctgccaccagtttcctcc

SEQ ID NO: 4516316 - DNA, 25 bp, Homo sapien
tgacttccgtgaagccggaggcaca

SEQ ID NO: 4516317 - DNA, 25 bp, Homo sapien
actgcggtgttgctggagctgacac

SEQ ID NO: 4516318 - DNA, 25 bp, Homo sapien
ccagttctgaatctgacactaagca

SEQ ID NO: 4516319 - DNA, 25 bp, Homo sapien
agaggtgagcactgttaccactgcc

SEQ ID NO: 4516320 - DNA, 25 bp, Homo sapien
actgccacgggccagttctgaatct

SEQ ID NO: 4516321 - DNA, 25 bp, Homo sapien
gaggtgagcactgttaccactgcca

SEQ ID NO: 4516322 - DNA, 25 bp, Homo sapien
tgagatcagaacctctctgtggggt

SEQ ID NO: 4516323 - DNA, 25 bp, Homo sapien
ctcctccagacgatgcacatcaaag

SEQ ID NO: 4516324 - DNA, 25 bp, Homo sapien
tcctccagacgatgcacatcaaagg

SEQ ID NO: 4516325 - DNA, 25 bp, Homo sapien
tcctcctccagacgatgcacatcaa

SEQ ID NO: 4516326 - DNA, 25 bp, Homo sapien
gaggagaaaactcggatctgcaggc

SEQ ID NO: 4516327 - DNA, 25 bp, Homo sapien
tggaggagaaaactcggatctgcag

SEQ ID NO: 4516328 - DNA, 25 bp, Homo sapien
gagaaaactcggatctgcaggctcc

SEQ ID NO: 4516329 - DNA, 25 bp, Homo sapien
ccatggaggagaaaactcggatctg

SEQ ID NO: 4516330 - DNA, 25 bp, Homo sapien
ttccccagcggaacgccacagagaa

SEQ ID NO: 4516331 - DNA, 25 bp, Homo sapien
ctggccggcgtgttgagcccctgaa

SEQ ID NO: 4516332 - DNA, 25 bp, Homo sapien
catgtgccaagcctgaggtcgggca

SEQ ID NO: 4516333 - DNA, 25 bp, Homo sapien
acagagaaccgacctgatggtgcca

SEQ ID NO: 4516334 - DNA, 25 bp, Homo sapien
cacaggtacacttgcttcaggaaga

SEQ ID NO: 4516335 - DNA, 25 bp, Homo sapien
acacaggtacacttgcttcaggaag

SEQ ID NO: 4516336 - DNA, 25 bp, Homo sapien
gaacacaggtacacttgcttcagga

SEQ ID NO: 4516337 - DNA, 25 bp, Homo sapien
aacacaggtacacttgcttcaggaa

SEQ ID NO: 4516338 - DNA, 25 bp, Homo sapien
actgcggtgttgctggagccgacac

SEQ ID NO: 4516339 - DNA, 25 bp, Homo sapien
ggcaaaccagtgcagcaggtgactt

SEQ ID NO: 4516340 - DNA, 25 bp, Homo sapien
tggagccgacactgctgtgctgcac

SEQ ID NO: 4516341 - DNA, 25 bp, Homo sapien
tgacttccgtgaagccagaggcaca

SEQ ID NO: 4516342 - DNA, 25 bp, Homo sapien
acaacttcctgttcaacacgctgct

SEQ ID NO: 4516343 - DNA, 25 bp, Homo sapien
tgttcaacacgctgctggacagcac

SEQ ID NO: 4516344 - DNA, 25 bp, Homo sapien
ctgctggacagcaccagggttgttt

SEQ ID NO: 4516345 - DNA, 25 bp, Homo sapien
tgctggacagcaccagggttgtttc

SEQ ID NO: 4516346 - DNA, 25 bp, Homo sapien
cagtgagtttgctactgttattttc

SEQ ID NO: 4516347 - DNA, 25 bp, Homo sapien
gcagtgagtttgctactgttatttt

SEQ ID NO: 4516348 - DNA, 25 bp, Homo sapien
cagcagtgagtttgctactgttatt

SEQ ID NO: 4516349 - DNA, 25 bp, Homo sapien
gtgagtttgctactgttattttcta

SEQ ID NO: 4516350 - DNA, 25 bp, Homo sapien
cagcattgattcctgtagacagtac

SEQ ID NO: 4516351 - DNA, 25 bp, Homo sapien
tatgaacaagtgtgtccatggcaca

SEQ ID NO: 4516352 - DNA, 25 bp, Homo sapien
gagggctgtgggtttgaaggactac

SEQ ID NO: 4516353 - DNA, 25 bp, Homo sapien
gagctctgtatgtctctgttatggg

SEQ ID NO: 4516354 - DNA, 25 bp, Homo sapien
ttttaaatgtgtttactcttgcttc

SEQ ID NO: 4516355 - DNA, 25 bp, Homo sapien
ttaaatgtgtttactcttgcttctc

SEQ ID NO: 4516356 - DNA, 25 bp, Homo sapien
aaatgtgtttactcttgcttctcta

SEQ ID NO: 4516357 - DNA, 25 bp, Homo sapien
taaatgtgtttactcttgcttctct

SEQ ID NO: 4516358 - DNA, 25 bp, Homo sapien
gagaggaatacattctgtgtagagg

SEQ ID NO: 4516359 - DNA, 25 bp, Homo sapien
aaatgtctagatctagtttcttgaa

SEQ ID NO: 4516360 - DNA, 25 bp, Homo sapien
ttagcccatgtggtctgcccatcag

SEQ ID NO: 4516361 - DNA, 25 bp, Homo sapien
gaaatgttactttagcccatgtggt

SEQ ID NO: 4516362 - DNA, 25 bp, Homo sapien
tgctatcagtttaaaaacaatgggt

SEQ ID NO: 4516363 - DNA, 25 bp, Homo sapien
ctatcagtttaaaaacaatgggtca

SEQ ID NO: 4516364 - DNA, 25 bp, Homo sapien
gctatcagtttaaaaacaatgggtc

SEQ ID NO: 4516365 - DNA, 25 bp, Homo sapien
atattgcaaagtctagggcaggctg

SEQ ID NO: 4516366 - DNA, 25 bp, Homo sapien
ttgcaaagtctagggcaggctgttc

SEQ ID NO: 4516367 - DNA, 25 bp, Homo sapien
taaaagggggcttagattcattgta

SEQ ID NO: 4516368 - DNA, 25 bp, Homo sapien
tcattgtaaatgcatattgcaaagt

SEQ ID NO: 4516369 - DNA, 25 bp, Homo sapien
gcctctggagggaaatgtctaccac

SEQ ID NO: 4516370 - DNA, 25 bp, Homo sapien
tgccttcaccacgtgagccggcggt

SEQ ID NO: 4516371 - DNA, 25 bp, Homo sapien
tggacaccccagttccgtaaggatc

SEQ ID NO: 4516372 - DNA, 25 bp, Homo sapien
cccttagcagcggagaagcatcgtc

SEQ ID NO: 4516373 - DNA, 25 bp, Homo sapien
ccttgcagtattaccagggacaaat

SEQ ID NO: 4516374 - DNA, 25 bp, Homo sapien
tacagttccagaggatcaaagctcc

SEQ ID NO: 4516375 - DNA, 25 bp, Homo sapien
ggcctgattcattcgctctaaattg

SEQ ID NO: 4516376 - DNA, 25 bp, Homo sapien
cctaacttttgtaatcagaactgcc

SEQ ID NO: 4516377 - DNA, 25 bp, Homo sapien
tagatagtgctggttagagaagcca

SEQ ID NO: 4516378 - DNA, 25 bp, Homo sapien
cctagatagtgctggttagagaagc

SEQ ID NO: 4516379 - DNA, 25 bp, Homo sapien
ggcccactgtgtcaatgtcaggact

SEQ ID NO: 4516380 - DNA, 25 bp, Homo sapien
tgggcccactgtgtcaatgtcagga

SEQ ID NO: 4516381 - DNA, 25 bp, Homo sapien
tatcatgagtcgaattcctggaaca

SEQ ID NO: 4516382 - DNA, 25 bp, Homo sapien
cttgcttctgttgccacgcgtaccc

SEQ ID NO: 4516383 - DNA, 25 bp, Homo sapien
cccatagggtatcatgagtcgaatt

SEQ ID NO: 4516384 - DNA, 25 bp, Homo sapien
gagtcgaattcctggaacaatgtgc

SEQ ID NO: 4516385 - DNA, 25 bp, Homo sapien
agctacttgacactcccaggtgctc

SEQ ID NO: 4516386 - DNA, 25 bp, Homo sapien
gaagctacttgacactcccaggtgc

SEQ ID NO: 4516387 - DNA, 25 bp, Homo sapien
tagaagctacttgacactcccaggt

SEQ ID NO: 4516388 - DNA, 25 bp, Homo sapien
aatagaagctacttgacactcccag

SEQ ID NO: 4516389 - DNA, 25 bp, Homo sapien
ccttgggagcctgattgtccctgta

SEQ ID NO: 4516390 - DNA, 25 bp, Homo sapien
cttgggagcctgattgtccctgtat

SEQ ID NO: 4516391 - DNA, 25 bp, Homo sapien
tccttgggagcctgattgtccctgt

SEQ ID NO: 4516392 - DNA, 25 bp, Homo sapien
ccattgaacaatggcttggctgcag

SEQ ID NO: 4516393 - DNA, 25 bp, Homo sapien
gaggcatccctggttgcatcctact

SEQ ID NO: 4516394 - DNA, 25 bp, Homo sapien
ggacttggtcctactccattgaaca

SEQ ID NO: 4516395 - DNA, 25 bp, Homo sapien
tggcaggtttttgaagaggcatccc

SEQ ID NO: 4516396 - DNA, 25 bp, Homo sapien
gctgtcccctgggatagtttgaaga

SEQ ID NO: 4516397 - DNA, 25 bp, Homo sapien
aaagatgtttctctacgtcattcat

SEQ ID NO: 4516398 - DNA, 25 bp, Homo sapien
ctgtcccctgggatagtttgaagaa

SEQ ID NO: 4516399 - DNA, 25 bp, Homo sapien
cagctgtcccctgggatagtttgaa

SEQ ID NO: 4516400 - DNA, 25 bp, Homo sapien
aaaaagctgtagacattgtctggaa

SEQ ID NO: 4516401 - DNA, 25 bp, Homo sapien
gcttatggcgtctgctaggagtctc

SEQ ID NO: 4516402 - DNA, 25 bp, Homo sapien
tggcgtgaatgtcgctggtctcccg

SEQ ID NO: 4516403 - DNA, 25 bp, Homo sapien
cccgcagtgcgctgtaggaaggtca

SEQ ID NO: 4516404 - DNA, 25 bp, Homo sapien
cattgttcggcgcagcgaaacagcc

SEQ ID NO: 4516405 - DNA, 25 bp, Homo sapien
tggccgcagccactgtagctgagct

SEQ ID NO: 4516406 - DNA, 25 bp, Homo sapien
tgcctcctgcgcaagcgcagttgtc

SEQ ID NO: 4516407 - DNA, 25 bp, Homo sapien
ggtactttgtactcctccagcaaca

SEQ ID NO: 4516408 - DNA, 25 bp, Homo sapien
ggctcctcattatggttgcctggtt

SEQ ID NO: 4516409 - DNA, 25 bp, Homo sapien
gggctatttgaggaatgcggccttt

SEQ ID NO: 4516410 - DNA, 25 bp, Homo sapien
gctatttgaggaatgcggccttttt

SEQ ID NO: 4516411 - DNA, 25 bp, Homo sapien
tggtttgcgggggcaaggtcagctg

SEQ ID NO: 4516412 - DNA, 25 bp, Homo sapien
tatttgaggaatgcggcctttttgc

SEQ ID NO: 4516413 - DNA, 25 bp, Homo sapien
atttccttcctctctgttgggctac

SEQ ID NO: 4516414 - DNA, 25 bp, Homo sapien
catatttccttcctctctgttgggc

SEQ ID NO: 4516415 - DNA, 25 bp, Homo sapien
ttatacatatttccttcctctctgt

SEQ ID NO: 4516416 - DNA, 25 bp, Homo sapien
acatatttccttcctctctgttggg

SEQ ID NO: 4516417 - DNA, 25 bp, Homo sapien
caagatggccgtgtcatgtaaaggg

SEQ ID NO: 4516418 - DNA, 25 bp, Homo sapien
gccgtgtcatgtaaagggctgtgtc

SEQ ID NO: 4516419 - DNA, 25 bp, Homo sapien
tttatccttgggattgttgcaagat

SEQ ID NO: 4516420 - DNA, 25 bp, Homo sapien
ggattgttgcaagatggccgtgtca

SEQ ID NO: 4516421 - DNA, 25 bp, Homo sapien
gcagacatccttcttgcgcaagcgc

SEQ ID NO: 4516422 - DNA, 25 bp, Homo sapien
tgcgcaagcgcagttgtaccatgaa

SEQ ID NO: 4516423 - DNA, 25 bp, Homo sapien
catgaatgcggtcgtcctgctgcag

SEQ ID NO: 4516424 - DNA, 25 bp, Homo sapien
cagttgtaccatgaatgcggtcgtc

SEQ ID NO: 4516425 - DNA, 25 bp, Homo sapien
tcaagacaagggaactataatagag

SEQ ID NO: 4516426 - DNA, 25 bp, Homo sapien
tgtgaatttgtaaccacccaaggga

SEQ ID NO: 4516427 - DNA, 25 bp, Homo sapien
gaagcaagaattcacccagagccgg

SEQ ID NO: 4516428 - DNA, 25 bp, Homo sapien
aacctttgacactcctctgaggtag

SEQ ID NO: 4516429 - DNA, 25 bp, Homo sapien
gtttcaaattgatggcttagtgtcc

SEQ ID NO: 4516430 - DNA, 25 bp, Homo sapien
ctgaagaaacaatttagggctccaa

SEQ ID NO: 4516431 - DNA, 25 bp, Homo sapien
tagtgtcctgggtagtgaaaatgga

SEQ ID NO: 4516432 - DNA, 25 bp, Homo sapien
tgaaaatggaattcctcaacctgaa

SEQ ID NO: 4516433 - DNA, 25 bp, Homo sapien
ggtctcactgctacccacatggcta

SEQ ID NO: 4516434 - DNA, 25 bp, Homo sapien
tgagcggccgacaaacccgcagtgc

SEQ ID NO: 4516435 - DNA, 25 bp, Homo sapien
aatgtgccaccgttctgagcggccg

SEQ ID NO: 4516436 - DNA, 25 bp, Homo sapien
cacgcagcccgcaagaaatgtgcca

SEQ ID NO: 4516437 - DNA, 25 bp, Homo sapien
catttgaataatgacggtccatgca

SEQ ID NO: 4516438 - DNA, 25 bp, Homo sapien
tttgaataatgacggtccatgcagg

SEQ ID NO: 4516439 - DNA, 25 bp, Homo sapien
acatttgaataatgacggtccatgc

SEQ ID NO: 4516440 - DNA, 25 bp, Homo sapien
tgaataatgacggtccatgcaggct

SEQ ID NO: 4516441 - DNA, 25 bp, Homo sapien
tcccacatctctgcaacattgtatc

SEQ ID NO: 4516442 - DNA, 25 bp, Homo sapien
gggatagacaagggaggcctcttgt

SEQ ID NO: 4516443 - DNA, 25 bp, Homo sapien
ggatagacaagggaggcctcttgtt

SEQ ID NO: 4516444 - DNA, 25 bp, Homo sapien
gatagacaagggaggcctcttgttc

SEQ ID NO: 4516445 - DNA, 25 bp, Homo sapien
ccaggaagccaaatgagtgaggatg

SEQ ID NO: 4516446 - DNA, 25 bp, Homo sapien
agtgaggatggtctgtgtccgctgg

SEQ ID NO: 4516447 - DNA, 25 bp, Homo sapien
gggaggtccctggatgttgccaaga

SEQ ID NO: 4516448 - DNA, 25 bp, Homo sapien
ccatgaggtctgcatgccaggaagc

SEQ ID NO: 4516449 - DNA, 25 bp, Homo sapien
aggtacagtaggtggtgcctgaagc

SEQ ID NO: 4516450 - DNA, 25 bp, Homo sapien
gtacagtaggtggtgcctgaagcat

SEQ ID NO: 4516451 - DNA, 25 bp, Homo sapien
tgaggtacagtaggtggtgcctgaa

SEQ ID NO: 4516452 - DNA, 25 bp, Homo sapien
ccctgaggtacagtaggtggtgcct

SEQ ID NO: 4516453 - DNA, 25 bp, Homo sapien
tgggacttggtagaagataactgct

SEQ ID NO: 4516454 - DNA, 25 bp, Homo sapien
cccagcaacagacacaaaggtgatt

SEQ ID NO: 4516455 - DNA, 25 bp, Homo sapien
ttacaaggttaacgagtgagactcc

SEQ ID NO: 4516456 - DNA, 25 bp, Homo sapien
gagtccagagatcagccagtcaaga

SEQ ID NO: 4516457 - DNA, 25 bp, Homo sapien
catcatagaaaattgtttggtttag

SEQ ID NO: 4516458 - DNA, 25 bp, Homo sapien
aagtttattgtctgtatctgaaaaa

SEQ ID NO: 4516459 - DNA, 25 bp, Homo sapien
cattcttttgagctacccaatcctt

SEQ ID NO: 4516460 - DNA, 25 bp, Homo sapien
tgcattcttttgagctacccaatcc

SEQ ID NO: 4516461 - DNA, 25 bp, Homo sapien
cttccttatacatttcctccatcat

SEQ ID NO: 4516462 - DNA, 25 bp, Homo sapien
cagcatgagcttccttatacatttc

SEQ ID NO: 4516463 - DNA, 25 bp, Homo sapien
tgagcttccttatacatttcctcca

SEQ ID NO: 4516464 - DNA, 25 bp, Homo sapien
agcatgagcttccttatacatttcc

SEQ ID NO: 4516465 - DNA, 25 bp, Homo sapien
agcacatgtaatcggcaacattctg

SEQ ID NO: 4516466 - DNA, 25 bp, Homo sapien
tcttcttccattaagtagcacatgt

SEQ ID NO: 4516467 - DNA, 25 bp, Homo sapien
taagtagcacatgtaatcggcaaca

SEQ ID NO: 4516468 - DNA, 25 bp, Homo sapien
aatgctttccacaatgtattcatcg

SEQ ID NO: 4516469 - DNA, 25 bp, Homo sapien
ggccagcggcaggccagtacaatat

SEQ ID NO: 4516470 - DNA, 25 bp, Homo sapien
aaacctactgagaagcctgcgggcc

SEQ ID NO: 4516471 - DNA, 25 bp, Homo sapien
actgagaagcctgcgggccagcggc

SEQ ID NO: 4516472 - DNA, 25 bp, Homo sapien
tgccaaacctactgagaagcctgcg

SEQ ID NO: 4516473 - DNA, 25 bp, Homo sapien
gatatctctgtttgttacacgaact

SEQ ID NO: 4516474 - DNA, 25 bp, Homo sapien
tatcatatccccctctatatgggca

SEQ ID NO: 4516475 - DNA, 25 bp, Homo sapien
atctctgtttgttacacgaactatc

SEQ ID NO: 4516476 - DNA, 25 bp, Homo sapien
aatgatatctctgtttgttacacga

SEQ ID NO: 4516477 - DNA, 25 bp, Homo sapien
ctgtatttgagtgtgttgtatttat

SEQ ID NO: 4516478 - DNA, 25 bp, Homo sapien
tgagtgtgttgtatttatttttatc

SEQ ID NO: 4516479 - DNA, 25 bp, Homo sapien
tgtatttgagtgtgttgtatttatt

SEQ ID NO: 4516480 - DNA, 25 bp, Homo sapien
tatttgagtgtgttgtatttatttt

SEQ ID NO: 4516481 - DNA, 25 bp, Homo sapien
cgtttccgagtatcgtaatcagttt

SEQ ID NO: 4516482 - DNA, 25 bp, Homo sapien
tttaccctctcatcatcgtcttcta

SEQ ID NO: 4516483 - DNA, 25 bp, Homo sapien
ccaagcgtttccgagtatcgtaatc

SEQ ID NO: 4516484 - DNA, 25 bp, Homo sapien
ttaccctctcatcatcgtcttctaa

SEQ ID NO: 4516485 - DNA, 25 bp, Homo sapien
gtccacagctcaacagagaccagca

SEQ ID NO: 4516486 - DNA, 25 bp, Homo sapien
ctgcagaacagagacccgcgtccac

SEQ ID NO: 4516487 - DNA, 25 bp, Homo sapien
cgcgtccacagctcaacagagacca

SEQ ID NO: 4516488 - DNA, 25 bp, Homo sapien
gcagaacagagacccgcgtccacag

SEQ ID NO: 4516489 - DNA, 25 bp, Homo sapien
acacccaaaaccactgttggcacat

SEQ ID NO: 4516490 - DNA, 25 bp, Homo sapien
aaccactgttggcacatggctaaag

SEQ ID NO: 4516491 - DNA, 25 bp, Homo sapien
caaaaccactgttggcacatggcta

SEQ ID NO: 4516492 - DNA, 25 bp, Homo sapien
actgttggcacatggctaaagaccg

SEQ ID NO: 4516493 - DNA, 25 bp, Homo sapien
tgtttcggagagttacccaggtgta

SEQ ID NO: 4516494 - DNA, 25 bp, Homo sapien
ggtgtagtacccttccaagtagata

SEQ ID NO: 4516495 - DNA, 25 bp, Homo sapien
gatgggtcagtgacagtccatgatt

SEQ ID NO: 4516496 - DNA, 25 bp, Homo sapien
gcagtgaagcgaagctcagacatca

SEQ ID NO: 4516497 - DNA, 25 bp, Homo sapien
gtagagggtacatggcattcattga

SEQ ID NO: 4516498 - DNA, 25 bp, Homo sapien
aggcagtcttctggtaagatacggg

SEQ ID NO: 4516499 - DNA, 25 bp, Homo sapien
tggcattcattgaaggattttcatc

SEQ ID NO: 4516500 - DNA, 25 bp, Homo sapien
gcaggcccattgagtagagggtaca

SEQ ID NO: 4516501 - DNA, 25 bp, Homo sapien
taaaacataggcatggtaagaatat

SEQ ID NO: 4516502 - DNA, 25 bp, Homo sapien
atggtaagaatatgtgcaaaggcca

SEQ ID NO: 4516503 - DNA, 25 bp, Homo sapien
aaaacataggcatggtaagaatatg

SEQ ID NO: 4516504 - DNA, 25 bp, Homo sapien
gtaagaatatgtgcaaaggccatgg

SEQ ID NO: 4516505 - DNA, 25 bp, Homo sapien
gcagaaaggcctgttgggttagttc

SEQ ID NO: 4516506 - DNA, 25 bp, Homo sapien
tcctgggctccagtgctcaatgtgt

SEQ ID NO: 4516507 - DNA, 25 bp, Homo sapien
ctgggctccagtgctcaatgtgtgt

SEQ ID NO: 4516508 - DNA, 25 bp, Homo sapien
gagcagaaaggcctgttgggttagt

SEQ ID NO: 4516509 - DNA, 25 bp, Homo sapien
cattgatcccaggttgcttatggtt

SEQ ID NO: 4516510 - DNA, 25 bp, Homo sapien
aaacaggtagacatgtccattgatc

SEQ ID NO: 4516511 - DNA, 25 bp, Homo sapien
gttgcttatggtttctagaggcccc

SEQ ID NO: 4516512 - DNA, 25 bp, Homo sapien
ccccaggtcattccggtgagggagg

SEQ ID NO: 4516513 - DNA, 25 bp, Homo sapien
tgcctgacgcatctgtctgaggagc

SEQ ID NO: 4516514 - DNA, 25 bp, Homo sapien
ttgtgccgttctgccccgatggtat

SEQ ID NO: 4516515 - DNA, 25 bp, Homo sapien
gatccggaatgttcagaggcttgct

SEQ ID NO: 4516516 - DNA, 25 bp, Homo sapien
ggagcggccacttttattcatcaga

SEQ ID NO: 4516517 - DNA, 25 bp, Homo sapien
gcagcggcttagatctgcgcaagcg

SEQ ID NO: 4516518 - DNA, 25 bp, Homo sapien
tcagcgggggggtggccgcttcctc

SEQ ID NO: 4516519 - DNA, 25 bp, Homo sapien
tgcgcaagcgcttcagcgggggggt

SEQ ID NO: 4516520 - DNA, 25 bp, Homo sapien
gctgcagcggcttagatctgcgcaa

SEQ ID NO: 4516521 - DNA, 25 bp, Homo sapien
tgctgtttcggagtttcagccgtac

SEQ ID NO: 4516522 - DNA, 25 bp, Homo sapien
gctgtttcggagtttcagccgtacc

SEQ ID NO: 4516523 - DNA, 25 bp, Homo sapien
cttctgctgtttcggagtttcagcc

SEQ ID NO: 4516524 - DNA, 25 bp, Homo sapien
tctgctgtttcggagtttcagccgt

SEQ ID NO: 4516525 - DNA, 25 bp, Homo sapien
agcttttgcctggaaggaatggcag

SEQ ID NO: 4516526 - DNA, 25 bp, Homo sapien
gcagcttttgcctggaaggaatggc

SEQ ID NO: 4516527 - DNA, 25 bp, Homo sapien
cttttgcctggaaggaatggcagcc

SEQ ID NO: 4516528 - DNA, 25 bp, Homo sapien
tttgcctggaaggaatggcagccct

SEQ ID NO: 4516529 - DNA, 25 bp, Homo sapien
cgcaggctccgcctagcaagcttgg

SEQ ID NO: 4516530 - DNA, 25 bp, Homo sapien
gagggagatgggttggcgcaggctc

SEQ ID NO: 4516531 - DNA, 25 bp, Homo sapien
cagctgttcctttccggttgtggcg

SEQ ID NO: 4516532 - DNA, 25 bp, Homo sapien
cctttccggttgtggcgcagtagag

SEQ ID NO: 4516533 - DNA, 25 bp, Homo sapien
cttacccacggtgcagcagtagagg

SEQ ID NO: 4516534 - DNA, 25 bp, Homo sapien
ttacccacggtgcagcagtagagga

SEQ ID NO: 4516535 - DNA, 25 bp, Homo sapien
ggagaggacatcgtgatggctcttc

SEQ ID NO: 4516536 - DNA, 25 bp, Homo sapien
tggggttgtgctttggatcagttac

SEQ ID NO: 4516537 - DNA, 25 bp, Homo sapien
tgaaaggtgtttcaaacactggacc

SEQ ID NO: 4516538 - DNA, 25 bp, Homo sapien
gtgatggctcttcccgactaaggtt

SEQ ID NO: 4516539 - DNA, 25 bp, Homo sapien
ttaaaggttcataggtggtttctgc

SEQ ID NO: 4516540 - DNA, 25 bp, Homo sapien
aaggttcataggtggtttctgcagt

SEQ ID NO: 4516541 - DNA, 25 bp, Homo sapien
tttctgcagtccctaatatggctag

SEQ ID NO: 4516542 - DNA, 25 bp, Homo sapien
tggctagtctggtgtgggatttcat

SEQ ID NO: 4516543 - DNA, 25 bp, Homo sapien
gtcaggagttcgagaccagcctggc

SEQ ID NO: 4516544 - DNA, 25 bp, Homo sapien
aattaaccgagtgtggtggcacgtg

SEQ ID NO: 4516545 - DNA, 25 bp, Homo sapien
ggaggctaagccaggcggatcacaa

SEQ ID NO: 4516546 - DNA, 25 bp, Homo sapien
aaaattaaccgagtgtggtggcacg

SEQ ID NO: 4516547 - DNA, 25 bp, Homo sapien
accccgaaggcagtgtttgtggtga

SEQ ID NO: 4516548 - DNA, 25 bp, Homo sapien
tagcgaggaatctgattccaagcaa

SEQ ID NO: 4516549 - DNA, 25 bp, Homo sapien
ggttaaagccatattggagtagcga

SEQ ID NO: 4516550 - DNA, 25 bp, Homo sapien
agttgtacccgaggcgttctcagca

SEQ ID NO: 4516551 - DNA, 25 bp, Homo sapien
gcaagtacctgtggtggatttccag

SEQ ID NO: 4516552 - DNA, 25 bp, Homo sapien
tattccagttattgtagcgcatgct

SEQ ID NO: 4516553 - DNA, 25 bp, Homo sapien
ttctgccagtagtttgaacaaagct

SEQ ID NO: 4516554 - DNA, 25 bp, Homo sapien
tggctcttgaataccctgttactga

SEQ ID NO: 4516555 - DNA, 25 bp, Homo sapien
tttctgccctgacactttcgtcatg

SEQ ID NO: 4516556 - DNA, 25 bp, Homo sapien
tgagtttaaatcaaaggagacagaa

SEQ ID NO: 4516557 - DNA, 25 bp, Homo sapien
cattgaataggtgtgcacaactgat

SEQ ID NO: 4516558 - DNA, 25 bp, Homo sapien
tacattatagtctgcaagtaggacc

SEQ ID NO: 4516559 - DNA, 25 bp, Homo sapien
ggtaatatatctggaccactacctg

SEQ ID NO: 4516560 - DNA, 25 bp, Homo sapien
cacattggtgctacggtggtgcagc

SEQ ID NO: 4516561 - DNA, 25 bp, Homo sapien
taattctgatttgtaggccaaagaa

SEQ ID NO: 4516562 - DNA, 25 bp, Homo sapien
tctctttgcctatcactgttcccat

SEQ ID NO: 4516563 - DNA, 25 bp, Homo sapien
gaatgcgaagcaaccagagcgtgaa

SEQ ID NO: 4516564 - DNA, 25 bp, Homo sapien
gaacagttgttcttcatggttgagg

SEQ ID NO: 4516565 - DNA, 25 bp, Homo sapien
ccctgctcgagggacgccaataggc

SEQ ID NO: 4516566 - DNA, 25 bp, Homo sapien
gccaataggcatgccgcctccggga

SEQ ID NO: 4516567 - DNA, 25 bp, Homo sapien
tttttcactgtaggcattatggctc

SEQ ID NO: 4516568 - DNA, 25 bp, Homo sapien
cacctggtatgagaccacccatggg

SEQ ID NO: 4516569 - DNA, 25 bp, Homo sapien
gaatggtttttgattgatctcacaa

SEQ ID NO: 4516570 - DNA, 25 bp, Homo sapien
gaacaatgggctgttgtattcaact

SEQ ID NO: 4516571 - DNA, 25 bp, Homo sapien
accatgaaacagagtattggattac

SEQ ID NO: 4516572 - DNA, 25 bp, Homo sapien
catgtgctttagacattaatgcagc

SEQ ID NO: 4516573 - DNA, 25 bp, Homo sapien
caactgtgtctctcaggtgatgact

SEQ ID NO: 4516574 - DNA, 25 bp, Homo sapien
cccttgtaatgttagtctctttgta

SEQ ID NO: 4516575 - DNA, 25 bp, Homo sapien
gctgtacaaacatcagataatcaat

SEQ ID NO: 4516576 - DNA, 25 bp, Homo sapien
catatagccttataactcatttgtg

SEQ ID NO: 4516577 - DNA, 25 bp, Homo sapien
taaactccccatgactctagtaagt

SEQ ID NO: 4516578 - DNA, 25 bp, Homo sapien
aataattataactcgggtatctaat

SEQ ID NO: 4516579 - DNA, 25 bp, Homo sapien
ataattataactcgggtatctaatg

SEQ ID NO: 4516580 - DNA, 25 bp, Homo sapien
aatattataactcaggtatctaatg

SEQ ID NO: 4516581 - DNA, 25 bp, Homo sapien
ttcacaagcatcttcaatagtcaag

SEQ ID NO: 4516582 - DNA, 25 bp, Homo sapien
ttaacaccctttctttcgatgagtg

SEQ ID NO: 4516583 - DNA, 25 bp, Homo sapien
atagtcaaggaggacaaagacatct

SEQ ID NO: 4516584 - DNA, 25 bp, Homo sapien
aacaccctttctttcgatgagtgaa

SEQ ID NO: 4516585 - DNA, 25 bp, Homo sapien
cagtcatttccaagatttagcgagt

SEQ ID NO: 4516586 - DNA, 25 bp, Homo sapien
caagttaggtaggatgaagatcact

SEQ ID NO: 4516587 - DNA, 25 bp, Homo sapien
tcaacaactgctagggagggttggt

SEQ ID NO: 4516588 - DNA, 25 bp, Homo sapien
ccctaatgccttggataagaatgcc

SEQ ID NO: 4516589 - DNA, 25 bp, Homo sapien
tttggcttgtgtcagacatttagca

SEQ ID NO: 4516590 - DNA, 25 bp, Homo sapien
catttagcaaagattgttgaggaaa

SEQ ID NO: 4516591 - DNA, 25 bp, Homo sapien
ttacggcaggattgcatttcattgt

SEQ ID NO: 4516592 - DNA, 25 bp, Homo sapien
gaaaaagtaacaacctaatgatgga

SEQ ID NO: 4516593 - DNA, 25 bp, Homo sapien
tgttgtatttgatgtgctatcctat

SEQ ID NO: 4516594 - DNA, 25 bp, Homo sapien
atgcccgcgccaaccagttctttat

SEQ ID NO: 4516595 - DNA, 25 bp, Homo sapien
tgcccgcgccaaccagttctttatt

SEQ ID NO: 4516596 - DNA, 25 bp, Homo sapien
gatgtgctatcctattcatttagta

SEQ ID NO: 4516597 - DNA, 25 bp, Homo sapien
tcttcccaggagagtaatgggctcc

SEQ ID NO: 4516598 - DNA, 25 bp, Homo sapien
tactcgtcacacttggagctatcca

SEQ ID NO: 4516599 - DNA, 25 bp, Homo sapien
tcagtcctgaaggtccagagtgaat

SEQ ID NO: 4516600 - DNA, 25 bp, Homo sapien
aagtctgtgccgtaggtactcgtca

SEQ ID NO: 4516601 - DNA, 25 bp, Homo sapien
catgcatgtagacccagtggtggtg

SEQ ID NO: 4516602 - DNA, 25 bp, Homo sapien
tgcatgtagacccagtggtggtgtt

SEQ ID NO: 4516603 - DNA, 25 bp, Homo sapien
gcatgtagacccagtggtggtgttc

SEQ ID NO: 4516604 - DNA, 25 bp, Homo sapien
tgcatgcatgtagacccagtggtgg

SEQ ID NO: 4516605 - DNA, 25 bp, Homo sapien
tctcgtcttcctgacagagtagtgg

SEQ ID NO: 4516606 - DNA, 25 bp, Homo sapien
ccttggtcacttctcgtcttcctga

SEQ ID NO: 4516607 - DNA, 25 bp, Homo sapien
ttggcccgccattgccgagcggcca

SEQ ID NO: 4516608 - DNA, 25 bp, Homo sapien
ggttccagggaatacaagggtcaga

SEQ ID NO: 4516609 - DNA, 25 bp, Homo sapien
gaaggcgtccagagggtatgtgtcc

SEQ ID NO: 4516610 - DNA, 25 bp, Homo sapien
ctgaaggcgtccagagggtatgtgt

SEQ ID NO: 4516611 - DNA, 25 bp, Homo sapien
tgaaggcgtccagagggtatgtgtc

SEQ ID NO: 4516612 - DNA, 25 bp, Homo sapien
tggttttccgccaagtgagcctcac

SEQ ID NO: 4516613 - DNA, 25 bp, Homo sapien
gttggttttccgccaagtgagcctc

SEQ ID NO: 4516614 - DNA, 25 bp, Homo sapien
tggttggttttccgccaagtgagcc

SEQ ID NO: 4516615 - DNA, 25 bp, Homo sapien
tgtggttggttttccgccaagtgag

SEQ ID NO: 4516616 - DNA, 25 bp, Homo sapien
gaggttctaccactcagggcgtcca

SEQ ID NO: 4516617 - DNA, 25 bp, Homo sapien
tcccagaggttctaccactcagggc

SEQ ID NO: 4516618 - DNA, 25 bp, Homo sapien
ctggttcccagaggttctaccactc

SEQ ID NO: 4516619 - DNA, 25 bp, Homo sapien
cagaggttctaccactcagggcgtc

SEQ ID NO: 4516620 - DNA, 25 bp, Homo sapien
ggatgaaagtctcacatcacaggca

SEQ ID NO: 4516621 - DNA, 25 bp, Homo sapien
tgaggtatacaagtaggagagtcat

SEQ ID NO: 4516622 - DNA, 25 bp, Homo sapien
caatagaaatattccctctgtgtga

SEQ ID NO: 4516623 - DNA, 25 bp, Homo sapien
gaaagtctcacatcacaggcacaat

SEQ ID NO: 4516624 - DNA, 25 bp, Homo sapien
tgaaagtggcttccatcctgaagac

SEQ ID NO: 4516625 - DNA, 25 bp, Homo sapien
ggtctcttggccctccattgctgag

SEQ ID NO: 4516626 - DNA, 25 bp, Homo sapien
tcccggcagaatagtgggctccacc

SEQ ID NO: 4516627 - DNA, 25 bp, Homo sapien
ggtcacttctggtcttcccggcaga

SEQ ID NO: 4516628 - DNA, 25 bp, Homo sapien
agagagtcccttgatttgagttgcc

SEQ ID NO: 4516629 - DNA, 25 bp, Homo sapien
agtcccttgatttgagttgcctcta

SEQ ID NO: 4516630 - DNA, 25 bp, Homo sapien
ttgatttgagttgcctctactcctc

SEQ ID NO: 4516631 - DNA, 25 bp, Homo sapien
cttccatagagagtcccttgatttg

SEQ ID NO: 4516632 - DNA, 25 bp, Homo sapien
atcgatgcaaggatgatggaaggca

SEQ ID NO: 4516633 - DNA, 25 bp, Homo sapien
tcctgcatccaagttggctgcgtgg

SEQ ID NO: 4516634 - DNA, 25 bp, Homo sapien
ttgtcagatgtcgttgagcaggtgt

SEQ ID NO: 4516635 - DNA, 25 bp, Homo sapien
tcggaggtcggtgcaaggaaggcct

SEQ ID NO: 4516636 - DNA, 25 bp, Homo sapien
gtggccctgggtcactccgatcttc

SEQ ID NO: 4516637 - DNA, 25 bp, Homo sapien
tcctctgatggatgacaggtcgggc

SEQ ID NO: 4516638 - DNA, 25 bp, Homo sapien
tggtgctgggctttccgtgtattcc

SEQ ID NO: 4516639 - DNA, 25 bp, Homo sapien
cgatcttcctggcagagtaatgggc

SEQ ID NO: 4516640 - DNA, 25 bp, Homo sapien
tcccgtgggttccaatcatgcatgg

SEQ ID NO: 4516641 - DNA, 25 bp, Homo sapien
gaggtccgtgtccattccgggcaat

SEQ ID NO: 4516642 - DNA, 25 bp, Homo sapien
tccacgcctctgcatgttggcaatg

SEQ ID NO: 4516643 - DNA, 25 bp, Homo sapien
ggtgttgccacggaaagtctcttga

SEQ ID NO: 4516644 - DNA, 25 bp, Homo sapien
cctggatttggtgtggcctggcatc

SEQ ID NO: 4516645 - DNA, 25 bp, Homo sapien
tggcccaggacggtaagcatttttc

SEQ ID NO: 4516646 - DNA, 25 bp, Homo sapien
agatggtcgatgcttctgagaaaca

SEQ ID NO: 4516647 - DNA, 25 bp, Homo sapien
ggtaagcatttttctgccccgtgtg

SEQ ID NO: 4516648 - DNA, 25 bp, Homo sapien
cccataggttccaccaccgaggaca

SEQ ID NO: 4516649 - DNA, 25 bp, Homo sapien
taggttccaccaccgaggacatcca

SEQ ID NO: 4516650 - DNA, 25 bp, Homo sapien
ttcccataggttccaccaccgagga

SEQ ID NO: 4516651 - DNA, 25 bp, Homo sapien
cataggttccaccaccgaggacatc

SEQ ID NO: 4516652 - DNA, 25 bp, Homo sapien
ggctctcgtggacatgagtgtgcat

SEQ ID NO: 4516653 - DNA, 25 bp, Homo sapien
cctcccgaaatgtaagatgcctgtg

SEQ ID NO: 4516654 - DNA, 25 bp, Homo sapien
ggatttctctggtggatgacaggtc

SEQ ID NO: 4516655 - DNA, 25 bp, Homo sapien
gcattgggctttaatttggcagtga

SEQ ID NO: 4516656 - DNA, 25 bp, Homo sapien
tcatgcatgaggctacccgtggaga

SEQ ID NO: 4516657 - DNA, 25 bp, Homo sapien
tcctttgggctccagtcatgcatga

SEQ ID NO: 4516658 - DNA, 25 bp, Homo sapien
aaaagtgtccagagcgaatgtgccc

SEQ ID NO: 4516659 - DNA, 25 bp, Homo sapien
tgctgctctcgtgagcaaatactgc

SEQ ID NO: 4516660 - DNA, 25 bp, Homo sapien
ctgtgtgctggcgatgttccagtgt

SEQ ID NO: 4516661 - DNA, 25 bp, Homo sapien
ctccatgtgactgtgtgctggcgat

SEQ ID NO: 4516662 - DNA, 25 bp, Homo sapien
tgactgtgtgctggcgatgttccag

SEQ ID NO: 4516663 - DNA, 25 bp, Homo sapien
catgtgactgtgtgctggcgatgtt

SEQ ID NO: 4516664 - DNA, 25 bp, Homo sapien
tcatagggtccaaggagaagcaggg

SEQ ID NO: 4516665 - DNA, 25 bp, Homo sapien
atagggtccaaggagaagcaggggt

SEQ ID NO: 4516666 - DNA, 25 bp, Homo sapien
catagggtccaaggagaagcagggg

SEQ ID NO: 4516667 - DNA, 25 bp, Homo sapien
tagggtccaaggagaagcaggggta

SEQ ID NO: 4516668 - DNA, 25 bp, Homo sapien
agttgccccgtgggaaagaatgaca

SEQ ID NO: 4516669 - DNA, 25 bp, Homo sapien
gagttgccccgtgggaaagaatgac

SEQ ID NO: 4516670 - DNA, 25 bp, Homo sapien
gccattaagggcattgtcgaggcct

SEQ ID NO: 4516671 - DNA, 25 bp, Homo sapien
gaagtttttcagctggccattaagg

SEQ ID NO: 4516672 - DNA, 25 bp, Homo sapien
cgtgggcctatttctcaagcgtgca

SEQ ID NO: 4516673 - DNA, 25 bp, Homo sapien
gcctttaaggtcatcagctcgcaca

SEQ ID NO: 4516674 - DNA, 25 bp, Homo sapien
ccatcagtggtcttgggctgtcatt

SEQ ID NO: 4516675 - DNA, 25 bp, Homo sapien
caggttggccattgggggtcttcaa

SEQ ID NO: 4516676 - DNA, 25 bp, Homo sapien
catgcatgccatcagtggtcttggg

SEQ ID NO: 4516677 - DNA, 25 bp, Homo sapien
gtggacatgcatgccatcagtggtc

SEQ ID NO: 4516678 - DNA, 25 bp, Homo sapien
gtagtagaagtgtccatcttcctgg

SEQ ID NO: 4516679 - DNA, 25 bp, Homo sapien
tgagggtcgggctgatgcctgtggt

SEQ ID NO: 4516680 - DNA, 25 bp, Homo sapien
ctagggagcatgagggtcgggctga

SEQ ID NO: 4516681 - DNA, 25 bp, Homo sapien
cagagtagtagaagtgtccatcttc

SEQ ID NO: 4516682 - DNA, 25 bp, Homo sapien
aggcaacacatgtgcaataccaggg

SEQ ID NO: 4516683 - DNA, 25 bp, Homo sapien
cacacttggcgtattcatggaggtc

SEQ ID NO: 4516684 - DNA, 25 bp, Homo sapien
ggcactgccgtggagagtctcttga

SEQ ID NO: 4516685 - DNA, 25 bp, Homo sapien
tggatcccatttcccgctttgaaag

SEQ ID NO: 4516686 - DNA, 25 bp, Homo sapien
gatgaaaatctcctatcacatgcat

SEQ ID NO: 4516687 - DNA, 25 bp, Homo sapien
tgaaaatctcctatcacatgcatgt

SEQ ID NO: 4516688 - DNA, 25 bp, Homo sapien
aatctcctatcacatgcatgtgagg

SEQ ID NO: 4516689 - DNA, 25 bp, Homo sapien
gaaaatctcctatcacatgcatgtg

SEQ ID NO: 4516690 - DNA, 25 bp, Homo sapien
ctgtatgacatagacggatgggaca

SEQ ID NO: 4516691 - DNA, 25 bp, Homo sapien
tgtatgacatagacggatgggacag

SEQ ID NO: 4516692 - DNA, 25 bp, Homo sapien
tcctctttcccgcttggaaagcaat

SEQ ID NO: 4516693 - DNA, 25 bp, Homo sapien
cctctttcccgcttggaaagcaatt

SEQ ID NO: 4516694 - DNA, 25 bp, Homo sapien
tctttcccgcttggaaagcaatttc

SEQ ID NO: 4516695 - DNA, 25 bp, Homo sapien
tttcccgcttggaaagcaatttcca

SEQ ID NO: 4516696 - DNA, 25 bp, Homo sapien
cgttctcatcggaactgaggtccag

SEQ ID NO: 4516697 - DNA, 25 bp, Homo sapien
cgtcgttctcatcggaactgaggtc

SEQ ID NO: 4516698 - DNA, 25 bp, Homo sapien
gtcgttctcatcggaactgaggtcc

SEQ ID NO: 4516699 - DNA, 25 bp, Homo sapien
tcgttctcatcggaactgaggtcca

SEQ ID NO: 4516700 - DNA, 25 bp, Homo sapien
agctgctcgtagtgcaatggcagag

SEQ ID NO: 4516701 - DNA, 25 bp, Homo sapien
tgtgagctgctcgtagtgcaatggc

SEQ ID NO: 4516702 - DNA, 25 bp, Homo sapien
gaagagcaatgggtgtcccagcaga

SEQ ID NO: 4516703 - DNA, 25 bp, Homo sapien
gagctgtgagctgctcgtagtgcaa

SEQ ID NO: 4516704 - DNA, 25 bp, Homo sapien
cctggaaatggtctcttggcccgcc

SEQ ID NO: 4516705 - DNA, 25 bp, Homo sapien
tgggaatgcggtcaagctgactgca

SEQ ID NO: 4516706 - DNA, 25 bp, Homo sapien
gacgtcctgttggagaagcagccat

SEQ ID NO: 4516707 - DNA, 25 bp, Homo sapien
caatgttaggtggtgtgtcttgtcc

SEQ ID NO: 4516708 - DNA, 25 bp, Homo sapien
cgatgggacattgcctctgaggtca

SEQ ID NO: 4516709 - DNA, 25 bp, Homo sapien
gaagctgtttcttgaggtcgtttgg

SEQ ID NO: 4516710 - DNA, 25 bp, Homo sapien
gtcatgtatcagtgcaacattctga

SEQ ID NO: 4516711 - DNA, 25 bp, Homo sapien
ttggttggttttccgccagatgtgc

SEQ ID NO: 4516712 - DNA, 25 bp, Homo sapien
ccacctctggctttgacgtcatgta

SEQ ID NO: 4516713 - DNA, 25 bp, Homo sapien
ggctttgacgtcatgtatcagtgca

SEQ ID NO: 4516714 - DNA, 25 bp, Homo sapien
tgtgcttggatcgatgatgagtccc

SEQ ID NO: 4516715 - DNA, 25 bp, Homo sapien
aaacatcctgcgtctttgaatgtgc

SEQ ID NO: 4516716 - DNA, 25 bp, Homo sapien
tgcccagcctatgatgtcaaacatc

SEQ ID NO: 4516717 - DNA, 25 bp, Homo sapien
ttgaatgtgcttggatcgatgatga

SEQ ID NO: 4516718 - DNA, 25 bp, Homo sapien
tgattgggatgctctacgcccatac

SEQ ID NO: 4516719 - DNA, 25 bp, Homo sapien
cagggtacccggaatccacatgtgc

SEQ ID NO: 4516720 - DNA, 25 bp, Homo sapien
catactctttagtggcatgacgccc

SEQ ID NO: 4516721 - DNA, 25 bp, Homo sapien
caaattgcaagtattgaagccatgg

SEQ ID NO: 4516722 - DNA, 25 bp, Homo sapien
ctgaagcacactcatttcctctgca

SEQ ID NO: 4516723 - DNA, 25 bp, Homo sapien
tctgaagcacactcatttcctctgc

SEQ ID NO: 4516724 - DNA, 25 bp, Homo sapien
ctgtctgtctttctgaagcacactc

SEQ ID NO: 4516725 - DNA, 25 bp, Homo sapien
tgtctttctgaagcacactcatttc

SEQ ID NO: 4516726 - DNA, 25 bp, Homo sapien
aggcccttgtccaagaaggatggtc

SEQ ID NO: 4516727 - DNA, 25 bp, Homo sapien
cttgtgtgatctttgagatgccatg

SEQ ID NO: 4516728 - DNA, 25 bp, Homo sapien
ggtcttcgtcttgtgtgatctttga

SEQ ID NO: 4516729 - DNA, 25 bp, Homo sapien
tgtccaagaaggatggtcttcgtct

SEQ ID NO: 4516730 - DNA, 25 bp, Homo sapien
tgtgagaaggtggggtagcatcctg

SEQ ID NO: 4516731 - DNA, 25 bp, Homo sapien
tgccagtgtgcaggagaaggtaaac

SEQ ID NO: 4516732 - DNA, 25 bp, Homo sapien
gtgagaaggtggggtagcatcctgc

SEQ ID NO: 4516733 - DNA, 25 bp, Homo sapien
aggcggtatccagttgcccacctct

SEQ ID NO: 4516734 - DNA, 25 bp, Homo sapien
gaaggcggtatccagttgcccacct

SEQ ID NO: 4516735 - DNA, 25 bp, Homo sapien
acaggaaggcggtatccagttgccc

SEQ ID NO: 4516736 - DNA, 25 bp, Homo sapien
gtgccacaggaaggcggtatccagt

SEQ ID NO: 4516737 - DNA, 25 bp, Homo sapien
cttaggatgtggtcctctttgggca

SEQ ID NO: 4516738 - DNA, 25 bp, Homo sapien
tggcttaggatgtggtcctctttgg

SEQ ID NO: 4516739 - DNA, 25 bp, Homo sapien
tttgggcaaatgcaagcgtctgggc

SEQ ID NO: 4516740 - DNA, 25 bp, Homo sapien
tgggctttttggacttctgtagctg

SEQ ID NO: 4516741 - DNA, 25 bp, Homo sapien
agtagccagtagtctctttgtgcat

SEQ ID NO: 4516742 - DNA, 25 bp, Homo sapien
agcagtagccagtagtctctttgtg

SEQ ID NO: 4516743 - DNA, 25 bp, Homo sapien
cagtagccagtagtctctttgtgca

SEQ ID NO: 4516744 - DNA, 25 bp, Homo sapien
gaagcagtagccagtagtctctttg

SEQ ID NO: 4516745 - DNA, 25 bp, Homo sapien
gccctgtaggattcagcatgtctga

SEQ ID NO: 4516746 - DNA, 25 bp, Homo sapien
gacagcaccatagaagccctgtagg

SEQ ID NO: 4516747 - DNA, 25 bp, Homo sapien
tatgagggctgtcatccacaggcca

SEQ ID NO: 4516748 - DNA, 25 bp, Homo sapien
aagacgtatcgtgttctcagggaca

SEQ ID NO: 4516749 - DNA, 25 bp, Homo sapien
tgcagtccgtgggactaggtgaatg

SEQ ID NO: 4516750 - DNA, 25 bp, Homo sapien
ggtggccaagattgtccttgactcc

SEQ ID NO: 4516751 - DNA, 25 bp, Homo sapien
tctgggtggccaagattgtccttga

SEQ ID NO: 4516752 - DNA, 25 bp, Homo sapien
actaggtgaatgtgcaggttgctca

SEQ ID NO: 4516753 - DNA, 25 bp, Homo sapien
ccggcatagcctctgtgcctatgtg

SEQ ID NO: 4516754 - DNA, 25 bp, Homo sapien
gtatatttggcatgaacaggcaggc

SEQ ID NO: 4516755 - DNA, 25 bp, Homo sapien
tgtactgtgcattgtgaggatgtat

SEQ ID NO: 4516756 - DNA, 25 bp, Homo sapien
ctatgtgcccatgttgtgtactgtg

SEQ ID NO: 4516757 - DNA, 25 bp, Homo sapien
ggttatcccaaaccagatacaggtc

SEQ ID NO: 4516758 - DNA, 25 bp, Homo sapien
ccaaaccagatacaggtcaatggct

SEQ ID NO: 4516759 - DNA, 25 bp, Homo sapien
aaccagatacaggtcaatggcttcc

SEQ ID NO: 4516760 - DNA, 25 bp, Homo sapien
tatcccaaaccagatacaggtcaat

SEQ ID NO: 4516761 - DNA, 25 bp, Homo sapien
ctggatgtaagtgattccatttcaa

SEQ ID NO: 4516762 - DNA, 25 bp, Homo sapien
agtgattccatttcaaagcaccctg

SEQ ID NO: 4516763 - DNA, 25 bp, Homo sapien
gatgtaagtgattccatttcaaagc

SEQ ID NO: 4516764 - DNA, 25 bp, Homo sapien
gggatggagattgtgtgtggatcga

SEQ ID NO: 4516765 - DNA, 25 bp, Homo sapien
ccaaaccgcatggtcccagaagggt

SEQ ID NO: 4516766 - DNA, 25 bp, Homo sapien
cccagagagggtatccacactgaac

SEQ ID NO: 4516767 - DNA, 25 bp, Homo sapien
cccatggtgtttggatagcatcagg

SEQ ID NO: 4516768 - DNA, 25 bp, Homo sapien
ttgtcaagggacgtaggacttccca

SEQ ID NO: 4516769 - DNA, 25 bp, Homo sapien
agagacaggcagatagcagatatgc

SEQ ID NO: 4516770 - DNA, 25 bp, Homo sapien
cagatatgccatagggggccagatg

SEQ ID NO: 4516771 - DNA, 25 bp, Homo sapien
ggccagatgacacggccctcatgac

SEQ ID NO: 4516772 - DNA, 25 bp, Homo sapien
gggccagatgacacggccctcatga

SEQ ID NO: 4516773 - DNA, 25 bp, Homo sapien
gagggacaatcttcttcttgtgcga

SEQ ID NO: 4516774 - DNA, 25 bp, Homo sapien
gaagcacactcgtatttccgctgca

SEQ ID NO: 4516775 - DNA, 25 bp, Homo sapien
cctggacacatgtggtgtgggctcc

SEQ ID NO: 4516776 - DNA, 25 bp, Homo sapien
gaaaggaggtatcttcgagggacaa

SEQ ID NO: 4516777 - DNA, 25 bp, Homo sapien
catttgttgacacaggctgcatcaa

SEQ ID NO: 4516778 - DNA, 25 bp, Homo sapien
tttgttgacacaggctgcatcaatg

SEQ ID NO: 4516779 - DNA, 25 bp, Homo sapien
atttgttgacacaggctgcatcaat

SEQ ID NO: 4516780 - DNA, 25 bp, Homo sapien
tctttgggtgaagtggagtagctgg

SEQ ID NO: 4516781 - DNA, 25 bp, Homo sapien
gagcgacgactgtgagcctctttcg

SEQ ID NO: 4516782 - DNA, 25 bp, Homo sapien
tgtagggtgcccatagtccatttca

SEQ ID NO: 4516783 - DNA, 25 bp, Homo sapien
gaatgtaattgtaggtccacgtgct

SEQ ID NO: 4516784 - DNA, 25 bp, Homo sapien
cccagagagggtatccacgttgaat

SEQ ID NO: 4516785 - DNA, 25 bp, Homo sapien
cataaatagttgaagccagacagcc

SEQ ID NO: 4516786 - DNA, 25 bp, Homo sapien
gccagattccagatgtatcgcaggg

SEQ ID NO: 4516787 - DNA, 25 bp, Homo sapien
gtgagccgcagggataccaggaaac

SEQ ID NO: 4516788 - DNA, 25 bp, Homo sapien
gaagcacgcttgtgtttcctctaca

SEQ ID NO: 4516789 - DNA, 25 bp, Homo sapien
ttgtgtattgcatgatcaggcaggc

SEQ ID NO: 4516790 - DNA, 25 bp, Homo sapien
gttagcttgttttgtccttggcgga

SEQ ID NO: 4516791 - DNA, 25 bp, Homo sapien
cttggcggaggacgttgtatttcca

SEQ ID NO: 4516792 - DNA, 25 bp, Homo sapien
gggagagcacaagcctacactattc

SEQ ID NO: 4516793 - DNA, 25 bp, Homo sapien
atgacatggccctcgtgacctgtgc

SEQ ID NO: 4516794 - DNA, 25 bp, Homo sapien
tctgataccaaaggagtccctggct

SEQ ID NO: 4516795 - DNA, 25 bp, Homo sapien
gatggtcaatgtcagtgctctttag

SEQ ID NO: 4516796 - DNA, 25 bp, Homo sapien
tcatggtaggttaaagccttcctcc

SEQ ID NO: 4516797 - DNA, 25 bp, Homo sapien
cttctttcccagagcactctgagtt

SEQ ID NO: 4516798 - DNA, 25 bp, Homo sapien
acttctttcccagagcactctgagt

SEQ ID NO: 4516799 - DNA, 25 bp, Homo sapien
tgagctgcggagataccaggaagcc

SEQ ID NO: 4516800 - DNA, 25 bp, Homo sapien
cttgtgtgagctgcggagataccag

SEQ ID NO: 4516801 - DNA, 25 bp, Homo sapien
gggacaacatccgtttgttgacaag

SEQ ID NO: 4516802 - DNA, 25 bp, Homo sapien
agggacaacatccgtttgttgacaa

SEQ ID NO: 4516803 - DNA, 25 bp, Homo sapien
gtatatccataggaggaaaccagtc

SEQ ID NO: 4516804 - DNA, 25 bp, Homo sapien
cagagagggtatccatgttgaactt

SEQ ID NO: 4516805 - DNA, 25 bp, Homo sapien
aggtctgcatgtgcatgtactggac

SEQ ID NO: 4516806 - DNA, 25 bp, Homo sapien
gacgtggcagttcccatggtgttta

SEQ ID NO: 4516807 - DNA, 25 bp, Homo sapien
gcggccatgttcaaaggcaagtgcc

SEQ ID NO: 4516808 - DNA, 25 bp, Homo sapien
tgttgtaggacagggctggtatcca

SEQ ID NO: 4516809 - DNA, 25 bp, Homo sapien
acagtgccttagaagccatgtggga

SEQ ID NO: 4516810 - DNA, 25 bp, Homo sapien
taggttttgcactgcgcggccatgt

SEQ ID NO: 4516811 - DNA, 25 bp, Homo sapien
gggttgcactaagccatccatccag

SEQ ID NO: 4516812 - DNA, 25 bp, Homo sapien
tctttgcagggataaagactgtgca

SEQ ID NO: 4516813 - DNA, 25 bp, Homo sapien
ggatcgatgatgacctcaatacatg

SEQ ID NO: 4516814 - DNA, 25 bp, Homo sapien
aggtccagcacgtggctccaactgg

SEQ ID NO: 4516815 - DNA, 25 bp, Homo sapien
tccttgtgtgaaggacttctctttg

SEQ ID NO: 4516816 - DNA, 25 bp, Homo sapien
ttccttgtgtgaaggacttctcttt

SEQ ID NO: 4516817 - DNA, 25 bp, Homo sapien
attccttgtgtgaaggacttctctt

SEQ ID NO: 4516818 - DNA, 25 bp, Homo sapien
gattccttgtgtgaaggacttctct

SEQ ID NO: 4516819 - DNA, 25 bp, Homo sapien
tggccaggtttgtccttgagtgctg

SEQ ID NO: 4516820 - DNA, 25 bp, Homo sapien
tggcacagaagagttagccggtaac

SEQ ID NO: 4516821 - DNA, 25 bp, Homo sapien
catggctgaggactttttagtgccc

SEQ ID NO: 4516822 - DNA, 25 bp, Homo sapien
ttgttccccagaggtagatagctcc

SEQ ID NO: 4516823 - DNA, 25 bp, Homo sapien
tctttctggagagtaccctgtagat

SEQ ID NO: 4516824 - DNA, 25 bp, Homo sapien
tgtgaggaggttggtgatgcttatt

SEQ ID NO: 4516825 - DNA, 25 bp, Homo sapien
cagcagtggaagtcagttgtgagga

SEQ ID NO: 4516826 - DNA, 25 bp, Homo sapien
gagagtaccctgtagatcggctcca

SEQ ID NO: 4516827 - DNA, 25 bp, Homo sapien
ggtagatagagagggaaaacttcca

SEQ ID NO: 4516828 - DNA, 25 bp, Homo sapien
ttgtaggtacaaagactgtgcatgg

SEQ ID NO: 4516829 - DNA, 25 bp, Homo sapien
gcacattgctccaacagtgggtaga

SEQ ID NO: 4516830 - DNA, 25 bp, Homo sapien
tctgatattccatctttgtaggtac

SEQ ID NO: 4516831 - DNA, 25 bp, Homo sapien
tttgtcacgtgtaccagattcgttg

SEQ ID NO: 4516832 - DNA, 25 bp, Homo sapien
tgcatggaattcctactgctgctcc

SEQ ID NO: 4516833 - DNA, 25 bp, Homo sapien
ttctcataccacatgggcaagtgaa

SEQ ID NO: 4516834 - DNA, 25 bp, Homo sapien
ttcagtactacccatttccagggag

SEQ ID NO: 4516835 - DNA, 25 bp, Homo sapien
tacttgtgcatagtaagcctgttgt

SEQ ID NO: 4516836 - DNA, 25 bp, Homo sapien
tggtgtgaggccctaataatctggt

SEQ ID NO: 4516837 - DNA, 25 bp, Homo sapien
tcaagcagtctgttaatccaaatgg

SEQ ID NO: 4516838 - DNA, 25 bp, Homo sapien
taacattaggataccctactagcaa

SEQ ID NO: 4516839 - DNA, 25 bp, Homo sapien
ccagcactcgagtcattcacactat

SEQ ID NO: 4516840 - DNA, 25 bp, Homo sapien
cattcacactattttcgtagacgcc

SEQ ID NO: 4516841 - DNA, 25 bp, Homo sapien
cactattttcgtagacgccacaaca

SEQ ID NO: 4516842 - DNA, 25 bp, Homo sapien
aaatggctgtgccagcactcgagtc

SEQ ID NO: 4516843 - DNA, 25 bp, Homo sapien
caaactgatagtctggttgcacatt

SEQ ID NO: 4516844 - DNA, 25 bp, Homo sapien
gagcaaactgatagtctggttgcac

SEQ ID NO: 4516845 - DNA, 25 bp, Homo sapien
ctgatagtctggttgcacatttgat

SEQ ID NO: 4516846 - DNA, 25 bp, Homo sapien
ttgagcaaactgatagtctggttgc

SEQ ID NO: 4516847 - DNA, 25 bp, Homo sapien
tctccaggaaagatcaaaacgatgc

SEQ ID NO: 4516848 - DNA, 25 bp, Homo sapien
cattttgccgcttggaattctcacc

SEQ ID NO: 4516849 - DNA, 25 bp, Homo sapien
ccctgatttcccctttatagattgg

SEQ ID NO: 4516850 - DNA, 25 bp, Homo sapien
gaagtgatattggtggaagacaaca

SEQ ID NO: 4516851 - DNA, 25 bp, Homo sapien
gtgaggtttccagaagatcccgtag

SEQ ID NO: 4516852 - DNA, 25 bp, Homo sapien
tttccagaagatcccgtagcaatat

SEQ ID NO: 4516853 - DNA, 25 bp, Homo sapien
agaagatcccgtagcaatatcactc

SEQ ID NO: 4516854 - DNA, 25 bp, Homo sapien
ggtttccagaagatcccgtagcaat

SEQ ID NO: 4516855 - DNA, 25 bp, Homo sapien
gtgctaatagaccatgatcgtattg

SEQ ID NO: 4516856 - DNA, 25 bp, Homo sapien
gctaatagaccatgatcgtattgct

SEQ ID NO: 4516857 - DNA, 25 bp, Homo sapien
ggtgctaatagaccatgatcgtatt

SEQ ID NO: 4516858 - DNA, 25 bp, Homo sapien
tgctaatagaccatgatcgtattgc

SEQ ID NO: 4516859 - DNA, 25 bp, Homo sapien
gatttgttgagttggtgccattcct

SEQ ID NO: 4516860 - DNA, 25 bp, Homo sapien
tttgttgagttggtgccattccttc

SEQ ID NO: 4516861 - DNA, 25 bp, Homo sapien
ggagactcttctctttcctgtgttg

SEQ ID NO: 4516862 - DNA, 25 bp, Homo sapien
gagactcttctctttcctgtgttgc

SEQ ID NO: 4516863 - DNA, 25 bp, Homo sapien
ttctctttcctgtgttgcagtggat

SEQ ID NO: 4516864 - DNA, 25 bp, Homo sapien
ctcttctctttcctgtgttgcagtg

SEQ ID NO: 4516865 - DNA, 25 bp, Homo sapien
ttacttgccattacttgcgattatt

SEQ ID NO: 4516866 - DNA, 25 bp, Homo sapien
cattacttgcgattatttgccaata

SEQ ID NO: 4516867 - DNA, 25 bp, Homo sapien
tccataaaacccttcacctatgtta

SEQ ID NO: 4516868 - DNA, 25 bp, Homo sapien
ttgccattacttgcgattatttgcc

SEQ ID NO: 4516869 - DNA, 25 bp, Homo sapien
gccatcttgcgcatatgctgtactc

SEQ ID NO: 4516870 - DNA, 25 bp, Homo sapien
catcttgcgcatatgctgtactctc

SEQ ID NO: 4516871 - DNA, 25 bp, Homo sapien
tcttgcgcatatgctgtactctcat

SEQ ID NO: 4516872 - DNA, 25 bp, Homo sapien
cgccatcttgcgcatatgctgtact

SEQ ID NO: 4516873 - DNA, 25 bp, Homo sapien
cctgtctcgtgtctgctcgttggaa

SEQ ID NO: 4516874 - DNA, 25 bp, Homo sapien
taagtcttcgtatccaaggacaagg

SEQ ID NO: 4516875 - DNA, 25 bp, Homo sapien
tgtctgctcgttggaagaaattaca

SEQ ID NO: 4516876 - DNA, 25 bp, Homo sapien
ttacagtttagactgcaatttcatc

SEQ ID NO: 4516877 - DNA, 25 bp, Homo sapien
tacagttttatcttgctgggcagga

SEQ ID NO: 4516878 - DNA, 25 bp, Homo sapien
taccatgttaggaaagtctgccacc

SEQ ID NO: 4516879 - DNA, 25 bp, Homo sapien
tgttaaacttacctgcagcaaggga

SEQ ID NO: 4516880 - DNA, 25 bp, Homo sapien
gaccaccagaaagagctatgatcaa

SEQ ID NO: 4516881 - DNA, 25 bp, Homo sapien
ttctagattgtcagtgaatttttac

SEQ ID NO: 4516882 - DNA, 25 bp, Homo sapien
cttatggtctagcatatgatctgtc

SEQ ID NO: 4516883 - DNA, 25 bp, Homo sapien
gcagattttgttcagatagatagtg

SEQ ID NO: 4516884 - DNA, 25 bp, Homo sapien
ctcagttcttcgtgtatttggaaat

SEQ ID NO: 4516885 - DNA, 25 bp, Homo sapien
gaataactcaggataggtctggtca

SEQ ID NO: 4516886 - DNA, 25 bp, Homo sapien
ccttgtccatgtaaaagttggtggg

SEQ ID NO: 4516887 - DNA, 25 bp, Homo sapien
gcttgagtcactaagacattcactg

SEQ ID NO: 4516888 - DNA, 25 bp, Homo sapien
tcttggtaggatgtgtcctccttcc

SEQ ID NO: 4516889 - DNA, 25 bp, Homo sapien
cctgttgtgagggtagtttaacatg

SEQ ID NO: 4516890 - DNA, 25 bp, Homo sapien
tataatcctcgcaagttttcctcta

SEQ ID NO: 4516891 - DNA, 25 bp, Homo sapien
gacggggtctctcatctcagagtta

SEQ ID NO: 4516892 - DNA, 25 bp, Homo sapien
tgtgctttgaagagcctttgacggg

SEQ ID NO: 4516893 - DNA, 25 bp, Homo sapien
cattccttatatatacacatgaagt

SEQ ID NO: 4516894 - DNA, 25 bp, Homo sapien
tcttccctatgaacattccttatat

SEQ ID NO: 4516895 - DNA, 25 bp, Homo sapien
ccttatatatacacatgaagtggca

SEQ ID NO: 4516896 - DNA, 25 bp, Homo sapien
ctctcttccctatgaacattcctta

SEQ ID NO: 4516897 - DNA, 25 bp, Homo sapien
caaacaatgtggtaggccttccttt

SEQ ID NO: 4516898 - DNA, 25 bp, Homo sapien
ataccccaggcggcaatgctaaggc

SEQ ID NO: 4516899 - DNA, 25 bp, Homo sapien
aacaatgtggtaggccttccttttg

SEQ ID NO: 4516900 - DNA, 25 bp, Homo sapien
caatgataccccaggcggcaatgct

SEQ ID NO: 4516901 - DNA, 25 bp, Homo sapien
cttcataatggtccatggacccggg

SEQ ID NO: 4516902 - DNA, 25 bp, Homo sapien
tcataatggtccatggacccggggg

SEQ ID NO: 4516903 - DNA, 25 bp, Homo sapien
ttcataatggtccatggacccgggg

SEQ ID NO: 4516904 - DNA, 25 bp, Homo sapien
tatcctttcggtgttcagtggcgga

SEQ ID NO: 4516905 - DNA, 25 bp, Homo sapien
catccatgatgggtaagtattccac

SEQ ID NO: 4516906 - DNA, 25 bp, Homo sapien
ccacaccttctgtccacatggaggg

SEQ ID NO: 4516907 - DNA, 25 bp, Homo sapien
agccaagtgcctagcccctattgca

SEQ ID NO: 4516908 - DNA, 25 bp, Homo sapien
gggtgggacacgttggcggctcctc

SEQ ID NO: 4516909 - DNA, 25 bp, Homo sapien
ggctcctccgtgagccccattatcc

SEQ ID NO: 4516910 - DNA, 25 bp, Homo sapien
cgtgagccccattatcctctgtgtc

SEQ ID NO: 4516911 - DNA, 25 bp, Homo sapien
tgggcttggtgtccacgctcagctt

SEQ ID NO: 4516912 - DNA, 25 bp, Homo sapien
gcaacagcacgtggtgtccgggcca

SEQ ID NO: 4516913 - DNA, 25 bp, Homo sapien
ctgtgcaactgccaggtaggcaaca

SEQ ID NO: 4516914 - DNA, 25 bp, Homo sapien
cagactgtgcaactgccaggtaggc

SEQ ID NO: 4516915 - DNA, 25 bp, Homo sapien
cagggcagactgtgcaactgccagg

SEQ ID NO: 4516916 - DNA, 25 bp, Homo sapien
gcttccttggaagtcggtcccaaga

SEQ ID NO: 4516917 - DNA, 25 bp, Homo sapien
ccttcaggccacgagggattcctca

SEQ ID NO: 4516918 - DNA, 25 bp, Homo sapien
cttggaagtcggtcccaagaaggat

SEQ ID NO: 4516919 - DNA, 25 bp, Homo sapien
gagggattcctcagggagcccatct

SEQ ID NO: 4516920 - DNA, 25 bp, Homo sapien
gggtgcagtctgtgtcccgctaaag

SEQ ID NO: 4516921 - DNA, 25 bp, Homo sapien
gctggccctgggaatttgggctttg

SEQ ID NO: 4516922 - DNA, 25 bp, Homo sapien
tgcagtctgtgtcccgctaaaggtc

SEQ ID NO: 4516923 - DNA, 25 bp, Homo sapien
gtctgtgtcccgctaaaggtcaccc

SEQ ID NO: 4516924 - DNA, 25 bp, Homo sapien
tgtgctcaacacctggtgagctgaa

SEQ ID NO: 4516925 - DNA, 25 bp, Homo sapien
aagacgtgcattgggtccgctggcc

SEQ ID NO: 4516926 - DNA, 25 bp, Homo sapien
gatgcactgggtcgggtcaatgatg

SEQ ID NO: 4516927 - DNA, 25 bp, Homo sapien
tgggttcctctggatacgtgtgcag

SEQ ID NO: 4516928 - DNA, 25 bp, Homo sapien
cagtgagctcgtcctcctaggtggg

SEQ ID NO: 4516929 - DNA, 25 bp, Homo sapien
ccctcgtgtgtttcagtgagctcgt

SEQ ID NO: 4516930 - DNA, 25 bp, Homo sapien
atctccggggggcacaaccctggct

SEQ ID NO: 4516931 - DNA, 25 bp, Homo sapien
ctgaggctctgaacggcatctccgg

SEQ ID NO: 4516932 - DNA, 25 bp, Homo sapien
tccacaccatggagggatagattgg

SEQ ID NO: 4516933 - DNA, 25 bp, Homo sapien
gattggtcctccaagagggctgttt

SEQ ID NO: 4516934 - DNA, 25 bp, Homo sapien
tcccagctgagtctcagtgcattgg

SEQ ID NO: 4516935 - DNA, 25 bp, Homo sapien
cagtgcattggtctggcctccagga

SEQ ID NO: 4516936 - DNA, 25 bp, Homo sapien
cttcgggatgcagtggggtcacaca

SEQ ID NO: 4516937 - DNA, 25 bp, Homo sapien
gtgggcatagaacccatggattcga

SEQ ID NO: 4516938 - DNA, 25 bp, Homo sapien
gggcttcgggatgcagtggggtcac

SEQ ID NO: 4516939 - DNA, 25 bp, Homo sapien
tgggcatagaacccatggattcgag

SEQ ID NO: 4516940 - DNA, 25 bp, Homo sapien
tccctggaatatgccacgcatgctg

SEQ ID NO: 4516941 - DNA, 25 bp, Homo sapien
ccgattagccaagtgcggccctgct

SEQ ID NO: 4516942 - DNA, 25 bp, Homo sapien
ggaagtcctgttgagggtcttgtcc

SEQ ID NO: 4516943 - DNA, 25 bp, Homo sapien
caagtgtcaggaagggtgacctcct

SEQ ID NO: 4516944 - DNA, 25 bp, Homo sapien
cttatgggacctgcagtaggacaca

SEQ ID NO: 4516945 - DNA, 25 bp, Homo sapien
ttttgttgccctgtgtccgtgacgg

SEQ ID NO: 4516946 - DNA, 25 bp, Homo sapien
ggctatgtgacttgcaggtctgcag

SEQ ID NO: 4516947 - DNA, 25 bp, Homo sapien
gggtgagcatccctgggctgacaca

SEQ ID NO: 4516948 - DNA, 25 bp, Homo sapien
ttgcgtctggacttaaggactgccc

SEQ ID NO: 4516949 - DNA, 25 bp, Homo sapien
gaatgggacccaccctgttgagcaa

SEQ ID NO: 4516950 - DNA, 25 bp, Homo sapien
aagttttgcacctgacacatggccc

SEQ ID NO: 4516951 - DNA, 25 bp, Homo sapien
ggtttgaggcacatgggaagctcct

SEQ ID NO: 4516952 - DNA, 25 bp, Homo sapien
cgggccagcctccttggttgaccat

SEQ ID NO: 4516953 - DNA, 25 bp, Homo sapien
ggttgaccatgaactggttgctggc

SEQ ID NO: 4516954 - DNA, 25 bp, Homo sapien
cagcagcatcaggcatacgggccag

SEQ ID NO: 4516955 - DNA, 25 bp, Homo sapien
agcatcaggcatacgggccagcctc

SEQ ID NO: 4516956 - DNA, 25 bp, Homo sapien
agccgggtgcctagcccctgttgca

SEQ ID NO: 4516957 - DNA, 25 bp, Homo sapien
agagagcatcaggtggcccacgtct

SEQ ID NO: 4516958 - DNA, 25 bp, Homo sapien
aagggtgaggttgcatttggcacct

SEQ ID NO: 4516959 - DNA, 25 bp, Homo sapien
ccacgtctgtgatgggccagtattc

SEQ ID NO: 4516960 - DNA, 25 bp, Homo sapien
ggccactgtattttgggctggagac

SEQ ID NO: 4516961 - DNA, 25 bp, Homo sapien
gggccactgtattttgggctggaga

SEQ ID NO: 4516962 - DNA, 25 bp, Homo sapien
agggccactgtattttgggctggag

SEQ ID NO: 4516963 - DNA, 25 bp, Homo sapien
gcttcgtgtcggtgctcagattccc

SEQ ID NO: 4516964 - DNA, 25 bp, Homo sapien
aacctgtctctacgttcctccatga

SEQ ID NO: 4516965 - DNA, 25 bp, Homo sapien
cctgtgcgagcttcgtgtcggtgct

SEQ ID NO: 4516966 - DNA, 25 bp, Homo sapien
gtccaggctccctgtgcgagcttcg

SEQ ID NO: 4516967 - DNA, 25 bp, Homo sapien
aagggccgcctccttgggaatctga

SEQ ID NO: 4516968 - DNA, 25 bp, Homo sapien
tgagggattggttctccagaagggc

SEQ ID NO: 4516969 - DNA, 25 bp, Homo sapien
agaagggccgcctccttgggaatct

SEQ ID NO: 4516970 - DNA, 25 bp, Homo sapien
tggtgagggattggttctccagaag

SEQ ID NO: 4516971 - DNA, 25 bp, Homo sapien
cattagtcccatgcaggtcagctcc

SEQ ID NO: 4516972 - DNA, 25 bp, Homo sapien
agacttggtgctagggtctggcctt

SEQ ID NO: 4516973 - DNA, 25 bp, Homo sapien
gctacaggagtgacattggtccagg

SEQ ID NO: 4516974 - DNA, 25 bp, Homo sapien
ttttggtgcgtgcttggagagggag

SEQ ID NO: 4516975 - DNA, 25 bp, Homo sapien
cagaggaagaattgcgttaggccct

SEQ ID NO: 4516976 - DNA, 25 bp, Homo sapien
agcacagaggaagaattgcgttagg

SEQ ID NO: 4516977 - DNA, 25 bp, Homo sapien
cacagaggaagaattgcgttaggcc

SEQ ID NO: 4516978 - DNA, 25 bp, Homo sapien
aggaagaattgcgttaggccctttg

SEQ ID NO: 4516979 - DNA, 25 bp, Homo sapien
tcagcctcccgtgcgctaaagctca

SEQ ID NO: 4516980 - DNA, 25 bp, Homo sapien
gcctcccgtgcgctaaagctcaggt

SEQ ID NO: 4516981 - DNA, 25 bp, Homo sapien
gagtccatccaggtccctctggatg

SEQ ID NO: 4516982 - DNA, 25 bp, Homo sapien
gtgagtccatccaggtccctctgga

SEQ ID NO: 4516983 - DNA, 25 bp, Homo sapien
gcagtggtgcgtggcatccgggcca

SEQ ID NO: 4516984 - DNA, 25 bp, Homo sapien
tggcagtggtgcgtggcatccgggc

SEQ ID NO: 4516985 - DNA, 25 bp, Homo sapien
gtggtgcgtggcatccgggccagcg

SEQ ID NO: 4516986 - DNA, 25 bp, Homo sapien
tggtgcgtggcatccgggccagcgt

SEQ ID NO: 4516987 - DNA, 25 bp, Homo sapien
ggttgccgagcatcagcctttggct

SEQ ID NO: 4516988 - DNA, 25 bp, Homo sapien
ggcttggtgtcggcgctcctgttac

SEQ ID NO: 4516989 - DNA, 25 bp, Homo sapien
caagggtggggtactttggcatctc

SEQ ID NO: 4516990 - DNA, 25 bp, Homo sapien
ttcctcaggaactgacccgaatgcc

SEQ ID NO: 4516991 - DNA, 25 bp, Homo sapien
ggctgacacccaggggccagtacag

SEQ ID NO: 4516992 - DNA, 25 bp, Homo sapien
tactgccagattggcagcagtacgt

SEQ ID NO: 4516993 - DNA, 25 bp, Homo sapien
caggctgcaatttccggtgtggtgt

SEQ ID NO: 4516994 - DNA, 25 bp, Homo sapien
ttggttggccgtgagacggtaggtg

SEQ ID NO: 4516995 - DNA, 25 bp, Homo sapien
gcatggaggcgtgaggttccatttg

SEQ ID NO: 4516996 - DNA, 25 bp, Homo sapien
ctgcatggaggcgtgaggttccatt

SEQ ID NO: 4516997 - DNA, 25 bp, Homo sapien
tgcatggaggcgtgaggttccattt

SEQ ID NO: 4516998 - DNA, 25 bp, Homo sapien
cctgcatggaggcgtgaggttccat

SEQ ID NO: 4516999 - DNA, 25 bp, Homo sapien
gaaaactttcattgggcccgctgtc

SEQ ID NO: 4517000 - DNA, 25 bp, Homo sapien
ccagcccttggtgtggtgaagctca

SEQ ID NO: 4517001 - DNA, 25 bp, Homo sapien
gtgagtggtcatcagtcaggtgccc

SEQ ID NO: 4517002 - DNA, 25 bp, Homo sapien
tccgggtcccgatggatgcatgcgt

SEQ ID NO: 4517003 - DNA, 25 bp, Homo sapien
atggtttctccggaagggcagcttc

SEQ ID NO: 4517004 - DNA, 25 bp, Homo sapien
ccagagatggatggtttctccggaa

SEQ ID NO: 4517005 - DNA, 25 bp, Homo sapien
gttaattgatcccaagaaggacgcc

SEQ ID NO: 4517006 - DNA, 25 bp, Homo sapien
gggcagcttccttgttaattgatcc

SEQ ID NO: 4517007 - DNA, 25 bp, Homo sapien
cttcaacccaatacagtgcagcagc

SEQ ID NO: 4517008 - DNA, 25 bp, Homo sapien
gttccttcaacccaatacagtgcag

SEQ ID NO: 4517009 - DNA, 25 bp, Homo sapien
gagagttccttcaacccaatacagt

SEQ ID NO: 4517010 - DNA, 25 bp, Homo sapien
ctgcaggggtaatggaggcccaggc

SEQ ID NO: 4517011 - DNA, 25 bp, Homo sapien
ctgctgcactgagctgcggtgagcc

SEQ ID NO: 4517012 - DNA, 25 bp, Homo sapien
ctgcactgagctgcggtgagcctat

SEQ ID NO: 4517013 - DNA, 25 bp, Homo sapien
cactggatgcatgggttgcggggca

SEQ ID NO: 4517014 - DNA, 25 bp, Homo sapien
actgagctgcggtgagcctatctgg

SEQ ID NO: 4517015 - DNA, 25 bp, Homo sapien
catggggtcacacaagagctcccca

SEQ ID NO: 4517016 - DNA, 25 bp, Homo sapien
tgccatggggtcacacaagagctcc

SEQ ID NO: 4517017 - DNA, 25 bp, Homo sapien
ggatgccatggggtcacacaagagc

SEQ ID NO: 4517018 - DNA, 25 bp, Homo sapien
tggggtcacacaagagctccccatc

SEQ ID NO: 4517019 - DNA, 25 bp, Homo sapien
ctccaggttgtgatttccagttcat

SEQ ID NO: 4517020 - DNA, 25 bp, Homo sapien
gcctgtgcccagtagctctgtcgta

SEQ ID NO: 4517021 - DNA, 25 bp, Homo sapien
tggccatgaactggttggtggccct

SEQ ID NO: 4517022 - DNA, 25 bp, Homo sapien
tggatgggtgcccacaatgcaccgg

SEQ ID NO: 4517023 - DNA, 25 bp, Homo sapien
gactgccagctttgcagcggcatct

SEQ ID NO: 4517024 - DNA, 25 bp, Homo sapien
tgtgagagtctgtccttgaggactg

SEQ ID NO: 4517025 - DNA, 25 bp, Homo sapien
aatcagacccaagacgatgccttcc

SEQ ID NO: 4517026 - DNA, 25 bp, Homo sapien
gactgcccaggacaaatgagtggga

SEQ ID NO: 4517027 - DNA, 25 bp, Homo sapien
tgggacaacagaggctcccggatac

SEQ ID NO: 4517028 - DNA, 25 bp, Homo sapien
gaaatgggtgggcgatcgggcccat

SEQ ID NO: 4517029 - DNA, 25 bp, Homo sapien
atgggtgggcgatcgggcccatggg

SEQ ID NO: 4517030 - DNA, 25 bp, Homo sapien
tggaaatgggtgggcgatcgggccc

SEQ ID NO: 4517031 - DNA, 25 bp, Homo sapien
aaatgggtgggcgatcgggcccatg

SEQ ID NO: 4517032 - DNA, 25 bp, Homo sapien
ctggtgcgtgcttggagaaggatcc

SEQ ID NO: 4517033 - DNA, 25 bp, Homo sapien
tgggactgccagattggcagcagtg

SEQ ID NO: 4517034 - DNA, 25 bp, Homo sapien
tgcgtgcttggagaaggatcctggg

SEQ ID NO: 4517035 - DNA, 25 bp, Homo sapien
aaggatcctgggcaggcattctctc

SEQ ID NO: 4517036 - DNA, 25 bp, Homo sapien
ccagggtttccgttgtggtccagag

SEQ ID NO: 4517037 - DNA, 25 bp, Homo sapien
cagggtttccgttgtggtccagagt

SEQ ID NO: 4517038 - DNA, 25 bp, Homo sapien
tgcccagggtttccgttgtggtcca

SEQ ID NO: 4517039 - DNA, 25 bp, Homo sapien
tggcttccttggaaatcatacccaa

SEQ ID NO: 4517040 - DNA, 25 bp, Homo sapien
atgggttctccagaagagtggcttc

SEQ ID NO: 4517041 - DNA, 25 bp, Homo sapien
tacccaaggaagataccttccctga

SEQ ID NO: 4517042 - DNA, 25 bp, Homo sapien
ctgggatgggttctccagaagagtg

SEQ ID NO: 4517043 - DNA, 25 bp, Homo sapien
aaatcagtcccaagaaggacacctt

SEQ ID NO: 4517044 - DNA, 25 bp, Homo sapien
ggaaatcagtcccaagaaggacacc

SEQ ID NO: 4517045 - DNA, 25 bp, Homo sapien
tttccttggaaatcagtcccaagaa

SEQ ID NO: 4517046 - DNA, 25 bp, Homo sapien
ttggaaatcagtcccaagaaggaca

SEQ ID NO: 4517047 - DNA, 25 bp, Homo sapien
gacccacggtcaaggatcctgtgct

SEQ ID NO: 4517048 - DNA, 25 bp, Homo sapien
cctggttctgagtcatggggtcacc

SEQ ID NO: 4517049 - DNA, 25 bp, Homo sapien
ctgaagtggagtggccggaagggtg

SEQ ID NO: 4517050 - DNA, 25 bp, Homo sapien
gtgctggcaatttgctgcgcagcct

SEQ ID NO: 4517051 - DNA, 25 bp, Homo sapien
tctagctgagactcggtgcacgggt

SEQ ID NO: 4517052 - DNA, 25 bp, Homo sapien
ttgtccgtgaggcaacccacattcg

SEQ ID NO: 4517053 - DNA, 25 bp, Homo sapien
tcacctttaggccatgtgggtttcc

SEQ ID NO: 4517054 - DNA, 25 bp, Homo sapien
tccggaggccacaggtgttaagcag

SEQ ID NO: 4517055 - DNA, 25 bp, Homo sapien
gggccctctgacattgaccggcata

SEQ ID NO: 4517056 - DNA, 25 bp, Homo sapien
ggccctctgacattgaccggcatag

SEQ ID NO: 4517057 - DNA, 25 bp, Homo sapien
gctctggttcccaggcgtggcatgt

SEQ ID NO: 4517058 - DNA, 25 bp, Homo sapien
tcagtgagctcttccgcccatttgg

SEQ ID NO: 4517059 - DNA, 25 bp, Homo sapien
gccttcgggccatgagagtttccta

SEQ ID NO: 4517060 - DNA, 25 bp, Homo sapien
ccttcgggccatgagagtttcctaa

SEQ ID NO: 4517061 - DNA, 25 bp, Homo sapien
caagaaggacgcctgtcctgaagcc

SEQ ID NO: 4517062 - DNA, 25 bp, Homo sapien
ggttcattcagcaccaagcaggcag

SEQ ID NO: 4517063 - DNA, 25 bp, Homo sapien
gatgagttatccagaagggccactt

SEQ ID NO: 4517064 - DNA, 25 bp, Homo sapien
gagacttggtgcatcggtcaggcct

SEQ ID NO: 4517065 - DNA, 25 bp, Homo sapien
gcccaatggagctgggccagtttct

SEQ ID NO: 4517066 - DNA, 25 bp, Homo sapien
cctgtcctagatggtgagctcggag

SEQ ID NO: 4517067 - DNA, 25 bp, Homo sapien
cttgcattgggcccaatggagctgg

SEQ ID NO: 4517068 - DNA, 25 bp, Homo sapien
gtgtcctcctgtcctagatggtgag

SEQ ID NO: 4517069 - DNA, 25 bp, Homo sapien
gccctgaatgggaccgatgctgttg

SEQ ID NO: 4517070 - DNA, 25 bp, Homo sapien
tttcctgagtttcagtgtcaggatg

SEQ ID NO: 4517071 - DNA, 25 bp, Homo sapien
ttcctgagtttcagtgtcaggatgc

SEQ ID NO: 4517072 - DNA, 25 bp, Homo sapien
gaatgggaccgatgctgttgagcaa

SEQ ID NO: 4517073 - DNA, 25 bp, Homo sapien
aactggacccaagatgttgccttcc

SEQ ID NO: 4517074 - DNA, 25 bp, Homo sapien
tcagtgcatgtgtcaggcctcgagg

SEQ ID NO: 4517075 - DNA, 25 bp, Homo sapien
tcgaggattgccgaggccacatgat

SEQ ID NO: 4517076 - DNA, 25 bp, Homo sapien
agacttccttcagccccgtgcagga

SEQ ID NO: 4517077 - DNA, 25 bp, Homo sapien
taggccaagtcgacagcttgtgtcc

SEQ ID NO: 4517078 - DNA, 25 bp, Homo sapien
tcgtgagctttaggccaagtcgaca

SEQ ID NO: 4517079 - DNA, 25 bp, Homo sapien
caagtcgacagcttgtgtcctgctg

SEQ ID NO: 4517080 - DNA, 25 bp, Homo sapien
agctttaggccaagtcgacagcttg

SEQ ID NO: 4517081 - DNA, 25 bp, Homo sapien
ccatggggtcatgtccagggtggca

SEQ ID NO: 4517082 - DNA, 25 bp, Homo sapien
ccgctgttgatggtcctatcctgag

SEQ ID NO: 4517083 - DNA, 25 bp, Homo sapien
gaaggcccgctgttgatggtcctat

SEQ ID NO: 4517084 - DNA, 25 bp, Homo sapien
tggaatgtgcggtgggaaggcccgc

SEQ ID NO: 4517085 - DNA, 25 bp, Homo sapien
gccatgagcatgtcggtgaccctgt

SEQ ID NO: 4517086 - DNA, 25 bp, Homo sapien
caggctcctcggttggccatgagca

SEQ ID NO: 4517087 - DNA, 25 bp, Homo sapien
tgtccacggtggcacatggcttctg

SEQ ID NO: 4517088 - DNA, 25 bp, Homo sapien
tgcccagcggcaggctatgcaactt

SEQ ID NO: 4517089 - DNA, 25 bp, Homo sapien
tggcaagtgtccgtcagccaggtgc

SEQ ID NO: 4517090 - DNA, 25 bp, Homo sapien
aatggaccctggcaagtgtccgtca

SEQ ID NO: 4517091 - DNA, 25 bp, Homo sapien
gaccctggcaagtgtccgtcagcca

SEQ ID NO: 4517092 - DNA, 25 bp, Homo sapien
caggaccaatggaccctggcaagtg

SEQ ID NO: 4517093 - DNA, 25 bp, Homo sapien
cccagttgagacttggtgtgcaggt

SEQ ID NO: 4517094 - DNA, 25 bp, Homo sapien
gatctgcaggaatgacaatggtcca

SEQ ID NO: 4517095 - DNA, 25 bp, Homo sapien
caggacatcgcccagttgagacttg

SEQ ID NO: 4517096 - DNA, 25 bp, Homo sapien
tgccacgggtttcacttgggagctc

SEQ ID NO: 4517097 - DNA, 25 bp, Homo sapien
catcccacctgtgaccctgaatggg

SEQ ID NO: 4517098 - DNA, 25 bp, Homo sapien
gggtcgggccatggaggttcaagga

SEQ ID NO: 4517099 - DNA, 25 bp, Homo sapien
tcgggccatggaggttcaaggatct

SEQ ID NO: 4517100 - DNA, 25 bp, Homo sapien
ggaggttcaaggatctcatcccacc

SEQ ID NO: 4517101 - DNA, 25 bp, Homo sapien
caggccacttggcattgaccggtat

SEQ ID NO: 4517102 - DNA, 25 bp, Homo sapien
tgggccagggaacgttggtggctcc

SEQ ID NO: 4517103 - DNA, 25 bp, Homo sapien
agggaacgttggtggctcctccctg

SEQ ID NO: 4517104 - DNA, 25 bp, Homo sapien
cacttggcattgaccggtataggtg

SEQ ID NO: 4517105 - DNA, 25 bp, Homo sapien
gcagctcctagctgagaatcggtgc

SEQ ID NO: 4517106 - DNA, 25 bp, Homo sapien
ccaccggggaggcataggttctcca

SEQ ID NO: 4517107 - DNA, 25 bp, Homo sapien
tgagaatcggtgcttgggtcagacc

SEQ ID NO: 4517108 - DNA, 25 bp, Homo sapien
cacatgagggcgactgagagcctcc

SEQ ID NO: 4517109 - DNA, 25 bp, Homo sapien
ggtccctcttgagaaatgggccatc

SEQ ID NO: 4517110 - DNA, 25 bp, Homo sapien
ggatggtccctcttgagaaatgggc

SEQ ID NO: 4517111 - DNA, 25 bp, Homo sapien
cgttgggccaaaggagagcccgaat

SEQ ID NO: 4517112 - DNA, 25 bp, Homo sapien
gtcagcactgggacccgtgggcgtt

SEQ ID NO: 4517113 - DNA, 25 bp, Homo sapien
tcttctgcccaagtggtccccgcgg

SEQ ID NO: 4517114 - DNA, 25 bp, Homo sapien
gttatggggcatgttggagtctcct

SEQ ID NO: 4517115 - DNA, 25 bp, Homo sapien
ctgggctccggatccctggttatgg

SEQ ID NO: 4517116 - DNA, 25 bp, Homo sapien
ttggtatctgggctccggatccctg

SEQ ID NO: 4517117 - DNA, 25 bp, Homo sapien
cagcatggggtcctcgacattcagc

SEQ ID NO: 4517118 - DNA, 25 bp, Homo sapien
gttccttcagcccaatgtagggcag

SEQ ID NO: 4517119 - DNA, 25 bp, Homo sapien
gctgaaactcggtggacagctcagg

SEQ ID NO: 4517120 - DNA, 25 bp, Homo sapien
ttcagcccaatgtagggcagctccc

SEQ ID NO: 4517121 - DNA, 25 bp, Homo sapien
tcccagctgaaactcggtggacagc

SEQ ID NO: 4517122 - DNA, 25 bp, Homo sapien
ttggagagggcaccagggccggtgc

SEQ ID NO: 4517123 - DNA, 25 bp, Homo sapien
gcaccagggccggtgcccacaatgc

SEQ ID NO: 4517124 - DNA, 25 bp, Homo sapien
cagagaaagtgtggcccaggggccc

SEQ ID NO: 4517125 - DNA, 25 bp, Homo sapien
gagagggcaccagggccggtgccca

SEQ ID NO: 4517126 - DNA, 25 bp, Homo sapien
tggcatctggccaaccaccttggtt

SEQ ID NO: 4517127 - DNA, 25 bp, Homo sapien
gtccctggtatggccctggggtcat

SEQ ID NO: 4517128 - DNA, 25 bp, Homo sapien
ggttgatggccctgtcctgtgtcct

SEQ ID NO: 4517129 - DNA, 25 bp, Homo sapien
gtgtgggagctggcctgagcagtgg

SEQ ID NO: 4517130 - DNA, 25 bp, Homo sapien
ttcagcatggatcccatcacatggg

SEQ ID NO: 4517131 - DNA, 25 bp, Homo sapien
gtcctccttctgtccctctagatgg

SEQ ID NO: 4517132 - DNA, 25 bp, Homo sapien
tcctccttctgtccctctagatggt

SEQ ID NO: 4517133 - DNA, 25 bp, Homo sapien
ccttctgtccctctagatggtgagc

SEQ ID NO: 4517134 - DNA, 25 bp, Homo sapien
ctccttctgtccctctagatggtga

SEQ ID NO: 4517135 - DNA, 25 bp, Homo sapien
cctgggattgggtcaaggttgactc

SEQ ID NO: 4517136 - DNA, 25 bp, Homo sapien
tccctgggattgggtcaaggttgac

SEQ ID NO: 4517137 - DNA, 25 bp, Homo sapien
tggccctgaatgtgaccatcgctgt

SEQ ID NO: 4517138 - DNA, 25 bp, Homo sapien
ccagggacagcccgcatcccgctgg

SEQ ID NO: 4517139 - DNA, 25 bp, Homo sapien
tccgggttccactggatgcatgtgc

SEQ ID NO: 4517140 - DNA, 25 bp, Homo sapien
ggtgctcagccatcggtgcgctgaa

SEQ ID NO: 4517141 - DNA, 25 bp, Homo sapien
tcctggtgccctgatctcctgcact

SEQ ID NO: 4517142 - DNA, 25 bp, Homo sapien
ttccactggatgcatgtgcgggaag

SEQ ID NO: 4517143 - DNA, 25 bp, Homo sapien
ttcctgagtccctgttctcgccttt

SEQ ID NO: 4517144 - DNA, 25 bp, Homo sapien
tcctgagtccctgttctcgcctttg

SEQ ID NO: 4517145 - DNA, 25 bp, Homo sapien
ctgagtccctgttctcgcctttgtc

SEQ ID NO: 4517146 - DNA, 25 bp, Homo sapien
gagtccctgttctcgcctttgtctt

SEQ ID NO: 4517147 - DNA, 25 bp, Homo sapien
tctaggttgtgatttccgtgcacac

SEQ ID NO: 4517148 - DNA, 25 bp, Homo sapien
ctatgcgatagccaggtctgcagcg

SEQ ID NO: 4517149 - DNA, 25 bp, Homo sapien
aagcacatggccctgtagctctagg

SEQ ID NO: 4517150 - DNA, 25 bp, Homo sapien
gacagcatcttgatgtgtgcccaac

SEQ ID NO: 4517151 - DNA, 25 bp, Homo sapien
aacttgagaacttgaagggcatctc

SEQ ID NO: 4517152 - DNA, 25 bp, Homo sapien
ggctccccttgcgggcttggtgtct

SEQ ID NO: 4517153 - DNA, 25 bp, Homo sapien
gctccccttgcgggcttggtgtctg

SEQ ID NO: 4517154 - DNA, 25 bp, Homo sapien
gcatctcaggggagcccaaccctgt

SEQ ID NO: 4517155 - DNA, 25 bp, Homo sapien
gggaatctgaccctaggagcacaca

SEQ ID NO: 4517156 - DNA, 25 bp, Homo sapien
acatttcctgaagctcggcagggag

SEQ ID NO: 4517157 - DNA, 25 bp, Homo sapien
acacatttcctgaagctcggcaggg

SEQ ID NO: 4517158 - DNA, 25 bp, Homo sapien
gaccctaggagcacacatttcctga

SEQ ID NO: 4517159 - DNA, 25 bp, Homo sapien
tctggtgagcacaactgggtgctgc

SEQ ID NO: 4517160 - DNA, 25 bp, Homo sapien
ggtgatgacttaaaaaccatgctca

SEQ ID NO: 4517161 - DNA, 25 bp, Homo sapien
taggccgaacctaggtgagaatgtt

SEQ ID NO: 4517162 - DNA, 25 bp, Homo sapien
caataggattacacttaggccgaac

SEQ ID NO: 4517163 - DNA, 25 bp, Homo sapien
ggatggaacaagttggtggctcttt

SEQ ID NO: 4517164 - DNA, 25 bp, Homo sapien
gatggaacaagttggtggctctttc

SEQ ID NO: 4517165 - DNA, 25 bp, Homo sapien
gaacaagttggtggctctttcctga

SEQ ID NO: 4517166 - DNA, 25 bp, Homo sapien
tggaacaagttggtggctctttcct

SEQ ID NO: 4517167 - DNA, 25 bp, Homo sapien
ttggttgtccatgacctggctggtg

SEQ ID NO: 4517168 - DNA, 25 bp, Homo sapien
tcatacggggcagctgttttgggca

SEQ ID NO: 4517169 - DNA, 25 bp, Homo sapien
ctggcattgattagcctccttggtt

SEQ ID NO: 4517170 - DNA, 25 bp, Homo sapien
gtggcccgatcctgtgcccagtggt

SEQ ID NO: 4517171 - DNA, 25 bp, Homo sapien
aaagcaagcatgagctggcacccaa

SEQ ID NO: 4517172 - DNA, 25 bp, Homo sapien
ggaaagcaagcatgagctggcaccc

SEQ ID NO: 4517173 - DNA, 25 bp, Homo sapien
atggagggtggtcacatgtcctcca

SEQ ID NO: 4517174 - DNA, 25 bp, Homo sapien
agcaagcatgagctggcacccaaca

SEQ ID NO: 4517175 - DNA, 25 bp, Homo sapien
ttggtgtttgcgctcctcttctcca

SEQ ID NO: 4517176 - DNA, 25 bp, Homo sapien
gtgagctcttctgccaagcggttcc

SEQ ID NO: 4517177 - DNA, 25 bp, Homo sapien
ggcccagtgctttctttgcgctcct

SEQ ID NO: 4517178 - DNA, 25 bp, Homo sapien
tccctttgtgggcttggtgtttgcg

SEQ ID NO: 4517179 - DNA, 25 bp, Homo sapien
aggaggatgtcttccctgaagccct

SEQ ID NO: 4517180 - DNA, 25 bp, Homo sapien
gtcatgcaggggagctgttttggac

SEQ ID NO: 4517181 - DNA, 25 bp, Homo sapien
ggtggcccggatctgtgcccaacag

SEQ ID NO: 4517182 - DNA, 25 bp, Homo sapien
ggtcatgcaggggagctgttttgga

SEQ ID NO: 4517183 - DNA, 25 bp, Homo sapien
cggatctgtgcccaacagtcccagt

SEQ ID NO: 4517184 - DNA, 25 bp, Homo sapien
tgcactgagctctggtgagtccatc

SEQ ID NO: 4517185 - DNA, 25 bp, Homo sapien
ctggatgcatgagctgggggcggga

SEQ ID NO: 4517186 - DNA, 25 bp, Homo sapien
ctctggtgagtccatctgggtcctg

SEQ ID NO: 4517187 - DNA, 25 bp, Homo sapien
tagtgccctcggctcctgcactgag

SEQ ID NO: 4517188 - DNA, 25 bp, Homo sapien
gctggcttggtatccgggctctggg

SEQ ID NO: 4517189 - DNA, 25 bp, Homo sapien
gtgacggggcatgttggaggctcct

SEQ ID NO: 4517190 - DNA, 25 bp, Homo sapien
ctggcttggtatccgggctctgggt

SEQ ID NO: 4517191 - DNA, 25 bp, Homo sapien
ccctggtgacggggcatgttggagg

SEQ ID NO: 4517192 - DNA, 25 bp, Homo sapien
ccttgagcggcataggtgagtgcat

SEQ ID NO: 4517193 - DNA, 25 bp, Homo sapien
gccttgagcggcataggtgagtgca

SEQ ID NO: 4517194 - DNA, 25 bp, Homo sapien
ctgttttggtcatgggccatgagtg

SEQ ID NO: 4517195 - DNA, 25 bp, Homo sapien
gggtccctgacattctgcctttggg

SEQ ID NO: 4517196 - DNA, 25 bp, Homo sapien
tcatgggccatgagtgatgcagcat

SEQ ID NO: 4517197 - DNA, 25 bp, Homo sapien
accagggttttctcaggctgccaac

SEQ ID NO: 4517198 - DNA, 25 bp, Homo sapien
gtgatcctggaagcccctaggcttg

SEQ ID NO: 4517199 - DNA, 25 bp, Homo sapien
atgtgatcctggaagcccctaggct

SEQ ID NO: 4517200 - DNA, 25 bp, Homo sapien
gcatgtgatcctggaagcccctagg

SEQ ID NO: 4517201 - DNA, 25 bp, Homo sapien
atcctggaagcccctaggcttggag

SEQ ID NO: 4517202 - DNA, 25 bp, Homo sapien
tctcggacttccaggtctgcagcgg

SEQ ID NO: 4517203 - DNA, 25 bp, Homo sapien
ggttgtgtgtggtagcaggcctggg

SEQ ID NO: 4517204 - DNA, 25 bp, Homo sapien
cacgcctaggtacgatctctcggac

SEQ ID NO: 4517205 - DNA, 25 bp, Homo sapien
cttggcgtctgggccagcatgcttg

SEQ ID NO: 4517206 - DNA, 25 bp, Homo sapien
tctacattgatgtgtgaggccctgg

SEQ ID NO: 4517207 - DNA, 25 bp, Homo sapien
gagccaggtgacacgcttgccctgt

SEQ ID NO: 4517208 - DNA, 25 bp, Homo sapien
tctggtgcgctgaaactctgaccct

SEQ ID NO: 4517209 - DNA, 25 bp, Homo sapien
tccgtgagggatcagtattcagcat

SEQ ID NO: 4517210 - DNA, 25 bp, Homo sapien
attttccacctaggaggtccacctg

SEQ ID NO: 4517211 - DNA, 25 bp, Homo sapien
tttccacctaggaggtccacctggc

SEQ ID NO: 4517212 - DNA, 25 bp, Homo sapien
ctttctccatggtcgagtgtcgtga

SEQ ID NO: 4517213 - DNA, 25 bp, Homo sapien
gaaggcttgctattgaggcacttgt

SEQ ID NO: 4517214 - DNA, 25 bp, Homo sapien
tcctgagttgggaaggcttgctatt

SEQ ID NO: 4517215 - DNA, 25 bp, Homo sapien
gctattgaggcacttgtactgtgaa

SEQ ID NO: 4517216 - DNA, 25 bp, Homo sapien
ggtgtcacctccagggtggcagggt

SEQ ID NO: 4517217 - DNA, 25 bp, Homo sapien
gggtggtcacacgttctccatctgt

SEQ ID NO: 4517218 - DNA, 25 bp, Homo sapien
ttctgtcggcctcgcttttcctggg

SEQ ID NO: 4517219 - DNA, 25 bp, Homo sapien
ggtcacacgttctccatctgttcct

SEQ ID NO: 4517220 - DNA, 25 bp, Homo sapien
ctccagatggtgagacttctgtcgg

SEQ ID NO: 4517221 - DNA, 25 bp, Homo sapien
cacttccttcggaatctgacccatg

SEQ ID NO: 4517222 - DNA, 25 bp, Homo sapien
acccatggagcacgcctttcctgaa

SEQ ID NO: 4517223 - DNA, 25 bp, Homo sapien
cagggagcgatggtttctcaggagg

SEQ ID NO: 4517224 - DNA, 25 bp, Homo sapien
gatggtttctcaggagggccacttc

SEQ ID NO: 4517225 - DNA, 25 bp, Homo sapien
ggagagggcaccagatctggcaccc

SEQ ID NO: 4517226 - DNA, 25 bp, Homo sapien
gagctagttggtggccctgtcccat

SEQ ID NO: 4517227 - DNA, 25 bp, Homo sapien
gctagttggtggccctgtcccatgc

SEQ ID NO: 4517228 - DNA, 25 bp, Homo sapien
agctagttggtggccctgtcccatg

SEQ ID NO: 4517229 - DNA, 25 bp, Homo sapien
tcggtgttccagtaaggcctcaagg

SEQ ID NO: 4517230 - DNA, 25 bp, Homo sapien
cggtgttccagtaaggcctcaagga

SEQ ID NO: 4517231 - DNA, 25 bp, Homo sapien
agggttccttcacccagctgagact

SEQ ID NO: 4517232 - DNA, 25 bp, Homo sapien
ggtgttccagtaaggcctcaaggac

SEQ ID NO: 4517233 - DNA, 25 bp, Homo sapien
ggttgagtcgcagagattcaaggat

SEQ ID NO: 4517234 - DNA, 25 bp, Homo sapien
agtcgcagagattcaaggatgctgc

SEQ ID NO: 4517235 - DNA, 25 bp, Homo sapien
agaggggctacgaggcaccacagga

SEQ ID NO: 4517236 - DNA, 25 bp, Homo sapien
catggggttgagtcgcagagattca

SEQ ID NO: 4517237 - DNA, 25 bp, Homo sapien
gggctttgggccaacggacagccca

SEQ ID NO: 4517238 - DNA, 25 bp, Homo sapien
ctttctctgaggtcgagtgtcgtga

SEQ ID NO: 4517239 - DNA, 25 bp, Homo sapien
gtggtaatgtaggtcagccctggga

SEQ ID NO: 4517240 - DNA, 25 bp, Homo sapien
gctttgggccaacggacagcccaca

SEQ ID NO: 4517241 - DNA, 25 bp, Homo sapien
aggacctgtactgagaatttgttgc

SEQ ID NO: 4517242 - DNA, 25 bp, Homo sapien
gttgcttaggctgcttaggatccat

SEQ ID NO: 4517243 - DNA, 25 bp, Homo sapien
gctgcttaggatccatgttgtcacc

SEQ ID NO: 4517244 - DNA, 25 bp, Homo sapien
ggaaagcccaatgtcgaaggacctg

SEQ ID NO: 4517245 - DNA, 25 bp, Homo sapien
gacctggctggtagcccgtgcctgt

SEQ ID NO: 4517246 - DNA, 25 bp, Homo sapien
ttggccgtgacctggctggtagccc

SEQ ID NO: 4517247 - DNA, 25 bp, Homo sapien
ccgtgacctggctggtagcccgtgc

SEQ ID NO: 4517248 - DNA, 25 bp, Homo sapien
gctttgccactgcaggtctgcagtg

SEQ ID NO: 4517249 - DNA, 25 bp, Homo sapien
gcagtatggcacagcctgggggcat

SEQ ID NO: 4517250 - DNA, 25 bp, Homo sapien
ctgcagtatggcacagcctgggggc

SEQ ID NO: 4517251 - DNA, 25 bp, Homo sapien
tgcagtatggcacagcctgggggca

SEQ ID NO: 4517252 - DNA, 25 bp, Homo sapien
tggagggtggtcacatgtactccac

SEQ ID NO: 4517253 - DNA, 25 bp, Homo sapien
tgtgtccctagatggtgagactgga

SEQ ID NO: 4517254 - DNA, 25 bp, Homo sapien
agacttccattgggcccacttttca

SEQ ID NO: 4517255 - DNA, 25 bp, Homo sapien
tccctagatggtgagactggaggaa

SEQ ID NO: 4517256 - DNA, 25 bp, Homo sapien
tctggaggtggcccaacctgtctct

SEQ ID NO: 4517257 - DNA, 25 bp, Homo sapien
ctggaggtggcccaacctgtctctg

SEQ ID NO: 4517258 - DNA, 25 bp, Homo sapien
catgtcgttctggattggccaagta

SEQ ID NO: 4517259 - DNA, 25 bp, Homo sapien
tcgttctggattggccaagtatggc

SEQ ID NO: 4517260 - DNA, 25 bp, Homo sapien
tggattggccaagtatggcctagct

SEQ ID NO: 4517261 - DNA, 25 bp, Homo sapien
agagggcaccatgtcgttctggatt

SEQ ID NO: 4517262 - DNA, 25 bp, Homo sapien
gagagggtgtcttgatttgtgccca

SEQ ID NO: 4517263 - DNA, 25 bp, Homo sapien
gtgtgcagagcatggacggtgaccc

SEQ ID NO: 4517264 - DNA, 25 bp, Homo sapien
tgtcttgatttgtgcccaccatgcc

SEQ ID NO: 4517265 - DNA, 25 bp, Homo sapien
gaggtgtgcagagcatggacggtga

SEQ ID NO: 4517266 - DNA, 25 bp, Homo sapien
gccagccaccttggttggccgtgag

SEQ ID NO: 4517267 - DNA, 25 bp, Homo sapien
ccacgtgtggcatctgggccagcca

SEQ ID NO: 4517268 - DNA, 25 bp, Homo sapien
agcctgagccacgtgtggcatctgg

SEQ ID NO: 4517269 - DNA, 25 bp, Homo sapien
caccttggttggccgtgagctggct

SEQ ID NO: 4517270 - DNA, 25 bp, Homo sapien
ccctggggtcgtgtgggggagccat

SEQ ID NO: 4517271 - DNA, 25 bp, Homo sapien
ccagtggtgccagggcggccctggg

SEQ ID NO: 4517272 - DNA, 25 bp, Homo sapien
gccctggggtcgtgtgggggagcca

SEQ ID NO: 4517273 - DNA, 25 bp, Homo sapien
gtggccagtggtgccagggcggccc

SEQ ID NO: 4517274 - DNA, 25 bp, Homo sapien
ctgaagcgcatcttgtgggggggca

SEQ ID NO: 4517275 - DNA, 25 bp, Homo sapien
ggctcccgttgcgggcttggtgccc

SEQ ID NO: 4517276 - DNA, 25 bp, Homo sapien
ggtgcccatgcttcgcttccccagg

SEQ ID NO: 4517277 - DNA, 25 bp, Homo sapien
gggggcaatcctgtctctgtgcttc

SEQ ID NO: 4517278 - DNA, 25 bp, Homo sapien
catgagtgaggcagcgtcggttcgt

SEQ ID NO: 4517279 - DNA, 25 bp, Homo sapien
ctttgagcggcatgggtcagagcat

SEQ ID NO: 4517280 - DNA, 25 bp, Homo sapien
gagcatcctgtcagggtcatgggcc

SEQ ID NO: 4517281 - DNA, 25 bp, Homo sapien
cagcgtcggttcgtcgagagtcagc

SEQ ID NO: 4517282 - DNA, 25 bp, Homo sapien
tcaaggactgctcgggccacatgat

SEQ ID NO: 4517283 - DNA, 25 bp, Homo sapien
agggttccttcagcccaacataatg

SEQ ID NO: 4517284 - DNA, 25 bp, Homo sapien
tgggaatctgactctaggagcatgc

SEQ ID NO: 4517285 - DNA, 25 bp, Homo sapien
ccagctgaaactcggtggcagatca

SEQ ID NO: 4517286 - DNA, 25 bp, Homo sapien
cggagattcaaggaatgctacccac

SEQ ID NO: 4517287 - DNA, 25 bp, Homo sapien
tgatagggcccatgcgatcaggctg

SEQ ID NO: 4517288 - DNA, 25 bp, Homo sapien
catgcgatcaggctgcggagattca

SEQ ID NO: 4517289 - DNA, 25 bp, Homo sapien
ttcaaggaatgctacccacccatgg

SEQ ID NO: 4517290 - DNA, 25 bp, Homo sapien
tgaggccctggttggacacatgtcc

SEQ ID NO: 4517291 - DNA, 25 bp, Homo sapien
tgtgaggccctggttggacacatgt

SEQ ID NO: 4517292 - DNA, 25 bp, Homo sapien
tatgtgaggccctggttggacacat

SEQ ID NO: 4517293 - DNA, 25 bp, Homo sapien
gaggccctggttggacacatgtcct

SEQ ID NO: 4517294 - DNA, 25 bp, Homo sapien
tcagctcccagtgcgctgaagctca

SEQ ID NO: 4517295 - DNA, 25 bp, Homo sapien
tccgggtcctgctggatgcatgaat

SEQ ID NO: 4517296 - DNA, 25 bp, Homo sapien
caccctggtgtccagcactgagctg

SEQ ID NO: 4517297 - DNA, 25 bp, Homo sapien
cctggaggaagacttgtgtcgggcc

SEQ ID NO: 4517298 - DNA, 25 bp, Homo sapien
aatgggccactagatagtctgtgtg

SEQ ID NO: 4517299 - DNA, 25 bp, Homo sapien
cctactgggataatgggccactaga

SEQ ID NO: 4517300 - DNA, 25 bp, Homo sapien
agtgcatcctactgggataatgggc

SEQ ID NO: 4517301 - DNA, 25 bp, Homo sapien
taggtgagtgcatcctactgggata

SEQ ID NO: 4517302 - DNA, 25 bp, Homo sapien
tcgaggcccaatgcagggcagtgcc

SEQ ID NO: 4517303 - DNA, 25 bp, Homo sapien
aattggtgctctggtaagggctcga

SEQ ID NO: 4517304 - DNA, 25 bp, Homo sapien
ggcagtgcccccctgagaattggtg

SEQ ID NO: 4517305 - DNA, 25 bp, Homo sapien
gggttccttctgcccaactcgaggc

SEQ ID NO: 4517306 - DNA, 25 bp, Homo sapien
tcacggagattcaaggattgcatct

SEQ ID NO: 4517307 - DNA, 25 bp, Homo sapien
tgggtcacggagattcaaggattgc

SEQ ID NO: 4517308 - DNA, 25 bp, Homo sapien
gttgggtcacggagattcaaggatt

SEQ ID NO: 4517309 - DNA, 25 bp, Homo sapien
cggagattcaaggattgcatctcac

SEQ ID NO: 4517310 - DNA, 25 bp, Homo sapien
tcaaggcggagctctgactggtacc

SEQ ID NO: 4517311 - DNA, 25 bp, Homo sapien
gggccaagaggcagcccgcatcctg

SEQ ID NO: 4517312 - DNA, 25 bp, Homo sapien
gtcgccttttctccgaggttgagtg

SEQ ID NO: 4517313 - DNA, 25 bp, Homo sapien
acggccctgaatgcgaccatccctg

SEQ ID NO: 4517314 - DNA, 25 bp, Homo sapien
gggagccgttttgggcagtggatgt

SEQ ID NO: 4517315 - DNA, 25 bp, Homo sapien
cagcctccttcgttggctgtgacct

SEQ ID NO: 4517316 - DNA, 25 bp, Homo sapien
gcctccttcgttggctgtgacctgg

SEQ ID NO: 4517317 - DNA, 25 bp, Homo sapien
gggccagcctccttcgttggctgtg

SEQ ID NO: 4517318 - DNA, 25 bp, Homo sapien
tgttggtgctccggttctctggtgt

SEQ ID NO: 4517319 - DNA, 25 bp, Homo sapien
ttggtgctccggttctctggtgtgg

SEQ ID NO: 4517320 - DNA, 25 bp, Homo sapien
tggtgctccggttctctggtgtggg

SEQ ID NO: 4517321 - DNA, 25 bp, Homo sapien
tggtgttggtgctccggttctctgg

SEQ ID NO: 4517322 - DNA, 25 bp, Homo sapien
tgcaggtcagccttgggactcgtaa

SEQ ID NO: 4517323 - DNA, 25 bp, Homo sapien
agctctggtacctggtcatgctgca

SEQ ID NO: 4517324 - DNA, 25 bp, Homo sapien
gactcgtaagctttgggccaaggga

SEQ ID NO: 4517325 - DNA, 25 bp, Homo sapien
gggtcgaatgtcacgaagggtggcc

SEQ ID NO: 4517326 - DNA, 25 bp, Homo sapien
tagagttttctcagggtgcgaccgg

SEQ ID NO: 4517327 - DNA, 25 bp, Homo sapien
cagccttcgggccactagagttttc

SEQ ID NO: 4517328 - DNA, 25 bp, Homo sapien
tgatcctaggagcacgcatttcttg

SEQ ID NO: 4517329 - DNA, 25 bp, Homo sapien
catggccttacacgacataggtgag

SEQ ID NO: 4517330 - DNA, 25 bp, Homo sapien
caaaggtgatggtggtccagacagg

SEQ ID NO: 4517331 - DNA, 25 bp, Homo sapien
ctgcaaaggtgatggtggtccagac

SEQ ID NO: 4517332 - DNA, 25 bp, Homo sapien
aggtgatggtggtccagacaggaga

SEQ ID NO: 4517333 - DNA, 25 bp, Homo sapien
tgcaaaggtgatggtggtccagaca

SEQ ID NO: 4517334 - DNA, 25 bp, Homo sapien
ctttgtgtgtgggaggtgtaacgca

SEQ ID NO: 4517335 - DNA, 25 bp, Homo sapien
tggctttgtgtgtgggaggtgtaac

SEQ ID NO: 4517336 - DNA, 25 bp, Homo sapien
ccccttccttgagattcagtggcca

SEQ ID NO: 4517337 - DNA, 25 bp, Homo sapien
tccttgagattcagtggccaaaagg

SEQ ID NO: 4517338 - DNA, 25 bp, Homo sapien
tcagccaggccatgtggggtcgctg

SEQ ID NO: 4517339 - DNA, 25 bp, Homo sapien
ggccatgtggggtcgctgaggttca

SEQ ID NO: 4517340 - DNA, 25 bp, Homo sapien
acctgaattcccacctgggagagac

SEQ ID NO: 4517341 - DNA, 25 bp, Homo sapien
ggttttctcaggcagccgacctgaa

SEQ ID NO: 4517342 - DNA, 25 bp, Homo sapien
gagataaaaggattgtgctccaccc

SEQ ID NO: 4517343 - DNA, 25 bp, Homo sapien
cgtccctgttgagtaatgggccatt

SEQ ID NO: 4517344 - DNA, 25 bp, Homo sapien
tgggagctctcagtccctagagtgt

SEQ ID NO: 4517345 - DNA, 25 bp, Homo sapien
tggcctggaatgtgaccgtccctgt

SEQ ID NO: 4517346 - DNA, 25 bp, Homo sapien
cccagggtaggctctgcaatggcca

SEQ ID NO: 4517347 - DNA, 25 bp, Homo sapien
ccttccttgagattcagtggccgaa

SEQ ID NO: 4517348 - DNA, 25 bp, Homo sapien
tattgaccaagtgggacctggctct

SEQ ID NO: 4517349 - DNA, 25 bp, Homo sapien
catgagcaggttggttgccctcacc

SEQ ID NO: 4517350 - DNA, 25 bp, Homo sapien
ccagtgcggccctggggttgttcgg

SEQ ID NO: 4517351 - DNA, 25 bp, Homo sapien
cccagtgcggccctggggttgttcg

SEQ ID NO: 4517352 - DNA, 25 bp, Homo sapien
cagtgcggccctggggttgttcggg

SEQ ID NO: 4517353 - DNA, 25 bp, Homo sapien
ccagcccagtgacccaccttccctg

SEQ ID NO: 4517354 - DNA, 25 bp, Homo sapien
ctgcagtagggcatcttgccccagc

SEQ ID NO: 4517355 - DNA, 25 bp, Homo sapien
tgcagtagggcatcttgccccagcc

SEQ ID NO: 4517356 - DNA, 25 bp, Homo sapien
cccagtgcgctgaagctcagaccct

SEQ ID NO: 4517357 - DNA, 25 bp, Homo sapien
tcctggaaatttgccatccaggctg

SEQ ID NO: 4517358 - DNA, 25 bp, Homo sapien
ctggaaatttgccatccaggctgct

SEQ ID NO: 4517359 - DNA, 25 bp, Homo sapien
tgtcctggaaatttgccatccaggc

SEQ ID NO: 4517360 - DNA, 25 bp, Homo sapien
aggctgcttctgagccatggggtca

SEQ ID NO: 4517361 - DNA, 25 bp, Homo sapien
cccaggccgtgaaggtgctctcagg

SEQ ID NO: 4517362 - DNA, 25 bp, Homo sapien
ggacaccatgtggttcctgattggc

SEQ ID NO: 4517363 - DNA, 25 bp, Homo sapien
ttggccaaggctccttggttggcca

SEQ ID NO: 4517364 - DNA, 25 bp, Homo sapien
tggcccaggccgtgaaggtgctctc

SEQ ID NO: 4517365 - DNA, 25 bp, Homo sapien
caaggaggataacttccctgatctc

SEQ ID NO: 4517366 - DNA, 25 bp, Homo sapien
cagcgcagcgttctgttgagactca

SEQ ID NO: 4517367 - DNA, 25 bp, Homo sapien
gcaggaaagagttccttcagcccca

SEQ ID NO: 4517368 - DNA, 25 bp, Homo sapien
tcaggtcaggcctggaggatttctc

SEQ ID NO: 4517369 - DNA, 25 bp, Homo sapien
tagaaagcatgtggctctggaggcc

SEQ ID NO: 4517370 - DNA, 25 bp, Homo sapien
catagaaagcatgtggctctggagg

SEQ ID NO: 4517371 - DNA, 25 bp, Homo sapien
ccccaggctttgatttccagtgcct

SEQ ID NO: 4517372 - DNA, 25 bp, Homo sapien
cagtgcctgcttggagtgggcacca

SEQ ID NO: 4517373 - DNA, 25 bp, Homo sapien
tctgcgactgccaggtctgcattgg

SEQ ID NO: 4517374 - DNA, 25 bp, Homo sapien
gccccgtggtcctggtgtggccctg

SEQ ID NO: 4517375 - DNA, 25 bp, Homo sapien
tggcccaggcagtggaggtgctctt

SEQ ID NO: 4517376 - DNA, 25 bp, Homo sapien
gtggttgagtggagctggcccaggc

SEQ ID NO: 4517377 - DNA, 25 bp, Homo sapien
ggccctggggtggttgagtggagct

SEQ ID NO: 4517378 - DNA, 25 bp, Homo sapien
cctcggttaggttgatgatgagaac

SEQ ID NO: 4517379 - DNA, 25 bp, Homo sapien
gttatgtgatgggtgttgtggcagc

SEQ ID NO: 4517380 - DNA, 25 bp, Homo sapien
tgatgggtgttgtggcagctctttg

SEQ ID NO: 4517381 - DNA, 25 bp, Homo sapien
accttattttgtctcgaggagaggt

SEQ ID NO: 4517382 - DNA, 25 bp, Homo sapien
gggacatatttaaagcagtgtgtag

SEQ ID NO: 4517383 - DNA, 25 bp, Homo sapien
agaatctctgggacatatttaaagc

SEQ ID NO: 4517384 - DNA, 25 bp, Homo sapien
tctgggacatatttaaagcagtgtg

SEQ ID NO: 4517385 - DNA, 25 bp, Homo sapien
tctctgggacatatttaaagcagtg

SEQ ID NO: 4517386 - DNA, 25 bp, Homo sapien
aggaaataactaagattggagcaga

SEQ ID NO: 4517387 - DNA, 25 bp, Homo sapien
gcaggaaataactaagattggagca

SEQ ID NO: 4517388 - DNA, 25 bp, Homo sapien
ggcaggaaataactaagattggagc

SEQ ID NO: 4517389 - DNA, 25 bp, Homo sapien
tggatatttggcactaagacccttg

SEQ ID NO: 4517390 - DNA, 25 bp, Homo sapien
tcagttggattacgctgaggcccag

SEQ ID NO: 4517391 - DNA, 25 bp, Homo sapien
cacgcttctatctgtgtgcttctaa

SEQ ID NO: 4517392 - DNA, 25 bp, Homo sapien
gatttagtaagtcctactggcacta

SEQ ID NO: 4517393 - DNA, 25 bp, Homo sapien
tcattcagacaacatgaatatcacg

SEQ ID NO: 4517394 - DNA, 25 bp, Homo sapien
caaactgtgctatccccttcaggag

SEQ ID NO: 4517395 - DNA, 25 bp, Homo sapien
cagttctggaatgagcccacagatc

SEQ ID NO: 4517396 - DNA, 25 bp, Homo sapien
gcagggaagccttgatagagccaaa

SEQ ID NO: 4517397 - DNA, 25 bp, Homo sapien
caagaacatcgagttgccaatgcac

SEQ ID NO: 4517398 - DNA, 25 bp, Homo sapien
cagtggttgtttacaggcagcatct

SEQ ID NO: 4517399 - DNA, 25 bp, Homo sapien
taaagcatagtactgggctctgctg

SEQ ID NO: 4517400 - DNA, 25 bp, Homo sapien
tttttgacctatagggcactgggct

SEQ ID NO: 4517401 - DNA, 25 bp, Homo sapien
tctgctgactgtacaacaaactggc

SEQ ID NO: 4517402 - DNA, 25 bp, Homo sapien
gtaaccatcagtcgaccctaagaag

SEQ ID NO: 4517403 - DNA, 25 bp, Homo sapien
tgatgtgtcctcagcgagagtgtcc

SEQ ID NO: 4517404 - DNA, 25 bp, Homo sapien
gacagactgctaacagctgatgtgt

SEQ ID NO: 4517405 - DNA, 25 bp, Homo sapien
cacagttcttgagctcggtacacag

SEQ ID NO: 4517406 - DNA, 25 bp, Homo sapien
tcgaatggctatcctgcagtgcctc

SEQ ID NO: 4517407 - DNA, 25 bp, Homo sapien
caaaagcaggtatcgaatggctatc

SEQ ID NO: 4517408 - DNA, 25 bp, Homo sapien
cagtgcctccaatcaacattcagac

SEQ ID NO: 4517409 - DNA, 25 bp, Homo sapien
caggtatcgaatggctatcctgcag

SEQ ID NO: 4517410 - DNA, 25 bp, Homo sapien
gctacactcaagaaagcagcacggg

SEQ ID NO: 4517411 - DNA, 25 bp, Homo sapien
tgaaatgagctacactcaagaaagc

SEQ ID NO: 4517412 - DNA, 25 bp, Homo sapien
tttctgaaatgagctacactcaaga

SEQ ID NO: 4517413 - DNA, 25 bp, Homo sapien
aatgagctacactcaagaaagcagc

SEQ ID NO: 4517414 - DNA, 25 bp, Homo sapien
agtatgaggagcaggtgaatgccac

SEQ ID NO: 4517415 - DNA, 25 bp, Homo sapien
ggagcaggtgaatgccacaacagct

SEQ ID NO: 4517416 - DNA, 25 bp, Homo sapien
ccacaacagctccatccaagatcat

SEQ ID NO: 4517417 - DNA, 25 bp, Homo sapien
aggagagtatgaggagcaggtgaat

SEQ ID NO: 4517418 - DNA, 25 bp, Homo sapien
cacaggccagttcagacacgtctta

SEQ ID NO: 4517419 - DNA, 25 bp, Homo sapien
tcctggaatacaccctgctggaaac

SEQ ID NO: 4517420 - DNA, 25 bp, Homo sapien
ccaggccggcagtccatttgtgcag

SEQ ID NO: 4517421 - DNA, 25 bp, Homo sapien
tctctttcagtgaccagcgtggcct

SEQ ID NO: 4517422 - DNA, 25 bp, Homo sapien
gagccttttcagagtcaggtaccat

SEQ ID NO: 4517423 - DNA, 25 bp, Homo sapien
cctgagagccttttcagagtcaggt

SEQ ID NO: 4517424 - DNA, 25 bp, Homo sapien
gagagccttttcagagtcaggtacc

SEQ ID NO: 4517425 - DNA, 25 bp, Homo sapien
tgagagccttttcagagtcaggtac

SEQ ID NO: 4517426 - DNA, 25 bp, Homo sapien
gaacaaggtttatgtagcatggaca

SEQ ID NO: 4517427 - DNA, 25 bp, Homo sapien
ccagcatctgaagatcacaggtgaa

SEQ ID NO: 4517428 - DNA, 25 bp, Homo sapien
tactggaggtgctagccagcacact

SEQ ID NO: 4517429 - DNA, 25 bp, Homo sapien
catggacaactgagattatcccagg

SEQ ID NO: 4517430 - DNA, 25 bp, Homo sapien
tggaaagagtatcaagaggagaccc

SEQ ID NO: 4517431 - DNA, 25 bp, Homo sapien
gaggagaccctaagacactctgtaa

SEQ ID NO: 4517432 - DNA, 25 bp, Homo sapien
gaatttacttacactccaggcaaag

SEQ ID NO: 4517433 - DNA, 25 bp, Homo sapien
tacagccatcaagacagtgcggtgc

SEQ ID NO: 4517434 - DNA, 25 bp, Homo sapien
tgctaccacggaagcattggaggca

SEQ ID NO: 4517435 - DNA, 25 bp, Homo sapien
ggtactttaaatatctggtcatgaa

SEQ ID NO: 4517436 - DNA, 25 bp, Homo sapien
cccattatgctgtgctaccacggaa

SEQ ID NO: 4517437 - DNA, 25 bp, Homo sapien
actttgggggttgatgaagtcttca

SEQ ID NO: 4517438 - DNA, 25 bp, Homo sapien
gaaagtgtgtaacacaaggccaaat

SEQ ID NO: 4517439 - DNA, 25 bp, Homo sapien
tgaaattaggcagctgctaagaatg

SEQ ID NO: 4517440 - DNA, 25 bp, Homo sapien
tgctaagaatgtccgggtgagtcag

SEQ ID NO: 4517441 - DNA, 25 bp, Homo sapien
gaatgcagcgaggaaagtgtgtaac

SEQ ID NO: 4517442 - DNA, 25 bp, Homo sapien
gtaagaggagtgacaacatgcccgg

SEQ ID NO: 4517443 - DNA, 25 bp, Homo sapien
cacagggactagtcttgggacgaca

SEQ ID NO: 4517444 - DNA, 25 bp, Homo sapien
gagcagctattctgtgcaaccgacg

SEQ ID NO: 4517445 - DNA, 25 bp, Homo sapien
tacagatggcccttagacactggcg

SEQ ID NO: 4517446 - DNA, 25 bp, Homo sapien
tacaattgtagaactttaataaata

SEQ ID NO: 4517447 - DNA, 25 bp, Homo sapien
ataaataccataataataaaacttg

SEQ ID NO: 4517448 - DNA, 25 bp, Homo sapien
taaataccataataataaaacttga

SEQ ID NO: 4517449 - DNA, 25 bp, Homo sapien
tgtagaactttaataaataccataa

SEQ ID NO: 4517450 - DNA, 25 bp, Homo sapien
tttattatataaaacgccctcagag

SEQ ID NO: 4517451 - DNA, 25 bp, Homo sapien
ttattatataaaacgccctcagagt

SEQ ID NO: 4517452 - DNA, 25 bp, Homo sapien
tattatataaaacgccctcagagta

SEQ ID NO: 4517453 - DNA, 25 bp, Homo sapien
tacacattaagaagcacagtggatg

SEQ ID NO: 4517454 - DNA, 25 bp, Homo sapien
cctaacagtgttctaaaggctggcc

SEQ ID NO: 4517455 - DNA, 25 bp, Homo sapien
tacagttgcacgaaggtccctttca

SEQ ID NO: 4517456 - DNA, 25 bp, Homo sapien
tttcatcaaggtagcgtatgtaccc

SEQ ID NO: 4517457 - DNA, 25 bp, Homo sapien
atcaatcaccaaggcacaagctcag

SEQ ID NO: 4517458 - DNA, 25 bp, Homo sapien
ggttgatctacagtaatcagttaaa

SEQ ID NO: 4517459 - DNA, 25 bp, Homo sapien
gctatagcttgtagcaaaaggatat

SEQ ID NO: 4517460 - DNA, 25 bp, Homo sapien
tatggtacataacaaacagttctgt

SEQ ID NO: 4517461 - DNA, 25 bp, Homo sapien
attcaacaagatgatggcaacacga

SEQ ID NO: 4517462 - DNA, 25 bp, Homo sapien
gttgcaacactgatcacgtgcctcg

SEQ ID NO: 4517463 - DNA, 25 bp, Homo sapien
caaggcacagtagccatctttttca

SEQ ID NO: 4517464 - DNA, 25 bp, Homo sapien
tatgattaagtaacacaaggcacag

SEQ ID NO: 4517465 - DNA, 25 bp, Homo sapien
gaaacagttcattgcaagacacatg

SEQ ID NO: 4517466 - DNA, 25 bp, Homo sapien
aagacacatgaagacgacatactgt

SEQ ID NO: 4517467 - DNA, 25 bp, Homo sapien
agaggattggctactgaaacagttc

SEQ ID NO: 4517468 - DNA, 25 bp, Homo sapien
ctttgttgcaataggcttgactacc

SEQ ID NO: 4517469 - DNA, 25 bp, Homo sapien
agggctgcagttaaaacattccaat

SEQ ID NO: 4517470 - DNA, 25 bp, Homo sapien
ctgagggctgcagttaaaacattcc

SEQ ID NO: 4517471 - DNA, 25 bp, Homo sapien
gagggctgcagttaaaacattccaa

SEQ ID NO: 4517472 - DNA, 25 bp, Homo sapien
gggctagaacagcagtaattgcatc

SEQ ID NO: 4517473 - DNA, 25 bp, Homo sapien
tacgtggtctacaaatggtggcaat

SEQ ID NO: 4517474 - DNA, 25 bp, Homo sapien
ggaggcacagacataggtgactact

SEQ ID NO: 4517475 - DNA, 25 bp, Homo sapien
tcaaaaggctcaacctcaagcagta

SEQ ID NO: 4517476 - DNA, 25 bp, Homo sapien
tttttgtactgggacactatcacca

SEQ ID NO: 4517477 - DNA, 25 bp, Homo sapien
ttttgtactgggacactatcaccac

SEQ ID NO: 4517478 - DNA, 25 bp, Homo sapien
ctttttgtactgggacactatcacc

SEQ ID NO: 4517479 - DNA, 25 bp, Homo sapien
cctttttgtactgggacactatcac

SEQ ID NO: 4517480 - DNA, 25 bp, Homo sapien
ttctttgcttgagtattccggaagt

SEQ ID NO: 4517481 - DNA, 25 bp, Homo sapien
tgcttgagtattccggaagtaaaag

SEQ ID NO: 4517482 - DNA, 25 bp, Homo sapien
ttgagtattccggaagtaaaagcac

SEQ ID NO: 4517483 - DNA, 25 bp, Homo sapien
ctttgcttgagtattccggaagtaa

SEQ ID NO: 4517484 - DNA, 25 bp, Homo sapien
catctgtaaatgaatgaacgatttc

SEQ ID NO: 4517485 - DNA, 25 bp, Homo sapien
tcatctttaattttcctagtcctcc

SEQ ID NO: 4517486 - DNA, 25 bp, Homo sapien
gtaaatgaatgaacgatttcccaga

SEQ ID NO: 4517487 - DNA, 25 bp, Homo sapien
tctgtaaatgaatgaacgatttccc

SEQ ID NO: 4517488 - DNA, 25 bp, Homo sapien
gaataacttccgaatggaccaggtc

SEQ ID NO: 4517489 - DNA, 25 bp, Homo sapien
gctctgacaactacaagactggtta

SEQ ID NO: 4517490 - DNA, 25 bp, Homo sapien
gactgggtttctgacagccctgaga

SEQ ID NO: 4517491 - DNA, 25 bp, Homo sapien
catgatgtagtaagctctgggccct

SEQ ID NO: 4517492 - DNA, 25 bp, Homo sapien
tgaaaaatgaaccatgcctcaggtc

SEQ ID NO: 4517493 - DNA, 25 bp, Homo sapien
gaaagaaaacgccaacactgggatg

SEQ ID NO: 4517494 - DNA, 25 bp, Homo sapien
tcaagcagcactactaggaaccagt

SEQ ID NO: 4517495 - DNA, 25 bp, Homo sapien
tcaagaagctgagcgaaccccaaat

SEQ ID NO: 4517496 - DNA, 25 bp, Homo sapien
gataacattcagagagcagttaggg

SEQ ID NO: 4517497 - DNA, 25 bp, Homo sapien
agccctgggtatttcactgtattca

SEQ ID NO: 4517498 - DNA, 25 bp, Homo sapien
ggacatagtctacaccttgactgaa

SEQ ID NO: 4517499 - DNA, 25 bp, Homo sapien
gctacagtgacagtaattaggacag

SEQ ID NO: 4517500 - DNA, 25 bp, Homo sapien
agtaagcatactctaaccagtgagg

SEQ ID NO: 4517501 - DNA, 25 bp, Homo sapien
tacctagagataaaggtctgaagca

SEQ ID NO: 4517502 - DNA, 25 bp, Homo sapien
aattatcttctaaccagcagtaagc

SEQ ID NO: 4517503 - DNA, 25 bp, Homo sapien
tagataatccatacgccaaatgcag

SEQ ID NO: 4517504 - DNA, 25 bp, Homo sapien
ccctggtatagccaccgtcatattc

SEQ ID NO: 4517505 - DNA, 25 bp, Homo sapien
gagtccctggtatagccaccgtcat

SEQ ID NO: 4517506 - DNA, 25 bp, Homo sapien
gtttcttctagtgcttggaaatcta

SEQ ID NO: 4517507 - DNA, 25 bp, Homo sapien
gtagtttcttctagtgcttggaaat

SEQ ID NO: 4517508 - DNA, 25 bp, Homo sapien
cattggtcaccatatgaaaacctct

SEQ ID NO: 4517509 - DNA, 25 bp, Homo sapien
ggtcaccatatgaaaacctctccga

SEQ ID NO: 4517510 - DNA, 25 bp, Homo sapien
tcaccatatgaaaacctctccgaaa

SEQ ID NO: 4517511 - DNA, 25 bp, Homo sapien
ttggtcaccatatgaaaacctctcc

SEQ ID NO: 4517512 - DNA, 25 bp, Homo sapien
tcctgcttacagcttaatacaagaa

SEQ ID NO: 4517513 - DNA, 25 bp, Homo sapien
tgtgataaagaccttaatcatgagg

SEQ ID NO: 4517514 - DNA, 25 bp, Homo sapien
tgctttatactacaaccacacttag

SEQ ID NO: 4517515 - DNA, 25 bp, Homo sapien
ttagctattaactatctcctgcttc

SEQ ID NO: 4517516 - DNA, 25 bp, Homo sapien
cacattcccttcatactccaataaa

SEQ ID NO: 4517517 - DNA, 25 bp, Homo sapien
ctggaaagtgatcatcatgtcatct

SEQ ID NO: 4517518 - DNA, 25 bp, Homo sapien
ccttcatactccaataaatctttta

SEQ ID NO: 4517519 - DNA, 25 bp, Homo sapien
ttcccttcatactccaataaatctt

SEQ ID NO: 4517520 - DNA, 25 bp, Homo sapien
aaagaaagattgtcagtcactgtga

SEQ ID NO: 4517521 - DNA, 25 bp, Homo sapien
ttctctgctgagaaaccccatacca

SEQ ID NO: 4517522 - DNA, 25 bp, Homo sapien
cacactgtgctctatgagaaattct

SEQ ID NO: 4517523 - DNA, 25 bp, Homo sapien
cagaaatggtaaattgaggccacca

SEQ ID NO: 4517524 - DNA, 25 bp, Homo sapien
gaaacacttctctatgaaatcaatc

SEQ ID NO: 4517525 - DNA, 25 bp, Homo sapien
tacaaaagcttcgtgctgacagcaa

SEQ ID NO: 4517526 - DNA, 25 bp, Homo sapien
tggtacttcggtcagattaaaacat

SEQ ID NO: 4517527 - DNA, 25 bp, Homo sapien
atctcttaagatttcactaaaacac

SEQ ID NO: 4517528 - DNA, 25 bp, Homo sapien
ttgtagattcatcgtatgtgaacat

SEQ ID NO: 4517529 - DNA, 25 bp, Homo sapien
ttttgtagattcatcgtatgtgaac

SEQ ID NO: 4517530 - DNA, 25 bp, Homo sapien
acaattttgtagattcatcgtatgt

SEQ ID NO: 4517531 - DNA, 25 bp, Homo sapien
aattttgtagattcatcgtatgtga

SEQ ID NO: 4517532 - DNA, 25 bp, Homo sapien
tgtaattaggcatgcaacattgatt

SEQ ID NO: 4517533 - DNA, 25 bp, Homo sapien
ctattatattagcacttgagaaaac

SEQ ID NO: 4517534 - DNA, 25 bp, Homo sapien
tggtggcatcgggtagaaaaatacg

SEQ ID NO: 4517535 - DNA, 25 bp, Homo sapien
tattcatgctttatccacccatagc

SEQ ID NO: 4517536 - DNA, 25 bp, Homo sapien
tccctcatcaactccttgttctcct

SEQ ID NO: 4517537 - DNA, 25 bp, Homo sapien
caagtctgcaggattttccatagcg

SEQ ID NO: 4517538 - DNA, 25 bp, Homo sapien
gaagatttcctccacaaccagctga

SEQ ID NO: 4517539 - DNA, 25 bp, Homo sapien
aattccacatacaactgcttcttca

SEQ ID NO: 4517540 - DNA, 25 bp, Homo sapien
gttaacaaactttagtgtctagcat

SEQ ID NO: 4517541 - DNA, 25 bp, Homo sapien
ttaacaaactttagtgtctagcatt

SEQ ID NO: 4517542 - DNA, 25 bp, Homo sapien
aatatttttgtgtacctatagaatt

SEQ ID NO: 4517543 - DNA, 25 bp, Homo sapien
agttaacaaactttagtgtctagca

SEQ ID NO: 4517544 - DNA, 25 bp, Homo sapien
tgtcacctgcaactcattagtgggt

SEQ ID NO: 4517545 - DNA, 25 bp, Homo sapien
tactagggattgcagtcaaagagtt

SEQ ID NO: 4517546 - DNA, 25 bp, Homo sapien
tcaggtcaggttgcccgagagcatt

SEQ ID NO: 4517547 - DNA, 25 bp, Homo sapien
tacagatggataagcatgtactggg

SEQ ID NO: 4517548 - DNA, 25 bp, Homo sapien
gaaatacaataaagctctgcgataa

SEQ ID NO: 4517549 - DNA, 25 bp, Homo sapien
ttggtgaaatgtgactgacgactgc

SEQ ID NO: 4517550 - DNA, 25 bp, Homo sapien
gcaatgacagggatagctaatacta

SEQ ID NO: 4517551 - DNA, 25 bp, Homo sapien
tctgcgataatgcacctgagacaaa

SEQ ID NO: 4517552 - DNA, 25 bp, Homo sapien
tttttaatctagcagcccaacttac

SEQ ID NO: 4517553 - DNA, 25 bp, Homo sapien
aggtttttaatctagcagcccaact

SEQ ID NO: 4517554 - DNA, 25 bp, Homo sapien
gtttttaatctagcagcccaactta

SEQ ID NO: 4517555 - DNA, 25 bp, Homo sapien
tttgtgacagcattcaatataaagg

SEQ ID NO: 4517556 - DNA, 25 bp, Homo sapien
tataaagggacatgtcataaaagag

SEQ ID NO: 4517557 - DNA, 25 bp, Homo sapien
ggtcacgtctaactttgagtctcaa

SEQ ID NO: 4517558 - DNA, 25 bp, Homo sapien
gataagtggttttcgacaatccagg

SEQ ID NO: 4517559 - DNA, 25 bp, Homo sapien
ctcttccaataacacggattaaagg

SEQ ID NO: 4517560 - DNA, 25 bp, Homo sapien
cttctcttctgttaagtaagtcaca

SEQ ID NO: 4517561 - DNA, 25 bp, Homo sapien
actttccggaagctctgtaccaatg

SEQ ID NO: 4517562 - DNA, 25 bp, Homo sapien
tctcgagagtatacattgtgatacg

SEQ ID NO: 4517563 - DNA, 25 bp, Homo sapien
tcaattctagcgcctttcttgttca

SEQ ID NO: 4517564 - DNA, 25 bp, Homo sapien
caattctagcgcctttcttgttcat

SEQ ID NO: 4517565 - DNA, 25 bp, Homo sapien
aaaatcaattctagcgcctttcttg

SEQ ID NO: 4517566 - DNA, 25 bp, Homo sapien
aatcaattctagcgcctttcttgtt

SEQ ID NO: 4517567 - DNA, 25 bp, Homo sapien
gctgctgcattattatccatacgaa

SEQ ID NO: 4517568 - DNA, 25 bp, Homo sapien
cattaatcttataaagctcgagggc

SEQ ID NO: 4517569 - DNA, 25 bp, Homo sapien
cagttaactggtggtagtagcgttc

SEQ ID NO: 4517570 - DNA, 25 bp, Homo sapien
tcgagttctcaaggtaagctgagct

SEQ ID NO: 4517571 - DNA, 25 bp, Homo sapien
caaacattcaaacaataagcacagt

SEQ ID NO: 4517572 - DNA, 25 bp, Homo sapien
gtgattagtacagctctcaagtaca

SEQ ID NO: 4517573 - DNA, 25 bp, Homo sapien
acattcaaacaataagcacagtgat

SEQ ID NO: 4517574 - DNA, 25 bp, Homo sapien
acagtgattagtacagctctcaagt

SEQ ID NO: 4517575 - DNA, 25 bp, Homo sapien
tctattatttatctctgccctccag

SEQ ID NO: 4517576 - DNA, 25 bp, Homo sapien
taccctgagcaaatccgtaaaataa

SEQ ID NO: 4517577 - DNA, 25 bp, Homo sapien
ccctgatgagatcccttagtaatac

SEQ ID NO: 4517578 - DNA, 25 bp, Homo sapien
tgccaacccttagtttaggatctat

SEQ ID NO: 4517579 - DNA, 25 bp, Homo sapien
ttatcagctgttcataatcaaaatt

SEQ ID NO: 4517580 - DNA, 25 bp, Homo sapien
cttatcagctgttcataatcaaaat

SEQ ID NO: 4517581 - DNA, 25 bp, Homo sapien
tatttacagaaagtcgctgaaaacc

SEQ ID NO: 4517582 - DNA, 25 bp, Homo sapien
tgcacaccgatatctacagcagttt

SEQ ID NO: 4517583 - DNA, 25 bp, Homo sapien
tcccacacatcatatggcatcagag

SEQ ID NO: 4517584 - DNA, 25 bp, Homo sapien
tggccaacaaccttaacagacacct

SEQ ID NO: 4517585 - DNA, 25 bp, Homo sapien
gcttaattcaacaaggactgagtgc

SEQ ID NO: 4517586 - DNA, 25 bp, Homo sapien
tgagaaatggtagcagccttgaagg

SEQ ID NO: 4517587 - DNA, 25 bp, Homo sapien
cattaatggacagttagctctgagg

SEQ ID NO: 4517588 - DNA, 25 bp, Homo sapien
actgagtgccagagtgtcacctgga

SEQ ID NO: 4517589 - DNA, 25 bp, Homo sapien
tagtcatgtgttggcacctgcacat

SEQ ID NO: 4517590 - DNA, 25 bp, Homo sapien
ggttcaggtgccttattgtgttcct

SEQ ID NO: 4517591 - DNA, 25 bp, Homo sapien
tcctttgactggtgtcacgtttccc

SEQ ID NO: 4517592 - DNA, 25 bp, Homo sapien
tttctttatggttggttcaggtgcc

SEQ ID NO: 4517593 - DNA, 25 bp, Homo sapien
ggctagcttcaatgtcgtcagactg

SEQ ID NO: 4517594 - DNA, 25 bp, Homo sapien
gcttcaatgtcgtcagactgaggtt

SEQ ID NO: 4517595 - DNA, 25 bp, Homo sapien
tcggctagcttcaatgtcgtcagac

SEQ ID NO: 4517596 - DNA, 25 bp, Homo sapien
tgtcgtcagactgaggttctcctga

SEQ ID NO: 4517597 - DNA, 25 bp, Homo sapien
tgcaattgagaaacagttagcaaaa

SEQ ID NO: 4517598 - DNA, 25 bp, Homo sapien
aattgagaaacagttagcaaaatat

SEQ ID NO: 4517599 - DNA, 25 bp, Homo sapien
aatgcaattgagaaacagttagcaa

SEQ ID NO: 4517600 - DNA, 25 bp, Homo sapien
gcaattgagaaacagttagcaaaat

SEQ ID NO: 4517601 - DNA, 25 bp, Homo sapien
gaagttttgcactggatagctgtga

SEQ ID NO: 4517602 - DNA, 25 bp, Homo sapien
cctgatttgtgaacttctcactgac

SEQ ID NO: 4517603 - DNA, 25 bp, Homo sapien
cacgagatatgaatcagtatttccc

SEQ ID NO: 4517604 - DNA, 25 bp, Homo sapien
ctcactgactttaggcttccaactt

SEQ ID NO: 4517605 - DNA, 25 bp, Homo sapien
gcttccaaacttgtatctcccagac

SEQ ID NO: 4517606 - DNA, 25 bp, Homo sapien
ggtaagtaccccaagattgcttcca

SEQ ID NO: 4517607 - DNA, 25 bp, Homo sapien
tgtgggtaagtaccccaagattgct

SEQ ID NO: 4517608 - DNA, 25 bp, Homo sapien
gtctccaccagccttgtgggtaagt

SEQ ID NO: 4517609 - DNA, 25 bp, Homo sapien
catttttgaaagtgcgaccctccag

SEQ ID NO: 4517610 - DNA, 25 bp, Homo sapien
aaaattgatgataaccccatgtacc

SEQ ID NO: 4517611 - DNA, 25 bp, Homo sapien
accctccagcatcagatgtcatact

SEQ ID NO: 4517612 - DNA, 25 bp, Homo sapien
catgtaccagctgactcatttttga

SEQ ID NO: 4517613 - DNA, 25 bp, Homo sapien
tccctaagcaagagaatatgtgaac

SEQ ID NO: 4517614 - DNA, 25 bp, Homo sapien
gaagttttcaaacacgtaggcagca

SEQ ID NO: 4517615 - DNA, 25 bp, Homo sapien
tattcttttactgccaagttgctgg

SEQ ID NO: 4517616 - DNA, 25 bp, Homo sapien
caagcttgactttggctcctaaaga

SEQ ID NO: 4517617 - DNA, 25 bp, Homo sapien
gaatactgcagcatgagctagcaaa

SEQ ID NO: 4517618 - DNA, 25 bp, Homo sapien
aatactgcagcatgagctagcaaat

SEQ ID NO: 4517619 - DNA, 25 bp, Homo sapien
tactgcagcatgagctagcaaattc

SEQ ID NO: 4517620 - DNA, 25 bp, Homo sapien
agctagcaaattcaaatggtggctc

SEQ ID NO: 4517621 - DNA, 25 bp, Homo sapien
ttccaataacactggtgcagcttct

SEQ ID NO: 4517622 - DNA, 25 bp, Homo sapien
tccaataacactggtgcagcttctc

SEQ ID NO: 4517623 - DNA, 25 bp, Homo sapien
gccactccttttacctccactgtaa

SEQ ID NO: 4517624 - DNA, 25 bp, Homo sapien
aagccactccttttacctccactgt

SEQ ID NO: 4517625 - DNA, 25 bp, Homo sapien
ctccttttacctccactgtaactct

SEQ ID NO: 4517626 - DNA, 25 bp, Homo sapien
cctgcaagccactccttttacctcc

SEQ ID NO: 4517627 - DNA, 25 bp, Homo sapien
taaaacgttcaccacataaaaggca

SEQ ID NO: 4517628 - DNA, 25 bp, Homo sapien
actattcttagcagtattcctgcca

SEQ ID NO: 4517629 - DNA, 25 bp, Homo sapien
aatgaagtaggtcaactctcaggcc

SEQ ID NO: 4517630 - DNA, 25 bp, Homo sapien
cagataggtctttgatagtggctac

SEQ ID NO: 4517631 - DNA, 25 bp, Homo sapien
tgatctgagcgtaggcttaataact

SEQ ID NO: 4517632 - DNA, 25 bp, Homo sapien
taccttgatctgagcgtaggcttaa

SEQ ID NO: 4517633 - DNA, 25 bp, Homo sapien
gctgctaccttgatctgagcgtagg

SEQ ID NO: 4517634 - DNA, 25 bp, Homo sapien
tcggtgacatcagggtgatcacagc

SEQ ID NO: 4517635 - DNA, 25 bp, Homo sapien
tcccctatccaggccaaatctgagg

SEQ ID NO: 4517636 - DNA, 25 bp, Homo sapien
ccctatccaggccaaatctgaggca

SEQ ID NO: 4517637 - DNA, 25 bp, Homo sapien
ctatccaggccaaatctgaggcatc

SEQ ID NO: 4517638 - DNA, 25 bp, Homo sapien
gattcccctatccaggccaaatctg

SEQ ID NO: 4517639 - DNA, 25 bp, Homo sapien
tttcgccaaacttctgaggagctgg

SEQ ID NO: 4517640 - DNA, 25 bp, Homo sapien
tggtgaattctaaaatcaggctctt

SEQ ID NO: 4517641 - DNA, 25 bp, Homo sapien
gaattctaaaatcaggctcttacag

SEQ ID NO: 4517642 - DNA, 25 bp, Homo sapien
catatttcgccaaacttctgaggag

SEQ ID NO: 4517643 - DNA, 25 bp, Homo sapien
tatgaacatccaaaaacgtatcaag

SEQ ID NO: 4517644 - DNA, 25 bp, Homo sapien
ggccctgtggcctgagtgctttcag

SEQ ID NO: 4517645 - DNA, 25 bp, Homo sapien
gaggaaagcataggtaggcaggccc

SEQ ID NO: 4517646 - DNA, 25 bp, Homo sapien
aaacaaattactgctgttgccggga

SEQ ID NO: 4517647 - DNA, 25 bp, Homo sapien
ttgtcagtgcctctagttgtaagct

SEQ ID NO: 4517648 - DNA, 25 bp, Homo sapien
cctctagttgtaagctgattgatgg

SEQ ID NO: 4517649 - DNA, 25 bp, Homo sapien
tgtaagctgattgatggtagggatc

SEQ ID NO: 4517650 - DNA, 25 bp, Homo sapien
tgatggtagggatcatctcttccat

SEQ ID NO: 4517651 - DNA, 25 bp, Homo sapien
tctgtccatttcagtcacgtcttaa

SEQ ID NO: 4517652 - DNA, 25 bp, Homo sapien
cacgtcttaatctgtactaatggtc

SEQ ID NO: 4517653 - DNA, 25 bp, Homo sapien
ggtctaccaattggtctgtttctgc

SEQ ID NO: 4517654 - DNA, 25 bp, Homo sapien
aaattacctgtagttaagtgggcat

SEQ ID NO: 4517655 - DNA, 25 bp, Homo sapien
gattctacacaccaatatttgaggg

SEQ ID NO: 4517656 - DNA, 25 bp, Homo sapien
cagaaggtagactcacaatgtgcca

SEQ ID NO: 4517657 - DNA, 25 bp, Homo sapien
gctggtaaatctgggctacacagtc

SEQ ID NO: 4517658 - DNA, 25 bp, Homo sapien
gctatgaagcgaagagaaacctttc

SEQ ID NO: 4517659 - DNA, 25 bp, Homo sapien
gcagtgccaaaggaatcatctgaga

SEQ ID NO: 4517660 - DNA, 25 bp, Homo sapien
gattacaagagtgcaagaaagtgac

SEQ ID NO: 4517661 - DNA, 25 bp, Homo sapien
catgagctttagagagggattacaa

SEQ ID NO: 4517662 - DNA, 25 bp, Homo sapien
aaagaacctgtgtagaagtacagca

SEQ ID NO: 4517663 - DNA, 25 bp, Homo sapien
tgaaaccaacctgaacacggcaaga

SEQ ID NO: 4517664 - DNA, 25 bp, Homo sapien
taacgactcatgtacaaagaccagt

SEQ ID NO: 4517665 - DNA, 25 bp, Homo sapien
ggcttagaatcaaatagtaacgact

SEQ ID NO: 4517666 - DNA, 25 bp, Homo sapien
tagggatatcagtcataaggcttag

SEQ ID NO: 4517667 - DNA, 25 bp, Homo sapien
tgatcagaagtgtgagacaaacacc

SEQ ID NO: 4517668 - DNA, 25 bp, Homo sapien
gcttctctcaatattgcaggcagta

SEQ ID NO: 4517669 - DNA, 25 bp, Homo sapien
tcttaaaagggcttctggtcatcct

SEQ ID NO: 4517670 - DNA, 25 bp, Homo sapien
gattgggtacctttgtgtctctgac

SEQ ID NO: 4517671 - DNA, 25 bp, Homo sapien
caaaagcctttaccaccaagatgag

SEQ ID NO: 4517672 - DNA, 25 bp, Homo sapien
ccaagatgaggaaagcatccttttc

SEQ ID NO: 4517673 - DNA, 25 bp, Homo sapien
caacaaaagcctttaccaccaagat

SEQ ID NO: 4517674 - DNA, 25 bp, Homo sapien
aagcctttaccaccaagatgaggaa

SEQ ID NO: 4517675 - DNA, 25 bp, Homo sapien
gactgacagttacggctgcagcagc

SEQ ID NO: 4517676 - DNA, 25 bp, Homo sapien
ctggctcgaagagcctggctcctag

SEQ ID NO: 4517677 - DNA, 25 bp, Homo sapien
tggctcctaggaggcccaaatctcg

SEQ ID NO: 4517678 - DNA, 25 bp, Homo sapien
caagcacacggctaaatatgtcttc

SEQ ID NO: 4517679 - DNA, 25 bp, Homo sapien
cggcggccgcctcactggtcgtagt

SEQ ID NO: 4517680 - DNA, 25 bp, Homo sapien
gcctcgttctctttcgctgccgcca

SEQ ID NO: 4517681 - DNA, 25 bp, Homo sapien
actggtcgtagtcgccctcgcccgc

SEQ ID NO: 4517682 - DNA, 25 bp, Homo sapien
gccaccgcctcgttctctttcgctg

SEQ ID NO: 4517683 - DNA, 25 bp, Homo sapien
cagaggtgaagcgtaagtaggcggc

SEQ ID NO: 4517684 - DNA, 25 bp, Homo sapien
cgagctattccgaggaggagccgaa

SEQ ID NO: 4517685 - DNA, 25 bp, Homo sapien
cgaaatcccggcgttcgtcgccagc

SEQ ID NO: 4517686 - DNA, 25 bp, Homo sapien
gctacaggccgcgagctattccgag

SEQ ID NO: 4517687 - DNA, 25 bp, Homo sapien
tcggtcgccatcttgcgactggaca

SEQ ID NO: 4517688 - DNA, 25 bp, Homo sapien
caccatcttgggagacacacggatc

SEQ ID NO: 4517689 - DNA, 25 bp, Homo sapien
aaggccccgtcgtctcctgtagtca

SEQ ID NO: 4517690 - DNA, 25 bp, Homo sapien
gactggacagaaagggtaatccctc

SEQ ID NO: 4517691 - DNA, 25 bp, Homo sapien
actcatagtcacattcaatcgatcc

SEQ ID NO: 4517692 - DNA, 25 bp, Homo sapien
tactcatagtcacattcaatcgatc

SEQ ID NO: 4517693 - DNA, 25 bp, Homo sapien
ctactcatagtcacattcaatcgat

SEQ ID NO: 4517694 - DNA, 25 bp, Homo sapien
tctccaaagcttcaaaggttcatgc

SEQ ID NO: 4517695 - DNA, 25 bp, Homo sapien
ctccaaagcttcaaaggttcatgca

SEQ ID NO: 4517696 - DNA, 25 bp, Homo sapien
tccaaagcttcaaaggttcatgcac

SEQ ID NO: 4517697 - DNA, 25 bp, Homo sapien
ttctccaaagcttcaaaggttcatg

SEQ ID NO: 4517698 - DNA, 25 bp, Homo sapien
tcagaactccaacattaattatggc

SEQ ID NO: 4517699 - DNA, 25 bp, Homo sapien
atcagaactccaacattaattatgg

SEQ ID NO: 4517700 - DNA, 25 bp, Homo sapien
gaactccaacattaattatggccat

SEQ ID NO: 4517701 - DNA, 25 bp, Homo sapien
cagaactccaacattaattatggcc

SEQ ID NO: 4517702 - DNA, 25 bp, Homo sapien
ttactggagcaaagcgaagtggttc

SEQ ID NO: 4517703 - DNA, 25 bp, Homo sapien
tgcagagagcattttgacagaactg

SEQ ID NO: 4517704 - DNA, 25 bp, Homo sapien
cagaactgccagtatgggtgactga

SEQ ID NO: 4517705 - DNA, 25 bp, Homo sapien
tcaggtaaggagctatgcagttgga

SEQ ID NO: 4517706 - DNA, 25 bp, Homo sapien
gcctctgtagaacagagccattggg

SEQ ID NO: 4517707 - DNA, 25 bp, Homo sapien
tctctttcactagaatccatttgaa

SEQ ID NO: 4517708 - DNA, 25 bp, Homo sapien
aatgtcagcctctgtagaacagagc

SEQ ID NO: 4517709 - DNA, 25 bp, Homo sapien
tctttcactagaatccatttgaaag

SEQ ID NO: 4517710 - DNA, 25 bp, Homo sapien
tcggaaaggcgtgcttccagaaaat

SEQ ID NO: 4517711 - DNA, 25 bp, Homo sapien
ttgaacaggtgatagtgggcagaac

SEQ ID NO: 4517712 - DNA, 25 bp, Homo sapien
tgcaggatgtgacttgaacaggtga

SEQ ID NO: 4517713 - DNA, 25 bp, Homo sapien
ttctgaaaagaactgtgcaggatgt

SEQ ID NO: 4517714 - DNA, 25 bp, Homo sapien
ttatggccatgagcgttagggagcc

SEQ ID NO: 4517715 - DNA, 25 bp, Homo sapien
gacttttatggccatgagcgttagg

SEQ ID NO: 4517716 - DNA, 25 bp, Homo sapien
ccatgggacttttatggccatgagc

SEQ ID NO: 4517717 - DNA, 25 bp, Homo sapien
ggccatgagcgttagggagccacac

SEQ ID NO: 4517718 - DNA, 25 bp, Homo sapien
aaagacacgaccacagtcatctgct

SEQ ID NO: 4517719 - DNA, 25 bp, Homo sapien
tgaaagacacgaccacagtcatctg

SEQ ID NO: 4517720 - DNA, 25 bp, Homo sapien
gtgaaagacacgaccacagtcatct

SEQ ID NO: 4517721 - DNA, 25 bp, Homo sapien
gaaagacacgaccacagtcatctgc

SEQ ID NO: 4517722 - DNA, 25 bp, Homo sapien
tgaattccccaattacattgttcat

SEQ ID NO: 4517723 - DNA, 25 bp, Homo sapien
tacagttcatgtgaattattggtag

SEQ ID NO: 4517724 - DNA, 25 bp, Homo sapien
cagctcttgagtacgtctttgctac

SEQ ID NO: 4517725 - DNA, 25 bp, Homo sapien
tagtgaatagctcttagtgctagga

SEQ ID NO: 4517726 - DNA, 25 bp, Homo sapien
caacttatctgggtccttcatacag

SEQ ID NO: 4517727 - DNA, 25 bp, Homo sapien
cagacatgggcactaaggacttgga

SEQ ID NO: 4517728 - DNA, 25 bp, Homo sapien
cgggtttgataatgggcatgtaaac

SEQ ID NO: 4517729 - DNA, 25 bp, Homo sapien
aagagcaggtttgggtgaaagatgg

SEQ ID NO: 4517730 - DNA, 25 bp, Homo sapien
catgtaaacgggattcacagagaag

SEQ ID NO: 4517731 - DNA, 25 bp, Homo sapien
cattcctgaaggatagtgttcccag

SEQ ID NO: 4517732 - DNA, 25 bp, Homo sapien
tatctatgagggctgggaatcccac

SEQ ID NO: 4517733 - DNA, 25 bp, Homo sapien
gaatccctgcagatcttggacggca

SEQ ID NO: 4517734 - DNA, 25 bp, Homo sapien
tatgggtaacgaaatgcaagcagga

SEQ ID NO: 4517735 - DNA, 25 bp, Homo sapien
ctcctcctctatccctttctcggct

SEQ ID NO: 4517736 - DNA, 25 bp, Homo sapien
cctttctcggctgaagctgtctgat

SEQ ID NO: 4517737 - DNA, 25 bp, Homo sapien
tcctctatccctttctcggctgaag

SEQ ID NO: 4517738 - DNA, 25 bp, Homo sapien
ccctttctcggctgaagctgtctga

SEQ ID NO: 4517739 - DNA, 25 bp, Homo sapien
caatgtccgcttgctggtggacagg

SEQ ID NO: 4517740 - DNA, 25 bp, Homo sapien
ggcacttctgcgagtcccttgaggt

SEQ ID NO: 4517741 - DNA, 25 bp, Homo sapien
tgcccctctgcctgtttatgcaaag

SEQ ID NO: 4517742 - DNA, 25 bp, Homo sapien
tgagatgtccgacaggcatccttgt

SEQ ID NO: 4517743 - DNA, 25 bp, Homo sapien
tcagtctcggatgtctctgcgcacc

SEQ ID NO: 4517744 - DNA, 25 bp, Homo sapien
gatgtctctgcgcacctgccgattc

SEQ ID NO: 4517745 - DNA, 25 bp, Homo sapien
gcacctgccgattccgcattacaaa

SEQ ID NO: 4517746 - DNA, 25 bp, Homo sapien
gccgattccgcattacaaaattcca

SEQ ID NO: 4517747 - DNA, 25 bp, Homo sapien
ccttagctcctgcacagtaagcaga

SEQ ID NO: 4517748 - DNA, 25 bp, Homo sapien
cctggtctgtaaagttgcatggcat

SEQ ID NO: 4517749 - DNA, 25 bp, Homo sapien
aacattagagcataaggcaccggga

SEQ ID NO: 4517750 - DNA, 25 bp, Homo sapien
gctgaggcggtcttgaacattagag

SEQ ID NO: 4517751 - DNA, 25 bp, Homo sapien
ttcctccgaggtggctcagtctagc

SEQ ID NO: 4517752 - DNA, 25 bp, Homo sapien
tggcccctggattggcagctaagac

SEQ ID NO: 4517753 - DNA, 25 bp, Homo sapien
cagatgagcaaagggacactcctgg

SEQ ID NO: 4517754 - DNA, 25 bp, Homo sapien
cctttgctaaggatggaaggacata

SEQ ID NO: 4517755 - DNA, 25 bp, Homo sapien
agacagtcctctggcacgctttcca

SEQ ID NO: 4517756 - DNA, 25 bp, Homo sapien
gagctgagctttgtctatggctgtg

SEQ ID NO: 4517757 - DNA, 25 bp, Homo sapien
aaagacagtcctctggcacgctttc

SEQ ID NO: 4517758 - DNA, 25 bp, Homo sapien
cccggagctgagctttgtctatggc

SEQ ID NO: 4517759 - DNA, 25 bp, Homo sapien
actttggcgcggtgaatgcccagga

SEQ ID NO: 4517760 - DNA, 25 bp, Homo sapien
catcgtggtactggagctcggtgcc

SEQ ID NO: 4517761 - DNA, 25 bp, Homo sapien
tcatgtgatgcgtcagctctgatac

SEQ ID NO: 4517762 - DNA, 25 bp, Homo sapien
caattttctgcctctcgtggatggc

SEQ ID NO: 4517763 - DNA, 25 bp, Homo sapien
tcctcctcatactccaagccctccg

SEQ ID NO: 4517764 - DNA, 25 bp, Homo sapien
cttcctcctcatactccaagccctc

SEQ ID NO: 4517765 - DNA, 25 bp, Homo sapien
cctcatactccaagccctccgtcat

SEQ ID NO: 4517766 - DNA, 25 bp, Homo sapien
ctcctcatactccaagccctccgtc

SEQ ID NO: 4517767 - DNA, 25 bp, Homo sapien
acagtatcgttgctctccctccatg

SEQ ID NO: 4517768 - DNA, 25 bp, Homo sapien
cacagtatcgttgctctccctccat

SEQ ID NO: 4517769 - DNA, 25 bp, Homo sapien
tcacagtatcgttgctctccctcca

SEQ ID NO: 4517770 - DNA, 25 bp, Homo sapien
ctttcatacggtcacatttcaatgt

SEQ ID NO: 4517771 - DNA, 25 bp, Homo sapien
gcagcagtaggatagacacggtcat

SEQ ID NO: 4517772 - DNA, 25 bp, Homo sapien
gcagcagcagtaggatagacacggt

SEQ ID NO: 4517773 - DNA, 25 bp, Homo sapien
cagcagcagtaggatagacacggtc

SEQ ID NO: 4517774 - DNA, 25 bp, Homo sapien
agcagcagtaggatagacacggtca

SEQ ID NO: 4517775 - DNA, 25 bp, Homo sapien
gaatatgaaaattgatagctgctgg

SEQ ID NO: 4517776 - DNA, 25 bp, Homo sapien
gaatctgggaagtcttgtgcaagag

SEQ ID NO: 4517777 - DNA, 25 bp, Homo sapien
tgctccaactgacccagctagtaag

SEQ ID NO: 4517778 - DNA, 25 bp, Homo sapien
ccagggcacaatttatatctctgtc

SEQ ID NO: 4517779 - DNA, 25 bp, Homo sapien
catttgggtcagactgtaagtggca

SEQ ID NO: 4517780 - DNA, 25 bp, Homo sapien
tctttcatttgggtcagactgtaag

SEQ ID NO: 4517781 - DNA, 25 bp, Homo sapien
tttcatttgggtcagactgtaagtg

SEQ ID NO: 4517782 - DNA, 25 bp, Homo sapien
tcatttgggtcagactgtaagtggc

SEQ ID NO: 4517783 - DNA, 25 bp, Homo sapien
acttgtcatgggcaggaaaagacag

SEQ ID NO: 4517784 - DNA, 25 bp, Homo sapien
caacttgtcatgggcaggaaaagac

SEQ ID NO: 4517785 - DNA, 25 bp, Homo sapien
gcaacttgtcatgggcaggaaaaga

SEQ ID NO: 4517786 - DNA, 25 bp, Homo sapien
agcaacttgtcatgggcaggaaaag

SEQ ID NO: 4517787 - DNA, 25 bp, Homo sapien
actcctggaacaagataagtccgct

SEQ ID NO: 4517788 - DNA, 25 bp, Homo sapien
cctttttagcctggccatgaactcc

SEQ ID NO: 4517789 - DNA, 25 bp, Homo sapien
gccgtgctccgttgcatacttcctg

SEQ ID NO: 4517790 - DNA, 25 bp, Homo sapien
gccgagggccgtcttagccatgtga

SEQ ID NO: 4517791 - DNA, 25 bp, Homo sapien
agctgagctcccagcatattgataa

SEQ ID NO: 4517792 - DNA, 25 bp, Homo sapien
cagactgtgctggtttgtagctgct

SEQ ID NO: 4517793 - DNA, 25 bp, Homo sapien
tgctgccaatcgcacagtcggtgag

SEQ ID NO: 4517794 - DNA, 25 bp, Homo sapien
gaggatccagaaatgcatgcccagc

SEQ ID NO: 4517795 - DNA, 25 bp, Homo sapien
atgtagcacagaaccccaccagatg

SEQ ID NO: 4517796 - DNA, 25 bp, Homo sapien
caccatggggtaatgtagcacagaa

SEQ ID NO: 4517797 - DNA, 25 bp, Homo sapien
gggtaatgtagcacagaaccccacc

SEQ ID NO: 4517798 - DNA, 25 bp, Homo sapien
tgcccttccaccatggggtaatgta

SEQ ID NO: 4517799 - DNA, 25 bp, Homo sapien
aaatcagtacaactccaaacggaga

SEQ ID NO: 4517800 - DNA, 25 bp, Homo sapien
atcagtacaactccaaacggagaca

SEQ ID NO: 4517801 - DNA, 25 bp, Homo sapien
aatcagtacaactccaaacggagac

SEQ ID NO: 4517802 - DNA, 25 bp, Homo sapien
caccttcaccgatgtggtgtagcaa

SEQ ID NO: 4517803 - DNA, 25 bp, Homo sapien
ggtgtagcaattcatagcttcctgc

SEQ ID NO: 4517804 - DNA, 25 bp, Homo sapien
gatgttttggcgacccttgcaagtt

SEQ ID NO: 4517805 - DNA, 25 bp, Homo sapien
tgttcctggatgttttggcgaccct

SEQ ID NO: 4517806 - DNA, 25 bp, Homo sapien
tgagctcgataagaagcccagtgct

SEQ ID NO: 4517807 - DNA, 25 bp, Homo sapien
gcagcagtcagaagctggcacggaa

SEQ ID NO: 4517808 - DNA, 25 bp, Homo sapien
tgtggatgcaattatcacgcgcccg

SEQ ID NO: 4517809 - DNA, 25 bp, Homo sapien
taaaggaatcctccctctgtgacct

SEQ ID NO: 4517810 - DNA, 25 bp, Homo sapien
taaggcggcgagcatcttgatggat

SEQ ID NO: 4517811 - DNA, 25 bp, Homo sapien
agcatcttgatggatcaggcatggg

SEQ ID NO: 4517812 - DNA, 25 bp, Homo sapien
tagggccgggcaccaacgccaccga

SEQ ID NO: 4517813 - DNA, 25 bp, Homo sapien
accaacgccaccgactctaaggcgg

SEQ ID NO: 4517814 - DNA, 25 bp, Homo sapien
ccacggcagctggagttgctttgca

SEQ ID NO: 4517815 - DNA, 25 bp, Homo sapien
tctattttagtggtaagagcccgag

SEQ ID NO: 4517816 - DNA, 25 bp, Homo sapien
ggaaagcctctccttctgtgcatat

SEQ ID NO: 4517817 - DNA, 25 bp, Homo sapien
gagcccgagaaggagtatggatacc

SEQ ID NO: 4517818 - DNA, 25 bp, Homo sapien
aaggagcccaccatgacaaagctgc

SEQ ID NO: 4517819 - DNA, 25 bp, Homo sapien
gaacaagcatttcaagcctctcagg

SEQ ID NO: 4517820 - DNA, 25 bp, Homo sapien
gggatccccaatcctgtgagaagga

SEQ ID NO: 4517821 - DNA, 25 bp, Homo sapien
tatctgacgctaatgccaggaactg

SEQ ID NO: 4517822 - DNA, 25 bp, Homo sapien
ctacaggagtcatgggaccagggac

SEQ ID NO: 4517823 - DNA, 25 bp, Homo sapien
tctggtttgggtgctgaggtatcct

SEQ ID NO: 4517824 - DNA, 25 bp, Homo sapien
tcttggatttcaaagcctggtgatg

SEQ ID NO: 4517825 - DNA, 25 bp, Homo sapien
gaatagttggcagaactgtccacag

SEQ ID NO: 4517826 - DNA, 25 bp, Homo sapien
cccatcccagggactgtaacatatt

SEQ ID NO: 4517827 - DNA, 25 bp, Homo sapien
catcccagggactgtaacatattca

SEQ ID NO: 4517828 - DNA, 25 bp, Homo sapien
atcccagggactgtaacatattcat

SEQ ID NO: 4517829 - DNA, 25 bp, Homo sapien
cacccatcccagggactgtaacata

SEQ ID NO: 4517830 - DNA, 25 bp, Homo sapien
gatgagtgatattgcatcccagagc

SEQ ID NO: 4517831 - DNA, 25 bp, Homo sapien
taacaaattcaacaccaggtacgga

SEQ ID NO: 4517832 - DNA, 25 bp, Homo sapien
taattcctctgaccatgagtgacag

SEQ ID NO: 4517833 - DNA, 25 bp, Homo sapien
tattccttccacaacggagtgtgaa

SEQ ID NO: 4517834 - DNA, 25 bp, Homo sapien
taaccgtgaaaaatactgtctcgtc

SEQ ID NO: 4517835 - DNA, 25 bp, Homo sapien
gctctcagggcatgattcaagaaca

SEQ ID NO: 4517836 - DNA, 25 bp, Homo sapien
aaatcccaaggaatatagctgtgct

SEQ ID NO: 4517837 - DNA, 25 bp, Homo sapien
aacattttcaacacgagacagctgg

SEQ ID NO: 4517838 - DNA, 25 bp, Homo sapien
gagacacttgtacggatgtgtgcac

SEQ ID NO: 4517839 - DNA, 25 bp, Homo sapien
ttgtacggatgtgtgcacggccaca

SEQ ID NO: 4517840 - DNA, 25 bp, Homo sapien
gtgcacggccacatcccaagcgtaa

SEQ ID NO: 4517841 - DNA, 25 bp, Homo sapien
ctgctcctgagacacttgtacggat

SEQ ID NO: 4517842 - DNA, 25 bp, Homo sapien
tgttctaagggaagtggacctctcc

SEQ ID NO: 4517843 - DNA, 25 bp, Homo sapien
tcttgggacctacactgagcctgtg

SEQ ID NO: 4517844 - DNA, 25 bp, Homo sapien
caaaaatgcctgaagaccgctgagc

SEQ ID NO: 4517845 - DNA, 25 bp, Homo sapien
gaagacagcatccaaagaggcccta

SEQ ID NO: 4517846 - DNA, 25 bp, Homo sapien
tgctgggatgcactcaactgtgaat

SEQ ID NO: 4517847 - DNA, 25 bp, Homo sapien
caggcaaaatacgacaccagggatg

SEQ ID NO: 4517848 - DNA, 25 bp, Homo sapien
tacaaggcggtcttcctgaaatgcc

SEQ ID NO: 4517849 - DNA, 25 bp, Homo sapien
cagtgcgcagtcacacatgttgaag

SEQ ID NO: 4517850 - DNA, 25 bp, Homo sapien
atttatatatattaaaaaaggccat

SEQ ID NO: 4517851 - DNA, 25 bp, Homo sapien
tatttatatatattaaaaaaggcca

SEQ ID NO: 4517852 - DNA, 25 bp, Homo sapien
tatatatattaaaaaaggccatttc

SEQ ID NO: 4517853 - DNA, 25 bp, Homo sapien
atatattaaaaaaggccatttcaag

SEQ ID NO: 4517854 - DNA, 25 bp, Homo sapien
cactgtgaccgccttgaagatgctc

SEQ ID NO: 4517855 - DNA, 25 bp, Homo sapien
ctggacaggaagtccacgtcccgct

SEQ ID NO: 4517856 - DNA, 25 bp, Homo sapien
tggacaggaagtccacgtcccgctt

SEQ ID NO: 4517857 - DNA, 25 bp, Homo sapien
ggaagtccacgtcccgcttgtccat

SEQ ID NO: 4517858 - DNA, 25 bp, Homo sapien
acaggaagtccacgtcccgcttgtc

SEQ ID NO: 4517859 - DNA, 25 bp, Homo sapien
tccgtccgggagaactgtaagacac

SEQ ID NO: 4517860 - DNA, 25 bp, Homo sapien
tgcaagctgctccgtccgggagaac

SEQ ID NO: 4517861 - DNA, 25 bp, Homo sapien
ctgcaagctgctccgtccgggagaa

SEQ ID NO: 4517862 - DNA, 25 bp, Homo sapien
tgctccgtccgggagaactgtaaga

SEQ ID NO: 4517863 - DNA, 25 bp, Homo sapien
ccaggaggaaatccagttgagtaag

SEQ ID NO: 4517864 - DNA, 25 bp, Homo sapien
agggtgtgctccctcactggcatgc

SEQ ID NO: 4517865 - DNA, 25 bp, Homo sapien
tctcaccttggactcctcaggacac

SEQ ID NO: 4517866 - DNA, 25 bp, Homo sapien
ctggcatgctcatgtccactgtgct

SEQ ID NO: 4517867 - DNA, 25 bp, Homo sapien
cctcccctggcgcagaggacatggg

SEQ ID NO: 4517868 - DNA, 25 bp, Homo sapien
ctgacgtgccagctgaagttgtgtg

SEQ ID NO: 4517869 - DNA, 25 bp, Homo sapien
cgagtccttcgggaggcgtccctga

SEQ ID NO: 4517870 - DNA, 25 bp, Homo sapien
ccctgatgagtgctcggttcccgag

SEQ ID NO: 4517871 - DNA, 25 bp, Homo sapien
gacttcctggtcaactgacgtgcca

SEQ ID NO: 4517872 - DNA, 25 bp, Homo sapien
caatgccaatgtcgtctgggctcac

SEQ ID NO: 4517873 - DNA, 25 bp, Homo sapien
gcaatgccaatgtcgtctgggctca

SEQ ID NO: 4517874 - DNA, 25 bp, Homo sapien
gaggcactatcccgctccgacaccc

SEQ ID NO: 4517875 - DNA, 25 bp, Homo sapien
cagaggcactatcccgctccgacac

SEQ ID NO: 4517876 - DNA, 25 bp, Homo sapien
ctcagaggcactatcccgctccgac

SEQ ID NO: 4517877 - DNA, 25 bp, Homo sapien
ggcactatcccgctccgacacccac

SEQ ID NO: 4517878 - DNA, 25 bp, Homo sapien
ccacacgttatccagttgagccagg

SEQ ID NO: 4517879 - DNA, 25 bp, Homo sapien
cagcgacaggcgtcatcaggcaagt

SEQ ID NO: 4517880 - DNA, 25 bp, Homo sapien
cggaggatagcacgtggcacaagac

SEQ ID NO: 4517881 - DNA, 25 bp, Homo sapien
gcttgcatagtccagtaagggttgg

SEQ ID NO: 4517882 - DNA, 25 bp, Homo sapien
aggttttggtttcaatgcccaggtg

SEQ ID NO: 4517883 - DNA, 25 bp, Homo sapien
tgagcagcgcgattgtcacaatagg

SEQ ID NO: 4517884 - DNA, 25 bp, Homo sapien
ggaaagtgagcagcgcgattgtcac

SEQ ID NO: 4517885 - DNA, 25 bp, Homo sapien
caggaaagtgagcagcgcgattgtc

SEQ ID NO: 4517886 - DNA, 25 bp, Homo sapien
aggtccccggatccagctggtaaga

SEQ ID NO: 4517887 - DNA, 25 bp, Homo sapien
cctggatctgtaggtccccggatcc

SEQ ID NO: 4517888 - DNA, 25 bp, Homo sapien
gtccccggatccagctggtaagaaa

SEQ ID NO: 4517889 - DNA, 25 bp, Homo sapien
tcctggatctgtaggtccccggatc

SEQ ID NO: 4517890 - DNA, 25 bp, Homo sapien
catgttaaaccagaacgttcgtggc

SEQ ID NO: 4517891 - DNA, 25 bp, Homo sapien
tcggccatgttaaaccagaacgttc

SEQ ID NO: 4517892 - DNA, 25 bp, Homo sapien
ctggaaggcggcgtcggccatgtta

SEQ ID NO: 4517893 - DNA, 25 bp, Homo sapien
ggcggcgtcggccatgttaaaccag

SEQ ID NO: 4517894 - DNA, 25 bp, Homo sapien
cttgatatagatgaatagagtctct

SEQ ID NO: 4517895 - DNA, 25 bp, Homo sapien
tatagatgaatagagtctctattac

SEQ ID NO: 4517896 - DNA, 25 bp, Homo sapien
ttgatatagatgaatagagtctcta

SEQ ID NO: 4517897 - DNA, 25 bp, Homo sapien
gatatagatgaatagagtctctatt

SEQ ID NO: 4517898 - DNA, 25 bp, Homo sapien
aatgtgtatttgaccctgccaagta

SEQ ID NO: 4517899 - DNA, 25 bp, Homo sapien
gtgtatttgaccctgccaagtacca

SEQ ID NO: 4517900 - DNA, 25 bp, Homo sapien
ccaaatgtgtatttgaccctgccaa

SEQ ID NO: 4517901 - DNA, 25 bp, Homo sapien
tgtatttgaccctgccaagtaccag

SEQ ID NO: 4517902 - DNA, 25 bp, Homo sapien
ccactggtcaatcatggtagatgca

SEQ ID NO: 4517903 - DNA, 25 bp, Homo sapien
ctcttgtagagctgcgggttggtca

SEQ ID NO: 4517904 - DNA, 25 bp, Homo sapien
aagtgacgagaagagcagattaaag

SEQ ID NO: 4517905 - DNA, 25 bp, Homo sapien
cattggctggcacatccctgtccag

SEQ ID NO: 4517906 - DNA, 25 bp, Homo sapien
tcaggcgatggtcctaagaaccgaa

SEQ ID NO: 4517907 - DNA, 25 bp, Homo sapien
caggcgatggtcctaagaaccgaac

SEQ ID NO: 4517908 - DNA, 25 bp, Homo sapien
caaaactctagacaggtatccaata

SEQ ID NO: 4517909 - DNA, 25 bp, Homo sapien
ccaaaactctagacaggtatccaat

SEQ ID NO: 4517910 - DNA, 25 bp, Homo sapien
aaaactctagacaggtatccaatac

SEQ ID NO: 4517911 - DNA, 25 bp, Homo sapien
caatgcccgtgaagaatcaagagcc

SEQ ID NO: 4517912 - DNA, 25 bp, Homo sapien
caggtatcggaatttcggcactgca

SEQ ID NO: 4517913 - DNA, 25 bp, Homo sapien
tcaagagcctctccaggtatcggaa

SEQ ID NO: 4517914 - DNA, 25 bp, Homo sapien
tcggcactgcaaagtcgctggccat

SEQ ID NO: 4517915 - DNA, 25 bp, Homo sapien
ttctgaacacagtgcgagcgtggcc

SEQ ID NO: 4517916 - DNA, 25 bp, Homo sapien
gattcctgttactggtgatgccgac

SEQ ID NO: 4517917 - DNA, 25 bp, Homo sapien
aatgcaaggtacacaacagggaagg

SEQ ID NO: 4517918 - DNA, 25 bp, Homo sapien
ccgacctggcgtcagatttgtcttc

SEQ ID NO: 4517919 - DNA, 25 bp, Homo sapien
catcaccttgcatgtagagccccag

SEQ ID NO: 4517920 - DNA, 25 bp, Homo sapien
ccagggcttgggctggtgctcccac

SEQ ID NO: 4517921 - DNA, 25 bp, Homo sapien
tgttcccatcaccttgcatgtagag

SEQ ID NO: 4517922 - DNA, 25 bp, Homo sapien
ccttgcatgtagagccccagggctt

SEQ ID NO: 4517923 - DNA, 25 bp, Homo sapien
tcagctatattaagggcaaaccctt

SEQ ID NO: 4517924 - DNA, 25 bp, Homo sapien
tagcctcgttcagtagagcccagag

SEQ ID NO: 4517925 - DNA, 25 bp, Homo sapien
tcagtagggccaattggtcacacag

SEQ ID NO: 4517926 - DNA, 25 bp, Homo sapien
gcagctgtattgagcatcagctata

SEQ ID NO: 4517927 - DNA, 25 bp, Homo sapien
cacatctgccacctggatcatgctg

SEQ ID NO: 4517928 - DNA, 25 bp, Homo sapien
tcctggccggagattcccacaccca

SEQ ID NO: 4517929 - DNA, 25 bp, Homo sapien
ccctcctggccggagattcccacac

SEQ ID NO: 4517930 - DNA, 25 bp, Homo sapien
tggccggagattcccacacccacat

SEQ ID NO: 4517931 - DNA, 25 bp, Homo sapien
ctagaaacagcacaggcaagaagaa

SEQ ID NO: 4517932 - DNA, 25 bp, Homo sapien
agaaacagcacaggcaagaagaatt

SEQ ID NO: 4517933 - DNA, 25 bp, Homo sapien
aaacagcacaggcaagaagaattgt

SEQ ID NO: 4517934 - DNA, 25 bp, Homo sapien
cagcacaggcaagaagaattgtttg

SEQ ID NO: 4517935 - DNA, 25 bp, Homo sapien
tgtggcctttcagggctgacgttgt

SEQ ID NO: 4517936 - DNA, 25 bp, Homo sapien
tcagggctgacgttgtcctcgtgct

SEQ ID NO: 4517937 - DNA, 25 bp, Homo sapien
gaaggacgctgacgctcagaggagg

SEQ ID NO: 4517938 - DNA, 25 bp, Homo sapien
gacgttgtcctcgtgctcccaggga

SEQ ID NO: 4517939 - DNA, 25 bp, Homo sapien
tcggaacatgttgcctgctctatca

SEQ ID NO: 4517940 - DNA, 25 bp, Homo sapien
ggaacatgttgcctgctctatcaca

SEQ ID NO: 4517941 - DNA, 25 bp, Homo sapien
cttcggaacatgttgcctgctctat

SEQ ID NO: 4517942 - DNA, 25 bp, Homo sapien
ttcggaacatgttgcctgctctatc

SEQ ID NO: 4517943 - DNA, 25 bp, Homo sapien
ggtcatggccttgagcttgctccgc

SEQ ID NO: 4517944 - DNA, 25 bp, Homo sapien
cagggtcatggccttgagcttgctc

SEQ ID NO: 4517945 - DNA, 25 bp, Homo sapien
ccagggtcatggccttgagcttgct

SEQ ID NO: 4517946 - DNA, 25 bp, Homo sapien
tcatggccttgagcttgctccgcac

SEQ ID NO: 4517947 - DNA, 25 bp, Homo sapien
cactgcttggcaaggaagaggaatt

SEQ ID NO: 4517948 - DNA, 25 bp, Homo sapien
ctcttctgcagaggcgtcgaccgac

SEQ ID NO: 4517949 - DNA, 25 bp, Homo sapien
gtttttctcgagagcgtaggccagg

SEQ ID NO: 4517950 - DNA, 25 bp, Homo sapien
caggcttctcccatcgatcacgagg

SEQ ID NO: 4517951 - DNA, 25 bp, Homo sapien
gaggcagtggacgtggagggtgggc

SEQ ID NO: 4517952 - DNA, 25 bp, Homo sapien
gcggccagaggcagtggacgtggag

SEQ ID NO: 4517953 - DNA, 25 bp, Homo sapien
ctgcggccagaggcagtggacgtgg

SEQ ID NO: 4517954 - DNA, 25 bp, Homo sapien
cagaggcagtggacgtggagggtgg

SEQ ID NO: 4517955 - DNA, 25 bp, Homo sapien
tctggaggcctctggactgcacgta

SEQ ID NO: 4517956 - DNA, 25 bp, Homo sapien
ggcctctggactgcacgtagcatag

SEQ ID NO: 4517957 - DNA, 25 bp, Homo sapien
tctggactgcacgtagcataggcac

SEQ ID NO: 4517958 - DNA, 25 bp, Homo sapien
gactgcacgtagcataggcactggt

SEQ ID NO: 4517959 - DNA, 25 bp, Homo sapien
ccgtgagtctgctgggtcagtgacc

SEQ ID NO: 4517960 - DNA, 25 bp, Homo sapien
tacggtggtagcagcactagggatc

SEQ ID NO: 4517961 - DNA, 25 bp, Homo sapien
caaggactaactgcaggacacaaag

SEQ ID NO: 4517962 - DNA, 25 bp, Homo sapien
gatagttagactgaaggccctccat

SEQ ID NO: 4517963 - DNA, 25 bp, Homo sapien
ggcattcagggtgatgacctcctcg

SEQ ID NO: 4517964 - DNA, 25 bp, Homo sapien
aggcggtcttcaatcccagtggcac

SEQ ID NO: 4517965 - DNA, 25 bp, Homo sapien
gcaggcccgcttgacgcaatttaga

SEQ ID NO: 4517966 - DNA, 25 bp, Homo sapien
aatagtttcagggactccgtcctgc

SEQ ID NO: 4517967 - DNA, 25 bp, Homo sapien
gaacacagctggaaatgtggacata

SEQ ID NO: 4517968 - DNA, 25 bp, Homo sapien
aatcctttcaactcccaactgtcag

SEQ ID NO: 4517969 - DNA, 25 bp, Homo sapien
tgtgccagcgtcctgccaggtggct

SEQ ID NO: 4517970 - DNA, 25 bp, Homo sapien
aatgcagcagtttctgggtcccaaa

SEQ ID NO: 4517971 - DNA, 25 bp, Homo sapien
agaggagctcctcgctgttttccag

SEQ ID NO: 4517972 - DNA, 25 bp, Homo sapien
tgttttccagggaggattcggcttc

SEQ ID NO: 4517973 - DNA, 25 bp, Homo sapien
agtgcaggttggtctccaggcgaat

SEQ ID NO: 4517974 - DNA, 25 bp, Homo sapien
aatggcagactggaagaggagctcc

SEQ ID NO: 4517975 - DNA, 25 bp, Homo sapien
cacgtgcaccctcgcggagacaccc

SEQ ID NO: 4517976 - DNA, 25 bp, Homo sapien
gcaccctcgcggagacacccccact

SEQ ID NO: 4517977 - DNA, 25 bp, Homo sapien
accctcgcggagacacccccactca

SEQ ID NO: 4517978 - DNA, 25 bp, Homo sapien
ctgcacgtgcaccctcgcggagaca

SEQ ID NO: 4517979 - DNA, 25 bp, Homo sapien
tctcttggcgatgcacaaggtgcgc

SEQ ID NO: 4517980 - DNA, 25 bp, Homo sapien
gtaattctgagttttgctccgaatc

SEQ ID NO: 4517981 - DNA, 25 bp, Homo sapien
gccttccgccgcatacacgttgagg

SEQ ID NO: 4517982 - DNA, 25 bp, Homo sapien
tccgaatctttttttgatgcctccc

SEQ ID NO: 4517983 - DNA, 25 bp, Homo sapien
gagacccttttacatgcctgaccgt

SEQ ID NO: 4517984 - DNA, 25 bp, Homo sapien
tctaagtccaccacctgaaagagga

SEQ ID NO: 4517985 - DNA, 25 bp, Homo sapien
tgatgttcccaccaggagacagctg

SEQ ID NO: 4517986 - DNA, 25 bp, Homo sapien
gattgttcctcgagcaaagccgtgc

SEQ ID NO: 4517987 - DNA, 25 bp, Homo sapien
cgctccccaagtaaaaggcgaatga

SEQ ID NO: 4517988 - DNA, 25 bp, Homo sapien
ccgctccccaagtaaaaggcgaatg

SEQ ID NO: 4517989 - DNA, 25 bp, Homo sapien
gctccccaagtaaaaggcgaatgat

SEQ ID NO: 4517990 - DNA, 25 bp, Homo sapien
gggatatttctcaggacctcctccc

SEQ ID NO: 4517991 - DNA, 25 bp, Homo sapien
tgggtggggatatttctcaggacct

SEQ ID NO: 4517992 - DNA, 25 bp, Homo sapien
tggggatatttctcaggacctcctc

SEQ ID NO: 4517993 - DNA, 25 bp, Homo sapien
aattgggtggggatatttctcagga

SEQ ID NO: 4517994 - DNA, 25 bp, Homo sapien
cggacggaatcgaaacccagtgtgt

SEQ ID NO: 4517995 - DNA, 25 bp, Homo sapien
ttgatctcatcggtaagcgggtgcc

SEQ ID NO: 4517996 - DNA, 25 bp, Homo sapien
caagcacgcagttgtaggctctggc

SEQ ID NO: 4517997 - DNA, 25 bp, Homo sapien
cactgacatcctcttgcggacggaa

SEQ ID NO: 4517998 - DNA, 25 bp, Homo sapien
atacaggccaccttgttcaccccac

SEQ ID NO: 4517999 - DNA, 25 bp, Homo sapien
cccacatcgcctgcggagggacctg

SEQ ID NO: 4518000 - DNA, 25 bp, Homo sapien
ggtccaggtactgccagacatgctg

SEQ ID NO: 4518001 - DNA, 25 bp, Homo sapien
cactgggtccaggtactgccagaca

SEQ ID NO: 4518002 - DNA, 25 bp, Homo sapien
aaccatggcccgcagcgcagaaggt

SEQ ID NO: 4518003 - DNA, 25 bp, Homo sapien
acaaccatggcccgcagcgcagaag

SEQ ID NO: 4518004 - DNA, 25 bp, Homo sapien
accatggcccgcagcgcagaaggtc

SEQ ID NO: 4518005 - DNA, 25 bp, Homo sapien
caaccatggcccgcagcgcagaagg

SEQ ID NO: 4518006 - DNA, 25 bp, Homo sapien
aatcaaagacgtcagacagctcagg

SEQ ID NO: 4518007 - DNA, 25 bp, Homo sapien
cagatggtgagtgcgatgaagaaat

SEQ ID NO: 4518008 - DNA, 25 bp, Homo sapien
gacgtgacgacgactgtgttgcaga

SEQ ID NO: 4518009 - DNA, 25 bp, Homo sapien
aggtgctcctgatgcctcgccacgg

SEQ ID NO: 4518010 - DNA, 25 bp, Homo sapien
tccagcagctttgggtcgggcgtga

SEQ ID NO: 4518011 - DNA, 25 bp, Homo sapien
ttgggtcgggcgtgatatccttctc

SEQ ID NO: 4518012 - DNA, 25 bp, Homo sapien
cagctttgggtcgggcgtgatatcc

SEQ ID NO: 4518013 - DNA, 25 bp, Homo sapien
cagcagctttgggtcgggcgtgata

SEQ ID NO: 4518014 - DNA, 25 bp, Homo sapien
ctccgagtctgcctcttggtacctg

SEQ ID NO: 4518015 - DNA, 25 bp, Homo sapien
gtgcgccggtgggacttggtgctct

SEQ ID NO: 4518016 - DNA, 25 bp, Homo sapien
atgctgccgcgctgggacaccgagc

SEQ ID NO: 4518017 - DNA, 25 bp, Homo sapien
cctcttggtacctggccagacgctg

SEQ ID NO: 4518018 - DNA, 25 bp, Homo sapien
tcttccgtgatgttcagagctcggc

SEQ ID NO: 4518019 - DNA, 25 bp, Homo sapien
tgagaatattctacaccagacacag

SEQ ID NO: 4518020 - DNA, 25 bp, Homo sapien
gacacagtgcatcttcggaaaacca

SEQ ID NO: 4518021 - DNA, 25 bp, Homo sapien
tcgtcatacaactgcatgtcctggt

SEQ ID NO: 4518022 - DNA, 25 bp, Homo sapien
gacaaggcacacaggatgaatgacc

SEQ ID NO: 4518023 - DNA, 25 bp, Homo sapien
ggcacacaggatgaatgaccgtgag

SEQ ID NO: 4518024 - DNA, 25 bp, Homo sapien
ctggaagagacaaggcacacaggat

SEQ ID NO: 4518025 - DNA, 25 bp, Homo sapien
ggatgaatgaccgtgaggaccaggg

SEQ ID NO: 4518026 - DNA, 25 bp, Homo sapien
ctgtgactggggataaggagcttcc

SEQ ID NO: 4518027 - DNA, 25 bp, Homo sapien
ggagcttccatcagacttggggaca

SEQ ID NO: 4518028 - DNA, 25 bp, Homo sapien
gataccgccatatccacagtccatg

SEQ ID NO: 4518029 - DNA, 25 bp, Homo sapien
aatgagtaaactgcagctgtgactg

SEQ ID NO: 4518030 - DNA, 25 bp, Homo sapien
cttgtagcggggcccactgttgttc

SEQ ID NO: 4518031 - DNA, 25 bp, Homo sapien
catgcaaacaaggagcaggacacac

SEQ ID NO: 4518032 - DNA, 25 bp, Homo sapien
gcaggacacaccagagcacgtcgca

SEQ ID NO: 4518033 - DNA, 25 bp, Homo sapien
ttgctgcgcttgtagcggggcccac

SEQ ID NO: 4518034 - DNA, 25 bp, Homo sapien
gtagatgacaatgccgacgactgcg

SEQ ID NO: 4518035 - DNA, 25 bp, Homo sapien
gactgcgtccgtgttcctaagggtg

SEQ ID NO: 4518036 - DNA, 25 bp, Homo sapien
gcaggttttctttatacagcccggc

SEQ ID NO: 4518037 - DNA, 25 bp, Homo sapien
ggcctttttcccgttgtcatgtatg

SEQ ID NO: 4518038 - DNA, 25 bp, Homo sapien
gagcctggcaaacgttgaaggctgc

SEQ ID NO: 4518039 - DNA, 25 bp, Homo sapien
gtccctccagtgggggatgacagga

SEQ ID NO: 4518040 - DNA, 25 bp, Homo sapien
cagagcctggcaaacgttgaaggct

SEQ ID NO: 4518041 - DNA, 25 bp, Homo sapien
ctcagagcctggcaaacgttgaagg

SEQ ID NO: 4518042 - DNA, 25 bp, Homo sapien
aggcatctccctggtcatgagtccc

SEQ ID NO: 4518043 - DNA, 25 bp, Homo sapien
gcatctccctggtcatgagtccccc

SEQ ID NO: 4518044 - DNA, 25 bp, Homo sapien
caggcatctccctggtcatgagtcc

SEQ ID NO: 4518045 - DNA, 25 bp, Homo sapien
ggcatctccctggtcatgagtcccc

SEQ ID NO: 4518046 - DNA, 25 bp, Homo sapien
tcaggtcgttgtttggcttctcgca

SEQ ID NO: 4518047 - DNA, 25 bp, Homo sapien
ggcttctcgcattcgatcacgctgg

SEQ ID NO: 4518048 - DNA, 25 bp, Homo sapien
tcacgctggtgaacgtcaaaggatt

SEQ ID NO: 4518049 - DNA, 25 bp, Homo sapien
acgtcaaaggattgaattcggagac

SEQ ID NO: 4518050 - DNA, 25 bp, Homo sapien
tctggatgaggaaaatcctgtttac

SEQ ID NO: 4518051 - DNA, 25 bp, Homo sapien
tcctgtttacattgcttatttctaa

SEQ ID NO: 4518052 - DNA, 25 bp, Homo sapien
taacaacaggcaacacacaacactc

SEQ ID NO: 4518053 - DNA, 25 bp, Homo sapien
ttatttctaacaacaggcaacacac

SEQ ID NO: 4518054 - DNA, 25 bp, Homo sapien
caccagcaagaagacgtggaaaaca

SEQ ID NO: 4518055 - DNA, 25 bp, Homo sapien
agcaagaagacgtggaaaacacaca

SEQ ID NO: 4518056 - DNA, 25 bp, Homo sapien
agggccaccgcctgcaccagcaaga

SEQ ID NO: 4518057 - DNA, 25 bp, Homo sapien
ccgcctgcaccagcaagaagacgtg

SEQ ID NO: 4518058 - DNA, 25 bp, Homo sapien
ctggatcccgttctgaaaacgccct

SEQ ID NO: 4518059 - DNA, 25 bp, Homo sapien
tcccgttctgaaaacgccctttgca

SEQ ID NO: 4518060 - DNA, 25 bp, Homo sapien
tgcatctggatcccgttctgaaaac

SEQ ID NO: 4518061 - DNA, 25 bp, Homo sapien
cccgttctgaaaacgccctttgcat

SEQ ID NO: 4518062 - DNA, 25 bp, Homo sapien
tgaggtccccctggttcacttccag

SEQ ID NO: 4518063 - DNA, 25 bp, Homo sapien
cctggttcacttccagccttgacat

SEQ ID NO: 4518064 - DNA, 25 bp, Homo sapien
gtgaggtccccctggttcacttcca

SEQ ID NO: 4518065 - DNA, 25 bp, Homo sapien
ccccctggttcacttccagccttga

SEQ ID NO: 4518066 - DNA, 25 bp, Homo sapien
taagctctaggtgattttagtgctc

SEQ ID NO: 4518067 - DNA, 25 bp, Homo sapien
tggaaggataccattgcaaagttcc

SEQ ID NO: 4518068 - DNA, 25 bp, Homo sapien
tgatgacagtacaaagtctggaagg

SEQ ID NO: 4518069 - DNA, 25 bp, Homo sapien
tatgagcatgggtaagtaagacttt

SEQ ID NO: 4518070 - DNA, 25 bp, Homo sapien
taactcattccgaccacctgctcca

SEQ ID NO: 4518071 - DNA, 25 bp, Homo sapien
accctaactcattccgaccacctgc

SEQ ID NO: 4518072 - DNA, 25 bp, Homo sapien
cctaactcattcctatcacctgctc

SEQ ID NO: 4518073 - DNA, 25 bp, Homo sapien
tccgatcacctgctccaccctaact

SEQ ID NO: 4518074 - DNA, 25 bp, Homo sapien
cgaccacctgctccaccctaactca

SEQ ID NO: 4518075 - DNA, 25 bp, Homo sapien
ccctaactcattccgatcacctgct

SEQ ID NO: 4518076 - DNA, 25 bp, Homo sapien
tgctccaccctaactcattccgacc

SEQ ID NO: 4518077 - DNA, 25 bp, Homo sapien
cctaactcattcctatcacctgctc

SEQ ID NO: 4518078 - DNA, 25 bp, Homo sapien
ccctaactcattccgaccacctgct

SEQ ID NO: 4518079 - DNA, 25 bp, Homo sapien
ccctaactcattccgatcacctgct

SEQ ID NO: 4518080 - DNA, 25 bp, Homo sapien
accctaactcattccgaccacctgc

SEQ ID NO: 4518081 - DNA, 25 bp, Homo sapien
accctaactcattccgatcacctgc

SEQ ID NO: 4518082 - DNA, 25 bp, Homo sapien
ctccagtagcctgcctttcaatgac

SEQ ID NO: 4518083 - DNA, 25 bp, Homo sapien
ctgagggcggccacccttctgagca

SEQ ID NO: 4518084 - DNA, 25 bp, Homo sapien
ccagtagcctgcctttcaatgacag

SEQ ID NO: 4518085 - DNA, 25 bp, Homo sapien
ggccacccttctgagcactcaccac

SEQ ID NO: 4518086 - DNA, 25 bp, Homo sapien
caggtcagagggaaccccaagtgct

SEQ ID NO: 4518087 - DNA, 25 bp, Homo sapien
ccggcatgacgaggaaaccgctgga

SEQ ID NO: 4518088 - DNA, 25 bp, Homo sapien
gacttggcagctggttctctgcact

SEQ ID NO: 4518089 - DNA, 25 bp, Homo sapien
gacttgcacgtgcagaatctacagg

SEQ ID NO: 4518090 - DNA, 25 bp, Homo sapien
taactccaatgtctgcggaggtgct

SEQ ID NO: 4518091 - DNA, 25 bp, Homo sapien
ccaatgtctgcggaggtgctctgac

SEQ ID NO: 4518092 - DNA, 25 bp, Homo sapien
actccaatgtctgcggaggtgctct

SEQ ID NO: 4518093 - DNA, 25 bp, Homo sapien
aatgtctgcggaggtgctctgacag

SEQ ID NO: 4518094 - DNA, 25 bp, Homo sapien
cagtccggggtaccctggacatatt

SEQ ID NO: 4518095 - DNA, 25 bp, Homo sapien
tctcagtccggggtaccctggacat

SEQ ID NO: 4518096 - DNA, 25 bp, Homo sapien
cccatctctcagtccggggtaccct

SEQ ID NO: 4518097 - DNA, 25 bp, Homo sapien
catctctcagtccggggtaccctgg

SEQ ID NO: 4518098 - DNA, 25 bp, Homo sapien
aggcatctccccctgtgacggtgac

SEQ ID NO: 4518099 - DNA, 25 bp, Homo sapien
caggcatctccccctgtgacggtga

SEQ ID NO: 4518100 - DNA, 25 bp, Homo sapien
atctccccctgtgacggtgaccggg

SEQ ID NO: 4518101 - DNA, 25 bp, Homo sapien
gcatctccccctgtgacggtgaccg

SEQ ID NO: 4518102 - DNA, 25 bp, Homo sapien
ccgaggccgatgggggagggcactg

SEQ ID NO: 4518103 - DNA, 25 bp, Homo sapien
tgccctcgctgaggtccacagacag

SEQ ID NO: 4518104 - DNA, 25 bp, Homo sapien
agtgccctcgctgaggtccacagac

SEQ ID NO: 4518105 - DNA, 25 bp, Homo sapien
cagggaagcccgatgggctggtgcc

SEQ ID NO: 4518106 - DNA, 25 bp, Homo sapien
gattcagctacgaagacctcgcgct

SEQ ID NO: 4518107 - DNA, 25 bp, Homo sapien
aggcaggattcagctacgaagacct

SEQ ID NO: 4518108 - DNA, 25 bp, Homo sapien
gctgcacggtggccagggcacacca

SEQ ID NO: 4518109 - DNA, 25 bp, Homo sapien
gaagacctcgcgctgaacccaaaca

SEQ ID NO: 4518110 - DNA, 25 bp, Homo sapien
cttgaggagaaaatgttcctgagca

SEQ ID NO: 4518111 - DNA, 25 bp, Homo sapien
tgaggagaaaatgttcctgagcatc

SEQ ID NO: 4518112 - DNA, 25 bp, Homo sapien
ttgaggagaaaatgttcctgagcat

SEQ ID NO: 4518113 - DNA, 25 bp, Homo sapien
agcagcagaatgtccgcagggaaga

SEQ ID NO: 4518114 - DNA, 25 bp, Homo sapien
tttctttccagaatcggttcacgta

SEQ ID NO: 4518115 - DNA, 25 bp, Homo sapien
tctcgatgtggcatagcccgtcggg

SEQ ID NO: 4518116 - DNA, 25 bp, Homo sapien
gatttcgttgcagcgaagacgcaca

SEQ ID NO: 4518117 - DNA, 25 bp, Homo sapien
ctcccagggacacattccaagccac

SEQ ID NO: 4518118 - DNA, 25 bp, Homo sapien
cagcatggtcagtccagggaaccat

SEQ ID NO: 4518119 - DNA, 25 bp, Homo sapien
cctgctgtgacaagctcggtcacct

SEQ ID NO: 4518120 - DNA, 25 bp, Homo sapien
cctctggccatgcagaggctcgttc

SEQ ID NO: 4518121 - DNA, 25 bp, Homo sapien
catgcagaggctcgttcctcaggcc

SEQ ID NO: 4518122 - DNA, 25 bp, Homo sapien
aaaggtcaagccttgacttcatgtc

SEQ ID NO: 4518123 - DNA, 25 bp, Homo sapien
ttccaaaggtcaagccttgacttca

SEQ ID NO: 4518124 - DNA, 25 bp, Homo sapien
tccttctcatgagcgtctgctgggc

SEQ ID NO: 4518125 - DNA, 25 bp, Homo sapien
cttcttccttctcatgagcgtctgc

SEQ ID NO: 4518126 - DNA, 25 bp, Homo sapien
tatccccatgcacaggttctacata

SEQ ID NO: 4518127 - DNA, 25 bp, Homo sapien
atccccatgcacaggttctacatac

SEQ ID NO: 4518128 - DNA, 25 bp, Homo sapien
tttatccccatgcacaggttctaca

SEQ ID NO: 4518129 - DNA, 25 bp, Homo sapien
atttatccccatgcacaggttctac

SEQ ID NO: 4518130 - DNA, 25 bp, Homo sapien
cttgaggcttttatcagcacggacc

SEQ ID NO: 4518131 - DNA, 25 bp, Homo sapien
gaggacatcgttgaatgggcatcca

SEQ ID NO: 4518132 - DNA, 25 bp, Homo sapien
ggacagagtccaacagtgaccaact

SEQ ID NO: 4518133 - DNA, 25 bp, Homo sapien
caagacagaaatcgagcccactggc

SEQ ID NO: 4518134 - DNA, 25 bp, Homo sapien
catctcgaatgtgtgcccgtcacca

SEQ ID NO: 4518135 - DNA, 25 bp, Homo sapien
cacggccgagtgaacacggctggaa

SEQ ID NO: 4518136 - DNA, 25 bp, Homo sapien
gtaacttccagtggcacatccatga

SEQ ID NO: 4518137 - DNA, 25 bp, Homo sapien
catttttggagacagtaacttccag

SEQ ID NO: 4518138 - DNA, 25 bp, Homo sapien
aggctcctctgtgaattaactctgc

SEQ ID NO: 4518139 - DNA, 25 bp, Homo sapien
ttttaatgtgcatctccctgccacc

SEQ ID NO: 4518140 - DNA, 25 bp, Homo sapien
gccacccagaccacttggcaggctc

SEQ ID NO: 4518141 - DNA, 25 bp, Homo sapien
attaactctgcatgtttccccttca

SEQ ID NO: 4518142 - DNA, 25 bp, Homo sapien
gatgccccaccagtgctgtctaggg

SEQ ID NO: 4518143 - DNA, 25 bp, Homo sapien
tacagcagctacctcattcaggatg

SEQ ID NO: 4518144 - DNA, 25 bp, Homo sapien
gagagaagggttttgtccaggacac

SEQ ID NO: 4518145 - DNA, 25 bp, Homo sapien
tgcaagcccaagtttcctccaagat

SEQ ID NO: 4518146 - DNA, 25 bp, Homo sapien
taacattctaatgcggaggagggtg

SEQ ID NO: 4518147 - DNA, 25 bp, Homo sapien
caaatccatacgtgggtcagactgt

SEQ ID NO: 4518148 - DNA, 25 bp, Homo sapien
gatcagtgactttcagagctttgca

SEQ ID NO: 4518149 - DNA, 25 bp, Homo sapien
caaattttcataaagcctggtcaca

SEQ ID NO: 4518150 - DNA, 25 bp, Homo sapien
cccagtctgctttctattgtaagga

SEQ ID NO: 4518151 - DNA, 25 bp, Homo sapien
tttggatctcactcccagggaaggg

SEQ ID NO: 4518152 - DNA, 25 bp, Homo sapien
aagactttggatctcactcccaggg

SEQ ID NO: 4518153 - DNA, 25 bp, Homo sapien
gtcaagcaaagactttggatctcac

SEQ ID NO: 4518154 - DNA, 25 bp, Homo sapien
tggtgatgtgccgctgccagcacag

SEQ ID NO: 4518155 - DNA, 25 bp, Homo sapien
cctggtgatgtgccgctgccagcac

SEQ ID NO: 4518156 - DNA, 25 bp, Homo sapien
gctgtgaatggagccacggagagga

SEQ ID NO: 4518157 - DNA, 25 bp, Homo sapien
ggtgatgtgccgctgccagcacagg

SEQ ID NO: 4518158 - DNA, 25 bp, Homo sapien
caaacagcaaactgcccgaaaggca

SEQ ID NO: 4518159 - DNA, 25 bp, Homo sapien
gagcgccactgggtaatggaccaga

SEQ ID NO: 4518160 - DNA, 25 bp, Homo sapien
aggcaagcacgtccacaaacagcaa

SEQ ID NO: 4518161 - DNA, 25 bp, Homo sapien
ccatctaacatgaacgagcgccact

SEQ ID NO: 4518162 - DNA, 25 bp, Homo sapien
ggaaacagctcgagggcatggggaa

SEQ ID NO: 4518163 - DNA, 25 bp, Homo sapien
gaaacagctcgagggcatggggaag

SEQ ID NO: 4518164 - DNA, 25 bp, Homo sapien
tgggaaacagctcgagggcatgggg

SEQ ID NO: 4518165 - DNA, 25 bp, Homo sapien
ctgggaaacagctcgagggcatggg

SEQ ID NO: 4518166 - DNA, 25 bp, Homo sapien
agatgccgttgaccaagatcttcat

SEQ ID NO: 4518167 - DNA, 25 bp, Homo sapien
ccgtgagagatgccgttgaccaaga

SEQ ID NO: 4518168 - DNA, 25 bp, Homo sapien
gagagatgccgttgaccaagatctt

SEQ ID NO: 4518169 - DNA, 25 bp, Homo sapien
gtgagagatgccgttgaccaagatc

SEQ ID NO: 4518170 - DNA, 25 bp, Homo sapien
tttttccacgtagaataagcttgtg

SEQ ID NO: 4518171 - DNA, 25 bp, Homo sapien
ttttccacgtagaataagcttgtgt

SEQ ID NO: 4518172 - DNA, 25 bp, Homo sapien
tgtttttccacgtagaataagcttg

SEQ ID NO: 4518173 - DNA, 25 bp, Homo sapien
tattatgttcattttccgatccatg

SEQ ID NO: 4518174 - DNA, 25 bp, Homo sapien
cattttgtaatgttcatcctgcatc

SEQ ID NO: 4518175 - DNA, 25 bp, Homo sapien
tcattttccgatccatgaacatggg

SEQ ID NO: 4518176 - DNA, 25 bp, Homo sapien
tccatttattcagatgttccttgat

SEQ ID NO: 4518177 - DNA, 25 bp, Homo sapien
gtctggggacatgcttagcccctgt

SEQ ID NO: 4518178 - DNA, 25 bp, Homo sapien
accctgtggcttgccgtctggggac

SEQ ID NO: 4518179 - DNA, 25 bp, Homo sapien
ttgccgtctggggacatgcttagcc

SEQ ID NO: 4518180 - DNA, 25 bp, Homo sapien
agctgccaaacagccagcacttgtg

SEQ ID NO: 4518181 - DNA, 25 bp, Homo sapien
cctctggctggtgcctcttgggaac

SEQ ID NO: 4518182 - DNA, 25 bp, Homo sapien
gcttctcactgctgactgccaggaa

SEQ ID NO: 4518183 - DNA, 25 bp, Homo sapien
caagcaagacctcgcctctcacaga

SEQ ID NO: 4518184 - DNA, 25 bp, Homo sapien
gggaactgcggggagcgctggcagg

SEQ ID NO: 4518185 - DNA, 25 bp, Homo sapien
tattcatatcggatctctctgcccg

SEQ ID NO: 4518186 - DNA, 25 bp, Homo sapien
cccgctgcggcaacaaattatgaca

SEQ ID NO: 4518187 - DNA, 25 bp, Homo sapien
cactgcaccggctaaacaaatctgt

SEQ ID NO: 4518188 - DNA, 25 bp, Homo sapien
catggatcttactgggtcaaaacga

SEQ ID NO: 4518189 - DNA, 25 bp, Homo sapien
gcaggggacacgggttggagaaata

SEQ ID NO: 4518190 - DNA, 25 bp, Homo sapien
acaaagcatgaagggcaggggacac

SEQ ID NO: 4518191 - DNA, 25 bp, Homo sapien
tctgctcagctcttccaaaacaaca

SEQ ID NO: 4518192 - DNA, 25 bp, Homo sapien
aaacaacaaagcatgaagggcaggg

SEQ ID NO: 4518193 - DNA, 25 bp, Homo sapien
caggtctgctgatttaaggtttccc

SEQ ID NO: 4518194 - DNA, 25 bp, Homo sapien
ccaggtctgctgatttaaggtttcc

SEQ ID NO: 4518195 - DNA, 25 bp, Homo sapien
aggcacactccatttctgggagcag

SEQ ID NO: 4518196 - DNA, 25 bp, Homo sapien
cttgcaaggcacactccatttctgg

SEQ ID NO: 4518197 - DNA, 25 bp, Homo sapien
gcttaaaactgttgagccccaccag

SEQ ID NO: 4518198 - DNA, 25 bp, Homo sapien
aggaaatcccacagcccggtctaat

SEQ ID NO: 4518199 - DNA, 25 bp, Homo sapien
tgtgggccatcatataagagttacg

SEQ ID NO: 4518200 - DNA, 25 bp, Homo sapien
gctacaggagttacgggctcagtaa

SEQ ID NO: 4518201 - DNA, 25 bp, Homo sapien
agcgccttcagtgactcttacaaaa

SEQ ID NO: 4518202 - DNA, 25 bp, Homo sapien
ttaacaagcgccttcagtgactctt

SEQ ID NO: 4518203 - DNA, 25 bp, Homo sapien
aaatcccagtaccacgaccttgctg

SEQ ID NO: 4518204 - DNA, 25 bp, Homo sapien
aaagtttcagaagcacgagcaaaga

SEQ ID NO: 4518205 - DNA, 25 bp, Homo sapien
ccaagatggatctaccaaggggctc

SEQ ID NO: 4518206 - DNA, 25 bp, Homo sapien
tccaagatggatctaccaaggggct

SEQ ID NO: 4518207 - DNA, 25 bp, Homo sapien
aagatggatctaccaaggggctctc

SEQ ID NO: 4518208 - DNA, 25 bp, Homo sapien
gctccaagatggatctaccaagggg

SEQ ID NO: 4518209 - DNA, 25 bp, Homo sapien
tccgccggagactctaaaactcagg

SEQ ID NO: 4518210 - DNA, 25 bp, Homo sapien
tggagagcataaaggatgaaaaggc

SEQ ID NO: 4518211 - DNA, 25 bp, Homo sapien
taaaggatgaaaaggccgcaggcct

SEQ ID NO: 4518212 - DNA, 25 bp, Homo sapien
cctctggacaggtccgccggagact

SEQ ID NO: 4518213 - DNA, 25 bp, Homo sapien
ctgctgtcctgagccgagctgttag

SEQ ID NO: 4518214 - DNA, 25 bp, Homo sapien
acttggcggcagtttcactttgctg

SEQ ID NO: 4518215 - DNA, 25 bp, Homo sapien
tagcagactgagctttactgtcctg

SEQ ID NO: 4518216 - DNA, 25 bp, Homo sapien
gggccgtgccagacatatcagcact

SEQ ID NO: 4518217 - DNA, 25 bp, Homo sapien
tttcctgcctttcacttcaggtggg

SEQ ID NO: 4518218 - DNA, 25 bp, Homo sapien
agacaaagtacacgttggccgggcg

SEQ ID NO: 4518219 - DNA, 25 bp, Homo sapien
gaactgctcgaacaggttcttgggc

SEQ ID NO: 4518220 - DNA, 25 bp, Homo sapien
tgagcagcgcgatgaagacaaagta

SEQ ID NO: 4518221 - DNA, 25 bp, Homo sapien
cttggtagtcttgagccggttgtcg

SEQ ID NO: 4518222 - DNA, 25 bp, Homo sapien
ggccgcgtgtcgccgcgcccggctc

SEQ ID NO: 4518223 - DNA, 25 bp, Homo sapien
gcccgcgccggcctcttaggttatc

SEQ ID NO: 4518224 - DNA, 25 bp, Homo sapien
gcgccggcctcttaggttatcatca

SEQ ID NO: 4518225 - DNA, 25 bp, Homo sapien
gttatcatcactcgcggcccgggcg

SEQ ID NO: 4518226 - DNA, 25 bp, Homo sapien
taggttatcatcactcgcggcccgg

SEQ ID NO: 4518227 - DNA, 25 bp, Homo sapien
gctccatcctggacggcgaaacgac

SEQ ID NO: 4518228 - DNA, 25 bp, Homo sapien
tactccagggatcaactggaatcaa

SEQ ID NO: 4518229 - DNA, 25 bp, Homo sapien
gggatcaactggaatcaaaatccaa

SEQ ID NO: 4518230 - DNA, 25 bp, Homo sapien
atcctggacggcgaaacgacctcgg

SEQ ID NO: 4518231 - DNA, 25 bp, Homo sapien
aaatgctgattcctcaggcagaggt

SEQ ID NO: 4518232 - DNA, 25 bp, Homo sapien
ggcccagccccaaggtgagaggtct

SEQ ID NO: 4518233 - DNA, 25 bp, Homo sapien
tcctcaggcagaggtcccttgaggc

SEQ ID NO: 4518234 - DNA, 25 bp, Homo sapien
cctggagcttccaggagtactcctg

SEQ ID NO: 4518235 - DNA, 25 bp, Homo sapien
catccttggatgtaactggcagaaa

SEQ ID NO: 4518236 - DNA, 25 bp, Homo sapien
tgcagcatccttggatgtaactggc

SEQ ID NO: 4518237 - DNA, 25 bp, Homo sapien
tactcctgatatctgatgttacaaa

SEQ ID NO: 4518238 - DNA, 25 bp, Homo sapien
ccttgagatatgcagcatccttgga

SEQ ID NO: 4518239 - DNA, 25 bp, Homo sapien
catcatcccatatactctgggtctt

SEQ ID NO: 4518240 - DNA, 25 bp, Homo sapien
tcaggtttcatcatcccatatactc

SEQ ID NO: 4518241 - DNA, 25 bp, Homo sapien
aggtttcatcatcccatatactctg

SEQ ID NO: 4518242 - DNA, 25 bp, Homo sapien
catcccatatactctgggtcttgtt

SEQ ID NO: 4518243 - DNA, 25 bp, Homo sapien
gtagattcgtctgttgccaccgtcc

SEQ ID NO: 4518244 - DNA, 25 bp, Homo sapien
ccgcacatgccaggcccgtatgtag

SEQ ID NO: 4518245 - DNA, 25 bp, Homo sapien
gaatcggattctctccttcaaactc

SEQ ID NO: 4518246 - DNA, 25 bp, Homo sapien
ttcaaactccagctgatccagcccg

SEQ ID NO: 4518247 - DNA, 25 bp, Homo sapien
ggccccatctccgttctaaggcaaa

SEQ ID NO: 4518248 - DNA, 25 bp, Homo sapien
taaggcaaactctgacgggcactaa

SEQ ID NO: 4518249 - DNA, 25 bp, Homo sapien
acgggcactaaattggtcctgttct

SEQ ID NO: 4518250 - DNA, 25 bp, Homo sapien
tctccgttctaaggcaaactctgac

SEQ ID NO: 4518251 - DNA, 25 bp, Homo sapien
tgtccacatcttgcagtaatgctgc

SEQ ID NO: 4518252 - DNA, 25 bp, Homo sapien
atcctgtccacatcttgcagtaatg

SEQ ID NO: 4518253 - DNA, 25 bp, Homo sapien
caccccacacgtgagggtcctgtct

SEQ ID NO: 4518254 - DNA, 25 bp, Homo sapien
ggtcctgtctgcttttgggggtctg

SEQ ID NO: 4518255 - DNA, 25 bp, Homo sapien
tccttggtgctggacgctgcaggct

SEQ ID NO: 4518256 - DNA, 25 bp, Homo sapien
cctccttggtgctggacgctgcagg

SEQ ID NO: 4518257 - DNA, 25 bp, Homo sapien
caccctccttggtgctggacgctgc

SEQ ID NO: 4518258 - DNA, 25 bp, Homo sapien
accctccttggtgctggacgctgca

SEQ ID NO: 4518259 - DNA, 25 bp, Homo sapien
cttgtactatatgatagcgacataa

SEQ ID NO: 4518260 - DNA, 25 bp, Homo sapien
tatgatagcgacataaatgaggtgc

SEQ ID NO: 4518261 - DNA, 25 bp, Homo sapien
gactgaggtacggaaggagggaggc

SEQ ID NO: 4518262 - DNA, 25 bp, Homo sapien
cataaatgaggtgcaatgggagtga

SEQ ID NO: 4518263 - DNA, 25 bp, Homo sapien
ggtggaaatcaaaggtatctttcaa

SEQ ID NO: 4518264 - DNA, 25 bp, Homo sapien
aggtggaaatcaaaggtatctttca

SEQ ID NO: 4518265 - DNA, 25 bp, Homo sapien
gggtaggccagcacactctcagaaa

SEQ ID NO: 4518266 - DNA, 25 bp, Homo sapien
ctggggtaggccagcacactctcag

SEQ ID NO: 4518267 - DNA, 25 bp, Homo sapien
ggtaggccagcacactctcagaaaa

SEQ ID NO: 4518268 - DNA, 25 bp, Homo sapien
ggggtaggccagcacactctcagaa

SEQ ID NO: 4518269 - DNA, 25 bp, Homo sapien
tgcagagatgaattcaaaggtcctt

SEQ ID NO: 4518270 - DNA, 25 bp, Homo sapien
gggtctcatacagcactagtcgcat

SEQ ID NO: 4518271 - DNA, 25 bp, Homo sapien
tctggaatgcctgtggagtctgaca

SEQ ID NO: 4518272 - DNA, 25 bp, Homo sapien
acaacataggtgtgtgatgatgcaa

SEQ ID NO: 4518273 - DNA, 25 bp, Homo sapien
ttcctgtgggtcctccgatccatca

SEQ ID NO: 4518274 - DNA, 25 bp, Homo sapien
gagctgtcgtttgtggagagtccat

SEQ ID NO: 4518275 - DNA, 25 bp, Homo sapien
tccgatccatcagagctgtcgtttg

SEQ ID NO: 4518276 - DNA, 25 bp, Homo sapien
gggtcctccgatccatcagagctgt

SEQ ID NO: 4518277 - DNA, 25 bp, Homo sapien
taggtatcgcacaggtgcttgagaa

SEQ ID NO: 4518278 - DNA, 25 bp, Homo sapien
catccctttataggtatcgcacagg

SEQ ID NO: 4518279 - DNA, 25 bp, Homo sapien
ctttataggtatcgcacaggtgctt

SEQ ID NO: 4518280 - DNA, 25 bp, Homo sapien
tctctcatccctttataggtatcgc

SEQ ID NO: 4518281 - DNA, 25 bp, Homo sapien
ccaacgtcttcttgaacacatttcc

SEQ ID NO: 4518282 - DNA, 25 bp, Homo sapien
cacaagattaggtttttagccaacg

SEQ ID NO: 4518283 - DNA, 25 bp, Homo sapien
tcacaagattaggtttttagccaac

SEQ ID NO: 4518284 - DNA, 25 bp, Homo sapien
ttttagccaacgtcttcttgaacac

SEQ ID NO: 4518285 - DNA, 25 bp, Homo sapien
taacttaggtagtgactgtgtcact

SEQ ID NO: 4518286 - DNA, 25 bp, Homo sapien
agggtaacttaggtagtgactgtgt

SEQ ID NO: 4518287 - DNA, 25 bp, Homo sapien
cacgtcactatgttgatggtggctg

SEQ ID NO: 4518288 - DNA, 25 bp, Homo sapien
ggtagtgaccacgtcactatgttga

SEQ ID NO: 4518289 - DNA, 25 bp, Homo sapien
tctttgaatgcggatagggaaacgt

SEQ ID NO: 4518290 - DNA, 25 bp, Homo sapien
tgcagaactgaagccgcgagaatgg

SEQ ID NO: 4518291 - DNA, 25 bp, Homo sapien
gaggtggaattagtaaggccagcca

SEQ ID NO: 4518292 - DNA, 25 bp, Homo sapien
gaaggattcggtcattttcaggaga

SEQ ID NO: 4518293 - DNA, 25 bp, Homo sapien
ttcatccctagctggtatgagatgg

SEQ ID NO: 4518294 - DNA, 25 bp, Homo sapien
ctggtatgagatggataccaccagc

SEQ ID NO: 4518295 - DNA, 25 bp, Homo sapien
gctgggatgagcaagcggtttcttc

SEQ ID NO: 4518296 - DNA, 25 bp, Homo sapien
gagcaagcggtttcttcatccctag

SEQ ID NO: 4518297 - DNA, 25 bp, Homo sapien
aaggagtagattcgcacagacagct

SEQ ID NO: 4518298 - DNA, 25 bp, Homo sapien
cagccccccagggagttggtattgc

SEQ ID NO: 4518299 - DNA, 25 bp, Homo sapien
gacaggcggactccaccatcattgg

SEQ ID NO: 4518300 - DNA, 25 bp, Homo sapien
ttagaggtgaaaggagtagattcgc

SEQ ID NO: 4518301 - DNA, 25 bp, Homo sapien
ctggcacatttgaaggtttgtttga

SEQ ID NO: 4518302 - DNA, 25 bp, Homo sapien
ggcacatttgaaggtttgtttgaag

SEQ ID NO: 4518303 - DNA, 25 bp, Homo sapien
gcacatttgaaggtttgtttgaagg

SEQ ID NO: 4518304 - DNA, 25 bp, Homo sapien
cacatttgaaggtttgtttgaaggt

SEQ ID NO: 4518305 - DNA, 25 bp, Homo sapien
gctacgggaaaaaaatcgttcatca

SEQ ID NO: 4518306 - DNA, 25 bp, Homo sapien
gggaaaaaaatcgttcatcagtcat

SEQ ID NO: 4518307 - DNA, 25 bp, Homo sapien
cgggaaaaaaatcgttcatcagtca

SEQ ID NO: 4518308 - DNA, 25 bp, Homo sapien
ctacgggaaaaaaatcgttcatcag

SEQ ID NO: 4518309 - DNA, 25 bp, Homo sapien
cagtgtatcaaggtagaggtagatt

SEQ ID NO: 4518310 - DNA, 25 bp, Homo sapien
tcactgcgagaacttcagtgtatca

SEQ ID NO: 4518311 - DNA, 25 bp, Homo sapien
tgcgagaacttcagtgtatcaaggt

SEQ ID NO: 4518312 - DNA, 25 bp, Homo sapien
gaacttcagtgtatcaaggtagagg

SEQ ID NO: 4518313 - DNA, 25 bp, Homo sapien
tgtgatgcgtgtcatgcacctctgc

SEQ ID NO: 4518314 - DNA, 25 bp, Homo sapien
gtgatgcgtgtcatgcacctctgca

SEQ ID NO: 4518315 - DNA, 25 bp, Homo sapien
ctgtgatgcgtgtcatgcacctctg

SEQ ID NO: 4518316 - DNA, 25 bp, Homo sapien
tgatgcgtgtcatgcacctctgcat

SEQ ID NO: 4518317 - DNA, 25 bp, Homo sapien
caatcgcgcccccttctctggcagg

SEQ ID NO: 4518318 - DNA, 25 bp, Homo sapien
gcgcccccttctctggcaggacagg

SEQ ID NO: 4518319 - DNA, 25 bp, Homo sapien
tcgcgcccccttctctggcaggaca

SEQ ID NO: 4518320 - DNA, 25 bp, Homo sapien
ggcatccaatcgcgcccccttctct

SEQ ID NO: 4518321 - DNA, 25 bp, Homo sapien
tgtctgtgcagtatcctggtgacac

SEQ ID NO: 4518322 - DNA, 25 bp, Homo sapien
tgtgcagtatcctggtgacacttca

SEQ ID NO: 4518323 - DNA, 25 bp, Homo sapien
tgcagtatcctggtgacacttcaac

SEQ ID NO: 4518324 - DNA, 25 bp, Homo sapien
gatgtccctgtctgtgcagtatcct

SEQ ID NO: 4518325 - DNA, 25 bp, Homo sapien
tgggctgtagttctcctcccacatc

SEQ ID NO: 4518326 - DNA, 25 bp, Homo sapien
ctctgggctgtagttctcctcccac

SEQ ID NO: 4518327 - DNA, 25 bp, Homo sapien
gggcttcaggatgatgtgctgccat

SEQ ID NO: 4518328 - DNA, 25 bp, Homo sapien
agcttgtgtatctgtcagccacccc

SEQ ID NO: 4518329 - DNA, 25 bp, Homo sapien
tgtgtatctgtcagccaccccgctt

SEQ ID NO: 4518330 - DNA, 25 bp, Homo sapien
gtcctccttcagtttgctgcacagc

SEQ ID NO: 4518331 - DNA, 25 bp, Homo sapien
tttcacatgtagaaacaaagactca

SEQ ID NO: 4518332 - DNA, 25 bp, Homo sapien
ggcccactcaactccttgcaatttt

SEQ ID NO: 4518333 - DNA, 25 bp, Homo sapien
taaatgtccatttattgagtcccac

SEQ ID NO: 4518334 - DNA, 25 bp, Homo sapien
gattcagtccaatcttccgggcacc

SEQ ID NO: 4518335 - DNA, 25 bp, Homo sapien
cctaataagtgcaggaagcgtctcc

SEQ ID NO: 4518336 - DNA, 25 bp, Homo sapien
caggccagagcacatggtggatgca

SEQ ID NO: 4518337 - DNA, 25 bp, Homo sapien
tatgtaatgcctgcgaagtggctcc

SEQ ID NO: 4518338 - DNA, 25 bp, Homo sapien
tcaggtgggtgcagacatgtgacca

SEQ ID NO: 4518339 - DNA, 25 bp, Homo sapien
tccaagtggagagaagaatgcctgg

SEQ ID NO: 4518340 - DNA, 25 bp, Homo sapien
gaggttggcaccagctggagagaag

SEQ ID NO: 4518341 - DNA, 25 bp, Homo sapien
gagaagagtggaggttggcaccagc

SEQ ID NO: 4518342 - DNA, 25 bp, Homo sapien
tggagagaagaatgactggggctcc

SEQ ID NO: 4518343 - DNA, 25 bp, Homo sapien
ttgcttccaagacgccagggccaag

SEQ ID NO: 4518344 - DNA, 25 bp, Homo sapien
ctgagttgcttccaagacgccaggg

SEQ ID NO: 4518345 - DNA, 25 bp, Homo sapien
gagtgccaccttgaagtcactgaga

SEQ ID NO: 4518346 - DNA, 25 bp, Homo sapien
gatgacgaatgagtgccaccttgaa

SEQ ID NO: 4518347 - DNA, 25 bp, Homo sapien
ggagaggagatgacggatggcggct

SEQ ID NO: 4518348 - DNA, 25 bp, Homo sapien
tccagaaccacatgacgaatgtcgg

SEQ ID NO: 4518349 - DNA, 25 bp, Homo sapien
gacgaatgtcggtgccacatgcttt

SEQ ID NO: 4518350 - DNA, 25 bp, Homo sapien
gatggcggctatccagaaccacatg

SEQ ID NO: 4518351 - DNA, 25 bp, Homo sapien
tggggagctgtaagcatgtagttca

SEQ ID NO: 4518352 - DNA, 25 bp, Homo sapien
gaacaggatatcgttgaatctgaga

SEQ ID NO: 4518353 - DNA, 25 bp, Homo sapien
tctgagacatgaagcatggctataa

SEQ ID NO: 4518354 - DNA, 25 bp, Homo sapien
tggctataaagcaggtgtgtgcaga

SEQ ID NO: 4518355 - DNA, 25 bp, Homo sapien
cctgctgttgagagacggctgctcc

SEQ ID NO: 4518356 - DNA, 25 bp, Homo sapien
taccaccagtcactttgatcatgcc

SEQ ID NO: 4518357 - DNA, 25 bp, Homo sapien
cctccagagggtgatgtctccctct

SEQ ID NO: 4518358 - DNA, 25 bp, Homo sapien
gagggtgatgtctccctctcgtgca

SEQ ID NO: 4518359 - DNA, 25 bp, Homo sapien
atcctaaccgctagaccatgtggga

SEQ ID NO: 4518360 - DNA, 25 bp, Homo sapien
gaatcctaaccgctagaccatgtgg

SEQ ID NO: 4518361 - DNA, 25 bp, Homo sapien
accaggaatcctaaccgctagacca

SEQ ID NO: 4518362 - DNA, 25 bp, Homo sapien
gccgcctgggtgaaaaccaggaatc

SEQ ID NO: 4518363 - DNA, 25 bp, Homo sapien
agcagaggcagatgtgcaccgcagc

SEQ ID NO: 4518364 - DNA, 25 bp, Homo sapien
gaggcagatgtgcaccgcagcctct

SEQ ID NO: 4518365 - DNA, 25 bp, Homo sapien
aggcagatgtgcaccgcagcctctc

SEQ ID NO: 4518366 - DNA, 25 bp, Homo sapien
gtcagcagaggcagatgtgcaccgc

SEQ ID NO: 4518367 - DNA, 25 bp, Homo sapien
gcggtctgggcgctagggttagaca

SEQ ID NO: 4518368 - DNA, 25 bp, Homo sapien
cagcaacagatgagtgcagcggtct

SEQ ID NO: 4518369 - DNA, 25 bp, Homo sapien
cgctagggttagacaggcacacagc

SEQ ID NO: 4518370 - DNA, 25 bp, Homo sapien
tcagcaacagatgagtgcagcggtc

SEQ ID NO: 4518371 - DNA, 25 bp, Homo sapien
tcacacactgagatgagcacgatca

SEQ ID NO: 4518372 - DNA, 25 bp, Homo sapien
acagggatgtggaaacgttcggctc

SEQ ID NO: 4518373 - DNA, 25 bp, Homo sapien
gacgttctagcgtgctcctgtgttc

SEQ ID NO: 4518374 - DNA, 25 bp, Homo sapien
tcctggaaccaggtgccatcgtctt

SEQ ID NO: 4518375 - DNA, 25 bp, Homo sapien
ccagggttaatctggccggagccca

SEQ ID NO: 4518376 - DNA, 25 bp, Homo sapien
tttccagggttaatctggccggagc

SEQ ID NO: 4518377 - DNA, 25 bp, Homo sapien
atgacgtttccagggttaatctggc

SEQ ID NO: 4518378 - DNA, 25 bp, Homo sapien
catgacgtttccagggttaatctgg

SEQ ID NO: 4518379 - DNA, 25 bp, Homo sapien
gcagagggccctgaatgtgatctat

SEQ ID NO: 4518380 - DNA, 25 bp, Homo sapien
tgtttcgttgattccgggcctggcc

SEQ ID NO: 4518381 - DNA, 25 bp, Homo sapien
ttttctacgccacactgcagagggc

SEQ ID NO: 4518382 - DNA, 25 bp, Homo sapien
tctgtggaggataccatgaactggc

SEQ ID NO: 4518383 - DNA, 25 bp, Homo sapien
catatcaaaatttccagtgggcagg

SEQ ID NO: 4518384 - DNA, 25 bp, Homo sapien
cttcatatcaaaatttccagtgggc

SEQ ID NO: 4518385 - DNA, 25 bp, Homo sapien
cacttcatatcaaaatttccagtgg

SEQ ID NO: 4518386 - DNA, 25 bp, Homo sapien
tatcaaaatttccagtgggcaggtg

SEQ ID NO: 4518387 - DNA, 25 bp, Homo sapien
aagcatcttgtcatcggtccatatt

SEQ ID NO: 4518388 - DNA, 25 bp, Homo sapien
tgtcatcggtccatatttggaaaca

SEQ ID NO: 4518389 - DNA, 25 bp, Homo sapien
tcttgtcatcggtccatatttggaa

SEQ ID NO: 4518390 - DNA, 25 bp, Homo sapien
atcttgtcatcggtccatatttgga

SEQ ID NO: 4518391 - DNA, 25 bp, Homo sapien
ctccttgcatgacggtctgcagtag

SEQ ID NO: 4518392 - DNA, 25 bp, Homo sapien
cagtagattgacattgaagtggttg

SEQ ID NO: 4518393 - DNA, 25 bp, Homo sapien
gtcccaaattctgaccccaaatctg

SEQ ID NO: 4518394 - DNA, 25 bp, Homo sapien
agcatttcattcattggtcccaaat

SEQ ID NO: 4518395 - DNA, 25 bp, Homo sapien
tcttgcaggcccacatcagagcctc

SEQ ID NO: 4518396 - DNA, 25 bp, Homo sapien
tggttcttgcaggcccacatcagag

SEQ ID NO: 4518397 - DNA, 25 bp, Homo sapien
ctcccccaggatggcttccttggtt

SEQ ID NO: 4518398 - DNA, 25 bp, Homo sapien
tcaagtgccctggttcttgcaggcc

SEQ ID NO: 4518399 - DNA, 25 bp, Homo sapien
caacacacacacgagagcaactctg

SEQ ID NO: 4518400 - DNA, 25 bp, Homo sapien
gagagcaactctgatccccagaggc

SEQ ID NO: 4518401 - DNA, 25 bp, Homo sapien
cacacacacgagagcaactctgatc

SEQ ID NO: 4518402 - DNA, 25 bp, Homo sapien
acacgagagcaactctgatccccag

SEQ ID NO: 4518403 - DNA, 25 bp, Homo sapien
aaacacgcaacttcccataagaagg

SEQ ID NO: 4518404 - DNA, 25 bp, Homo sapien
cccctggaggtcacgaagcgcaaca

SEQ ID NO: 4518405 - DNA, 25 bp, Homo sapien
aacaggccttgtgttgggcagagca

SEQ ID NO: 4518406 - DNA, 25 bp, Homo sapien
cctgaaacacgcaacttcccataag

SEQ ID NO: 4518407 - DNA, 25 bp, Homo sapien
tatcacttctaagagagggcagata

SEQ ID NO: 4518408 - DNA, 25 bp, Homo sapien
ctttcacatccgcactgcatccctg

SEQ ID NO: 4518409 - DNA, 25 bp, Homo sapien
tgatcgtagccccaaacacaccata

SEQ ID NO: 4518410 - DNA, 25 bp, Homo sapien
gtctgatcgtagccccaaacacacc

SEQ ID NO: 4518411 - DNA, 25 bp, Homo sapien
ccatacctttcacatccgcactgca

SEQ ID NO: 4518412 - DNA, 25 bp, Homo sapien
cattgaagaaccgatgtcattctcc

SEQ ID NO: 4518413 - DNA, 25 bp, Homo sapien
agaaccgatgtcattctccagtatg

SEQ ID NO: 4518414 - DNA, 25 bp, Homo sapien
gacaactgagtatttcaagtcccgc

SEQ ID NO: 4518415 - DNA, 25 bp, Homo sapien
gagtatttcaagtcccgcttcttga

SEQ ID NO: 4518416 - DNA, 25 bp, Homo sapien
tttgagatggaagactggcatatgc

SEQ ID NO: 4518417 - DNA, 25 bp, Homo sapien
tgcgtaagatgggatttgagatgga

SEQ ID NO: 4518418 - DNA, 25 bp, Homo sapien
aagatgggatttgagatggaagact

SEQ ID NO: 4518419 - DNA, 25 bp, Homo sapien
gagatggaagactggcatatgccat

SEQ ID NO: 4518420 - DNA, 25 bp, Homo sapien
gaacactctgattggacatcaccca

SEQ ID NO: 4518421 - DNA, 25 bp, Homo sapien
cacgctggaagtatctctgtgacag

SEQ ID NO: 4518422 - DNA, 25 bp, Homo sapien
gaaaaggtgatatccccatcgccag

SEQ ID NO: 4518423 - DNA, 25 bp, Homo sapien
tgacaggtgtcacagtgtgcgaatc

SEQ ID NO: 4518424 - DNA, 25 bp, Homo sapien
agagaaacaggcataagctgtgcaa

SEQ ID NO: 4518425 - DNA, 25 bp, Homo sapien
aagaggacagctgcagcaaggccca

SEQ ID NO: 4518426 - DNA, 25 bp, Homo sapien
tcaagaggacagctgcagcaaggcc

SEQ ID NO: 4518427 - DNA, 25 bp, Homo sapien
agaggacagctgcagcaaggcccac

SEQ ID NO: 4518428 - DNA, 25 bp, Homo sapien
caagaggacagctgcagcaaggccc

SEQ ID NO: 4518429 - DNA, 25 bp, Homo sapien
ctagttgttttccccactgtaagat

SEQ ID NO: 4518430 - DNA, 25 bp, Homo sapien
gttgttttccccactgtaagatgat

SEQ ID NO: 4518431 - DNA, 25 bp, Homo sapien
agttgttttccccactgtaagatga

SEQ ID NO: 4518432 - DNA, 25 bp, Homo sapien
tgttttccccactgtaagatgatcg

SEQ ID NO: 4518433 - DNA, 25 bp, Homo sapien
tacaagcgcacaggtatcttccaag

SEQ ID NO: 4518434 - DNA, 25 bp, Homo sapien
taaatcagatgaacaccctacaagc

SEQ ID NO: 4518435 - DNA, 25 bp, Homo sapien
tgaacaccctacaagcgcacaggta

SEQ ID NO: 4518436 - DNA, 25 bp, Homo sapien
tccatagaataaatcagatgaacac

SEQ ID NO: 4518437 - DNA, 25 bp, Homo sapien
gtaggaaagctgtagcgaacaccgt

SEQ ID NO: 4518438 - DNA, 25 bp, Homo sapien
tcaatgcgggtaagagaagtcagga

SEQ ID NO: 4518439 - DNA, 25 bp, Homo sapien
taagctgagacagacccactgatgc

SEQ ID NO: 4518440 - DNA, 25 bp, Homo sapien
gactgctagtcggagttccacaaaa

SEQ ID NO: 4518441 - DNA, 25 bp, Homo sapien
tccaggaaactcttacatcaagttt

SEQ ID NO: 4518442 - DNA, 25 bp, Homo sapien
gaatggatgccttcttctcgtgaag

SEQ ID NO: 4518443 - DNA, 25 bp, Homo sapien
tgggtgacaatcaactcagactgtg

SEQ ID NO: 4518444 - DNA, 25 bp, Homo sapien
cagactgtgtctttagtatgctgaa

SEQ ID NO: 4518445 - DNA, 25 bp, Homo sapien
taggatccttaagtgacagctccat

SEQ ID NO: 4518446 - DNA, 25 bp, Homo sapien
ctttaggatccttaagtgacagctc

SEQ ID NO: 4518447 - DNA, 25 bp, Homo sapien
tttaggatccttaagtgacagctcc

SEQ ID NO: 4518448 - DNA, 25 bp, Homo sapien
ttaggatccttaagtgacagctcca

SEQ ID NO: 4518449 - DNA, 25 bp, Homo sapien
ctgacaagaggcactgagaataaaa

SEQ ID NO: 4518450 - DNA, 25 bp, Homo sapien
ataaaatgaaactcccatcatcctc

SEQ ID NO: 4518451 - DNA, 25 bp, Homo sapien
ctgagaataaaatgaaactcccatc

SEQ ID NO: 4518452 - DNA, 25 bp, Homo sapien
gaataaaatgaaactcccatcatcc

SEQ ID NO: 4518453 - DNA, 25 bp, Homo sapien
taagacatttgatcaaagcttcaca

SEQ ID NO: 4518454 - DNA, 25 bp, Homo sapien
ctgtaagacatttgatcaaagcttc

SEQ ID NO: 4518455 - DNA, 25 bp, Homo sapien
caaagcttcacaagtcacgcacttg

SEQ ID NO: 4518456 - DNA, 25 bp, Homo sapien
aagtcacgcacttgtctctacacat

SEQ ID NO: 4518457 - DNA, 25 bp, Homo sapien
agggaggacccggtgctggacaaca

SEQ ID NO: 4518458 - DNA, 25 bp, Homo sapien
gggaggacccggtgctggacaacag

SEQ ID NO: 4518459 - DNA, 25 bp, Homo sapien
caagggaggacccggtgctggacaa

SEQ ID NO: 4518460 - DNA, 25 bp, Homo sapien
cagggagacgctttctgggtcatgc

SEQ ID NO: 4518461 - DNA, 25 bp, Homo sapien
ggtcatgctgcggagacctctgctg

SEQ ID NO: 4518462 - DNA, 25 bp, Homo sapien
tgctgtgccacctctgtttctcacg

SEQ ID NO: 4518463 - DNA, 25 bp, Homo sapien
cacctctgtttctcacggctatatc

SEQ ID NO: 4518464 - DNA, 25 bp, Homo sapien
catcgcaacactcctttggaatctt

SEQ ID NO: 4518465 - DNA, 25 bp, Homo sapien
tgcaccacatcgcaacactcctttg

SEQ ID NO: 4518466 - DNA, 25 bp, Homo sapien
accacatcgcaacactcctttggaa

SEQ ID NO: 4518467 - DNA, 25 bp, Homo sapien
cttgctgcaccacatcgcaacactc

SEQ ID NO: 4518468 - DNA, 25 bp, Homo sapien
caggtaaatgaggtgaaatatgagt

SEQ ID NO: 4518469 - DNA, 25 bp, Homo sapien
tgaccgggagtctttcccatggcga

SEQ ID NO: 4518470 - DNA, 25 bp, Homo sapien
gagtctttcccatggcgaagaggtc

SEQ ID NO: 4518471 - DNA, 25 bp, Homo sapien
cccatggcgaagaggtcaggtaaat

SEQ ID NO: 4518472 - DNA, 25 bp, Homo sapien
aggcttgtcctccaattgcaaaatg

SEQ ID NO: 4518473 - DNA, 25 bp, Homo sapien
ttccaatccaggcttgtcctccaat

SEQ ID NO: 4518474 - DNA, 25 bp, Homo sapien
tgggcatctgatcagggtagctcac

SEQ ID NO: 4518475 - DNA, 25 bp, Homo sapien
tgcttcttccacacacccgcagcac

SEQ ID NO: 4518476 - DNA, 25 bp, Homo sapien
ctcacactgtcttgggatggcccat

SEQ ID NO: 4518477 - DNA, 25 bp, Homo sapien
tagtaatccatagcttttgccgcca

SEQ ID NO: 4518478 - DNA, 25 bp, Homo sapien
gggatggcccattctatatagtaat

SEQ ID NO: 4518479 - DNA, 25 bp, Homo sapien
tgttgcttcgtttgacctcacactg

SEQ ID NO: 4518480 - DNA, 25 bp, Homo sapien
aaaaagacaaccagtcttcagaaca

SEQ ID NO: 4518481 - DNA, 25 bp, Homo sapien
catggagctgatgtccctttagaaa

SEQ ID NO: 4518482 - DNA, 25 bp, Homo sapien
tcttcagaacatggagctgatgtcc

SEQ ID NO: 4518483 - DNA, 25 bp, Homo sapien
tgtccctttagaaactcgctgctgc

SEQ ID NO: 4518484 - DNA, 25 bp, Homo sapien
ttcccacttggtctatgtctatgcg

SEQ ID NO: 4518485 - DNA, 25 bp, Homo sapien
ctcctgctgccatatccacgagggt

SEQ ID NO: 4518486 - DNA, 25 bp, Homo sapien
ggtctatgtctatgcggcctcctgc

SEQ ID NO: 4518487 - DNA, 25 bp, Homo sapien
tatccacgagggttatgaccaacat

SEQ ID NO: 4518488 - DNA, 25 bp, Homo sapien
cttgttatgatcctgtagctgatgg

SEQ ID NO: 4518489 - DNA, 25 bp, Homo sapien
ttgggtgaaccgttcaaggtgctgt

SEQ ID NO: 4518490 - DNA, 25 bp, Homo sapien
cctgtagctgatgggactccgtcat

SEQ ID NO: 4518491 - DNA, 25 bp, Homo sapien
gctttcaggcgagtatgactgaatt

SEQ ID NO: 4518492 - DNA, 25 bp, Homo sapien
cctcctcggcacactcctcctcaaa

SEQ ID NO: 4518493 - DNA, 25 bp, Homo sapien
tcctcctcggcacactcctcctcaa

SEQ ID NO: 4518494 - DNA, 25 bp, Homo sapien
ctcctcggcacactcctcctcaaac

SEQ ID NO: 4518495 - DNA, 25 bp, Homo sapien
tctttcagttccactctcattcttt

SEQ ID NO: 4518496 - DNA, 25 bp, Homo sapien
ttattatcccacaagcccaaaggct

SEQ ID NO: 4518497 - DNA, 25 bp, Homo sapien
gcaattccaatgatacaaatgctgg

SEQ ID NO: 4518498 - DNA, 25 bp, Homo sapien
tctacttttaagcacatctgccagc

SEQ ID NO: 4518499 - DNA, 25 bp, Homo sapien
caccaccacagttgggggtcagcct

SEQ ID NO: 4518500 - DNA, 25 bp, Homo sapien
caggactggaggagctgactcattc

SEQ ID NO: 4518501 - DNA, 25 bp, Homo sapien
taagccaggaactgctgtccagcaa

SEQ ID NO: 4518502 - DNA, 25 bp, Homo sapien
tgactcattcagatgcctcagtgtg

SEQ ID NO: 4518503 - DNA, 25 bp, Homo sapien
tcatgtacatgggagcttgctgtgc

SEQ ID NO: 4518504 - DNA, 25 bp, Homo sapien
atgtacatgggagcttgctgtgcac

SEQ ID NO: 4518505 - DNA, 25 bp, Homo sapien
catgtacatgggagcttgctgtgca

SEQ ID NO: 4518506 - DNA, 25 bp, Homo sapien
tgtacatgggagcttgctgtgcact

SEQ ID NO: 4518507 - DNA, 25 bp, Homo sapien
agctcctccagtcctgtgcaggctg

SEQ ID NO: 4518508 - DNA, 25 bp, Homo sapien
ttagctcctccagtcctgtgcaggc

SEQ ID NO: 4518509 - DNA, 25 bp, Homo sapien
cagtcctgtgcaggctgctccccac

SEQ ID NO: 4518510 - DNA, 25 bp, Homo sapien
tccagtcctgtgcaggctgctcccc

SEQ ID NO: 4518511 - DNA, 25 bp, Homo sapien
gggagctgttgccagacagcagctc

SEQ ID NO: 4518512 - DNA, 25 bp, Homo sapien
cccctcaactgtgatgaggactgtg

SEQ ID NO: 4518513 - DNA, 25 bp, Homo sapien
gactgtgggtccagacgaaggtcaa

SEQ ID NO: 4518514 - DNA, 25 bp, Homo sapien
acgaaggtcaaagtgacccaagagc

SEQ ID NO: 4518515 - DNA, 25 bp, Homo sapien
ctgtgtggtatctgtgtccaaatca

SEQ ID NO: 4518516 - DNA, 25 bp, Homo sapien
ggtttgcaaaggcatcattcccatt

SEQ ID NO: 4518517 - DNA, 25 bp, Homo sapien
aatgagagggactctatttcatgcc

SEQ ID NO: 4518518 - DNA, 25 bp, Homo sapien
tcttacagtccagatgcccaagatg

SEQ ID NO: 4518519 - DNA, 25 bp, Homo sapien
gatgttaatagcacggttctcgcca

SEQ ID NO: 4518520 - DNA, 25 bp, Homo sapien
gaaatgctgattgagcagctccttt

SEQ ID NO: 4518521 - DNA, 25 bp, Homo sapien
tgactctcctattcactggaatgga

SEQ ID NO: 4518522 - DNA, 25 bp, Homo sapien
gagcaactctgagaacccgttttta

SEQ ID NO: 4518523 - DNA, 25 bp, Homo sapien
ctccatttgcttctagtggcagttt

SEQ ID NO: 4518524 - DNA, 25 bp, Homo sapien
cctccatttgcttctagtggcagtt

SEQ ID NO: 4518525 - DNA, 25 bp, Homo sapien
gatgctccacggaacatctgcagat

SEQ ID NO: 4518526 - DNA, 25 bp, Homo sapien
gatgatgctccacggaacatctgca

SEQ ID NO: 4518527 - DNA, 25 bp, Homo sapien
tgatgctccacggaacatctgcaga

SEQ ID NO: 4518528 - DNA, 25 bp, Homo sapien
ggtgatgatgctccacggaacatct

SEQ ID NO: 4518529 - DNA, 25 bp, Homo sapien
gaccacagttgagacttgaaatccc

SEQ ID NO: 4518530 - DNA, 25 bp, Homo sapien
gggcacatcattatctttctctcca

SEQ ID NO: 4518531 - DNA, 25 bp, Homo sapien
caacatctgccgcactcactaattt

SEQ ID NO: 4518532 - DNA, 25 bp, Homo sapien
gcactcactaatttcttactgtcac

SEQ ID NO: 4518533 - DNA, 25 bp, Homo sapien
gcaatgaagaatttttcaagcttct

SEQ ID NO: 4518534 - DNA, 25 bp, Homo sapien
ctgcaatgaagaatttttcaagctt

SEQ ID NO: 4518535 - DNA, 25 bp, Homo sapien
aatgaagaatttttcaagcttcttc

SEQ ID NO: 4518536 - DNA, 25 bp, Homo sapien
tgaagaatttttcaagcttcttcat

SEQ ID NO: 4518537 - DNA, 25 bp, Homo sapien
ctgggatatgtcagagatgatgatg

SEQ ID NO: 4518538 - DNA, 25 bp, Homo sapien
ctctgggatatgtcagagatgatga

SEQ ID NO: 4518539 - DNA, 25 bp, Homo sapien
gggatatgtcagagatgatgatgtt

SEQ ID NO: 4518540 - DNA, 25 bp, Homo sapien
agactctgggatatgtcagagatga

SEQ ID NO: 4518541 - DNA, 25 bp, Homo sapien
agaatggcagaacaatccatatgct

SEQ ID NO: 4518542 - DNA, 25 bp, Homo sapien
tccattgtgatcaaagatgcctcat

SEQ ID NO: 4518543 - DNA, 25 bp, Homo sapien
aatatatccgggagttccagtgttg

SEQ ID NO: 4518544 - DNA, 25 bp, Homo sapien
aagtggcatgttgatgatgtctcca

SEQ ID NO: 4518545 - DNA, 25 bp, Homo sapien
gatgcgaatccacaccaaatgaggt

SEQ ID NO: 4518546 - DNA, 25 bp, Homo sapien
ataaggcgaggaacggatgcgaatc

SEQ ID NO: 4518547 - DNA, 25 bp, Homo sapien
cgaggaacggatgcgaatccacacc

SEQ ID NO: 4518548 - DNA, 25 bp, Homo sapien
gaatccacaccaaatgaggtcagca

SEQ ID NO: 4518549 - DNA, 25 bp, Homo sapien
ttgcaatacttcctgccggacctgc

SEQ ID NO: 4518550 - DNA, 25 bp, Homo sapien
ggggcctatcagaaacaccctccat

SEQ ID NO: 4518551 - DNA, 25 bp, Homo sapien
cactgtgcactgagggggcctatca

SEQ ID NO: 4518552 - DNA, 25 bp, Homo sapien
ccttgcaatacttcctgccggacct

SEQ ID NO: 4518553 - DNA, 25 bp, Homo sapien
tctgacaaaaggtatacaaggtctc

SEQ ID NO: 4518554 - DNA, 25 bp, Homo sapien
caaggtctctacactggaaactgaa

SEQ ID NO: 4518555 - DNA, 25 bp, Homo sapien
tctatgtaaaaaatctgagggagtc

SEQ ID NO: 4518556 - DNA, 25 bp, Homo sapien
tgagggagtcactttaaagagctac

SEQ ID NO: 4518557 - DNA, 25 bp, Homo sapien
ttcagcaaggatgcaaagtcaactc

SEQ ID NO: 4518558 - DNA, 25 bp, Homo sapien
cagttccaatcaaattcccagaagg

SEQ ID NO: 4518559 - DNA, 25 bp, Homo sapien
cattgttagggtagcaattctccac

SEQ ID NO: 4518560 - DNA, 25 bp, Homo sapien
caggagagtctagatatgaaccaac

SEQ ID NO: 4518561 - DNA, 25 bp, Homo sapien
tgtttagagctaagagatgcagatc

SEQ ID NO: 4518562 - DNA, 25 bp, Homo sapien
gcaaaatcagactagtaagaggcag

SEQ ID NO: 4518563 - DNA, 25 bp, Homo sapien
cagatctttaggatgagagtttcgc

SEQ ID NO: 4518564 - DNA, 25 bp, Homo sapien
gagtttcgctcaggatccaacacca

SEQ ID NO: 4518565 - DNA, 25 bp, Homo sapien
tggtatagacagtgaaacccctcca

SEQ ID NO: 4518566 - DNA, 25 bp, Homo sapien
gatctcctcagtaaaaatgtcaacg

SEQ ID NO: 4518567 - DNA, 25 bp, Homo sapien
gaggtaatcaatccaaggcacacta

SEQ ID NO: 4518568 - DNA, 25 bp, Homo sapien
tctgtagatcttgagcccctgtggc

SEQ ID NO: 4518569 - DNA, 25 bp, Homo sapien
caacaacgtcagaggtccgggttca

SEQ ID NO: 4518570 - DNA, 25 bp, Homo sapien
gaaaatatgacatcgcatgctgcca

SEQ ID NO: 4518571 - DNA, 25 bp, Homo sapien
gcgtctatgaaaccggtgcaccttg

SEQ ID NO: 4518572 - DNA, 25 bp, Homo sapien
tatcaggcctagaaatccatacgag

SEQ ID NO: 4518573 - DNA, 25 bp, Homo sapien
gcattcacatcggttagatcaggta

SEQ ID NO: 4518574 - DNA, 25 bp, Homo sapien
tgaattcctggtatcgccaatgccg

SEQ ID NO: 4518575 - DNA, 25 bp, Homo sapien
gaacttccagcgatgtcaacagaat

SEQ ID NO: 4518576 - DNA, 25 bp, Homo sapien
tgtgaagacctcctccgtagatggg

SEQ ID NO: 4518577 - DNA, 25 bp, Homo sapien
agtcattcactatccctaagaaggg

SEQ ID NO: 4518578 - DNA, 25 bp, Homo sapien
caggtgtggctgaaacaggtgccca

SEQ ID NO: 4518579 - DNA, 25 bp, Homo sapien
catggcagtagcatgtcccttgtgc

SEQ ID NO: 4518580 - DNA, 25 bp, Homo sapien
ctttccacgggatgattagcagcaa

SEQ ID NO: 4518581 - DNA, 25 bp, Homo sapien
tgaagctaagatgatagttaaaaaa

SEQ ID NO: 4518582 - DNA, 25 bp, Homo sapien
cacttctgtttcacgtaaaatttga

SEQ ID NO: 4518583 - DNA, 25 bp, Homo sapien
gacatgcactttagccatataacaa

SEQ ID NO: 4518584 - DNA, 25 bp, Homo sapien
agaagctgttaggttgtgtatacag

SEQ ID NO: 4518585 - DNA, 25 bp, Homo sapien
taaaggccttactaagattgccgag

SEQ ID NO: 4518586 - DNA, 25 bp, Homo sapien
gacccataaaggcatggagggcaca

SEQ ID NO: 4518587 - DNA, 25 bp, Homo sapien
caaggagctactgtgttcgctggga

SEQ ID NO: 4518588 - DNA, 25 bp, Homo sapien
caggtctatgggcacaggcagtcct

SEQ ID NO: 4518589 - DNA, 25 bp, Homo sapien
cagggtcaatgtgcacggaaatgtc

SEQ ID NO: 4518590 - DNA, 25 bp, Homo sapien
tgtgttcaacaccaggccagagatt

SEQ ID NO: 4518591 - DNA, 25 bp, Homo sapien
tcctagctagatggccaggactcca

SEQ ID NO: 4518592 - DNA, 25 bp, Homo sapien
gcccaagtcctacacaaagctgatg

SEQ ID NO: 4518593 - DNA, 25 bp, Homo sapien
tttgaacggtcattctttgccttgg

SEQ ID NO: 4518594 - DNA, 25 bp, Homo sapien
gaagcagcccataaggtacatgtca

SEQ ID NO: 4518595 - DNA, 25 bp, Homo sapien
caggaacacaaagacgaagcagccc

SEQ ID NO: 4518596 - DNA, 25 bp, Homo sapien
tgccttggctgtcttttctgcaagc

SEQ ID NO: 4518597 - DNA, 25 bp, Homo sapien
cacagcctgtaaaggggagccacat

SEQ ID NO: 4518598 - DNA, 25 bp, Homo sapien
tgtgggtctgtagccatcatttcga

SEQ ID NO: 4518599 - DNA, 25 bp, Homo sapien
tggtgtgttgtggtggtccacagcc

SEQ ID NO: 4518600 - DNA, 25 bp, Homo sapien
ctgctatgggggatactgtggatgg

SEQ ID NO: 4518601 - DNA, 25 bp, Homo sapien
tggaaatctaatggcaatggctgaa

SEQ ID NO: 4518602 - DNA, 25 bp, Homo sapien
caataaatagtaaccggcactgtta

SEQ ID NO: 4518603 - DNA, 25 bp, Homo sapien
ctgttggaaatctaatggcaatggc

SEQ ID NO: 4518604 - DNA, 25 bp, Homo sapien
tgtgccaataaatagtaaccggcac

SEQ ID NO: 4518605 - DNA, 25 bp, Homo sapien
agggaaatcatccagctgcagtaca

SEQ ID NO: 4518606 - DNA, 25 bp, Homo sapien
gtacgttcaccaggcttgtaagtct

SEQ ID NO: 4518607 - DNA, 25 bp, Homo sapien
tccagctgcagtacaggaaatggct

SEQ ID NO: 4518608 - DNA, 25 bp, Homo sapien
tctaaagggaaatcatccagctgca

SEQ ID NO: 4518609 - DNA, 25 bp, Homo sapien
catcataattgatccagaaggacac

SEQ ID NO: 4518610 - DNA, 25 bp, Homo sapien
ctcagtgacagtcgaggataggcac

SEQ ID NO: 4518611 - DNA, 25 bp, Homo sapien
gaaggacacccacgacagaatcgtt

SEQ ID NO: 4518612 - DNA, 25 bp, Homo sapien
cagaatcgttatcagtatagagggc

SEQ ID NO: 4518613 - DNA, 25 bp, Homo sapien
gcattaacgagagtctcaaaggagc

SEQ ID NO: 4518614 - DNA, 25 bp, Homo sapien
cacagaagaggcattaacgagagtc

SEQ ID NO: 4518615 - DNA, 25 bp, Homo sapien
agtctcaaaggagcacctgtctgcc

SEQ ID NO: 4518616 - DNA, 25 bp, Homo sapien
tcaaaggagcacctgtctgccttct

SEQ ID NO: 4518617 - DNA, 25 bp, Homo sapien
aacattccactcaacacattttgga

SEQ ID NO: 4518618 - DNA, 25 bp, Homo sapien
gaacattccactcaacacattttgg

SEQ ID NO: 4518619 - DNA, 25 bp, Homo sapien
ttctcggatgtgaacattccactca

SEQ ID NO: 4518620 - DNA, 25 bp, Homo sapien
tatgcgtgttcaaagactgagcctg

SEQ ID NO: 4518621 - DNA, 25 bp, Homo sapien
tgtacagataaaccagacggactta

SEQ ID NO: 4518622 - DNA, 25 bp, Homo sapien
tatagaatctactgaaaccgactgg

SEQ ID NO: 4518623 - DNA, 25 bp, Homo sapien
aatgcctccagctgtctagtagaag

SEQ ID NO: 4518624 - DNA, 25 bp, Homo sapien
tcttgaggtggaggataaagtggca

SEQ ID NO: 4518625 - DNA, 25 bp, Homo sapien
ctcttgaggtggaggataaagtggc

SEQ ID NO: 4518626 - DNA, 25 bp, Homo sapien
cctcttgaggtggaggataaagtgg

SEQ ID NO: 4518627 - DNA, 25 bp, Homo sapien
gaccagacggtgctccacgatggag

SEQ ID NO: 4518628 - DNA, 25 bp, Homo sapien
gagaactgcgggagctcaatccttt

SEQ ID NO: 4518629 - DNA, 25 bp, Homo sapien
tttccactccggtaacagccttgtc

SEQ ID NO: 4518630 - DNA, 25 bp, Homo sapien
tgtggcgaagacaacattcctcgag

SEQ ID NO: 4518631 - DNA, 25 bp, Homo sapien
ttctgctcgtccagggggtatctcc

SEQ ID NO: 4518632 - DNA, 25 bp, Homo sapien
catcatgcatgctgctgtcgtggtg

SEQ ID NO: 4518633 - DNA, 25 bp, Homo sapien
catgcatgctgctgtcgtggtgatt

SEQ ID NO: 4518634 - DNA, 25 bp, Homo sapien
tctgctcgtccagggggtatctcct

SEQ ID NO: 4518635 - DNA, 25 bp, Homo sapien
gcagaattcaatcctgcagaattga

SEQ ID NO: 4518636 - DNA, 25 bp, Homo sapien
caacatcagtgtgcgagagctttat

SEQ ID NO: 4518637 - DNA, 25 bp, Homo sapien
cagtgtgcgagagctttatggcttc

SEQ ID NO: 4518638 - DNA, 25 bp, Homo sapien
atccaacatcagtgtgcgagagctt

SEQ ID NO: 4518639 - DNA, 25 bp, Homo sapien
gacctattctatgggtcaccacaca

SEQ ID NO: 4518640 - DNA, 25 bp, Homo sapien
tcacccatggtgtagcatgtacaag

SEQ ID NO: 4518641 - DNA, 25 bp, Homo sapien
ataacatcgattaccctaaccccag

SEQ ID NO: 4518642 - DNA, 25 bp, Homo sapien
ttcacattggtgtgcgaccaacact

SEQ ID NO: 4518643 - DNA, 25 bp, Homo sapien
tgacagggtgccaaggtgaagctca

SEQ ID NO: 4518644 - DNA, 25 bp, Homo sapien
cagtgcagccatatacagcaagggc

SEQ ID NO: 4518645 - DNA, 25 bp, Homo sapien
tatattctcatagtggcttccccgt

SEQ ID NO: 4518646 - DNA, 25 bp, Homo sapien
cattcaatgacatccgagggccaag

SEQ ID NO: 4518647 - DNA, 25 bp, Homo sapien
catgcataccctgtccagagcattc

SEQ ID NO: 4518648 - DNA, 25 bp, Homo sapien
taggatggcatgcataccctgtcca

SEQ ID NO: 4518649 - DNA, 25 bp, Homo sapien
ttattttaggatggcatgcataccc

SEQ ID NO: 4518650 - DNA, 25 bp, Homo sapien
gatggcatgcataccctgtccagag

SEQ ID NO: 4518651 - DNA, 25 bp, Homo sapien
tgacaagctggtgcagggatctcag

SEQ ID NO: 4518652 - DNA, 25 bp, Homo sapien
gacaagctggtgcagggatctcagt

SEQ ID NO: 4518653 - DNA, 25 bp, Homo sapien
tcaagcatctgcgtgagtggtcagt

SEQ ID NO: 4518654 - DNA, 25 bp, Homo sapien
gaagagcaagctagtgttaccccaa

SEQ ID NO: 4518655 - DNA, 25 bp, Homo sapien
gatttcccagaataaggctgagttg

SEQ ID NO: 4518656 - DNA, 25 bp, Homo sapien
gtacaaacctacgtcacggacagct

SEQ ID NO: 4518657 - DNA, 25 bp, Homo sapien
cagtgtaggctactgctggatagac

SEQ ID NO: 4518658 - DNA, 25 bp, Homo sapien
gaccttcctcagcagtactttacaa

SEQ ID NO: 4518659 - DNA, 25 bp, Homo sapien
gaaggtctcagtgatacagccagtc

SEQ ID NO: 4518660 - DNA, 25 bp, Homo sapien
cagccagtccaaccagtatttcaag

SEQ ID NO: 4518661 - DNA, 25 bp, Homo sapien
gaatagccaatttctaatgagcaga

SEQ ID NO: 4518662 - DNA, 25 bp, Homo sapien
ccagccagtgcaacagtaaaaagac

SEQ ID NO: 4518663 - DNA, 25 bp, Homo sapien
tctttatgacagcttatccaggtcc

SEQ ID NO: 4518664 - DNA, 25 bp, Homo sapien
tggctgagccatgtgagcactcaca

SEQ ID NO: 4518665 - DNA, 25 bp, Homo sapien
atgcaacagcaaaattggtcctgaa

SEQ ID NO: 4518666 - DNA, 25 bp, Homo sapien
atattcaacacccatgcaccatgca

SEQ ID NO: 4518667 - DNA, 25 bp, Homo sapien
agtgagatattcaacacccatgcac

SEQ ID NO: 4518668 - DNA, 25 bp, Homo sapien
gcaacagcaaaattggtcctgaaga

SEQ ID NO: 4518669 - DNA, 25 bp, Homo sapien
catcagggtgaagacggatcatgcg

SEQ ID NO: 4518670 - DNA, 25 bp, Homo sapien
gggatcccagaataggcgagccttt

SEQ ID NO: 4518671 - DNA, 25 bp, Homo sapien
gctggtcagccactcgattgtcaag

SEQ ID NO: 4518672 - DNA, 25 bp, Homo sapien
taagaaatatgtgtcgggcacccat

SEQ ID NO: 4518673 - DNA, 25 bp, Homo sapien
gaaagttagtttgtacccagccaca

SEQ ID NO: 4518674 - DNA, 25 bp, Homo sapien
tcctccacgaccagccaaattcagg

SEQ ID NO: 4518675 - DNA, 25 bp, Homo sapien
agttagtttgtacccagccacaggt

SEQ ID NO: 4518676 - DNA, 25 bp, Homo sapien
acgaccagccaaattcaggttgcaa

SEQ ID NO: 4518677 - DNA, 25 bp, Homo sapien
agagtttctctactatcaccctcca

SEQ ID NO: 4518678 - DNA, 25 bp, Homo sapien
atgtgttagtggtggcgaccacaga

SEQ ID NO: 4518679 - DNA, 25 bp, Homo sapien
ctttcgctggtgtgggcggtgcgct

SEQ ID NO: 4518680 - DNA, 25 bp, Homo sapien
cgctggaactgaggcgtgcaaagtt

SEQ ID NO: 4518681 - DNA, 25 bp, Homo sapien
tcgcgatgtctagcgcccttctcag

SEQ ID NO: 4518682 - DNA, 25 bp, Homo sapien
atgtctagcgcccttctcagagtcc

SEQ ID NO: 4518683 - DNA, 25 bp, Homo sapien
tgagtcgcgatgtctagcgcccttc

SEQ ID NO: 4518684 - DNA, 25 bp, Homo sapien
gcctgagtcgcgatgtctagcgccc

SEQ ID NO: 4518685 - DNA, 25 bp, Homo sapien
cagtcagccctaggagcccggctgt

SEQ ID NO: 4518686 - DNA, 25 bp, Homo sapien
agtcagccctaggagcccggctgtc

SEQ ID NO: 4518687 - DNA, 25 bp, Homo sapien
ttttggactgtgtcgctctccgcac

SEQ ID NO: 4518688 - DNA, 25 bp, Homo sapien
cgtcttattttggactgtgtcgctc

SEQ ID NO: 4518689 - DNA, 25 bp, Homo sapien
gcagcgcctctcagtttgggtcttg

SEQ ID NO: 4518690 - DNA, 25 bp, Homo sapien
ctcgggctccgcgtcttattttgga

SEQ ID NO: 4518691 - DNA, 25 bp, Homo sapien
gaggtgacttgagtagactagtggg

SEQ ID NO: 4518692 - DNA, 25 bp, Homo sapien
tgaggtgacttgagtagactagtgg

SEQ ID NO: 4518693 - DNA, 25 bp, Homo sapien
acttgagtagactagtgggtaagag

SEQ ID NO: 4518694 - DNA, 25 bp, Homo sapien
gtgacttgagtagactagtgggtaa

SEQ ID NO: 4518695 - DNA, 25 bp, Homo sapien
tccactctcgtgcagccgggagtag

SEQ ID NO: 4518696 - DNA, 25 bp, Homo sapien
catggtgccgctccttgtgacgtgc

SEQ ID NO: 4518697 - DNA, 25 bp, Homo sapien
cgcttgtgtgagtgatccttcagca

SEQ ID NO: 4518698 - DNA, 25 bp, Homo sapien
tcctgttacgggagccatggtgccg

SEQ ID NO: 4518699 - DNA, 25 bp, Homo sapien
gcaatgatgtggcatgaaccaaaga

SEQ ID NO: 4518700 - DNA, 25 bp, Homo sapien
tctgtcagagttttgaattccaagc

SEQ ID NO: 4518701 - DNA, 25 bp, Homo sapien
caaagagatggaatttgcatgggat

SEQ ID NO: 4518702 - DNA, 25 bp, Homo sapien
tgtggcatgaaccaaagagaagagc

SEQ ID NO: 4518703 - DNA, 25 bp, Homo sapien
aggccttggaaatccgagctgggag

SEQ ID NO: 4518704 - DNA, 25 bp, Homo sapien
ctccactccttgtgactgccgagag

SEQ ID NO: 4518705 - DNA, 25 bp, Homo sapien
ggagtcaggtgcaagagcgcctcca

SEQ ID NO: 4518706 - DNA, 25 bp, Homo sapien
gtcaggtgcaagagcgcctccactc

SEQ ID NO: 4518707 - DNA, 25 bp, Homo sapien
tcttctgtctggtaggtggcccaca

SEQ ID NO: 4518708 - DNA, 25 bp, Homo sapien
gaggtcccaaagactccgagagcct

SEQ ID NO: 4518709 - DNA, 25 bp, Homo sapien
tccgccacgctaaccggaagttgtg

SEQ ID NO: 4518710 - DNA, 25 bp, Homo sapien
cggtatcccggtgctgaggtcccaa

SEQ ID NO: 4518711 - DNA, 25 bp, Homo sapien
tgtggagcaattatccttggactcc

SEQ ID NO: 4518712 - DNA, 25 bp, Homo sapien
agcccttgtggagcaattatccttg

SEQ ID NO: 4518713 - DNA, 25 bp, Homo sapien
cttgtggagcaattatccttggact

SEQ ID NO: 4518714 - DNA, 25 bp, Homo sapien
cccttgtggagcaattatccttgga

SEQ ID NO: 4518715 - DNA, 25 bp, Homo sapien
tccgccgggaactaggaagagtctg

SEQ ID NO: 4518716 - DNA, 25 bp, Homo sapien
tgcaaaccgtttcaagagggtctcc

SEQ ID NO: 4518717 - DNA, 25 bp, Homo sapien
gagggtctccaaaaagccatcaatg

SEQ ID NO: 4518718 - DNA, 25 bp, Homo sapien
aacatgcgcatgtgtgctgagccac

SEQ ID NO: 4518719 - DNA, 25 bp, Homo sapien
gaaaaaatgaatctataagccacgt

SEQ ID NO: 4518720 - DNA, 25 bp, Homo sapien
gtggctgaatcctagctgtgcagtt

SEQ ID NO: 4518721 - DNA, 25 bp, Homo sapien
cacagtggctgaatcctagctgtgc

SEQ ID NO: 4518722 - DNA, 25 bp, Homo sapien
tataagccacgttagttccacagtg

SEQ ID NO: 4518723 - DNA, 25 bp, Homo sapien
tcacctttgagctgttagtagcaaa

SEQ ID NO: 4518724 - DNA, 25 bp, Homo sapien
tatgagcagatgaccttaagacccg

SEQ ID NO: 4518725 - DNA, 25 bp, Homo sapien
cctttgtcgcctgaggagaggctta

SEQ ID NO: 4518726 - DNA, 25 bp, Homo sapien
agtggcttctcgtcaccagttttca

SEQ ID NO: 4518727 - DNA, 25 bp, Homo sapien
ccaatactgccatattatttgcacg

SEQ ID NO: 4518728 - DNA, 25 bp, Homo sapien
tcataatcaactggatatctggagg

SEQ ID NO: 4518729 - DNA, 25 bp, Homo sapien
cagtgctgccacacattcatctgca

SEQ ID NO: 4518730 - DNA, 25 bp, Homo sapien
tatttgcacgaggttccctgtccag

SEQ ID NO: 4518731 - DNA, 25 bp, Homo sapien
cagtgatgtccttcctacttaggga

SEQ ID NO: 4518732 - DNA, 25 bp, Homo sapien
tcgaacacaatgaggatgactatgc

SEQ ID NO: 4518733 - DNA, 25 bp, Homo sapien
tctgaggaagtgagcagcaaaacct

SEQ ID NO: 4518734 - DNA, 25 bp, Homo sapien
tgattccccagagtaaggctcactg

SEQ ID NO: 4518735 - DNA, 25 bp, Homo sapien
tctgaatccagtgtcacttccagag

SEQ ID NO: 4518736 - DNA, 25 bp, Homo sapien
ccctttctcaggattgggtgccact

SEQ ID NO: 4518737 - DNA, 25 bp, Homo sapien
cacctgcagtatgtgtgtctgaatc

SEQ ID NO: 4518738 - DNA, 25 bp, Homo sapien
tcacctgggaggagacgcaagaagt

SEQ ID NO: 4518739 - DNA, 25 bp, Homo sapien
gaacagtgtcacttaggcttggcaa

SEQ ID NO: 4518740 - DNA, 25 bp, Homo sapien
cttggcaagtaggtggacataggcc

SEQ ID NO: 4518741 - DNA, 25 bp, Homo sapien
tgctgcaagaggacccaatcgtata

SEQ ID NO: 4518742 - DNA, 25 bp, Homo sapien
aacatgaggtgtttcagcataatga

SEQ ID NO: 4518743 - DNA, 25 bp, Homo sapien
cagtaacatgctgtgggttccaggg

SEQ ID NO: 4518744 - DNA, 25 bp, Homo sapien
caatgacagacagcccagctcttgg

SEQ ID NO: 4518745 - DNA, 25 bp, Homo sapien
gtggaccatgtgtaaagctaagacc

SEQ ID NO: 4518746 - DNA, 25 bp, Homo sapien
ccagggactggataatgtggaccat

SEQ ID NO: 4518747 - DNA, 25 bp, Homo sapien
cttttaccacttggtcaagctggta

SEQ ID NO: 4518748 - DNA, 25 bp, Homo sapien
tcttggtgatcatacaaggagggac

SEQ ID NO: 4518749 - DNA, 25 bp, Homo sapien
taagaggcattatgtggggagatac

SEQ ID NO: 4518750 - DNA, 25 bp, Homo sapien
gggacacgatgtctctttgtgccac

SEQ ID NO: 4518751 - DNA, 25 bp, Homo sapien
ctagagcaagcctcttaacagagac

SEQ ID NO: 4518752 - DNA, 25 bp, Homo sapien
ccagggctgaccaagtgacttgaga

SEQ ID NO: 4518753 - DNA, 25 bp, Homo sapien
gacacctgcacgagccgctcatttg

SEQ ID NO: 4518754 - DNA, 25 bp, Homo sapien
tcctctaagccagtgtgggtatcat

SEQ ID NO: 4518755 - DNA, 25 bp, Homo sapien
tctcttgctgaaacaacaatcggca

SEQ ID NO: 4518756 - DNA, 25 bp, Homo sapien
tcaaggatcaaaggataccgccaag

SEQ ID NO: 4518757 - DNA, 25 bp, Homo sapien
aaagcacctggtccactcactgggt

SEQ ID NO: 4518758 - DNA, 25 bp, Homo sapien
ccactgcagcccgaaagcacctggt

SEQ ID NO: 4518759 - DNA, 25 bp, Homo sapien
aagcagatgacaaggacgctgcagt

SEQ ID NO: 4518760 - DNA, 25 bp, Homo sapien
caacagcaatttgtatgctttgagc

SEQ ID NO: 4518761 - DNA, 25 bp, Homo sapien
caagctgtgattagattggtcacca

SEQ ID NO: 4518762 - DNA, 25 bp, Homo sapien
gagcactcgtctctaagaaactcat

SEQ ID NO: 4518763 - DNA, 25 bp, Homo sapien
gcaccagttgcattcctaccaagca

SEQ ID NO: 4518764 - DNA, 25 bp, Homo sapien
gttataaaggcactccactgaattg

SEQ ID NO: 4518765 - DNA, 25 bp, Homo sapien
tgttataaaggcactccactgaatt

SEQ ID NO: 4518766 - DNA, 25 bp, Homo sapien
atgttcttacatctgcttggtttgg

SEQ ID NO: 4518767 - DNA, 25 bp, Homo sapien
gttcttacatctgcttggtttgggc

SEQ ID NO: 4518768 - DNA, 25 bp, Homo sapien
tgttcttacatctgcttggtttggg

SEQ ID NO: 4518769 - DNA, 25 bp, Homo sapien
catcagcactggtttaactgtgcac

SEQ ID NO: 4518770 - DNA, 25 bp, Homo sapien
tctataagtgtcaatcaaatcctgt

SEQ ID NO: 4518771 - DNA, 25 bp, Homo sapien
tctgtatgttgggagcacatcctcc

SEQ ID NO: 4518772 - DNA, 25 bp, Homo sapien
gatggtgtcgtttggttcttctgta

SEQ ID NO: 4518773 - DNA, 25 bp, Homo sapien
tctattctctcttcgatttcttctt

SEQ ID NO: 4518774 - DNA, 25 bp, Homo sapien
ctaagcacctccaacagaaagaagg

SEQ ID NO: 4518775 - DNA, 25 bp, Homo sapien
gtgtcttcacgccttttgattgtat

SEQ ID NO: 4518776 - DNA, 25 bp, Homo sapien
acctgggaggaatggcactattcca

SEQ ID NO: 4518777 - DNA, 25 bp, Homo sapien
aactcaaccgttagaggcagtgcag

SEQ ID NO: 4518778 - DNA, 25 bp, Homo sapien
ccaagcaaagggattggccagtctc

SEQ ID NO: 4518779 - DNA, 25 bp, Homo sapien
cgagggcaggctacaggtaaaccaa

SEQ ID NO: 4518780 - DNA, 25 bp, Homo sapien
aactgtccagaaatacatggtggga

SEQ ID NO: 4518781 - DNA, 25 bp, Homo sapien
ccaaaacaatgacttgaacatgtgt

SEQ ID NO: 4518782 - DNA, 25 bp, Homo sapien
gaacatgtgtattctattgctcacc

SEQ ID NO: 4518783 - DNA, 25 bp, Homo sapien
tcttgtgtaagatttactgcggaaa

SEQ ID NO: 4518784 - DNA, 25 bp, Homo sapien
agtctgaatgactaaaccaaaacaa

SEQ ID NO: 4518785 - DNA, 25 bp, Homo sapien
caccagaaacttgcaaacaaatgaa

SEQ ID NO: 4518786 - DNA, 25 bp, Homo sapien
ttaatggctggcataaatggcccag

SEQ ID NO: 4518787 - DNA, 25 bp, Homo sapien
gttgcaccagaaacttgcaaacaaa

SEQ ID NO: 4518788 - DNA, 25 bp, Homo sapien
taagttgcaccagaaacttgcaaac

SEQ ID NO: 4518789 - DNA, 25 bp, Homo sapien
gaatctgcctctcctctttgcccct

SEQ ID NO: 4518790 - DNA, 25 bp, Homo sapien
tctagcctgaatctgcctctcctct

SEQ ID NO: 4518791 - DNA, 25 bp, Homo sapien
tgaatctgcctctcctctttgcccc

SEQ ID NO: 4518792 - DNA, 25 bp, Homo sapien
tctgcctctcctctttgcccctctt

SEQ ID NO: 4518793 - DNA, 25 bp, Homo sapien
gttttatgtccctaataccagatag

SEQ ID NO: 4518794 - DNA, 25 bp, Homo sapien
tagcgaagtgcaagttaaatcacag

SEQ ID NO: 4518795 - DNA, 25 bp, Homo sapien
tgttccctagaaccactggtaagca

SEQ ID NO: 4518796 - DNA, 25 bp, Homo sapien
cagacagtgttattggacatacgca

SEQ ID NO: 4518797 - DNA, 25 bp, Homo sapien
cctttaccatttataggctccttat

SEQ ID NO: 4518798 - DNA, 25 bp, Homo sapien
tgcttttccaacttcgtctctggaa

SEQ ID NO: 4518799 - DNA, 25 bp, Homo sapien
cacccattcgtaactctgccatttt

SEQ ID NO: 4518800 - DNA, 25 bp, Homo sapien
cctcctgcagaacggcctaggtgca

SEQ ID NO: 4518801 - DNA, 25 bp, Homo sapien
caggaggcagccttggaaaaaccgc

SEQ ID NO: 4518802 - DNA, 25 bp, Homo sapien
tctgaagcagcggaagcctgtcagc

SEQ ID NO: 4518803 - DNA, 25 bp, Homo sapien
acctcggacagagactggcggtgcc

SEQ ID NO: 4518804 - DNA, 25 bp, Homo sapien
cagaagacctaagtgacactgtgtc

SEQ ID NO: 4518805 - DNA, 25 bp, Homo sapien
atataggagccacccccacatctcg

SEQ ID NO: 4518806 - DNA, 25 bp, Homo sapien
tataggagccacccccacatctcgc

SEQ ID NO: 4518807 - DNA, 25 bp, Homo sapien
tctcccggttccccagcgcctgttg

SEQ ID NO: 4518808 - DNA, 25 bp, Homo sapien
taggagccacccccacatctcgcct

SEQ ID NO: 4518809 - DNA, 25 bp, Homo sapien
gcctgtgatcccagacagcgggccg

SEQ ID NO: 4518810 - DNA, 25 bp, Homo sapien
ctgtgatcccagacagcgggccggg

SEQ ID NO: 4518811 - DNA, 25 bp, Homo sapien
gtgatcccagacagcgggccggggg

SEQ ID NO: 4518812 - DNA, 25 bp, Homo sapien
cctgtgatcccagacagcgggccgg

SEQ ID NO: 4518813 - DNA, 25 bp, Homo sapien
gtcgatgctggcgatgtcgatgttc

SEQ ID NO: 4518814 - DNA, 25 bp, Homo sapien
ggcgatgtcgatgttcatccccacg

SEQ ID NO: 4518815 - DNA, 25 bp, Homo sapien
gatgtcgatgttcatccccacgcag

SEQ ID NO: 4518816 - DNA, 25 bp, Homo sapien
tgtcgatgctggcgatgtcgatgtt

SEQ ID NO: 4518817 - DNA, 25 bp, Homo sapien
aagcacaggacacggcgatcagccc

SEQ ID NO: 4518818 - DNA, 25 bp, Homo sapien
acaggacacggcgatcagcccagct

SEQ ID NO: 4518819 - DNA, 25 bp, Homo sapien
cgggaagcacaggacacggcgatca

SEQ ID NO: 4518820 - DNA, 25 bp, Homo sapien
ctgcgggaagcacaggacacggcga

SEQ ID NO: 4518821 - DNA, 25 bp, Homo sapien
caaaggacatgttcccgggatcgtt

SEQ ID NO: 4518822 - DNA, 25 bp, Homo sapien
cccgaagtcgggtcttaggcgaatg

SEQ ID NO: 4518823 - DNA, 25 bp, Homo sapien
gaatgtcgtagcctttcaacagctt

SEQ ID NO: 4518824 - DNA, 25 bp, Homo sapien
acaaaggacatgttcccgggatcgt

SEQ ID NO: 4518825 - DNA, 25 bp, Homo sapien
cgagaagatgccgaaaagccttcct

SEQ ID NO: 4518826 - DNA, 25 bp, Homo sapien
acagccaccagcaccggggccgaga

SEQ ID NO: 4518827 - DNA, 25 bp, Homo sapien
gccttcctcccgcaaggccccacat

SEQ ID NO: 4518828 - DNA, 25 bp, Homo sapien
ccggggccgagaagatgccgaaaag

SEQ ID NO: 4518829 - DNA, 25 bp, Homo sapien
ccgcgctggcccggagcggaggagg

SEQ ID NO: 4518830 - DNA, 25 bp, Homo sapien
ccgccgcgctggcccggagcggagg

SEQ ID NO: 4518831 - DNA, 25 bp, Homo sapien
gccgcgctggcccggagcggaggag

SEQ ID NO: 4518832 - DNA, 25 bp, Homo sapien
cgccgccgtcgcgacccgcagccgg

SEQ ID NO: 4518833 - DNA, 25 bp, Homo sapien
ggctcagagcctcgggtccccaggg

SEQ ID NO: 4518834 - DNA, 25 bp, Homo sapien
gctcagagcctcgggtccccagggt

SEQ ID NO: 4518835 - DNA, 25 bp, Homo sapien
ctcagagcctcgggtccccagggtc

SEQ ID NO: 4518836 - DNA, 25 bp, Homo sapien
tgggatccgctctcccccctactct

SEQ ID NO: 4518837 - DNA, 25 bp, Homo sapien
gggatccgctctcccccctactctc

SEQ ID NO: 4518838 - DNA, 25 bp, Homo sapien
tgtaccagtgcacaccggatgcacc

SEQ ID NO: 4518839 - DNA, 25 bp, Homo sapien
cgcactggtgcaaggaccctggtgt

SEQ ID NO: 4518840 - DNA, 25 bp, Homo sapien
ctactggcgcactggtgcaaggacc

SEQ ID NO: 4518841 - DNA, 25 bp, Homo sapien
ggtgcaaggaccctggtgtaccagt

SEQ ID NO: 4518842 - DNA, 25 bp, Homo sapien
gatgcatgggctataaggtccttac

SEQ ID NO: 4518843 - DNA, 25 bp, Homo sapien
acactactgcacatcacagtcgctg

SEQ ID NO: 4518844 - DNA, 25 bp, Homo sapien
aaagggtggacatgcagcctgccgc

SEQ ID NO: 4518845 - DNA, 25 bp, Homo sapien
ttgcacctacatccgcaacaaaggg

SEQ ID NO: 4518846 - DNA, 25 bp, Homo sapien
catggaaggcttagtttgaaaatca

SEQ ID NO: 4518847 - DNA, 25 bp, Homo sapien
tcacatggaaggcttagtttgaaaa

SEQ ID NO: 4518848 - DNA, 25 bp, Homo sapien
gtgtgaagacggcaccgaagcttca

SEQ ID NO: 4518849 - DNA, 25 bp, Homo sapien
gaagcttcatagcttgagaaactga

SEQ ID NO: 4518850 - DNA, 25 bp, Homo sapien
gaaaaacagcccaagcaaggtcagg

SEQ ID NO: 4518851 - DNA, 25 bp, Homo sapien
ccacaggaaggcatacacaaggtga

SEQ ID NO: 4518852 - DNA, 25 bp, Homo sapien
tgctaggagggttcccccacaggaa

SEQ ID NO: 4518853 - DNA, 25 bp, Homo sapien
gggcattcacttgataaggtgacct

SEQ ID NO: 4518854 - DNA, 25 bp, Homo sapien
agaggagaatgccagcagggaatgg

SEQ ID NO: 4518855 - DNA, 25 bp, Homo sapien
agcagggaatggaagcagtggcagc

SEQ ID NO: 4518856 - DNA, 25 bp, Homo sapien
aagcagtggcagcaatgggagacat

SEQ ID NO: 4518857 - DNA, 25 bp, Homo sapien
acaggaagaggagaatgccagcagg

SEQ ID NO: 4518858 - DNA, 25 bp, Homo sapien
agagagccgtcccaaaaagtgagca

SEQ ID NO: 4518859 - DNA, 25 bp, Homo sapien
tcctccagctgttaagacgggtcca

SEQ ID NO: 4518860 - DNA, 25 bp, Homo sapien
aaacgaagccgcaaattctcgcagg

SEQ ID NO: 4518861 - DNA, 25 bp, Homo sapien
agcagcaggttattggtctcacgaa

SEQ ID NO: 4518862 - DNA, 25 bp, Homo sapien
gatgccagtctttcgatttagagcc

SEQ ID NO: 4518863 - DNA, 25 bp, Homo sapien
gcggacatgatttagggaggacact

SEQ ID NO: 4518864 - DNA, 25 bp, Homo sapien
tgcagtgcagtgacctaatctaagc

SEQ ID NO: 4518865 - DNA, 25 bp, Homo sapien
caaagcaaggtcatgttctgaggtt

SEQ ID NO: 4518866 - DNA, 25 bp, Homo sapien
ctggtttcataaatggcataaaatg

SEQ ID NO: 4518867 - DNA, 25 bp, Homo sapien
aatgttctgtgttctttgactgcgt

SEQ ID NO: 4518868 - DNA, 25 bp, Homo sapien
tgttctgtgttctttgactgcgttc

SEQ ID NO: 4518869 - DNA, 25 bp, Homo sapien
taaatggcataaaatgttctgtgtt

SEQ ID NO: 4518870 - DNA, 25 bp, Homo sapien
ggaagctgagtttcacattgatgtg

SEQ ID NO: 4518871 - DNA, 25 bp, Homo sapien
cattgatgtgattgaggttcctctg

SEQ ID NO: 4518872 - DNA, 25 bp, Homo sapien
cattcatcaacccagggctgcttgt

SEQ ID NO: 4518873 - DNA, 25 bp, Homo sapien
ctttccaaggaagctgagtttcaca

SEQ ID NO: 4518874 - DNA, 25 bp, Homo sapien
cagttcaccgtgaggacggcatcat

SEQ ID NO: 4518875 - DNA, 25 bp, Homo sapien
aatgggaggtctcctcgtgcctccc

SEQ ID NO: 4518876 - DNA, 25 bp, Homo sapien
caatgaatgggaggtctcctcgtgc

SEQ ID NO: 4518877 - DNA, 25 bp, Homo sapien
aggcaaatccagagaaggcactggg

SEQ ID NO: 4518878 - DNA, 25 bp, Homo sapien
catcgacacatactccacaggtgca

SEQ ID NO: 4518879 - DNA, 25 bp, Homo sapien
tctggaagacactgcgtccccagct

SEQ ID NO: 4518880 - DNA, 25 bp, Homo sapien
tcagactctgctcacggtgccgtct

SEQ ID NO: 4518881 - DNA, 25 bp, Homo sapien
gctgccctgagcatcgacacatact

SEQ ID NO: 4518882 - DNA, 25 bp, Homo sapien
taggttgacataaagaattccaagt

SEQ ID NO: 4518883 - DNA, 25 bp, Homo sapien
aggttgacataaagaattccaagtt

SEQ ID NO: 4518884 - DNA, 25 bp, Homo sapien
ctaggttgacataaagaattccaag

SEQ ID NO: 4518885 - DNA, 25 bp, Homo sapien
tgaagctcttgcctcctttgagctt

SEQ ID NO: 4518886 - DNA, 25 bp, Homo sapien
cttgaagctcttgcctcctttgagc

SEQ ID NO: 4518887 - DNA, 25 bp, Homo sapien
ttgaagctcttgcctcctttgagct

SEQ ID NO: 4518888 - DNA, 25 bp, Homo sapien
tagatgtgggacatgctcagtttga

SEQ ID NO: 4518889 - DNA, 25 bp, Homo sapien
cagtttgaaagagcttaatctccat

SEQ ID NO: 4518890 - DNA, 25 bp, Homo sapien
aactcctggttgttgtagatgtggg

SEQ ID NO: 4518891 - DNA, 25 bp, Homo sapien
cccaaactcctggttgttgtagatg

SEQ ID NO: 4518892 - DNA, 25 bp, Homo sapien
tagcaaactgaggtactggcactcc

SEQ ID NO: 4518893 - DNA, 25 bp, Homo sapien
ctgtcattccatcgtactgcagact

SEQ ID NO: 4518894 - DNA, 25 bp, Homo sapien
cactctgatgcctgtttgtggtact

SEQ ID NO: 4518895 - DNA, 25 bp, Homo sapien
gtttctttggtggtgtagcaaactg

SEQ ID NO: 4518896 - DNA, 25 bp, Homo sapien
tctgctggtcagtgcagttctgcat

SEQ ID NO: 4518897 - DNA, 25 bp, Homo sapien
agctctgctggtcagtgcagttctg

SEQ ID NO: 4518898 - DNA, 25 bp, Homo sapien
gctggtcagtgcagttctgcattcc

SEQ ID NO: 4518899 - DNA, 25 bp, Homo sapien
gctctgctggtcagtgcagttctgc

SEQ ID NO: 4518900 - DNA, 25 bp, Homo sapien
ggctctaggtgcatccacagacaga

SEQ ID NO: 4518901 - DNA, 25 bp, Homo sapien
cctagtttttggtacgtggctctag

SEQ ID NO: 4518902 - DNA, 25 bp, Homo sapien
tttggtacgtggctctaggtgcatc

SEQ ID NO: 4518903 - DNA, 25 bp, Homo sapien
tacgtggctctaggtgcatccacag

SEQ ID NO: 4518904 - DNA, 25 bp, Homo sapien
atagttcaaatagccctccaccaag

SEQ ID NO: 4518905 - DNA, 25 bp, Homo sapien
atgatagttcaaatagccctccacc

SEQ ID NO: 4518906 - DNA, 25 bp, Homo sapien
gtctcctcagctcatcatgatagtt

SEQ ID NO: 4518907 - DNA, 25 bp, Homo sapien
tctcctcagctcatcatgatagttc

SEQ ID NO: 4518908 - DNA, 25 bp, Homo sapien
catctgaaacttgacggataggcaa

SEQ ID NO: 4518909 - DNA, 25 bp, Homo sapien
ggaatagacgggaattttcatgtgg

SEQ ID NO: 4518910 - DNA, 25 bp, Homo sapien
tcatgtggaaatcacgggctgcaga

SEQ ID NO: 4518911 - DNA, 25 bp, Homo sapien
aaggaggccgagtgagtgacaggct

SEQ ID NO: 4518912 - DNA, 25 bp, Homo sapien
aatggagcaacgcagcttaggagac

SEQ ID NO: 4518913 - DNA, 25 bp, Homo sapien
gttcataggccgtccatctggaaga

SEQ ID NO: 4518914 - DNA, 25 bp, Homo sapien
cttaggagacgcctctgagagttca

SEQ ID NO: 4518915 - DNA, 25 bp, Homo sapien
tggaagatgaaaggaccaccacgca

SEQ ID NO: 4518916 - DNA, 25 bp, Homo sapien
gacaggtttgctgcaagcccccgca

SEQ ID NO: 4518917 - DNA, 25 bp, Homo sapien
ggtttgctgcaagcccccgcacagg

SEQ ID NO: 4518918 - DNA, 25 bp, Homo sapien
cttgacaggtttgctgcaagccccc

SEQ ID NO: 4518919 - DNA, 25 bp, Homo sapien
aggtttgctgcaagcccccgcacag

SEQ ID NO: 4518920 - DNA, 25 bp, Homo sapien
cttcagcccacaccttggcagttgg

SEQ ID NO: 4518921 - DNA, 25 bp, Homo sapien
ttccccaagtctccattggcctggg

SEQ ID NO: 4518922 - DNA, 25 bp, Homo sapien
ctcgcagcacgggatggcagagaag

SEQ ID NO: 4518923 - DNA, 25 bp, Homo sapien
gcagttggtggtgcctcgcagcacg

SEQ ID NO: 4518924 - DNA, 25 bp, Homo sapien
gggtccagaggacgcatttccactt

SEQ ID NO: 4518925 - DNA, 25 bp, Homo sapien
cacttgctgtgttcggggtggccca

SEQ ID NO: 4518926 - DNA, 25 bp, Homo sapien
tgtcaggatgaggtgagtgtcccag

SEQ ID NO: 4518927 - DNA, 25 bp, Homo sapien
ggcttccgtccacagaaaccaatct

SEQ ID NO: 4518928 - DNA, 25 bp, Homo sapien
cttttgtttcttgatgctctcattt

SEQ ID NO: 4518929 - DNA, 25 bp, Homo sapien
gtttcttgatgctctcatttctccc

SEQ ID NO: 4518930 - DNA, 25 bp, Homo sapien
ccatcctctctcataatacagcagt

SEQ ID NO: 4518931 - DNA, 25 bp, Homo sapien
cccatcctctctcataatacagcag

SEQ ID NO: 4518932 - DNA, 25 bp, Homo sapien
cctgctgctcgctgacttggacaca

SEQ ID NO: 4518933 - DNA, 25 bp, Homo sapien
tgctgctcgctgacttggacacatc

SEQ ID NO: 4518934 - DNA, 25 bp, Homo sapien
gcttcagaggatgcccgttgcctcc

SEQ ID NO: 4518935 - DNA, 25 bp, Homo sapien
ctgccagcttcagaggatgcccgtt

SEQ ID NO: 4518936 - DNA, 25 bp, Homo sapien
caggtgccagacagttggagatgct

SEQ ID NO: 4518937 - DNA, 25 bp, Homo sapien
gctttctgcatcactcttagcaggg

SEQ ID NO: 4518938 - DNA, 25 bp, Homo sapien
tgtgcagacaggtgccagacagttg

SEQ ID NO: 4518939 - DNA, 25 bp, Homo sapien
cgtcgggtctgacagcctgagtcag

SEQ ID NO: 4518940 - DNA, 25 bp, Homo sapien
ccattgtggctgacaacttcaataa

SEQ ID NO: 4518941 - DNA, 25 bp, Homo sapien
cccattgtggctgacaacttcaata

SEQ ID NO: 4518942 - DNA, 25 bp, Homo sapien
gcccattgtggctgacaacttcaat

SEQ ID NO: 4518943 - DNA, 25 bp, Homo sapien
ctatgctggtaagaagtgaaaggcc

SEQ ID NO: 4518944 - DNA, 25 bp, Homo sapien
gaaaggccaattggttgagagttta

SEQ ID NO: 4518945 - DNA, 25 bp, Homo sapien
tattgtgtacttttacgaccatggc

SEQ ID NO: 4518946 - DNA, 25 bp, Homo sapien
caataaggtaaacctatagacaggt

SEQ ID NO: 4518947 - DNA, 25 bp, Homo sapien
ctggaaaggatctgaggctgttaca

SEQ ID NO: 4518948 - DNA, 25 bp, Homo sapien
gatgtttcccgatggtgaggacaca

SEQ ID NO: 4518949 - DNA, 25 bp, Homo sapien
ctgctgtgagtagccagtgggtctc

SEQ ID NO: 4518950 - DNA, 25 bp, Homo sapien
tattattgcaagaattgaaggcaga

SEQ ID NO: 4518951 - DNA, 25 bp, Homo sapien
gtttggaccagaacatttacaagga

SEQ ID NO: 4518952 - DNA, 25 bp, Homo sapien
gggtcaccttgccaccactgaacaa

SEQ ID NO: 4518953 - DNA, 25 bp, Homo sapien
tacaagagaagagaccttagctgcc

SEQ ID NO: 4518954 - DNA, 25 bp, Homo sapien
tacaaggaaatgtggagtcaactcc

SEQ ID NO: 4518955 - DNA, 25 bp, Homo sapien
ttctgcatattcttgaagttgtgtg

SEQ ID NO: 4518956 - DNA, 25 bp, Homo sapien
tgttgtagttattccatccatttct

SEQ ID NO: 4518957 - DNA, 25 bp, Homo sapien
ctgttgtagttattccatccatttc

SEQ ID NO: 4518958 - DNA, 25 bp, Homo sapien
catattcttgaagttgtgtggccat

SEQ ID NO: 4518959 - DNA, 25 bp, Homo sapien
cagcgttgctgttgaatggtctaga

SEQ ID NO: 4518960 - DNA, 25 bp, Homo sapien
ggtctagaagactggctggtccaaa

SEQ ID NO: 4518961 - DNA, 25 bp, Homo sapien
gatagggctgtttcagcgttgctgt

SEQ ID NO: 4518962 - DNA, 25 bp, Homo sapien
ttatgtcttttggagggatagggct

SEQ ID NO: 4518963 - DNA, 25 bp, Homo sapien
caaacctgagtgctcccattaggga

SEQ ID NO: 4518964 - DNA, 25 bp, Homo sapien
tctccagcttgacggatgtctgcct

SEQ ID NO: 4518965 - DNA, 25 bp, Homo sapien
tggtaaatgcagcaacgacacagca

SEQ ID NO: 4518966 - DNA, 25 bp, Homo sapien
ggtgcacctgtcctgatagagctct

SEQ ID NO: 4518967 - DNA, 25 bp, Homo sapien
tgtgggaaggccagcgcaggtgcag

SEQ ID NO: 4518968 - DNA, 25 bp, Homo sapien
tgcagcaaaagcacctggcggctct

SEQ ID NO: 4518969 - DNA, 25 bp, Homo sapien
ccagcgcaggtgcagcaaaagcacc

SEQ ID NO: 4518970 - DNA, 25 bp, Homo sapien
caggtgcagcaaaagcacctggcgg

SEQ ID NO: 4518971 - DNA, 25 bp, Homo sapien
tgccagctctccttgtgagtcttct

SEQ ID NO: 4518972 - DNA, 25 bp, Homo sapien
aatcatgctttcgtaatgacagctt

SEQ ID NO: 4518973 - DNA, 25 bp, Homo sapien
tgctttcgtaatgacagcttccttc

SEQ ID NO: 4518974 - DNA, 25 bp, Homo sapien
tgctcctgaaggtcctgaaggctgc

SEQ ID NO: 4518975 - DNA, 25 bp, Homo sapien
tccccagaccccgtgtgagccttct

SEQ ID NO: 4518976 - DNA, 25 bp, Homo sapien
gaacatcttccccagaccccgtgtg

SEQ ID NO: 4518977 - DNA, 25 bp, Homo sapien
atcttccccagaccccgtgtgagcc

SEQ ID NO: 4518978 - DNA, 25 bp, Homo sapien
cagaccccgtgtgagccttcttccc

SEQ ID NO: 4518979 - DNA, 25 bp, Homo sapien
agctgcttcctgggctcttcagagc

SEQ ID NO: 4518980 - DNA, 25 bp, Homo sapien
tgcttcctgggctcttcagagcccc

SEQ ID NO: 4518981 - DNA, 25 bp, Homo sapien
caggggggtgccactctctctgaag

SEQ ID NO: 4518982 - DNA, 25 bp, Homo sapien
ggtctccaggggggtgccactctct

SEQ ID NO: 4518983 - DNA, 25 bp, Homo sapien
taaagcatgcaaaaaacattcaggt

SEQ ID NO: 4518984 - DNA, 25 bp, Homo sapien
ttcaggtcgtccttgtgggccactg

SEQ ID NO: 4518985 - DNA, 25 bp, Homo sapien
ccagacttccgtttccagaaagtgt

SEQ ID NO: 4518986 - DNA, 25 bp, Homo sapien
ctttccatagctggatgcaggacaa

SEQ ID NO: 4518987 - DNA, 25 bp, Homo sapien
cagctcgtctgcaggcaactgggag

SEQ ID NO: 4518988 - DNA, 25 bp, Homo sapien
gcgacattcccttggattggagagg

SEQ ID NO: 4518989 - DNA, 25 bp, Homo sapien
caactgggaggagcgaggtggacct

SEQ ID NO: 4518990 - DNA, 25 bp, Homo sapien
cggaatccacagagcgcgacattcc

SEQ ID NO: 4518991 - DNA, 25 bp, Homo sapien
ggccctctacgggaagcaccctctg

SEQ ID NO: 4518992 - DNA, 25 bp, Homo sapien
tgatgtcccattcaccccgggcttc

SEQ ID NO: 4518993 - DNA, 25 bp, Homo sapien
ctggccctctacgggaagcaccctc

SEQ ID NO: 4518994 - DNA, 25 bp, Homo sapien
atgtcccattcaccccgggcttctg

SEQ ID NO: 4518995 - DNA, 25 bp, Homo sapien
caaacatgctgccatgcttggtgga

SEQ ID NO: 4518996 - DNA, 25 bp, Homo sapien
ctccagatgactctaatttgtggta

SEQ ID NO: 4518997 - DNA, 25 bp, Homo sapien
cttggtggaattctccagatgactc

SEQ ID NO: 4518998 - DNA, 25 bp, Homo sapien
ggtacttctcaaaagtgaccatggt

SEQ ID NO: 4518999 - DNA, 25 bp, Homo sapien
caagcgtatgccaaacttagttgac

SEQ ID NO: 4519000 - DNA, 25 bp, Homo sapien
tcaagcgtatgccaaacttagttga

SEQ ID NO: 4519001 - DNA, 25 bp, Homo sapien
ctttgcccttggagagtgctcacat

SEQ ID NO: 4519002 - DNA, 25 bp, Homo sapien
ttcgtacctaacagcttcagagatg

SEQ ID NO: 4519003 - DNA, 25 bp, Homo sapien
cacggttgctgtaaggtagatgttc

SEQ ID NO: 4519004 - DNA, 25 bp, Homo sapien
gaagctgaactgagatgttcacggt

SEQ ID NO: 4519005 - DNA, 25 bp, Homo sapien
cccaaatgtcctgttcatggaggtc

SEQ ID NO: 4519006 - DNA, 25 bp, Homo sapien
tctgatgtttgatagcagctcccca

SEQ ID NO: 4519007 - DNA, 25 bp, Homo sapien
tccacttctagtacgcaggctctgg

SEQ ID NO: 4519008 - DNA, 25 bp, Homo sapien
taaacagtgaaccagactatgagct

SEQ ID NO: 4519009 - DNA, 25 bp, Homo sapien
gggtggatgtgtcaagtctgtcatt

SEQ ID NO: 4519010 - DNA, 25 bp, Homo sapien
atttggtgccgagcccctcaattaa

SEQ ID NO: 4519011 - DNA, 25 bp, Homo sapien
cagtggacggacagcatccatggtg

SEQ ID NO: 4519012 - DNA, 25 bp, Homo sapien
gaaggacattgtgcaacagtggacg

SEQ ID NO: 4519013 - DNA, 25 bp, Homo sapien
tacttagagatacgtggaacctcca

SEQ ID NO: 4519014 - DNA, 25 bp, Homo sapien
tctgagtcagcctccaatcaacagc

SEQ ID NO: 4519015 - DNA, 25 bp, Homo sapien
gaaagctagtaagttggcctgccat

SEQ ID NO: 4519016 - DNA, 25 bp, Homo sapien
tttcccctgtcaaaacctatgatgg

SEQ ID NO: 4519017 - DNA, 25 bp, Homo sapien
gaacgtgcaggtcttcttggcatct

SEQ ID NO: 4519018 - DNA, 25 bp, Homo sapien
tggcagggaacgtgcaggtcttctt

SEQ ID NO: 4519019 - DNA, 25 bp, Homo sapien
taccatgtgcgagtgggcttgcttg

SEQ ID NO: 4519020 - DNA, 25 bp, Homo sapien
tgtcttaaccattccatgaagtaaa

SEQ ID NO: 4519021 - DNA, 25 bp, Homo sapien
aggggtgccagtgtcgctcagctgc

SEQ ID NO: 4519022 - DNA, 25 bp, Homo sapien
tgaggggtgccagtgtcgctcagct

SEQ ID NO: 4519023 - DNA, 25 bp, Homo sapien
gaggggtgccagtgtcgctcagctg

SEQ ID NO: 4519024 - DNA, 25 bp, Homo sapien
tgacagtgagatggtacctgtctgg

SEQ ID NO: 4519025 - DNA, 25 bp, Homo sapien
ggcacctgtcatacctgtcgcaaag

SEQ ID NO: 4519026 - DNA, 25 bp, Homo sapien
gcagaggatgctattgacagtgaga

SEQ ID NO: 4519027 - DNA, 25 bp, Homo sapien
tcatacctgtcgcaaaggaggaggt

SEQ ID NO: 4519028 - DNA, 25 bp, Homo sapien
gtgggatgctccttaacaactgtga

SEQ ID NO: 4519029 - DNA, 25 bp, Homo sapien
aactgtgatgtgcatttcaatctct

SEQ ID NO: 4519030 - DNA, 25 bp, Homo sapien
ctgcaaggatgctgaaaagattagc

SEQ ID NO: 4519031 - DNA, 25 bp, Homo sapien
agtttttgcagttcactagttgtgg

SEQ ID NO: 4519032 - DNA, 25 bp, Homo sapien
gattgtcagtggacaagcttcagac

SEQ ID NO: 4519033 - DNA, 25 bp, Homo sapien
gacaactgatggattgtcagtggac

SEQ ID NO: 4519034 - DNA, 25 bp, Homo sapien
ttatgatgcgacagcaatatctctg

SEQ ID NO: 4519035 - DNA, 25 bp, Homo sapien
caagcttcagaccttatgatgcgac

SEQ ID NO: 4519036 - DNA, 25 bp, Homo sapien
actgaacctctcgagcaaaggtggt

SEQ ID NO: 4519037 - DNA, 25 bp, Homo sapien
tgaacctctcgagcaaaggtggtag

SEQ ID NO: 4519038 - DNA, 25 bp, Homo sapien
cactgaacctctcgagcaaaggtgg

SEQ ID NO: 4519039 - DNA, 25 bp, Homo sapien
cccactgaacctctcgagcaaaggt

SEQ ID NO: 4519040 - DNA, 25 bp, Homo sapien
acagttctgcctcatgatactcagg

SEQ ID NO: 4519041 - DNA, 25 bp, Homo sapien
ggctagtttgtcattgagatggcaa

SEQ ID NO: 4519042 - DNA, 25 bp, Homo sapien
gatggcaaagctgagccaggaaccc

SEQ ID NO: 4519043 - DNA, 25 bp, Homo sapien
catgatactcaggatggacttgatg

SEQ ID NO: 4519044 - DNA, 25 bp, Homo sapien
ctgacaatcataaggtacatgataa

SEQ ID NO: 4519045 - DNA, 25 bp, Homo sapien
gtaaccttcccagcactggacgagc

SEQ ID NO: 4519046 - DNA, 25 bp, Homo sapien
agagctggagatggctgtaaccttc

SEQ ID NO: 4519047 - DNA, 25 bp, Homo sapien
ctgtaaccttcccagcactggacga

SEQ ID NO: 4519048 - DNA, 25 bp, Homo sapien
ctagagctggagatggctgtaacct

SEQ ID NO: 4519049 - DNA, 25 bp, Homo sapien
aactcctgcacttcattggccttga

SEQ ID NO: 4519050 - DNA, 25 bp, Homo sapien
ggtcagtgaagtctgtagccctttc

SEQ ID NO: 4519051 - DNA, 25 bp, Homo sapien
catggagcgtttgaaagggcctgtc

SEQ ID NO: 4519052 - DNA, 25 bp, Homo sapien
catgtaaatcttcagggtgacctca

SEQ ID NO: 4519053 - DNA, 25 bp, Homo sapien
tatgtggaacatgagtgaggccatc

SEQ ID NO: 4519054 - DNA, 25 bp, Homo sapien
cagaaacagggagcaaagagtggac

SEQ ID NO: 4519055 - DNA, 25 bp, Homo sapien
ggcttcctaggcacaaaagggctga

SEQ ID NO: 4519056 - DNA, 25 bp, Homo sapien
gaggccatcctggtttgttctgaga

SEQ ID NO: 4519057 - DNA, 25 bp, Homo sapien
aaactccactgctccacatattcag

SEQ ID NO: 4519058 - DNA, 25 bp, Homo sapien
ttgtttcaaccatgtaatgtttcac

SEQ ID NO: 4519059 - DNA, 25 bp, Homo sapien
actttgtttcaaccatgtaatgttt

SEQ ID NO: 4519060 - DNA, 25 bp, Homo sapien
actgctccacatattcagctccaca

SEQ ID NO: 4519061 - DNA, 25 bp, Homo sapien
ctgcacaggcaggaacgtggagcag

SEQ ID NO: 4519062 - DNA, 25 bp, Homo sapien
tgcacaggcaggaacgtggagcagg

SEQ ID NO: 4519063 - DNA, 25 bp, Homo sapien
gcacaggcaggaacgtggagcaggt

SEQ ID NO: 4519064 - DNA, 25 bp, Homo sapien
gagatgccgacaaggcccctgtaat

SEQ ID NO: 4519065 - DNA, 25 bp, Homo sapien
gagatggccatgagatgccgacaag

SEQ ID NO: 4519066 - DNA, 25 bp, Homo sapien
ccatgagatgccgacaaggcccctg

SEQ ID NO: 4519067 - DNA, 25 bp, Homo sapien
taaggagatggccatgagatgccga

SEQ ID NO: 4519068 - DNA, 25 bp, Homo sapien
tcggttcccatctgtctgactcagt

SEQ ID NO: 4519069 - DNA, 25 bp, Homo sapien
tgctgcttgtgtttccgttgctcag

SEQ ID NO: 4519070 - DNA, 25 bp, Homo sapien
cgtctccactcggttcccatctgtc

SEQ ID NO: 4519071 - DNA, 25 bp, Homo sapien
ttgtgtttccgttgctcagcgtctc

SEQ ID NO: 4519072 - DNA, 25 bp, Homo sapien
tgggcaggacgaggacagtggtcat

SEQ ID NO: 4519073 - DNA, 25 bp, Homo sapien
tgtggactgagctccgaggaagtac

SEQ ID NO: 4519074 - DNA, 25 bp, Homo sapien
ccccggtgctttccgtgtgtgccag

SEQ ID NO: 4519075 - DNA, 25 bp, Homo sapien
gtggactgagctcccagtggcctcc

SEQ ID NO: 4519076 - DNA, 25 bp, Homo sapien
ttgggggtgccgcatgttttcatcc

SEQ ID NO: 4519077 - DNA, 25 bp, Homo sapien
cctgcatggcggtgagggccttgct

SEQ ID NO: 4519078 - DNA, 25 bp, Homo sapien
ctgtagatcaagatttatgatgttt

SEQ ID NO: 4519079 - DNA, 25 bp, Homo sapien
tccaggtcaaagcaaatcgcggcca

SEQ ID NO: 4519080 - DNA, 25 bp, Homo sapien
tgctgacatggacaatgtgctctca

SEQ ID NO: 4519081 - DNA, 25 bp, Homo sapien
catgagctttgtactcccggtgagc

SEQ ID NO: 4519082 - DNA, 25 bp, Homo sapien
aactcaagggacaggctcgggtgct

SEQ ID NO: 4519083 - DNA, 25 bp, Homo sapien
caaacgggcactatgcggggcagtt

SEQ ID NO: 4519084 - DNA, 25 bp, Homo sapien
tcagaggagccaccggtgcttcccc

SEQ ID NO: 4519085 - DNA, 25 bp, Homo sapien
tggttcctggagtgacgggcacata

SEQ ID NO: 4519086 - DNA, 25 bp, Homo sapien
tttcagccagtgcattcaccaggtc

SEQ ID NO: 4519087 - DNA, 25 bp, Homo sapien
cacagccagaagccggtaggctgct

SEQ ID NO: 4519088 - DNA, 25 bp, Homo sapien
gcacagccagaagccggtaggctgc

SEQ ID NO: 4519089 - DNA, 25 bp, Homo sapien
cggcagtcgccaacagccgggcagc

SEQ ID NO: 4519090 - DNA, 25 bp, Homo sapien
ccagcagccggcagtcgccaacagc

SEQ ID NO: 4519091 - DNA, 25 bp, Homo sapien
ggaccttgacctgccccgagaggaa

SEQ ID NO: 4519092 - DNA, 25 bp, Homo sapien
caggaccttgacctgccccgagagg

SEQ ID NO: 4519093 - DNA, 25 bp, Homo sapien
ttagtcgttcatactggacctggtg

SEQ ID NO: 4519094 - DNA, 25 bp, Homo sapien
tttggaagctgaagcgtttagtcgt

SEQ ID NO: 4519095 - DNA, 25 bp, Homo sapien
gatgggatcatcttgagattctgtg

SEQ ID NO: 4519096 - DNA, 25 bp, Homo sapien
tctgtgtctcgcagacagcagcggt

SEQ ID NO: 4519097 - DNA, 25 bp, Homo sapien
ccttctcaccgatgtgtccctctgt

SEQ ID NO: 4519098 - DNA, 25 bp, Homo sapien
tccttctcaccgatgtgtccctctg

SEQ ID NO: 4519099 - DNA, 25 bp, Homo sapien
ctccttctcaccgatgtgtccctct

SEQ ID NO: 4519100 - DNA, 25 bp, Homo sapien
tgccaagcaggcaacaagttgcact

SEQ ID NO: 4519101 - DNA, 25 bp, Homo sapien
agcaggcaacaagttgcactcctcc

SEQ ID NO: 4519102 - DNA, 25 bp, Homo sapien
tgatgccaagcaggcaacaagttgc

SEQ ID NO: 4519103 - DNA, 25 bp, Homo sapien
aacaagttgcactcctccccacagg

SEQ ID NO: 4519104 - DNA, 25 bp, Homo sapien
tcctcgagaatgtcctgtgaaatca

SEQ ID NO: 4519105 - DNA, 25 bp, Homo sapien
ggtagaacccttgccacgtgccaat

SEQ ID NO: 4519106 - DNA, 25 bp, Homo sapien
ccaagggtggtacagtcagtgccgt

SEQ ID NO: 4519107 - DNA, 25 bp, Homo sapien
tcagtgccgtgggatgattctctaa

SEQ ID NO: 4519108 - DNA, 25 bp, Homo sapien
tgccttcagggtgggcaggttctgg

SEQ ID NO: 4519109 - DNA, 25 bp, Homo sapien
gatacatctgctgagggcagagcca

SEQ ID NO: 4519110 - DNA, 25 bp, Homo sapien
gagcaggggatgatacatctgctga

SEQ ID NO: 4519111 - DNA, 25 bp, Homo sapien
aggctggtagccaggtctgctgcct

SEQ ID NO: 4519112 - DNA, 25 bp, Homo sapien
ccaaattggctttgaagatgccaaa

SEQ ID NO: 4519113 - DNA, 25 bp, Homo sapien
cttccaaattggctttgaagatgcc

SEQ ID NO: 4519114 - DNA, 25 bp, Homo sapien
tccaaattggctttgaagatgccaa

SEQ ID NO: 4519115 - DNA, 25 bp, Homo sapien
ttcttccaaattggctttgaagatg

SEQ ID NO: 4519116 - DNA, 25 bp, Homo sapien
cctgagaaatggctcctctgtaact

SEQ ID NO: 4519117 - DNA, 25 bp, Homo sapien
tgacccatgcagcatgcgggaccat

SEQ ID NO: 4519118 - DNA, 25 bp, Homo sapien
ctgtaactcctggttctgagtgacc

SEQ ID NO: 4519119 - DNA, 25 bp, Homo sapien
gagaaatggctcctctgtaactcct

SEQ ID NO: 4519120 - DNA, 25 bp, Homo sapien
aggcagtctcctattcaagtgctga

SEQ ID NO: 4519121 - DNA, 25 bp, Homo sapien
tattcaagtgctgaccagaccaggc

SEQ ID NO: 4519122 - DNA, 25 bp, Homo sapien
tcctattcaagtgctgaccagacca

SEQ ID NO: 4519123 - DNA, 25 bp, Homo sapien
cagtctcctattcaagtgctgacca

SEQ ID NO: 4519124 - DNA, 25 bp, Homo sapien
catggtggggttaatctggatccca

SEQ ID NO: 4519125 - DNA, 25 bp, Homo sapien
cgccttcgattcaacagcacaatga

SEQ ID NO: 4519126 - DNA, 25 bp, Homo sapien
tcttactctgaacagcaacatggtg

SEQ ID NO: 4519127 - DNA, 25 bp, Homo sapien
tcagacctggacagatagtcgcctt

SEQ ID NO: 4519128 - DNA, 25 bp, Homo sapien
ctatgtattttcgatgacctctagg

SEQ ID NO: 4519129 - DNA, 25 bp, Homo sapien
gttttctgctagcaggtcatgtttt

SEQ ID NO: 4519130 - DNA, 25 bp, Homo sapien
tttcgatgacctctaggtgactgat

SEQ ID NO: 4519131 - DNA, 25 bp, Homo sapien
ctgctagcaggtcatgttttccatc

SEQ ID NO: 4519132 - DNA, 25 bp, Homo sapien
ggaccgcggcaggagatgcctctat

SEQ ID NO: 4519133 - DNA, 25 bp, Homo sapien
cagtaatggtacacctgcagttcca

SEQ ID NO: 4519134 - DNA, 25 bp, Homo sapien
gccacattggtacgataggtcttca

SEQ ID NO: 4519135 - DNA, 25 bp, Homo sapien
gacccagagtctgcaggcatgagta

SEQ ID NO: 4519136 - DNA, 25 bp, Homo sapien
taaatctggaaacggttataagtga

SEQ ID NO: 4519137 - DNA, 25 bp, Homo sapien
ataaatctggaaacggttataagtg

SEQ ID NO: 4519138 - DNA, 25 bp, Homo sapien
aatctggaaacggttataagtgagt

SEQ ID NO: 4519139 - DNA, 25 bp, Homo sapien
atctggaaacggttataagtgagtc

SEQ ID NO: 4519140 - DNA, 25 bp, Homo sapien
gctgagtatccaccaatactgggtg

SEQ ID NO: 4519141 - DNA, 25 bp, Homo sapien
tcctaagatatccatgggagtgggc

SEQ ID NO: 4519142 - DNA, 25 bp, Homo sapien
catgggagtgggctgcttatctacc

SEQ ID NO: 4519143 - DNA, 25 bp, Homo sapien
taagatatccatgggagtgggctga

SEQ ID NO: 4519144 - DNA, 25 bp, Homo sapien
atactgagtgttctaagatatccat

SEQ ID NO: 4519145 - DNA, 25 bp, Homo sapien
caatactgagtgttctaagatatcc

SEQ ID NO: 4519146 - DNA, 25 bp, Homo sapien
atccaccaatactgagtgttctaag

SEQ ID NO: 4519147 - DNA, 25 bp, Homo sapien
caccaatactgagtgttctaagata

SEQ ID NO: 4519148 - DNA, 25 bp, Homo sapien
tgcgagtggactgcgtatccaccaa

SEQ ID NO: 4519149 - DNA, 25 bp, Homo sapien
catccatgcgagtggactgcgtatc

SEQ ID NO: 4519150 - DNA, 25 bp, Homo sapien
tctgaggcatccatgcgagtggact

SEQ ID NO: 4519151 - DNA, 25 bp, Homo sapien
actgagtattctgaggcatccatgc

SEQ ID NO: 4519152 - DNA, 25 bp, Homo sapien
ctcctacaaggaacttcaaagttat

SEQ ID NO: 4519153 - DNA, 25 bp, Homo sapien
tttttcgactttttctacaatctga

SEQ ID NO: 4519154 - DNA, 25 bp, Homo sapien
ttcgactttttctacaatctgaccc

SEQ ID NO: 4519155 - DNA, 25 bp, Homo sapien
cttcctcctacaaggaacttcaaag

SEQ ID NO: 4519156 - DNA, 25 bp, Homo sapien
accccagggaaaggagtcgagcatg

SEQ ID NO: 4519157 - DNA, 25 bp, Homo sapien
aaaggagtcgagcatggctgagact

SEQ ID NO: 4519158 - DNA, 25 bp, Homo sapien
cagggaaaggagtcgagcatggctg

SEQ ID NO: 4519159 - DNA, 25 bp, Homo sapien
cagcaccccagggaaaggagtcgag

SEQ ID NO: 4519160 - DNA, 25 bp, Homo sapien
tctgcctcttgcaaagaaacttcag

SEQ ID NO: 4519161 - DNA, 25 bp, Homo sapien
cacatacgtacgttgacaaagtaga

SEQ ID NO: 4519162 - DNA, 25 bp, Homo sapien
ctgtccacatttggaaaagcgctca

SEQ ID NO: 4519163 - DNA, 25 bp, Homo sapien
gcaagtaagtcatccctgtccacat

SEQ ID NO: 4519164 - DNA, 25 bp, Homo sapien
gtggggagttgtagcattcattaga

SEQ ID NO: 4519165 - DNA, 25 bp, Homo sapien
ccaacacggtgggtgtgagtggagg

SEQ ID NO: 4519166 - DNA, 25 bp, Homo sapien
agttgtagcattcattagagaccac

SEQ ID NO: 4519167 - DNA, 25 bp, Homo sapien
gggagttgtagcattcattagagac

SEQ ID NO: 4519168 - DNA, 25 bp, Homo sapien
ggccttgacgctgtttatcttcatt

SEQ ID NO: 4519169 - DNA, 25 bp, Homo sapien
cataaattgtattggccttgacgct

SEQ ID NO: 4519170 - DNA, 25 bp, Homo sapien
cacataatatgacatcgctccatcc

SEQ ID NO: 4519171 - DNA, 25 bp, Homo sapien
tcaaagctgctaactgacacataat

SEQ ID NO: 4519172 - DNA, 25 bp, Homo sapien
tgccctctgtctcaacaaggtttcg

SEQ ID NO: 4519173 - DNA, 25 bp, Homo sapien
gattcttccaacacccataagtctt

SEQ ID NO: 4519174 - DNA, 25 bp, Homo sapien
tgaacctcaaaagccgattgtttcc

SEQ ID NO: 4519175 - DNA, 25 bp, Homo sapien
ccccgtcagcatgtgtttgtgaacc

SEQ ID NO: 4519176 - DNA, 25 bp, Homo sapien
ttggcaggctcggtcccatacagta

SEQ ID NO: 4519177 - DNA, 25 bp, Homo sapien
ggtcccatacagtagagtcttgtgt

SEQ ID NO: 4519178 - DNA, 25 bp, Homo sapien
tgagcacacatcaccgcatgcatgg

SEQ ID NO: 4519179 - DNA, 25 bp, Homo sapien
gagtccctgagcatcaaggtgagca

SEQ ID NO: 4519180 - DNA, 25 bp, Homo sapien
agatgtgcggcaggcgcctttccca

SEQ ID NO: 4519181 - DNA, 25 bp, Homo sapien
cagggtcccgcagttcaagatgtgc

SEQ ID NO: 4519182 - DNA, 25 bp, Homo sapien
agttcaagatgtgcggcaggcgcct

SEQ ID NO: 4519183 - DNA, 25 bp, Homo sapien
accactcagggtcccgcagttcaag

SEQ ID NO: 4519184 - DNA, 25 bp, Homo sapien
cacggccatgctctcagggctgact

SEQ ID NO: 4519185 - DNA, 25 bp, Homo sapien
gagcaggcctgaacaggtccagcca

SEQ ID NO: 4519186 - DNA, 25 bp, Homo sapien
aacaggtccagccatcacggccatg

SEQ ID NO: 4519187 - DNA, 25 bp, Homo sapien
ggacttctctatcccaagagccagg

SEQ ID NO: 4519188 - DNA, 25 bp, Homo sapien
gaaacaacgtgttgtctctcagttc

SEQ ID NO: 4519189 - DNA, 25 bp, Homo sapien
taaaatcaagatggcaggcttggca

SEQ ID NO: 4519190 - DNA, 25 bp, Homo sapien
gcatcttccgagtgccgtgaaggaa

SEQ ID NO: 4519191 - DNA, 25 bp, Homo sapien
tctcgtcggcttgcaggtagtattc

SEQ ID NO: 4519192 - DNA, 25 bp, Homo sapien
acaggatacaaataaccaggctgat

SEQ ID NO: 4519193 - DNA, 25 bp, Homo sapien
ggtgagttctcgttcctgttcctgc

SEQ ID NO: 4519194 - DNA, 25 bp, Homo sapien
ttggggtgcgccacctgcatccgca

SEQ ID NO: 4519195 - DNA, 25 bp, Homo sapien
ggtctggaagggtctcagggcagga

SEQ ID NO: 4519196 - DNA, 25 bp, Homo sapien
tactctaagttgaggagatgacagt

SEQ ID NO: 4519197 - DNA, 25 bp, Homo sapien
ttgacatggaatccaaatttctgac

SEQ ID NO: 4519198 - DNA, 25 bp, Homo sapien
ggaatccaaatttctgaccactgtg

SEQ ID NO: 4519199 - DNA, 25 bp, Homo sapien
gaaatactctaagttgaggagatga

SEQ ID NO: 4519200 - DNA, 25 bp, Homo sapien
tagcttgctgcagtaagtttgcagg

SEQ ID NO: 4519201 - DNA, 25 bp, Homo sapien
ggcatgttgcttcgttgttctgcaa

SEQ ID NO: 4519202 - DNA, 25 bp, Homo sapien
taaccacactcgaagcaacaggaga

SEQ ID NO: 4519203 - DNA, 25 bp, Homo sapien
gttctgcaatataaccacactcgaa

SEQ ID NO: 4519204 - DNA, 25 bp, Homo sapien
cctttggagagcccttgagcatcac

SEQ ID NO: 4519205 - DNA, 25 bp, Homo sapien
tcctttggagagcccttgagcatca

SEQ ID NO: 4519206 - DNA, 25 bp, Homo sapien
ctttggagagcccttgagcatcact

SEQ ID NO: 4519207 - DNA, 25 bp, Homo sapien
cccgacgtgccttggcgacacgggc

SEQ ID NO: 4519208 - DNA, 25 bp, Homo sapien
ggcgcccgacgtgccttggcgacac

SEQ ID NO: 4519209 - DNA, 25 bp, Homo sapien
ctagtgaaatgagggcgcactggcg

SEQ ID NO: 4519210 - DNA, 25 bp, Homo sapien
cgcttcgtgcgtcccgtccccgccg

SEQ ID NO: 4519211 - DNA, 25 bp, Homo sapien
caagtcctaagaactatcctgaaaa

SEQ ID NO: 4519212 - DNA, 25 bp, Homo sapien
ccctggttcctgtatatatcttaag

SEQ ID NO: 4519213 - DNA, 25 bp, Homo sapien
taaaataatgatttcgtagcacgat

SEQ ID NO: 4519214 - DNA, 25 bp, Homo sapien
tcgtagcacgatgacacatttcaaa

SEQ ID NO: 4519215 - DNA, 25 bp, Homo sapien
gagtgtgggcctaatctgattttca

SEQ ID NO: 4519216 - DNA, 25 bp, Homo sapien
ttgatgattgattgggtaaaagtcc

SEQ ID NO: 4519217 - DNA, 25 bp, Homo sapien
aaagtccagggttactaagagatct

SEQ ID NO: 4519218 - DNA, 25 bp, Homo sapien
ggttactaagagatctgagcacctg

SEQ ID NO: 4519219 - DNA, 25 bp, Homo sapien
gatgagtccatcaagatcaaagcct

SEQ ID NO: 4519220 - DNA, 25 bp, Homo sapien
gtagaagcttgagtggatgagtcca

SEQ ID NO: 4519221 - DNA, 25 bp, Homo sapien
gcctctgatctggacgtcctgcttc

SEQ ID NO: 4519222 - DNA, 25 bp, Homo sapien
caataccttgagtgagtagaagctt

SEQ ID NO: 4519223 - DNA, 25 bp, Homo sapien
gaagcaagactcaaaggtggagagc

SEQ ID NO: 4519224 - DNA, 25 bp, Homo sapien
cttttggaagcaagactcaaaggtg

SEQ ID NO: 4519225 - DNA, 25 bp, Homo sapien
agcaagactcaaaggtggagagcac

SEQ ID NO: 4519226 - DNA, 25 bp, Homo sapien
gactcaaaggtggagagcactgttt

SEQ ID NO: 4519227 - DNA, 25 bp, Homo sapien
gccattggcggcctcttctgactga

SEQ ID NO: 4519228 - DNA, 25 bp, Homo sapien
agagcagccattggcggcctcttct

SEQ ID NO: 4519229 - DNA, 25 bp, Homo sapien
cattggcggcctcttctgactgatt

SEQ ID NO: 4519230 - DNA, 25 bp, Homo sapien
cagccattggcggcctcttctgact

SEQ ID NO: 4519231 - DNA, 25 bp, Homo sapien
tgaccaaaaggatgggtccctgcag

SEQ ID NO: 4519232 - DNA, 25 bp, Homo sapien
ttgaccaaaaggatgggtccctgca

SEQ ID NO: 4519233 - DNA, 25 bp, Homo sapien
gaccaaaaggatgggtccctgcagg

SEQ ID NO: 4519234 - DNA, 25 bp, Homo sapien
tttgaccaaaaggatgggtccctgc

SEQ ID NO: 4519235 - DNA, 25 bp, Homo sapien
atgagcaacataggactcatcaaat

SEQ ID NO: 4519236 - DNA, 25 bp, Homo sapien
gggagatgagcaacataggactcat

SEQ ID NO: 4519237 - DNA, 25 bp, Homo sapien
atggggagatgagcaacataggact

SEQ ID NO: 4519238 - DNA, 25 bp, Homo sapien
gagatgagcaacataggactcatca

SEQ ID NO: 4519239 - DNA, 25 bp, Homo sapien
cacagtcctgagagagttcggtggg

SEQ ID NO: 4519240 - DNA, 25 bp, Homo sapien
agcagtggccccagcacagtcctga

SEQ ID NO: 4519241 - DNA, 25 bp, Homo sapien
ggccccagcacagtcctgagagagt

SEQ ID NO: 4519242 - DNA, 25 bp, Homo sapien
cagcacagtcctgagagagttcggt

SEQ ID NO: 4519243 - DNA, 25 bp, Homo sapien
tactgaagtttccagtcccaccatc

SEQ ID NO: 4519244 - DNA, 25 bp, Homo sapien
tgaagtttccagtcccaccatcttt

SEQ ID NO: 4519245 - DNA, 25 bp, Homo sapien
tgggttactgaagtttccagtccca

SEQ ID NO: 4519246 - DNA, 25 bp, Homo sapien
gttactgaagtttccagtcccacca

SEQ ID NO: 4519247 - DNA, 25 bp, Homo sapien
tcctctcaagcttgggggtaacctc

SEQ ID NO: 4519248 - DNA, 25 bp, Homo sapien
cttcttgtccttatgtaactgtggc

SEQ ID NO: 4519249 - DNA, 25 bp, Homo sapien
ccgacgtcgattctacacttcttgt

SEQ ID NO: 4519250 - DNA, 25 bp, Homo sapien
gcagccagtgcacagtggtccgcac

SEQ ID NO: 4519251 - DNA, 25 bp, Homo sapien
ggttccaaggtgactcatgcacagt

SEQ ID NO: 4519252 - DNA, 25 bp, Homo sapien
cacaataccaaccacctcctcgttg

SEQ ID NO: 4519253 - DNA, 25 bp, Homo sapien
ctcgttggagaagcagcgagtgtct

SEQ ID NO: 4519254 - DNA, 25 bp, Homo sapien
tcctcgttggagaagcagcgagtgt

SEQ ID NO: 4519255 - DNA, 25 bp, Homo sapien
tacccgtcggacacaataccaacca

SEQ ID NO: 4519256 - DNA, 25 bp, Homo sapien
ctgaggcatcgccaggtggcacaca

SEQ ID NO: 4519257 - DNA, 25 bp, Homo sapien
tgaggcatcgccaggtggcacacag

SEQ ID NO: 4519258 - DNA, 25 bp, Homo sapien
gaggtgagtggtgccggttaagagt

SEQ ID NO: 4519259 - DNA, 25 bp, Homo sapien
ccaagtgcctgaggacttctaaagt

SEQ ID NO: 4519260 - DNA, 25 bp, Homo sapien
taagagttgccagaatgtggagaga

SEQ ID NO: 4519261 - DNA, 25 bp, Homo sapien
tgggctggcgagtgaagggagtttg

SEQ ID NO: 4519262 - DNA, 25 bp, Homo sapien
aatatccctgggcttgaggtccgca

SEQ ID NO: 4519263 - DNA, 25 bp, Homo sapien
tcagtccccggatctcacggttagc

SEQ ID NO: 4519264 - DNA, 25 bp, Homo sapien
tctatgacacaggtggtggtcatca

SEQ ID NO: 4519265 - DNA, 25 bp, Homo sapien
tgaggtccgcatccagtgagacctt

SEQ ID NO: 4519266 - DNA, 25 bp, Homo sapien
ctgaacaacaaccagggggccatac

SEQ ID NO: 4519267 - DNA, 25 bp, Homo sapien
tgaacaacaaccagggggccatact

SEQ ID NO: 4519268 - DNA, 25 bp, Homo sapien
gaacaacaaccagggggccatacta

SEQ ID NO: 4519269 - DNA, 25 bp, Homo sapien
ggagcagccgcgtggccgtttccac

SEQ ID NO: 4519270 - DNA, 25 bp, Homo sapien
aggcaggtccgcctctctctgcaaa

SEQ ID NO: 4519271 - DNA, 25 bp, Homo sapien
ttggaggaacgctccaggcaggtcc

SEQ ID NO: 4519272 - DNA, 25 bp, Homo sapien
gcacaggcggctctctgtcactcac

SEQ ID NO: 4519273 - DNA, 25 bp, Homo sapien
tctatccccaccagtacttcaaata

SEQ ID NO: 4519274 - DNA, 25 bp, Homo sapien
tccccaccagtacttcaaataccat

SEQ ID NO: 4519275 - DNA, 25 bp, Homo sapien
ctatccccaccagtacttcaaatac

SEQ ID NO: 4519276 - DNA, 25 bp, Homo sapien
tatccccaccagtacttcaaatacc

SEQ ID NO: 4519277 - DNA, 25 bp, Homo sapien
ttaaagtaggtaatactgatacaca

SEQ ID NO: 4519278 - DNA, 25 bp, Homo sapien
tggtgaggggaaaatgtagctcaga

SEQ ID NO: 4519279 - DNA, 25 bp, Homo sapien
tgtggtgaggggaaaatgtagctca

SEQ ID NO: 4519280 - DNA, 25 bp, Homo sapien
tgaggggaaaatgtagctcagagcc

SEQ ID NO: 4519281 - DNA, 25 bp, Homo sapien
ggggaaaatgtagctcagagccagc

SEQ ID NO: 4519282 - DNA, 25 bp, Homo sapien
ctcagtgtataagatgctttcatcg

SEQ ID NO: 4519283 - DNA, 25 bp, Homo sapien
taagatgctttcatcgaatataatg

SEQ ID NO: 4519284 - DNA, 25 bp, Homo sapien
cagtgtataagatgctttcatcgaa

SEQ ID NO: 4519285 - DNA, 25 bp, Homo sapien
gctttcatcgaatataatgcagttt

SEQ ID NO: 4519286 - DNA, 25 bp, Homo sapien
actcagagtcactcaagccccgggt

SEQ ID NO: 4519287 - DNA, 25 bp, Homo sapien
ctcaagccccgggtcagtgtctgca

SEQ ID NO: 4519288 - DNA, 25 bp, Homo sapien
tcatttgtgactgctgtgcgactat

SEQ ID NO: 4519289 - DNA, 25 bp, Homo sapien
tgtgactgctgtgcgactatagtca

SEQ ID NO: 4519290 - DNA, 25 bp, Homo sapien
gttagattccattaatgccccactc

SEQ ID NO: 4519291 - DNA, 25 bp, Homo sapien
tccctcccacagacagactcaggat

SEQ ID NO: 4519292 - DNA, 25 bp, Homo sapien
taggaggaactggtacaattttcag

SEQ ID NO: 4519293 - DNA, 25 bp, Homo sapien
gctgctgactaatgttagattccat

SEQ ID NO: 4519294 - DNA, 25 bp, Homo sapien
tgttacaaatatcatcatacatgac

SEQ ID NO: 4519295 - DNA, 25 bp, Homo sapien
tacaaatatcatcatacatgactgg

SEQ ID NO: 4519296 - DNA, 25 bp, Homo sapien
tggttgatagcagtaggatgtttca

SEQ ID NO: 4519297 - DNA, 25 bp, Homo sapien
gttgatagcagtaggatgtttcatc

SEQ ID NO: 4519298 - DNA, 25 bp, Homo sapien
tgtatttgttgaaggtgcttccagc

SEQ ID NO: 4519299 - DNA, 25 bp, Homo sapien
taagtgaagtagtagagcaacatcc

SEQ ID NO: 4519300 - DNA, 25 bp, Homo sapien
ttgtagtgctcccttgccaagttcc

SEQ ID NO: 4519301 - DNA, 25 bp, Homo sapien
gctgaccgcaaacccttgtagtgct

SEQ ID NO: 4519302 - DNA, 25 bp, Homo sapien
tagcttcctcgtcaggtaggtcctg

SEQ ID NO: 4519303 - DNA, 25 bp, Homo sapien
gcttcctcgtcaggtaggtcctgtc

SEQ ID NO: 4519304 - DNA, 25 bp, Homo sapien
tcctcgtcaggtaggtcctgtccac

SEQ ID NO: 4519305 - DNA, 25 bp, Homo sapien
ttcctcgtcaggtaggtcctgtcca

SEQ ID NO: 4519306 - DNA, 25 bp, Homo sapien
gagaactagtaagatcttacaacta

SEQ ID NO: 4519307 - DNA, 25 bp, Homo sapien
aacccatgcgtgtgtaggtctggaa

SEQ ID NO: 4519308 - DNA, 25 bp, Homo sapien
tacaactagttacaaggaaggagaa

SEQ ID NO: 4519309 - DNA, 25 bp, Homo sapien
aaggagaatcagacaacccatgcgt

SEQ ID NO: 4519310 - DNA, 25 bp, Homo sapien
tgacgctggtcagatgcaagtggaa

SEQ ID NO: 4519311 - DNA, 25 bp, Homo sapien
gttgacgctggtcagatgcaagtgg

SEQ ID NO: 4519312 - DNA, 25 bp, Homo sapien
gacgctggtcagatgcaagtggaat

SEQ ID NO: 4519313 - DNA, 25 bp, Homo sapien
ttgacgctggtcagatgcaagtgga

SEQ ID NO: 4519314 - DNA, 25 bp, Homo sapien
tcacggtaccttcaggtaatggccc

SEQ ID NO: 4519315 - DNA, 25 bp, Homo sapien
caaggacaagctcgcccttcacggt

SEQ ID NO: 4519316 - DNA, 25 bp, Homo sapien
gcccattagtggcattcagtcttgg

SEQ ID NO: 4519317 - DNA, 25 bp, Homo sapien
tatttcccaaggacaagctcgccct

SEQ ID NO: 4519318 - DNA, 25 bp, Homo sapien
cttgggcaataccctggcctggacc

SEQ ID NO: 4519319 - DNA, 25 bp, Homo sapien
tggcctggaccagctgcaagacagc

SEQ ID NO: 4519320 - DNA, 25 bp, Homo sapien
cctggaccagctgcaagacagcagc

SEQ ID NO: 4519321 - DNA, 25 bp, Homo sapien
tgggcaataccctggcctggaccag

SEQ ID NO: 4519322 - DNA, 25 bp, Homo sapien
tcagaaacagttgaaacggcactag

SEQ ID NO: 4519323 - DNA, 25 bp, Homo sapien
aaacagttgaaacggcactagatgc

SEQ ID NO: 4519324 - DNA, 25 bp, Homo sapien
aacggcactagatgcacctgccaca

SEQ ID NO: 4519325 - DNA, 25 bp, Homo sapien
gttgaaacggcactagatgcacctg

SEQ ID NO: 4519326 - DNA, 25 bp, Homo sapien
acaggtccacaagatgcttaatggg

SEQ ID NO: 4519327 - DNA, 25 bp, Homo sapien
ctgcacaggtccacaagatgcttaa

SEQ ID NO: 4519328 - DNA, 25 bp, Homo sapien
gccaaggccagtcagtgtcacggag

SEQ ID NO: 4519329 - DNA, 25 bp, Homo sapien
tcagtgtcacggagggtatagagct

SEQ ID NO: 4519330 - DNA, 25 bp, Homo sapien
ccaacaaagctagggtcagtggcct

SEQ ID NO: 4519331 - DNA, 25 bp, Homo sapien
gagctgccagtttaggtatcttgtc

SEQ ID NO: 4519332 - DNA, 25 bp, Homo sapien
aagctcccgctgactaacctgggca

SEQ ID NO: 4519333 - DNA, 25 bp, Homo sapien
gccagtttaggtatcttgtcttccc

SEQ ID NO: 4519334 - DNA, 25 bp, Homo sapien
gtccgcaggcacaccagtacttgat

SEQ ID NO: 4519335 - DNA, 25 bp, Homo sapien
tgtccgcaggcacaccagtacttga

SEQ ID NO: 4519336 - DNA, 25 bp, Homo sapien
gatgtccgcaggcacaccagtactt

SEQ ID NO: 4519337 - DNA, 25 bp, Homo sapien
atgtccgcaggcacaccagtacttg

SEQ ID NO: 4519338 - DNA, 25 bp, Homo sapien
ggtcagggcaaaagcatgggtcatt

SEQ ID NO: 4519339 - DNA, 25 bp, Homo sapien
gcaaaagcatgggtcattgccaagg

SEQ ID NO: 4519340 - DNA, 25 bp, Homo sapien
ccagggtcagggcaaaagcatgggt

SEQ ID NO: 4519341 - DNA, 25 bp, Homo sapien
tgggtcattgccaaggagagctcca

SEQ ID NO: 4519342 - DNA, 25 bp, Homo sapien
cctgggtccactcgtgcatctggtc

SEQ ID NO: 4519343 - DNA, 25 bp, Homo sapien
tgggtccactcgtgcatctggtcat

SEQ ID NO: 4519344 - DNA, 25 bp, Homo sapien
gtccactcgtgcatctggtcatctc

SEQ ID NO: 4519345 - DNA, 25 bp, Homo sapien
gggtccactcgtgcatctggtcatc

SEQ ID NO: 4519346 - DNA, 25 bp, Homo sapien
tgcccacgtgtcaggcccagaaaca

SEQ ID NO: 4519347 - DNA, 25 bp, Homo sapien
tctgcccacgtgtcaggcccagaaa

SEQ ID NO: 4519348 - DNA, 25 bp, Homo sapien
gtccatatcacagatggtctgccca

SEQ ID NO: 4519349 - DNA, 25 bp, Homo sapien
ctctgtccatatcacagatggtctg

SEQ ID NO: 4519350 - DNA, 25 bp, Homo sapien
cagaggaggtcatggtgttccaaca

SEQ ID NO: 4519351 - DNA, 25 bp, Homo sapien
cctttagtcttcgagcaatagatgg

SEQ ID NO: 4519352 - DNA, 25 bp, Homo sapien
catctccagggtaagcaccttttct

SEQ ID NO: 4519353 - DNA, 25 bp, Homo sapien
gcctcaggagaattgacagttaaac

SEQ ID NO: 4519354 - DNA, 25 bp, Homo sapien
agtgcaggacacaaccatcattggg

SEQ ID NO: 4519355 - DNA, 25 bp, Homo sapien
caccacatgagccacaaggagataa

SEQ ID NO: 4519356 - DNA, 25 bp, Homo sapien
atcccaacagtgcaggacacaacca

SEQ ID NO: 4519357 - DNA, 25 bp, Homo sapien
gacacaaccatcattgggaagccca

SEQ ID NO: 4519358 - DNA, 25 bp, Homo sapien
gatacacaggacacggatgctgcgg

SEQ ID NO: 4519359 - DNA, 25 bp, Homo sapien
taagttaaaaacctgcctgtgctga

SEQ ID NO: 4519360 - DNA, 25 bp, Homo sapien
taaccctgtctatgggaccctgtgg

SEQ ID NO: 4519361 - DNA, 25 bp, Homo sapien
gaaggcacttgcgtgtcaaagcaca

SEQ ID NO: 4519362 - DNA, 25 bp, Homo sapien
ggcccacgaggaaggcatcatagcc

SEQ ID NO: 4519363 - DNA, 25 bp, Homo sapien
tgtggttccctgagctgagcaagcc

SEQ ID NO: 4519364 - DNA, 25 bp, Homo sapien
ttattcccaagcacagcgtcaaggc

SEQ ID NO: 4519365 - DNA, 25 bp, Homo sapien
tcaaggcctgccgtgaactctgagg

SEQ ID NO: 4519366 - DNA, 25 bp, Homo sapien
tatcattccgttaactgggacacag

SEQ ID NO: 4519367 - DNA, 25 bp, Homo sapien
gaaacttggctggatctgaaactgg

SEQ ID NO: 4519368 - DNA, 25 bp, Homo sapien
cattgactattcaggagttggatac

SEQ ID NO: 4519369 - DNA, 25 bp, Homo sapien
ggtcacacaggaggttaataacaga

SEQ ID NO: 4519370 - DNA, 25 bp, Homo sapien
tgaaggccccatcgagtgcattcca

SEQ ID NO: 4519371 - DNA, 25 bp, Homo sapien
ggccagtgaaggccccatcgagtgc

SEQ ID NO: 4519372 - DNA, 25 bp, Homo sapien
cagtgaaggccccatcgagtgcatt

SEQ ID NO: 4519373 - DNA, 25 bp, Homo sapien
aaggccccatcgagtgcattccaga

SEQ ID NO: 4519374 - DNA, 25 bp, Homo sapien
ggccacccagcatcattgagcggag

SEQ ID NO: 4519375 - DNA, 25 bp, Homo sapien
gagaccagtgtaacctttgaaccca

SEQ ID NO: 4519376 - DNA, 25 bp, Homo sapien
tatggatgaaactcctctggtccct

SEQ ID NO: 4519377 - DNA, 25 bp, Homo sapien
cgttctgcactgagagcctcctgct

SEQ ID NO: 4519378 - DNA, 25 bp, Homo sapien
tgcaggcagcttcttggtgtagacc

SEQ ID NO: 4519379 - DNA, 25 bp, Homo sapien
cttcatgtggtgcaggcagcttctt

SEQ ID NO: 4519380 - DNA, 25 bp, Homo sapien
ggtgcaggcagcttcttggtgtaga

SEQ ID NO: 4519381 - DNA, 25 bp, Homo sapien
caggcagcttcttggtgtagaccat

SEQ ID NO: 4519382 - DNA, 25 bp, Homo sapien
cagatgggcttgtggccgagtgctg

SEQ ID NO: 4519383 - DNA, 25 bp, Homo sapien
cggccagggcacttggccatctggt

SEQ ID NO: 4519384 - DNA, 25 bp, Homo sapien
cgtccagcacaacttcagaggaggg

SEQ ID NO: 4519385 - DNA, 25 bp, Homo sapien
ttgtggccgagtgctggcgtccagc

SEQ ID NO: 4519386 - DNA, 25 bp, Homo sapien
tctcagctgatgctccgccacagac

SEQ ID NO: 4519387 - DNA, 25 bp, Homo sapien
tagttctccatatcattaaggatct

SEQ ID NO: 4519388 - DNA, 25 bp, Homo sapien
agctcttcaacaaccatctctctag

SEQ ID NO: 4519389 - DNA, 25 bp, Homo sapien
ctgatgctccgccacagaccagcat

SEQ ID NO: 4519390 - DNA, 25 bp, Homo sapien
aatggtcaacaggatgcccaggaga

SEQ ID NO: 4519391 - DNA, 25 bp, Homo sapien
tggtcaacaggatgcccaggagacc

SEQ ID NO: 4519392 - DNA, 25 bp, Homo sapien
ctggcaatggtcaacaggatgccca

SEQ ID NO: 4519393 - DNA, 25 bp, Homo sapien
gcaatggtcaacaggatgcccagga

SEQ ID NO: 4519394 - DNA, 25 bp, Homo sapien
tgacctgatcacaaagccaaggcca

SEQ ID NO: 4519395 - DNA, 25 bp, Homo sapien
caaagccaaggccagcaacccaggc

SEQ ID NO: 4519396 - DNA, 25 bp, Homo sapien
ttgacctgatcacaaagccaaggcc

SEQ ID NO: 4519397 - DNA, 25 bp, Homo sapien
agccaaggccagcaacccaggccat

SEQ ID NO: 4519398 - DNA, 25 bp, Homo sapien
agctgcctgcagccgttctctatca

SEQ ID NO: 4519399 - DNA, 25 bp, Homo sapien
ctgggtctgtctccggagctgcctg

SEQ ID NO: 4519400 - DNA, 25 bp, Homo sapien
tccccatagatagcacccaggctga

SEQ ID NO: 4519401 - DNA, 25 bp, Homo sapien
ttctcctctttatccccatagatag

SEQ ID NO: 4519402 - DNA, 25 bp, Homo sapien
atagatagcacccaggctgacgtcc

SEQ ID NO: 4519403 - DNA, 25 bp, Homo sapien
tctttatccccatagatagcaccca

SEQ ID NO: 4519404 - DNA, 25 bp, Homo sapien
tttgggtcatccataaatgcggagc

SEQ ID NO: 4519405 - DNA, 25 bp, Homo sapien
tatcgtgacagtacacatgtggagc

SEQ ID NO: 4519406 - DNA, 25 bp, Homo sapien
gaaatttgatccgtggaaaggcaga

SEQ ID NO: 4519407 - DNA, 25 bp, Homo sapien
gactaaagatgtcttgggactctcc

SEQ ID NO: 4519408 - DNA, 25 bp, Homo sapien
gcaatccctgcacacacgacgtttg

SEQ ID NO: 4519409 - DNA, 25 bp, Homo sapien
tccatgaaggagaacccatatccat

SEQ ID NO: 4519410 - DNA, 25 bp, Homo sapien
gacgcgccaatcagtgtcccgttac

SEQ ID NO: 4519411 - DNA, 25 bp, Homo sapien
tatccatgctgttctgcaatccctg

SEQ ID NO: 4519412 - DNA, 25 bp, Homo sapien
tgatgacgaaggcaaaggctatggc

SEQ ID NO: 4519413 - DNA, 25 bp, Homo sapien
ggctatggcataggctcctacacag

SEQ ID NO: 4519414 - DNA, 25 bp, Homo sapien
gcaaaatgagacaagcaaggctgat

SEQ ID NO: 4519415 - DNA, 25 bp, Homo sapien
cttcccagccacatctaagacagga

SEQ ID NO: 4519416 - DNA, 25 bp, Homo sapien
tctagctgacccatttgtccctcca

SEQ ID NO: 4519417 - DNA, 25 bp, Homo sapien
cactcttatgggttagagtctcccc

SEQ ID NO: 4519418 - DNA, 25 bp, Homo sapien
ttcttcccactcttatgggttagag

SEQ ID NO: 4519419 - DNA, 25 bp, Homo sapien
ttagagtctccccttctagctgacc

SEQ ID NO: 4519420 - DNA, 25 bp, Homo sapien
atgagcggcggtgcgggcaggccaa

SEQ ID NO: 4519421 - DNA, 25 bp, Homo sapien
gggcatacatgagcggcggtgcggg

SEQ ID NO: 4519422 - DNA, 25 bp, Homo sapien
aggccagggcatacatgagcggcgg

SEQ ID NO: 4519423 - DNA, 25 bp, Homo sapien
ctcccaggcaagcaccgaaggccag

SEQ ID NO: 4519424 - DNA, 25 bp, Homo sapien
aggaagaggacattgatgccacgtc

SEQ ID NO: 4519425 - DNA, 25 bp, Homo sapien
cattgatgccacgtcccatggacgc

SEQ ID NO: 4519426 - DNA, 25 bp, Homo sapien
tcccatggacgctcagagaagctgc

SEQ ID NO: 4519427 - DNA, 25 bp, Homo sapien
cacgtcccatggacgctcagagaag

SEQ ID NO: 4519428 - DNA, 25 bp, Homo sapien
cctgccacttctgtgcagttgccca

SEQ ID NO: 4519429 - DNA, 25 bp, Homo sapien
ctgccacttctgtgcagttgcccat

SEQ ID NO: 4519430 - DNA, 25 bp, Homo sapien
ccacctgccacttctgtgcagttgc

SEQ ID NO: 4519431 - DNA, 25 bp, Homo sapien
ctgagcaccacctgccacttctgtg

SEQ ID NO: 4519432 - DNA, 25 bp, Homo sapien
tccatgttttcgctactgtgagtag

SEQ ID NO: 4519433 - DNA, 25 bp, Homo sapien
gctgcaaggaacatgatctcattgt

SEQ ID NO: 4519434 - DNA, 25 bp, Homo sapien
taggataataaccaccaggtccatc

SEQ ID NO: 4519435 - DNA, 25 bp, Homo sapien
tcttgtgtgatgctgggatttggac

SEQ ID NO: 4519436 - DNA, 25 bp, Homo sapien
tcaagtcctcatggacagaaagcgc

SEQ ID NO: 4519437 - DNA, 25 bp, Homo sapien
catggttgcttttacgtcctcacag

SEQ ID NO: 4519438 - DNA, 25 bp, Homo sapien
aagcatggtcgtcagccttgagtcc

SEQ ID NO: 4519439 - DNA, 25 bp, Homo sapien
tcctcacagaaagcgtggtcatcag

SEQ ID NO: 4519440 - DNA, 25 bp, Homo sapien
tcctgcgctcggtccgcaactgtgg

SEQ ID NO: 4519441 - DNA, 25 bp, Homo sapien
ctgatggaggctgtgtcggggtcct

SEQ ID NO: 4519442 - DNA, 25 bp, Homo sapien
ctgtggcctcattggctgggacagc

SEQ ID NO: 4519443 - DNA, 25 bp, Homo sapien
ttggctgggacagcgcggagtctcc

SEQ ID NO: 4519444 - DNA, 25 bp, Homo sapien
ggagaacaggatgaatgcacaggat

SEQ ID NO: 4519445 - DNA, 25 bp, Homo sapien
ttgggacccccttgcatgggatgtt

SEQ ID NO: 4519446 - DNA, 25 bp, Homo sapien
ggtgccattgttcagaatactatac

SEQ ID NO: 4519447 - DNA, 25 bp, Homo sapien
cagggcggtgggatgtcttgggacc

SEQ ID NO: 4519448 - DNA, 25 bp, Homo sapien
cagaatactatacagggcggtggga

SEQ ID NO: 4519449 - DNA, 25 bp, Homo sapien
tcactttcgtcctctacacctgtga

SEQ ID NO: 4519450 - DNA, 25 bp, Homo sapien
tgggctctgctcactttcgtcctct

SEQ ID NO: 4519451 - DNA, 25 bp, Homo sapien
ctttcgtcctctacacctgtgagtg

SEQ ID NO: 4519452 - DNA, 25 bp, Homo sapien
gtcctctacacctgtgagtgcagca

SEQ ID NO: 4519453 - DNA, 25 bp, Homo sapien
acaccaccaggacaatggcggctat

SEQ ID NO: 4519454 - DNA, 25 bp, Homo sapien
gaacgggatgttgtcaatcagggac

SEQ ID NO: 4519455 - DNA, 25 bp, Homo sapien
caatcagggacgacgccagggctga

SEQ ID NO: 4519456 - DNA, 25 bp, Homo sapien
caatggcggctatgaggcgctgctc

SEQ ID NO: 4519457 - DNA, 25 bp, Homo sapien
ctattaagtggagatgtgccaatgc

SEQ ID NO: 4519458 - DNA, 25 bp, Homo sapien
ctttattagcaaagcagtttgttct

SEQ ID NO: 4519459 - DNA, 25 bp, Homo sapien
caacatattctattaagtggagatg

SEQ ID NO: 4519460 - DNA, 25 bp, Homo sapien
tattctattaagtggagatgtgcca

SEQ ID NO: 4519461 - DNA, 25 bp, Homo sapien
gcatcacacaactctggataaggag

SEQ ID NO: 4519462 - DNA, 25 bp, Homo sapien
cgagcatcacacaactctggataag

SEQ ID NO: 4519463 - DNA, 25 bp, Homo sapien
tcacacaactctggataaggaggaa

SEQ ID NO: 4519464 - DNA, 25 bp, Homo sapien
cctgccttcagccggcatttgagaa

SEQ ID NO: 4519465 - DNA, 25 bp, Homo sapien
ttccttttattggatgccctgcagc

SEQ ID NO: 4519466 - DNA, 25 bp, Homo sapien
catcaggtgtaccatggcagaggta

SEQ ID NO: 4519467 - DNA, 25 bp, Homo sapien
caagcaggctgatatatctcagaag

SEQ ID NO: 4519468 - DNA, 25 bp, Homo sapien
tctcagaagtcaggtagacagtccc

SEQ ID NO: 4519469 - DNA, 25 bp, Homo sapien
ttaaaatcatcttcatcaaaatctg

SEQ ID NO: 4519470 - DNA, 25 bp, Homo sapien
tgtcctgtctcattttaaaatcatc

SEQ ID NO: 4519471 - DNA, 25 bp, Homo sapien
aaaatcatcttcatcaaaatctgac

SEQ ID NO: 4519472 - DNA, 25 bp, Homo sapien
gatgtcctgtctcattttaaaatca

SEQ ID NO: 4519473 - DNA, 25 bp, Homo sapien
cagaaggggatatgatagtacgcac

SEQ ID NO: 4519474 - DNA, 25 bp, Homo sapien
gatagtacgcacagcatatgcatgt

SEQ ID NO: 4519475 - DNA, 25 bp, Homo sapien
caggttgcttatgcccgtacagaag

SEQ ID NO: 4519476 - DNA, 25 bp, Homo sapien
tgcatgtgaactacgaaaatatggt

SEQ ID NO: 4519477 - DNA, 25 bp, Homo sapien
tacgctgcggtgtattgtactggcc

SEQ ID NO: 4519478 - DNA, 25 bp, Homo sapien
aattacgctgcggtgtattgtactg

SEQ ID NO: 4519479 - DNA, 25 bp, Homo sapien
cgctgcggtgtattgtactggcctg

SEQ ID NO: 4519480 - DNA, 25 bp, Homo sapien
ttacgctgcggtgtattgtactggc

SEQ ID NO: 4519481 - DNA, 25 bp, Homo sapien
ttgatggtcagccaagtgcctttac

SEQ ID NO: 4519482 - DNA, 25 bp, Homo sapien
tggaaagcattgatggtcagccaag

SEQ ID NO: 4519483 - DNA, 25 bp, Homo sapien
gactggcaaggaatacaatgtggaa

SEQ ID NO: 4519484 - DNA, 25 bp, Homo sapien
tgactggcaaggaatacaatgtgga

SEQ ID NO: 4519485 - DNA, 25 bp, Homo sapien
cctgaagagagctgtagatagaggc

SEQ ID NO: 4519486 - DNA, 25 bp, Homo sapien
ggtgccctgaagagagctgtagata

SEQ ID NO: 4519487 - DNA, 25 bp, Homo sapien
agagctgtagatagaggcttgtcta

SEQ ID NO: 4519488 - DNA, 25 bp, Homo sapien
tgaagtttttggtgccctgaagaga

SEQ ID NO: 4519489 - DNA, 25 bp, Homo sapien
agaatgttgcagattacatgtgcta

SEQ ID NO: 4519490 - DNA, 25 bp, Homo sapien
catcatgggccagaatgttgcagat

SEQ ID NO: 4519491 - DNA, 25 bp, Homo sapien
tgcagaagtacaccggaagcacatc

SEQ ID NO: 4519492 - DNA, 25 bp, Homo sapien
aagtacaccggaagcacatcatggg

SEQ ID NO: 4519493 - DNA, 25 bp, Homo sapien
aaacagttcgttcaatacaggaaga

SEQ ID NO: 4519494 - DNA, 25 bp, Homo sapien
cagaaacagttcgttcaatacagga

SEQ ID NO: 4519495 - DNA, 25 bp, Homo sapien
gaaacagttcgttcaatacaggaag

SEQ ID NO: 4519496 - DNA, 25 bp, Homo sapien
agaaacagttcgttcaatacaggaa

SEQ ID NO: 4519497 - DNA, 25 bp, Homo sapien
ggagtatccagggcagccatgtgag

SEQ ID NO: 4519498 - DNA, 25 bp, Homo sapien
ctggagtatccagggcagccatgtg

SEQ ID NO: 4519499 - DNA, 25 bp, Homo sapien
tggagtatccagggcagccatgtga

SEQ ID NO: 4519500 - DNA, 25 bp, Homo sapien
gagtatccagggcagccatgtgagg

SEQ ID NO: 4519501 - DNA, 25 bp, Homo sapien
aaaagacatcgccaagcctatggta

SEQ ID NO: 4519502 - DNA, 25 bp, Homo sapien
tctctgagcacgcactgaatcccag

SEQ ID NO: 4519503 - DNA, 25 bp, Homo sapien
tgcactcctaaaacgtctctgagca

SEQ ID NO: 4519504 - DNA, 25 bp, Homo sapien
gcctatggtaaatcttgcactccta

SEQ ID NO: 4519505 - DNA, 25 bp, Homo sapien
taacctgtagcatagaaactcttcc

SEQ ID NO: 4519506 - DNA, 25 bp, Homo sapien
tgtgaatccaagtcatagctcccgt

SEQ ID NO: 4519507 - DNA, 25 bp, Homo sapien
cagtgtgctggctatttgtcaagaa

SEQ ID NO: 4519508 - DNA, 25 bp, Homo sapien
tgatgcctgcagataagtttaaact

SEQ ID NO: 4519509 - DNA, 25 bp, Homo sapien
tggagacacgagctgacacatggag

SEQ ID NO: 4519510 - DNA, 25 bp, Homo sapien
gagacacgagctgacacatggagca

SEQ ID NO: 4519511 - DNA, 25 bp, Homo sapien
gctggagacacgagctgacacatgg

SEQ ID NO: 4519512 - DNA, 25 bp, Homo sapien
acacgagctgacacatggagcagca

SEQ ID NO: 4519513 - DNA, 25 bp, Homo sapien
agctgcaatgaggtctgtaagcttg

SEQ ID NO: 4519514 - DNA, 25 bp, Homo sapien
tgatggtcagactgctcatagaggg

SEQ ID NO: 4519515 - DNA, 25 bp, Homo sapien
tgatattcatggcacatgagaaagc

SEQ ID NO: 4519516 - DNA, 25 bp, Homo sapien
ctgcaatgaggtctgtaagcttgat

SEQ ID NO: 4519517 - DNA, 25 bp, Homo sapien
ctctgtgtagaattatctcaaaatc

SEQ ID NO: 4519518 - DNA, 25 bp, Homo sapien
aattagcaaccagatggcacccaga

SEQ ID NO: 4519519 - DNA, 25 bp, Homo sapien
aaacagaagggttgcccattccact

SEQ ID NO: 4519520 - DNA, 25 bp, Homo sapien
ctgcaaaaaacagaagggttgccca

SEQ ID NO: 4519521 - DNA, 25 bp, Homo sapien
gttcccgtccacctgctcagaattt

SEQ ID NO: 4519522 - DNA, 25 bp, Homo sapien
cacttgttcccgtccacctgctcag

SEQ ID NO: 4519523 - DNA, 25 bp, Homo sapien
cgtccacctgctcagaatttcctgt

SEQ ID NO: 4519524 - DNA, 25 bp, Homo sapien
ttgttcccgtccacctgctcagaat

SEQ ID NO: 4519525 - DNA, 25 bp, Homo sapien
ccaacactgtcaggcatttggcgag

SEQ ID NO: 4519526 - DNA, 25 bp, Homo sapien
tgaagataacaaatcccaacactgt

SEQ ID NO: 4519527 - DNA, 25 bp, Homo sapien
atttggcgagcagaatcccgtcaga

SEQ ID NO: 4519528 - DNA, 25 bp, Homo sapien
gaatgccagggacaaacgaattgag

SEQ ID NO: 4519529 - DNA, 25 bp, Homo sapien
aaagtgtgaaccttgggcctgccct

SEQ ID NO: 4519530 - DNA, 25 bp, Homo sapien
aagctgctccacttcatgcagcatg

SEQ ID NO: 4519531 - DNA, 25 bp, Homo sapien
ttcatgcagcatgccttgccggtct

SEQ ID NO: 4519532 - DNA, 25 bp, Homo sapien
cagggacacccgctcagagggcggg

SEQ ID NO: 4519533 - DNA, 25 bp, Homo sapien
tggtctcccaatttttgtcctcctg

SEQ ID NO: 4519534 - DNA, 25 bp, Homo sapien
tattggtctcccaatttttgtcctc

SEQ ID NO: 4519535 - DNA, 25 bp, Homo sapien
tctcccaatttttgtcctcctgtga

SEQ ID NO: 4519536 - DNA, 25 bp, Homo sapien
cttggatattggtctcccaattttt

SEQ ID NO: 4519537 - DNA, 25 bp, Homo sapien
agcctccgggcgagcaggtgctcca

SEQ ID NO: 4519538 - DNA, 25 bp, Homo sapien
gcagtcaggcgccagacgtgaatct

SEQ ID NO: 4519539 - DNA, 25 bp, Homo sapien
tggccgggctgatgcgctgagcagt

SEQ ID NO: 4519540 - DNA, 25 bp, Homo sapien
cagacgtgaatctcgtgcttcagtt

SEQ ID NO: 4519541 - DNA, 25 bp, Homo sapien
tcatcctggtcttgtcaatgtcatt

SEQ ID NO: 4519542 - DNA, 25 bp, Homo sapien
catcctggtcttgtcaatgtcattc

SEQ ID NO: 4519543 - DNA, 25 bp, Homo sapien
ttattgtgtcacaggtgtcagatct

SEQ ID NO: 4519544 - DNA, 25 bp, Homo sapien
ttccacattaacattattgtgtcac

SEQ ID NO: 4519545 - DNA, 25 bp, Homo sapien
caacaatctcactgggttccttgtt

SEQ ID NO: 4519546 - DNA, 25 bp, Homo sapien
aagctttctgttccagtaaaggagt

SEQ ID NO: 4519547 - DNA, 25 bp, Homo sapien
tataaagctttctgttccagtaaag

SEQ ID NO: 4519548 - DNA, 25 bp, Homo sapien
cactgggttccttgttataaagctt

SEQ ID NO: 4519549 - DNA, 25 bp, Homo sapien
atgtgtgcagtgaatccggcaaagt

SEQ ID NO: 4519550 - DNA, 25 bp, Homo sapien
ctgaggagcggaaagcagaccagga

SEQ ID NO: 4519551 - DNA, 25 bp, Homo sapien
aagcagaccaggagaacaaggcaaa

SEQ ID NO: 4519552 - DNA, 25 bp, Homo sapien
cagtgaatccggcaaagtccaggcc

SEQ ID NO: 4519553 - DNA, 25 bp, Homo sapien
ataaacaaggggaaatgaaatggca

SEQ ID NO: 4519554 - DNA, 25 bp, Homo sapien
gggaaatgaaatggcagcccaggca

SEQ ID NO: 4519555 - DNA, 25 bp, Homo sapien
aatgaaatggcagcccaggcatggt

SEQ ID NO: 4519556 - DNA, 25 bp, Homo sapien
gaaatgaaatggcagcccaggcatg

SEQ ID NO: 4519557 - DNA, 25 bp, Homo sapien
ttgtcctggaataagtcagcggcgt

SEQ ID NO: 4519558 - DNA, 25 bp, Homo sapien
gcagcatcattggttggttctgttc

SEQ ID NO: 4519559 - DNA, 25 bp, Homo sapien
agtcagcagcatcattggttggttc

SEQ ID NO: 4519560 - DNA, 25 bp, Homo sapien
atcattggttggttctgttctttca

SEQ ID NO: 4519561 - DNA, 25 bp, Homo sapien
aaacgtcctggaataagtcagcagc

SEQ ID NO: 4519562 - DNA, 25 bp, Homo sapien
gaataagtcagcagcgtcattggtt

SEQ ID NO: 4519563 - DNA, 25 bp, Homo sapien
cctggaataagtcagcagcgtcatt

SEQ ID NO: 4519564 - DNA, 25 bp, Homo sapien
ggaataagtcagcagcgtcattggt

SEQ ID NO: 4519565 - DNA, 25 bp, Homo sapien
taagtcagcagcgtcattggttggt

SEQ ID NO: 4519566 - DNA, 25 bp, Homo sapien
ttggttctgttctttcacagaccat

SEQ ID NO: 4519567 - DNA, 25 bp, Homo sapien
gttggttctgttctttcacagacca

SEQ ID NO: 4519568 - DNA, 25 bp, Homo sapien
ggttggttctgttctttcacagacc

SEQ ID NO: 4519569 - DNA, 25 bp, Homo sapien
tggttggttctgttctttcacagac

SEQ ID NO: 4519570 - DNA, 25 bp, Homo sapien
taatatagccactttgttctgatga

SEQ ID NO: 4519571 - DNA, 25 bp, Homo sapien
tacattcttctgatattgagtggcg

SEQ ID NO: 4519572 - DNA, 25 bp, Homo sapien
ttcaagtgcagttggaaaaacatat

SEQ ID NO: 4519573 - DNA, 25 bp, Homo sapien
tgagaattgtactgaactctccaac

SEQ ID NO: 4519574 - DNA, 25 bp, Homo sapien
aggattccacgtgcctgccaccatg

SEQ ID NO: 4519575 - DNA, 25 bp, Homo sapien
aagtagctaggattccacgtgcctg

SEQ ID NO: 4519576 - DNA, 25 bp, Homo sapien
ccaagtagctaggattccacgtgcc

SEQ ID NO: 4519577 - DNA, 25 bp, Homo sapien
tagctaggattccacgtgcctgcca

SEQ ID NO: 4519578 - DNA, 25 bp, Homo sapien
tgagcatgagctccatcctggataa

SEQ ID NO: 4519579 - DNA, 25 bp, Homo sapien
gcagggtctgttaccacctgacatg

SEQ ID NO: 4519580 - DNA, 25 bp, Homo sapien
tcctggataacaggtgcccctagca

SEQ ID NO: 4519581 - DNA, 25 bp, Homo sapien
aacactctaggatgctatttgcacc

SEQ ID NO: 4519582 - DNA, 25 bp, Homo sapien
aagttggtgaagtgttgccaagcag

SEQ ID NO: 4519583 - DNA, 25 bp, Homo sapien
tggcaaagttggtgaagtgttgcca

SEQ ID NO: 4519584 - DNA, 25 bp, Homo sapien
gtgaagtgttgccaagcagtttccc

SEQ ID NO: 4519585 - DNA, 25 bp, Homo sapien
gttgccaagcagtttcccacggcag

SEQ ID NO: 4519586 - DNA, 25 bp, Homo sapien
cttccatgaagcggccattaacacc

SEQ ID NO: 4519587 - DNA, 25 bp, Homo sapien
atgcagagccatacccagaacctct

SEQ ID NO: 4519588 - DNA, 25 bp, Homo sapien
agaacctctggagcgcactgcttcc

SEQ ID NO: 4519589 - DNA, 25 bp, Homo sapien
agagccatacccagaacctctggag

SEQ ID NO: 4519590 - DNA, 25 bp, Homo sapien
tggcagctcctccaatgtttgtgaa

SEQ ID NO: 4519591 - DNA, 25 bp, Homo sapien
gacttgtcttggatcaaggttgagc

SEQ ID NO: 4519592 - DNA, 25 bp, Homo sapien
gatcaaggttgagcacctcacacaa

SEQ ID NO: 4519593 - DNA, 25 bp, Homo sapien
tgaagatcacttctgcaatcaggac

SEQ ID NO: 4519594 - DNA, 25 bp, Homo sapien
acggccgcgatgagacagagcatga

SEQ ID NO: 4519595 - DNA, 25 bp, Homo sapien
catgatgatcatggcccacacccgt

SEQ ID NO: 4519596 - DNA, 25 bp, Homo sapien
gtggtgacgttgtccaagaaggcag

SEQ ID NO: 4519597 - DNA, 25 bp, Homo sapien
tcacaggcgtgaagaggagcatggt

SEQ ID NO: 4519598 - DNA, 25 bp, Homo sapien
agcacaataatcgaaaaatcccgtt

SEQ ID NO: 4519599 - DNA, 25 bp, Homo sapien
caataatcgaaaaatcccgtttctg

SEQ ID NO: 4519600 - DNA, 25 bp, Homo sapien
ctgaaaatatggctactaagatcat

SEQ ID NO: 4519601 - DNA, 25 bp, Homo sapien
ctttacagcacaataatcgaaaaat

SEQ ID NO: 4519602 - DNA, 25 bp, Homo sapien
gcgtctcaaaatcaatccactccac

SEQ ID NO: 4519603 - DNA, 25 bp, Homo sapien
caatccactccaccacatgggtcag

SEQ ID NO: 4519604 - DNA, 25 bp, Homo sapien
tggccgccagagttctgtgcacgat

SEQ ID NO: 4519605 - DNA, 25 bp, Homo sapien
gccagtgctgcaagggaacccagca

SEQ ID NO: 4519606 - DNA, 25 bp, Homo sapien
gcatggccgccagagttctgtgcac

SEQ ID NO: 4519607 - DNA, 25 bp, Homo sapien
gtgctgcaagggaacccagcatggc

SEQ ID NO: 4519608 - DNA, 25 bp, Homo sapien
tccagtgcacgagggagttagcaca

SEQ ID NO: 4519609 - DNA, 25 bp, Homo sapien
gaaattaccgcgttccagtgcacga

SEQ ID NO: 4519610 - DNA, 25 bp, Homo sapien
cgagggagttagcacacacgaaagc

SEQ ID NO: 4519611 - DNA, 25 bp, Homo sapien
agcacaggaaattaccgcgttccag

SEQ ID NO: 4519612 - DNA, 25 bp, Homo sapien
ctatatctgccactgtgtaccacat

SEQ ID NO: 4519613 - DNA, 25 bp, Homo sapien
gagggggtctatatctgccactgtg

SEQ ID NO: 4519614 - DNA, 25 bp, Homo sapien
gggtctatatctgccactgtgtacc

SEQ ID NO: 4519615 - DNA, 25 bp, Homo sapien
gtctatatctgccactgtgtaccac

SEQ ID NO: 4519616 - DNA, 25 bp, Homo sapien
cagggcaggcattcatccccaactt

SEQ ID NO: 4519617 - DNA, 25 bp, Homo sapien
agggcaggcattcatccccaacttg

SEQ ID NO: 4519618 - DNA, 25 bp, Homo sapien
tccttatccaatgccaagggtggcc

SEQ ID NO: 4519619 - DNA, 25 bp, Homo sapien
ttccttatccaatgccaagggtggc

SEQ ID NO: 4519620 - DNA, 25 bp, Homo sapien
ggacatccagacatagggtcctcct

SEQ ID NO: 4519621 - DNA, 25 bp, Homo sapien
gacagcaggacatccagacataggg

SEQ ID NO: 4519622 - DNA, 25 bp, Homo sapien
agcaggacatccagacatagggtcc

SEQ ID NO: 4519623 - DNA, 25 bp, Homo sapien
tccctgagcattctccgcacccctg

SEQ ID NO: 4519624 - DNA, 25 bp, Homo sapien
tcaaatatgatcagcgcgtagacgc

SEQ ID NO: 4519625 - DNA, 25 bp, Homo sapien
gccgtcgcgatggtcacctgggttt

SEQ ID NO: 4519626 - DNA, 25 bp, Homo sapien
cctgggtttctacacttccgcggag

SEQ ID NO: 4519627 - DNA, 25 bp, Homo sapien
tccgcggaggtactgatgagccatc

SEQ ID NO: 4519628 - DNA, 25 bp, Homo sapien
gagtgctcgcttctcctcggattta

SEQ ID NO: 4519629 - DNA, 25 bp, Homo sapien
aatacaccgtccagttgtgagtgac

SEQ ID NO: 4519630 - DNA, 25 bp, Homo sapien
tgctcatcactgagtgctcgcttct

SEQ ID NO: 4519631 - DNA, 25 bp, Homo sapien
tcctcggatttaaatacaccgtcca

SEQ ID NO: 4519632 - DNA, 25 bp, Homo sapien
tcccaggacgactcggcccactggc

SEQ ID NO: 4519633 - DNA, 25 bp, Homo sapien
gctccaccacgatgtgctcttccct

SEQ ID NO: 4519634 - DNA, 25 bp, Homo sapien
ctggagcccaaagcgtcagcctggg

SEQ ID NO: 4519635 - DNA, 25 bp, Homo sapien
cactggccactagggcccctgccag

SEQ ID NO: 4519636 - DNA, 25 bp, Homo sapien
ctgcagcagcgtggagtccacgtgg

SEQ ID NO: 4519637 - DNA, 25 bp, Homo sapien
caggcacggttttaaagtgatgaag

SEQ ID NO: 4519638 - DNA, 25 bp, Homo sapien
agatactttacagctcaggcacggt

SEQ ID NO: 4519639 - DNA, 25 bp, Homo sapien
gaatgagaaacaaagtctgtcaaca

SEQ ID NO: 4519640 - DNA, 25 bp, Homo sapien
gaagtaatgcagaggtcgaggcaca

SEQ ID NO: 4519641 - DNA, 25 bp, Homo sapien
acggatgcccgccgcactagcagta

SEQ ID NO: 4519642 - DNA, 25 bp, Homo sapien
cgcactagcagtaccgggggcttca

SEQ ID NO: 4519643 - DNA, 25 bp, Homo sapien
tgcccgccgcactagcagtaccggg

SEQ ID NO: 4519644 - DNA, 25 bp, Homo sapien
caggaccctccacggatgcccgccg

SEQ ID NO: 4519645 - DNA, 25 bp, Homo sapien
gatccggatataggctgaacaaaat

SEQ ID NO: 4519646 - DNA, 25 bp, Homo sapien
gagctttccttgatccggatatagg

SEQ ID NO: 4519647 - DNA, 25 bp, Homo sapien
ctgccagagctttccttgatccgga

SEQ ID NO: 4519648 - DNA, 25 bp, Homo sapien
tccagcggtgataaggccaacagct

SEQ ID NO: 4519649 - DNA, 25 bp, Homo sapien
actctgggctatccacgatctccag

SEQ ID NO: 4519650 - DNA, 25 bp, Homo sapien
gggctatccacgatctccagatgtg

SEQ ID NO: 4519651 - DNA, 25 bp, Homo sapien
agacactctgggctatccacgatct

SEQ ID NO: 4519652 - DNA, 25 bp, Homo sapien
cagggcacaatctcaaaggggtgct

SEQ ID NO: 4519653 - DNA, 25 bp, Homo sapien
aggcaaacaggcccatgactttcag

SEQ ID NO: 4519654 - DNA, 25 bp, Homo sapien
caaacaggcccatgactttcagcca

SEQ ID NO: 4519655 - DNA, 25 bp, Homo sapien
caaaggcaaacaggcccatgacttt

SEQ ID NO: 4519656 - DNA, 25 bp, Homo sapien
agaacacagcaccacaaaggcaaac

SEQ ID NO: 4519657 - DNA, 25 bp, Homo sapien
ctcagcttggaaagacggagtcgga

SEQ ID NO: 4519658 - DNA, 25 bp, Homo sapien
ttcccaagactcttcagcagtgatg

SEQ ID NO: 4519659 - DNA, 25 bp, Homo sapien
ttagcaggtatcttcgctcccagtc

SEQ ID NO: 4519660 - DNA, 25 bp, Homo sapien
cttctcggaggaggcagatgcagac

SEQ ID NO: 4519661 - DNA, 25 bp, Homo sapien
acacaacatccacagaagcatgagc

SEQ ID NO: 4519662 - DNA, 25 bp, Homo sapien
gcttcccacacaacatccacagaag

SEQ ID NO: 4519663 - DNA, 25 bp, Homo sapien
aagcatgagcaggaagagggaacat

SEQ ID NO: 4519664 - DNA, 25 bp, Homo sapien
tcccacacaacatccacagaagcat

SEQ ID NO: 4519665 - DNA, 25 bp, Homo sapien
gagggaagcaagttaatgtcattgc

SEQ ID NO: 4519666 - DNA, 25 bp, Homo sapien
gttcgcttccctgtccaatatggca

SEQ ID NO: 4519667 - DNA, 25 bp, Homo sapien
tagaaatgttcgcttccctgtccaa

SEQ ID NO: 4519668 - DNA, 25 bp, Homo sapien
tcacttgaagtgtggctagtgcaac

SEQ ID NO: 4519669 - DNA, 25 bp, Homo sapien
tgtgaagagtggctaccagttgtca

SEQ ID NO: 4519670 - DNA, 25 bp, Homo sapien
tcagttcagatacagggcatgcttt

SEQ ID NO: 4519671 - DNA, 25 bp, Homo sapien
tgtaccacacgttcctgctgtcaac

SEQ ID NO: 4519672 - DNA, 25 bp, Homo sapien
ggcatgctttgacctttgtaccaca

SEQ ID NO: 4519673 - DNA, 25 bp, Homo sapien
agcaggaatctttagacctggagct

SEQ ID NO: 4519674 - DNA, 25 bp, Homo sapien
aaagcaggaatctttagacctggag

SEQ ID NO: 4519675 - DNA, 25 bp, Homo sapien
aagcaggaatctttagacctggagc

SEQ ID NO: 4519676 - DNA, 25 bp, Homo sapien
ccagcctgaggattgtgccaggcat

SEQ ID NO: 4519677 - DNA, 25 bp, Homo sapien
cagaaggcaacacatcccagcctga

SEQ ID NO: 4519678 - DNA, 25 bp, Homo sapien
aaggcaacacatcccagcctgagga

SEQ ID NO: 4519679 - DNA, 25 bp, Homo sapien
tcccagcctgaggattgtgccaggc

SEQ ID NO: 4519680 - DNA, 25 bp, Homo sapien
gcctcctcgagggccacctcccctc

SEQ ID NO: 4519681 - DNA, 25 bp, Homo sapien
cctcctcgagggccacctcccctca

SEQ ID NO: 4519682 - DNA, 25 bp, Homo sapien
cagcctcctcgagggccacctcccc

SEQ ID NO: 4519683 - DNA, 25 bp, Homo sapien
tccaagtggtagcacatatcagtac

SEQ ID NO: 4519684 - DNA, 25 bp, Homo sapien
acatatgcacaagttttacacaggc

SEQ ID NO: 4519685 - DNA, 25 bp, Homo sapien
gaaggcaccatttacgaggaacagg

SEQ ID NO: 4519686 - DNA, 25 bp, Homo sapien
tgaacagtttgaggaactgctgaac

SEQ ID NO: 4519687 - DNA, 25 bp, Homo sapien
cagatggtagaatgaaggagttgca

SEQ ID NO: 4519688 - DNA, 25 bp, Homo sapien
cagcttttgttggtatgggaatttc

SEQ ID NO: 4519689 - DNA, 25 bp, Homo sapien
caatctatttagaactagtgccaac

SEQ ID NO: 4519690 - DNA, 25 bp, Homo sapien
tttcagctctatacagaacctttgc

SEQ ID NO: 4519691 - DNA, 25 bp, Homo sapien
cactgagactaagattaagcttgag

SEQ ID NO: 4519692 - DNA, 25 bp, Homo sapien
tcaataccaggagattttacaagca

SEQ ID NO: 4519693 - DNA, 25 bp, Homo sapien
tgtagcagtccgttggtttaggtac

SEQ ID NO: 4519694 - DNA, 25 bp, Homo sapien
caacaattatcaagtctcccactga

SEQ ID NO: 4519695 - DNA, 25 bp, Homo sapien
tgagtcacttggagataaatcttac

SEQ ID NO: 4519696 - DNA, 25 bp, Homo sapien
tgttttatgtaccaacactgaacaa

SEQ ID NO: 4519697 - DNA, 25 bp, Homo sapien
ttgatgttttacaacaacaccaaaa

SEQ ID NO: 4519698 - DNA, 25 bp, Homo sapien
tgtccaacacctatcactgaaaact

SEQ ID NO: 4519699 - DNA, 25 bp, Homo sapien
ggacagcatagactgtaagtcaata

SEQ ID NO: 4519700 - DNA, 25 bp, Homo sapien
acattcagtgaaagcatgagcacgc

SEQ ID NO: 4519701 - DNA, 25 bp, Homo sapien
tcaccacttgcaaaaggacagcata

SEQ ID NO: 4519702 - DNA, 25 bp, Homo sapien
tgaaagcatgagcacgcaagctggg

SEQ ID NO: 4519703 - DNA, 25 bp, Homo sapien
gcttgccggccacaagttcagcgag

SEQ ID NO: 4519704 - DNA, 25 bp, Homo sapien
aggaagcctgcgcttgccggccaca

SEQ ID NO: 4519705 - DNA, 25 bp, Homo sapien
agtccgctgggcacggacgtctgca

SEQ ID NO: 4519706 - DNA, 25 bp, Homo sapien
cccttttgtgaggaatgaagcaaac

SEQ ID NO: 4519707 - DNA, 25 bp, Homo sapien
tgcattttcaagcagccgacagcac

SEQ ID NO: 4519708 - DNA, 25 bp, Homo sapien
cagaaatgacctttggccttgcagc

SEQ ID NO: 4519709 - DNA, 25 bp, Homo sapien
tggctacctctggatggcgaaagtg

SEQ ID NO: 4519710 - DNA, 25 bp, Homo sapien
gccttgcagccacttggtttgctgt

SEQ ID NO: 4519711 - DNA, 25 bp, Homo sapien
tacagctcaggactggtgccttcag

SEQ ID NO: 4519712 - DNA, 25 bp, Homo sapien
gaccaggaaatgagtagcctagcaa

SEQ ID NO: 4519713 - DNA, 25 bp, Homo sapien
tccaaaggctattacacagtgcctg

SEQ ID NO: 4519714 - DNA, 25 bp, Homo sapien
cacaagctggcatgcaaacatactg

SEQ ID NO: 4519715 - DNA, 25 bp, Homo sapien
gcaaaggcgtcaatgtgtctccggg

SEQ ID NO: 4519716 - DNA, 25 bp, Homo sapien
gcttgtctccaaggcgtggccgtgt

SEQ ID NO: 4519717 - DNA, 25 bp, Homo sapien
caggagcgatgctgtgaccgttgca

SEQ ID NO: 4519718 - DNA, 25 bp, Homo sapien
gcatggctgtgtctctcggagcacg

SEQ ID NO: 4519719 - DNA, 25 bp, Homo sapien
cggatcccagggagggggcaggaga

SEQ ID NO: 4519720 - DNA, 25 bp, Homo sapien
cttctagttcccggatcccagggag

SEQ ID NO: 4519721 - DNA, 25 bp, Homo sapien
tcccagggagggggcaggagaagcc

SEQ ID NO: 4519722 - DNA, 25 bp, Homo sapien
gatcccagggagggggcaggagaag

SEQ ID NO: 4519723 - DNA, 25 bp, Homo sapien
gaaggcctgaagaagcccgtccagg

SEQ ID NO: 4519724 - DNA, 25 bp, Homo sapien
aggcctgaagaagcccgtccagggg

SEQ ID NO: 4519725 - DNA, 25 bp, Homo sapien
aaggcctgaagaagcccgtccaggg

SEQ ID NO: 4519726 - DNA, 25 bp, Homo sapien
ggtcccgcgggtggccggcgcaaga

SEQ ID NO: 4519727 - DNA, 25 bp, Homo sapien
gggtggccggcgcaagagccacagc

SEQ ID NO: 4519728 - DNA, 25 bp, Homo sapien
cgcgctccgccgaaactgcgcgggt

SEQ ID NO: 4519729 - DNA, 25 bp, Homo sapien
agcccgcgacaagccggctgcctgc

SEQ ID NO: 4519730 - DNA, 25 bp, Homo sapien
cttgcttcctaagccgcgactcagc

SEQ ID NO: 4519731 - DNA, 25 bp, Homo sapien
ggctagtctggctcctcgcctcctt

SEQ ID NO: 4519732 - DNA, 25 bp, Homo sapien
tcagccggggctgtgtaaaccctcc

SEQ ID NO: 4519733 - DNA, 25 bp, Homo sapien
cgaccgcggagcacgtgcactttac

SEQ ID NO: 4519734 - DNA, 25 bp, Homo sapien
tctccaggagtgagtttaaggtccg

SEQ ID NO: 4519735 - DNA, 25 bp, Homo sapien
cgcacctccgctctggatggtgagc

SEQ ID NO: 4519736 - DNA, 25 bp, Homo sapien
atggtgagcggagcacagccttcga

SEQ ID NO: 4519737 - DNA, 25 bp, Homo sapien
gagcacagccttcgaagtaagaact

SEQ ID NO: 4519738 - DNA, 25 bp, Homo sapien
gcggcccaggactgcggacaggctt

SEQ ID NO: 4519739 - DNA, 25 bp, Homo sapien
ggcggcccaggactgcggacaggct

SEQ ID NO: 4519740 - DNA, 25 bp, Homo sapien
agaggcggcccaggactgcggacag

SEQ ID NO: 4519741 - DNA, 25 bp, Homo sapien
aggcggcccaggactgcggacaggc

SEQ ID NO: 4519742 - DNA, 25 bp, Homo sapien
cccaagtcccgggtcatcctgagct

SEQ ID NO: 4519743 - DNA, 25 bp, Homo sapien
agagggtgggtcctgtgactgggag

SEQ ID NO: 4519744 - DNA, 25 bp, Homo sapien
gggctggcccaagtcccgggtcatc

SEQ ID NO: 4519745 - DNA, 25 bp, Homo sapien
cctgaagagggtgggtcctgtgact

SEQ ID NO: 4519746 - DNA, 25 bp, Homo sapien
atttttcagaggcccagcgctctcc

SEQ ID NO: 4519747 - DNA, 25 bp, Homo sapien
ttttcagaggcccagcgctctcctt

SEQ ID NO: 4519748 - DNA, 25 bp, Homo sapien
cagcgctctccttccgcatcctgcc

SEQ ID NO: 4519749 - DNA, 25 bp, Homo sapien
ccaatttttcagaggcccagcgctc

SEQ ID NO: 4519750 - DNA, 25 bp, Homo sapien
tctggttaaacctgagggtgagccc

SEQ ID NO: 4519751 - DNA, 25 bp, Homo sapien
gagaatggaaacagcaagtgcgcgc

SEQ ID NO: 4519752 - DNA, 25 bp, Homo sapien
cccttctgaggtcgtggataagcct

SEQ ID NO: 4519753 - DNA, 25 bp, Homo sapien
tttttggcaagtcaggacagcgcac

SEQ ID NO: 4519754 - DNA, 25 bp, Homo sapien
gaaaggcctcaattcagatgacata

SEQ ID NO: 4519755 - DNA, 25 bp, Homo sapien
ttaggcatatacatgacacaaacat

SEQ ID NO: 4519756 - DNA, 25 bp, Homo sapien
cctctggatgcattcaagtaatact

SEQ ID NO: 4519757 - DNA, 25 bp, Homo sapien
catgatagaagttatgatgctgttc

SEQ ID NO: 4519758 - DNA, 25 bp, Homo sapien
atatacaatcaagacgactcacgac

SEQ ID NO: 4519759 - DNA, 25 bp, Homo sapien
ttataatacgatttgttacacagtt

SEQ ID NO: 4519760 - DNA, 25 bp, Homo sapien
caagacgactcacgacacttgaaag

SEQ ID NO: 4519761 - DNA, 25 bp, Homo sapien
cgactcacgacacttgaaagaaagg

SEQ ID NO: 4519762 - DNA, 25 bp, Homo sapien
tggctcaggctctcatctcacgagg

SEQ ID NO: 4519763 - DNA, 25 bp, Homo sapien
tgagaagacccttggaagtcgagcg

SEQ ID NO: 4519764 - DNA, 25 bp, Homo sapien
gaggacggacgcttctcatcagaca

SEQ ID NO: 4519765 - DNA, 25 bp, Homo sapien
agcctacagtctacacagcagcgag

SEQ ID NO: 4519766 - DNA, 25 bp, Homo sapien
cggctggctctcctgtaagtgcgat

SEQ ID NO: 4519767 - DNA, 25 bp, Homo sapien
tccgaagcaaaggagtcgacatcct

SEQ ID NO: 4519768 - DNA, 25 bp, Homo sapien
taagtgcgatgcgagcgtagtcatc

SEQ ID NO: 4519769 - DNA, 25 bp, Homo sapien
tatctgaatcgtcgctgctgtcgtc

SEQ ID NO: 4519770 - DNA, 25 bp, Homo sapien
gttgagcagaaacatgaagtgatta

SEQ ID NO: 4519771 - DNA, 25 bp, Homo sapien
ttgagcagaaacatgaagtgattag

SEQ ID NO: 4519772 - DNA, 25 bp, Homo sapien
ctgttgagcagaaacatgaagtgat

SEQ ID NO: 4519773 - DNA, 25 bp, Homo sapien
tgttgagcagaaacatgaagtgatt

SEQ ID NO: 4519774 - DNA, 25 bp, Homo sapien
aaccactggatcagcgatgcggaag

SEQ ID NO: 4519775 - DNA, 25 bp, Homo sapien
gccaccgacttgagaaggtgcagcg

SEQ ID NO: 4519776 - DNA, 25 bp, Homo sapien
cagacgaagcgaaggaaaagagagc

SEQ ID NO: 4519777 - DNA, 25 bp, Homo sapien
gatgcctttataggtggccaccgac

SEQ ID NO: 4519778 - DNA, 25 bp, Homo sapien
gtcacgctccctctctacaccaagg

SEQ ID NO: 4519779 - DNA, 25 bp, Homo sapien
ggcatttccgcaagactccgtcacg

SEQ ID NO: 4519780 - DNA, 25 bp, Homo sapien
ctgcgggaggatgtctgtcagggcc

SEQ ID NO: 4519781 - DNA, 25 bp, Homo sapien
tgtcagggccgcgtgatgcttccca

SEQ ID NO: 4519782 - DNA, 25 bp, Homo sapien
gggaacaggcacaacgcgggccatt

SEQ ID NO: 4519783 - DNA, 25 bp, Homo sapien
catcgtctccagttcgtagccggtg

SEQ ID NO: 4519784 - DNA, 25 bp, Homo sapien
agttcgtagccggtgaacagagaga

SEQ ID NO: 4519785 - DNA, 25 bp, Homo sapien
gcgggccattccttcccgaacagca

SEQ ID NO: 4519786 - DNA, 25 bp, Homo sapien
gcaacagagacggatgaccaccaac

SEQ ID NO: 4519787 - DNA, 25 bp, Homo sapien
cacaaccacgttctgctacttttgc

SEQ ID NO: 4519788 - DNA, 25 bp, Homo sapien
gtccacacaaccacgttctgctact

SEQ ID NO: 4519789 - DNA, 25 bp, Homo sapien
atgcaacagagacggatgaccacca

SEQ ID NO: 4519790 - DNA, 25 bp, Homo sapien
cttggagctcaactgaatgtcctgg

SEQ ID NO: 4519791 - DNA, 25 bp, Homo sapien
cacttggcactgtgaagggcaggct

SEQ ID NO: 4519792 - DNA, 25 bp, Homo sapien
atagtttatcgccagccgcacgtac

SEQ ID NO: 4519793 - DNA, 25 bp, Homo sapien
cattgtctcggatgtacatgagtcc

SEQ ID NO: 4519794 - DNA, 25 bp, Homo sapien
tgaccggacccgcagaacagactgt

SEQ ID NO: 4519795 - DNA, 25 bp, Homo sapien
agagttcacagcctgaccggacccg

SEQ ID NO: 4519796 - DNA, 25 bp, Homo sapien
gcactgagattaggccagagttcac

SEQ ID NO: 4519797 - DNA, 25 bp, Homo sapien
gcctgttaacaagaccctagaggcc

SEQ ID NO: 4519798 - DNA, 25 bp, Homo sapien
gctcaggggactcccggttcggatg

SEQ ID NO: 4519799 - DNA, 25 bp, Homo sapien
gtccgcgatggtgaggctcatccca

SEQ ID NO: 4519800 - DNA, 25 bp, Homo sapien
acaggctcggcaaggttgaggctca

SEQ ID NO: 4519801 - DNA, 25 bp, Homo sapien
actgaggtccgcgatggtgaggctc

SEQ ID NO: 4519802 - DNA, 25 bp, Homo sapien
gcaggtagcagtctcggttggcccc

SEQ ID NO: 4519803 - DNA, 25 bp, Homo sapien
agcaggtagcagtctcggttggccc

SEQ ID NO: 4519804 - DNA, 25 bp, Homo sapien
tgagcaggtagcagtctcggttggc

SEQ ID NO: 4519805 - DNA, 25 bp, Homo sapien
ggctgagcaggtagcagtctcggtt

SEQ ID NO: 4519806 - DNA, 25 bp, Homo sapien
tcccgttgggtgtcacgatcagcag

SEQ ID NO: 4519807 - DNA, 25 bp, Homo sapien
gggcgtgagtccgttctgcagctcc

SEQ ID NO: 4519808 - DNA, 25 bp, Homo sapien
tcctcacagatctcagctatggact

SEQ ID NO: 4519809 - DNA, 25 bp, Homo sapien
cagctatggactcgctgtagccgcc

SEQ ID NO: 4519810 - DNA, 25 bp, Homo sapien
ccaacgctcccacaccatgtggcct

SEQ ID NO: 4519811 - DNA, 25 bp, Homo sapien
gctcaggcgaccactgccggggaca

SEQ ID NO: 4519812 - DNA, 25 bp, Homo sapien
gctccagcacgtggcaagttctcac

SEQ ID NO: 4519813 - DNA, 25 bp, Homo sapien
gccactcgaagtcccctcacacagt

SEQ ID NO: 4519814 - DNA, 25 bp, Homo sapien
gagctcatcttagcacacatctgcc

SEQ ID NO: 4519815 - DNA, 25 bp, Homo sapien
actttccagacacggtgaggaagga

SEQ ID NO: 4519816 - DNA, 25 bp, Homo sapien
ctgtcgggaccaaacgagctcatct

SEQ ID NO: 4519817 - DNA, 25 bp, Homo sapien
ccaaagacagacttggtgccgtcgg

SEQ ID NO: 4519818 - DNA, 25 bp, Homo sapien
gaaactcgcggcagcttgttaaggc

SEQ ID NO: 4519819 - DNA, 25 bp, Homo sapien
catgacgacacccactagtagaggc

SEQ ID NO: 4519820 - DNA, 25 bp, Homo sapien
gaatgaacttgtctgcgtgccacac

SEQ ID NO: 4519821 - DNA, 25 bp, Homo sapien
aagaatgacaggagccacagttgcc

SEQ ID NO: 4519822 - DNA, 25 bp, Homo sapien
gacttggagagtaatctccatgtgc

SEQ ID NO: 4519823 - DNA, 25 bp, Homo sapien
ccacgaaagcatcacttctaaggct

SEQ ID NO: 4519824 - DNA, 25 bp, Homo sapien
cttggagagtaatctccatgtgcta

SEQ ID NO: 4519825 - DNA, 25 bp, Homo sapien
acttggagagtaatctccatgtgct

SEQ ID NO: 4519826 - DNA, 25 bp, Homo sapien
tagttgcttgtactactttccggaa

SEQ ID NO: 4519827 - DNA, 25 bp, Homo sapien
gacgatcgcgtaccatagttgcttg

SEQ ID NO: 4519828 - DNA, 25 bp, Homo sapien
ggttcagctccacgacggggccatg

SEQ ID NO: 4519829 - DNA, 25 bp, Homo sapien
gggccatgctgacgatcgcgtacca

SEQ ID NO: 4519830 - DNA, 25 bp, Homo sapien
gagagtgtcgaacccaacagaaggc

SEQ ID NO: 4519831 - DNA, 25 bp, Homo sapien
gacggttcctcagcgcaatgatggg

SEQ ID NO: 4519832 - DNA, 25 bp, Homo sapien
aacagaaggcccgagtccagtttcg

SEQ ID NO: 4519833 - DNA, 25 bp, Homo sapien
gcgagccttccaggtcgaacatggg

SEQ ID NO: 4519834 - DNA, 25 bp, Homo sapien
tttgccagcactggcgggcttgctg

SEQ ID NO: 4519835 - DNA, 25 bp, Homo sapien
gggcagctaccaaccgaggcctctg

SEQ ID NO: 4519836 - DNA, 25 bp, Homo sapien
cacacggttgaccttcttaccctga

SEQ ID NO: 4519837 - DNA, 25 bp, Homo sapien
tggcattggtggttccgtctcccag

SEQ ID NO: 4519838 - DNA, 25 bp, Homo sapien
ccttttaaggctgcgcatgtccttc

SEQ ID NO: 4519839 - DNA, 25 bp, Homo sapien
tagagatgatgtttaccgtgtaggc

SEQ ID NO: 4519840 - DNA, 25 bp, Homo sapien
agatgatgtttaccgtgtaggccag

SEQ ID NO: 4519841 - DNA, 25 bp, Homo sapien
tgtccttcatgctcaaccctcttag

SEQ ID NO: 4519842 - DNA, 25 bp, Homo sapien
tggcgatggcgatgactttcttccc

SEQ ID NO: 4519843 - DNA, 25 bp, Homo sapien
tggacctgccgaggccttcgaacat

SEQ ID NO: 4519844 - DNA, 25 bp, Homo sapien
gcccaacctgtgataatcgcctttg

SEQ ID NO: 4519845 - DNA, 25 bp, Homo sapien
tcgaacatggtcatctgatccatgg

SEQ ID NO: 4519846 - DNA, 25 bp, Homo sapien
aaattatggggcaaggtgatctcac

SEQ ID NO: 4519847 - DNA, 25 bp, Homo sapien
aggaagcatggaaattatggggcaa

SEQ ID NO: 4519848 - DNA, 25 bp, Homo sapien
caggacacaaccatagcctgctgca

SEQ ID NO: 4519849 - DNA, 25 bp, Homo sapien
tggaaattatggggcaaggtgatct

SEQ ID NO: 4519850 - DNA, 25 bp, Homo sapien
taagggcaacagaaaactgggatcc

SEQ ID NO: 4519851 - DNA, 25 bp, Homo sapien
gcattccactttaactactccaaga

SEQ ID NO: 4519852 - DNA, 25 bp, Homo sapien
tgggatccgcattccactttaacta

SEQ ID NO: 4519853 - DNA, 25 bp, Homo sapien
atttggtaagggcaacagaaaactg

SEQ ID NO: 4519854 - DNA, 25 bp, Homo sapien
atgtcaaccacacggtggccctgca

SEQ ID NO: 4519855 - DNA, 25 bp, Homo sapien
acagtgtcgtcatctgtgaggcaga

SEQ ID NO: 4519856 - DNA, 25 bp, Homo sapien
tccccggccgagcttgccgtagtcc

SEQ ID NO: 4519857 - DNA, 25 bp, Homo sapien
actgccacaggcgatgtcaaccaca

SEQ ID NO: 4519858 - DNA, 25 bp, Homo sapien
ccatgtgtagaggtccccggctgct

SEQ ID NO: 4519859 - DNA, 25 bp, Homo sapien
ggccgtagcggcctttgccccatgt

SEQ ID NO: 4519860 - DNA, 25 bp, Homo sapien
gctgctgtgacacaggcgctgtggg

SEQ ID NO: 4519861 - DNA, 25 bp, Homo sapien
ctcactgtcgctgtgccccagccgg

SEQ ID NO: 4519862 - DNA, 25 bp, Homo sapien
ttcaattcctctcagagactcgatg

SEQ ID NO: 4519863 - DNA, 25 bp, Homo sapien
tcgatgacacgagggcggtcacacg

SEQ ID NO: 4519864 - DNA, 25 bp, Homo sapien
ttcctctcagagactcgatgacacg

SEQ ID NO: 4519865 - DNA, 25 bp, Homo sapien
tcagagactcgatgacacgagggcg

SEQ ID NO: 4519866 - DNA, 25 bp, Homo sapien
ttctgcctcaccccaagagtaaact

SEQ ID NO: 4519867 - DNA, 25 bp, Homo sapien
ctgcaccatacccagtggcatacag

SEQ ID NO: 4519868 - DNA, 25 bp, Homo sapien
caatgcctagtctgccacctgcacc

SEQ ID NO: 4519869 - DNA, 25 bp, Homo sapien
tgaagacagggcaaggcagtgcttt

SEQ ID NO: 4519870 - DNA, 25 bp, Homo sapien
ttgcacgtgctaagaaccacacagc

SEQ ID NO: 4519871 - DNA, 25 bp, Homo sapien
aactgcctcaggctcaatgaccttg

SEQ ID NO: 4519872 - DNA, 25 bp, Homo sapien
ttttagtacagatccttgcacgtgc

SEQ ID NO: 4519873 - DNA, 25 bp, Homo sapien
gctgcttcctgcataccacagtatc

SEQ ID NO: 4519874 - DNA, 25 bp, Homo sapien
ttcccatcagccgtcacagcaaaga

SEQ ID NO: 4519875 - DNA, 25 bp, Homo sapien
tgggaactttgacttttgcgccttc

SEQ ID NO: 4519876 - DNA, 25 bp, Homo sapien
aactgcacgggtctgagagttgcaa

SEQ ID NO: 4519877 - DNA, 25 bp, Homo sapien
ctggcccctgtgattatgtccccat

SEQ ID NO: 4519878 - DNA, 25 bp, Homo sapien
ctgccaccagcagagagagtccagt

SEQ ID NO: 4519879 - DNA, 25 bp, Homo sapien
agcagagagagtccagtcatctggt

SEQ ID NO: 4519880 - DNA, 25 bp, Homo sapien
tgccaccagcagagagagtccagtc

SEQ ID NO: 4519881 - DNA, 25 bp, Homo sapien
agagagagtccagtcatctggtcgc

SEQ ID NO: 4519882 - DNA, 25 bp, Homo sapien
actgcacaagttgttcgtcttgctc

SEQ ID NO: 4519883 - DNA, 25 bp, Homo sapien
cactgcacaagttgttcgtcttgct

SEQ ID NO: 4519884 - DNA, 25 bp, Homo sapien
tccactgcacaagttgttcgtcttg

SEQ ID NO: 4519885 - DNA, 25 bp, Homo sapien
atccactgcacaagttgttcgtctt

SEQ ID NO: 4519886 - DNA, 25 bp, Homo sapien
gtgttcttttgtcaagggccacagc

SEQ ID NO: 4519887 - DNA, 25 bp, Homo sapien
ggtgttcttttgtcaagggccacag

SEQ ID NO: 4519888 - DNA, 25 bp, Homo sapien
aggcccacttgtgcgtctcggcaca

SEQ ID NO: 4519889 - DNA, 25 bp, Homo sapien
ccacttgtgcgtctcggcacagcaa

SEQ ID NO: 4519890 - DNA, 25 bp, Homo sapien
ccaggcccacttgtgcgtctcggca

SEQ ID NO: 4519891 - DNA, 25 bp, Homo sapien
aggcagagtgtccagctccaggtca

SEQ ID NO: 4519892 - DNA, 25 bp, Homo sapien
ctgcaggcaccaaaaatgacaaact

SEQ ID NO: 4519893 - DNA, 25 bp, Homo sapien
cacaataggatcttcatattcaaac

SEQ ID NO: 4519894 - DNA, 25 bp, Homo sapien
gagcagctgtttgccacccctcaca

SEQ ID NO: 4519895 - DNA, 25 bp, Homo sapien
aaagcagcaagagcactacctgtaa

SEQ ID NO: 4519896 - DNA, 25 bp, Homo sapien
cagcaagagcactacctgtaaaact

SEQ ID NO: 4519897 - DNA, 25 bp, Homo sapien
ctccaagcagcctatttatgttaat

SEQ ID NO: 4519898 - DNA, 25 bp, Homo sapien
ccaagcagcctatttatgttaattg

SEQ ID NO: 4519899 - DNA, 25 bp, Homo sapien
ttctccaagcagcctatttatgtta

SEQ ID NO: 4519900 - DNA, 25 bp, Homo sapien
caagcagcctatttatgttaattga

SEQ ID NO: 4519901 - DNA, 25 bp, Homo sapien
gctgccagcgaggccgcaaggcgag

SEQ ID NO: 4519902 - DNA, 25 bp, Homo sapien
aaggcgagggacgatgcttctgtta

SEQ ID NO: 4519903 - DNA, 25 bp, Homo sapien
gcaaggcgagggacgatgcttctgt

SEQ ID NO: 4519904 - DNA, 25 bp, Homo sapien
gccgcaaggcgagggacgatgcttc

SEQ ID NO: 4519905 - DNA, 25 bp, Homo sapien
cttgatcgccataagccccttcctt

SEQ ID NO: 4519906 - DNA, 25 bp, Homo sapien
tgatcgccataagccccttccttac

SEQ ID NO: 4519907 - DNA, 25 bp, Homo sapien
ttgatcgccataagccccttcctta

SEQ ID NO: 4519908 - DNA, 25 bp, Homo sapien
atgcgcagctcgctggaccagtcgg

SEQ ID NO: 4519909 - DNA, 25 bp, Homo sapien
agctcgctggaccagtcggaccact

SEQ ID NO: 4519910 - DNA, 25 bp, Homo sapien
cattcacagacccatcgctgatgaa

SEQ ID NO: 4519911 - DNA, 25 bp, Homo sapien
agccattcacagacccatcgctgat

SEQ ID NO: 4519912 - DNA, 25 bp, Homo sapien
aggtacccaggaaactgcggcaggc

SEQ ID NO: 4519913 - DNA, 25 bp, Homo sapien
ttcagcccctgtaccaggtacccag

SEQ ID NO: 4519914 - DNA, 25 bp, Homo sapien
ttcttcagcaaacacgcattcagcc

SEQ ID NO: 4519915 - DNA, 25 bp, Homo sapien
aaactgcggcaggcgggcagacact

SEQ ID NO: 4519916 - DNA, 25 bp, Homo sapien
tctggcacctcacacgtctccagca

SEQ ID NO: 4519917 - DNA, 25 bp, Homo sapien
gaggcagggcccatccgacagggat

SEQ ID NO: 4519918 - DNA, 25 bp, Homo sapien
gcccatccgacagggatgtggtaca

SEQ ID NO: 4519919 - DNA, 25 bp, Homo sapien
ctgcaactgtctgatgaggcagggc

SEQ ID NO: 4519920 - DNA, 25 bp, Homo sapien
tgttgacgccgtccatgactgtgag

SEQ ID NO: 4519921 - DNA, 25 bp, Homo sapien
aaattctaccctgagtccttctgca

SEQ ID NO: 4519922 - DNA, 25 bp, Homo sapien
gcacggagacgatcctgttgacgcc

SEQ ID NO: 4519923 - DNA, 25 bp, Homo sapien
tctgtggagcactgccggtcaaatt

SEQ ID NO: 4519924 - DNA, 25 bp, Homo sapien
tcattctgaaggtgggaaaggctgc

SEQ ID NO: 4519925 - DNA, 25 bp, Homo sapien
tccccgctggggccagcccctgtac

SEQ ID NO: 4519926 - DNA, 25 bp, Homo sapien
aaaggctgcagctccccgctggggc

SEQ ID NO: 4519927 - DNA, 25 bp, Homo sapien
cattctgaaggtgggaaaggctgca

SEQ ID NO: 4519928 - DNA, 25 bp, Homo sapien
tcctccaactcggtgacacagagct

SEQ ID NO: 4519929 - DNA, 25 bp, Homo sapien
tcgtcggtgtaagggtggctactct

SEQ ID NO: 4519930 - DNA, 25 bp, Homo sapien
tggtatcttcactgtgccactggtg

SEQ ID NO: 4519931 - DNA, 25 bp, Homo sapien
ccactggtggaggtgtcgtcggtgt

SEQ ID NO: 4519932 - DNA, 25 bp, Homo sapien
aacggccgtatccttattcttgtct

SEQ ID NO: 4519933 - DNA, 25 bp, Homo sapien
gcgcccatgtgcagagtcgatcagg

SEQ ID NO: 4519934 - DNA, 25 bp, Homo sapien
ctggcaagggcagtttgaaaacggc

SEQ ID NO: 4519935 - DNA, 25 bp, Homo sapien
agatgttggcatcatcaagcgccca

SEQ ID NO: 4519936 - DNA, 25 bp, Homo sapien
tggaggtccactcccagactctgtt

SEQ ID NO: 4519937 - DNA, 25 bp, Homo sapien
cttcctccaggtgatcgaattggct

SEQ ID NO: 4519938 - DNA, 25 bp, Homo sapien
ctggaggtccactcccagactctgt

SEQ ID NO: 4519939 - DNA, 25 bp, Homo sapien
aatcactgataccccttcctccagg

SEQ ID NO: 4519940 - DNA, 25 bp, Homo sapien
gacagcttgagcaggtctaccacca

SEQ ID NO: 4519941 - DNA, 25 bp, Homo sapien
cacgagtgtcatccgcaatcagcag

SEQ ID NO: 4519942 - DNA, 25 bp, Homo sapien
caatcagcagactggtgaactcatc

SEQ ID NO: 4519943 - DNA, 25 bp, Homo sapien
gaggctccggacctgctgctttatt

SEQ ID NO: 4519944 - DNA, 25 bp, Homo sapien
tcactgggataaaaggccgagcgga

SEQ ID NO: 4519945 - DNA, 25 bp, Homo sapien
tctgcaatgatgcttgcggctccca

SEQ ID NO: 4519946 - DNA, 25 bp, Homo sapien
caggtcatccgtcactgggataaaa

SEQ ID NO: 4519947 - DNA, 25 bp, Homo sapien
tgatgcttgcggctcccaggtcatc

SEQ ID NO: 4519948 - DNA, 25 bp, Homo sapien
ttcgatatcaacagccagcatgcat

SEQ ID NO: 4519949 - DNA, 25 bp, Homo sapien
atcatggcggccggcatcagggccc

SEQ ID NO: 4519950 - DNA, 25 bp, Homo sapien
atttggactcagtctgtcttcgata

SEQ ID NO: 4519951 - DNA, 25 bp, Homo sapien
tccattcatgggactagccatcgca

SEQ ID NO: 4519952 - DNA, 25 bp, Homo sapien
ctggcatacatgatttgcaatgctg

SEQ ID NO: 4519953 - DNA, 25 bp, Homo sapien
tttccatccaatgacaagagaatct

SEQ ID NO: 4519954 - DNA, 25 bp, Homo sapien
caagagaatcttggcaagagaaggg

SEQ ID NO: 4519955 - DNA, 25 bp, Homo sapien
gaattacttgcaccacttattttat

SEQ ID NO: 4519956 - DNA, 25 bp, Homo sapien
agccacgcgtgtgatcttctggcct

SEQ ID NO: 4519957 - DNA, 25 bp, Homo sapien
acaagccacgcgtgtgatcttctgg

SEQ ID NO: 4519958 - DNA, 25 bp, Homo sapien
cacaagccacgcgtgtgatcttctg

SEQ ID NO: 4519959 - DNA, 25 bp, Homo sapien
gacccacaagccacgcgtgtgatct

SEQ ID NO: 4519960 - DNA, 25 bp, Homo sapien
gtggtttccgcacgtgcacgtcaga

SEQ ID NO: 4519961 - DNA, 25 bp, Homo sapien
ctgtggtttccgcacgtgcacgtca

SEQ ID NO: 4519962 - DNA, 25 bp, Homo sapien
cacctgtggtttccgcacgtgcacg

SEQ ID NO: 4519963 - DNA, 25 bp, Homo sapien
caccacctgtggtttccgcacgtgc

SEQ ID NO: 4519964 - DNA, 25 bp, Homo sapien
cttggtgagcgccagggagaactga

SEQ ID NO: 4519965 - DNA, 25 bp, Homo sapien
gcgccagggagaactgagctccaca

SEQ ID NO: 4519966 - DNA, 25 bp, Homo sapien
gtgagcgccagggagaactgagctc

SEQ ID NO: 4519967 - DNA, 25 bp, Homo sapien
gttttccaaagtcaccatcacccca

SEQ ID NO: 4519968 - DNA, 25 bp, Homo sapien
ttacagccttcacttccgccccggc

SEQ ID NO: 4519969 - DNA, 25 bp, Homo sapien
cagttttccaaagtcaccatcaccc

SEQ ID NO: 4519970 - DNA, 25 bp, Homo sapien
ctggggaatgttacagccttcactt

SEQ ID NO: 4519971 - DNA, 25 bp, Homo sapien
gcaacctggattactctgtgaccga

SEQ ID NO: 4519972 - DNA, 25 bp, Homo sapien
acatgcaacctggattactctgtga

SEQ ID NO: 4519973 - DNA, 25 bp, Homo sapien
ctctgtgaccgagaaggactttcac

SEQ ID NO: 4519974 - DNA, 25 bp, Homo sapien
gattactctgtgaccgagaaggact

SEQ ID NO: 4519975 - DNA, 25 bp, Homo sapien
cagttctccgctggatgtgagggct

SEQ ID NO: 4519976 - DNA, 25 bp, Homo sapien
gaggccccaggtgtacagttctccg

SEQ ID NO: 4519977 - DNA, 25 bp, Homo sapien
gatatcccggatacgcttggttttc

SEQ ID NO: 4519978 - DNA, 25 bp, Homo sapien
tgtgcgagctcccacaggcgatatc

SEQ ID NO: 4519979 - DNA, 25 bp, Homo sapien
tccaagttttccatcgtcaccttcg

SEQ ID NO: 4519980 - DNA, 25 bp, Homo sapien
acagttaaagccgtcgcgtgccggc

SEQ ID NO: 4519981 - DNA, 25 bp, Homo sapien
aacacttttccatcgacagttaaag

SEQ ID NO: 4519982 - DNA, 25 bp, Homo sapien
tctgctgaagtgtccaagttttcca

SEQ ID NO: 4519983 - DNA, 25 bp, Homo sapien
tagctagctccctattttgcctggc

SEQ ID NO: 4519984 - DNA, 25 bp, Homo sapien
cacactcaatgagcgtgagctgaat

SEQ ID NO: 4519985 - DNA, 25 bp, Homo sapien
tcaacaggatcaacagcggagttag

SEQ ID NO: 4519986 - DNA, 25 bp, Homo sapien
tcctgggacatatgtgccaaatagg

SEQ ID NO: 4519987 - DNA, 25 bp, Homo sapien
cagccggccattcgtggcttctcca

SEQ ID NO: 4519988 - DNA, 25 bp, Homo sapien
agagctgtgatctgccgtgggatgg

SEQ ID NO: 4519989 - DNA, 25 bp, Homo sapien
gatgggcaccgtcccgctggaaatg

SEQ ID NO: 4519990 - DNA, 25 bp, Homo sapien
tcttgaccacgtagctgctgagagc

SEQ ID NO: 4519991 - DNA, 25 bp, Homo sapien
agccacctgtaccacattcaaagct

SEQ ID NO: 4519992 - DNA, 25 bp, Homo sapien
gccacctgtaccacattcaaagctg

SEQ ID NO: 4519993 - DNA, 25 bp, Homo sapien
aacttttagatccaccagccacctg

SEQ ID NO: 4519994 - DNA, 25 bp, Homo sapien
aacaaacttttagatccaccagcca

SEQ ID NO: 4519995 - DNA, 25 bp, Homo sapien
gcttgtttctctgtgctcgcaaagc

SEQ ID NO: 4519996 - DNA, 25 bp, Homo sapien
tctgtgcaagctacttcaccctgaa

SEQ ID NO: 4519997 - DNA, 25 bp, Homo sapien
ctgaagaatctcaggcgcgaagcac

SEQ ID NO: 4519998 - DNA, 25 bp, Homo sapien
tgtgctcgcaaagcgttctctctct

SEQ ID NO: 4519999 - DNA, 25 bp, Homo sapien
caaacaccttggttcttatcgtagc

SEQ ID NO: 4520000 - DNA, 25 bp, Homo sapien
tttcagcccgcccagctggtccttg

SEQ ID NO: 4520001 - DNA, 25 bp, Homo sapien
ttgtcattcaggccccacacaaaca

SEQ ID NO: 4520002 - DNA, 25 bp, Homo sapien
ttcttatcgtagctgctgattccag

SEQ ID NO: 4520003 - DNA, 25 bp, Homo sapien
ctctttcatccaatactaggcacag

SEQ ID NO: 4520004 - DNA, 25 bp, Homo sapien
ctttcatccaatactaggcacaggt

SEQ ID NO: 4520005 - DNA, 25 bp, Homo sapien
actctttcatccaatactaggcaca

SEQ ID NO: 4520006 - DNA, 25 bp, Homo sapien
tctttcatccaatactaggcacagg

SEQ ID NO: 4520007 - DNA, 25 bp, Homo sapien
aaatctgatcaatgagtaaagctca

SEQ ID NO: 4520008 - DNA, 25 bp, Homo sapien
tcagtgtgggaacatcccagttggg

SEQ ID NO: 4520009 - DNA, 25 bp, Homo sapien
gaaaccaggactgatattcaagata

SEQ ID NO: 4520010 - DNA, 25 bp, Homo sapien
taagtatcaatcagccagagtggag

SEQ ID NO: 4520011 - DNA, 25 bp, Homo sapien
tgtccaattcattttagtagctact

SEQ ID NO: 4520012 - DNA, 25 bp, Homo sapien
tctatataacgtgctcaacagcggc

SEQ ID NO: 4520013 - DNA, 25 bp, Homo sapien
tcaacagagttcagccagcactggc

SEQ ID NO: 4520014 - DNA, 25 bp, Homo sapien
tctgacttctgtacgtatggcctgg

SEQ ID NO: 4520015 - DNA, 25 bp, Homo sapien
agcacagggtgtcttggtcaacaga

SEQ ID NO: 4520016 - DNA, 25 bp, Homo sapien
tctcaaggctgtatgcacttcttcc

SEQ ID NO: 4520017 - DNA, 25 bp, Homo sapien
ttcctgcctcttaccaaaggcctaa

SEQ ID NO: 4520018 - DNA, 25 bp, Homo sapien
caaaggcctaatagcacactgatgc

SEQ ID NO: 4520019 - DNA, 25 bp, Homo sapien
aatgctccaatgcagactctcaagg

SEQ ID NO: 4520020 - DNA, 25 bp, Homo sapien
tataccatacaacttccataggaca

SEQ ID NO: 4520021 - DNA, 25 bp, Homo sapien
catatggaaattctagcgatggaca

SEQ ID NO: 4520022 - DNA, 25 bp, Homo sapien
caggactgaagactaatcatatgga

SEQ ID NO: 4520023 - DNA, 25 bp, Homo sapien
aaatactgcactcaaaaattacagg

SEQ ID NO: 4520024 - DNA, 25 bp, Homo sapien
tcctcctcttcattatccgaagcta

SEQ ID NO: 4520025 - DNA, 25 bp, Homo sapien
ttctgcacggatccgtcccagcagg

SEQ ID NO: 4520026 - DNA, 25 bp, Homo sapien
gcacggatccgtcccagcaggatga

SEQ ID NO: 4520027 - DNA, 25 bp, Homo sapien
ttcattatccgaagctaagaaagga

SEQ ID NO: 4520028 - DNA, 25 bp, Homo sapien
gcaacttcagcgtcacatatatggt

SEQ ID NO: 4520029 - DNA, 25 bp, Homo sapien
gatgccaacaggtgtgacgacaaaa

SEQ ID NO: 4520030 - DNA, 25 bp, Homo sapien
ggaaaaactgggctcaatgctagta

SEQ ID NO: 4520031 - DNA, 25 bp, Homo sapien
gctaggagcagttaccaagtatacc

SEQ ID NO: 4520032 - DNA, 25 bp, Homo sapien
tgcagtcattcagaaggggcactgt

SEQ ID NO: 4520033 - DNA, 25 bp, Homo sapien
tagttcaataaggttattcagggaa

SEQ ID NO: 4520034 - DNA, 25 bp, Homo sapien
tgtgcagtcattcagaaggggcact

SEQ ID NO: 4520035 - DNA, 25 bp, Homo sapien
ggcactgtggtgtcagaagggttaa

SEQ ID NO: 4520036 - DNA, 25 bp, Homo sapien
aacaaaggcgtctttattatagaag

SEQ ID NO: 4520037 - DNA, 25 bp, Homo sapien
tcaaacaaaggcgtctttattatag

SEQ ID NO: 4520038 - DNA, 25 bp, Homo sapien
aagaatcaaacaaaggcgtctttat

SEQ ID NO: 4520039 - DNA, 25 bp, Homo sapien
caaaggcgtctttattatagaaggt

SEQ ID NO: 4520040 - DNA, 25 bp, Homo sapien
gtcagcaggatctacgatcattttt

SEQ ID NO: 4520041 - DNA, 25 bp, Homo sapien
aaccagggacggcatgtagctactg

SEQ ID NO: 4520042 - DNA, 25 bp, Homo sapien
ccagggacggcatgtagctactgtc

SEQ ID NO: 4520043 - DNA, 25 bp, Homo sapien
tactgtcagcaggatctacgatcat

SEQ ID NO: 4520044 - DNA, 25 bp, Homo sapien
tgggaaaatctccaaacgaatccag

SEQ ID NO: 4520045 - DNA, 25 bp, Homo sapien
ctgggaaaatctccaaacgaatcca

SEQ ID NO: 4520046 - DNA, 25 bp, Homo sapien
ggaaaatctccaaacgaatccagtg

SEQ ID NO: 4520047 - DNA, 25 bp, Homo sapien
cataacgtgagtactgacaggtgct

SEQ ID NO: 4520048 - DNA, 25 bp, Homo sapien
tgtacaaggcaaaaccatcggtgtg

SEQ ID NO: 4520049 - DNA, 25 bp, Homo sapien
gaaaggccctgtcctaaagtctgac

SEQ ID NO: 4520050 - DNA, 25 bp, Homo sapien
gtatctatatactcctggcctaggg

SEQ ID NO: 4520051 - DNA, 25 bp, Homo sapien
tcacggaggacgacacattcaggct

SEQ ID NO: 4520052 - DNA, 25 bp, Homo sapien
cattcaggctcttcaccatgcggga

SEQ ID NO: 4520053 - DNA, 25 bp, Homo sapien
gcagggctcgctgccgtcaatgaga

SEQ ID NO: 4520054 - DNA, 25 bp, Homo sapien
tcaatgagacgggatgcctggttca

SEQ ID NO: 4520055 - DNA, 25 bp, Homo sapien
ctatttcgtgatagtcaaaaagaga

SEQ ID NO: 4520056 - DNA, 25 bp, Homo sapien
gatcaagaatattacatagtaagga

SEQ ID NO: 4520057 - DNA, 25 bp, Homo sapien
aacatcatgatcaagaatattacat

SEQ ID NO: 4520058 - DNA, 25 bp, Homo sapien
catcatgatcaagaatattacatag

SEQ ID NO: 4520059 - DNA, 25 bp, Homo sapien
catgatcaagaatattacatagtaa

SEQ ID NO: 4520060 - DNA, 25 bp, Homo sapien
gcatcaccaggttccaagcaaagtc

SEQ ID NO: 4520061 - DNA, 25 bp, Homo sapien
tagcattttgacagcctcgtgaagg

SEQ ID NO: 4520062 - DNA, 25 bp, Homo sapien
tctgcaggacagaggttaggcctaa

SEQ ID NO: 4520063 - DNA, 25 bp, Homo sapien
taaggtaagcccagatagtcactaa

SEQ ID NO: 4520064 - DNA, 25 bp, Homo sapien
caaagttagattcaaggttaccagg

SEQ ID NO: 4520065 - DNA, 25 bp, Homo sapien
tatggtttcacctagatgagatgtc

SEQ ID NO: 4520066 - DNA, 25 bp, Homo sapien
tgtttgagcatatgacccacttagc

SEQ ID NO: 4520067 - DNA, 25 bp, Homo sapien
aaaggatgacgttctgacacatgct

SEQ ID NO: 4520068 - DNA, 25 bp, Homo sapien
ttttggtcttgaaacacgtttcaca

SEQ ID NO: 4520069 - DNA, 25 bp, Homo sapien
aatctggatccattgataggaaaca

SEQ ID NO: 4520070 - DNA, 25 bp, Homo sapien
aaatgtatgcctggtattgtgtttt

SEQ ID NO: 4520071 - DNA, 25 bp, Homo sapien
tgcctggtattgtgttttttggtct

SEQ ID NO: 4520072 - DNA, 25 bp, Homo sapien
caaagcaaatctagcaaccataaaa

SEQ ID NO: 4520073 - DNA, 25 bp, Homo sapien
aatagcaactgagttaagaaaggtc

SEQ ID NO: 4520074 - DNA, 25 bp, Homo sapien
tagcaactgagttaagaaaggtcat

SEQ ID NO: 4520075 - DNA, 25 bp, Homo sapien
aaccattcgtcccaaagcaaatcta

SEQ ID NO: 4520076 - DNA, 25 bp, Homo sapien
accaactccatttctgatagcaacc

SEQ ID NO: 4520077 - DNA, 25 bp, Homo sapien
tgaacttaaaactgcacctagccat

SEQ ID NO: 4520078 - DNA, 25 bp, Homo sapien
acctagccatgtcatactacattgt

SEQ ID NO: 4520079 - DNA, 25 bp, Homo sapien
gcacctagccatgtcatactacatt

SEQ ID NO: 4520080 - DNA, 25 bp, Homo sapien
tgcacctagccatgtcatactacat

SEQ ID NO: 4520081 - DNA, 25 bp, Homo sapien
tgacagaggctttgacccgcacttt

SEQ ID NO: 4520082 - DNA, 25 bp, Homo sapien
ttcacaacccccacactctgatgag

SEQ ID NO: 4520083 - DNA, 25 bp, Homo sapien
cagaggctttgacccgcactttatc

SEQ ID NO: 4520084 - DNA, 25 bp, Homo sapien
aacccccacactctgatgagtcaca

SEQ ID NO: 4520085 - DNA, 25 bp, Homo sapien
gcacacttcttcatacgctcggcag

SEQ ID NO: 4520086 - DNA, 25 bp, Homo sapien
acacttcttcatacgctcggcagca

SEQ ID NO: 4520087 - DNA, 25 bp, Homo sapien
tcttcatacgctcggcagcatctaa

SEQ ID NO: 4520088 - DNA, 25 bp, Homo sapien
ttcgcacacttcttcatacgctcgg

SEQ ID NO: 4520089 - DNA, 25 bp, Homo sapien
ctcaagaaatcagctcgttttttgt

SEQ ID NO: 4520090 - DNA, 25 bp, Homo sapien
tcctcgtcagaatactcgtcggaca

SEQ ID NO: 4520091 - DNA, 25 bp, Homo sapien
tctgagagctccgtgacctgtatgt

SEQ ID NO: 4520092 - DNA, 25 bp, Homo sapien
gaatactcgtcggacaccgtgtctg

SEQ ID NO: 4520093 - DNA, 25 bp, Homo sapien
acctgtatgtcggagtggtccagca

SEQ ID NO: 4520094 - DNA, 25 bp, Homo sapien
tcttcactctggcagggcggatgtg

SEQ ID NO: 4520095 - DNA, 25 bp, Homo sapien
caaatcctgggctcgaagggtgagt

SEQ ID NO: 4520096 - DNA, 25 bp, Homo sapien
gacttcagggcaaactcgatgttcc

SEQ ID NO: 4520097 - DNA, 25 bp, Homo sapien
ctgcaccacgatcggcagagcggga

SEQ ID NO: 4520098 - DNA, 25 bp, Homo sapien
cagtatgcaagtctagaaagcccgc

SEQ ID NO: 4520099 - DNA, 25 bp, Homo sapien
ccccggtgctcaggaagtatcaaag

SEQ ID NO: 4520100 - DNA, 25 bp, Homo sapien
aagcctagggttttgcagcgaagtc

SEQ ID NO: 4520101 - DNA, 25 bp, Homo sapien
gcttacacagtctaggaacacaggg

SEQ ID NO: 4520102 - DNA, 25 bp, Homo sapien
gagtcctgacgagcctctttgaata

SEQ ID NO: 4520103 - DNA, 25 bp, Homo sapien
cctgacgagcctctttgaataattc

SEQ ID NO: 4520104 - DNA, 25 bp, Homo sapien
tgccagagtcctgacgagcctcttt

SEQ ID NO: 4520105 - DNA, 25 bp, Homo sapien
tggagagagcggagaggctggcggc

SEQ ID NO: 4520106 - DNA, 25 bp, Homo sapien
ttcacaggagacggctgggtggccg

SEQ ID NO: 4520107 - DNA, 25 bp, Homo sapien
tgctgcaagaggatcatggggggct

SEQ ID NO: 4520108 - DNA, 25 bp, Homo sapien
cagctgctgcaagaggatcatgggg

SEQ ID NO: 4520109 - DNA, 25 bp, Homo sapien
caggagacggctgggtggccgaggc

SEQ ID NO: 4520110 - DNA, 25 bp, Homo sapien
aaggtcaggtgataccactgctcca

SEQ ID NO: 4520111 - DNA, 25 bp, Homo sapien
ggtcaggtgataccactgctccatc

SEQ ID NO: 4520112 - DNA, 25 bp, Homo sapien
caaggtcaggtgataccactgctcc

SEQ ID NO: 4520113 - DNA, 25 bp, Homo sapien
aggtcaggtgataccactgctccat

SEQ ID NO: 4520114 - DNA, 25 bp, Homo sapien
agccttcaaaggctgcccgtccagt

SEQ ID NO: 4520115 - DNA, 25 bp, Homo sapien
cagccttcaaaggctgcccgtccag

SEQ ID NO: 4520116 - DNA, 25 bp, Homo sapien
gtgtgaacagttccagtctcctgaa

SEQ ID NO: 4520117 - DNA, 25 bp, Homo sapien
tgtgaacagttccagtctcctgaac

SEQ ID NO: 4520118 - DNA, 25 bp, Homo sapien
ctgtgtgaacagttccagtctcctg

SEQ ID NO: 4520119 - DNA, 25 bp, Homo sapien
tgtgtgaacagttccagtctcctga

SEQ ID NO: 4520120 - DNA, 25 bp, Homo sapien
gctggctgagacaggatctgccgca

SEQ ID NO: 4520121 - DNA, 25 bp, Homo sapien
aggatgtatagcttcaactgctggc

SEQ ID NO: 4520122 - DNA, 25 bp, Homo sapien
cagcgcccgacctgctttcaggatg

SEQ ID NO: 4520123 - DNA, 25 bp, Homo sapien
tgctttcaggatgtatagcttcaac

SEQ ID NO: 4520124 - DNA, 25 bp, Homo sapien
tgcaaaggcctgtttagtcgatttc

SEQ ID NO: 4520125 - DNA, 25 bp, Homo sapien
ttccagcgaggttcaccaactgagc

SEQ ID NO: 4520126 - DNA, 25 bp, Homo sapien
gttcacattaaaggccacggcaggg

SEQ ID NO: 4520127 - DNA, 25 bp, Homo sapien
tgagcccagacagacagcatgggct

SEQ ID NO: 4520128 - DNA, 25 bp, Homo sapien
tgcataacttgaccgcccaggcgca

SEQ ID NO: 4520129 - DNA, 25 bp, Homo sapien
cgtgcataacttgaccgcccaggcg

SEQ ID NO: 4520130 - DNA, 25 bp, Homo sapien
caaactcatcgtgcataacttgacc

SEQ ID NO: 4520131 - DNA, 25 bp, Homo sapien
actcatcgtgcataacttgaccgcc

SEQ ID NO: 4520132 - DNA, 25 bp, Homo sapien
gatgtacttgttgatgagcccattc

SEQ ID NO: 4520133 - DNA, 25 bp, Homo sapien
ttgatgtacttgttgatgagcccat

SEQ ID NO: 4520134 - DNA, 25 bp, Homo sapien
agcggagctgggagttgatgtactt

SEQ ID NO: 4520135 - DNA, 25 bp, Homo sapien
gtacttgttgatgagcccattccac

SEQ ID NO: 4520136 - DNA, 25 bp, Homo sapien
agggaagggagacggccacgcacct

SEQ ID NO: 4520137 - DNA, 25 bp, Homo sapien
taagtgacggcactgcgccgctctt

SEQ ID NO: 4520138 - DNA, 25 bp, Homo sapien
tgcacctctgagtgacggcactgcg

SEQ ID NO: 4520139 - DNA, 25 bp, Homo sapien
agggaagggagacggccatgcacct

SEQ ID NO: 4520140 - DNA, 25 bp, Homo sapien
gcttgcaacaaatgcacagctaaga

SEQ ID NO: 4520141 - DNA, 25 bp, Homo sapien
cttgcaacaaatgcacagctaagat

SEQ ID NO: 4520142 - DNA, 25 bp, Homo sapien
accagctccggtgttgctccctgta

SEQ ID NO: 4520143 - DNA, 25 bp, Homo sapien
accttcatgagcagcgtgatccact

SEQ ID NO: 4520144 - DNA, 25 bp, Homo sapien
agctccggtgttgctccctgtacac

SEQ ID NO: 4520145 - DNA, 25 bp, Homo sapien
ccttcatgagcagcgtgatccactg

SEQ ID NO: 4520146 - DNA, 25 bp, Homo sapien
tatgtgtagtaaaagtagttaggga

SEQ ID NO: 4520147 - DNA, 25 bp, Homo sapien
ttcaaataacagtactttgcaacag

SEQ ID NO: 4520148 - DNA, 25 bp, Homo sapien
ctttgcaacagtgcatctattatat

SEQ ID NO: 4520149 - DNA, 25 bp, Homo sapien
tttagctatgcattgtttctaggca

SEQ ID NO: 4520150 - DNA, 25 bp, Homo sapien
cagacaaagagtctgcagtaagtta

SEQ ID NO: 4520151 - DNA, 25 bp, Homo sapien
gcagcagtccgcataaagtcttggt

SEQ ID NO: 4520152 - DNA, 25 bp, Homo sapien
ttaatagtgctggtaaacatcattg

SEQ ID NO: 4520153 - DNA, 25 bp, Homo sapien
cagtccgcataaagtcttggtggct

SEQ ID NO: 4520154 - DNA, 25 bp, Homo sapien
tgtgtcccactggactcttatccat

SEQ ID NO: 4520155 - DNA, 25 bp, Homo sapien
ggctgtgcagcagccggcagctctg

SEQ ID NO: 4520156 - DNA, 25 bp, Homo sapien
aatcacgcggcctaggcctggagga

SEQ ID NO: 4520157 - DNA, 25 bp, Homo sapien
gagtcatcctctgtgtccgaatcct

SEQ ID NO: 4520158 - DNA, 25 bp, Homo sapien
catatcttcctcaacgttgtcacaa

SEQ ID NO: 4520159 - DNA, 25 bp, Homo sapien
agggagctgcacaggagccgtttcc

SEQ ID NO: 4520160 - DNA, 25 bp, Homo sapien
gcagccagttctggtcctgaaacag

SEQ ID NO: 4520161 - DNA, 25 bp, Homo sapien
catcatggcagccagttctggtcct

SEQ ID NO: 4520162 - DNA, 25 bp, Homo sapien
cccaggctcggtcctgacgggttct

SEQ ID NO: 4520163 - DNA, 25 bp, Homo sapien
aaggtcgaggttgtttgcgccgtgc

SEQ ID NO: 4520164 - DNA, 25 bp, Homo sapien
ccgtctgcgtgagggccagcatgcc

SEQ ID NO: 4520165 - DNA, 25 bp, Homo sapien
cgggttctcattggtgatggtttgc

SEQ ID NO: 4520166 - DNA, 25 bp, Homo sapien
tacagcttgccaaaggtgacttcca

SEQ ID NO: 4520167 - DNA, 25 bp, Homo sapien
cttccagcagcatccgattaaaagg

SEQ ID NO: 4520168 - DNA, 25 bp, Homo sapien
tctgttacagaacaacattttgttg

SEQ ID NO: 4520169 - DNA, 25 bp, Homo sapien
ccagacttctgttacagaacaacat

SEQ ID NO: 4520170 - DNA, 25 bp, Homo sapien
gaacaacattttgttgccatagcta

SEQ ID NO: 4520171 - DNA, 25 bp, Homo sapien
acttctgttacagaacaacattttg

SEQ ID NO: 4520172 - DNA, 25 bp, Homo sapien
ttcttgctcgccagttttaaaattg

SEQ ID NO: 4520173 - DNA, 25 bp, Homo sapien
attcttgctcgccagttttaaaatt

SEQ ID NO: 4520174 - DNA, 25 bp, Homo sapien
caaattcagcaattgtactgaggag

SEQ ID NO: 4520175 - DNA, 25 bp, Homo sapien
gaggagtggagactgcggataaaga

SEQ ID NO: 4520176 - DNA, 25 bp, Homo sapien
gggcaaattcagcaattgtactgag

SEQ ID NO: 4520177 - DNA, 25 bp, Homo sapien
ttaagggcaaattcagcaattgtac

SEQ ID NO: 4520178 - DNA, 25 bp, Homo sapien
tgggtctcttgtccacatttattgg

SEQ ID NO: 4520179 - DNA, 25 bp, Homo sapien
tgtccacatttattggactatgagg

SEQ ID NO: 4520180 - DNA, 25 bp, Homo sapien
cacatttattggactatgaggcaaa

SEQ ID NO: 4520181 - DNA, 25 bp, Homo sapien
taattgcaatgggtctcttgtccac

SEQ ID NO: 4520182 - DNA, 25 bp, Homo sapien
ttcgttctcgaattatcttttgagc

SEQ ID NO: 4520183 - DNA, 25 bp, Homo sapien
ctctctttttccttcgttctcgaat

SEQ ID NO: 4520184 - DNA, 25 bp, Homo sapien
caaacgttcgatgacaggagcgcag

SEQ ID NO: 4520185 - DNA, 25 bp, Homo sapien
tccttcgttctcgaattatcttttg

SEQ ID NO: 4520186 - DNA, 25 bp, Homo sapien
taacaacaaatatttcagcaactgt

SEQ ID NO: 4520187 - DNA, 25 bp, Homo sapien
tgcaaagttaaccaggaaaagacaa

SEQ ID NO: 4520188 - DNA, 25 bp, Homo sapien
ctgcaaagttaaccaggaaaagaca

SEQ ID NO: 4520189 - DNA, 25 bp, Homo sapien
gacaactttaacaacaaatatttca

SEQ ID NO: 4520190 - DNA, 25 bp, Homo sapien
acattttgcttggtagacaactcta

SEQ ID NO: 4520191 - DNA, 25 bp, Homo sapien
tgacttaggcaacgttctgtgcttt

SEQ ID NO: 4520192 - DNA, 25 bp, Homo sapien
cactgacttaggcaacgttctgtgc

SEQ ID NO: 4520193 - DNA, 25 bp, Homo sapien
tgcatgaactaaagataatgccaca

SEQ ID NO: 4520194 - DNA, 25 bp, Homo sapien
catgttttaagaggcaacataacaa

SEQ ID NO: 4520195 - DNA, 25 bp, Homo sapien
gaggcaacataacaacaagcgaccg

SEQ ID NO: 4520196 - DNA, 25 bp, Homo sapien
ttaagaggcaacataacaacaagcg

SEQ ID NO: 4520197 - DNA, 25 bp, Homo sapien
ggcaacataacaacaagcgaccgac

SEQ ID NO: 4520198 - DNA, 25 bp, Homo sapien
gggaaacatgatcggtgtggtcaaa

SEQ ID NO: 4520199 - DNA, 25 bp, Homo sapien
tgcctacagtacctttctatttgac

SEQ ID NO: 4520200 - DNA, 25 bp, Homo sapien
tcggtgtggtcaaatggcactgcct

SEQ ID NO: 4520201 - DNA, 25 bp, Homo sapien
aatggcactgcctacagtacctttc

SEQ ID NO: 4520202 - DNA, 25 bp, Homo sapien
ccgtctgtgggagcagagtcgagat

SEQ ID NO: 4520203 - DNA, 25 bp, Homo sapien
gcagagtcgagatttgctggcaggt

SEQ ID NO: 4520204 - DNA, 25 bp, Homo sapien
agggcccgtctgtgggagcagagtc

SEQ ID NO: 4520205 - DNA, 25 bp, Homo sapien
agcagagtcgagatttgctggcagg

SEQ ID NO: 4520206 - DNA, 25 bp, Homo sapien
tccttgccaatttaaacaaagccca

SEQ ID NO: 4520207 - DNA, 25 bp, Homo sapien
agcccatcttctggcaagcaatgag

SEQ ID NO: 4520208 - DNA, 25 bp, Homo sapien
agggcccatggcaccctctgccctg

SEQ ID NO: 4520209 - DNA, 25 bp, Homo sapien
ctgccctggaactcgccagccctgc

SEQ ID NO: 4520210 - DNA, 25 bp, Homo sapien
tggcacattcaatctcgacaggaga

SEQ ID NO: 4520211 - DNA, 25 bp, Homo sapien
caggagacagcggtgtgctcattgc

SEQ ID NO: 4520212 - DNA, 25 bp, Homo sapien
tctcgacaggagacagcggtgtgct

SEQ ID NO: 4520213 - DNA, 25 bp, Homo sapien
tcctctctgtgtctatcagaggtga

SEQ ID NO: 4520214 - DNA, 25 bp, Homo sapien
attcccgggtgtcttcaaactgcaa

SEQ ID NO: 4520215 - DNA, 25 bp, Homo sapien
cgggtgtcttcaaactgcaaagcag

SEQ ID NO: 4520216 - DNA, 25 bp, Homo sapien
tcccgggtgtcttcaaactgcaaag

SEQ ID NO: 4520217 - DNA, 25 bp, Homo sapien
cccgggtgtcttcaaactgcaaagc

SEQ ID NO: 4520218 - DNA, 25 bp, Homo sapien
ctgttaacgactgtgtctggaagtc

SEQ ID NO: 4520219 - DNA, 25 bp, Homo sapien
ccaggtgctagggaaaattggtgtt

SEQ ID NO: 4520220 - DNA, 25 bp, Homo sapien
tgaaaagctctagagatgagtggcg

SEQ ID NO: 4520221 - DNA, 25 bp, Homo sapien
gggaaaattggtgtttaatagatgc

SEQ ID NO: 4520222 - DNA, 25 bp, Homo sapien
tagatgcatagtttcagttgagaaa

SEQ ID NO: 4520223 - DNA, 25 bp, Homo sapien
ctaacgggttgcatgggacctatct

SEQ ID NO: 4520224 - DNA, 25 bp, Homo sapien
tatcaataacaataagttgcagggc

SEQ ID NO: 4520225 - DNA, 25 bp, Homo sapien
caaactaacgttctctggtggatag

SEQ ID NO: 4520226 - DNA, 25 bp, Homo sapien
catcagccagtgtttccctcgacaa

SEQ ID NO: 4520227 - DNA, 25 bp, Homo sapien
ttcctggtgccagatggttgaaccg

SEQ ID NO: 4520228 - DNA, 25 bp, Homo sapien
tgatcatcccgttcctttcctggtg

SEQ ID NO: 4520229 - DNA, 25 bp, Homo sapien
gccaggccaggctaactcttcatga

SEQ ID NO: 4520230 - DNA, 25 bp, Homo sapien
ggttgaaccgatccagatgttccaa

SEQ ID NO: 4520231 - DNA, 25 bp, Homo sapien
ggcttaacaacagaactgtcagtaa

SEQ ID NO: 4520232 - DNA, 25 bp, Homo sapien
tccaatgtgcgtgcacaggagggct

SEQ ID NO: 4520233 - DNA, 25 bp, Homo sapien
ggtagaagcaatgctggcggccaca

SEQ ID NO: 4520234 - DNA, 25 bp, Homo sapien
gcggccacaggcagtatatctccaa

SEQ ID NO: 4520235 - DNA, 25 bp, Homo sapien
taaagtccccttccacaatgtaagc

SEQ ID NO: 4520236 - DNA, 25 bp, Homo sapien
tccagacatgatgaaatccgacggg

SEQ ID NO: 4520237 - DNA, 25 bp, Homo sapien
taataagcaaacgttgaaaacgcag

SEQ ID NO: 4520238 - DNA, 25 bp, Homo sapien
cctggataaagtttactaataagca

SEQ ID NO: 4520239 - DNA, 25 bp, Homo sapien
ggtctgaccaatactttctcctgga

SEQ ID NO: 4520240 - DNA, 25 bp, Homo sapien
tgtcccatacaggaccccacgtgcc

SEQ ID NO: 4520241 - DNA, 25 bp, Homo sapien
cccacgtgccacaggaaccaaaaag

SEQ ID NO: 4520242 - DNA, 25 bp, Homo sapien
aaatctgctgtagaaccaatgtccc

SEQ ID NO: 4520243 - DNA, 25 bp, Homo sapien
gtgccacaggaaccaaaaagtcaca

SEQ ID NO: 4520244 - DNA, 25 bp, Homo sapien
tgttgtatgagctgaaccagaggca

SEQ ID NO: 4520245 - DNA, 25 bp, Homo sapien
agaagctgttgtatgagctgaacca

SEQ ID NO: 4520246 - DNA, 25 bp, Homo sapien
ccagaggcaaacactgtttgccaga

SEQ ID NO: 4520247 - DNA, 25 bp, Homo sapien
tgtatgagctgaaccagaggcaaac

SEQ ID NO: 4520248 - DNA, 25 bp, Homo sapien
tccttctgtgcttcttttttggctt

SEQ ID NO: 4520249 - DNA, 25 bp, Homo sapien
tgttgaggcattcgcttcctgttca

SEQ ID NO: 4520250 - DNA, 25 bp, Homo sapien
ggcattcgcttcctgttcatcaatt

SEQ ID NO: 4520251 - DNA, 25 bp, Homo sapien
tctttatccagtggagtcctgcttc

SEQ ID NO: 4520252 - DNA, 25 bp, Homo sapien
aagatcaatcatgaatcgacgacct

SEQ ID NO: 4520253 - DNA, 25 bp, Homo sapien
atgaatcgacgacctggacttatgt

SEQ ID NO: 4520254 - DNA, 25 bp, Homo sapien
caatcatgaatcgacgacctggact

SEQ ID NO: 4520255 - DNA, 25 bp, Homo sapien
gatcaatcatgaatcgacgacctgg

SEQ ID NO: 4520256 - DNA, 25 bp, Homo sapien
cctggtgactaatggcagcatgcaa

SEQ ID NO: 4520257 - DNA, 25 bp, Homo sapien
aggaggaagaagaagggaaatcatg

SEQ ID NO: 4520258 - DNA, 25 bp, Homo sapien
gaagaagaagggaaatcatgaatac

SEQ ID NO: 4520259 - DNA, 25 bp, Homo sapien
ggaagaagaagggaaatcatgaata

SEQ ID NO: 4520260 - DNA, 25 bp, Homo sapien
gaggaagaagaagggaaatcatgaa

SEQ ID NO: 4520261 - DNA, 25 bp, Homo sapien
tcgtagaagattcagcgttgccacg

SEQ ID NO: 4520262 - DNA, 25 bp, Homo sapien
aagattcagcgttgccacggccaca

SEQ ID NO: 4520263 - DNA, 25 bp, Homo sapien
aagtcgtagaagattcagcgttgcc

SEQ ID NO: 4520264 - DNA, 25 bp, Homo sapien
agtccgcggaaccatccatcccctc

SEQ ID NO: 4520265 - DNA, 25 bp, Homo sapien
ggaggccaatggaccactcagaaca

SEQ ID NO: 4520266 - DNA, 25 bp, Homo sapien
ctggcttggtcacgcgcaaggtgtc

SEQ ID NO: 4520267 - DNA, 25 bp, Homo sapien
aggcccacaggcaattcccactatg

SEQ ID NO: 4520268 - DNA, 25 bp, Homo sapien
cgcaaggtgtcaaagtgctggcact

SEQ ID NO: 4520269 - DNA, 25 bp, Homo sapien
ctcgctgtcctcagtcagagccagg

SEQ ID NO: 4520270 - DNA, 25 bp, Homo sapien
ggccatctttcgtcaaagcaatgga

SEQ ID NO: 4520271 - DNA, 25 bp, Homo sapien
tggaaaactgacttccacagcggac

SEQ ID NO: 4520272 - DNA, 25 bp, Homo sapien
gagttttggataacgaacatgttcc

SEQ ID NO: 4520273 - DNA, 25 bp, Homo sapien
tccccatgaataaacttggccatct

SEQ ID NO: 4520274 - DNA, 25 bp, Homo sapien
tttaagcccggctaccagcatcgga

SEQ ID NO: 4520275 - DNA, 25 bp, Homo sapien
acacgccacatcgatgaccttcagt

SEQ ID NO: 4520276 - DNA, 25 bp, Homo sapien
agccagggtttgagcatccccactc

SEQ ID NO: 4520277 - DNA, 25 bp, Homo sapien
cagcatcggaatggcctcgtcctca

SEQ ID NO: 4520278 - DNA, 25 bp, Homo sapien
cctgctgcatgctcccactcatgca

SEQ ID NO: 4520279 - DNA, 25 bp, Homo sapien
tcctgctgcatgctcccactcatgc

SEQ ID NO: 4520280 - DNA, 25 bp, Homo sapien
gcggagatcaccttaggctcctcca

SEQ ID NO: 4520281 - DNA, 25 bp, Homo sapien
cctcggcagtgatggccgcactgta

SEQ ID NO: 4520282 - DNA, 25 bp, Homo sapien
taagtgctcccgcaagcgatgtgca

SEQ ID NO: 4520283 - DNA, 25 bp, Homo sapien
caagcgatgtgcaccacgtgcttcc

SEQ ID NO: 4520284 - DNA, 25 bp, Homo sapien
cagtttgggatcttcccagcggatg

SEQ ID NO: 4520285 - DNA, 25 bp, Homo sapien
agcggatgctgtcggcaatgatgcc

SEQ ID NO: 4520286 - DNA, 25 bp, Homo sapien
gctgttctgagcttggcatacatgt

SEQ ID NO: 4520287 - DNA, 25 bp, Homo sapien
taccacacgatacgcattactctgc

SEQ ID NO: 4520288 - DNA, 25 bp, Homo sapien
acagtgtccccatggcccagccgtc

SEQ ID NO: 4520289 - DNA, 25 bp, Homo sapien
gtgtccccatggcccagccgtccgc

SEQ ID NO: 4520290 - DNA, 25 bp, Homo sapien
ccccatggcccagccgtccgccgtc

SEQ ID NO: 4520291 - DNA, 25 bp, Homo sapien
catggcccagccgtccgccgtcccc

SEQ ID NO: 4520292 - DNA, 25 bp, Homo sapien
cagccaaggctaggtagtggtgacc

SEQ ID NO: 4520293 - DNA, 25 bp, Homo sapien
tagtggtgaccatcagaatgggcag

SEQ ID NO: 4520294 - DNA, 25 bp, Homo sapien
tgaccatcagaatgggcagcaattt

SEQ ID NO: 4520295 - DNA, 25 bp, Homo sapien
aggcaaggccttggaccagctgtgg

SEQ ID NO: 4520296 - DNA, 25 bp, Homo sapien
caggaaacgcttctctgcacaggca

SEQ ID NO: 4520297 - DNA, 25 bp, Homo sapien
caggccttcgcactggattggacca

SEQ ID NO: 4520298 - DNA, 25 bp, Homo sapien
cggccattgcgtgacagaatcagga

SEQ ID NO: 4520299 - DNA, 25 bp, Homo sapien
tattataggcctgtgtgtacacgcg

SEQ ID NO: 4520300 - DNA, 25 bp, Homo sapien
catacagggcgtagccagacggtct

SEQ ID NO: 4520301 - DNA, 25 bp, Homo sapien
agctacacagcggaggcatacaggg

SEQ ID NO: 4520302 - DNA, 25 bp, Homo sapien
gcatacagggcgtagccagacggtc

SEQ ID NO: 4520303 - DNA, 25 bp, Homo sapien
acacagcggaggcatacagggcgta

SEQ ID NO: 4520304 - DNA, 25 bp, Homo sapien
ccctcggagtggggtgcatccttcc

SEQ ID NO: 4520305 - DNA, 25 bp, Homo sapien
ggagtggggtgcatccttcctgcaa

SEQ ID NO: 4520306 - DNA, 25 bp, Homo sapien
tcggagtggggtgcatccttcctgc

SEQ ID NO: 4520307 - DNA, 25 bp, Homo sapien
cctcggagtggggtgcatccttcct

SEQ ID NO: 4520308 - DNA, 25 bp, Homo sapien
cctgcagggggatgcttcctggccc

SEQ ID NO: 4520309 - DNA, 25 bp, Homo sapien
ctgcagggggatgcttcctggccct

SEQ ID NO: 4520310 - DNA, 25 bp, Homo sapien
tcactgcagaggtccgcatcctcgc

SEQ ID NO: 4520311 - DNA, 25 bp, Homo sapien
ctgaggaacctggtcgctctctcca

SEQ ID NO: 4520312 - DNA, 25 bp, Homo sapien
gacacggtgctctcgtcaaagagcg

SEQ ID NO: 4520313 - DNA, 25 bp, Homo sapien
tcgtcaaagagcgaggcctcgggaa

SEQ ID NO: 4520314 - DNA, 25 bp, Homo sapien
ccgagttcgaaacccagtctgttga

SEQ ID NO: 4520315 - DNA, 25 bp, Homo sapien
gcacagagagcacatgggatcagcc

SEQ ID NO: 4520316 - DNA, 25 bp, Homo sapien
cacatggtggctgaaccgagttcga

SEQ ID NO: 4520317 - DNA, 25 bp, Homo sapien
gtattagggaagcagaacaacgcgc

SEQ ID NO: 4520318 - DNA, 25 bp, Homo sapien
ccaggccctgcgcaggaaggcaaag

SEQ ID NO: 4520319 - DNA, 25 bp, Homo sapien
aagacagcgccgctcgggatcccac

SEQ ID NO: 4520320 - DNA, 25 bp, Homo sapien
cacacctttgcccgcaggccgggaa

SEQ ID NO: 4520321 - DNA, 25 bp, Homo sapien
tctggcgagcccctccacacctttg

SEQ ID NO: 4520322 - DNA, 25 bp, Homo sapien
tgcagacgacacacacggaacatac

SEQ ID NO: 4520323 - DNA, 25 bp, Homo sapien
gcagagggtgcagatactacataaa

SEQ ID NO: 4520324 - DNA, 25 bp, Homo sapien
ggtgtgtaccaaaatccgaccaatg

SEQ ID NO: 4520325 - DNA, 25 bp, Homo sapien
caagtgacaggatcacaagtggatt

SEQ ID NO: 4520326 - DNA, 25 bp, Homo sapien
ctacatgagcaaattggcaaatcca

SEQ ID NO: 4520327 - DNA, 25 bp, Homo sapien
cacagcatggtctattactacatga

SEQ ID NO: 4520328 - DNA, 25 bp, Homo sapien
gaaggtgaagacagcctatattgaa

SEQ ID NO: 4520329 - DNA, 25 bp, Homo sapien
tgaagacagcctatattgaaaacct

SEQ ID NO: 4520330 - DNA, 25 bp, Homo sapien
tgaaatagcgctccaagatcaccag

SEQ ID NO: 4520331 - DNA, 25 bp, Homo sapien
cctctgcttgagtcgcagggctgag

SEQ ID NO: 4520332 - DNA, 25 bp, Homo sapien
tttaaccagcacagaaagacactcc

SEQ ID NO: 4520333 - DNA, 25 bp, Homo sapien
gaggcagagaaataccgctgctttt

SEQ ID NO: 4520334 - DNA, 25 bp, Homo sapien
aacagaggttgccagggtgaataaa

SEQ ID NO: 4520335 - DNA, 25 bp, Homo sapien
ggttgccagggtgaataaagaagca

SEQ ID NO: 4520336 - DNA, 25 bp, Homo sapien
agacctaattatatgatacctgaaa

SEQ ID NO: 4520337 - DNA, 25 bp, Homo sapien
cctaattatatgatacctgaaagaa

SEQ ID NO: 4520338 - DNA, 25 bp, Homo sapien
agcatgagagatttcaatcctcctc

SEQ ID NO: 4520339 - DNA, 25 bp, Homo sapien
tcctgggaaataaagccagtcgctg

SEQ ID NO: 4520340 - DNA, 25 bp, Homo sapien
tggagctgatctccccagaacgctg

SEQ ID NO: 4520341 - DNA, 25 bp, Homo sapien
gtgcatgcaccttataacattctca

SEQ ID NO: 4520342 - DNA, 25 bp, Homo sapien
ttgcttgccccatacccagctgtcc

SEQ ID NO: 4520343 - DNA, 25 bp, Homo sapien
ttgccccatacccagctgtccagaa

SEQ ID NO: 4520344 - DNA, 25 bp, Homo sapien
gcttgccccatacccagctgtccag

SEQ ID NO: 4520345 - DNA, 25 bp, Homo sapien
ggttgcttgccccatacccagctgt

SEQ ID NO: 4520346 - DNA, 25 bp, Homo sapien
aggtcaggagatcgagaccatcctg

SEQ ID NO: 4520347 - DNA, 25 bp, Homo sapien
tggctaacacggtgaaaccccatct

SEQ ID NO: 4520348 - DNA, 25 bp, Homo sapien
ctaacacggtgaaaccccatctcta

SEQ ID NO: 4520349 - DNA, 25 bp, Homo sapien
gggaagccatggcgggtggatcaca

SEQ ID NO: 4520350 - DNA, 25 bp, Homo sapien
tccgttctgggttgattctgttcca

SEQ ID NO: 4520351 - DNA, 25 bp, Homo sapien
ttgattctgttccagtgtatacaat

SEQ ID NO: 4520352 - DNA, 25 bp, Homo sapien
ccagtgtatacaatttctccatctt

SEQ ID NO: 4520353 - DNA, 25 bp, Homo sapien
tctgttccagtgtatacaatttctc

SEQ ID NO: 4520354 - DNA, 25 bp, Homo sapien
acagagcccatctcttgtgaatgca

SEQ ID NO: 4520355 - DNA, 25 bp, Homo sapien
agagcccatctcttgtgaatgcaag

SEQ ID NO: 4520356 - DNA, 25 bp, Homo sapien
gaccacagagcccatctcttgtgaa

SEQ ID NO: 4520357 - DNA, 25 bp, Homo sapien
acagaccacagagcccatctcttgt

SEQ ID NO: 4520358 - DNA, 25 bp, Homo sapien
cataaaaaagcgaaacctacaactg

SEQ ID NO: 4520359 - DNA, 25 bp, Homo sapien
cctacaactggcaacaagcaaatta

SEQ ID NO: 4520360 - DNA, 25 bp, Homo sapien
tacaagaaaaatgacacgtggtcgg

SEQ ID NO: 4520361 - DNA, 25 bp, Homo sapien
aatactatgctacctcttatgtaac

SEQ ID NO: 4520362 - DNA, 25 bp, Homo sapien
tttgaatatatttgcttactctgtt

SEQ ID NO: 4520363 - DNA, 25 bp, Homo sapien
agaatcaaaggcaatctgacagcgg

SEQ ID NO: 4520364 - DNA, 25 bp, Homo sapien
tcaaaggcaatctgacagcggcacc

SEQ ID NO: 4520365 - DNA, 25 bp, Homo sapien
caacttaaattggaaatctatgaac

SEQ ID NO: 4520366 - DNA, 25 bp, Homo sapien
aaaaaaaagcagctgttcaaagact

SEQ ID NO: 4520367 - DNA, 25 bp, Homo sapien
agagcaagactttacctcaaacaaa

SEQ ID NO: 4520368 - DNA, 25 bp, Homo sapien
gcagctgttcaaagactgataggga

SEQ ID NO: 4520369 - DNA, 25 bp, Homo sapien
aagcagctgttcaaagactgatagg

SEQ ID NO: 4520370 - DNA, 25 bp, Homo sapien
gataactgccataaacatacttgga

SEQ ID NO: 4520371 - DNA, 25 bp, Homo sapien
tgtagcgacagaaaccaagccagca

SEQ ID NO: 4520372 - DNA, 25 bp, Homo sapien
tccaaaaagtgagccctagccaggt

SEQ ID NO: 4520373 - DNA, 25 bp, Homo sapien
tggtaacttgttctgtagcgacaga

SEQ ID NO: 4520374 - DNA, 25 bp, Homo sapien
gcagatgtcagctcggaacaatggg

SEQ ID NO: 4520375 - DNA, 25 bp, Homo sapien
gaagttattgttacccagagcctcg

SEQ ID NO: 4520376 - DNA, 25 bp, Homo sapien
ggagatcaatgaagcaacggtatgc

SEQ ID NO: 4520377 - DNA, 25 bp, Homo sapien
agaatcatatgtcagccaagcacgg

SEQ ID NO: 4520378 - DNA, 25 bp, Homo sapien
ttagcgccattttcttggaaacctc

SEQ ID NO: 4520379 - DNA, 25 bp, Homo sapien
ttttcttggaaacctctgcgccatg

SEQ ID NO: 4520380 - DNA, 25 bp, Homo sapien
cttggaaacctctgcgccatgagag

SEQ ID NO: 4520381 - DNA, 25 bp, Homo sapien
aagcgaatgcgcaggctgaagcgca

SEQ ID NO: 4520382 - DNA, 25 bp, Homo sapien
cggccacgcaacacagctctaaaca

SEQ ID NO: 4520383 - DNA, 25 bp, Homo sapien
acacagctctaaacactggactctc

SEQ ID NO: 4520384 - DNA, 25 bp, Homo sapien
ggactctcatatctaccaacactca

SEQ ID NO: 4520385 - DNA, 25 bp, Homo sapien
cactggactctcatatctaccaaca

SEQ ID NO: 4520386 - DNA, 25 bp, Homo sapien
ttttcaaccatttggagtcgaggcg

SEQ ID NO: 4520387 - DNA, 25 bp, Homo sapien
tcaaccatttggagtcgaggcgagc

SEQ ID NO: 4520388 - DNA, 25 bp, Homo sapien
accatttggagtcgaggcgagcctg

SEQ ID NO: 4520389 - DNA, 25 bp, Homo sapien
ctgttttcaaccatttggagtcgag

SEQ ID NO: 4520390 - DNA, 25 bp, Homo sapien
ttctccagcttcctcccaggtctca

SEQ ID NO: 4520391 - DNA, 25 bp, Homo sapien
cttttctccagcttcctcccaggtc

SEQ ID NO: 4520392 - DNA, 25 bp, Homo sapien
tccagcttcctcccaggtctcaggc

SEQ ID NO: 4520393 - DNA, 25 bp, Homo sapien
ttttctccagcttcctcccaggtct

SEQ ID NO: 4520394 - DNA, 25 bp, Homo sapien
cgctgaagacctaacgctttttaat

SEQ ID NO: 4520395 - DNA, 25 bp, Homo sapien
catacgctgaagacctaacgctttt

SEQ ID NO: 4520396 - DNA, 25 bp, Homo sapien
aaacacatacgctgaagacctaacg

SEQ ID NO: 4520397 - DNA, 25 bp, Homo sapien
cacatacgctgaagacctaacgctt

SEQ ID NO: 4520398 - DNA, 25 bp, Homo sapien
cgcgcggacgcagcctcccaagagc

SEQ ID NO: 4520399 - DNA, 25 bp, Homo sapien
ggcgcgcggacgcagcctcccaaga

SEQ ID NO: 4520400 - DNA, 25 bp, Homo sapien
cctcgcctcgccggcgcgcggacgc

SEQ ID NO: 4520401 - DNA, 25 bp, Homo sapien
cggacgcagcctcccaagagccgct

SEQ ID NO: 4520402 - DNA, 25 bp, Homo sapien
tgggtaagcctggtcaaagcggctc

SEQ ID NO: 4520403 - DNA, 25 bp, Homo sapien
gatggaaattttgagagagcaggca

SEQ ID NO: 4520404 - DNA, 25 bp, Homo sapien
tatcttcaaaggaggtgggttccat

SEQ ID NO: 4520405 - DNA, 25 bp, Homo sapien
gagtgcgggacagcatgaaagcaca

SEQ ID NO: 4520406 - DNA, 25 bp, Homo sapien
gacccaggtaatggtctcgctgctg

SEQ ID NO: 4520407 - DNA, 25 bp, Homo sapien
ggtgacccaggtaatggtctcgctg

SEQ ID NO: 4520408 - DNA, 25 bp, Homo sapien
tgacccaggtaatggtctcgctgct

SEQ ID NO: 4520409 - DNA, 25 bp, Homo sapien
caggtgacccaggtaatggtctcgc

SEQ ID NO: 4520410 - DNA, 25 bp, Homo sapien
ctgctctcgtatcttctcctcctgc

SEQ ID NO: 4520411 - DNA, 25 bp, Homo sapien
ctgttcttgcatcttctcttcctgc

SEQ ID NO: 4520412 - DNA, 25 bp, Homo sapien
tgctcccacatcttctcttcctgtt

SEQ ID NO: 4520413 - DNA, 25 bp, Homo sapien
gcctcacttcctgctcccgcatctt

SEQ ID NO: 4520414 - DNA, 25 bp, Homo sapien
ggcggttccacaactcgttctcttc

SEQ ID NO: 4520415 - DNA, 25 bp, Homo sapien
tggttcaggcggttccacaactcgt

SEQ ID NO: 4520416 - DNA, 25 bp, Homo sapien
tgttgctggttcaggcggttccaca

SEQ ID NO: 4520417 - DNA, 25 bp, Homo sapien
ctgttgctggttcaggcggttccac

SEQ ID NO: 4520418 - DNA, 25 bp, Homo sapien
cagattctacaagttgaagtttttc

SEQ ID NO: 4520419 - DNA, 25 bp, Homo sapien
tagctcctttacgttgagctggatc

SEQ ID NO: 4520420 - DNA, 25 bp, Homo sapien
ttttagctcctttacgttgagctgg

SEQ ID NO: 4520421 - DNA, 25 bp, Homo sapien
aggagcttggccctctccagtttcc

SEQ ID NO: 4520422 - DNA, 25 bp, Homo sapien
gtgttcctgtacagttccagactca

SEQ ID NO: 4520423 - DNA, 25 bp, Homo sapien
cctctcctttgttaactcctcaatg

SEQ ID NO: 4520424 - DNA, 25 bp, Homo sapien
acagttccagactcagggcgtccct

SEQ ID NO: 4520425 - DNA, 25 bp, Homo sapien
tctcctttgttaactcctcaatgta

SEQ ID NO: 4520426 - DNA, 25 bp, Homo sapien
ctgcaaacttccatgaatcatgcag

SEQ ID NO: 4520427 - DNA, 25 bp, Homo sapien
tagtaaagtgccatctgaagctcag

SEQ ID NO: 4520428 - DNA, 25 bp, Homo sapien
tgctggctgtagtaaagtgccatct

SEQ ID NO: 4520429 - DNA, 25 bp, Homo sapien
gcatgctggctgtagtaaagtgcca

SEQ ID NO: 4520430 - DNA, 25 bp, Homo sapien
tggctgtagtaaagtgccatctgaa

SEQ ID NO: 4520431 - DNA, 25 bp, Homo sapien
tccctccttagggcttcctgatgtt

SEQ ID NO: 4520432 - DNA, 25 bp, Homo sapien
gatgttggtggcttgccttctgttc

SEQ ID NO: 4520433 - DNA, 25 bp, Homo sapien
ctccttagggcttcctgatgttggt

SEQ ID NO: 4520434 - DNA, 25 bp, Homo sapien
tctagctccctccttagggcttcct

SEQ ID NO: 4520435 - DNA, 25 bp, Homo sapien
tctttttggtgtcgcttgctgctgt

SEQ ID NO: 4520436 - DNA, 25 bp, Homo sapien
ttgctgctgtaccaacactagggtt

SEQ ID NO: 4520437 - DNA, 25 bp, Homo sapien
cactagggttggtctggggatgatg

SEQ ID NO: 4520438 - DNA, 25 bp, Homo sapien
ttctttttggtgtcgcttgctgctg

SEQ ID NO: 4520439 - DNA, 25 bp, Homo sapien
ctgttccttggcctcggccaatttg

SEQ ID NO: 4520440 - DNA, 25 bp, Homo sapien
tgctctgtctggtttctttggacat

SEQ ID NO: 4520441 - DNA, 25 bp, Homo sapien
tgttccttggcctcggccaatttgc

SEQ ID NO: 4520442 - DNA, 25 bp, Homo sapien
atttgctctgtctggtttctttgga

SEQ ID NO: 4520443 - DNA, 25 bp, Homo sapien
cataggatgggtagggaggtgggga

SEQ ID NO: 4520444 - DNA, 25 bp, Homo sapien
ggtggggttggggccacatcagcat

SEQ ID NO: 4520445 - DNA, 25 bp, Homo sapien
gggaggtggggttggggccacatca

SEQ ID NO: 4520446 - DNA, 25 bp, Homo sapien
ggaggtggggttggggccacatcag

SEQ ID NO: 4520447 - DNA, 25 bp, Homo sapien
atcctctgtttaatgataccttcca

SEQ ID NO: 4520448 - DNA, 25 bp, Homo sapien
tctcttatcctctgtttaatgatac

SEQ ID NO: 4520449 - DNA, 25 bp, Homo sapien
tgataccttccagttgaaaggtgtt

SEQ ID NO: 4520450 - DNA, 25 bp, Homo sapien
tcttatcctctgtttaatgatacct

SEQ ID NO: 4520451 - DNA, 25 bp, Homo sapien
atacaatcttccatacgcagaagac

SEQ ID NO: 4520452 - DNA, 25 bp, Homo sapien
aagtgtgacaaaacattaactagtg

SEQ ID NO: 4520453 - DNA, 25 bp, Homo sapien
caatcttccatacgcagaagacaga

SEQ ID NO: 4520454 - DNA, 25 bp, Homo sapien
cttccatacgcagaagacagaaaac

SEQ ID NO: 4520455 - DNA, 25 bp, Homo sapien
cggacagcatggtcaaagtgcaggc

SEQ ID NO: 4520456 - DNA, 25 bp, Homo sapien
ccaggaggctcttctctggtctctt

SEQ ID NO: 4520457 - DNA, 25 bp, Homo sapien
tggtcaaagtgcaggctctcctcca

SEQ ID NO: 4520458 - DNA, 25 bp, Homo sapien
ccatccggacagcatggtcaaagtg

SEQ ID NO: 4520459 - DNA, 25 bp, Homo sapien
gcagccaaggcttttttctaacaac

SEQ ID NO: 4520460 - DNA, 25 bp, Homo sapien
cagccaaggcttttttctaacaact

SEQ ID NO: 4520461 - DNA, 25 bp, Homo sapien
taacaactctttttctaaagatgta

SEQ ID NO: 4520462 - DNA, 25 bp, Homo sapien
tctaacaactctttttctaaagatg

SEQ ID NO: 4520463 - DNA, 25 bp, Homo sapien
gccatcagcctctgtttctgaacca

SEQ ID NO: 4520464 - DNA, 25 bp, Homo sapien
cctctaaatcttctaggtcctcctg

SEQ ID NO: 4520465 - DNA, 25 bp, Homo sapien
catttcaggattgtcaccacccata

SEQ ID NO: 4520466 - DNA, 25 bp, Homo sapien
gaaccagcctcttcatgctcctgtt

SEQ ID NO: 4520467 - DNA, 25 bp, Homo sapien
ctgggagaagactgatatcttcatc

SEQ ID NO: 4520468 - DNA, 25 bp, Homo sapien
ggagaagactgatatcttcatcttt

SEQ ID NO: 4520469 - DNA, 25 bp, Homo sapien
tgggagaagactgatatcttcatct

SEQ ID NO: 4520470 - DNA, 25 bp, Homo sapien
gggagaagactgatatcttcatctt

SEQ ID NO: 4520471 - DNA, 25 bp, Homo sapien
agagctgccatggattctaccattc

SEQ ID NO: 4520472 - DNA, 25 bp, Homo sapien
attctggaagcactgtaaaattgct

SEQ ID NO: 4520473 - DNA, 25 bp, Homo sapien
gtaaagagctgccatggattctacc

SEQ ID NO: 4520474 - DNA, 25 bp, Homo sapien
ctttggttccaatccatcttgaaac

SEQ ID NO: 4520475 - DNA, 25 bp, Homo sapien
gtgtccacgtgcgaccgcagtcgca

SEQ ID NO: 4520476 - DNA, 25 bp, Homo sapien
acccgtgtccacgtgcgaccgcagt

SEQ ID NO: 4520477 - DNA, 25 bp, Homo sapien
ccgtgtccacgtgcgaccgcagtcg

SEQ ID NO: 4520478 - DNA, 25 bp, Homo sapien
tgcaacccgtgtccacgtgcgaccg

SEQ ID NO: 4520479 - DNA, 25 bp, Homo sapien
actcgggccagccagtggctttgcc

SEQ ID NO: 4520480 - DNA, 25 bp, Homo sapien
tgaggatgcactcgggccagccagt

SEQ ID NO: 4520481 - DNA, 25 bp, Homo sapien
gtgaggatgcactcgggccagccag

SEQ ID NO: 4520482 - DNA, 25 bp, Homo sapien
tgcactcgggccagccagtggcttt

SEQ ID NO: 4520483 - DNA, 25 bp, Homo sapien
ctccctcagacaccgctccggggtc

SEQ ID NO: 4520484 - DNA, 25 bp, Homo sapien
cggggtccgtcagcgccaggcccat

SEQ ID NO: 4520485 - DNA, 25 bp, Homo sapien
gacaccgctccggggtccgtcagcg

SEQ ID NO: 4520486 - DNA, 25 bp, Homo sapien
ccgctccggggtccgtcagcgccag

SEQ ID NO: 4520487 - DNA, 25 bp, Homo sapien
gttactgtcctgtcaagagattcca

SEQ ID NO: 4520488 - DNA, 25 bp, Homo sapien
tgtttgctcgcgacatgactgctcg

SEQ ID NO: 4520489 - DNA, 25 bp, Homo sapien
ccagttcgagttcccactgggtctg

SEQ ID NO: 4520490 - DNA, 25 bp, Homo sapien
tacttggcccgtacgtgctcagtaa

SEQ ID NO: 4520491 - DNA, 25 bp, Homo sapien
caggctaaccattccttctggttaa

SEQ ID NO: 4520492 - DNA, 25 bp, Homo sapien
gctaaccattccttctggttaatat

SEQ ID NO: 4520493 - DNA, 25 bp, Homo sapien
ggctaaccattccttctggttaata

SEQ ID NO: 4520494 - DNA, 25 bp, Homo sapien
tcaggctaaccattccttctggtta

SEQ ID NO: 4520495 - DNA, 25 bp, Homo sapien
tgtatactgccaaatccctaacgga

SEQ ID NO: 4520496 - DNA, 25 bp, Homo sapien
gttgatgtatactgccaaatcccta

SEQ ID NO: 4520497 - DNA, 25 bp, Homo sapien
tgttgttgatgtatactgccaaatc

SEQ ID NO: 4520498 - DNA, 25 bp, Homo sapien
tgccaaatccctaacggatactgga

SEQ ID NO: 4520499 - DNA, 25 bp, Homo sapien
cctccgcaaacccttctgaattgag

SEQ ID NO: 4520500 - DNA, 25 bp, Homo sapien
cttggcaacagaggggagtcatgca

SEQ ID NO: 4520501 - DNA, 25 bp, Homo sapien
ctgaattgagaatgggaaccttggc

SEQ ID NO: 4520502 - DNA, 25 bp, Homo sapien
gcttggtccttaaggaatatctcag

SEQ ID NO: 4520503 - DNA, 25 bp, Homo sapien
ctcacagttactttctggcagtttc

SEQ ID NO: 4520504 - DNA, 25 bp, Homo sapien
gctggatgtctttgtgcccggcgcc

SEQ ID NO: 4520505 - DNA, 25 bp, Homo sapien
ccaggtactggctgtagagctggat

SEQ ID NO: 4520506 - DNA, 25 bp, Homo sapien
ggatgtctttgtgcccggcgccctc

SEQ ID NO: 4520507 - DNA, 25 bp, Homo sapien
tgtagagctggatgtctttgtgccc

SEQ ID NO: 4520508 - DNA, 25 bp, Homo sapien
gtctttcgtgccgtggataatgagc

SEQ ID NO: 4520509 - DNA, 25 bp, Homo sapien
ctcgtctttcgtgccgtggataatg

SEQ ID NO: 4520510 - DNA, 25 bp, Homo sapien
cgtgatcttggacaccttctggatt

SEQ ID NO: 4520511 - DNA, 25 bp, Homo sapien
tctttcgtgccgtggataatgagca

SEQ ID NO: 4520512 - DNA, 25 bp, Homo sapien
gggaaggcgtcgaagcagtaggtcg

SEQ ID NO: 4520513 - DNA, 25 bp, Homo sapien
ggaaggcgtcgaagcagtaggtcgt

SEQ ID NO: 4520514 - DNA, 25 bp, Homo sapien
tggggaaggcgtcgaagcagtaggt

SEQ ID NO: 4520515 - DNA, 25 bp, Homo sapien
ttggggaaggcgtcgaagcagtagg

SEQ ID NO: 4520516 - DNA, 25 bp, Homo sapien
ctcaggtccaaggtgagcggcgagt

SEQ ID NO: 4520517 - DNA, 25 bp, Homo sapien
ctggtccagcaccagtaccaaggcc

SEQ ID NO: 4520518 - DNA, 25 bp, Homo sapien
gtcggcgtagaggttcgtctcggag

SEQ ID NO: 4520519 - DNA, 25 bp, Homo sapien
cgtagaggttcgtctcggagggcct

SEQ ID NO: 4520520 - DNA, 25 bp, Homo sapien
gtagaggttcgtctcggagggcctg

SEQ ID NO: 4520521 - DNA, 25 bp, Homo sapien
ggcgtagaggttcgtctcggagggc

SEQ ID NO: 4520522 - DNA, 25 bp, Homo sapien
tccacgcgttgccttccttgttcat

SEQ ID NO: 4520523 - DNA, 25 bp, Homo sapien
ggtccacgcgttgccttccttgttc

SEQ ID NO: 4520524 - DNA, 25 bp, Homo sapien
aggtccacgcgttgccttccttgtt

SEQ ID NO: 4520525 - DNA, 25 bp, Homo sapien
gtccacgcgttgccttccttgttca

SEQ ID NO: 4520526 - DNA, 25 bp, Homo sapien
cttggtccttaaggaatatctcaga

SEQ ID NO: 4520527 - DNA, 25 bp, Homo sapien
tagcttggtccttaaggaatatctc

SEQ ID NO: 4520528 - DNA, 25 bp, Homo sapien
gcttggtccttaaggaatatctcag

SEQ ID NO: 4520529 - DNA, 25 bp, Homo sapien
ttggtccttaaggaatatctcagaa

SEQ ID NO: 4520530 - DNA, 25 bp, Homo sapien
cttggcaacagaggggagtcatgca

SEQ ID NO: 4520531 - DNA, 25 bp, Homo sapien
ctgaattgagaatgggaaccttggc

SEQ ID NO: 4520532 - DNA, 25 bp, Homo sapien
aattgagaatgggaaccttggcaac

SEQ ID NO: 4520533 - DNA, 25 bp, Homo sapien
tgagaatgggaaccttggcaacaga

SEQ ID NO: 4520534 - DNA, 25 bp, Homo sapien
ctcacagttactttctggcagtttc

SEQ ID NO: 4520535 - DNA, 25 bp, Homo sapien
cagctgaattgcgtctgaccagcgg

SEQ ID NO: 4520536 - DNA, 25 bp, Homo sapien
tgcgtctgaccagcggtgcatgaac

SEQ ID NO: 4520537 - DNA, 25 bp, Homo sapien
gaattgcgtctgaccagcggtgcat

SEQ ID NO: 4520538 - DNA, 25 bp, Homo sapien
ctacatcagctgaattgcgtctgac

SEQ ID NO: 4520539 - DNA, 25 bp, Homo sapien
agggcgaccccgggggcagctcagc

SEQ ID NO: 4520540 - DNA, 25 bp, Homo sapien
caggtgagggcgaccccgggggcag

SEQ ID NO: 4520541 - DNA, 25 bp, Homo sapien
gtgagggcgaccccgggggcagctc

SEQ ID NO: 4520542 - DNA, 25 bp, Homo sapien
ctgcgcaccaggtgagggcgacccc

SEQ ID NO: 4520543 - DNA, 25 bp, Homo sapien
tgggcacaccggagaggggaccagg

SEQ ID NO: 4520544 - DNA, 25 bp, Homo sapien
cacaccggagaggggaccaggccgg

SEQ ID NO: 4520545 - DNA, 25 bp, Homo sapien
ctgggcacaccggagaggggaccag

SEQ ID NO: 4520546 - DNA, 25 bp, Homo sapien
ggcacaccggagaggggaccaggcc

SEQ ID NO: 4520547 - DNA, 25 bp, Homo sapien
gagggggaggccagatcgcgctcag

SEQ ID NO: 4520548 - DNA, 25 bp, Homo sapien
agatcgcgctcagggcctccactga

SEQ ID NO: 4520549 - DNA, 25 bp, Homo sapien
gggaggccagatcgcgctcagggcc

SEQ ID NO: 4520550 - DNA, 25 bp, Homo sapien
ggccagatcgcgctcagggcctcca

SEQ ID NO: 4520551 - DNA, 25 bp, Homo sapien
agagttctggggttgcggcatcgac

SEQ ID NO: 4520552 - DNA, 25 bp, Homo sapien
ttgcggcatcgacagggtggcaggt

SEQ ID NO: 4520553 - DNA, 25 bp, Homo sapien
gaggagagttctggggttgcggcat

SEQ ID NO: 4520554 - DNA, 25 bp, Homo sapien
gggttgcggcatcgacagggtggca

SEQ ID NO: 4520555 - DNA, 25 bp, Homo sapien
tgaggtggccgaggacttgtccact

SEQ ID NO: 4520556 - DNA, 25 bp, Homo sapien
gccgaggacttgtccactcccaagg

SEQ ID NO: 4520557 - DNA, 25 bp, Homo sapien
aggtggccgaggacttgtccactcc

SEQ ID NO: 4520558 - DNA, 25 bp, Homo sapien
tggccgaggacttgtccactcccaa

SEQ ID NO: 4520559 - DNA, 25 bp, Homo sapien
ctggtgggaggaggtgctgcccccg

SEQ ID NO: 4520560 - DNA, 25 bp, Homo sapien
tgggaggaggtgctgcccccgcagc

SEQ ID NO: 4520561 - DNA, 25 bp, Homo sapien
ggaggaggtgctgcccccgcagccg

SEQ ID NO: 4520562 - DNA, 25 bp, Homo sapien
gaggtgctgcccccgcagccgccac

SEQ ID NO: 4520563 - DNA, 25 bp, Homo sapien
ctcgatgttgacctgggttgggctg

SEQ ID NO: 4520564 - DNA, 25 bp, Homo sapien
cgatgttgacctgggttgggctggc

SEQ ID NO: 4520565 - DNA, 25 bp, Homo sapien
cctcgatgttgacctgggttgggct

SEQ ID NO: 4520566 - DNA, 25 bp, Homo sapien
atgttgacctgggttgggctggcac

SEQ ID NO: 4520567 - DNA, 25 bp, Homo sapien
ccagtgcaccaggaacggctttcta

SEQ ID NO: 4520568 - DNA, 25 bp, Homo sapien
ggccagtgcaccaggaacggctttc

SEQ ID NO: 4520569 - DNA, 25 bp, Homo sapien
cagtgcaccaggaacggctttctaa

SEQ ID NO: 4520570 - DNA, 25 bp, Homo sapien
agtgcaccaggaacggctttctaac

SEQ ID NO: 4520571 - DNA, 25 bp, Homo sapien
ccttggacctgagcgtcgccttccc

SEQ ID NO: 4520572 - DNA, 25 bp, Homo sapien
ttggacctgagcgtcgccttcccga

SEQ ID NO: 4520573 - DNA, 25 bp, Homo sapien
accttggacctgagcgtcgccttcc

SEQ ID NO: 4520574 - DNA, 25 bp, Homo sapien
tcaccttggacctgagcgtcgcctt

SEQ ID NO: 4520575 - DNA, 25 bp, Homo sapien
tgctcattatccacggcacgaaaga

SEQ ID NO: 4520576 - DNA, 25 bp, Homo sapien
ccctcccgcagaatccagaaggtgt

SEQ ID NO: 4520577 - DNA, 25 bp, Homo sapien
attatccacggcacgaaagacgagg

SEQ ID NO: 4520578 - DNA, 25 bp, Homo sapien
cgcagaatccagaaggtgtccaaga

SEQ ID NO: 4520579 - DNA, 25 bp, Homo sapien
ccgcaccggcctcccgggggctgca

SEQ ID NO: 4520580 - DNA, 25 bp, Homo sapien
cgcaccggcctcccgggggctgcat

SEQ ID NO: 4520581 - DNA, 25 bp, Homo sapien
tatcaataatctgatttatcacagg

SEQ ID NO: 4520582 - DNA, 25 bp, Homo sapien
ttatcaataatctgatttatcacag

SEQ ID NO: 4520583 - DNA, 25 bp, Homo sapien
tgccttcaacaagaaatgcacctag

SEQ ID NO: 4520584 - DNA, 25 bp, Homo sapien
cataagactgtaaacggccgtaaca

SEQ ID NO: 4520585 - DNA, 25 bp, Homo sapien
ggtcactgaatctagcactgccttc

SEQ ID NO: 4520586 - DNA, 25 bp, Homo sapien
tagagcaggaatatagtacttggca

SEQ ID NO: 4520587 - DNA, 25 bp, Homo sapien
aaagctgcccgcatgatggtatttt

SEQ ID NO: 4520588 - DNA, 25 bp, Homo sapien
aactacatgatgttaaattccctgc

SEQ ID NO: 4520589 - DNA, 25 bp, Homo sapien
tgtaacctttgagaacttagaagag

SEQ ID NO: 4520590 - DNA, 25 bp, Homo sapien
gatcttttcttacaggatgcttagt

SEQ ID NO: 4520591 - DNA, 25 bp, Homo sapien
ttcattagttttctgtatatcccat

SEQ ID NO: 4520592 - DNA, 25 bp, Homo sapien
gcaaccatattagcattcttaatgg

SEQ ID NO: 4520593 - DNA, 25 bp, Homo sapien
caagaacagcaaccatattagcatt

SEQ ID NO: 4520594 - DNA, 25 bp, Homo sapien
ctgtatatcccatttggttttgaaa

SEQ ID NO: 4520595 - DNA, 25 bp, Homo sapien
ttcatctaggagaagaattttggga

SEQ ID NO: 4520596 - DNA, 25 bp, Homo sapien
cttcatctaggagaagaattttggg

SEQ ID NO: 4520597 - DNA, 25 bp, Homo sapien
aattccggatcaagaccactgcatt

SEQ ID NO: 4520598 - DNA, 25 bp, Homo sapien
tccggatcaagaccactgcattggc

SEQ ID NO: 4520599 - DNA, 25 bp, Homo sapien
gggaaattccggatcaagaccactg

SEQ ID NO: 4520600 - DNA, 25 bp, Homo sapien
cggatcaagaccactgcattggcca

SEQ ID NO: 4520601 - DNA, 25 bp, Homo sapien
catcagcaccataagcaatgttctc

SEQ ID NO: 4520602 - DNA, 25 bp, Homo sapien
atcagcaccataagcaatgttctca

SEQ ID NO: 4520603 - DNA, 25 bp, Homo sapien
gctgacggatgtcatggccatcaag

SEQ ID NO: 4520604 - DNA, 25 bp, Homo sapien
tagctgacggatgtcatggccatca

SEQ ID NO: 4520605 - DNA, 25 bp, Homo sapien
gacggatgtcatggccatcaagact

SEQ ID NO: 4520606 - DNA, 25 bp, Homo sapien
gtttagctgacggatgtcatggcca

SEQ ID NO: 4520607 - DNA, 25 bp, Homo sapien
aagcgggatcggcaaaatgcacgtt

SEQ ID NO: 4520608 - DNA, 25 bp, Homo sapien
caagcgggatcggcaaaatgcacgt

SEQ ID NO: 4520609 - DNA, 25 bp, Homo sapien
ggcaagcgggatcggcaaaatgcac

SEQ ID NO: 4520610 - DNA, 25 bp, Homo sapien
gggcaagcgggatcggcaaaatgca

SEQ ID NO: 4520611 - DNA, 25 bp, Homo sapien
gaagcttttctcatttaagataacc

SEQ ID NO: 4520612 - DNA, 25 bp, Homo sapien
ggaagcttttctcatttaagataac

SEQ ID NO: 4520613 - DNA, 25 bp, Homo sapien
ctggaagcttttctcatttaagata

SEQ ID NO: 4520614 - DNA, 25 bp, Homo sapien
agcttttctcatttaagataaccct

SEQ ID NO: 4520615 - DNA, 25 bp, Homo sapien
ggcagattgggctctctctccagga

SEQ ID NO: 4520616 - DNA, 25 bp, Homo sapien
aaaaggcagattgggctctctctcc

SEQ ID NO: 4520617 - DNA, 25 bp, Homo sapien
aggcagattgggctctctctccagg

SEQ ID NO: 4520618 - DNA, 25 bp, Homo sapien
cttaaaaggcagattgggctctctc

SEQ ID NO: 4520619 - DNA, 25 bp, Homo sapien
tagaaagagctcagacctccaatgc

SEQ ID NO: 4520620 - DNA, 25 bp, Homo sapien
tgcttattccaaccccgaaagcata

SEQ ID NO: 4520621 - DNA, 25 bp, Homo sapien
gagctcagacctccaatgcttattc

SEQ ID NO: 4520622 - DNA, 25 bp, Homo sapien
catcagctccgagtagaaagagctc

SEQ ID NO: 4520623 - DNA, 25 bp, Homo sapien
caatcaggtttccggacagcctagt

SEQ ID NO: 4520624 - DNA, 25 bp, Homo sapien
ttgctgactacatcacatggtccac

SEQ ID NO: 4520625 - DNA, 25 bp, Homo sapien
tgactacatcacatggtccactttg

SEQ ID NO: 4520626 - DNA, 25 bp, Homo sapien
ttccggacagcctagttctccaaag

SEQ ID NO: 4520627 - DNA, 25 bp, Homo sapien
ctttggtcagtttccgtagatatcg

SEQ ID NO: 4520628 - DNA, 25 bp, Homo sapien
cccgattaggtgagacacaaaacat

SEQ ID NO: 4520629 - DNA, 25 bp, Homo sapien
ggttaatcaattcccctgtgccagc

SEQ ID NO: 4520630 - DNA, 25 bp, Homo sapien
acgaatggcattggcggcagcacca

SEQ ID NO: 4520631 - DNA, 25 bp, Homo sapien
tgaagtttgcatgaggtagacacga

SEQ ID NO: 4520632 - DNA, 25 bp, Homo sapien
tgaggtagacacgaatggcattggc

SEQ ID NO: 4520633 - DNA, 25 bp, Homo sapien
cagaggcgggtcaggttgtcgctgt

SEQ ID NO: 4520634 - DNA, 25 bp, Homo sapien
tccccagaaagaaaggggcagacat

SEQ ID NO: 4520635 - DNA, 25 bp, Homo sapien
ttccccagaaagaaaggggcagaca

SEQ ID NO: 4520636 - DNA, 25 bp, Homo sapien
gaaatccaaccgcagctgccagcct

SEQ ID NO: 4520637 - DNA, 25 bp, Homo sapien
ggagaaatccaaccgcagctgccag

SEQ ID NO: 4520638 - DNA, 25 bp, Homo sapien
cggagaaatccaaccgcagctgcca

SEQ ID NO: 4520639 - DNA, 25 bp, Homo sapien
gagaaatccaaccgcagctgccagc

SEQ ID NO: 4520640 - DNA, 25 bp, Homo sapien
gtccgggcgccatgggtcgtagccg

SEQ ID NO: 4520641 - DNA, 25 bp, Homo sapien
ggcgccatgggtcgtagccgctggt

SEQ ID NO: 4520642 - DNA, 25 bp, Homo sapien
ccatgggtcgtagccgctggtcgtc

SEQ ID NO: 4520643 - DNA, 25 bp, Homo sapien
tcccggcctccgagagtccgggcgc

SEQ ID NO: 4520644 - DNA, 25 bp, Homo sapien
cggctccaacgccccagagcagctc

SEQ ID NO: 4520645 - DNA, 25 bp, Homo sapien
agctgccgggcccaagcccacagcc

SEQ ID NO: 4520646 - DNA, 25 bp, Homo sapien
gcgtggccccccgagccgcccagac

SEQ ID NO: 4520647 - DNA, 25 bp, Homo sapien
ccacagccccgggagccgtccgagg

SEQ ID NO: 4520648 - DNA, 25 bp, Homo sapien
cttaagttatagtcatgcgatttcc

SEQ ID NO: 4520649 - DNA, 25 bp, Homo sapien
tatagtcatgcgatttccattcttt

SEQ ID NO: 4520650 - DNA, 25 bp, Homo sapien
agttatagtcatgcgatttccattc

SEQ ID NO: 4520651 - DNA, 25 bp, Homo sapien
taagttatagtcatgcgatttccat

SEQ ID NO: 4520652 - DNA, 25 bp, Homo sapien
acaaggacccgatgtttgcactctt

SEQ ID NO: 4520653 - DNA, 25 bp, Homo sapien
aatttggaagagtccgttgaagtca

SEQ ID NO: 4520654 - DNA, 25 bp, Homo sapien
tattccatcggcaaaatcgtactgc

SEQ ID NO: 4520655 - DNA, 25 bp, Homo sapien
ccgttgaagtcacaaggacccgatg

SEQ ID NO: 4520656 - DNA, 25 bp, Homo sapien
ctgttaatgtcgtatttataaaagt

SEQ ID NO: 4520657 - DNA, 25 bp, Homo sapien
taaaagtatcatgaggatgccaaat

SEQ ID NO: 4520658 - DNA, 25 bp, Homo sapien
tgttaatgtcgtatttataaaagta

SEQ ID NO: 4520659 - DNA, 25 bp, Homo sapien
ttataaaagtatcatgaggatgcca

SEQ ID NO: 4520660 - DNA, 25 bp, Homo sapien
taagtgaaacccagaggtacagaaa

SEQ ID NO: 4520661 - DNA, 25 bp, Homo sapien
aaatatgcccgtaagtgaaacccag

SEQ ID NO: 4520662 - DNA, 25 bp, Homo sapien
tatgcccgtaagtgaaacccagagg

SEQ ID NO: 4520663 - DNA, 25 bp, Homo sapien
ctgcacaaaatatgcccgtaagtga

SEQ ID NO: 4520664 - DNA, 25 bp, Homo sapien
agaaaattgcgaaagtatgccagag

SEQ ID NO: 4520665 - DNA, 25 bp, Homo sapien
aaattgcgaaagtatgccagagtga

SEQ ID NO: 4520666 - DNA, 25 bp, Homo sapien
aaagaaaattgcgaaagtatgccag

SEQ ID NO: 4520667 - DNA, 25 bp, Homo sapien
gaaaattgcgaaagtatgccagagt

SEQ ID NO: 4520668 - DNA, 25 bp, Homo sapien
tccttgcacaggctccacgctgtca

SEQ ID NO: 4520669 - DNA, 25 bp, Homo sapien
ctccttgcacaggctccacgctgtc

SEQ ID NO: 4520670 - DNA, 25 bp, Homo sapien
ccatgcttgtgggcagccccaagct

SEQ ID NO: 4520671 - DNA, 25 bp, Homo sapien
catgcttgtgggcagccccaagctc

SEQ ID NO: 4520672 - DNA, 25 bp, Homo sapien
accatgcttgtgggcagccccaagc

SEQ ID NO: 4520673 - DNA, 25 bp, Homo sapien
caccatgcttgtgggcagccccaag

SEQ ID NO: 4520674 - DNA, 25 bp, Homo sapien
tcctggactgggctcatgagcaggg

SEQ ID NO: 4520675 - DNA, 25 bp, Homo sapien
gggctcctggactgggctcatgagc

SEQ ID NO: 4520676 - DNA, 25 bp, Homo sapien
ctggggctcctggactgggctcatg

SEQ ID NO: 4520677 - DNA, 25 bp, Homo sapien
ggctcctggactgggctcatgagca

SEQ ID NO: 4520678 - DNA, 25 bp, Homo sapien
aatttgctgtgtcccttgtagtcgc

SEQ ID NO: 4520679 - DNA, 25 bp, Homo sapien
agaatttgctgtgtcccttgtagtc

SEQ ID NO: 4520680 - DNA, 25 bp, Homo sapien
ttgctgtgtcccttgtagtcgccac

SEQ ID NO: 4520681 - DNA, 25 bp, Homo sapien
caagaatttgctgtgtcccttgtag

SEQ ID NO: 4520682 - DNA, 25 bp, Homo sapien
tctcctgcagctccagcagcttcac

SEQ ID NO: 4520683 - DNA, 25 bp, Homo sapien
catctcctgcagctccagcagcttc

SEQ ID NO: 4520684 - DNA, 25 bp, Homo sapien
cagctgcaacaccatctcctgcagc

SEQ ID NO: 4520685 - DNA, 25 bp, Homo sapien
accatctcctgcagctccagcagct

SEQ ID NO: 4520686 - DNA, 25 bp, Homo sapien
tgctgccagcgctcaccgtcacagc

SEQ ID NO: 4520687 - DNA, 25 bp, Homo sapien
ctgtcacgctgctgccagcgctcac

SEQ ID NO: 4520688 - DNA, 25 bp, Homo sapien
ccccgcagagatgttgcacactcta

SEQ ID NO: 4520689 - DNA, 25 bp, Homo sapien
gggtgctcagctgtcacgctgctgc

SEQ ID NO: 4520690 - DNA, 25 bp, Homo sapien
ctgtccagggccagcctgatggtgt

SEQ ID NO: 4520691 - DNA, 25 bp, Homo sapien
tcatctcctccctgtccagggccag

SEQ ID NO: 4520692 - DNA, 25 bp, Homo sapien
catctcctccctgtccagggccagc

SEQ ID NO: 4520693 - DNA, 25 bp, Homo sapien
tccctgtccagggccagcctgatgg

SEQ ID NO: 4520694 - DNA, 25 bp, Homo sapien
ctggctttgttatagggtgataaac

SEQ ID NO: 4520695 - DNA, 25 bp, Homo sapien
cccctggctttgttatagggtgata

SEQ ID NO: 4520696 - DNA, 25 bp, Homo sapien
gccccctggctttgttatagggtga

SEQ ID NO: 4520697 - DNA, 25 bp, Homo sapien
ctgccccctggctttgttatagggt

SEQ ID NO: 4520698 - DNA, 25 bp, Homo sapien
catctctctctgtagtactggaaga

SEQ ID NO: 4520699 - DNA, 25 bp, Homo sapien
ggcatctctctctgtagtactggaa

SEQ ID NO: 4520700 - DNA, 25 bp, Homo sapien
tctctctctgtagtactggaagaat

SEQ ID NO: 4520701 - DNA, 25 bp, Homo sapien
tctctctgtagtactggaagaatcc

SEQ ID NO: 4520702 - DNA, 25 bp, Homo sapien
aggtctgccttctcctccaggtggt

SEQ ID NO: 4520703 - DNA, 25 bp, Homo sapien
cctccaggtggtccataaagccgct

SEQ ID NO: 4520704 - DNA, 25 bp, Homo sapien
tctcctccaggtggtccataaagcc

SEQ ID NO: 4520705 - DNA, 25 bp, Homo sapien
ggtctgccttctcctccaggtggtc

SEQ ID NO: 4520706 - DNA, 25 bp, Homo sapien
ctgccctcaggtggcattttcaagt

SEQ ID NO: 4520707 - DNA, 25 bp, Homo sapien
tttcacctgctcttgtaactgtgcc

SEQ ID NO: 4520708 - DNA, 25 bp, Homo sapien
gctctttcacctgctcttgtaactg

SEQ ID NO: 4520709 - DNA, 25 bp, Homo sapien
cctgctcttgtaactgtgcctgctt

SEQ ID NO: 4520710 - DNA, 25 bp, Homo sapien
gcctgcttctcctgggcactagctc

SEQ ID NO: 4520711 - DNA, 25 bp, Homo sapien
ggatgctaggaatgggccgaggtgc

SEQ ID NO: 4520712 - DNA, 25 bp, Homo sapien
gcacattcccactactggtcggtgc

SEQ ID NO: 4520713 - DNA, 25 bp, Homo sapien
acttagtgcaggcacccggttagta

SEQ ID NO: 4520714 - DNA, 25 bp, Homo sapien
cattcccactactggtcggtgcggg

SEQ ID NO: 4520715 - DNA, 25 bp, Homo sapien
ttagtgcaggcacccggttagtata

SEQ ID NO: 4520716 - DNA, 25 bp, Homo sapien
gctgctgtttctgctggctcgcagc

SEQ ID NO: 4520717 - DNA, 25 bp, Homo sapien
actgggccgttagctgctgtttctg

SEQ ID NO: 4520718 - DNA, 25 bp, Homo sapien
tcaactgggccgttagctgctgttt

SEQ ID NO: 4520719 - DNA, 25 bp, Homo sapien
ctgctgtttctgctggctcgcagct

SEQ ID NO: 4520720 - DNA, 25 bp, Homo sapien
ttttggcaggccatctcggccaccg

SEQ ID NO: 4520721 - DNA, 25 bp, Homo sapien
ctgctgctgcaactggttcattagc

SEQ ID NO: 4520722 - DNA, 25 bp, Homo sapien
gggtctcctgcaacttttggcaggc

SEQ ID NO: 4520723 - DNA, 25 bp, Homo sapien
agccccatcctcggcagctccctcc

SEQ ID NO: 4520724 - DNA, 25 bp, Homo sapien
ctgctgctgataggtggccacgtac

SEQ ID NO: 4520725 - DNA, 25 bp, Homo sapien
gtgacccaggtaatggtctggctgc

SEQ ID NO: 4520726 - DNA, 25 bp, Homo sapien
tgacccaggtaatggtctggctgct

SEQ ID NO: 4520727 - DNA, 25 bp, Homo sapien
tgcaggtgacccaggtaatggtctg

SEQ ID NO: 4520728 - DNA, 25 bp, Homo sapien
caggtgacccaggtaatggtctggc

SEQ ID NO: 4520729 - DNA, 25 bp, Homo sapien
cccagaccttcttggatggggtgga

SEQ ID NO: 4520730 - DNA, 25 bp, Homo sapien
ccagaccttcttggatggggtggag

SEQ ID NO: 4520731 - DNA, 25 bp, Homo sapien
agaccttcttggatggggtggaggt

SEQ ID NO: 4520732 - DNA, 25 bp, Homo sapien
ctcccagaccttcttggatggggtg

SEQ ID NO: 4520733 - DNA, 25 bp, Homo sapien
ccaactgtagtacgctcttgttctc

SEQ ID NO: 4520734 - DNA, 25 bp, Homo sapien
tgctccaactgtagtacgctcttgt

SEQ ID NO: 4520735 - DNA, 25 bp, Homo sapien
aactgtagtacgctcttgttctcat

SEQ ID NO: 4520736 - DNA, 25 bp, Homo sapien
ctccaactgtagtacgctcttgttc

SEQ ID NO: 4520737 - DNA, 25 bp, Homo sapien
ttgaagctgttctgtggctcggcca

SEQ ID NO: 4520738 - DNA, 25 bp, Homo sapien
ctgggcctggagctctcctgccact

SEQ ID NO: 4520739 - DNA, 25 bp, Homo sapien
tgggggctccgggggcagaggttca

SEQ ID NO: 4520740 - DNA, 25 bp, Homo sapien
ctctagttccttcctcaggtgctgc

SEQ ID NO: 4520741 - DNA, 25 bp, Homo sapien
gagctctcctgccactctctctagt

SEQ ID NO: 4520742 - DNA, 25 bp, Homo sapien
tctctacccgatatttatcatgctt

SEQ ID NO: 4520743 - DNA, 25 bp, Homo sapien
ctctacccgatatttatcatgcttc

SEQ ID NO: 4520744 - DNA, 25 bp, Homo sapien
acctatctaatgtgggggggctgaa

SEQ ID NO: 4520745 - DNA, 25 bp, Homo sapien
agtgacctatctaatgtgggggggc

SEQ ID NO: 4520746 - DNA, 25 bp, Homo sapien
tgacctatctaatgtgggggggctg

SEQ ID NO: 4520747 - DNA, 25 bp, Homo sapien
tccagtgacctatctaatgtggggg

SEQ ID NO: 4520748 - DNA, 25 bp, Homo sapien
tttagatgttcagcatattcatccc

SEQ ID NO: 4520749 - DNA, 25 bp, Homo sapien
ccctctctagctggacttctttaag

SEQ ID NO: 4520750 - DNA, 25 bp, Homo sapien
ggacttctttaagtgactccttcaa

SEQ ID NO: 4520751 - DNA, 25 bp, Homo sapien
tagatgttcagcatattcatccctc

SEQ ID NO: 4520752 - DNA, 25 bp, Homo sapien
atacgtgctttactgcggctggaga

SEQ ID NO: 4520753 - DNA, 25 bp, Homo sapien
ttccactccatacgtgctttactgc

SEQ ID NO: 4520754 - DNA, 25 bp, Homo sapien
cagctgcgctttcagcagtgcctgc

SEQ ID NO: 4520755 - DNA, 25 bp, Homo sapien
tccatacgtgctttactgcggctgg

SEQ ID NO: 4520756 - DNA, 25 bp, Homo sapien
tgccgctaacaaccatacaaaaaag

SEQ ID NO: 4520757 - DNA, 25 bp, Homo sapien
tgactcagtcccaagctgccgctaa

SEQ ID NO: 4520758 - DNA, 25 bp, Homo sapien
gctaacaaccatacaaaaaagcagt

SEQ ID NO: 4520759 - DNA, 25 bp, Homo sapien
caagctgccgctaacaaccatacaa

SEQ ID NO: 4520760 - DNA, 25 bp, Homo sapien
tcttctgtgtggcggtgacagcaga

SEQ ID NO: 4520761 - DNA, 25 bp, Homo sapien
tctgtgtggcggtgacagcagagag

SEQ ID NO: 4520762 - DNA, 25 bp, Homo sapien
gagcccgctctaactctcctttacg

SEQ ID NO: 4520763 - DNA, 25 bp, Homo sapien
ttcttctgtgtggcggtgacagcag

SEQ ID NO: 4520764 - DNA, 25 bp, Homo sapien
tgttgcagacggacggccagatcct

SEQ ID NO: 4520765 - DNA, 25 bp, Homo sapien
caatgaatgttgcagacggacggcc

SEQ ID NO: 4520766 - DNA, 25 bp, Homo sapien
aatgaatgttgcagacggacggcca

SEQ ID NO: 4520767 - DNA, 25 bp, Homo sapien
gaatgttgcagacggacggccagat

SEQ ID NO: 4520768 - DNA, 25 bp, Homo sapien
tgagatggggcccaaaggactcccc

SEQ ID NO: 4520769 - DNA, 25 bp, Homo sapien
agttgagatggggcccaaaggactc

SEQ ID NO: 4520770 - DNA, 25 bp, Homo sapien
gagagagttgagatggggcccaaag

SEQ ID NO: 4520771 - DNA, 25 bp, Homo sapien
atgagagagttgagatggggcccaa

SEQ ID NO: 4520772 - DNA, 25 bp, Homo sapien
ccctttctgtatgttcaatctctgg

SEQ ID NO: 4520773 - DNA, 25 bp, Homo sapien
cctttctgtatgttcaatctctgga

SEQ ID NO: 4520774 - DNA, 25 bp, Homo sapien
cgtttcgtgtggtacaggtccgtat

SEQ ID NO: 4520775 - DNA, 25 bp, Homo sapien
tcaaagtatctgagagaacgtttcg

SEQ ID NO: 4520776 - DNA, 25 bp, Homo sapien
ctctagctccctttcggctttctgt

SEQ ID NO: 4520777 - DNA, 25 bp, Homo sapien
ctccctttcggctttctgtttctcg

SEQ ID NO: 4520778 - DNA, 25 bp, Homo sapien
ctagctccctttcggctttctgttt

SEQ ID NO: 4520779 - DNA, 25 bp, Homo sapien
ctgtttctcgttgtttgctttcttt

SEQ ID NO: 4520780 - DNA, 25 bp, Homo sapien
atggtactgcaagagacatgtcccc

SEQ ID NO: 4520781 - DNA, 25 bp, Homo sapien
tggtactgcaagagacatgtcccca

SEQ ID NO: 4520782 - DNA, 25 bp, Homo sapien
gagatggtactgcaagagacatgtc

SEQ ID NO: 4520783 - DNA, 25 bp, Homo sapien
gatggtactgcaagagacatgtccc

SEQ ID NO: 4520784 - DNA, 25 bp, Homo sapien
ctgatgttccacttgtttattctgt

SEQ ID NO: 4520785 - DNA, 25 bp, Homo sapien
tgttccacttgtttattctgttgtt

SEQ ID NO: 4520786 - DNA, 25 bp, Homo sapien
ccagctgatgttccacttgtttatt

SEQ ID NO: 4520787 - DNA, 25 bp, Homo sapien
cagctgatgttccacttgtttattc

SEQ ID NO: 4520788 - DNA, 25 bp, Homo sapien
acatttactgagcacgtacgggcca

SEQ ID NO: 4520789 - DNA, 25 bp, Homo sapien
tactgagcacgtacgggccaagtac

SEQ ID NO: 4520790 - DNA, 25 bp, Homo sapien
cacagaagatttagggcggaaaagg

SEQ ID NO: 4520791 - DNA, 25 bp, Homo sapien
ggttcttcacagaagatttagggcg

SEQ ID NO: 4520792 - DNA, 25 bp, Homo sapien
tgactgacttttacggacctcgagt

SEQ ID NO: 4520793 - DNA, 25 bp, Homo sapien
ctgacttttacggacctcgagtctg

SEQ ID NO: 4520794 - DNA, 25 bp, Homo sapien
tgacttttacggacctcgagtctgg

SEQ ID NO: 4520795 - DNA, 25 bp, Homo sapien
gactgacttttacggacctcgagtc

SEQ ID NO: 4520796 - DNA, 25 bp, Homo sapien
aggaggttggagggctggcctgcag

SEQ ID NO: 4520797 - DNA, 25 bp, Homo sapien
gagggctggcctgcagggtcactgc

SEQ ID NO: 4520798 - DNA, 25 bp, Homo sapien
ggctggcctgcagggtcactgcacc

SEQ ID NO: 4520799 - DNA, 25 bp, Homo sapien
gaggaggttggagggctggcctgca

SEQ ID NO: 4520800 - DNA, 25 bp, Homo sapien
atgatgtagggctctccccgtggat

SEQ ID NO: 4520801 - DNA, 25 bp, Homo sapien
tagggctctccccgtggatacctgt

SEQ ID NO: 4520802 - DNA, 25 bp, Homo sapien
atgtagggctctccccgtggatacc

SEQ ID NO: 4520803 - DNA, 25 bp, Homo sapien
agggctctccccgtggatacctgtt

SEQ ID NO: 4520804 - DNA, 25 bp, Homo sapien
acaccagggctgtttctctgccaat

SEQ ID NO: 4520805 - DNA, 25 bp, Homo sapien
accagaagtggctgtctcatggatg

SEQ ID NO: 4520806 - DNA, 25 bp, Homo sapien
agaagtggctgtctcatggatgctg

SEQ ID NO: 4520807 - DNA, 25 bp, Homo sapien
aacaccagggctgtttctctgccaa

SEQ ID NO: 4520808 - DNA, 25 bp, Homo sapien
ctggcagcagtcttgtcgttggaga

SEQ ID NO: 4520809 - DNA, 25 bp, Homo sapien
actctggcagcagtcttgtcgttgg

SEQ ID NO: 4520810 - DNA, 25 bp, Homo sapien
tctggcagcagtcttgtcgttggag

SEQ ID NO: 4520811 - DNA, 25 bp, Homo sapien
ctctggcagcagtcttgtcgttgga

SEQ ID NO: 4520812 - DNA, 25 bp, Homo sapien
tatggctgggttgggggtccgtgac

SEQ ID NO: 4520813 - DNA, 25 bp, Homo sapien
ctatggctgggttgggggtccgtga

SEQ ID NO: 4520814 - DNA, 25 bp, Homo sapien
ggctgctgccaatttactttgtcga

SEQ ID NO: 4520815 - DNA, 25 bp, Homo sapien
ctgccaatttactttgtcgagtttc

SEQ ID NO: 4520816 - DNA, 25 bp, Homo sapien
ttactttgtcgagtttcttctgcca

SEQ ID NO: 4520817 - DNA, 25 bp, Homo sapien
tttactttgtcgagtttcttctgcc

SEQ ID NO: 4520818 - DNA, 25 bp, Homo sapien
tcagcaaaatcccaccaagcactga

SEQ ID NO: 4520819 - DNA, 25 bp, Homo sapien
cagcaaaatcccaccaagcactgat

SEQ ID NO: 4520820 - DNA, 25 bp, Homo sapien
tgccggttcaccctcactagggcgg

SEQ ID NO: 4520821 - DNA, 25 bp, Homo sapien
ttcaccctcactagggcggcagctg

SEQ ID NO: 4520822 - DNA, 25 bp, Homo sapien
aatgtaactcgcctgccggttcacc

SEQ ID NO: 4520823 - DNA, 25 bp, Homo sapien
tttcagaaatgtaactcgcctgccg

SEQ ID NO: 4520824 - DNA, 25 bp, Homo sapien
gctgggcgagcctggctgaaagccc

SEQ ID NO: 4520825 - DNA, 25 bp, Homo sapien
agaagccaatagctggacagtgaca

SEQ ID NO: 4520826 - DNA, 25 bp, Homo sapien
cacccattaagcaagaagccaatag

SEQ ID NO: 4520827 - DNA, 25 bp, Homo sapien
gacagtgacactcagaccccaggct

SEQ ID NO: 4520828 - DNA, 25 bp, Homo sapien
ttcacccgtgcttcctcctgggaga

SEQ ID NO: 4520829 - DNA, 25 bp, Homo sapien
gagggagccgctcattaatttggcc

SEQ ID NO: 4520830 - DNA, 25 bp, Homo sapien
taatttggccaaagccttcttgagg

SEQ ID NO: 4520831 - DNA, 25 bp, Homo sapien
aagggggcggagcacacacaactct

SEQ ID NO: 4520832 - DNA, 25 bp, Homo sapien
ggctgggtgtgtgggggccaccgtg

SEQ ID NO: 4520833 - DNA, 25 bp, Homo sapien
ctgtaggtttcacaggctgggtgtg

SEQ ID NO: 4520834 - DNA, 25 bp, Homo sapien
gtaggtttcacaggctgggtgtgtg

SEQ ID NO: 4520835 - DNA, 25 bp, Homo sapien
caggctgggtgtgtgggggccaccg

SEQ ID NO: 4520836 - DNA, 25 bp, Homo sapien
tgtggtcctgcgcctacacctgggc

SEQ ID NO: 4520837 - DNA, 25 bp, Homo sapien
ctgggtcagtagacgcttcactgcc

SEQ ID NO: 4520838 - DNA, 25 bp, Homo sapien
gcctgggtcagtagacgcttcactg

SEQ ID NO: 4520839 - DNA, 25 bp, Homo sapien
ccgcctgggtcagtagacgcttcac

SEQ ID NO: 4520840 - DNA, 25 bp, Homo sapien
agcctataaggtcacctgttgagca

SEQ ID NO: 4520841 - DNA, 25 bp, Homo sapien
caaagagtagggagcctataaggtc

SEQ ID NO: 4520842 - DNA, 25 bp, Homo sapien
cctataaggtcacctgttgagcaag

SEQ ID NO: 4520843 - DNA, 25 bp, Homo sapien
ctgcaaagagtagggagcctataag

SEQ ID NO: 4520844 - DNA, 25 bp, Homo sapien
gagagcgccgtctggatggagatga

SEQ ID NO: 4520845 - DNA, 25 bp, Homo sapien
ggccagggagagcgccgtctggatg

SEQ ID NO: 4520846 - DNA, 25 bp, Homo sapien
atcagtttctgctcggcatgggcca

SEQ ID NO: 4520847 - DNA, 25 bp, Homo sapien
tcagtttctgctcggcatgggccat

SEQ ID NO: 4520848 - DNA, 25 bp, Homo sapien
ctgggtaaacacacagacatgctgg

SEQ ID NO: 4520849 - DNA, 25 bp, Homo sapien
tgcagctgacagctatgaagcagga

SEQ ID NO: 4520850 - DNA, 25 bp, Homo sapien
ctgcagctgacagctatgaagcagg

SEQ ID NO: 4520851 - DNA, 25 bp, Homo sapien
gcagctgacagctatgaagcaggag

SEQ ID NO: 4520852 - DNA, 25 bp, Homo sapien
tgcctattgcatccactttccaact

SEQ ID NO: 4520853 - DNA, 25 bp, Homo sapien
ctcgctgcctatctgagcagatgcg

SEQ ID NO: 4520854 - DNA, 25 bp, Homo sapien
tatctgagcagatgcgatattgggc

SEQ ID NO: 4520855 - DNA, 25 bp, Homo sapien
cgatattgggcaccttgtgaaacat

SEQ ID NO: 4520856 - DNA, 25 bp, Homo sapien
ctacacagcccaggttgccggctcc

SEQ ID NO: 4520857 - DNA, 25 bp, Homo sapien
gctggtggagacttctgatactgag

SEQ ID NO: 4520858 - DNA, 25 bp, Homo sapien
tctgcaacagccgtgctggtggaga

SEQ ID NO: 4520859 - DNA, 25 bp, Homo sapien
tctgtgcccactcttcaagaaagtc

SEQ ID NO: 4520860 - DNA, 25 bp, Homo sapien
agaagttaggtttgagggcatcctc

SEQ ID NO: 4520861 - DNA, 25 bp, Homo sapien
gcaacaatgctgttgacgtggagca

SEQ ID NO: 4520862 - DNA, 25 bp, Homo sapien
tggagcagacttcccatttgggatg

SEQ ID NO: 4520863 - DNA, 25 bp, Homo sapien
gggtctgaggaaggaaccaccttca

SEQ ID NO: 4520864 - DNA, 25 bp, Homo sapien
cttcactacatgataccctgcctgg

SEQ ID NO: 4520865 - DNA, 25 bp, Homo sapien
atcaccttcactacatgataccctg

SEQ ID NO: 4520866 - DNA, 25 bp, Homo sapien
cactacatgataccctgcctggata

SEQ ID NO: 4520867 - DNA, 25 bp, Homo sapien
atgataccctgcctggataacacca

SEQ ID NO: 4520868 - DNA, 25 bp, Homo sapien
aaccaaaaagtcacacgcagcgaag

SEQ ID NO: 4520869 - DNA, 25 bp, Homo sapien
gtcacacgcagcgaagacgaagaca

SEQ ID NO: 4520870 - DNA, 25 bp, Homo sapien
aaagtcacacgcagcgaagacgaag

SEQ ID NO: 4520871 - DNA, 25 bp, Homo sapien
acgcagcgaagacgaagacacagga

SEQ ID NO: 4520872 - DNA, 25 bp, Homo sapien
catggccccatgaacaggccagctg

SEQ ID NO: 4520873 - DNA, 25 bp, Homo sapien
agggctccctggtctgtactcggct

SEQ ID NO: 4520874 - DNA, 25 bp, Homo sapien
gtactcggctgcctgacccaagctg

SEQ ID NO: 4520875 - DNA, 25 bp, Homo sapien
cctggtctgtactcggctgcctgac

SEQ ID NO: 4520876 - DNA, 25 bp, Homo sapien
tgttgtatgagctgaaccagaggca

SEQ ID NO: 4520877 - DNA, 25 bp, Homo sapien
agaagctgttgtatgagctgaacca

SEQ ID NO: 4520878 - DNA, 25 bp, Homo sapien
tgtatgagctgaaccagaggcaaac

SEQ ID NO: 4520879 - DNA, 25 bp, Homo sapien
ccagaggcaaacactgtttgccaga

SEQ ID NO: 4520880 - DNA, 25 bp, Homo sapien
cctccttctatgaaatgttgaggca

SEQ ID NO: 4520881 - DNA, 25 bp, Homo sapien
tatccaatggagtcctccttctatg

SEQ ID NO: 4520882 - DNA, 25 bp, Homo sapien
cgtattaataaggtctttatccaat

SEQ ID NO: 4520883 - DNA, 25 bp, Homo sapien
taataaggtctttatccaatggagt

SEQ ID NO: 4520884 - DNA, 25 bp, Homo sapien
aagatcaatcaccaatcgatgacct

SEQ ID NO: 4520885 - DNA, 25 bp, Homo sapien
gatcaatcaccaatcgatgacctgg

SEQ ID NO: 4520886 - DNA, 25 bp, Homo sapien
tcaatcaccaatcgatgacctggac

SEQ ID NO: 4520887 - DNA, 25 bp, Homo sapien
atcaatcaccaatcgatgacctgga

SEQ ID NO: 4520888 - DNA, 25 bp, Homo sapien
atttgagtgaaacgccatcccctcc

SEQ ID NO: 4520889 - DNA, 25 bp, Homo sapien
gccaatttgagtgaaacgccatccc

SEQ ID NO: 4520890 - DNA, 25 bp, Homo sapien
caatttgagtgaaacgccatcccct

SEQ ID NO: 4520891 - DNA, 25 bp, Homo sapien
tgtgccaatttgagtgaaacgccat

SEQ ID NO: 4520892 - DNA, 25 bp, Homo sapien
acagcatggaccagccgctctgcag

SEQ ID NO: 4520893 - DNA, 25 bp, Homo sapien
gcttctcagcggtgggcaacagcat

SEQ ID NO: 4520894 - DNA, 25 bp, Homo sapien
gtgctcagcacgtctgcgctgcttg

SEQ ID NO: 4520895 - DNA, 25 bp, Homo sapien
acgtctgcgctgcttgccagggtca

SEQ ID NO: 4520896 - DNA, 25 bp, Homo sapien
tgagcaaatatccaccccaaaaggg

SEQ ID NO: 4520897 - DNA, 25 bp, Homo sapien
tcaaaagtcactgagcaaatatcca

SEQ ID NO: 4520898 - DNA, 25 bp, Homo sapien
cacagcaactagtgaataatagcct

SEQ ID NO: 4520899 - DNA, 25 bp, Homo sapien
tacacaaactagaggcaccgtggtg

SEQ ID NO: 4520900 - DNA, 25 bp, Homo sapien
tctaactgcacccagaaatactgat

SEQ ID NO: 4520901 - DNA, 25 bp, Homo sapien
gtcttgggcatcaactctaataatt

SEQ ID NO: 4520902 - DNA, 25 bp, Homo sapien
ctggagcgctatggtgcgatctcag

SEQ ID NO: 4520903 - DNA, 25 bp, Homo sapien
gctggagcgctatggtgcgatctca

SEQ ID NO: 4520904 - DNA, 25 bp, Homo sapien
cacctgaacccggtaagtcaaggct

SEQ ID NO: 4520905 - DNA, 25 bp, Homo sapien
caggtgtggttccatgtgcctgcag

SEQ ID NO: 4520906 - DNA, 25 bp, Homo sapien
ctgcagtcccagctagtggcaaggc

SEQ ID NO: 4520907 - DNA, 25 bp, Homo sapien
gctgaggtggagaaccacctgaacc

SEQ ID NO: 4520908 - DNA, 25 bp, Homo sapien
ctggcaacatgggatcctccaactc

SEQ ID NO: 4520909 - DNA, 25 bp, Homo sapien
gttgcccagtctggcaacatgggat

SEQ ID NO: 4520910 - DNA, 25 bp, Homo sapien
ccagtctggcaacatgggatcctcc

SEQ ID NO: 4520911 - DNA, 25 bp, Homo sapien
gtctggcaacatgggatcctccaac

SEQ ID NO: 4520912 - DNA, 25 bp, Homo sapien
taagcgggattgctggaagcgggag

SEQ ID NO: 4520913 - DNA, 25 bp, Homo sapien
gccaagcagtctcccgtgggagtgc

SEQ ID NO: 4520914 - DNA, 25 bp, Homo sapien
cagccagggcgctccaagtaggaag

SEQ ID NO: 4520915 - DNA, 25 bp, Homo sapien
cctcgttgcgattggccgtacgcgg

SEQ ID NO: 4520916 - DNA, 25 bp, Homo sapien
tctgcaggcgatccttttgagtaat

SEQ ID NO: 4520917 - DNA, 25 bp, Homo sapien
ttttctgcaggcgatccttttgagt

SEQ ID NO: 4520918 - DNA, 25 bp, Homo sapien
ggtttttctgcaggcgatccttttg

SEQ ID NO: 4520919 - DNA, 25 bp, Homo sapien
ctgcaggcgatccttttgagtaatt

SEQ ID NO: 4520920 - DNA, 25 bp, Homo sapien
tgctgtggggtaaagcggcagattc

SEQ ID NO: 4520921 - DNA, 25 bp, Homo sapien
gctgtggggtaaagcggcagattca

SEQ ID NO: 4520922 - DNA, 25 bp, Homo sapien
ctgtggggtaaagcggcagattcat

SEQ ID NO: 4520923 - DNA, 25 bp, Homo sapien
tcctgtgaccgtccattctcaaggt

SEQ ID NO: 4520924 - DNA, 25 bp, Homo sapien
gtggtgcagaaactcggcacaccct

SEQ ID NO: 4520925 - DNA, 25 bp, Homo sapien
gtccattctcaaggtctcgtcagcg

SEQ ID NO: 4520926 - DNA, 25 bp, Homo sapien
tcaaggtctcgtcagcgtggtgcag

SEQ ID NO: 4520927 - DNA, 25 bp, Homo sapien
actattaaaaagcattaggtcttca

SEQ ID NO: 4520928 - DNA, 25 bp, Homo sapien
taaaaagcattaggtcttcagcgta

SEQ ID NO: 4520929 - DNA, 25 bp, Homo sapien
aagcattaggtcttcagcgtatgtg

SEQ ID NO: 4520930 - DNA, 25 bp, Homo sapien
attaggtcttcagcgtatgtgttta

SEQ ID NO: 4520931 - DNA, 25 bp, Homo sapien
ggttgaaaacagatatacaggtggg

SEQ ID NO: 4520932 - DNA, 25 bp, Homo sapien
tacaggtggggtttgacatgtcttt

SEQ ID NO: 4520933 - DNA, 25 bp, Homo sapien
gcctcgactccaaatggttgaaaac

SEQ ID NO: 4520934 - DNA, 25 bp, Homo sapien
caggctcgcctcgactccaaatggt

SEQ ID NO: 4520935 - DNA, 25 bp, Homo sapien
ctcagtgttgtgtggcctttggtca

SEQ ID NO: 4520936 - DNA, 25 bp, Homo sapien
tgttggtgggaagcgaataagcctt

SEQ ID NO: 4520937 - DNA, 25 bp, Homo sapien
caagtcattggccttctgagcttca

SEQ ID NO: 4520938 - DNA, 25 bp, Homo sapien
cctatgtatgggagcgtgaaggctt

SEQ ID NO: 4520939 - DNA, 25 bp, Homo sapien
gagagtgttatcaataccgataaat

SEQ ID NO: 4520940 - DNA, 25 bp, Homo sapien
tgaagtagttctaaaattgtgagag

SEQ ID NO: 4520941 - DNA, 25 bp, Homo sapien
gcaacatgaagtagttctaaaattg

SEQ ID NO: 4520942 - DNA, 25 bp, Homo sapien
tttacactgctttattgtgcaacat

SEQ ID NO: 4520943 - DNA, 25 bp, Homo sapien
cgactgaacagtggcgatttcctag

SEQ ID NO: 4520944 - DNA, 25 bp, Homo sapien
cctttttggctgactattggatatc

SEQ ID NO: 4520945 - DNA, 25 bp, Homo sapien
taggaggcagtgattacgactgaac

SEQ ID NO: 4520946 - DNA, 25 bp, Homo sapien
aacagactcagtgatttaggaggca

SEQ ID NO: 4520947 - DNA, 25 bp, Homo sapien
caccttttaacgagagagcagttgc

SEQ ID NO: 4520948 - DNA, 25 bp, Homo sapien
agaaccacaccttttaacgagagag

SEQ ID NO: 4520949 - DNA, 25 bp, Homo sapien
tttaacgagagagcagttgcatcac

SEQ ID NO: 4520950 - DNA, 25 bp, Homo sapien
ccacaccttttaacgagagagcagt

SEQ ID NO: 4520951 - DNA, 25 bp, Homo sapien
ttattagtcacgcatgctcacagcc

SEQ ID NO: 4520952 - DNA, 25 bp, Homo sapien
taggacaccgacactggacagatga

SEQ ID NO: 4520953 - DNA, 25 bp, Homo sapien
gttctcacctgagccgtgttcctgg

SEQ ID NO: 4520954 - DNA, 25 bp, Homo sapien
tatgggatggctgaacgtaggacac

SEQ ID NO: 4520955 - DNA, 25 bp, Homo sapien
gcattcagttaatcatgtgtgttgt

SEQ ID NO: 4520956 - DNA, 25 bp, Homo sapien
gatctgttacaggtatgattgatgt

SEQ ID NO: 4520957 - DNA, 25 bp, Homo sapien
cacgcccggccaatatattggtttc

SEQ ID NO: 4520958 - DNA, 25 bp, Homo sapien
aaaattatactggatctgttacagg

SEQ ID NO: 4520959 - DNA, 25 bp, Homo sapien
taattagtgacaccatgcatggtag

SEQ ID NO: 4520960 - DNA, 25 bp, Homo sapien
taggagttccttatcatggatggac

SEQ ID NO: 4520961 - DNA, 25 bp, Homo sapien
ctttcctggcatggacatacatatg

SEQ ID NO: 4520962 - DNA, 25 bp, Homo sapien
tagccactattatcccttcagagtg

SEQ ID NO: 4520963 - DNA, 25 bp, Homo sapien
gggccagtcacatacgcaggcagtg

SEQ ID NO: 4520964 - DNA, 25 bp, Homo sapien
gcttgatgattcactaaaaggactc

SEQ ID NO: 4520965 - DNA, 25 bp, Homo sapien
cacgtggatgtgcttagctctccca

SEQ ID NO: 4520966 - DNA, 25 bp, Homo sapien
gcacctgagcctcgagtctagagat

SEQ ID NO: 4520967 - DNA, 25 bp, Homo sapien
taaaggatgttgatttgatcccgcc

SEQ ID NO: 4520968 - DNA, 25 bp, Homo sapien
aagctgtacgcttgggctgttcaga

SEQ ID NO: 4520969 - DNA, 25 bp, Homo sapien
tatgttgtggaaacttgcaaatgcc

SEQ ID NO: 4520970 - DNA, 25 bp, Homo sapien
gcagtgtcccaagtcaaattcttta

SEQ ID NO: 4520971 - DNA, 25 bp, Homo sapien
tcaacttgagtgtaattacctggct

SEQ ID NO: 4520972 - DNA, 25 bp, Homo sapien
cagaaaataaagagaggctgggcgc

SEQ ID NO: 4520973 - DNA, 25 bp, Homo sapien
gattacttgcattatgagaacagaa

SEQ ID NO: 4520974 - DNA, 25 bp, Homo sapien
tacctggctgtaaaataatgaatct

SEQ ID NO: 4520975 - DNA, 25 bp, Homo sapien
cacctgttggtctgctgctctttgc

SEQ ID NO: 4520976 - DNA, 25 bp, Homo sapien
tggccaaatctatcttttgctgtac

SEQ ID NO: 4520977 - DNA, 25 bp, Homo sapien
attctaacatctgcccacctgttgg

SEQ ID NO: 4520978 - DNA, 25 bp, Homo sapien
gaatttcttgtttgctaattctaac

SEQ ID NO: 4520979 - DNA, 25 bp, Homo sapien
atgatggttagatgctgccgaacat

SEQ ID NO: 4520980 - DNA, 25 bp, Homo sapien
gaaattctttattaagagtagagta

SEQ ID NO: 4520981 - DNA, 25 bp, Homo sapien
agagtaatactacttatcatggctc

SEQ ID NO: 4520982 - DNA, 25 bp, Homo sapien
tggttagatgctgccgaacatacga

SEQ ID NO: 4520983 - DNA, 25 bp, Homo sapien
tattatatgtcaattataactgaat

SEQ ID NO: 4520984 - DNA, 25 bp, Homo sapien
atatgtcaattataactgaataaag

SEQ ID NO: 4520985 - DNA, 25 bp, Homo sapien
aaaatacaaaagagcccagtacagt

SEQ ID NO: 4520986 - DNA, 25 bp, Homo sapien
aaatacaaaagagcccagtacagtg

SEQ ID NO: 4520987 - DNA, 25 bp, Homo sapien
tttcattccagcagcataaatcgca

SEQ ID NO: 4520988 - DNA, 25 bp, Homo sapien
cagcataaatcgcatgagagcacac

SEQ ID NO: 4520989 - DNA, 25 bp, Homo sapien
tccagcagcataaatcgcatgagag

SEQ ID NO: 4520990 - DNA, 25 bp, Homo sapien
cataaatcgcatgagagcacaccat

SEQ ID NO: 4520991 - DNA, 25 bp, Homo sapien
ggcttcctgttaaccgtggtcgtgc

SEQ ID NO: 4520992 - DNA, 25 bp, Homo sapien
tggtcgtgccattgccctgctggcc

SEQ ID NO: 4520993 - DNA, 25 bp, Homo sapien
tctggccttctaagccttgcacgag

SEQ ID NO: 4520994 - DNA, 25 bp, Homo sapien
aagaggacgggctcgtggacagagg

SEQ ID NO: 4520995 - DNA, 25 bp, Homo sapien
tcaagcagtaagactcggctgagtt

SEQ ID NO: 4520996 - DNA, 25 bp, Homo sapien
aagactcggctgagttcatcaacag

SEQ ID NO: 4520997 - DNA, 25 bp, Homo sapien
agctgtgatttcaacaggacgaggg

SEQ ID NO: 4520998 - DNA, 25 bp, Homo sapien
gagggccatgtcgtgacccccacgt

SEQ ID NO: 4520999 - DNA, 25 bp, Homo sapien
ccccgagtccgtgaccgccaggcag

SEQ ID NO: 4521000 - DNA, 25 bp, Homo sapien
ccgagtccgtgaccgccaggcagtg

SEQ ID NO: 4521001 - DNA, 25 bp, Homo sapien
cccgagtccgtgaccgccaggcagt

SEQ ID NO: 4521002 - DNA, 25 bp, Homo sapien
agagccctggcgcaacctgaagtaa

SEQ ID NO: 4521003 - DNA, 25 bp, Homo sapien
agccctggcgcaacctgaagtaatc

SEQ ID NO: 4521004 - DNA, 25 bp, Homo sapien
gagccctggcgcaacctgaagtaat

SEQ ID NO: 4521005 - DNA, 25 bp, Homo sapien
cagagccctggcgcaacctgaagta

SEQ ID NO: 4521006 - DNA, 25 bp, Homo sapien
ggcccgtggtggagtgttacaatat

SEQ ID NO: 4521007 - DNA, 25 bp, Homo sapien
tgttacaatatagttgtggtctgac

SEQ ID NO: 4521008 - DNA, 25 bp, Homo sapien
gacaatgctatacaagaagacactc

SEQ ID NO: 4521009 - DNA, 25 bp, Homo sapien
gaagacactcattgtctcacatctt

SEQ ID NO: 4521010 - DNA, 25 bp, Homo sapien
cttggtgagcgccagtaggaactga

SEQ ID NO: 4521011 - DNA, 25 bp, Homo sapien
gtgagcgccagtaggaactgagctc

SEQ ID NO: 4521012 - DNA, 25 bp, Homo sapien
cataagtgtgcaaattgatgaattc

SEQ ID NO: 4521013 - DNA, 25 bp, Homo sapien
gacactgaacataactaacaaccag

SEQ ID NO: 4521014 - DNA, 25 bp, Homo sapien
caggaaagtgcatctatcataagtg

SEQ ID NO: 4521015 - DNA, 25 bp, Homo sapien
tattgtacctgtttagcacctagat

SEQ ID NO: 4521016 - DNA, 25 bp, Homo sapien
tgtacagttgcatattagtttgcag

SEQ ID NO: 4521017 - DNA, 25 bp, Homo sapien
catatatgcgttgttgttggttccc

SEQ ID NO: 4521018 - DNA, 25 bp, Homo sapien
tatattgcataaacgtaccacactt

SEQ ID NO: 4521019 - DNA, 25 bp, Homo sapien
tgaacatatgcaacacatatatgcg

SEQ ID NO: 4521020 - DNA, 25 bp, Homo sapien
tgaaaatacactatcctccagctat

SEQ ID NO: 4521021 - DNA, 25 bp, Homo sapien
caggagaagcattagggtgtccgac

SEQ ID NO: 4521022 - DNA, 25 bp, Homo sapien
aattagtgattaagaatagaagtca

SEQ ID NO: 4521023 - DNA, 25 bp, Homo sapien
tattgagatctactcacatttatga

SEQ ID NO: 4521024 - DNA, 25 bp, Homo sapien
attctgtattttgcccgcaaagttt

SEQ ID NO: 4521025 - DNA, 25 bp, Homo sapien
cattctgtattttgcccgcaaagtt

SEQ ID NO: 4521026 - DNA, 25 bp, Homo sapien
cattaaagctgattaaaaggttcca

SEQ ID NO: 4521027 - DNA, 25 bp, Homo sapien
ggccatatctctaataagcgccagt

SEQ ID NO: 4521028 - DNA, 25 bp, Homo sapien
aaatggcaaaatggccatatctcta

SEQ ID NO: 4521029 - DNA, 25 bp, Homo sapien
gacagcattaaagctgattaaaagg

SEQ ID NO: 4521030 - DNA, 25 bp, Homo sapien
gtgaagtgatttcaacgataaaagt

SEQ ID NO: 4521031 - DNA, 25 bp, Homo sapien
gaagtgatttcaacgataaaagtac

SEQ ID NO: 4521032 - DNA, 25 bp, Homo sapien
tgaagtgatttcaacgataaaagta

SEQ ID NO: 4521033 - DNA, 25 bp, Homo sapien
accagcgagaacagttttgggcaaa

SEQ ID NO: 4521034 - DNA, 25 bp, Homo sapien
caaaccagcgagaacagttttgggc

SEQ ID NO: 4521035 - DNA, 25 bp, Homo sapien
aaaccagcgagaacagttttgggca

SEQ ID NO: 4521036 - DNA, 25 bp, Homo sapien
tccaaaccagcgagaacagttttgg

SEQ ID NO: 4521037 - DNA, 25 bp, Homo sapien
aaatttcttgagcagctctttgagg

SEQ ID NO: 4521038 - DNA, 25 bp, Homo sapien
tgtaggagattaaccccataacttg

SEQ ID NO: 4521039 - DNA, 25 bp, Homo sapien
aatttcttgagcagctctttgagga

SEQ ID NO: 4521040 - DNA, 25 bp, Homo sapien
ttcttgagcagctctttgaggatgg

SEQ ID NO: 4521041 - DNA, 25 bp, Homo sapien
ttcttggcagccaagcccagcaaaa

SEQ ID NO: 4521042 - DNA, 25 bp, Homo sapien
agcccagcaaaagaatggcacacag

SEQ ID NO: 4521043 - DNA, 25 bp, Homo sapien
aaagaatggcacacagcagttgctg

SEQ ID NO: 4521044 - DNA, 25 bp, Homo sapien
gcaaaagaatggcacacagcagttg

SEQ ID NO: 4521045 - DNA, 25 bp, Homo sapien
tcaaggagaggatcctccctggcct

SEQ ID NO: 4521046 - DNA, 25 bp, Homo sapien
ggcagaggaggtgaggctcacctca

SEQ ID NO: 4521047 - DNA, 25 bp, Homo sapien
tgtcaaggagaggatcctccctggc

SEQ ID NO: 4521048 - DNA, 25 bp, Homo sapien
cttgtcaaggagaggatcctccctg

SEQ ID NO: 4521049 - DNA, 25 bp, Homo sapien
caccatgcttgtctgcagccccaag

SEQ ID NO: 4521050 - DNA, 25 bp, Homo sapien
catgcttgtctgcagccccaagctc

SEQ ID NO: 4521051 - DNA, 25 bp, Homo sapien
ccatgcttgtctgcagccccaagct

SEQ ID NO: 4521052 - DNA, 25 bp, Homo sapien
accatgcttgtctgcagccccaagc

SEQ ID NO: 4521053 - DNA, 25 bp, Homo sapien
ctggaccgggctcatcagcagagtt

SEQ ID NO: 4521054 - DNA, 25 bp, Homo sapien
tggaccgggctcatcagcagagttg

SEQ ID NO: 4521055 - DNA, 25 bp, Homo sapien
ttgtagttgctgtaagccgcaatac

SEQ ID NO: 4521056 - DNA, 25 bp, Homo sapien
accgggctcatcagcagagttgtgg

SEQ ID NO: 4521057 - DNA, 25 bp, Homo sapien
atctgctgcagctccagcagcttca

SEQ ID NO: 4521058 - DNA, 25 bp, Homo sapien
catctgctgcagctccagcagcttc

SEQ ID NO: 4521059 - DNA, 25 bp, Homo sapien
tctgctgcagctccagcagcttcac

SEQ ID NO: 4521060 - DNA, 25 bp, Homo sapien
tctttggcacggccccctggttctg

SEQ ID NO: 4521061 - DNA, 25 bp, Homo sapien
atctttggcacggccccctggttct

SEQ ID NO: 4521062 - DNA, 25 bp, Homo sapien
ctcttgccagtattgaatgaagcga

SEQ ID NO: 4521063 - DNA, 25 bp, Homo sapien
attgaatgaagcgaagttcttgttt

SEQ ID NO: 4521064 - DNA, 25 bp, Homo sapien
tctctcttgccagtattgaatgaag

SEQ ID NO: 4521065 - DNA, 25 bp, Homo sapien
catctctcttgccagtattgaatga

SEQ ID NO: 4521066 - DNA, 25 bp, Homo sapien
caaaatattgcagtcacatctcggc

SEQ ID NO: 4521067 - DNA, 25 bp, Homo sapien
aaatattgcagtcacatctcggcag

SEQ ID NO: 4521068 - DNA, 25 bp, Homo sapien
gagccaaaatattgcagtcacatct

SEQ ID NO: 4521069 - DNA, 25 bp, Homo sapien
ctggagccaaaatattgcagtcaca

SEQ ID NO: 4521070 - DNA, 25 bp, Homo sapien
agctccagcggacttgagaaatgcc

SEQ ID NO: 4521071 - DNA, 25 bp, Homo sapien
gggcactagctccagcggacttgag

SEQ ID NO: 4521072 - DNA, 25 bp, Homo sapien
gcactagctccagcggacttgagaa

SEQ ID NO: 4521073 - DNA, 25 bp, Homo sapien
ctagctccagcggacttgagaaatg

SEQ ID NO: 4521074 - DNA, 25 bp, Homo sapien
cgggtcctctgggacactcggcatg

SEQ ID NO: 4521075 - DNA, 25 bp, Homo sapien
cctgctctccgggtcctctgggaca

SEQ ID NO: 4521076 - DNA, 25 bp, Homo sapien
tctccgggtcctctgggacactcgg

SEQ ID NO: 4521077 - DNA, 25 bp, Homo sapien
ctctgggacactcggcatgggctga

SEQ ID NO: 4521078 - DNA, 25 bp, Homo sapien
cacactcccactactggtcgatgtg

SEQ ID NO: 4521079 - DNA, 25 bp, Homo sapien
cttgctattccgcccaggcacactc

SEQ ID NO: 4521080 - DNA, 25 bp, Homo sapien
cactcccactactggtcgatgtggg

SEQ ID NO: 4521081 - DNA, 25 bp, Homo sapien
gctattccgcccaggcacactccca

SEQ ID NO: 4521082 - DNA, 25 bp, Homo sapien
ctcagctgggccgttagctgctggt

SEQ ID NO: 4521083 - DNA, 25 bp, Homo sapien
agctgggccgttagctgctggttct

SEQ ID NO: 4521084 - DNA, 25 bp, Homo sapien
aggctcagctgggccgttagctgct

SEQ ID NO: 4521085 - DNA, 25 bp, Homo sapien
atgaggctcagctgggccgttagct

SEQ ID NO: 4521086 - DNA, 25 bp, Homo sapien
tgcctcaagcttcctgctactgcag

SEQ ID NO: 4521087 - DNA, 25 bp, Homo sapien
atatcggccaccgctttgcctcaag

SEQ ID NO: 4521088 - DNA, 25 bp, Homo sapien
caacttttggcaggccatatcggcc

SEQ ID NO: 4521089 - DNA, 25 bp, Homo sapien
cctgcaacttttggcaggccatatc

SEQ ID NO: 4521090 - DNA, 25 bp, Homo sapien
aggtcaactgctgataggcggccac

SEQ ID NO: 4521091 - DNA, 25 bp, Homo sapien
tgctgctgataggtggccacggact

SEQ ID NO: 4521092 - DNA, 25 bp, Homo sapien
gccacggactgctgcaggtgaccca

SEQ ID NO: 4521093 - DNA, 25 bp, Homo sapien
ctgctgctgataggtggccacggac

SEQ ID NO: 4521094 - DNA, 25 bp, Homo sapien
tgacccaggtaatggtctggctgct

SEQ ID NO: 4521095 - DNA, 25 bp, Homo sapien
cccagcccttcttggatggggtgga

SEQ ID NO: 4521096 - DNA, 25 bp, Homo sapien
tcttggatggggtggaggtttccga

SEQ ID NO: 4521097 - DNA, 25 bp, Homo sapien
tggatggggtggaggtttccgactc

SEQ ID NO: 4521098 - DNA, 25 bp, Homo sapien
cctcccagcccttcttggatggggt

SEQ ID NO: 4521099 - DNA, 25 bp, Homo sapien
ctgctccaactgcagtgtgctcttg

SEQ ID NO: 4521100 - DNA, 25 bp, Homo sapien
ctcgccaagcttctcctgtagctcc

SEQ ID NO: 4521101 - DNA, 25 bp, Homo sapien
caactgcagtgtgctcttgttctca

SEQ ID NO: 4521102 - DNA, 25 bp, Homo sapien
actgcagtgtgctcttgttctcatt

SEQ ID NO: 4521103 - DNA, 25 bp, Homo sapien
ctgctgaaggctcttgtgctgctcc

SEQ ID NO: 4521104 - DNA, 25 bp, Homo sapien
ctgggcctggagctctcctgccact

SEQ ID NO: 4521105 - DNA, 25 bp, Homo sapien
gagctctcctgccactctctctagt

SEQ ID NO: 4521106 - DNA, 25 bp, Homo sapien
tctctctagttccttcctcaggtgc

SEQ ID NO: 4521107 - DNA, 25 bp, Homo sapien
ctctagttccttcctcaggtgctgc

SEQ ID NO: 4521108 - DNA, 25 bp, Homo sapien
ctctacccgacgcatatcttgctgc

SEQ ID NO: 4521109 - DNA, 25 bp, Homo sapien
ctacccgacgcatatcttgctgctt

SEQ ID NO: 4521110 - DNA, 25 bp, Homo sapien
tctacccgacgcatatcttgctgct

SEQ ID NO: 4521111 - DNA, 25 bp, Homo sapien
taattggacttgttgaaatgactcc

SEQ ID NO: 4521112 - DNA, 25 bp, Homo sapien
tagatgttcagaatactcatctctt

SEQ ID NO: 4521113 - DNA, 25 bp, Homo sapien
ttttagatgttcagaatactcatct

SEQ ID NO: 4521114 - DNA, 25 bp, Homo sapien
ctcatctctttctaattggacttgt

SEQ ID NO: 4521115 - DNA, 25 bp, Homo sapien
gctgcactttcagtagtgcctcctc

SEQ ID NO: 4521116 - DNA, 25 bp, Homo sapien
agctgcactttcagtagtgcctcct

SEQ ID NO: 4521117 - DNA, 25 bp, Homo sapien
tcagctgcactttcagtagtgcctc

SEQ ID NO: 4521118 - DNA, 25 bp, Homo sapien
cagctgcactttcagtagtgcctcc

SEQ ID NO: 4521119 - DNA, 25 bp, Homo sapien
cttcttctgtgtggccatgacatca

SEQ ID NO: 4521120 - DNA, 25 bp, Homo sapien
ctgtgtggccatgacatcagagaga

SEQ ID NO: 4521121 - DNA, 25 bp, Homo sapien
ggccatgacatcagagagaacactc

SEQ ID NO: 4521122 - DNA, 25 bp, Homo sapien
agagagaacactctctaactctcct

SEQ ID NO: 4521123 - DNA, 25 bp, Homo sapien
agttgagatggggcccaaaggactc

SEQ ID NO: 4521124 - DNA, 25 bp, Homo sapien
tgtagtgagagagttgagatggggc

SEQ ID NO: 4521125 - DNA, 25 bp, Homo sapien
tgagatggggcccaaaggactcccc

SEQ ID NO: 4521126 - DNA, 25 bp, Homo sapien
ctgtagtgagagagttgagatgggg

SEQ ID NO: 4521127 - DNA, 25 bp, Homo sapien
tgagagaacgtttcatgtggtacag

SEQ ID NO: 4521128 - DNA, 25 bp, Homo sapien
cctctttctgtatgttcaatgtctg

SEQ ID NO: 4521129 - DNA, 25 bp, Homo sapien
tcaaagtatctgagagaacgtttca

SEQ ID NO: 4521130 - DNA, 25 bp, Homo sapien
tgtggtacaggtccgtatttagttc

SEQ ID NO: 4521131 - DNA, 25 bp, Homo sapien
ctagcacccttttggctttctgttt

SEQ ID NO: 4521132 - DNA, 25 bp, Homo sapien
tctgtttcttgttgtttgctttctt

SEQ ID NO: 4521133 - DNA, 25 bp, Homo sapien
ttctgtttcttgttgtttgctttct

SEQ ID NO: 4521134 - DNA, 25 bp, Homo sapien
ctttctgtttcttgttgtttgcttt

SEQ ID NO: 4521135 - DNA, 25 bp, Homo sapien
agaatgccaccaatgccccaggaca

SEQ ID NO: 4521136 - DNA, 25 bp, Homo sapien
cagaatgccaccaatgccccaggac

SEQ ID NO: 4521137 - DNA, 25 bp, Homo sapien
aatgccaccaatgccccaggacagg

SEQ ID NO: 4521138 - DNA, 25 bp, Homo sapien
gaatgccaccaatgccccaggacag

SEQ ID NO: 4521139 - DNA, 25 bp, Homo sapien
cttccagctgatgttccacttgttt

SEQ ID NO: 4521140 - DNA, 25 bp, Homo sapien
ttccagctgatgttccacttgtttc

SEQ ID NO: 4521141 - DNA, 25 bp, Homo sapien
ttcttccagctgatgttccacttgt

SEQ ID NO: 4521142 - DNA, 25 bp, Homo sapien
tcttccagctgatgttccacttgtt

SEQ ID NO: 4521143 - DNA, 25 bp, Homo sapien
tgactgatttctacggaccttgaat

SEQ ID NO: 4521144 - DNA, 25 bp, Homo sapien
ttgactgatttctacggaccttgaa

SEQ ID NO: 4521145 - DNA, 25 bp, Homo sapien
agttgactgatttctacggaccttg

SEQ ID NO: 4521146 - DNA, 25 bp, Homo sapien
gttgactgatttctacggaccttga

SEQ ID NO: 4521147 - DNA, 25 bp, Homo sapien
gagcaggagtcgggggagaggtaga

SEQ ID NO: 4521148 - DNA, 25 bp, Homo sapien
ggaggtggagcaggagtcgggggag

SEQ ID NO: 4521149 - DNA, 25 bp, Homo sapien
ctggcagaggggcacccagtccctc

SEQ ID NO: 4521150 - DNA, 25 bp, Homo sapien
aggaggaggtggagcaggagtcggg

SEQ ID NO: 4521151 - DNA, 25 bp, Homo sapien
cagatgatgtagggccttccctgtg

SEQ ID NO: 4521152 - DNA, 25 bp, Homo sapien
gatgatgtagggccttccctgtgaa

SEQ ID NO: 4521153 - DNA, 25 bp, Homo sapien
gatgtagggccttccctgtgaaaac

SEQ ID NO: 4521154 - DNA, 25 bp, Homo sapien
tgatgtagggccttccctgtgaaaa

SEQ ID NO: 4521155 - DNA, 25 bp, Homo sapien
gtggctgtctgagggatactgccat

SEQ ID NO: 4521156 - DNA, 25 bp, Homo sapien
tcctgttcgctcctgctggaactct

SEQ ID NO: 4521157 - DNA, 25 bp, Homo sapien
ctgctggaactctagggctgttttt

SEQ ID NO: 4521158 - DNA, 25 bp, Homo sapien
tgtctgagggatactgccatttgtt

SEQ ID NO: 4521159 - DNA, 25 bp, Homo sapien
aacccattctctcattgccacccag

SEQ ID NO: 4521160 - DNA, 25 bp, Homo sapien
ttctctcattgccacccagagatac

SEQ ID NO: 4521161 - DNA, 25 bp, Homo sapien
cccattctctcattgccacccagag

SEQ ID NO: 4521162 - DNA, 25 bp, Homo sapien
cattctctcattgccacccagagat

SEQ ID NO: 4521163 - DNA, 25 bp, Homo sapien
ggcttttcccaccgtcaacatctgt

SEQ ID NO: 4521164 - DNA, 25 bp, Homo sapien
cttttcccaccgtcaacatctgtaa

SEQ ID NO: 4521165 - DNA, 25 bp, Homo sapien
gcttttcccaccgtcaacatctgta

SEQ ID NO: 4521166 - DNA, 25 bp, Homo sapien
aaaggccagtcttgcagtaacggca

SEQ ID NO: 4521167 - DNA, 25 bp, Homo sapien
ggccagtcttgcagtaacggcagtt

SEQ ID NO: 4521168 - DNA, 25 bp, Homo sapien
ccagtcttgcagtaacggcagttac

SEQ ID NO: 4521169 - DNA, 25 bp, Homo sapien
tcaaaggccagtcttgcagtaacgg

SEQ ID NO: 4521170 - DNA, 25 bp, Homo sapien
taggtgggctgtgacatcacaacat

SEQ ID NO: 4521171 - DNA, 25 bp, Homo sapien
tgtgacatcacaacattccactcct

SEQ ID NO: 4521172 - DNA, 25 bp, Homo sapien
gtgacatcacaacattccactcctc

SEQ ID NO: 4521173 - DNA, 25 bp, Homo sapien
gtgggctgtgacatcacaacattcc

SEQ ID NO: 4521174 - DNA, 25 bp, Homo sapien
tggtcggggggagggaccatgtcag

SEQ ID NO: 4521175 - DNA, 25 bp, Homo sapien
gtcgctgctccacgatgggggaggg

SEQ ID NO: 4521176 - DNA, 25 bp, Homo sapien
agtcgctgctccacgatgggggagg

SEQ ID NO: 4521177 - DNA, 25 bp, Homo sapien
tcgctgctccacgatgggggaggga

SEQ ID NO: 4521178 - DNA, 25 bp, Homo sapien
aggcagcaggaggggagggcagagt

SEQ ID NO: 4521179 - DNA, 25 bp, Homo sapien
ttgaggcagcaggaggggagggcag

SEQ ID NO: 4521180 - DNA, 25 bp, Homo sapien
tgaggcagcaggaggggagggcaga

SEQ ID NO: 4521181 - DNA, 25 bp, Homo sapien
cttgaggcagcaggaggggagggca

SEQ ID NO: 4521182 - DNA, 25 bp, Homo sapien
actttgatgggggtagcccaaggca

SEQ ID NO: 4521183 - DNA, 25 bp, Homo sapien
caggagtcgtatagactctggcagg

SEQ ID NO: 4521184 - DNA, 25 bp, Homo sapien
ctttgatgggggtagcccaaggcac

SEQ ID NO: 4521185 - DNA, 25 bp, Homo sapien
gggaccagtccagtgtgcctcagga

SEQ ID NO: 4521186 - DNA, 25 bp, Homo sapien
gaggggctatgacctagtgcgtttt

SEQ ID NO: 4521187 - DNA, 25 bp, Homo sapien
ttgaggggctatgacctagtgcgtt

SEQ ID NO: 4521188 - DNA, 25 bp, Homo sapien
gggctatgacctagtgcgtttttac

SEQ ID NO: 4521189 - DNA, 25 bp, Homo sapien
tggctgggttgaggggctatgacct

SEQ ID NO: 4521190 - DNA, 25 bp, Homo sapien
tgcagccaatttgttgtgttgagtt

SEQ ID NO: 4521191 - DNA, 25 bp, Homo sapien
gcagccaatttgttgtgttgagttt

SEQ ID NO: 4521192 - DNA, 25 bp, Homo sapien
caatgagaaccgatcaaggcctcca

SEQ ID NO: 4521193 - DNA, 25 bp, Homo sapien
aatgagaaccgatcaaggcctccag

SEQ ID NO: 4521194 - DNA, 25 bp, Homo sapien
gagaaccgatcaaggcctccagtca

SEQ ID NO: 4521195 - DNA, 25 bp, Homo sapien
tgagaaccgatcaaggcctccagtc

SEQ ID NO: 4521196 - DNA, 25 bp, Homo sapien
ctaagagaggggagaggcctcccac

SEQ ID NO: 4521197 - DNA, 25 bp, Homo sapien
taagagaggggagaggcctcccact

SEQ ID NO: 4521198 - DNA, 25 bp, Homo sapien
gctatcagttgacaagtcttggcca

SEQ ID NO: 4521199 - DNA, 25 bp, Homo sapien
gaatggagtagtcatccagccatca

SEQ ID NO: 4521200 - DNA, 25 bp, Homo sapien
gaatcagcatacattccccttaaag

SEQ ID NO: 4521201 - DNA, 25 bp, Homo sapien
gattgcaacaggagataagatagag

SEQ ID NO: 4521202 - DNA, 25 bp, Homo sapien
cagcgagggcacaatgcgcctttcc

SEQ ID NO: 4521203 - DNA, 25 bp, Homo sapien
acagcgagggcacaatgcgcctttc

SEQ ID NO: 4521204 - DNA, 25 bp, Homo sapien
ttcttccgtcaacaagtccattttc

SEQ ID NO: 4521205 - DNA, 25 bp, Homo sapien
cattcctacttttcttccgtcaaca

SEQ ID NO: 4521206 - DNA, 25 bp, Homo sapien
tacttttcttccgtcaacaagtcca

SEQ ID NO: 4521207 - DNA, 25 bp, Homo sapien
cgatgactggttctattgagtaggc

SEQ ID NO: 4521208 - DNA, 25 bp, Homo sapien
tttctttgcacgatgactggttcta

SEQ ID NO: 4521209 - DNA, 25 bp, Homo sapien
ttgcacgatgactggttctattgag

SEQ ID NO: 4521210 - DNA, 25 bp, Homo sapien
tggcatttctttgcacgatgactgg

SEQ ID NO: 4521211 - DNA, 25 bp, Homo sapien
gcaggatcgcttgagaatgtgagat

SEQ ID NO: 4521212 - DNA, 25 bp, Homo sapien
tgagaatgtgagattcagactgcag

SEQ ID NO: 4521213 - DNA, 25 bp, Homo sapien
cttctcacctaagcattgactacaa

SEQ ID NO: 4521214 - DNA, 25 bp, Homo sapien
tctcacctaagcattgactacaaag

SEQ ID NO: 4521215 - DNA, 25 bp, Homo sapien
gctttcctggcatcgatgaaggcag

SEQ ID NO: 4521216 - DNA, 25 bp, Homo sapien
cagttaccggctcagaatgtctcca

SEQ ID NO: 4521217 - DNA, 25 bp, Homo sapien
tcctgtagcggttttactgagccct

SEQ ID NO: 4521218 - DNA, 25 bp, Homo sapien
ggagacatgccacttgctgagaagc

SEQ ID NO: 4521219 - DNA, 25 bp, Homo sapien
ccagcacccaggaggatgaccggca

SEQ ID NO: 4521220 - DNA, 25 bp, Homo sapien
cagcacccaggaggatgaccggcat

SEQ ID NO: 4521221 - DNA, 25 bp, Homo sapien
gggctgaaatctaggtatcagcaga

SEQ ID NO: 4521222 - DNA, 25 bp, Homo sapien
ggcattcattgtcttgcagctccac

SEQ ID NO: 4521223 - DNA, 25 bp, Homo sapien
tcacagttttggatatcaggagtcc

SEQ ID NO: 4521224 - DNA, 25 bp, Homo sapien
catcctttgactttcgcagcttctg

SEQ ID NO: 4521225 - DNA, 25 bp, Homo sapien
gaggattgcttcaccccagcttcta

SEQ ID NO: 4521226 - DNA, 25 bp, Homo sapien
ttgcttcaccccagcttctaggtgg

SEQ ID NO: 4521227 - DNA, 25 bp, Homo sapien
gcgcccggcggaaacccagaacaga

SEQ ID NO: 4521228 - DNA, 25 bp, Homo sapien
tgcgcccggcggaaacccagaacag

SEQ ID NO: 4521229 - DNA, 25 bp, Homo sapien
cagaacggattgcagatttgcatgt

SEQ ID NO: 4521230 - DNA, 25 bp, Homo sapien
gagtcagcagcccactccaattcat

SEQ ID NO: 4521231 - DNA, 25 bp, Homo sapien
agatttgcatgtttcctggctgcct

SEQ ID NO: 4521232 - DNA, 25 bp, Homo sapien
gctgcctctgctagcctgagtcagc

SEQ ID NO: 4521233 - DNA, 25 bp, Homo sapien
gccaaaatgttcattagatactgtt

SEQ ID NO: 4521234 - DNA, 25 bp, Homo sapien
tcagttttaattaatattggggcca

SEQ ID NO: 4521235 - DNA, 25 bp, Homo sapien
tttaatgatcagtttttatgcaaat

SEQ ID NO: 4521236 - DNA, 25 bp, Homo sapien
tatgcaaatgatttatataagtcag

SEQ ID NO: 4521237 - DNA, 25 bp, Homo sapien
tctggaacactgcttcccacggctg

SEQ ID NO: 4521238 - DNA, 25 bp, Homo sapien
ctgtggccgcctctggaacactgct

SEQ ID NO: 4521239 - DNA, 25 bp, Homo sapien
gagctttgcgggcagctggagcgct

SEQ ID NO: 4521240 - DNA, 25 bp, Homo sapien
gctttgcgggcagctggagcgctac

SEQ ID NO: 4521241 - DNA, 25 bp, Homo sapien
tgcgcgacgctctcttcgcggctaa

SEQ ID NO: 4521242 - DNA, 25 bp, Homo sapien
ccgactgcgagagcccgcgcgagtt

SEQ ID NO: 4521243 - DNA, 25 bp, Homo sapien
tgggcgcggcggcccacggctgtgg

SEQ ID NO: 4521244 - DNA, 25 bp, Homo sapien
gagcccgcgcgagtttcgggagcgg

SEQ ID NO: 4521245 - DNA, 25 bp, Homo sapien
ctgatgggtcgaggcggacgcgcgg

SEQ ID NO: 4521246 - DNA, 25 bp, Homo sapien
gcgcgggatcgctgcgggaaaccag

SEQ ID NO: 4521247 - DNA, 25 bp, Homo sapien
ctgcgcgggatcgctgcgggaaacc

SEQ ID NO: 4521248 - DNA, 25 bp, Homo sapien
tgcgcgggatcgctgcgggaaacca

SEQ ID NO: 4521249 - DNA, 25 bp, Homo sapien
ccgcacccagtctataattttcctt

SEQ ID NO: 4521250 - DNA, 25 bp, Homo sapien
cgcacccagtctataattttccttt

SEQ ID NO: 4521251 - DNA, 25 bp, Homo sapien
taacagctgttttaaaataccattc

SEQ ID NO: 4521252 - DNA, 25 bp, Homo sapien
ttaaaataccattcacagaccatat

SEQ ID NO: 4521253 - DNA, 25 bp, Homo sapien
tactgttcccacgactgtcttggag

SEQ ID NO: 4521254 - DNA, 25 bp, Homo sapien
cagttaaaccttagattgacttggg

SEQ ID NO: 4521255 - DNA, 25 bp, Homo sapien
tgtcttggaggcacattttagggtc

SEQ ID NO: 4521256 - DNA, 25 bp, Homo sapien
caaattgttaagcagtcccaatcac

SEQ ID NO: 4521257 - DNA, 25 bp, Homo sapien
tattacgatccatgtgaaagtccag

SEQ ID NO: 4521258 - DNA, 25 bp, Homo sapien
gaaagtccagaggaacttagtcatt

SEQ ID NO: 4521259 - DNA, 25 bp, Homo sapien
ggctgcaggacgataagaattcgga

SEQ ID NO: 4521260 - DNA, 25 bp, Homo sapien
tcggaagtgaaagaactcagaaggc

SEQ ID NO: 4521261 - DNA, 25 bp, Homo sapien
ctacacagctagtatcatgacagca

SEQ ID NO: 4521262 - DNA, 25 bp, Homo sapien
tacacagctagtatcatgacagcag

SEQ ID NO: 4521263 - DNA, 25 bp, Homo sapien
acacagctagtatcatgacagcagc

SEQ ID NO: 4521264 - DNA, 25 bp, Homo sapien
gaatataaaaaatgagttccatgac

SEQ ID NO: 4521265 - DNA, 25 bp, Homo sapien
cagaatataaaaaatgagttccatg

SEQ ID NO: 4521266 - DNA, 25 bp, Homo sapien
aatataaaaaatgagttccatgacg

SEQ ID NO: 4521267 - DNA, 25 bp, Homo sapien
tataaaaaatgagttccatgacgac

SEQ ID NO: 4521268 - DNA, 25 bp, Homo sapien
aggcccctccatggatcaccggcac

SEQ ID NO: 4521269 - DNA, 25 bp, Homo sapien
ggcccctccatggatcaccggcacc

SEQ ID NO: 4521270 - DNA, 25 bp, Homo sapien
cctccatggatcaccggcaccaagg

SEQ ID NO: 4521271 - DNA, 25 bp, Homo sapien
gcccctccatggatcaccggcacca

SEQ ID NO: 4521272 - DNA, 25 bp, Homo sapien
ggtcatcgtttccttgtaatcccag

SEQ ID NO: 4521273 - DNA, 25 bp, Homo sapien
caattgtgccggtcatcgtttcctt

SEQ ID NO: 4521274 - DNA, 25 bp, Homo sapien
ccagcactaggatttctaggaaatc

SEQ ID NO: 4521275 - DNA, 25 bp, Homo sapien
gaaatcctgggaatcgttttctaga

SEQ ID NO: 4521276 - DNA, 25 bp, Homo sapien
ccatttgctttgtattctgatccgt

SEQ ID NO: 4521277 - DNA, 25 bp, Homo sapien
tttgctttgtattctgatccgtgga

SEQ ID NO: 4521278 - DNA, 25 bp, Homo sapien
tattctgatccgtggaatatcttca

SEQ ID NO: 4521279 - DNA, 25 bp, Homo sapien
gctttgtattctgatccgtggaata

SEQ ID NO: 4521280 - DNA, 25 bp, Homo sapien
tataggacttagacacccttgctaa

SEQ ID NO: 4521281 - DNA, 25 bp, Homo sapien
ctataggacttagacacccttgcta

SEQ ID NO: 4521282 - DNA, 25 bp, Homo sapien
ataggacttagacacccttgctaac

SEQ ID NO: 4521283 - DNA, 25 bp, Homo sapien
agtccctcgtctctagcagtgcctg

SEQ ID NO: 4521284 - DNA, 25 bp, Homo sapien
atgctgaagtccctcgtctctagca

SEQ ID NO: 4521285 - DNA, 25 bp, Homo sapien
gctgaagtccctcgtctctagcagt

SEQ ID NO: 4521286 - DNA, 25 bp, Homo sapien
tgaagtccctcgtctctagcagtgc

SEQ ID NO: 4521287 - DNA, 25 bp, Homo sapien
gaggatttcagagcgccaccgaaca

SEQ ID NO: 4521288 - DNA, 25 bp, Homo sapien
agaagaggatttcagagcgccaccg

SEQ ID NO: 4521289 - DNA, 25 bp, Homo sapien
ttcagagcgccaccgaacacaaaaa

SEQ ID NO: 4521290 - DNA, 25 bp, Homo sapien
cttggcaaggtatccagaagaggat

SEQ ID NO: 4521291 - DNA, 25 bp, Homo sapien
gttacagtagtactgaaaaatcctc

SEQ ID NO: 4521292 - DNA, 25 bp, Homo sapien
ctctgttttctagtgcataatgact

SEQ ID NO: 4521293 - DNA, 25 bp, Homo sapien
tactgaaaaatcctcgcaatttagg

SEQ ID NO: 4521294 - DNA, 25 bp, Homo sapien
tgttttctagtgcataatgacttaa

SEQ ID NO: 4521295 - DNA, 25 bp, Homo sapien
gaatcctgactgctccaatatctga

SEQ ID NO: 4521296 - DNA, 25 bp, Homo sapien
caatatctgattgtattggtaatga

SEQ ID NO: 4521297 - DNA, 25 bp, Homo sapien
caaagatgccagtcttactgaaact

SEQ ID NO: 4521298 - DNA, 25 bp, Homo sapien
ggtaatgactttctcccaacactat

SEQ ID NO: 4521299 - DNA, 25 bp, Homo sapien
ttatatgttccactcacaaaatgtc

SEQ ID NO: 4521300 - DNA, 25 bp, Homo sapien
ctggtgaatttagcatggatgtttt

SEQ ID NO: 4521301 - DNA, 25 bp, Homo sapien
attatatgttccactcacaaaatgt

SEQ ID NO: 4521302 - DNA, 25 bp, Homo sapien
ctttctggtgaatttagcatggatg

SEQ ID NO: 4521303 - DNA, 25 bp, Homo sapien
ggcccgccacttcagggcggtcgaa

SEQ ID NO: 4521304 - DNA, 25 bp, Homo sapien
cacttcagggcggtcgaaagagcct

SEQ ID NO: 4521305 - DNA, 25 bp, Homo sapien
cttcagggcggtcgaaagagccttg

SEQ ID NO: 4521306 - DNA, 25 bp, Homo sapien
ggagggcgacgctaggacctgcggg

SEQ ID NO: 4521307 - DNA, 25 bp, Homo sapien
tttttgtgatattcttttagcaagt

SEQ ID NO: 4521308 - DNA, 25 bp, Homo sapien
ccaaaaaattttcgaatgctatgat

SEQ ID NO: 4521309 - DNA, 25 bp, Homo sapien
gcaatgaccaaaaaattttcgaatg

SEQ ID NO: 4521310 - DNA, 25 bp, Homo sapien
cctgatccagatcattgcaatgacc

SEQ ID NO: 4521311 - DNA, 25 bp, Homo sapien
gagtgtgcaagtgtggaggtaagtc

SEQ ID NO: 4521312 - DNA, 25 bp, Homo sapien
tcacgatgttgcattcttgagtgtg

SEQ ID NO: 4521313 - DNA, 25 bp, Homo sapien
tgtgcaagtgtggaggtaagtcagg

SEQ ID NO: 4521314 - DNA, 25 bp, Homo sapien
cacgatgttgcattcttgagtgtgc

SEQ ID NO: 4521315 - DNA, 25 bp, Homo sapien
acggcagtgccacaccactcacggc

SEQ ID NO: 4521316 - DNA, 25 bp, Homo sapien
cacggcagtgccacaccactcacgg

SEQ ID NO: 4521317 - DNA, 25 bp, Homo sapien
tcacggcagtgccacaccactcacg

SEQ ID NO: 4521318 - DNA, 25 bp, Homo sapien
tcagccggtaggctcccaagtagga

SEQ ID NO: 4521319 - DNA, 25 bp, Homo sapien
gcctcagccggtaggctcccaagta

SEQ ID NO: 4521320 - DNA, 25 bp, Homo sapien
agccggtaggctcccaagtaggaag

SEQ ID NO: 4521321 - DNA, 25 bp, Homo sapien
ctcagccggtaggctcccaagtagg

SEQ ID NO: 4521322 - DNA, 25 bp, Homo sapien
agagtccagaggagcggcgaagcgc

SEQ ID NO: 4521323 - DNA, 25 bp, Homo sapien
tccagaggagcggcgaagcgctcct

SEQ ID NO: 4521324 - DNA, 25 bp, Homo sapien
agtccagaggagcggcgaagcgctc

SEQ ID NO: 4521325 - DNA, 25 bp, Homo sapien
tgcacgaagcgggagagtccagagg

SEQ ID NO: 4521326 - DNA, 25 bp, Homo sapien
tcttggttgttttcgtggcctccag

SEQ ID NO: 4521327 - DNA, 25 bp, Homo sapien
actcttgaggtgtacttagggttct

SEQ ID NO: 4521328 - DNA, 25 bp, Homo sapien
tgtaaagtgttgtaatttatgctcc

SEQ ID NO: 4521329 - DNA, 25 bp, Homo sapien
tttatgctcctgagaataactcttg

SEQ ID NO: 4521330 - DNA, 25 bp, Homo sapien
ggcccactgtaaagtaacacaatgt

SEQ ID NO: 4521331 - DNA, 25 bp, Homo sapien
gagggagccatggcccactgtaaag

SEQ ID NO: 4521332 - DNA, 25 bp, Homo sapien
cacagggttagaacccctcttctgg

SEQ ID NO: 4521333 - DNA, 25 bp, Homo sapien
gccatggcccactgtaaagtaacac

SEQ ID NO: 4521334 - DNA, 25 bp, Homo sapien
tgtcaaacctacagccctcgggaag

SEQ ID NO: 4521335 - DNA, 25 bp, Homo sapien
ccagcctgtcaaacctacagccctc

SEQ ID NO: 4521336 - DNA, 25 bp, Homo sapien
tcgggaaggctttggccaaatccat

SEQ ID NO: 4521337 - DNA, 25 bp, Homo sapien
agcctgtcaaacctacagccctcgg

SEQ ID NO: 4521338 - DNA, 25 bp, Homo sapien
tctcctccgtagaagaatgggatgc

SEQ ID NO: 4521339 - DNA, 25 bp, Homo sapien
tgatctttttcttgtctcctccgta

SEQ ID NO: 4521340 - DNA, 25 bp, Homo sapien
cgctcctgggcgttcttcattccag

SEQ ID NO: 4521341 - DNA, 25 bp, Homo sapien
aggtgctgcctaagcctgggcgctc

SEQ ID NO: 4521342 - DNA, 25 bp, Homo sapien
gaccatgtcccagccggatgcggct

SEQ ID NO: 4521343 - DNA, 25 bp, Homo sapien
catgtcccagccggatgcggctccc

SEQ ID NO: 4521344 - DNA, 25 bp, Homo sapien
accatgtcccagccggatgcggctc

SEQ ID NO: 4521345 - DNA, 25 bp, Homo sapien
ccatgtcccagccggatgcggctcc

SEQ ID NO: 4521346 - DNA, 25 bp, Homo sapien
tggcagcgggattttgtccgtctcc

SEQ ID NO: 4521347 - DNA, 25 bp, Homo sapien
ctgtggcagcgggattttgtccgtc

SEQ ID NO: 4521348 - DNA, 25 bp, Homo sapien
ctttttagctccttgatgtggagct

SEQ ID NO: 4521349 - DNA, 25 bp, Homo sapien
cagcgggattttgtccgtctccagt

SEQ ID NO: 4521350 - DNA, 25 bp, Homo sapien
gttcctgaacagctccagactcatg

SEQ ID NO: 4521351 - DNA, 25 bp, Homo sapien
tgaacagctccagactcatggcttc

SEQ ID NO: 4521352 - DNA, 25 bp, Homo sapien
tcctgaacagctccagactcatggc

SEQ ID NO: 4521353 - DNA, 25 bp, Homo sapien
gaacagctccagactcatggcttcc

SEQ ID NO: 4521354 - DNA, 25 bp, Homo sapien
agaaatggcccatgctgtcttctgg

SEQ ID NO: 4521355 - DNA, 25 bp, Homo sapien
aaatggcccatgctgtcttctgggc

SEQ ID NO: 4521356 - DNA, 25 bp, Homo sapien
tctgggcaggacactgcatcctgca

SEQ ID NO: 4521357 - DNA, 25 bp, Homo sapien
aaaagcagcaagaaatggcccatgc

SEQ ID NO: 4521358 - DNA, 25 bp, Homo sapien
ttaggctcattcctccatctgcgaa

SEQ ID NO: 4521359 - DNA, 25 bp, Homo sapien
catctgcgaagctgggctcccaggg

SEQ ID NO: 4521360 - DNA, 25 bp, Homo sapien
cgaagctgggctcccaggggaccgg

SEQ ID NO: 4521361 - DNA, 25 bp, Homo sapien
ctttaggctcattcctccatctgcg

SEQ ID NO: 4521362 - DNA, 25 bp, Homo sapien
gtgctctgcggacatagcagagaga

SEQ ID NO: 4521363 - DNA, 25 bp, Homo sapien
gctgtctccagttcagttttctgac

SEQ ID NO: 4521364 - DNA, 25 bp, Homo sapien
ggagcgctgtctccagttcagtttt

SEQ ID NO: 4521365 - DNA, 25 bp, Homo sapien
tgtcatggagcgctgtctccagttc

SEQ ID NO: 4521366 - DNA, 25 bp, Homo sapien
tcctggctgtcatggagcgctgtct

SEQ ID NO: 4521367 - DNA, 25 bp, Homo sapien
tgatgttggtggcttgccttatttt

SEQ ID NO: 4521368 - DNA, 25 bp, Homo sapien
ctctagctgcctccttagggcttgc

SEQ ID NO: 4521369 - DNA, 25 bp, Homo sapien
gcctccttagggcttgctgatgttg

SEQ ID NO: 4521370 - DNA, 25 bp, Homo sapien
ctgatgttggtggcttgccttattt

SEQ ID NO: 4521371 - DNA, 25 bp, Homo sapien
ctctttcagctgagctcggttctgt

SEQ ID NO: 4521372 - DNA, 25 bp, Homo sapien
tcagctgagctcggttctgttgttt

SEQ ID NO: 4521373 - DNA, 25 bp, Homo sapien
tttcagctgagctcggttctgttgt

SEQ ID NO: 4521374 - DNA, 25 bp, Homo sapien
tctttcagctgagctcggttctgtt

SEQ ID NO: 4521375 - DNA, 25 bp, Homo sapien
gtcctcaggagaccggccagccaag

SEQ ID NO: 4521376 - DNA, 25 bp, Homo sapien
caatcttaacagttaccctcgacct

SEQ ID NO: 4521377 - DNA, 25 bp, Homo sapien
ttgtcctcaggagaccggccagcca

SEQ ID NO: 4521378 - DNA, 25 bp, Homo sapien
tcaggagaccggccagccaagactc

SEQ ID NO: 4521379 - DNA, 25 bp, Homo sapien
cgagtggcagccccccgaagtggtt

SEQ ID NO: 4521380 - DNA, 25 bp, Homo sapien
aggcgagtggcagccccccgaagtg

SEQ ID NO: 4521381 - DNA, 25 bp, Homo sapien
ctcaggcgagtggcagccccccgaa

SEQ ID NO: 4521382 - DNA, 25 bp, Homo sapien
caggcgagtggcagccccccgaagt

SEQ ID NO: 4521383 - DNA, 25 bp, Homo sapien
tcaccggctgaaagtcaccctgggg

SEQ ID NO: 4521384 - DNA, 25 bp, Homo sapien
gtcaccggctgaaagtcaccctggg

SEQ ID NO: 4521385 - DNA, 25 bp, Homo sapien
ggcatccggttccttgggaacgtga

SEQ ID NO: 4521386 - DNA, 25 bp, Homo sapien
catccggttccttgggaacgtgagc

SEQ ID NO: 4521387 - DNA, 25 bp, Homo sapien
tggtcccagccaattttctttgttg

SEQ ID NO: 4521388 - DNA, 25 bp, Homo sapien
tcttggtcccagccaattttctttg

SEQ ID NO: 4521389 - DNA, 25 bp, Homo sapien
cttggtcccagccaattttctttgt

SEQ ID NO: 4521390 - DNA, 25 bp, Homo sapien
tctcctgaatatttacgcgttgctg

SEQ ID NO: 4521391 - DNA, 25 bp, Homo sapien
ctctgtgggtgaataagtggtttcc

SEQ ID NO: 4521392 - DNA, 25 bp, Homo sapien
ggtttcctttctcagctggttgacg

SEQ ID NO: 4521393 - DNA, 25 bp, Homo sapien
tagcctcccatatgagcgtgtggcc

SEQ ID NO: 4521394 - DNA, 25 bp, Homo sapien
tggcccattcgcatctctataaaaa

SEQ ID NO: 4521395 - DNA, 25 bp, Homo sapien
cgctgagctctccacgatgggagca

SEQ ID NO: 4521396 - DNA, 25 bp, Homo sapien
cataaggtccatctgggtgggcgct

SEQ ID NO: 4521397 - DNA, 25 bp, Homo sapien
tctgctcaaatgaacattccaggca

SEQ ID NO: 4521398 - DNA, 25 bp, Homo sapien
cagttgtaggagcaatggcaagccc

SEQ ID NO: 4521399 - DNA, 25 bp, Homo sapien
agcccgacaggttgcgtgcttggcc

SEQ ID NO: 4521400 - DNA, 25 bp, Homo sapien
gcgaagtcctcgacctgaggtttta

SEQ ID NO: 4521401 - DNA, 25 bp, Homo sapien
tatcattgagttaggagcgaagtcc

SEQ ID NO: 4521402 - DNA, 25 bp, Homo sapien
tctaaggatgtattgagagggtcac

SEQ ID NO: 4521403 - DNA, 25 bp, Homo sapien
gaagaggtgtcatacagtggcatgc

SEQ ID NO: 4521404 - DNA, 25 bp, Homo sapien
tggtggtctcgaggtcatctgagcc

SEQ ID NO: 4521405 - DNA, 25 bp, Homo sapien
cagttttgccgtgactgaattccca

SEQ ID NO: 4521406 - DNA, 25 bp, Homo sapien
ctagacagtgtgcttcagacgagta

SEQ ID NO: 4521407 - DNA, 25 bp, Homo sapien
cagtccatagttctgtgtggaacca

SEQ ID NO: 4521408 - DNA, 25 bp, Homo sapien
gcacagaaacagagccgtaaggact

SEQ ID NO: 4521409 - DNA, 25 bp, Homo sapien
tgtggaaccacgatccacggaggca

SEQ ID NO: 4521410 - DNA, 25 bp, Homo sapien
tctttcccataaggaactgtgttgg

SEQ ID NO: 4521411 - DNA, 25 bp, Homo sapien
tgtcttgactcagacccactcgtat

SEQ ID NO: 4521412 - DNA, 25 bp, Homo sapien
tgccatttcccgtgtaatcctgtct

SEQ ID NO: 4521413 - DNA, 25 bp, Homo sapien
gttggctgtgacttcattccatgtt

SEQ ID NO: 4521414 - DNA, 25 bp, Homo sapien
cagacccagggacacatgtgtggct

SEQ ID NO: 4521415 - DNA, 25 bp, Homo sapien
tgagcccaccctgaggtcggttgtt

SEQ ID NO: 4521416 - DNA, 25 bp, Homo sapien
ttgttggacccacctgcctgatgca

SEQ ID NO: 4521417 - DNA, 25 bp, Homo sapien
tccttctccagtaagcgacctggga

SEQ ID NO: 4521418 - DNA, 25 bp, Homo sapien
cccgagtgagcgtctgttggagact

SEQ ID NO: 4521419 - DNA, 25 bp, Homo sapien
aggacccgagtgagcgtctgttgga

SEQ ID NO: 4521420 - DNA, 25 bp, Homo sapien
acccgagtgagcgtctgttggagac

SEQ ID NO: 4521421 - DNA, 25 bp, Homo sapien
cccaggacccgagtgagcgtctgtt

SEQ ID NO: 4521422 - DNA, 25 bp, Homo sapien
gcggactcgctcctcgcaatactgg

SEQ ID NO: 4521423 - DNA, 25 bp, Homo sapien
gcaatactggccacatgccctcaag

SEQ ID NO: 4521424 - DNA, 25 bp, Homo sapien
tctgtttcttagagtcgatgtcccc

SEQ ID NO: 4521425 - DNA, 25 bp, Homo sapien
ctgggtctggaccaccctgcggact

SEQ ID NO: 4521426 - DNA, 25 bp, Homo sapien
gaaccaaggcgatgttgagaaatga

SEQ ID NO: 4521427 - DNA, 25 bp, Homo sapien
tgctgctcggcgtgccgaaggaacc

SEQ ID NO: 4521428 - DNA, 25 bp, Homo sapien
ctggtgagcaggagaacctgtgcct

SEQ ID NO: 4521429 - DNA, 25 bp, Homo sapien
cgtgccgaaggaaccaaggcgatgt

SEQ ID NO: 4521430 - DNA, 25 bp, Homo sapien
acagcgcacttgcagctcttgggag

SEQ ID NO: 4521431 - DNA, 25 bp, Homo sapien
tcttctggaatgataaacgctgggc

SEQ ID NO: 4521432 - DNA, 25 bp, Homo sapien
aatggaaggcagctccttgggtgca

SEQ ID NO: 4521433 - DNA, 25 bp, Homo sapien
tgactggccgtcctcgtgggcgtgg

SEQ ID NO: 4521434 - DNA, 25 bp, Homo sapien
agctgcctctcaggctaggggatga

SEQ ID NO: 4521435 - DNA, 25 bp, Homo sapien
gaggcccgtagcccaggcccatcat

SEQ ID NO: 4521436 - DNA, 25 bp, Homo sapien
tgtcctgtcatgagtgctgtgttcc

SEQ ID NO: 4521437 - DNA, 25 bp, Homo sapien
tcttcctatctttggagcggctcca

SEQ ID NO: 4521438 - DNA, 25 bp, Homo sapien
ctgatacagtctgtgccctgcggtt

SEQ ID NO: 4521439 - DNA, 25 bp, Homo sapien
gatacagtctgtgccctgcggttgt

SEQ ID NO: 4521440 - DNA, 25 bp, Homo sapien
atactgtaaacgctgatacagtctg

SEQ ID NO: 4521441 - DNA, 25 bp, Homo sapien
tggtttttagggccttgcggcggca

SEQ ID NO: 4521442 - DNA, 25 bp, Homo sapien
gacaggttgtccgttcatgtgccgt

SEQ ID NO: 4521443 - DNA, 25 bp, Homo sapien
tgtgccactgaaaccttccgaaaag

SEQ ID NO: 4521444 - DNA, 25 bp, Homo sapien
tgtgatacagactgctgtgccactg

SEQ ID NO: 4521445 - DNA, 25 bp, Homo sapien
aagaccaagattcagtggaggcagc

SEQ ID NO: 4521446 - DNA, 25 bp, Homo sapien
catgtggacaccgactggtagggtt

SEQ ID NO: 4521447 - DNA, 25 bp, Homo sapien
tgtgcatgtggacaccgactggtag

SEQ ID NO: 4521448 - DNA, 25 bp, Homo sapien
tttctgtccaggagggtccctcact

SEQ ID NO: 4521449 - DNA, 25 bp, Homo sapien
taacacctgactgcttggtgaccat

SEQ ID NO: 4521450 - DNA, 25 bp, Homo sapien
taagttcatccaggattcctttaaa

SEQ ID NO: 4521451 - DNA, 25 bp, Homo sapien
gttaagttcatccaggattccttta

SEQ ID NO: 4521452 - DNA, 25 bp, Homo sapien
tgttaagttcatccaggattccttt

SEQ ID NO: 4521453 - DNA, 25 bp, Homo sapien
gttcatccaggattcctttaaatac

SEQ ID NO: 4521454 - DNA, 25 bp, Homo sapien
tacagatcatgttattctaaattac

SEQ ID NO: 4521455 - DNA, 25 bp, Homo sapien
tagcatgtagtgatgtatgatgtaa

SEQ ID NO: 4521456 - DNA, 25 bp, Homo sapien
tatgatgtaatgtatgatatgtact

SEQ ID NO: 4521457 - DNA, 25 bp, Homo sapien
gttttattatatactgttacagatc

SEQ ID NO: 4521458 - DNA, 25 bp, Homo sapien
gagtatgtgagccttagttcaggct

SEQ ID NO: 4521459 - DNA, 25 bp, Homo sapien
catgagggcctaatttcttcccaaa

SEQ ID NO: 4521460 - DNA, 25 bp, Homo sapien
agattagtttagagaacacacattc

SEQ ID NO: 4521461 - DNA, 25 bp, Homo sapien
caaaggccccacattataatagcat

SEQ ID NO: 4521462 - DNA, 25 bp, Homo sapien
gaagaggcattggaccagcatgacc

SEQ ID NO: 4521463 - DNA, 25 bp, Homo sapien
gatgatgtcttcagcgcaagtgttc

SEQ ID NO: 4521464 - DNA, 25 bp, Homo sapien
tgaccaattcaaggacacgttgatg

SEQ ID NO: 4521465 - DNA, 25 bp, Homo sapien
agggctgcctacagggctggtgtcc

SEQ ID NO: 4521466 - DNA, 25 bp, Homo sapien
tccagtctgtacacattggatcctg

SEQ ID NO: 4521467 - DNA, 25 bp, Homo sapien
tgtccagtctgtacacattggatcc

SEQ ID NO: 4521468 - DNA, 25 bp, Homo sapien
ctctgtccagtctgtacacattgga

SEQ ID NO: 4521469 - DNA, 25 bp, Homo sapien
tctgtccagtctgtacacattggat

SEQ ID NO: 4521470 - DNA, 25 bp, Homo sapien
tcttcagtagttccacagcggatct

SEQ ID NO: 4521471 - DNA, 25 bp, Homo sapien
gatccggttgactctgtctgaccag

SEQ ID NO: 4521472 - DNA, 25 bp, Homo sapien
gggtctcctggatgtaacgagttct

SEQ ID NO: 4521473 - DNA, 25 bp, Homo sapien
cagcggatcttcgagactggtacag

SEQ ID NO: 4521474 - DNA, 25 bp, Homo sapien
agaggcctccttgcaaagggccagg

SEQ ID NO: 4521475 - DNA, 25 bp, Homo sapien
gaagcaccatgttgcttcacagaac

SEQ ID NO: 4521476 - DNA, 25 bp, Homo sapien
gataaagaggcctccttgcaaaggg

SEQ ID NO: 4521477 - DNA, 25 bp, Homo sapien
agaacaggccgtgaaaagccacaga

SEQ ID NO: 4521478 - DNA, 25 bp, Homo sapien
tgccaattatgccagaatgagtctc

SEQ ID NO: 4521479 - DNA, 25 bp, Homo sapien
ttaaatgccaattatgccagaatga

SEQ ID NO: 4521480 - DNA, 25 bp, Homo sapien
ccaattatgccagaatgagtctctg

SEQ ID NO: 4521481 - DNA, 25 bp, Homo sapien
aatgccaattatgccagaatgagtc

SEQ ID NO: 4521482 - DNA, 25 bp, Homo sapien
gtagattgtgagaatgaaccacata

SEQ ID NO: 4521483 - DNA, 25 bp, Homo sapien
atgtgtagcacatgtgagttttccc

SEQ ID NO: 4521484 - DNA, 25 bp, Homo sapien
taatgaagaggggatgtgtagcaca

SEQ ID NO: 4521485 - DNA, 25 bp, Homo sapien
ttgtgagaatgaaccacataatgaa

SEQ ID NO: 4521486 - DNA, 25 bp, Homo sapien
tgctgctaggcacatacggacatgc

SEQ ID NO: 4521487 - DNA, 25 bp, Homo sapien
gggtctcctgtatcgcagcagagca

SEQ ID NO: 4521488 - DNA, 25 bp, Homo sapien
gctgtgtgtactgcccgtcttggac

SEQ ID NO: 4521489 - DNA, 25 bp, Homo sapien
atagtccccggtcacattaggttgg

SEQ ID NO: 4521490 - DNA, 25 bp, Homo sapien
tgtggggtacactgtgttttgtccg

SEQ ID NO: 4521491 - DNA, 25 bp, Homo sapien
cactgtgttttgtccgttgttggat

SEQ ID NO: 4521492 - DNA, 25 bp, Homo sapien
tgtccgttgttggatttgtattcat

SEQ ID NO: 4521493 - DNA, 25 bp, Homo sapien
gtacactgtgttttgtccgttgttg

SEQ ID NO: 4521494 - DNA, 25 bp, Homo sapien
tagggggtgaggtagaagaggtggc

SEQ ID NO: 4521495 - DNA, 25 bp, Homo sapien
ctagggggtgaggtagaagaggtgg

SEQ ID NO: 4521496 - DNA, 25 bp, Homo sapien
tagaagaggtggcagaggccagctt

SEQ ID NO: 4521497 - DNA, 25 bp, Homo sapien
aagaggtggcagaggccagcttgac

SEQ ID NO: 4521498 - DNA, 25 bp, Homo sapien
aagccctggcaggtctttgttggag

SEQ ID NO: 4521499 - DNA, 25 bp, Homo sapien
tccatagttgaccttggagggtgcg

SEQ ID NO: 4521500 - DNA, 25 bp, Homo sapien
gctgacaggaagggatatgtgcttt

SEQ ID NO: 4521501 - DNA, 25 bp, Homo sapien
gggatatgtgctttccatagttgac

SEQ ID NO: 4521502 - DNA, 25 bp, Homo sapien
gggtcacagtgggctggtggctgta

SEQ ID NO: 4521503 - DNA, 25 bp, Homo sapien
tcagggtcacagtgggctggtggct

SEQ ID NO: 4521504 - DNA, 25 bp, Homo sapien
ctcagggtcacagtgggctggtggc

SEQ ID NO: 4521505 - DNA, 25 bp, Homo sapien
tcacagtgggctggtggctgtagca

SEQ ID NO: 4521506 - DNA, 25 bp, Homo sapien
tagcagatcatgagccaggtttgtg

SEQ ID NO: 4521507 - DNA, 25 bp, Homo sapien
ggaaacttgcttgctcagtgacaac

SEQ ID NO: 4521508 - DNA, 25 bp, Homo sapien
tcagtgacaactgcatccaaatagc

SEQ ID NO: 4521509 - DNA, 25 bp, Homo sapien
aagggagttcggaggaagtcgctct

SEQ ID NO: 4521510 - DNA, 25 bp, Homo sapien
ggaccagctgtcctgcatcaaatcc

SEQ ID NO: 4521511 - DNA, 25 bp, Homo sapien
ccagctgtcctgcatcaaatcccat

SEQ ID NO: 4521512 - DNA, 25 bp, Homo sapien
gtggaccagctgtcctgcatcaaat

SEQ ID NO: 4521513 - DNA, 25 bp, Homo sapien
gaccagctgtcctgcatcaaatccc

SEQ ID NO: 4521514 - DNA, 25 bp, Homo sapien
aagcagacttttccccctcgagtct

SEQ ID NO: 4521515 - DNA, 25 bp, Homo sapien
cctcgagtcttgtggccgcttctct

SEQ ID NO: 4521516 - DNA, 25 bp, Homo sapien
tctggtagagggtgtatttagcagt

SEQ ID NO: 4521517 - DNA, 25 bp, Homo sapien
ttagcagtgtacttctttgcacggg

SEQ ID NO: 4521518 - DNA, 25 bp, Homo sapien
tggcacgtccttggtgccttccctt

SEQ ID NO: 4521519 - DNA, 25 bp, Homo sapien
gacctggcacgtccttggtgccttc

SEQ ID NO: 4521520 - DNA, 25 bp, Homo sapien
tggtgccttcccttgaagagagtag

SEQ ID NO: 4521521 - DNA, 25 bp, Homo sapien
acctggcacgtccttggtgccttcc

SEQ ID NO: 4521522 - DNA, 25 bp, Homo sapien
cctggatggcatgttctctggatgc

SEQ ID NO: 4521523 - DNA, 25 bp, Homo sapien
taagagcgtttgtccagcaccaaag

SEQ ID NO: 4521524 - DNA, 25 bp, Homo sapien
agcaccaaagatcctagttctgtgg

SEQ ID NO: 4521525 - DNA, 25 bp, Homo sapien
gggcaccataagagcgtttgtccag

SEQ ID NO: 4521526 - DNA, 25 bp, Homo sapien
tgcaggcattccttgtccaggacct

SEQ ID NO: 4521527 - DNA, 25 bp, Homo sapien
ctttggaccttggagatttctggag

SEQ ID NO: 4521528 - DNA, 25 bp, Homo sapien
ggcattccttgtccaggacctccat

SEQ ID NO: 4521529 - DNA, 25 bp, Homo sapien
tcctttggaccttggagatttctgg

SEQ ID NO: 4521530 - DNA, 25 bp, Homo sapien
taacggtagtcaccatgatgcacaa

SEQ ID NO: 4521531 - DNA, 25 bp, Homo sapien
tgtgtccgtggaccaatacttcccc

SEQ ID NO: 4521532 - DNA, 25 bp, Homo sapien
taacgtgcattacatcacctagttt

SEQ ID NO: 4521533 - DNA, 25 bp, Homo sapien
gagaacacttcattcactatcttag

SEQ ID NO: 4521534 - DNA, 25 bp, Homo sapien
ggctcccaggacacgacttgtaatg

SEQ ID NO: 4521535 - DNA, 25 bp, Homo sapien
caagccagggtgtgtctcggtagct

SEQ ID NO: 4521536 - DNA, 25 bp, Homo sapien
ctgtgcggagcgaactggcgcctcc

SEQ ID NO: 4521537 - DNA, 25 bp, Homo sapien
tgtaaagcgttccaagtattttgcc

SEQ ID NO: 4521538 - DNA, 25 bp, Homo sapien
tcagcggcgggtgcccgcctgtcct

SEQ ID NO: 4521539 - DNA, 25 bp, Homo sapien
tacctcagcggcgggtgcccgcctg

SEQ ID NO: 4521540 - DNA, 25 bp, Homo sapien
cctcagcggcgggtgcccgcctgtc

SEQ ID NO: 4521541 - DNA, 25 bp, Homo sapien
ctcagcggcgggtgcccgcctgtcc

SEQ ID NO: 4521542 - DNA, 25 bp, Homo sapien
attcactatgcggtggcagccacag

SEQ ID NO: 4521543 - DNA, 25 bp, Homo sapien
ttcacagcttggatgcggctctgca

SEQ ID NO: 4521544 - DNA, 25 bp, Homo sapien
tgcaaattcactatgcggtggcagc

SEQ ID NO: 4521545 - DNA, 25 bp, Homo sapien
gcttggatgcggctctgcaaattca

SEQ ID NO: 4521546 - DNA, 25 bp, Homo sapien
ctaatgagttcggtgggtgggtgct

SEQ ID NO: 4521547 - DNA, 25 bp, Homo sapien
aatgagttcggtgggtgggtgctct

SEQ ID NO: 4521548 - DNA, 25 bp, Homo sapien
tcactaatgagttcggtgggtgggt

SEQ ID NO: 4521549 - DNA, 25 bp, Homo sapien
tgtcactaatgagttcggtgggtgg

SEQ ID NO: 4521550 - DNA, 25 bp, Homo sapien
ttcttcatggccaccgttctggtgt

SEQ ID NO: 4521551 - DNA, 25 bp, Homo sapien
caagcacgggctttgttcagaggcg

SEQ ID NO: 4521552 - DNA, 25 bp, Homo sapien
taggctgtgggtcttggatgggcag

SEQ ID NO: 4521553 - DNA, 25 bp, Homo sapien
tggccaccgttctggtgtcacctgg

SEQ ID NO: 4521554 - DNA, 25 bp, Homo sapien
cagttggcccatttcagatcccaga

SEQ ID NO: 4521555 - DNA, 25 bp, Homo sapien
tcccagatggaacatgattggagcg

SEQ ID NO: 4521556 - DNA, 25 bp, Homo sapien
tctgtggcctggtgtgttacaagca

SEQ ID NO: 4521557 - DNA, 25 bp, Homo sapien
ggctcttgctgctggtacccggatg

SEQ ID NO: 4521558 - DNA, 25 bp, Homo sapien
gttgggtacagtttccgtatccaca

SEQ ID NO: 4521559 - DNA, 25 bp, Homo sapien
gtccctgactgcctcatttcgaagg

SEQ ID NO: 4521560 - DNA, 25 bp, Homo sapien
ggttccagcccagcggcatcaagtt

SEQ ID NO: 4521561 - DNA, 25 bp, Homo sapien
tagagtccatgagtggccctgagca

SEQ ID NO: 4521562 - DNA, 25 bp, Homo sapien
ctgccaccagcgcaaacccagagct

SEQ ID NO: 4521563 - DNA, 25 bp, Homo sapien
ggtggggtgcaggtgaggggcctac

SEQ ID NO: 4521564 - DNA, 25 bp, Homo sapien
aaacccagagctgggtgaaggtggg

SEQ ID NO: 4521565 - DNA, 25 bp, Homo sapien
gccaccagcgcaaacccagagctgg

SEQ ID NO: 4521566 - DNA, 25 bp, Homo sapien
cattggccattgggaccgggccctg

SEQ ID NO: 4521567 - DNA, 25 bp, Homo sapien
ccattggccattgggaccgggccct

SEQ ID NO: 4521568 - DNA, 25 bp, Homo sapien
gccccattggccattgggaccgggc

SEQ ID NO: 4521569 - DNA, 25 bp, Homo sapien
taagtggtttatgatcctcctgcgc

SEQ ID NO: 4521570 - DNA, 25 bp, Homo sapien
tgatagagccatcgagccacatgag

SEQ ID NO: 4521571 - DNA, 25 bp, Homo sapien
cacaaagttctcgtggatggcgctg

SEQ ID NO: 4521572 - DNA, 25 bp, Homo sapien
tccacggccattgttgggagcagct

SEQ ID NO: 4521573 - DNA, 25 bp, Homo sapien
ctgaaggcctctttgtcaggcatga

SEQ ID NO: 4521574 - DNA, 25 bp, Homo sapien
ccacatttatcctccgccaagctgg

SEQ ID NO: 4521575 - DNA, 25 bp, Homo sapien
aaggcctctttgtcaggcatgatgg

SEQ ID NO: 4521576 - DNA, 25 bp, Homo sapien
ccccagatcatcctgggtgtccccc

SEQ ID NO: 4521577 - DNA, 25 bp, Homo sapien
cgccaggcgttggtgtccacggtca

SEQ ID NO: 4521578 - DNA, 25 bp, Homo sapien
caggcgttggtgtccacggtcagaa

SEQ ID NO: 4521579 - DNA, 25 bp, Homo sapien
ggcgttggtgtccacggtcagaaat

SEQ ID NO: 4521580 - DNA, 25 bp, Homo sapien
tggcgccaggcgttggtgtccacgg

SEQ ID NO: 4521581 - DNA, 25 bp, Homo sapien
tgtccactaaagagcgtggccgctc

SEQ ID NO: 4521582 - DNA, 25 bp, Homo sapien
tgttggccgttggtcagttttccag

SEQ ID NO: 4521583 - DNA, 25 bp, Homo sapien
tcgttggtgacagccaagcgcatgg

SEQ ID NO: 4521584 - DNA, 25 bp, Homo sapien
aaaccctggcatccgcataggcctt

SEQ ID NO: 4521585 - DNA, 25 bp, Homo sapien
agccgtggcagagcgagacatggaa

SEQ ID NO: 4521586 - DNA, 25 bp, Homo sapien
gggcccgacaggcagccgtggcaga

SEQ ID NO: 4521587 - DNA, 25 bp, Homo sapien
aggcagccgtggcagagcgagacat

SEQ ID NO: 4521588 - DNA, 25 bp, Homo sapien
cgacaggcagccgtggcagagcgag

SEQ ID NO: 4521589 - DNA, 25 bp, Homo sapien
ctgagggtccctgtaagacggccag

SEQ ID NO: 4521590 - DNA, 25 bp, Homo sapien
tctgggtcgtctgttctggtgtctt

SEQ ID NO: 4521591 - DNA, 25 bp, Homo sapien
tgtcagtggcgagggacgccaacaa

SEQ ID NO: 4521592 - DNA, 25 bp, Homo sapien
agcttcacgccacacaaagttggaa

SEQ ID NO: 4521593 - DNA, 25 bp, Homo sapien
ttccaggtcctggctacacgacggc

SEQ ID NO: 4521594 - DNA, 25 bp, Homo sapien
ggcctgccgtgggtcaagtggtgtc

SEQ ID NO: 4521595 - DNA, 25 bp, Homo sapien
ctgccgtgggtcaagtggtgtccca

SEQ ID NO: 4521596 - DNA, 25 bp, Homo sapien
gatcagacaggaaccgccctgcagc

SEQ ID NO: 4521597 - DNA, 25 bp, Homo sapien
cagatcagacaggaaccgccctgca

SEQ ID NO: 4521598 - DNA, 25 bp, Homo sapien
tgtgccagactctaggccttttctg

SEQ ID NO: 4521599 - DNA, 25 bp, Homo sapien
ctgtcctgtgccagactctaggcct

SEQ ID NO: 4521600 - DNA, 25 bp, Homo sapien
ccccatgcccagagctatcgttggg

SEQ ID NO: 4521601 - DNA, 25 bp, Homo sapien
ctgtgtctgcgtggggcggctccag

SEQ ID NO: 4521602 - DNA, 25 bp, Homo sapien
gagcgggacacacgcccgggacctg

SEQ ID NO: 4521603 - DNA, 25 bp, Homo sapien
tgccatgctagatgtgcacaaggtg

SEQ ID NO: 4521604 - DNA, 25 bp, Homo sapien
ccatgctagatgtgcacaaggtggg

SEQ ID NO: 4521605 - DNA, 25 bp, Homo sapien
gtggagcgggacacacgcccgggac

SEQ ID NO: 4521606 - DNA, 25 bp, Homo sapien
tggcgtagcagtgccctcggacacc

SEQ ID NO: 4521607 - DNA, 25 bp, Homo sapien
caccaggaggcttgtgctgtcagct

SEQ ID NO: 4521608 - DNA, 25 bp, Homo sapien
caggatcctctggagacacatggcc

SEQ ID NO: 4521609 - DNA, 25 bp, Homo sapien
gatcctctggagacacatggccagg

SEQ ID NO: 4521610 - DNA, 25 bp, Homo sapien
gcgccacagtggagttgcctgcatg

SEQ ID NO: 4521611 - DNA, 25 bp, Homo sapien
tgagctcccagaaatcattccagga

SEQ ID NO: 4521612 - DNA, 25 bp, Homo sapien
cattccaggaatggcatggttcggg

SEQ ID NO: 4521613 - DNA, 25 bp, Homo sapien
gacactttggtcacaagacgctttg

SEQ ID NO: 4521614 - DNA, 25 bp, Homo sapien
tgaagccagcactggtgtttgggtc

SEQ ID NO: 4521615 - DNA, 25 bp, Homo sapien
cagcactggtgtttgggtccccgga

SEQ ID NO: 4521616 - DNA, 25 bp, Homo sapien
gccagcactggtgtttgggtccccg

SEQ ID NO: 4521617 - DNA, 25 bp, Homo sapien
actggtgtttgggtccccggagctg

SEQ ID NO: 4521618 - DNA, 25 bp, Homo sapien
catgttgtgcagaagcatcattcac

SEQ ID NO: 4521619 - DNA, 25 bp, Homo sapien
cgcaagcagagtgtcaagagtttaa

SEQ ID NO: 4521620 - DNA, 25 bp, Homo sapien
tggttaacttagaactccgctgtct

SEQ ID NO: 4521621 - DNA, 25 bp, Homo sapien
aaggtcaggaggaaactggattcac

SEQ ID NO: 4521622 - DNA, 25 bp, Homo sapien
gggtcactgagcagaggcggtgaag

SEQ ID NO: 4521623 - DNA, 25 bp, Homo sapien
tgcccccgcgccacaaggcagccat

SEQ ID NO: 4521624 - DNA, 25 bp, Homo sapien
gagcagaggcggtgaaggggacaga

SEQ ID NO: 4521625 - DNA, 25 bp, Homo sapien
cccccgcgccacaaggcagccatgg

SEQ ID NO: 4521626 - DNA, 25 bp, Homo sapien
tcccattgcaccctcggtcagcctc

SEQ ID NO: 4521627 - DNA, 25 bp, Homo sapien
attgcaccctcggtcagcctcccct

SEQ ID NO: 4521628 - DNA, 25 bp, Homo sapien
cccattgcaccctcggtcagcctcc

SEQ ID NO: 4521629 - DNA, 25 bp, Homo sapien
ttgcaccctcggtcagcctcccctc

SEQ ID NO: 4521630 - DNA, 25 bp, Homo sapien
ggctgtgactcgtggctgcagaaat

SEQ ID NO: 4521631 - DNA, 25 bp, Homo sapien
aaaagcaccagcactgggttcccca

SEQ ID NO: 4521632 - DNA, 25 bp, Homo sapien
ctcgtggctgcagaaatggaactgg

SEQ ID NO: 4521633 - DNA, 25 bp, Homo sapien
cacaaagctcagacgcacctgggct

SEQ ID NO: 4521634 - DNA, 25 bp, Homo sapien
cacgtcatacaaagtgccgaatgga

SEQ ID NO: 4521635 - DNA, 25 bp, Homo sapien
agctcagcaggatagagcaggccgg

SEQ ID NO: 4521636 - DNA, 25 bp, Homo sapien
gctattgatggccacgtcatacaaa

SEQ ID NO: 4521637 - DNA, 25 bp, Homo sapien
cgaatggagacggagcaaagtccag

SEQ ID NO: 4521638 - DNA, 25 bp, Homo sapien
tgaactcgtcgaaatccagggtctg

SEQ ID NO: 4521639 - DNA, 25 bp, Homo sapien
ggtctggtggagaacggtgccgtga

SEQ ID NO: 4521640 - DNA, 25 bp, Homo sapien
cggtgccgtgaggagtcacgcaggt

SEQ ID NO: 4521641 - DNA, 25 bp, Homo sapien
tctgggcctcagtggacggtgtgca

SEQ ID NO: 4521642 - DNA, 25 bp, Homo sapien
acgcatgtgcgtctgtggtcctccg

SEQ ID NO: 4521643 - DNA, 25 bp, Homo sapien
ccacggctgcgtgtgtttaattgtc

SEQ ID NO: 4521644 - DNA, 25 bp, Homo sapien
tccgaaacagaggtgaatcatccgc

SEQ ID NO: 4521645 - DNA, 25 bp, Homo sapien
cgccttggaggctgtcagtcctgat

SEQ ID NO: 4521646 - DNA, 25 bp, Homo sapien
ccaggtataaagctcaactctgcac

SEQ ID NO: 4521647 - DNA, 25 bp, Homo sapien
tgactgccaggtataaagctcaact

SEQ ID NO: 4521648 - DNA, 25 bp, Homo sapien
catgttgactgccaggtataaagct

SEQ ID NO: 4521649 - DNA, 25 bp, Homo sapien
tgccaggtataaagctcaactctgc

SEQ ID NO: 4521650 - DNA, 25 bp, Homo sapien
acagcaggcttgttactaccgaagt

SEQ ID NO: 4521651 - DNA, 25 bp, Homo sapien
tactaccgaagtttgctgaatcaac

SEQ ID NO: 4521652 - DNA, 25 bp, Homo sapien
ggacaaccctgcagatgagctggag

SEQ ID NO: 4521653 - DNA, 25 bp, Homo sapien
gccttccttagacttggtagaaaca

SEQ ID NO: 4521654 - DNA, 25 bp, Homo sapien
ggagagcccgccctgcggccccctg

SEQ ID NO: 4521655 - DNA, 25 bp, Homo sapien
tgccgccacccccaggtaggttcca

SEQ ID NO: 4521656 - DNA, 25 bp, Homo sapien
ccctgcggccccctggtcctgccgc

SEQ ID NO: 4521657 - DNA, 25 bp, Homo sapien
gcggccccctggtcctgccgccacc

SEQ ID NO: 4521658 - DNA, 25 bp, Homo sapien
gaagcgtccactcctacactggttt

SEQ ID NO: 4521659 - DNA, 25 bp, Homo sapien
actggtttcaaaccgcgcagaggag

SEQ ID NO: 4521660 - DNA, 25 bp, Homo sapien
gcgtccactcctacactggtttcaa

SEQ ID NO: 4521661 - DNA, 25 bp, Homo sapien
tacactggtttcaaaccgcgcagag

SEQ ID NO: 4521662 - DNA, 25 bp, Homo sapien
cacacacgatagtggacaggacgtt

SEQ ID NO: 4521663 - DNA, 25 bp, Homo sapien
acaggacgttgagggcacacacgct

SEQ ID NO: 4521664 - DNA, 25 bp, Homo sapien
tctgcatacagcacatggctgtggc

SEQ ID NO: 4521665 - DNA, 25 bp, Homo sapien
aggacatcggaggagaccatctgca

SEQ ID NO: 4521666 - DNA, 25 bp, Homo sapien
ttatttccgctagttcattcagtag

SEQ ID NO: 4521667 - DNA, 25 bp, Homo sapien
tatttccgctagttcattcagtagt

SEQ ID NO: 4521668 - DNA, 25 bp, Homo sapien
atttatttccgctagttcattcagt

SEQ ID NO: 4521669 - DNA, 25 bp, Homo sapien
tttccgctagttcattcagtagttt

SEQ ID NO: 4521670 - DNA, 25 bp, Homo sapien
gacctagtatggcttccagtaacct

SEQ ID NO: 4521671 - DNA, 25 bp, Homo sapien
aaatgagggcatatttgagacctag

SEQ ID NO: 4521672 - DNA, 25 bp, Homo sapien
ggtcttatatgcaatatgtctggca

SEQ ID NO: 4521673 - DNA, 25 bp, Homo sapien
gcctcataaagctgagttgaaagtt

SEQ ID NO: 4521674 - DNA, 25 bp, Homo sapien
gcatgcacaagcagcgcccagcggg

SEQ ID NO: 4521675 - DNA, 25 bp, Homo sapien
atgcatgcacaagcagcgcccagcg

SEQ ID NO: 4521676 - DNA, 25 bp, Homo sapien
gaaatgcatgcacaagcagcgccca

SEQ ID NO: 4521677 - DNA, 25 bp, Homo sapien
aaatgcatgcacaagcagcgcccag

SEQ ID NO: 4521678 - DNA, 25 bp, Homo sapien
cagttctcctgcagcgggttcagct

SEQ ID NO: 4521679 - DNA, 25 bp, Homo sapien
agccggacgactggtgctgcagctc

SEQ ID NO: 4521680 - DNA, 25 bp, Homo sapien
tctccccgaggttgctgcagccgga

SEQ ID NO: 4521681 - DNA, 25 bp, Homo sapien
cagcgtctccccgaggttgctgcag

SEQ ID NO: 4521682 - DNA, 25 bp, Homo sapien
agagtacccctcagtgttcgggtca

SEQ ID NO: 4521683 - DNA, 25 bp, Homo sapien
ctcctggttagttccctgacctcga

SEQ ID NO: 4521684 - DNA, 25 bp, Homo sapien
gacctcgacatctgggtgtgcaggc

SEQ ID NO: 4521685 - DNA, 25 bp, Homo sapien
tagttccctgacctcgacatctggg

SEQ ID NO: 4521686 - DNA, 25 bp, Homo sapien
gcacaccaaggccagtatccttgga

SEQ ID NO: 4521687 - DNA, 25 bp, Homo sapien
ggcacaccaaggccagtatccttgg

SEQ ID NO: 4521688 - DNA, 25 bp, Homo sapien
gtgtcaccaacatcgacagtttggg

SEQ ID NO: 4521689 - DNA, 25 bp, Homo sapien
tgggaccaatcaaaactaccttcac

SEQ ID NO: 4521690 - DNA, 25 bp, Homo sapien
ggcataaactcagggccaacataga

SEQ ID NO: 4521691 - DNA, 25 bp, Homo sapien
ctgtctccccggcataaactcaggg

SEQ ID NO: 4521692 - DNA, 25 bp, Homo sapien
ggctcaaagctactcgccaagcagc

SEQ ID NO: 4521693 - DNA, 25 bp, Homo sapien
ttggatgacacggagccactttccc

SEQ ID NO: 4521694 - DNA, 25 bp, Homo sapien
ccactttcccgcgagtggctcaaag

SEQ ID NO: 4521695 - DNA, 25 bp, Homo sapien
ccgtaggttggatgacacggagcca

SEQ ID NO: 4521696 - DNA, 25 bp, Homo sapien
ctgaatgcagtccctgccagacctg

SEQ ID NO: 4521697 - DNA, 25 bp, Homo sapien
tgaatgcagtccctgccagacctga

SEQ ID NO: 4521698 - DNA, 25 bp, Homo sapien
ctgccagacctgaggacaaagccgg

SEQ ID NO: 4521699 - DNA, 25 bp, Homo sapien
ggtcatcaggctcatcagctgggtg

SEQ ID NO: 4521700 - DNA, 25 bp, Homo sapien
tgggtggtcgctgcaggccagaaag

SEQ ID NO: 4521701 - DNA, 25 bp, Homo sapien
agtccataagggtcatcaggctcat

SEQ ID NO: 4521702 - DNA, 25 bp, Homo sapien
cagctgggtggtcgctgcaggccag

SEQ ID NO: 4521703 - DNA, 25 bp, Homo sapien
tgtccttggtaatacttccgaataa

SEQ ID NO: 4521704 - DNA, 25 bp, Homo sapien
tcagaaaggaaacttattaaatgta

SEQ ID NO: 4521705 - DNA, 25 bp, Homo sapien
gacatcaactattccttacatcttg

SEQ ID NO: 4521706 - DNA, 25 bp, Homo sapien
gaaatctatgaaaatgctatggaaa

SEQ ID NO: 4521707 - DNA, 25 bp, Homo sapien
tcccaagctgaagtaatccctacag

SEQ ID NO: 4521708 - DNA, 25 bp, Homo sapien
gaggagacctactagagattgtgaa

SEQ ID NO: 4521709 - DNA, 25 bp, Homo sapien
caatggcctcttagatgttcttggc

SEQ ID NO: 4521710 - DNA, 25 bp, Homo sapien
tcttaggtggactatagcaatggcc

SEQ ID NO: 4521711 - DNA, 25 bp, Homo sapien
cacctctgggtcaagatcttcctca

SEQ ID NO: 4521712 - DNA, 25 bp, Homo sapien
gttctcgtgctgtatcatctttcgg

SEQ ID NO: 4521713 - DNA, 25 bp, Homo sapien
cagtatctgaccaatcaccacgaag

SEQ ID NO: 4521714 - DNA, 25 bp, Homo sapien
tctcttccgcagaaggagttttaag

SEQ ID NO: 4521715 - DNA, 25 bp, Homo sapien
tcaaacgcttaactggtggttgtcg

SEQ ID NO: 4521716 - DNA, 25 bp, Homo sapien
gggcaaccattccagtagtccctcg

SEQ ID NO: 4521717 - DNA, 25 bp, Homo sapien
atgtcactctgcaggacttattatt

SEQ ID NO: 4521718 - DNA, 25 bp, Homo sapien
gtcactctgcaggacttattattaa

SEQ ID NO: 4521719 - DNA, 25 bp, Homo sapien
ggcaaccattccagtagtccctcga

SEQ ID NO: 4521720 - DNA, 25 bp, Homo sapien
actttgcattagatatgtttgcttg

SEQ ID NO: 4521721 - DNA, 25 bp, Homo sapien
ccattgtggcaagtaaattggcatt

SEQ ID NO: 4521722 - DNA, 25 bp, Homo sapien
gctataagaacaaccaacggcaagg

SEQ ID NO: 4521723 - DNA, 25 bp, Homo sapien
gtagttccattgtggcaagtaaatt

SEQ ID NO: 4521724 - DNA, 25 bp, Homo sapien
gattactaattactaatttggtgtc

SEQ ID NO: 4521725 - DNA, 25 bp, Homo sapien
ctgtagggattactaattactaatt

SEQ ID NO: 4521726 - DNA, 25 bp, Homo sapien
ttactaattactaatttggtgtcat

SEQ ID NO: 4521727 - DNA, 25 bp, Homo sapien
attactaattactaatttggtgtca

SEQ ID NO: 4521728 - DNA, 25 bp, Homo sapien
aatatattctccagtgtcattccaa

SEQ ID NO: 4521729 - DNA, 25 bp, Homo sapien
tatattctccagtgtcattccaaca

SEQ ID NO: 4521730 - DNA, 25 bp, Homo sapien
aaaatatattctccagtgtcattcc

SEQ ID NO: 4521731 - DNA, 25 bp, Homo sapien
atatattctccagtgtcattccaac

SEQ ID NO: 4521732 - DNA, 25 bp, Homo sapien
agcccgagggaccttttcctcatgt

SEQ ID NO: 4521733 - DNA, 25 bp, Homo sapien
cttgaagtttcaatctttagataaa

SEQ ID NO: 4521734 - DNA, 25 bp, Homo sapien
aggtagtggccccacagccaggaca

SEQ ID NO: 4521735 - DNA, 25 bp, Homo sapien
gataaattctcttcttcccaggtag

SEQ ID NO: 4521736 - DNA, 25 bp, Homo sapien
actgcaccccctgcgtccccctgcc

SEQ ID NO: 4521737 - DNA, 25 bp, Homo sapien
gcatgccaccattcacacttaattt

SEQ ID NO: 4521738 - DNA, 25 bp, Homo sapien
tatttgaagacatgttctcactttg

SEQ ID NO: 4521739 - DNA, 25 bp, Homo sapien
tcagtttatttcccagtgctttggg

SEQ ID NO: 4521740 - DNA, 25 bp, Homo sapien
gctttgccatgtagcgaatgatggg

SEQ ID NO: 4521741 - DNA, 25 bp, Homo sapien
gtgctgctttgccatgtagcgaatg

SEQ ID NO: 4521742 - DNA, 25 bp, Homo sapien
gatgtgggacaaggcgcagcacaga

SEQ ID NO: 4521743 - DNA, 25 bp, Homo sapien
gacaaggcgcagcacagacatggcc

SEQ ID NO: 4521744 - DNA, 25 bp, Homo sapien
tgtataggttttgcaatattctatg

SEQ ID NO: 4521745 - DNA, 25 bp, Homo sapien
tgtgccagcgacactggtcctgctg

SEQ ID NO: 4521746 - DNA, 25 bp, Homo sapien
ttcagcatcgaaactgtgccagcga

SEQ ID NO: 4521747 - DNA, 25 bp, Homo sapien
ggtcctgctggccttcgtagataag

SEQ ID NO: 4521748 - DNA, 25 bp, Homo sapien
gctgcccctgtgaatccaaacaaca

SEQ ID NO: 4521749 - DNA, 25 bp, Homo sapien
gagaattgaaccagccaaattcagc

SEQ ID NO: 4521750 - DNA, 25 bp, Homo sapien
tacacacactgcagaaagcagcatg

SEQ ID NO: 4521751 - DNA, 25 bp, Homo sapien
tagggagttgactagctgagcattc

SEQ ID NO: 4521752 - DNA, 25 bp, Homo sapien
actggcagccttctagggagttgac

SEQ ID NO: 4521753 - DNA, 25 bp, Homo sapien
caggcatggttaatggttacgctat

SEQ ID NO: 4521754 - DNA, 25 bp, Homo sapien
gacagtccgattcccaaacaggcat

SEQ ID NO: 4521755 - DNA, 25 bp, Homo sapien
aagcctttttgagatccacagtgag

SEQ ID NO: 4521756 - DNA, 25 bp, Homo sapien
tcatgacccacgatttaaaaaacac

SEQ ID NO: 4521757 - DNA, 25 bp, Homo sapien
tgtaataactacagtagcaagaaga

SEQ ID NO: 4521758 - DNA, 25 bp, Homo sapien
actacgtgtttagcagcagagctga

SEQ ID NO: 4521759 - DNA, 25 bp, Homo sapien
actattgggagaaaatacattacac

SEQ ID NO: 4521760 - DNA, 25 bp, Homo sapien
tacattacactcattgcttggaacc

SEQ ID NO: 4521761 - DNA, 25 bp, Homo sapien
tacacacattgaagcgtttacagca

SEQ ID NO: 4521762 - DNA, 25 bp, Homo sapien
caatcctctaaactgtgcctttggg

SEQ ID NO: 4521763 - DNA, 25 bp, Homo sapien
tacagcaatatgctccctgggttcg

SEQ ID NO: 4521764 - DNA, 25 bp, Homo sapien
tttgcaaacacatcctaaagctaca

SEQ ID NO: 4521765 - DNA, 25 bp, Homo sapien
atggagctgggccactaggctgagg

SEQ ID NO: 4521766 - DNA, 25 bp, Homo sapien
gagctgggccactaggctgaggtct

SEQ ID NO: 4521767 - DNA, 25 bp, Homo sapien
ccactaggctgaggtctggccctgt

SEQ ID NO: 4521768 - DNA, 25 bp, Homo sapien
ggccactaggctgaggtctggccct

SEQ ID NO: 4521769 - DNA, 25 bp, Homo sapien
tgagccctaagacgatcatcaggag

SEQ ID NO: 4521770 - DNA, 25 bp, Homo sapien
tatccgccggtattccaggtaacgc

SEQ ID NO: 4521771 - DNA, 25 bp, Homo sapien
tatacccgaagacgtactggaggcg

SEQ ID NO: 4521772 - DNA, 25 bp, Homo sapien
aagatgtccttgtagtccccgatga

SEQ ID NO: 4521773 - DNA, 25 bp, Homo sapien
aggggccctgcgacccctgcgagcc

SEQ ID NO: 4521774 - DNA, 25 bp, Homo sapien
cggcgggcgccctgaggcgaggggc

SEQ ID NO: 4521775 - DNA, 25 bp, Homo sapien
ggcgggcgccctgaggcgaggggcc

SEQ ID NO: 4521776 - DNA, 25 bp, Homo sapien
gcccggcgggcgccctgaggcgagg

SEQ ID NO: 4521777 - DNA, 25 bp, Homo sapien
ccggggtttccgctatggctccagt

SEQ ID NO: 4521778 - DNA, 25 bp, Homo sapien
cgtctctgagaacccgggcgtcttc

SEQ ID NO: 4521779 - DNA, 25 bp, Homo sapien
ggtttccgctatggctccagtctct

SEQ ID NO: 4521780 - DNA, 25 bp, Homo sapien
gcctcctcggcaaagccgtctctga

SEQ ID NO: 4521781 - DNA, 25 bp, Homo sapien
caggtgccggcgcacactccggtag

SEQ ID NO: 4521782 - DNA, 25 bp, Homo sapien
ttgcgggtcggcgacccgctaacgc

SEQ ID NO: 4521783 - DNA, 25 bp, Homo sapien
tgtcggctgagactgcgtgctgcgt

SEQ ID NO: 4521784 - DNA, 25 bp, Homo sapien
actccggtaggcaagcagccgcggc

SEQ ID NO: 4521785 - DNA, 25 bp, Homo sapien
caagatgcaactatatcctcaggca

SEQ ID NO: 4521786 - DNA, 25 bp, Homo sapien
tgttccacacaagatgcaactatat

SEQ ID NO: 4521787 - DNA, 25 bp, Homo sapien
tatcctcaggcatcaattttaatga

SEQ ID NO: 4521788 - DNA, 25 bp, Homo sapien
tgcaactatatcctcaggcatcaat

SEQ ID NO: 4521789 - DNA, 25 bp, Homo sapien
tgtgtccagaggttgacccactgtt

SEQ ID NO: 4521790 - DNA, 25 bp, Homo sapien
tctgttcttgttgcctggactcctc

SEQ ID NO: 4521791 - DNA, 25 bp, Homo sapien
gccagatgttctcttgcctccagtg

SEQ ID NO: 4521792 - DNA, 25 bp, Homo sapien
tgagctttgaaagcctcgggccaac

SEQ ID NO: 4521793 - DNA, 25 bp, Homo sapien
ttcacactcggggaagcgtggaagt

SEQ ID NO: 4521794 - DNA, 25 bp, Homo sapien
gagtcagcactgacgacgatgggca

SEQ ID NO: 4521795 - DNA, 25 bp, Homo sapien
ggagtcagcactgacgacgatgggc

SEQ ID NO: 4521796 - DNA, 25 bp, Homo sapien
tggagtcagcactgacgacgatggg

SEQ ID NO: 4521797 - DNA, 25 bp, Homo sapien
aagacagtccccacagaacctgaga

SEQ ID NO: 4521798 - DNA, 25 bp, Homo sapien
tctccattgtgtctctccagagaaa

SEQ ID NO: 4521799 - DNA, 25 bp, Homo sapien
tcttcctcctatctcatgaaaacat

SEQ ID NO: 4521800 - DNA, 25 bp, Homo sapien
aaatatcttcctcctatctcatgaa

SEQ ID NO: 4521801 - DNA, 25 bp, Homo sapien
aaggctgcatcttgtgtcaagcgcc

SEQ ID NO: 4521802 - DNA, 25 bp, Homo sapien
catcttgtgtcaagcgccgtggaag

SEQ ID NO: 4521803 - DNA, 25 bp, Homo sapien
agcgccgtggaagggaatagtgaag

SEQ ID NO: 4521804 - DNA, 25 bp, Homo sapien
atgttccaggtgccgcgcagacagg

SEQ ID NO: 4521805 - DNA, 25 bp, Homo sapien
taggagcatccccaagctgccagaa

SEQ ID NO: 4521806 - DNA, 25 bp, Homo sapien
gacagcacactaacctttaataaat

SEQ ID NO: 4521807 - DNA, 25 bp, Homo sapien
gtgataacccaactaattcatagca

SEQ ID NO: 4521808 - DNA, 25 bp, Homo sapien
tatggaaaacttatagtgataaccc

SEQ ID NO: 4521809 - DNA, 25 bp, Homo sapien
cactttcaaagatggccttcacatt

SEQ ID NO: 4521810 - DNA, 25 bp, Homo sapien
ttgccagtcagcacaacagagctcc

SEQ ID NO: 4521811 - DNA, 25 bp, Homo sapien
gaagactaaagtggatcttgccagt

SEQ ID NO: 4521812 - DNA, 25 bp, Homo sapien
agtggatcttgccagtcagcacaac

SEQ ID NO: 4521813 - DNA, 25 bp, Homo sapien
gaaaccttctcacaacaggaggctg

SEQ ID NO: 4521814 - DNA, 25 bp, Homo sapien
aataaatacgcgagaggaacctcag

SEQ ID NO: 4521815 - DNA, 25 bp, Homo sapien
tcagagtagactggctcaccgagat

SEQ ID NO: 4521816 - DNA, 25 bp, Homo sapien
ttgcattcgccagcctacaaaggga

SEQ ID NO: 4521817 - DNA, 25 bp, Homo sapien
gctctccttcatctcgctctgtgtg

SEQ ID NO: 4521818 - DNA, 25 bp, Homo sapien
atggcagcaccaaaacgctccagca

SEQ ID NO: 4521819 - DNA, 25 bp, Homo sapien
ctgtaagcgcagaatgatgaaaaga

SEQ ID NO: 4521820 - DNA, 25 bp, Homo sapien
cacatcagtcactccggcagggact

SEQ ID NO: 4521821 - DNA, 25 bp, Homo sapien
gcagggcgaatggagtggctgcaaa

SEQ ID NO: 4521822 - DNA, 25 bp, Homo sapien
agctgtgggcccaaaactgcttctt

SEQ ID NO: 4521823 - DNA, 25 bp, Homo sapien
gggcgaatggagtggctgcaaagac

SEQ ID NO: 4521824 - DNA, 25 bp, Homo sapien
ggcccaaaactgcttcttctcacta

SEQ ID NO: 4521825 - DNA, 25 bp, Homo sapien
gagacgacacctatgagtcccgaca

SEQ ID NO: 4521826 - DNA, 25 bp, Homo sapien
tcttccaggagacgacacctatgag

SEQ ID NO: 4521827 - DNA, 25 bp, Homo sapien
acacctatgagtcccgacagcagca

SEQ ID NO: 4521828 - DNA, 25 bp, Homo sapien
gaggcctcttccaggagacgacacc

SEQ ID NO: 4521829 - DNA, 25 bp, Homo sapien
gccacagtgctatggtggacactca

SEQ ID NO: 4521830 - DNA, 25 bp, Homo sapien
gtgctatggtggacactcatgctca

SEQ ID NO: 4521831 - DNA, 25 bp, Homo sapien
ctcagccacagtgctatggtggaca

SEQ ID NO: 4521832 - DNA, 25 bp, Homo sapien
cacagtgctatggtggacactcatg

SEQ ID NO: 4521833 - DNA, 25 bp, Homo sapien
gaggaggcttaaccctaatgacgga

SEQ ID NO: 4521834 - DNA, 25 bp, Homo sapien
ccctgataccggaaacactgacaca

SEQ ID NO: 4521835 - DNA, 25 bp, Homo sapien
tatttgtttcttcgggagtgggaca

SEQ ID NO: 4521836 - DNA, 25 bp, Homo sapien
tgacacaggtccaaatacgaaggcc

SEQ ID NO: 4521837 - DNA, 25 bp, Homo sapien
cttcaggggctgcaccaacacatca

SEQ ID NO: 4521838 - DNA, 25 bp, Homo sapien
cactcataatgtccctgagaaaagt

SEQ ID NO: 4521839 - DNA, 25 bp, Homo sapien
ctgtggtccaaacatcctccacacc

SEQ ID NO: 4521840 - DNA, 25 bp, Homo sapien
ggtccaaacatcctccacaccattt

SEQ ID NO: 4521841 - DNA, 25 bp, Homo sapien
tggtctgttctgatgcaatgcatgc

SEQ ID NO: 4521842 - DNA, 25 bp, Homo sapien
cctcttacgggtatctactctgaca

SEQ ID NO: 4521843 - DNA, 25 bp, Homo sapien
gaaaggtgaaatacaccatggtctg

SEQ ID NO: 4521844 - DNA, 25 bp, Homo sapien
taaattgatgacaaagatcacctca

SEQ ID NO: 4521845 - DNA, 25 bp, Homo sapien
catgtaacagaatgcgtagacctac

SEQ ID NO: 4521846 - DNA, 25 bp, Homo sapien
gttttggtaaaacccagtgatggca

SEQ ID NO: 4521847 - DNA, 25 bp, Homo sapien
catactcaatggtttcaatcctggg

SEQ ID NO: 4521848 - DNA, 25 bp, Homo sapien
gggaacaatttcatagcatctctca

SEQ ID NO: 4521849 - DNA, 25 bp, Homo sapien
ggaccaatatggactgctcgcctgc

SEQ ID NO: 4521850 - DNA, 25 bp, Homo sapien
tgctttgctgaaaataaggtcccct

SEQ ID NO: 4521851 - DNA, 25 bp, Homo sapien
gaatgacatcttcacgagactcctg

SEQ ID NO: 4521852 - DNA, 25 bp, Homo sapien
tatcatcacgtctgaagagcaggtc

SEQ ID NO: 4521853 - DNA, 25 bp, Homo sapien
gcacaaattgctaccaaaatcctcg

SEQ ID NO: 4521854 - DNA, 25 bp, Homo sapien
ttctgaaagttgtcttctgcacaaa

SEQ ID NO: 4521855 - DNA, 25 bp, Homo sapien
tgtcttctgcacaaattgctaccaa

SEQ ID NO: 4521856 - DNA, 25 bp, Homo sapien
taccaaaatcctcgccagtgtctct

SEQ ID NO: 4521857 - DNA, 25 bp, Homo sapien
tctctagcacatgtaacccattaaa

SEQ ID NO: 4521858 - DNA, 25 bp, Homo sapien
acatgtaacccattaaaaacatcac

SEQ ID NO: 4521859 - DNA, 25 bp, Homo sapien
gtatactctctagcacatgtaaccc

SEQ ID NO: 4521860 - DNA, 25 bp, Homo sapien
gcacatgtaacccattaaaaacatc

SEQ ID NO: 4521861 - DNA, 25 bp, Homo sapien
atgagctgaaactacggaccccgta

SEQ ID NO: 4521862 - DNA, 25 bp, Homo sapien
ggttgaaatctacggacagccatga

SEQ ID NO: 4521863 - DNA, 25 bp, Homo sapien
tgtcctaattctgacaggatccggt

SEQ ID NO: 4521864 - DNA, 25 bp, Homo sapien
gggacaaattcgtctgtggttgaaa

SEQ ID NO: 4521865 - DNA, 25 bp, Homo sapien
tacaatgtcaggaatcatattgtaa

SEQ ID NO: 4521866 - DNA, 25 bp, Homo sapien
tctacaatgtcaggaatcatattgt

SEQ ID NO: 4521867 - DNA, 25 bp, Homo sapien
ttctctacaatgtcaggaatcatat

SEQ ID NO: 4521868 - DNA, 25 bp, Homo sapien
caatgtcaggaatcatattgtaaaa

SEQ ID NO: 4521869 - DNA, 25 bp, Homo sapien
ctgaatccccagctatcctgtggtt

SEQ ID NO: 4521870 - DNA, 25 bp, Homo sapien
agctatcctgtggtttgcaccttta

SEQ ID NO: 4521871 - DNA, 25 bp, Homo sapien
gtttgcacctttatgaccttctatc

SEQ ID NO: 4521872 - DNA, 25 bp, Homo sapien
ttgcacctttatgaccttctatccc

SEQ ID NO: 4521873 - DNA, 25 bp, Homo sapien
ctctcaccacagggtcggctgggcc

SEQ ID NO: 4521874 - DNA, 25 bp, Homo sapien
ctgcctctcaccacagggtcggctg

SEQ ID NO: 4521875 - DNA, 25 bp, Homo sapien
gcctctcaccacagggtcggctggg

SEQ ID NO: 4521876 - DNA, 25 bp, Homo sapien
ctcaccacagggtcggctgggccca

SEQ ID NO: 4521877 - DNA, 25 bp, Homo sapien
agtaggacagcacacctctggtgca

SEQ ID NO: 4521878 - DNA, 25 bp, Homo sapien
catatgcccatcataacccacacgg

SEQ ID NO: 4521879 - DNA, 25 bp, Homo sapien
aatgcacgcatacaccggggtaata

SEQ ID NO: 4521880 - DNA, 25 bp, Homo sapien
gcatacaccggggtaatacgtaagc

SEQ ID NO: 4521881 - DNA, 25 bp, Homo sapien
ggaagacagcactgaacctagccat

SEQ ID NO: 4521882 - DNA, 25 bp, Homo sapien
tggaagacagcactgaacctagcca

SEQ ID NO: 4521883 - DNA, 25 bp, Homo sapien
agtccggactcccacatcaagctgg

SEQ ID NO: 4521884 - DNA, 25 bp, Homo sapien
aggtcaccccgtgggccacggcagt

SEQ ID NO: 4521885 - DNA, 25 bp, Homo sapien
aagatggatttcttcaaagcacagg

SEQ ID NO: 4521886 - DNA, 25 bp, Homo sapien
agatggatttcttcaaagcacaggg

SEQ ID NO: 4521887 - DNA, 25 bp, Homo sapien
ctaaagatggatttcttcaaagcac

SEQ ID NO: 4521888 - DNA, 25 bp, Homo sapien
aaagatggatttcttcaaagcacag

SEQ ID NO: 4521889 - DNA, 25 bp, Homo sapien
tctttggacacacatcctcccttta

SEQ ID NO: 4521890 - DNA, 25 bp, Homo sapien
gtataatatataactctttggacac

SEQ ID NO: 4521891 - DNA, 25 bp, Homo sapien
ccatgaacagcgtgatgtcgaagtc

SEQ ID NO: 4521892 - DNA, 25 bp, Homo sapien
tgatgtcgaagtcccgctcaccaat

SEQ ID NO: 4521893 - DNA, 25 bp, Homo sapien
ctacatctgtaggacccaggacagt

SEQ ID NO: 4521894 - DNA, 25 bp, Homo sapien
ggacccgcaacccagaggactgcag

SEQ ID NO: 4521895 - DNA, 25 bp, Homo sapien
ctctacatctgtaggacccaggaca

SEQ ID NO: 4521896 - DNA, 25 bp, Homo sapien
ggacagtccttctggacccgcaacc

SEQ ID NO: 4521897 - DNA, 25 bp, Homo sapien
cctgaatccagggtagacagccggg

SEQ ID NO: 4521898 - DNA, 25 bp, Homo sapien
tccctgaatccagggtagacagccg

SEQ ID NO: 4521899 - DNA, 25 bp, Homo sapien
ctccctgaatccagggtagacagcc

SEQ ID NO: 4521900 - DNA, 25 bp, Homo sapien
tgaatccagggtagacagccgggaa

SEQ ID NO: 4521901 - DNA, 25 bp, Homo sapien
ttaagtaggagatgagctaagcctc

SEQ ID NO: 4521902 - DNA, 25 bp, Homo sapien
taagcctctggtactctcggtccac

SEQ ID NO: 4521903 - DNA, 25 bp, Homo sapien
tggtactctcggtccacagaggcac

SEQ ID NO: 4521904 - DNA, 25 bp, Homo sapien
tgagctaagcctctggtactctcgg

SEQ ID NO: 4521905 - DNA, 25 bp, Homo sapien
gccagcggatacctgcccctcataa

SEQ ID NO: 4521906 - DNA, 25 bp, Homo sapien
ctgcccctcataaaatactcccctc

SEQ ID NO: 4521907 - DNA, 25 bp, Homo sapien
ccagcggatacctgcccctcataaa

SEQ ID NO: 4521908 - DNA, 25 bp, Homo sapien
gcagggggtcctcaaacaatggaaa

SEQ ID NO: 4521909 - DNA, 25 bp, Homo sapien
tcaacttggtccagtggaatggctc

SEQ ID NO: 4521910 - DNA, 25 bp, Homo sapien
tgtctccaaccttgccgagtcctcc

SEQ ID NO: 4521911 - DNA, 25 bp, Homo sapien
ctctgtattcatcacagacctccgg

SEQ ID NO: 4521912 - DNA, 25 bp, Homo sapien
ggttccagcagacttaaacctcagt

SEQ ID NO: 4521913 - DNA, 25 bp, Homo sapien
gttccagcagacttaaacctcagtg

SEQ ID NO: 4521914 - DNA, 25 bp, Homo sapien
tggttccagcagacttaaacctcag

SEQ ID NO: 4521915 - DNA, 25 bp, Homo sapien
cggagcccgtccccgcctggtcgcg

SEQ ID NO: 4521916 - DNA, 25 bp, Homo sapien
ccgtccccgcctggtcgcggacact

SEQ ID NO: 4521917 - DNA, 25 bp, Homo sapien
gcccgtccccgcctggtcgcggaca

SEQ ID NO: 4521918 - DNA, 25 bp, Homo sapien
tccccgcctggtcgcggacactcac

SEQ ID NO: 4521919 - DNA, 25 bp, Homo sapien
ctgccacgatgaggcatccgagcgc

SEQ ID NO: 4521920 - DNA, 25 bp, Homo sapien
gcgcggcgaagctgactgccacgat

SEQ ID NO: 4521921 - DNA, 25 bp, Homo sapien
gccagcgcggcgaagctgactgcca

SEQ ID NO: 4521922 - DNA, 25 bp, Homo sapien
aggagtggcggacgcgggccgaggt

SEQ ID NO: 4521923 - DNA, 25 bp, Homo sapien
cacgatgcgggagcggcccgggcac

SEQ ID NO: 4521924 - DNA, 25 bp, Homo sapien
cccgagcgccagcacgatgcgggag

SEQ ID NO: 4521925 - DNA, 25 bp, Homo sapien
gcgccagcacgatgcgggagcggcc

SEQ ID NO: 4521926 - DNA, 25 bp, Homo sapien
agcacgatgcgggagcggcccgggc

SEQ ID NO: 4521927 - DNA, 25 bp, Homo sapien
aacggcatcagcctccgcggcggag

SEQ ID NO: 4521928 - DNA, 25 bp, Homo sapien
gcggctgcaggtctgcggaaggaga

SEQ ID NO: 4521929 - DNA, 25 bp, Homo sapien
gcatcaagggcaacggcatcagcct

SEQ ID NO: 4521930 - DNA, 25 bp, Homo sapien
cggcagcgcatcaagggcaacggca

SEQ ID NO: 4521931 - DNA, 25 bp, Homo sapien
cgctgagagaactcagctctggagg

SEQ ID NO: 4521932 - DNA, 25 bp, Homo sapien
gagggaaattccgagcgctgggccg

SEQ ID NO: 4521933 - DNA, 25 bp, Homo sapien
gttcgagaatctcccaagccatccg

SEQ ID NO: 4521934 - DNA, 25 bp, Homo sapien
ctcttgaatgcaaaaatccaagatc

SEQ ID NO: 4521935 - DNA, 25 bp, Homo sapien
cccctgtactcagagaactttcggt

SEQ ID NO: 4521936 - DNA, 25 bp, Homo sapien
gatcgaagaatgagttgcaagcccc

SEQ ID NO: 4521937 - DNA, 25 bp, Homo sapien
ggttcagtgttatggagactacaca

SEQ ID NO: 4521938 - DNA, 25 bp, Homo sapien
tctagtgggaagactggcggcacac

SEQ ID NO: 4521939 - DNA, 25 bp, Homo sapien
cataatggatgagaaagaatctaga

SEQ ID NO: 4521940 - DNA, 25 bp, Homo sapien
tagagagttgtgcttggatctcaca

SEQ ID NO: 4521941 - DNA, 25 bp, Homo sapien
ctgtccatacataatggatgagaaa

SEQ ID NO: 4521942 - DNA, 25 bp, Homo sapien
gaatctagacccttggtagcctctc

SEQ ID NO: 4521943 - DNA, 25 bp, Homo sapien
gccaggttcagcgaccaccttaggg

SEQ ID NO: 4521944 - DNA, 25 bp, Homo sapien
gaggagctctgccttatccaatcca

SEQ ID NO: 4521945 - DNA, 25 bp, Homo sapien
ggaagtagatatcggccactctgac

SEQ ID NO: 4521946 - DNA, 25 bp, Homo sapien
catcctggcgcatttgtaagtaaga

SEQ ID NO: 4521947 - DNA, 25 bp, Homo sapien
tcttttgccaatcttctgtcaaaca

SEQ ID NO: 4521948 - DNA, 25 bp, Homo sapien
cattaattaaaccttcaaacattgc

SEQ ID NO: 4521949 - DNA, 25 bp, Homo sapien
gctgtcagttgttcttttgccaatc

SEQ ID NO: 4521950 - DNA, 25 bp, Homo sapien
cagttgttcttttgccaatcttctg

SEQ ID NO: 4521951 - DNA, 25 bp, Homo sapien
tttacaagtttcctagcgtgtagga

SEQ ID NO: 4521952 - DNA, 25 bp, Homo sapien
acaagtttcctagcgtgtaggagct

SEQ ID NO: 4521953 - DNA, 25 bp, Homo sapien
caagtttcctagcgtgtaggagctt

SEQ ID NO: 4521954 - DNA, 25 bp, Homo sapien
tacaagtttcctagcgtgtaggagc

SEQ ID NO: 4521955 - DNA, 25 bp, Homo sapien
agttgatagagcaaactttaagaag

SEQ ID NO: 4521956 - DNA, 25 bp, Homo sapien
cacagttgatagagcaaactttaag

SEQ ID NO: 4521957 - DNA, 25 bp, Homo sapien
tctcacagttgatagagcaaacttt

SEQ ID NO: 4521958 - DNA, 25 bp, Homo sapien
ctcacagttgatagagcaaacttta

SEQ ID NO: 4521959 - DNA, 25 bp, Homo sapien
tgaagagctagcagccccatttgtg

SEQ ID NO: 4521960 - DNA, 25 bp, Homo sapien
tcacaagtccagtgtaagccccatg

SEQ ID NO: 4521961 - DNA, 25 bp, Homo sapien
catgcttaatcagaaccacgagaag

SEQ ID NO: 4521962 - DNA, 25 bp, Homo sapien
gggcaggacccatgactcaagaagt

SEQ ID NO: 4521963 - DNA, 25 bp, Homo sapien
tcataataattagtctaccttacag

SEQ ID NO: 4521964 - DNA, 25 bp, Homo sapien
gaacacaggtattgacatccatcaa

SEQ ID NO: 4521965 - DNA, 25 bp, Homo sapien
tgtctctcgaggcattacccttgta

SEQ ID NO: 4521966 - DNA, 25 bp, Homo sapien
gaggcattacccttgtatttgttta

SEQ ID NO: 4521967 - DNA, 25 bp, Homo sapien
ggtgaaggcatccaagctgagtctc

SEQ ID NO: 4521968 - DNA, 25 bp, Homo sapien
tgcagtgattcagtccccaagtcca

SEQ ID NO: 4521969 - DNA, 25 bp, Homo sapien
ggtgctctggacaacctctacaaag

SEQ ID NO: 4521970 - DNA, 25 bp, Homo sapien
tagctccgcagctcatggcaaagat

SEQ ID NO: 4521971 - DNA, 25 bp, Homo sapien
gaacacctccagtgtaatgccctca

SEQ ID NO: 4521972 - DNA, 25 bp, Homo sapien
aagatccgagaagaggatcctgacc

SEQ ID NO: 4521973 - DNA, 25 bp, Homo sapien
agatccgagaagaggatcctgacca

SEQ ID NO: 4521974 - DNA, 25 bp, Homo sapien
cactcaaagtgtttggcactgtggc

SEQ ID NO: 4521975 - DNA, 25 bp, Homo sapien
tactgggttggggcacatgcatgag

SEQ ID NO: 4521976 - DNA, 25 bp, Homo sapien
ctactgggttggggcacatgcatga

SEQ ID NO: 4521977 - DNA, 25 bp, Homo sapien
actgggttggggcacatgcatgagc

SEQ ID NO: 4521978 - DNA, 25 bp, Homo sapien
gctttcaccattgagatgatgtcaa

SEQ ID NO: 4521979 - DNA, 25 bp, Homo sapien
gactaatacagtatcttacttagca

SEQ ID NO: 4521980 - DNA, 25 bp, Homo sapien
ctgaaaacttgacaggacacatcct

SEQ ID NO: 4521981 - DNA, 25 bp, Homo sapien
catatcttacaagaaaaacgtgagc

SEQ ID NO: 4521982 - DNA, 25 bp, Homo sapien
gagacgaggtcttcagatgcccctt

SEQ ID NO: 4521983 - DNA, 25 bp, Homo sapien
tgccctggagacgaggtcttcagat

SEQ ID NO: 4521984 - DNA, 25 bp, Homo sapien
cctggagacgaggtcttcagatgcc

SEQ ID NO: 4521985 - DNA, 25 bp, Homo sapien
ggatgccctggagacgaggtcttca

SEQ ID NO: 4521986 - DNA, 25 bp, Homo sapien
aaagcaatctcgtcgcgtgtggcca

SEQ ID NO: 4521987 - DNA, 25 bp, Homo sapien
tctcgtcgcgtgtggccattgggat

SEQ ID NO: 4521988 - DNA, 25 bp, Homo sapien
tggaaaagcaatctcgtcgcgtgtg

SEQ ID NO: 4521989 - DNA, 25 bp, Homo sapien
ggccattgggatgattttctcctcc

SEQ ID NO: 4521990 - DNA, 25 bp, Homo sapien
acaacaggccccaataccggctcca

SEQ ID NO: 4521991 - DNA, 25 bp, Homo sapien
ttacgcccatttggcacatttcctt

SEQ ID NO: 4521992 - DNA, 25 bp, Homo sapien
cccaataccggctccacctgaacat

SEQ ID NO: 4521993 - DNA, 25 bp, Homo sapien
tcatcatttaccttacgcccatttg

SEQ ID NO: 4521994 - DNA, 25 bp, Homo sapien
catctaagagtgtaaagctccagaa

SEQ ID NO: 4521995 - DNA, 25 bp, Homo sapien
tccatctaagagtgtaaagctccag

SEQ ID NO: 4521996 - DNA, 25 bp, Homo sapien
atctaagagtgtaaagctccagaaa

SEQ ID NO: 4521997 - DNA, 25 bp, Homo sapien
ccatctaagagtgtaaagctccaga

SEQ ID NO: 4521998 - DNA, 25 bp, Homo sapien
gagggagtcattatccccaacacaa

SEQ ID NO: 4521999 - DNA, 25 bp, Homo sapien
gatgccgacgctgggagactcggaa

SEQ ID NO: 4522000 - DNA, 25 bp, Homo sapien
gcgctcctgcgcactgcctgatgtt

SEQ ID NO: 4522001 - DNA, 25 bp, Homo sapien
cactgactcggacccgcattggact

SEQ ID NO: 4522002 - DNA, 25 bp, Homo sapien
tgatacttatctggccaaatttggc

SEQ ID NO: 4522003 - DNA, 25 bp, Homo sapien
aacagcctgcattgactggtcctcg

SEQ ID NO: 4522004 - DNA, 25 bp, Homo sapien
gcctgaatggaccaaacttctgcct

SEQ ID NO: 4522005 - DNA, 25 bp, Homo sapien
ctggtcctcggccagtctcagggtc

SEQ ID NO: 4522006 - DNA, 25 bp, Homo sapien
gctctgaaatgtcgttaaagtcata

SEQ ID NO: 4522007 - DNA, 25 bp, Homo sapien
gaggaaaactgggttgtgctctgaa

SEQ ID NO: 4522008 - DNA, 25 bp, Homo sapien
cctctgaatctcctcgtgggaggaa

SEQ ID NO: 4522009 - DNA, 25 bp, Homo sapien
taaagtcatatttggagagctgcgc

SEQ ID NO: 4522010 - DNA, 25 bp, Homo sapien
cgccccagtcctcggcgtcccgcag

SEQ ID NO: 4522011 - DNA, 25 bp, Homo sapien
caggcccccgctttggccacccagg

SEQ ID NO: 4522012 - DNA, 25 bp, Homo sapien
aggcactttccgccctgagcgtggc

SEQ ID NO: 4522013 - DNA, 25 bp, Homo sapien
gccagggtcgccgagcctcccctgc

SEQ ID NO: 4522014 - DNA, 25 bp, Homo sapien
agaaggcgaagggcgaggtcccagg

SEQ ID NO: 4522015 - DNA, 25 bp, Homo sapien
agacctgggactgccaaacacacag

SEQ ID NO: 4522016 - DNA, 25 bp, Homo sapien
ccaaacacacagtgacgggagctga

SEQ ID NO: 4522017 - DNA, 25 bp, Homo sapien
tgagacctgggactgccaaacacac

SEQ ID NO: 4522018 - DNA, 25 bp, Homo sapien
ccactttcaaaatggatggttgagc

SEQ ID NO: 4522019 - DNA, 25 bp, Homo sapien
cagaaaaggcctggacgggtgtggc

SEQ ID NO: 4522020 - DNA, 25 bp, Homo sapien
tggatggttgagcaaaagttccttt

SEQ ID NO: 4522021 - DNA, 25 bp, Homo sapien
gagctgagacccgatgagaaaggca

SEQ ID NO: 4522022 - DNA, 25 bp, Homo sapien
ctaatgaccaggctcctgagaacag

SEQ ID NO: 4522023 - DNA, 25 bp, Homo sapien
gcagctgccatctgtagggtattca

SEQ ID NO: 4522024 - DNA, 25 bp, Homo sapien
catctgtagggtattcatcatcctc

SEQ ID NO: 4522025 - DNA, 25 bp, Homo sapien
aatgaccaggctcctgagaacagga

SEQ ID NO: 4522026 - DNA, 25 bp, Homo sapien
gtgcttcaacgccatgtgactccga

SEQ ID NO: 4522027 - DNA, 25 bp, Homo sapien
cttccaagaggcagctacagacact

SEQ ID NO: 4522028 - DNA, 25 bp, Homo sapien
cttgggtttgctgtgcttcaacgcc

SEQ ID NO: 4522029 - DNA, 25 bp, Homo sapien
agctacagacactctccgggcctgg

SEQ ID NO: 4522030 - DNA, 25 bp, Homo sapien
tatacaaatggttacacgcacacac

SEQ ID NO: 4522031 - DNA, 25 bp, Homo sapien
tgcatgcaacaccagacgacgaggt

SEQ ID NO: 4522032 - DNA, 25 bp, Homo sapien
ggattcagtccacaaaggtgtttac

SEQ ID NO: 4522033 - DNA, 25 bp, Homo sapien
acaatgcccgtgctatttatctggg

SEQ ID NO: 4522034 - DNA, 25 bp, Homo sapien
tgtacgtatgctaggccagggccat

SEQ ID NO: 4522035 - DNA, 25 bp, Homo sapien
cactttagggcacagcattgtatca

SEQ ID NO: 4522036 - DNA, 25 bp, Homo sapien
cagtgtgtagcatgttttccgacca

SEQ ID NO: 4522037 - DNA, 25 bp, Homo sapien
tacaggagagaatacaaaggtagcc

SEQ ID NO: 4522038 - DNA, 25 bp, Homo sapien
ccatttagattaagtttaatccagt

SEQ ID NO: 4522039 - DNA, 25 bp, Homo sapien
tttcacattatttaagttcctatat

SEQ ID NO: 4522040 - DNA, 25 bp, Homo sapien
cacattatttaagttcctatatttc

SEQ ID NO: 4522041 - DNA, 25 bp, Homo sapien
ttccatttagattaagtttaatcca

SEQ ID NO: 4522042 - DNA, 25 bp, Homo sapien
agtttgctccaacgagataatttgg

SEQ ID NO: 4522043 - DNA, 25 bp, Homo sapien
gataatttggatctccgggaagaca

SEQ ID NO: 4522044 - DNA, 25 bp, Homo sapien
agacacttgttttgccaggttttag

SEQ ID NO: 4522045 - DNA, 25 bp, Homo sapien
taaggacagaaacacagtttgctcc

SEQ ID NO: 4522046 - DNA, 25 bp, Homo sapien
gctttgcaattatagggcaaatacg

SEQ ID NO: 4522047 - DNA, 25 bp, Homo sapien
ttcttcagcatattgaatttgtatc

SEQ ID NO: 4522048 - DNA, 25 bp, Homo sapien
gaagttgatgtcatttacagttcag

SEQ ID NO: 4522049 - DNA, 25 bp, Homo sapien
ttcagtaaactgctatccgtaatgc

SEQ ID NO: 4522050 - DNA, 25 bp, Homo sapien
ggagggccctacaacaatcatttgg

SEQ ID NO: 4522051 - DNA, 25 bp, Homo sapien
aatattccacgacgaacaggagggc

SEQ ID NO: 4522052 - DNA, 25 bp, Homo sapien
gtattacactgaaaaaccatggcca

SEQ ID NO: 4522053 - DNA, 25 bp, Homo sapien
gaagtagctctcaaacaggaatgac

SEQ ID NO: 4522054 - DNA, 25 bp, Homo sapien
gatgattttagagcaaaagaccaac

SEQ ID NO: 4522055 - DNA, 25 bp, Homo sapien
cgaggagtcggatgattttagagca

SEQ ID NO: 4522056 - DNA, 25 bp, Homo sapien
tcggatgattttagagcaaaagacc

SEQ ID NO: 4522057 - DNA, 25 bp, Homo sapien
ccgacgaggagtcggatgattttag

SEQ ID NO: 4522058 - DNA, 25 bp, Homo sapien
agtgtggtaagcgcagctccacagg

SEQ ID NO: 4522059 - DNA, 25 bp, Homo sapien
gtgtggtaagcgcagctccacaggc

SEQ ID NO: 4522060 - DNA, 25 bp, Homo sapien
tgtggtaagcgcagctccacaggct

SEQ ID NO: 4522061 - DNA, 25 bp, Homo sapien
tggctactgcattcaatcatatggg

SEQ ID NO: 4522062 - DNA, 25 bp, Homo sapien
tggttaaagagattcatgcagggcc

SEQ ID NO: 4522063 - DNA, 25 bp, Homo sapien
aatcagatgtcagtattccggcaaa

SEQ ID NO: 4522064 - DNA, 25 bp, Homo sapien
tgctagctagccacgtgcaggcagt

SEQ ID NO: 4522065 - DNA, 25 bp, Homo sapien
aactccttcgggaatggctccttga

SEQ ID NO: 4522066 - DNA, 25 bp, Homo sapien
tgctgttaaatatgcctcgggctgt

SEQ ID NO: 4522067 - DNA, 25 bp, Homo sapien
tgtcccggcagaccttgaaatagat

SEQ ID NO: 4522068 - DNA, 25 bp, Homo sapien
gtttctatggaactcagcacgcccc

SEQ ID NO: 4522069 - DNA, 25 bp, Homo sapien
tgatatttaggcttctctgcatgga

SEQ ID NO: 4522070 - DNA, 25 bp, Homo sapien
gaatcgattgtatgctggagtgact

SEQ ID NO: 4522071 - DNA, 25 bp, Homo sapien
caaacttgcgttcaaatggtcgggc

SEQ ID NO: 4522072 - DNA, 25 bp, Homo sapien
ggaatagctttaggcactgtgctga

SEQ ID NO: 4522073 - DNA, 25 bp, Homo sapien
tatgtggagagacgcgctggtgaca

SEQ ID NO: 4522074 - DNA, 25 bp, Homo sapien
tggctgggcatactgcgagggcaat

SEQ ID NO: 4522075 - DNA, 25 bp, Homo sapien
catgtgctcccttagaatgtatgtg

SEQ ID NO: 4522076 - DNA, 25 bp, Homo sapien
tggcctggatgggttcatagcgttt

SEQ ID NO: 4522077 - DNA, 25 bp, Homo sapien
agtcatagctagtgtaagagccaag

SEQ ID NO: 4522078 - DNA, 25 bp, Homo sapien
tgacgttccttttcaagtagtcata

SEQ ID NO: 4522079 - DNA, 25 bp, Homo sapien
ttcaagtagtcatagctagtgtaag

SEQ ID NO: 4522080 - DNA, 25 bp, Homo sapien
agtagtcatagctagtgtaagagcc

SEQ ID NO: 4522081 - DNA, 25 bp, Homo sapien
tcttcggtcaaagtatgacagctgt

SEQ ID NO: 4522082 - DNA, 25 bp, Homo sapien
gattggaccgaacaatatcttcagg

SEQ ID NO: 4522083 - DNA, 25 bp, Homo sapien
tcttcagggtcataatgattggacc

SEQ ID NO: 4522084 - DNA, 25 bp, Homo sapien
tgattctgagaatgcgctggctttg

SEQ ID NO: 4522085 - DNA, 25 bp, Homo sapien
gttttgtcatgttcactgaattgat

SEQ ID NO: 4522086 - DNA, 25 bp, Homo sapien
gcacctgaaggtttagatgctactt

SEQ ID NO: 4522087 - DNA, 25 bp, Homo sapien
gggagcacctgaaggtttagatgct

SEQ ID NO: 4522088 - DNA, 25 bp, Homo sapien
ctgagaagtgggtttgggaccaatg

SEQ ID NO: 4522089 - DNA, 25 bp, Homo sapien
aaggtttagatgctacttctggagg

SEQ ID NO: 4522090 - DNA, 25 bp, Homo sapien
gaaaactggtccgtatagcttgagg

SEQ ID NO: 4522091 - DNA, 25 bp, Homo sapien
aaaatactgcttggactctgcaggc

SEQ ID NO: 4522092 - DNA, 25 bp, Homo sapien
catgtgtgtcatacccaggagctgg

SEQ ID NO: 4522093 - DNA, 25 bp, Homo sapien
cctgggtgactaacggctggctgtt

SEQ ID NO: 4522094 - DNA, 25 bp, Homo sapien
aataatcagtataccaatggaagcc

SEQ ID NO: 4522095 - DNA, 25 bp, Homo sapien
ggaagccatgcaaactacgaaactg

SEQ ID NO: 4522096 - DNA, 25 bp, Homo sapien
gcattacagtgtataagcctgcagt

SEQ ID NO: 4522097 - DNA, 25 bp, Homo sapien
tcatgtgccagattgatggacagca

SEQ ID NO: 4522098 - DNA, 25 bp, Homo sapien
tcttagcattatgtgagctgcctca

SEQ ID NO: 4522099 - DNA, 25 bp, Homo sapien
aatgatggttcttgatctcttagca

SEQ ID NO: 4522100 - DNA, 25 bp, Homo sapien
ctttgttggatctacatgcgacgac

SEQ ID NO: 4522101 - DNA, 25 bp, Homo sapien
gcctcagtacttggtgttcttaaag

SEQ ID NO: 4522102 - DNA, 25 bp, Homo sapien
tgcacctctatctacaaaacgttga

SEQ ID NO: 4522103 - DNA, 25 bp, Homo sapien
aaaacgttgaatgcttgctgcttac

SEQ ID NO: 4522104 - DNA, 25 bp, Homo sapien
taaaatttaataatgcacctctatc

SEQ ID NO: 4522105 - DNA, 25 bp, Homo sapien
ttaattcttaatctggagaaaggac

SEQ ID NO: 4522106 - DNA, 25 bp, Homo sapien
gacaggtaggacagacgatcatcat

SEQ ID NO: 4522107 - DNA, 25 bp, Homo sapien
gaggagtcctctcttacaggctcag

SEQ ID NO: 4522108 - DNA, 25 bp, Homo sapien
gagtattcactacctggagctgaca

SEQ ID NO: 4522109 - DNA, 25 bp, Homo sapien
caggctcagaggaccgtgtaatggc

SEQ ID NO: 4522110 - DNA, 25 bp, Homo sapien
tagacaccgtgctcagttactcatg

SEQ ID NO: 4522111 - DNA, 25 bp, Homo sapien
taacgtgacactagtacctggatga

SEQ ID NO: 4522112 - DNA, 25 bp, Homo sapien
tgaatggagctttccacgcagtccc

SEQ ID NO: 4522113 - DNA, 25 bp, Homo sapien
gaaaggaagctacagagttgcaatc

SEQ ID NO: 4522114 - DNA, 25 bp, Homo sapien
ttcagcgcaccataccaaccatcat

SEQ ID NO: 4522115 - DNA, 25 bp, Homo sapien
ttgcttctttcagcgcaccatacca

SEQ ID NO: 4522116 - DNA, 25 bp, Homo sapien
tgaattgcttctttcagcgcaccat

SEQ ID NO: 4522117 - DNA, 25 bp, Homo sapien
agcgcaccataccaaccatcattca

SEQ ID NO: 4522118 - DNA, 25 bp, Homo sapien
agctgaaagaaggcctttattaaca

SEQ ID NO: 4522119 - DNA, 25 bp, Homo sapien
ctgaaagaaggcctttattaacata

SEQ ID NO: 4522120 - DNA, 25 bp, Homo sapien
taagctgaaagaaggcctttattaa

SEQ ID NO: 4522121 - DNA, 25 bp, Homo sapien
tgtaagctgaaagaaggcctttatt

SEQ ID NO: 4522122 - DNA, 25 bp, Homo sapien
gagatcgctcgtataacttcctggc

SEQ ID NO: 4522123 - DNA, 25 bp, Homo sapien
ttttactccttgcttagaatcaggg

SEQ ID NO: 4522124 - DNA, 25 bp, Homo sapien
tggcacttttccgagattctggaca

SEQ ID NO: 4522125 - DNA, 25 bp, Homo sapien
gataccactgggcatagttaagacg

SEQ ID NO: 4522126 - DNA, 25 bp, Homo sapien
taatgccagagctacgttggtcagt

SEQ ID NO: 4522127 - DNA, 25 bp, Homo sapien
ttgctttattgtatgcaggcgaata

SEQ ID NO: 4522128 - DNA, 25 bp, Homo sapien
tcagttccagcgtctcgtggttcac

SEQ ID NO: 4522129 - DNA, 25 bp, Homo sapien
tgtatgcaggcgaataatgccagag

SEQ ID NO: 4522130 - DNA, 25 bp, Homo sapien
tgctcctttgccaagctctaaccag

SEQ ID NO: 4522131 - DNA, 25 bp, Homo sapien
tcacactgtaacatccagagaaaat

SEQ ID NO: 4522132 - DNA, 25 bp, Homo sapien
gctctaatatggctcaacagggcac

SEQ ID NO: 4522133 - DNA, 25 bp, Homo sapien
ttgtatggcacactgagataaactg

SEQ ID NO: 4522134 - DNA, 25 bp, Homo sapien
cggtaatggtgctatagtggattgc

SEQ ID NO: 4522135 - DNA, 25 bp, Homo sapien
tagagaccttagttacatcagtaga

SEQ ID NO: 4522136 - DNA, 25 bp, Homo sapien
attgcctagggagttctgggttaga

SEQ ID NO: 4522137 - DNA, 25 bp, Homo sapien
gggttagagaccttagttacatcag

SEQ ID NO: 4522138 - DNA, 25 bp, Homo sapien
tctggaaagacaagtcacactgagg

SEQ ID NO: 4522139 - DNA, 25 bp, Homo sapien
tacagataacttagccaggtgcggt

SEQ ID NO: 4522140 - DNA, 25 bp, Homo sapien
cagcaacgtttgtgactctggtcac

SEQ ID NO: 4522141 - DNA, 25 bp, Homo sapien
tgaattccctgttgtggagtaaacc

SEQ ID NO: 4522142 - DNA, 25 bp, Homo sapien
ctgaaggggatgctaagggagataa

SEQ ID NO: 4522143 - DNA, 25 bp, Homo sapien
gtcctgtcgccaccgccaccatgcc

SEQ ID NO: 4522144 - DNA, 25 bp, Homo sapien
gatgctaagggagataaagccaagg

SEQ ID NO: 4522145 - DNA, 25 bp, Homo sapien
gagaagatccgcgaggttgtctgct

SEQ ID NO: 4522146 - DNA, 25 bp, Homo sapien
catatgtcactaatagaatgtctcc

SEQ ID NO: 4522147 - DNA, 25 bp, Homo sapien
gacctgacccctagtcattggttac

SEQ ID NO: 4522148 - DNA, 25 bp, Homo sapien
tggattgatgtggagaaaacacctt

SEQ ID NO: 4522149 - DNA, 25 bp, Homo sapien
gcacacagaacacttcattgttgtt

SEQ ID NO: 4522150 - DNA, 25 bp, Homo sapien
tatctttaataaagctggatacagt

SEQ ID NO: 4522151 - DNA, 25 bp, Homo sapien
tttaataaagctggatacagtttgg

SEQ ID NO: 4522152 - DNA, 25 bp, Homo sapien
atggaaagtatctttaataaagctg

SEQ ID NO: 4522153 - DNA, 25 bp, Homo sapien
ggaaagtatctttaataaagctgga

SEQ ID NO: 4522154 - DNA, 25 bp, Homo sapien
tataaatgtctgcaataacaacagc

SEQ ID NO: 4522155 - DNA, 25 bp, Homo sapien
tgtctgcaataacaacagctgataa

SEQ ID NO: 4522156 - DNA, 25 bp, Homo sapien
cagctgataatattagcaatgtttt

SEQ ID NO: 4522157 - DNA, 25 bp, Homo sapien
tttgtcagtttaatgactaaaagag

SEQ ID NO: 4522158 - DNA, 25 bp, Homo sapien
tatactccttacctcagagcatgac

SEQ ID NO: 4522159 - DNA, 25 bp, Homo sapien
gcaatgaccatccaagtctcaggct

SEQ ID NO: 4522160 - DNA, 25 bp, Homo sapien
cactcactttagaggtgtaactccc

SEQ ID NO: 4522161 - DNA, 25 bp, Homo sapien
ttggtggaacaaggacatggtcact

SEQ ID NO: 4522162 - DNA, 25 bp, Homo sapien
catcagctattggtccaaaaatggt

SEQ ID NO: 4522163 - DNA, 25 bp, Homo sapien
caacatcagctattggtccaaaaat

SEQ ID NO: 4522164 - DNA, 25 bp, Homo sapien
tattggtccaaaaatggttacaggc

SEQ ID NO: 4522165 - DNA, 25 bp, Homo sapien
cagctattggtccaaaaatggttac

SEQ ID NO: 4522166 - DNA, 25 bp, Homo sapien
tgtatactgtacactggctagctgc

SEQ ID NO: 4522167 - DNA, 25 bp, Homo sapien
gaagaaccactctttcataagctgg

SEQ ID NO: 4522168 - DNA, 25 bp, Homo sapien
tgaacaggctgagcggacaaatcct

SEQ ID NO: 4522169 - DNA, 25 bp, Homo sapien
gatttctcttggagctgcgaagacc

SEQ ID NO: 4522170 - DNA, 25 bp, Homo sapien
tgaaatgaaatatacaatactggat

SEQ ID NO: 4522171 - DNA, 25 bp, Homo sapien
gaaatgaaatatacaatactggatg

SEQ ID NO: 4522172 - DNA, 25 bp, Homo sapien
atgaaatgaaatatacaatactgga

SEQ ID NO: 4522173 - DNA, 25 bp, Homo sapien
ttaccaattcgaatagcaagccaag

SEQ ID NO: 4522174 - DNA, 25 bp, Homo sapien
tgtacaaggtatccacaacacggaa

SEQ ID NO: 4522175 - DNA, 25 bp, Homo sapien
gatgcctcgttctacctccttatga

SEQ ID NO: 4522176 - DNA, 25 bp, Homo sapien
agagcccagttttccattgtacaag

SEQ ID NO: 4522177 - DNA, 25 bp, Homo sapien
tctgagccaatatggtcacttcttc

SEQ ID NO: 4522178 - DNA, 25 bp, Homo sapien
tgatatttgtaaaatctacgttgtt

SEQ ID NO: 4522179 - DNA, 25 bp, Homo sapien
tcctttagggaggtcaagcaggaaa

SEQ ID NO: 4522180 - DNA, 25 bp, Homo sapien
ttctcctttagggaggtcaagcagg

SEQ ID NO: 4522181 - DNA, 25 bp, Homo sapien
gcctttgatgtgaattccatctccc

SEQ ID NO: 4522182 - DNA, 25 bp, Homo sapien
tgtggagtatgaagtttcaaagcca

SEQ ID NO: 4522183 - DNA, 25 bp, Homo sapien
actaatcctgtctcttgtggagtat

SEQ ID NO: 4522184 - DNA, 25 bp, Homo sapien
ggctttcctgatttgtgtaactaat

SEQ ID NO: 4522185 - DNA, 25 bp, Homo sapien
tctagaacgccagctacaaatattc

SEQ ID NO: 4522186 - DNA, 25 bp, Homo sapien
aacgccagctacaaatattccaaca

SEQ ID NO: 4522187 - DNA, 25 bp, Homo sapien
ctgcagggctatcttctagaacgcc

SEQ ID NO: 4522188 - DNA, 25 bp, Homo sapien
gggctatcttctagaacgccagcta

SEQ ID NO: 4522189 - DNA, 25 bp, Homo sapien
aatcatagtattaggtggtatgtac

SEQ ID NO: 4522190 - DNA, 25 bp, Homo sapien
gacagcggtgagaaagaaagcatcc

SEQ ID NO: 4522191 - DNA, 25 bp, Homo sapien
ctaatttaaaagctaggcaggagac

SEQ ID NO: 4522192 - DNA, 25 bp, Homo sapien
taactcactatcatatataagtagc

SEQ ID NO: 4522193 - DNA, 25 bp, Homo sapien
tcagatggactgacaggtaaatcca

SEQ ID NO: 4522194 - DNA, 25 bp, Homo sapien
aagaatcccatcttcatgagttgaa

SEQ ID NO: 4522195 - DNA, 25 bp, Homo sapien
agttgaattaggtaggacaccatca

SEQ ID NO: 4522196 - DNA, 25 bp, Homo sapien
tggttgcccaacttgggcatacaca

SEQ ID NO: 4522197 - DNA, 25 bp, Homo sapien
tgtgccaacctgctacccataagga

SEQ ID NO: 4522198 - DNA, 25 bp, Homo sapien
gaaaacgctggaagtcatatgcaga

SEQ ID NO: 4522199 - DNA, 25 bp, Homo sapien
acacctgtaatagggaggatcaggt

SEQ ID NO: 4522200 - DNA, 25 bp, Homo sapien
cagacaaattcacacatgagaagaa

SEQ ID NO: 4522201 - DNA, 25 bp, Homo sapien
tctcatttctttcaactgtaacttc

SEQ ID NO: 4522202 - DNA, 25 bp, Homo sapien
tttctttcaactgtaacttcttcca

SEQ ID NO: 4522203 - DNA, 25 bp, Homo sapien
ttttaggtgtgtgatcatcagcatg

SEQ ID NO: 4522204 - DNA, 25 bp, Homo sapien
tgttttaggtgtgtgatcatcagca

SEQ ID NO: 4522205 - DNA, 25 bp, Homo sapien
gagacagccccaggtttagaaattc

SEQ ID NO: 4522206 - DNA, 25 bp, Homo sapien
cagccccaggtttagaaattctctc

SEQ ID NO: 4522207 - DNA, 25 bp, Homo sapien
ttctctcttcatctctactccggag

SEQ ID NO: 4522208 - DNA, 25 bp, Homo sapien
tctctcttcatctctactccggaga

SEQ ID NO: 4522209 - DNA, 25 bp, Homo sapien
gacaacctgctctaacagataccaa

SEQ ID NO: 4522210 - DNA, 25 bp, Homo sapien
taagaagaggcaatgcaacttcaaa

SEQ ID NO: 4522211 - DNA, 25 bp, Homo sapien
aaaaccaaatagattcatgtaataa

SEQ ID NO: 4522212 - DNA, 25 bp, Homo sapien
tgtaagagaacagtataagaagagg

SEQ ID NO: 4522213 - DNA, 25 bp, Homo sapien
caaaaaatgtaactaggtcatacac

SEQ ID NO: 4522214 - DNA, 25 bp, Homo sapien
tgataacatcactggtagggaaaga

SEQ ID NO: 4522215 - DNA, 25 bp, Homo sapien
tagggaaagatatggagaaacagac

SEQ ID NO: 4522216 - DNA, 25 bp, Homo sapien
aaaagtgtatgactatttgaaggca

SEQ ID NO: 4522217 - DNA, 25 bp, Homo sapien
taatcacgagctaatggtcccaaaa

SEQ ID NO: 4522218 - DNA, 25 bp, Homo sapien
gaagacccaggtagtataatcacga

SEQ ID NO: 4522219 - DNA, 25 bp, Homo sapien
catgaaatcaggtacgaaggtgctt

SEQ ID NO: 4522220 - DNA, 25 bp, Homo sapien
tcaagggtgcaagattagttcgaca

SEQ ID NO: 4522221 - DNA, 25 bp, Homo sapien
agacacacagattacagaatacata

SEQ ID NO: 4522222 - DNA, 25 bp, Homo sapien
taagcaacagtggttcaccttggag

SEQ ID NO: 4522223 - DNA, 25 bp, Homo sapien
catgcccatgtacagacaagcaaca

SEQ ID NO: 4522224 - DNA, 25 bp, Homo sapien
aaacagacatgtttgcacatgccca

SEQ ID NO: 4522225 - DNA, 25 bp, Homo sapien
ggtaatgaccttgttatctggaggc

SEQ ID NO: 4522226 - DNA, 25 bp, Homo sapien
gactcactgttaagcagagcctact

SEQ ID NO: 4522227 - DNA, 25 bp, Homo sapien
taggtcacatgaacggactcactgt

SEQ ID NO: 4522228 - DNA, 25 bp, Homo sapien
tagttgaaagctctagacaagacag

SEQ ID NO: 4522229 - DNA, 25 bp, Homo sapien
gtgtgaccagtgtagccgattaata

SEQ ID NO: 4522230 - DNA, 25 bp, Homo sapien
gccgattaatacacactcaattaga

SEQ ID NO: 4522231 - DNA, 25 bp, Homo sapien
cacactcaattagattagcaaggag

SEQ ID NO: 4522232 - DNA, 25 bp, Homo sapien
cagtgtagccgattaatacacactc

SEQ ID NO: 4522233 - DNA, 25 bp, Homo sapien
catgcagcatggtcagtacagggtc

SEQ ID NO: 4522234 - DNA, 25 bp, Homo sapien
tcctaaagtactcggtggccagcag

SEQ ID NO: 4522235 - DNA, 25 bp, Homo sapien
ggcactctatctcagcaccaaggag

SEQ ID NO: 4522236 - DNA, 25 bp, Homo sapien
caaattctcggccactcagtgagca

SEQ ID NO: 4522237 - DNA, 25 bp, Homo sapien
aagcctgcctttctgctatttgatc

SEQ ID NO: 4522238 - DNA, 25 bp, Homo sapien
ggttaaaatctaacagcaatcactg

SEQ ID NO: 4522239 - DNA, 25 bp, Homo sapien
tacttgggtttccattaactagaga

SEQ ID NO: 4522240 - DNA, 25 bp, Homo sapien
ctgaataccccatgactatacttgg

SEQ ID NO: 4522241 - DNA, 25 bp, Homo sapien
tcactagtcagaagatcgttacctc

SEQ ID NO: 4522242 - DNA, 25 bp, Homo sapien
gaatatgtgcatcatactggttacc

SEQ ID NO: 4522243 - DNA, 25 bp, Homo sapien
tggttacccattgagcagccctaat

SEQ ID NO: 4522244 - DNA, 25 bp, Homo sapien
gcaaagttgcacaggttaagcatcc

SEQ ID NO: 4522245 - DNA, 25 bp, Homo sapien
tattctcagcagataatcgcacatc

SEQ ID NO: 4522246 - DNA, 25 bp, Homo sapien
ggttattattctcagcagataatcg

SEQ ID NO: 4522247 - DNA, 25 bp, Homo sapien
gaagatgaagaggttattattctca

SEQ ID NO: 4522248 - DNA, 25 bp, Homo sapien
tattattctcagcagataatcgcac

SEQ ID NO: 4522249 - DNA, 25 bp, Homo sapien
tcatcaacaacgtataagggttccc

SEQ ID NO: 4522250 - DNA, 25 bp, Homo sapien
ggactgcagttaaccatgggtcagg

SEQ ID NO: 4522251 - DNA, 25 bp, Homo sapien
aaagaacgtgctccctgttatccag

SEQ ID NO: 4522252 - DNA, 25 bp, Homo sapien
gttttaactaccactgtcactgcgg

SEQ ID NO: 4522253 - DNA, 25 bp, Homo sapien
gctctgaccgctggtcaggagatcg

SEQ ID NO: 4522254 - DNA, 25 bp, Homo sapien
tctgaccgctggtcaggagatcgtg

SEQ ID NO: 4522255 - DNA, 25 bp, Homo sapien
gctgcggcgagtgcctggaatgatc

SEQ ID NO: 4522256 - DNA, 25 bp, Homo sapien
cggcgagtgcctggaatgatcagaa

SEQ ID NO: 4522257 - DNA, 25 bp, Homo sapien
tatcgtgtgatcgaccagaatgatc

SEQ ID NO: 4522258 - DNA, 25 bp, Homo sapien
gggaggcctatcgtgtgatcgacca

SEQ ID NO: 4522259 - DNA, 25 bp, Homo sapien
ggcctatcgtgtgatcgaccagaat

SEQ ID NO: 4522260 - DNA, 25 bp, Homo sapien
cgtgtgatcgaccagaatgatctga

SEQ ID NO: 4522261 - DNA, 25 bp, Homo sapien
tcagaggcattagcagagtggatgc

SEQ ID NO: 4522262 - DNA, 25 bp, Homo sapien
tagcgtagcccgttcatctctttga

SEQ ID NO: 4522263 - DNA, 25 bp, Homo sapien
gcctttagacctttctatcaatgtc

SEQ ID NO: 4522264 - DNA, 25 bp, Homo sapien
gatcagggacattcaatagcgtagc

SEQ ID NO: 4522265 - DNA, 25 bp, Homo sapien
tacaacatcaccttcttgaatattg

SEQ ID NO: 4522266 - DNA, 25 bp, Homo sapien
tggcttgccaatcgaagaccatatt

SEQ ID NO: 4522267 - DNA, 25 bp, Homo sapien
cttaacaaatatatggcttgccaat

SEQ ID NO: 4522268 - DNA, 25 bp, Homo sapien
cttgctgccaaactatcttgtgaaa

SEQ ID NO: 4522269 - DNA, 25 bp, Homo sapien
ctgaaataatgtaagtaagtgtttt

SEQ ID NO: 4522270 - DNA, 25 bp, Homo sapien
ggctattctcatcacaacaaatcca

SEQ ID NO: 4522271 - DNA, 25 bp, Homo sapien
gccataacaggatttgacttacagt

SEQ ID NO: 4522272 - DNA, 25 bp, Homo sapien
gacagcaactgtacttctcattaaa

SEQ ID NO: 4522273 - DNA, 25 bp, Homo sapien
tcacttgaagtgttatctgttccaa

SEQ ID NO: 4522274 - DNA, 25 bp, Homo sapien
tgaccgcggggacaagctcctctct

SEQ ID NO: 4522275 - DNA, 25 bp, Homo sapien
tctacttgcacttctatccctcggc

SEQ ID NO: 4522276 - DNA, 25 bp, Homo sapien
ctatccctcggccaaatcttctcac

SEQ ID NO: 4522277 - DNA, 25 bp, Homo sapien
tgactttagtaggtttagcaggctg

SEQ ID NO: 4522278 - DNA, 25 bp, Homo sapien
gatcaggacgacttactggtatttg

SEQ ID NO: 4522279 - DNA, 25 bp, Homo sapien
ttcaggatcaggacgacttactggt

SEQ ID NO: 4522280 - DNA, 25 bp, Homo sapien
catgtatttcctcatcataactatc

SEQ ID NO: 4522281 - DNA, 25 bp, Homo sapien
cataactatcttcttcattatcaga

SEQ ID NO: 4522282 - DNA, 25 bp, Homo sapien
aactccgttaaccattgcaactcgg

SEQ ID NO: 4522283 - DNA, 25 bp, Homo sapien
cgttaaccattgcaactcggtcatt

SEQ ID NO: 4522284 - DNA, 25 bp, Homo sapien
cattatccattgaaactccgttaac

SEQ ID NO: 4522285 - DNA, 25 bp, Homo sapien
tccattgaaactccgttaaccattg

SEQ ID NO: 4522286 - DNA, 25 bp, Homo sapien
ttgacgtttccccactctgaaaatg

SEQ ID NO: 4522287 - DNA, 25 bp, Homo sapien
catctgaaatcactattgacgtttc

SEQ ID NO: 4522288 - DNA, 25 bp, Homo sapien
ttcagctggtcctcctttcagcaca

SEQ ID NO: 4522289 - DNA, 25 bp, Homo sapien
aaatgaggattatctcgtccaccag

SEQ ID NO: 4522290 - DNA, 25 bp, Homo sapien
caggattagtaggaaatccactggc

SEQ ID NO: 4522291 - DNA, 25 bp, Homo sapien
caaaatttgactttcaccgctgaag

SEQ ID NO: 4522292 - DNA, 25 bp, Homo sapien
ggcactgtaacaaaccctgtaagta

SEQ ID NO: 4522293 - DNA, 25 bp, Homo sapien
atatgattatctccaagatcctgaa

SEQ ID NO: 4522294 - DNA, 25 bp, Homo sapien
tgtagacctcccaagagtgacttta

SEQ ID NO: 4522295 - DNA, 25 bp, Homo sapien
tatattatactgctactgggcggtg

SEQ ID NO: 4522296 - DNA, 25 bp, Homo sapien
aatccatgaggaggcaaattctgcc

SEQ ID NO: 4522297 - DNA, 25 bp, Homo sapien
gaccagtagagagatcagaatccat

SEQ ID NO: 4522298 - DNA, 25 bp, Homo sapien
gatactataacttggctatcacgaa

SEQ ID NO: 4522299 - DNA, 25 bp, Homo sapien
acttatgttgatactataacttggc

SEQ ID NO: 4522300 - DNA, 25 bp, Homo sapien
atcaactgatgtacacttatgttga

SEQ ID NO: 4522301 - DNA, 25 bp, Homo sapien
ataacttggctatcacgaataatgc

SEQ ID NO: 4522302 - DNA, 25 bp, Homo sapien
gagttcattggctcactattctgca

SEQ ID NO: 4522303 - DNA, 25 bp, Homo sapien
agctgtgggtttatctgtctgtggc

SEQ ID NO: 4522304 - DNA, 25 bp, Homo sapien
gaatatgtattaggtggttctcaca

SEQ ID NO: 4522305 - DNA, 25 bp, Homo sapien
gatactattgtctgcaaacaagggt

SEQ ID NO: 4522306 - DNA, 25 bp, Homo sapien
tttgtcatagtctctctgtgatgag

SEQ ID NO: 4522307 - DNA, 25 bp, Homo sapien
tctaacaaggtcagaaaaatcagat

SEQ ID NO: 4522308 - DNA, 25 bp, Homo sapien
gcctgagccattacttaccacaatg

SEQ ID NO: 4522309 - DNA, 25 bp, Homo sapien
aacggcattatcataacagacttgc

SEQ ID NO: 4522310 - DNA, 25 bp, Homo sapien
taatgtggtaatagcaaattgcatc

SEQ ID NO: 4522311 - DNA, 25 bp, Homo sapien
gaataatctcgcttccagtaaaaaa

SEQ ID NO: 4522312 - DNA, 25 bp, Homo sapien
tcaaaagagcttaaactcaaggtaa

SEQ ID NO: 4522313 - DNA, 25 bp, Homo sapien
catctgtggtctctaatgaataatc

SEQ ID NO: 4522314 - DNA, 25 bp, Homo sapien
gaaagtccaaactagtgcaataagg

SEQ ID NO: 4522315 - DNA, 25 bp, Homo sapien
aataaagagcattcaaaaggaggga

SEQ ID NO: 4522316 - DNA, 25 bp, Homo sapien
taaggtaagtatgcctgctcaccat

SEQ ID NO: 4522317 - DNA, 25 bp, Homo sapien
gaaagacagcttttacccagtatta

SEQ ID NO: 4522318 - DNA, 25 bp, Homo sapien
caacgggagctcttatacactgcca

SEQ ID NO: 4522319 - DNA, 25 bp, Homo sapien
gtgtaagaagtcagcctcaaaaggc

SEQ ID NO: 4522320 - DNA, 25 bp, Homo sapien
gatgaggatacgcaacaacgggagc

SEQ ID NO: 4522321 - DNA, 25 bp, Homo sapien
taattaccatgggacccacagcaag

SEQ ID NO: 4522322 - DNA, 25 bp, Homo sapien
gaaagggagtaatcagtagattcag

SEQ ID NO: 4522323 - DNA, 25 bp, Homo sapien
agggagtaatcagtagattcagctc

SEQ ID NO: 4522324 - DNA, 25 bp, Homo sapien
aaagggagtaatcagtagattcagc

SEQ ID NO: 4522325 - DNA, 25 bp, Homo sapien
gggagtaatcagtagattcagctct

SEQ ID NO: 4522326 - DNA, 25 bp, Homo sapien
gccagtatcctgagttatacacaga

SEQ ID NO: 4522327 - DNA, 25 bp, Homo sapien
cagtatcctgagttatacacagatt

SEQ ID NO: 4522328 - DNA, 25 bp, Homo sapien
tgccagtatcctgagttatacacag

SEQ ID NO: 4522329 - DNA, 25 bp, Homo sapien
tatcctgagttatacacagattact

SEQ ID NO: 4522330 - DNA, 25 bp, Homo sapien
cactgtatgttgttcccatatagct

SEQ ID NO: 4522331 - DNA, 25 bp, Homo sapien
gtcactgtatgttgttcccatatag

SEQ ID NO: 4522332 - DNA, 25 bp, Homo sapien
gaagcgtcactgtatgttgttccca

SEQ ID NO: 4522333 - DNA, 25 bp, Homo sapien
gcgtcactgtatgttgttcccatat

SEQ ID NO: 4522334 - DNA, 25 bp, Homo sapien
tctgactttacgatggtacccatac

SEQ ID NO: 4522335 - DNA, 25 bp, Homo sapien
gagttgccagtttgtccaatctcag

SEQ ID NO: 4522336 - DNA, 25 bp, Homo sapien
taaaacagcgtgtacatggttatcc

SEQ ID NO: 4522337 - DNA, 25 bp, Homo sapien
taaaagtatctgcaagagttgccag

SEQ ID NO: 4522338 - DNA, 25 bp, Homo sapien
tataaccaggcagtactgatgagga

SEQ ID NO: 4522339 - DNA, 25 bp, Homo sapien
gattcaggtaaccatggcagactgc

SEQ ID NO: 4522340 - DNA, 25 bp, Homo sapien
cttctgtggcaaaagtagcaaattc

SEQ ID NO: 4522341 - DNA, 25 bp, Homo sapien
gaagtggttaggctcttgaccagcc

SEQ ID NO: 4522342 - DNA, 25 bp, Homo sapien
taactggacacaactagtatgacct

SEQ ID NO: 4522343 - DNA, 25 bp, Homo sapien
tacagtctagcaggagaaccaaatg

SEQ ID NO: 4522344 - DNA, 25 bp, Homo sapien
gctctgggcaaagtccttgaggaga

SEQ ID NO: 4522345 - DNA, 25 bp, Homo sapien
cagcacgtgcaagagcctagtgtag

SEQ ID NO: 4522346 - DNA, 25 bp, Homo sapien
gataatgacaattccaaaagcgtga

SEQ ID NO: 4522347 - DNA, 25 bp, Homo sapien
gtacaatctccaagataatgacaat

SEQ ID NO: 4522348 - DNA, 25 bp, Homo sapien
tctccaagataatgacaattccaaa

SEQ ID NO: 4522349 - DNA, 25 bp, Homo sapien
gacaattccaaaagcgtgaaaattc

SEQ ID NO: 4522350 - DNA, 25 bp, Homo sapien
gaaaagcccactgtatacacaaatt

SEQ ID NO: 4522351 - DNA, 25 bp, Homo sapien
gcaagtatgcattgatcagtaacta

SEQ ID NO: 4522352 - DNA, 25 bp, Homo sapien
caaatatccgtatcaaaaactgggc

SEQ ID NO: 4522353 - DNA, 25 bp, Homo sapien
taattaaaacactgcatcactcact

SEQ ID NO: 4522354 - DNA, 25 bp, Homo sapien
taaatgtgacttacggaaacaggtc

SEQ ID NO: 4522355 - DNA, 25 bp, Homo sapien
gaagtggctccataatacagcatct

SEQ ID NO: 4522356 - DNA, 25 bp, Homo sapien
tcaacttgccctttactcgcaaatg

SEQ ID NO: 4522357 - DNA, 25 bp, Homo sapien
atgtaaagcactgagtccagcctgg

SEQ ID NO: 4522358 - DNA, 25 bp, Homo sapien
gtggcaatccattgaaaacgtattt

SEQ ID NO: 4522359 - DNA, 25 bp, Homo sapien
tgtggcaatccattgaaaacgtatt

SEQ ID NO: 4522360 - DNA, 25 bp, Homo sapien
ttaagtaccagagatcacacttcag

SEQ ID NO: 4522361 - DNA, 25 bp, Homo sapien
cctcttaaaaagtgtgttgtcttgc

SEQ ID NO: 4522362 - DNA, 25 bp, Homo sapien
gacattctgtgtaatacggaaacaa

SEQ ID NO: 4522363 - DNA, 25 bp, Homo sapien
tgtcttgcatattaagtaccagaga

SEQ ID NO: 4522364 - DNA, 25 bp, Homo sapien
aagtgtaaccgctagcttctcccag

SEQ ID NO: 4522365 - DNA, 25 bp, Homo sapien
ccagcaaacaagcttctgtgagagt

SEQ ID NO: 4522366 - DNA, 25 bp, Homo sapien
caaaagtttcagaggcatagtattc

SEQ ID NO: 4522367 - DNA, 25 bp, Homo sapien
gctcccagatgttacgggtaagcat

SEQ ID NO: 4522368 - DNA, 25 bp, Homo sapien
gacctactacgcctcacaggctgag

SEQ ID NO: 4522369 - DNA, 25 bp, Homo sapien
gcatgaaagaaaacccgacctacta

SEQ ID NO: 4522370 - DNA, 25 bp, Homo sapien
tggagtgttttgcagtctcaaagcc

SEQ ID NO: 4522371 - DNA, 25 bp, Homo sapien
tctcaaagccttatcgctggcgtgc

SEQ ID NO: 4522372 - DNA, 25 bp, Homo sapien
gagggacctgttgcgtgtccccgcc

SEQ ID NO: 4522373 - DNA, 25 bp, Homo sapien
gagccgagtttctccgcgagggacc

SEQ ID NO: 4522374 - DNA, 25 bp, Homo sapien
ggcacaggcgccggcagctatgcac

SEQ ID NO: 4522375 - DNA, 25 bp, Homo sapien
tctccgcgagggacctgttgcgtgt

SEQ ID NO: 4522376 - DNA, 25 bp, Homo sapien
cttggcggccgcagctctggcggac

SEQ ID NO: 4522377 - DNA, 25 bp, Homo sapien
ttggcggccgcagctctggcggaca

SEQ ID NO: 4522378 - DNA, 25 bp, Homo sapien
tggcggccgcagctctggcggacat

SEQ ID NO: 4522379 - DNA, 25 bp, Homo sapien
tcctcacgccacagcccaaataaac

SEQ ID NO: 4522380 - DNA, 25 bp, Homo sapien
agcgccgcgcgaggctcctcggacc

SEQ ID NO: 4522381 - DNA, 25 bp, Homo sapien
tcggacccgaaactccgcggcgctg

SEQ ID NO: 4522382 - DNA, 25 bp, Homo sapien
aaataaacatctcccgagagcgagc

SEQ ID NO: 4522383 - DNA, 25 bp, Homo sapien
agccggcgccggcaactcagcggcc

SEQ ID NO: 4522384 - DNA, 25 bp, Homo sapien
actcagcggccacgcaaacctgccg

SEQ ID NO: 4522385 - DNA, 25 bp, Homo sapien
ctcggaagccggcttcgccacgtaa

SEQ ID NO: 4522386 - DNA, 25 bp, Homo sapien
aaggaacgcggcgtccgctggctca

SEQ ID NO: 4522387 - DNA, 25 bp, Homo sapien
actgggcaaacagcatggtcacggc

SEQ ID NO: 4522388 - DNA, 25 bp, Homo sapien
tccggcagggtcagaagcgttgctc

SEQ ID NO: 4522389 - DNA, 25 bp, Homo sapien
gcagagccgatacccgacagttgtt

SEQ ID NO: 4522390 - DNA, 25 bp, Homo sapien
ggaagacagtttccgctgccgtgcg

SEQ ID NO: 4522391 - DNA, 25 bp, Homo sapien
tctgttgtgaatgcatgcccaggtc

SEQ ID NO: 4522392 - DNA, 25 bp, Homo sapien
caaagggcccctagattatagaggc

SEQ ID NO: 4522393 - DNA, 25 bp, Homo sapien
tcaagagtcgtctgccacaactagg

SEQ ID NO: 4522394 - DNA, 25 bp, Homo sapien
tgccaaattgccgtctaagaaaacc

SEQ ID NO: 4522395 - DNA, 25 bp, Homo sapien
tgtcatgagggcattcaagcagcac

SEQ ID NO: 4522396 - DNA, 25 bp, Homo sapien
catgtgctggagttaacctgagagc

SEQ ID NO: 4522397 - DNA, 25 bp, Homo sapien
tcctctagccttggatggaccctgg

SEQ ID NO: 4522398 - DNA, 25 bp, Homo sapien
agttctggctgacgtcttgactgca

SEQ ID NO: 4522399 - DNA, 25 bp, Homo sapien
atattaagactaaaataagggatat

SEQ ID NO: 4522400 - DNA, 25 bp, Homo sapien
actacagaccctacagtcgttatta

SEQ ID NO: 4522401 - DNA, 25 bp, Homo sapien
gatatcactacagaccctacagtcg

SEQ ID NO: 4522402 - DNA, 25 bp, Homo sapien
tatcactacagaccctacagtcgtt

SEQ ID NO: 4522403 - DNA, 25 bp, Homo sapien
atgatgaagagccttgaactcaaat

SEQ ID NO: 4522404 - DNA, 25 bp, Homo sapien
atgatgatgaagagccttgaactca

SEQ ID NO: 4522405 - DNA, 25 bp, Homo sapien
tgaagagccttgaactcaaattcaa

SEQ ID NO: 4522406 - DNA, 25 bp, Homo sapien
gatgaagagccttgaactcaaattc

SEQ ID NO: 4522407 - DNA, 25 bp, Homo sapien
cccggtgaagcctgcatagagagct

SEQ ID NO: 4522408 - DNA, 25 bp, Homo sapien
gagagcttgcatcagtgcatgctct

SEQ ID NO: 4522409 - DNA, 25 bp, Homo sapien
gaagcctgcatagagagcttgcatc

SEQ ID NO: 4522410 - DNA, 25 bp, Homo sapien
cagcccggtgaagcctgcatagaga

SEQ ID NO: 4522411 - DNA, 25 bp, Homo sapien
tattttgtacattcaatcagtagcc

SEQ ID NO: 4522412 - DNA, 25 bp, Homo sapien
tgttcatggcctttgtaacctcttc

SEQ ID NO: 4522413 - DNA, 25 bp, Homo sapien
catgttcatggcctttgtaacctct

SEQ ID NO: 4522414 - DNA, 25 bp, Homo sapien
tcatggcctttgtaacctcttccat

SEQ ID NO: 4522415 - DNA, 25 bp, Homo sapien
cattcatgttcatggcctttgtaac

SEQ ID NO: 4522416 - DNA, 25 bp, Homo sapien
ctgtctccctatgcagagatgttga

SEQ ID NO: 4522417 - DNA, 25 bp, Homo sapien
gcctaattcctttgcttgcataaca

SEQ ID NO: 4522418 - DNA, 25 bp, Homo sapien
gagatgttgaacaccgcctaattcc

SEQ ID NO: 4522419 - DNA, 25 bp, Homo sapien
gcttgcataacaaagttcctcagaa

SEQ ID NO: 4522420 - DNA, 25 bp, Homo sapien
gccggcagtagaaacagaacgttta

SEQ ID NO: 4522421 - DNA, 25 bp, Homo sapien
aacaatagccggcagtagaaacaga

SEQ ID NO: 4522422 - DNA, 25 bp, Homo sapien
tagaaacagaacgtttatactaaga

SEQ ID NO: 4522423 - DNA, 25 bp, Homo sapien
ctaaattgatatctaacacccattt

SEQ ID NO: 4522424 - DNA, 25 bp, Homo sapien
agtgagaacatatctcaaaaaaaaa

SEQ ID NO: 4522425 - DNA, 25 bp, Homo sapien
ggtgacagagtgagaacatatctca

SEQ ID NO: 4522426 - DNA, 25 bp, Homo sapien
gatcacctaagcctggggaggtcga

SEQ ID NO: 4522427 - DNA, 25 bp, Homo sapien
gaggatcacctaagcctggggaggt

SEQ ID NO: 4522428 - DNA, 25 bp, Homo sapien
tcagtatggaaaggatgaaacaccc

SEQ ID NO: 4522429 - DNA, 25 bp, Homo sapien
ccagtgtatattaccatcaaaggac

SEQ ID NO: 4522430 - DNA, 25 bp, Homo sapien
ggagaacatctttatgacctggaaa

SEQ ID NO: 4522431 - DNA, 25 bp, Homo sapien
caatatatggtgctgagacaactgg

SEQ ID NO: 4522432 - DNA, 25 bp, Homo sapien
aaaacaactgaaactatggggaatg

SEQ ID NO: 4522433 - DNA, 25 bp, Homo sapien
gggaatgtttcaaaccagttaagca

SEQ ID NO: 4522434 - DNA, 25 bp, Homo sapien
catgacatgagaaccaatactggta

SEQ ID NO: 4522435 - DNA, 25 bp, Homo sapien
ccagttaagcactgacataaatgac

SEQ ID NO: 4522436 - DNA, 25 bp, Homo sapien
tcagttcaaactgcctccacagaac

SEQ ID NO: 4522437 - DNA, 25 bp, Homo sapien
ctttcaagcgttccttattctcaaa

SEQ ID NO: 4522438 - DNA, 25 bp, Homo sapien
catttagcattcaactctttgatca

SEQ ID NO: 4522439 - DNA, 25 bp, Homo sapien
ctcctaggtcatttgaacatttagc

SEQ ID NO: 4522440 - DNA, 25 bp, Homo sapien
acagcacactctgatgtcccgtgca

SEQ ID NO: 4522441 - DNA, 25 bp, Homo sapien
caacacaggctgtatgctcagtgaa

SEQ ID NO: 4522442 - DNA, 25 bp, Homo sapien
acccaggttagcaacacaggctgta

SEQ ID NO: 4522443 - DNA, 25 bp, Homo sapien
tgatgtcccgtgcagttcactgaca

SEQ ID NO: 4522444 - DNA, 25 bp, Homo sapien
caagaattcccccaaagccacatgg

SEQ ID NO: 4522445 - DNA, 25 bp, Homo sapien
gccaagaattcccccaaagccacat

SEQ ID NO: 4522446 - DNA, 25 bp, Homo sapien
tgccaagaattcccccaaagccaca

SEQ ID NO: 4522447 - DNA, 25 bp, Homo sapien
ttgccaagaattcccccaaagccac

SEQ ID NO: 4522448 - DNA, 25 bp, Homo sapien
tccaggctctcgtactggtgatggg

SEQ ID NO: 4522449 - DNA, 25 bp, Homo sapien
ccaggctctcgtactggtgatggga

SEQ ID NO: 4522450 - DNA, 25 bp, Homo sapien
agagcagaggagcccacgatgctcc

SEQ ID NO: 4522451 - DNA, 25 bp, Homo sapien
aggagcccacgatgctccctgcagt

SEQ ID NO: 4522452 - DNA, 25 bp, Homo sapien
ggagtgtgtactaacttcaaccaga

SEQ ID NO: 4522453 - DNA, 25 bp, Homo sapien
ttaaaacaacatcgtccatgaagcc

SEQ ID NO: 4522454 - DNA, 25 bp, Homo sapien
gaaattaattctgcacctgggtagc

SEQ ID NO: 4522455 - DNA, 25 bp, Homo sapien
gaagccaagggaaccattacaccag

SEQ ID NO: 4522456 - DNA, 25 bp, Homo sapien
tgagaaaagcattgatcagtccact

SEQ ID NO: 4522457 - DNA, 25 bp, Homo sapien
gaaaagcattgatcagtccacttac

SEQ ID NO: 4522458 - DNA, 25 bp, Homo sapien
aatgagaaaagcattgatcagtcca

SEQ ID NO: 4522459 - DNA, 25 bp, Homo sapien
gagaaaagcattgatcagtccactt

SEQ ID NO: 4522460 - DNA, 25 bp, Homo sapien
aggattttcagaggatggcgttacc

SEQ ID NO: 4522461 - DNA, 25 bp, Homo sapien
tggctgacactagaagtagcaccat

SEQ ID NO: 4522462 - DNA, 25 bp, Homo sapien
tgtgtaatctccctttaattcgtct

SEQ ID NO: 4522463 - DNA, 25 bp, Homo sapien
gaaatccatgctatcaaggcttttg

SEQ ID NO: 4522464 - DNA, 25 bp, Homo sapien
cactttattttgatagcgctggtag

SEQ ID NO: 4522465 - DNA, 25 bp, Homo sapien
gattgcacatgcctatgggtcccaa

SEQ ID NO: 4522466 - DNA, 25 bp, Homo sapien
aaatctagaagcctaaaagagcctg

SEQ ID NO: 4522467 - DNA, 25 bp, Homo sapien
aactagaagaatagatccactgccc

SEQ ID NO: 4522468 - DNA, 25 bp, Homo sapien
atcttgtccccgctccgctcgcggg

SEQ ID NO: 4522469 - DNA, 25 bp, Homo sapien
ggggtgacgccgatggccatctgca

SEQ ID NO: 4522470 - DNA, 25 bp, Homo sapien
gcttcctcttgagcggcaggaggct

SEQ ID NO: 4522471 - DNA, 25 bp, Homo sapien
cagcaccgtcaggtatttctggtac

SEQ ID NO: 4522472 - DNA, 25 bp, Homo sapien
gccaaaaattgtagggtgcaccaag

SEQ ID NO: 4522473 - DNA, 25 bp, Homo sapien
aaggttcgtatgagagctatgtcca

SEQ ID NO: 4522474 - DNA, 25 bp, Homo sapien
tatccggtgttagctgaaaaggttc

SEQ ID NO: 4522475 - DNA, 25 bp, Homo sapien
tctgagggaaatatcttcgagtggc

SEQ ID NO: 4522476 - DNA, 25 bp, Homo sapien
tcatggtgtatgagctaatggcatg

SEQ ID NO: 4522477 - DNA, 25 bp, Homo sapien
gtatgagctaatggcatggcatcag

SEQ ID NO: 4522478 - DNA, 25 bp, Homo sapien
agaatccacagccatttgagccatg

SEQ ID NO: 4522479 - DNA, 25 bp, Homo sapien
acagccatttgagccatgggagagc

SEQ ID NO: 4522480 - DNA, 25 bp, Homo sapien
ggattgtggcattcctgaccttgca

SEQ ID NO: 4522481 - DNA, 25 bp, Homo sapien
tcctgtgctcccaaacttggcttgg

SEQ ID NO: 4522482 - DNA, 25 bp, Homo sapien
taaatgctgcatgtctaagctgatc

SEQ ID NO: 4522483 - DNA, 25 bp, Homo sapien
tccagactgtagtcttctgtgtccc

SEQ ID NO: 4522484 - DNA, 25 bp, Homo sapien
actgctgtatgatctgggggccacc

SEQ ID NO: 4522485 - DNA, 25 bp, Homo sapien
gtgtcctcactcaggtttgcttccc

SEQ ID NO: 4522486 - DNA, 25 bp, Homo sapien
cagcggagccggaccaggctcttgt

SEQ ID NO: 4522487 - DNA, 25 bp, Homo sapien
ggaccaggctcttgtgtcctcactc

SEQ ID NO: 4522488 - DNA, 25 bp, Homo sapien
tacaggaggcatgactctggcatct

SEQ ID NO: 4522489 - DNA, 25 bp, Homo sapien
acaggaggcatgactctggcatctt

SEQ ID NO: 4522490 - DNA, 25 bp, Homo sapien
ctgtacaggaggcatgactctggca

SEQ ID NO: 4522491 - DNA, 25 bp, Homo sapien
ggcatcttctcagtttctggggagg

SEQ ID NO: 4522492 - DNA, 25 bp, Homo sapien
gcaccctgtgggtgagatgcaccag

SEQ ID NO: 4522493 - DNA, 25 bp, Homo sapien
ttaagaaccaggccggcccatctcg

SEQ ID NO: 4522494 - DNA, 25 bp, Homo sapien
caccaggtcattgtaggccacaggc

SEQ ID NO: 4522495 - DNA, 25 bp, Homo sapien
catctcgggtttgtgtctgggcaca

SEQ ID NO: 4522496 - DNA, 25 bp, Homo sapien
gtcaaaagcactgctacgatcgggt

SEQ ID NO: 4522497 - DNA, 25 bp, Homo sapien
gatcgggttgagttccaacccttgc

SEQ ID NO: 4522498 - DNA, 25 bp, Homo sapien
tacataattggagactttgttcttg

SEQ ID NO: 4522499 - DNA, 25 bp, Homo sapien
agcagatgcattttgtaaggtccta

SEQ ID NO: 4522500 - DNA, 25 bp, Homo sapien
cttgctcttcctcgggatctgacca

SEQ ID NO: 4522501 - DNA, 25 bp, Homo sapien
cagttgaactcgtcttgctcttcct

SEQ ID NO: 4522502 - DNA, 25 bp, Homo sapien
gtcttgctcttcctcgggatctgac

SEQ ID NO: 4522503 - DNA, 25 bp, Homo sapien
gttgaactcgtcttgctcttcctcg

SEQ ID NO: 4522504 - DNA, 25 bp, Homo sapien
atttctgcctctgcctggacagcac

SEQ ID NO: 4522505 - DNA, 25 bp, Homo sapien
gatttctgcctctgcctggacagca

SEQ ID NO: 4522506 - DNA, 25 bp, Homo sapien
agaggcaatggtccccagcaaagag

SEQ ID NO: 4522507 - DNA, 25 bp, Homo sapien
ggttgaacgcttctgccacttggtt

SEQ ID NO: 4522508 - DNA, 25 bp, Homo sapien
cacacctggttgaacgcttctgcca

SEQ ID NO: 4522509 - DNA, 25 bp, Homo sapien
cagcaaagagctgatagcacatgga

SEQ ID NO: 4522510 - DNA, 25 bp, Homo sapien
atcatcgtgtagtcagtggcagccc

SEQ ID NO: 4522511 - DNA, 25 bp, Homo sapien
tcccatcatcgtgtagtcagtggca

SEQ ID NO: 4522512 - DNA, 25 bp, Homo sapien
tccagctcctgaaggcggcgtccat

SEQ ID NO: 4522513 - DNA, 25 bp, Homo sapien
catcctcccatcatcgtgtagtcag

SEQ ID NO: 4522514 - DNA, 25 bp, Homo sapien
aggcacttgcacctttgaaaaggag

SEQ ID NO: 4522515 - DNA, 25 bp, Homo sapien
acagaaggcacttgcacctttgaaa

SEQ ID NO: 4522516 - DNA, 25 bp, Homo sapien
cagaaggcacttgcacctttgaaaa

SEQ ID NO: 4522517 - DNA, 25 bp, Homo sapien
gaaggcacttgcacctttgaaaagg

SEQ ID NO: 4522518 - DNA, 25 bp, Homo sapien
gggagcgcctgactcacagtgaatt

SEQ ID NO: 4522519 - DNA, 25 bp, Homo sapien
taactcatcagtatccgagagccac

SEQ ID NO: 4522520 - DNA, 25 bp, Homo sapien
gatctctcggtactcctttaaggag

SEQ ID NO: 4522521 - DNA, 25 bp, Homo sapien
gcaatcctgagggaggatctctcgg

SEQ ID NO: 4522522 - DNA, 25 bp, Homo sapien
tggagaactcgggaaatatctccct

SEQ ID NO: 4522523 - DNA, 25 bp, Homo sapien
gtggagaactcgggaaatatctccc

SEQ ID NO: 4522524 - DNA, 25 bp, Homo sapien
tgttcttgtctcactgtcataaaac

SEQ ID NO: 4522525 - DNA, 25 bp, Homo sapien
tctgtgttcttgtctcactgtcata

SEQ ID NO: 4522526 - DNA, 25 bp, Homo sapien
gtgtaaggttttgtatattccagag

SEQ ID NO: 4522527 - DNA, 25 bp, Homo sapien
aggttttgtatattccagagggtag

SEQ ID NO: 4522528 - DNA, 25 bp, Homo sapien
tgtaaggttttgtatattccagagg

SEQ ID NO: 4522529 - DNA, 25 bp, Homo sapien
tgtgtaaggttttgtatattccaga

SEQ ID NO: 4522530 - DNA, 25 bp, Homo sapien
ctagaacagggcaggggcataccac

SEQ ID NO: 4522531 - DNA, 25 bp, Homo sapien
gggcacaagttttcagcaacggtca

SEQ ID NO: 4522532 - DNA, 25 bp, Homo sapien
tttcagcaacggtcacacctggatg

SEQ ID NO: 4522533 - DNA, 25 bp, Homo sapien
caggggcataccacagaggggggca

SEQ ID NO: 4522534 - DNA, 25 bp, Homo sapien
caacaatagacgaagtcacagatga

SEQ ID NO: 4522535 - DNA, 25 bp, Homo sapien
gcaacaatagacgaagtcacagatg

SEQ ID NO: 4522536 - DNA, 25 bp, Homo sapien
aacaatagacgaagtcacagatgaa

SEQ ID NO: 4522537 - DNA, 25 bp, Homo sapien
cgcaacaatagacgaagtcacagat

SEQ ID NO: 4522538 - DNA, 25 bp, Homo sapien
aggagtaaagggtgcacgtgcgggt

SEQ ID NO: 4522539 - DNA, 25 bp, Homo sapien
agtaaagggtgcacgtgcgggtgtg

SEQ ID NO: 4522540 - DNA, 25 bp, Homo sapien
ataaaaaaaaagcgagcagagagct

SEQ ID NO: 4522541 - DNA, 25 bp, Homo sapien
gagtaaagggtgcacgtgcgggtgt

SEQ ID NO: 4522542 - DNA, 25 bp, Homo sapien
gggcttccctcttctctgggcaccg

SEQ ID NO: 4522543 - DNA, 25 bp, Homo sapien
gactgatgctcagcccctttgggct

SEQ ID NO: 4522544 - DNA, 25 bp, Homo sapien
ttaagactgatgctcagcccctttg

SEQ ID NO: 4522545 - DNA, 25 bp, Homo sapien
ctgggcaccgtgtcttccaacccac

SEQ ID NO: 4522546 - DNA, 25 bp, Homo sapien
cacacgctagcagctatgatggtac

SEQ ID NO: 4522547 - DNA, 25 bp, Homo sapien
tcacacgctagcagctatgatggta

SEQ ID NO: 4522548 - DNA, 25 bp, Homo sapien
ctttggggccgtgggagccagcctt

SEQ ID NO: 4522549 - DNA, 25 bp, Homo sapien
tggggccgtgggagccagccttggt

SEQ ID NO: 4522550 - DNA, 25 bp, Homo sapien
gggctttggggccgtgggagccagc

SEQ ID NO: 4522551 - DNA, 25 bp, Homo sapien
gggccgtgggagccagccttggtac

SEQ ID NO: 4522552 - DNA, 25 bp, Homo sapien
tgcatccggcaaggacgctctgcac

SEQ ID NO: 4522553 - DNA, 25 bp, Homo sapien
ctgcatccggcaaggacgctctgca

SEQ ID NO: 4522554 - DNA, 25 bp, Homo sapien
gcccccatgtgcgtgctgatggtgg

SEQ ID NO: 4522555 - DNA, 25 bp, Homo sapien
cccccatgtgcgtgctgatggtggt

SEQ ID NO: 4522556 - DNA, 25 bp, Homo sapien
tcagcgttttctggtccccacgtga

SEQ ID NO: 4522557 - DNA, 25 bp, Homo sapien
gcgttttctggtccccacgtgagta

SEQ ID NO: 4522558 - DNA, 25 bp, Homo sapien
tctgccgactcttccatcagcgttt

SEQ ID NO: 4522559 - DNA, 25 bp, Homo sapien
cgactcttccatcagcgttttctgg

SEQ ID NO: 4522560 - DNA, 25 bp, Homo sapien
tggtcttgggcatgacaccaaccat

SEQ ID NO: 4522561 - DNA, 25 bp, Homo sapien
catgatggtcttgggcatgacacca

SEQ ID NO: 4522562 - DNA, 25 bp, Homo sapien
tgatggtcttgggcatgacaccaac

SEQ ID NO: 4522563 - DNA, 25 bp, Homo sapien
gatggtcttgggcatgacaccaacc

SEQ ID NO: 4522564 - DNA, 25 bp, Homo sapien
tccacaaggttctgggtggtttcca

SEQ ID NO: 4522565 - DNA, 25 bp, Homo sapien
aggagtccacaaggttctgggtggt

SEQ ID NO: 4522566 - DNA, 25 bp, Homo sapien
gtaggagtccacaaggttctgggtg

SEQ ID NO: 4522567 - DNA, 25 bp, Homo sapien
ccacaaggttctgggtggtttccat

SEQ ID NO: 4522568 - DNA, 25 bp, Homo sapien
cagttgctgaccactagtgatcctt

SEQ ID NO: 4522569 - DNA, 25 bp, Homo sapien
gcacacagttgctgaccactagtga

SEQ ID NO: 4522570 - DNA, 25 bp, Homo sapien
ttgcacacagttgctgaccactagt

SEQ ID NO: 4522571 - DNA, 25 bp, Homo sapien
tgaccactagtgatcctttgaggtt

SEQ ID NO: 4522572 - DNA, 25 bp, Homo sapien
ttcaaagccgtcttgggccgcatcc

SEQ ID NO: 4522573 - DNA, 25 bp, Homo sapien
caagcttgctttacacaatattctg

SEQ ID NO: 4522574 - DNA, 25 bp, Homo sapien
gatagtttatgggaagccttcatca

SEQ ID NO: 4522575 - DNA, 25 bp, Homo sapien
agaactcctgtatagcttttgccca

SEQ ID NO: 4522576 - DNA, 25 bp, Homo sapien
cactaagcttggtaaggaccaattg

SEQ ID NO: 4522577 - DNA, 25 bp, Homo sapien
ggcactaagcttggtaaggaccaat

SEQ ID NO: 4522578 - DNA, 25 bp, Homo sapien
ctaagcttggtaaggaccaattgtt

SEQ ID NO: 4522579 - DNA, 25 bp, Homo sapien
agcttggtaaggaccaattgttatt

SEQ ID NO: 4522580 - DNA, 25 bp, Homo sapien
gatgctagttctacaattgcctagg

SEQ ID NO: 4522581 - DNA, 25 bp, Homo sapien
ggttctgaggtacagtgtcaagtca

SEQ ID NO: 4522582 - DNA, 25 bp, Homo sapien
ggaggatggcttttccaattatcct

SEQ ID NO: 4522583 - DNA, 25 bp, Homo sapien
cattgattaaatctggtagccatta

SEQ ID NO: 4522584 - DNA, 25 bp, Homo sapien
ttagagttgtgataacgcagacatt

SEQ ID NO: 4522585 - DNA, 25 bp, Homo sapien
gttgtgataacgcagacattttccc

SEQ ID NO: 4522586 - DNA, 25 bp, Homo sapien
gtgataacgcagacattttccctga

SEQ ID NO: 4522587 - DNA, 25 bp, Homo sapien
tgtatgttagagttgtgataacgca

SEQ ID NO: 4522588 - DNA, 25 bp, Homo sapien
gcccttgttctactggtacttgctg

SEQ ID NO: 4522589 - DNA, 25 bp, Homo sapien
tgcccttgttctactggtacttgct

SEQ ID NO: 4522590 - DNA, 25 bp, Homo sapien
gtgttcatgaggtgcctatggatta

SEQ ID NO: 4522591 - DNA, 25 bp, Homo sapien
tttaccctgataaatatcagtgact

SEQ ID NO: 4522592 - DNA, 25 bp, Homo sapien
caataatgtgttcatgaggtgccta

SEQ ID NO: 4522593 - DNA, 25 bp, Homo sapien
acttttatcgttgaaatcacttcac

SEQ ID NO: 4522594 - DNA, 25 bp, Homo sapien
cccgttccccggtgtacacattgtg

SEQ ID NO: 4522595 - DNA, 25 bp, Homo sapien
ccgttccccggtgtacacattgtgt

SEQ ID NO: 4522596 - DNA, 25 bp, Homo sapien
gtgtaaggttttgtatattccagag

SEQ ID NO: 4522597 - DNA, 25 bp, Homo sapien
aggttttgtatattccagagggtag

SEQ ID NO: 4522598 - DNA, 25 bp, Homo sapien
tgtaaggttttgtatattccagagg

SEQ ID NO: 4522599 - DNA, 25 bp, Homo sapien
tgtgtaaggttttgtatattccaga

SEQ ID NO: 4522600 - DNA, 25 bp, Homo sapien
ggggcaatgtcgggacagctttctc

SEQ ID NO: 4522601 - DNA, 25 bp, Homo sapien
tggaggggcaatgtcgggacagctt

SEQ ID NO: 4522602 - DNA, 25 bp, Homo sapien
gaggggcaatgtcgggacagctttc

SEQ ID NO: 4522603 - DNA, 25 bp, Homo sapien
aggggcaatgtcgggacagctttct

SEQ ID NO: 4522604 - DNA, 25 bp, Homo sapien
atgggatggacttgcgtgacctgat

SEQ ID NO: 4522605 - DNA, 25 bp, Homo sapien
cgcaggtgcggctgtggcaaggttc

SEQ ID NO: 4522606 - DNA, 25 bp, Homo sapien
ggagggcgcaggtgcggctgtggca

SEQ ID NO: 4522607 - DNA, 25 bp, Homo sapien
tgggatggacttgcgtgacctgatc

SEQ ID NO: 4522608 - DNA, 25 bp, Homo sapien
gaaggaaaattgctcgaacaaggat

SEQ ID NO: 4522609 - DNA, 25 bp, Homo sapien
gcctgacagaaggaaaattgctcga

SEQ ID NO: 4522610 - DNA, 25 bp, Homo sapien
attgctcgaacaaggatgatgaagc

SEQ ID NO: 4522611 - DNA, 25 bp, Homo sapien
ttggggaacccaacataacagccac

SEQ ID NO: 4522612 - DNA, 25 bp, Homo sapien
tcagtcacatgctagcagctgtgat

SEQ ID NO: 4522613 - DNA, 25 bp, Homo sapien
cagtcacatgctagcagctgtgatg

SEQ ID NO: 4522614 - DNA, 25 bp, Homo sapien
gtcacatgctagcagctgtgatggt

SEQ ID NO: 4522615 - DNA, 25 bp, Homo sapien
cacatgctagcagctgtgatggtac

SEQ ID NO: 4522616 - DNA, 25 bp, Homo sapien
gggagacttggggccataggggcca

SEQ ID NO: 4522617 - DNA, 25 bp, Homo sapien
ggctggggagacttggggccatagg

SEQ ID NO: 4522618 - DNA, 25 bp, Homo sapien
gagacttggggccataggggccagc

SEQ ID NO: 4522619 - DNA, 25 bp, Homo sapien
tggggagacttggggccataggggc

SEQ ID NO: 4522620 - DNA, 25 bp, Homo sapien
tgcgtctggcaaggacgctctgcac

SEQ ID NO: 4522621 - DNA, 25 bp, Homo sapien
ctgcgtctggcaaggacgctctgca

SEQ ID NO: 4522622 - DNA, 25 bp, Homo sapien
gcccccatgtgcgtgctgatggtgg

SEQ ID NO: 4522623 - DNA, 25 bp, Homo sapien
cccccatgtgcgtgctgatggtggt

SEQ ID NO: 4522624 - DNA, 25 bp, Homo sapien
ggttggacagcaactctgataatat

SEQ ID NO: 4522625 - DNA, 25 bp, Homo sapien
ttggacagcaactctgataatatga

SEQ ID NO: 4522626 - DNA, 25 bp, Homo sapien
gttggacagcaactctgataatatg

SEQ ID NO: 4522627 - DNA, 25 bp, Homo sapien
aggttggacagcaactctgataata

SEQ ID NO: 4522628 - DNA, 25 bp, Homo sapien
aaccaactatgaggtcccacacagt

SEQ ID NO: 4522629 - DNA, 25 bp, Homo sapien
gaaaccaactatgaggtcccacaca

SEQ ID NO: 4522630 - DNA, 25 bp, Homo sapien
gacggtcttgggcatgaaaccaact

SEQ ID NO: 4522631 - DNA, 25 bp, Homo sapien
cggtcttgggcatgaaaccaactat

SEQ ID NO: 4522632 - DNA, 25 bp, Homo sapien
gtggagttgtccacgggtccaatgg

SEQ ID NO: 4522633 - DNA, 25 bp, Homo sapien
tcagtttggcaaacatgtcctcctg

SEQ ID NO: 4522634 - DNA, 25 bp, Homo sapien
tggagttgtccacgggtccaatggg

SEQ ID NO: 4522635 - DNA, 25 bp, Homo sapien
ctttgagggtctttactctgcccat

SEQ ID NO: 4522636 - DNA, 25 bp, Homo sapien
ctgctttgagggtctttactctgcc

SEQ ID NO: 4522637 - DNA, 25 bp, Homo sapien
tgctttgagggtctttactctgccc

SEQ ID NO: 4522638 - DNA, 25 bp, Homo sapien
gctttgagggtctttactctgccca

SEQ ID NO: 4522639 - DNA, 25 bp, Homo sapien
ttatgttttgcaccagtgcttcagt

SEQ ID NO: 4522640 - DNA, 25 bp, Homo sapien
tgttttgcaccagtgcttcagtcca

SEQ ID NO: 4522641 - DNA, 25 bp, Homo sapien
atgttttgcaccagtgcttcagtcc

SEQ ID NO: 4522642 - DNA, 25 bp, Homo sapien
tatgttttgcaccagtgcttcagtc

SEQ ID NO: 4522643 - DNA, 25 bp, Homo sapien
tacccatttctttgagttccttgtg

SEQ ID NO: 4522644 - DNA, 25 bp, Homo sapien
cattctgaaaataaattacccattt

SEQ ID NO: 4522645 - DNA, 25 bp, Homo sapien
aattttctagctcattctgaaaata

SEQ ID NO: 4522646 - DNA, 25 bp, Homo sapien
gctcattctgaaaataaattaccca

SEQ ID NO: 4522647 - DNA, 25 bp, Homo sapien
agccttcttggtcagtccacgcaca

SEQ ID NO: 4522648 - DNA, 25 bp, Homo sapien
acgcacacctccactttggagcaag

SEQ ID NO: 4522649 - DNA, 25 bp, Homo sapien
cacacctccactttggagcaaggtt

SEQ ID NO: 4522650 - DNA, 25 bp, Homo sapien
gagccttcttggtcagtccacgcac

SEQ ID NO: 4522651 - DNA, 25 bp, Homo sapien
gaagctaacaactcccaggttcctg

SEQ ID NO: 4522652 - DNA, 25 bp, Homo sapien
cgtccttctagtgtctaacttcaat

SEQ ID NO: 4522653 - DNA, 25 bp, Homo sapien
tcctgagagttggaacgtccttcta

SEQ ID NO: 4522654 - DNA, 25 bp, Homo sapien
agagtctgttcttgactggccctgg

SEQ ID NO: 4522655 - DNA, 25 bp, Homo sapien
ttttagaaccgagccttccgagatg

SEQ ID NO: 4522656 - DNA, 25 bp, Homo sapien
gcatgcggcctagatagcctctcag

SEQ ID NO: 4522657 - DNA, 25 bp, Homo sapien
ggtcatgagagaacttgggctttag

SEQ ID NO: 4522658 - DNA, 25 bp, Homo sapien
gagttctacctctgaaggcgagcgg

SEQ ID NO: 4522659 - DNA, 25 bp, Homo sapien
gaaggtccacacatagcacatatca

SEQ ID NO: 4522660 - DNA, 25 bp, Homo sapien
aggaagggacttgtccgaagtgaca

SEQ ID NO: 4522661 - DNA, 25 bp, Homo sapien
ggtccacacatagcacatatcacag

SEQ ID NO: 4522662 - DNA, 25 bp, Homo sapien
acatagcacatatcacagctgagga

SEQ ID NO: 4522663 - DNA, 25 bp, Homo sapien
tataactataagtggaatacctggg

SEQ ID NO: 4522664 - DNA, 25 bp, Homo sapien
gctcttccaaactggcaaaatcctg

SEQ ID NO: 4522665 - DNA, 25 bp, Homo sapien
ctcggagaggcttactgagctccct

SEQ ID NO: 4522666 - DNA, 25 bp, Homo sapien
ggaaccgcagggagttccagtcacc

SEQ ID NO: 4522667 - DNA, 25 bp, Homo sapien
ttcctcatgaagagtgacttgcggc

SEQ ID NO: 4522668 - DNA, 25 bp, Homo sapien
caagacaccgggcatgtttcctcat

SEQ ID NO: 4522669 - DNA, 25 bp, Homo sapien
gaagagtgacttgcggctccttcgc

SEQ ID NO: 4522670 - DNA, 25 bp, Homo sapien
ggatgaacccactgcgggggtcttc

SEQ ID NO: 4522671 - DNA, 25 bp, Homo sapien
cattgatgagttcgtggtcccagga

SEQ ID NO: 4522672 - DNA, 25 bp, Homo sapien
tattatagacaggactcaggtaagg

SEQ ID NO: 4522673 - DNA, 25 bp, Homo sapien
gcattcaagctgaggttagcccact

SEQ ID NO: 4522674 - DNA, 25 bp, Homo sapien
gcccactattgggagggatattata

SEQ ID NO: 4522675 - DNA, 25 bp, Homo sapien
tctcagataggaacccagcagaagg

SEQ ID NO: 4522676 - DNA, 25 bp, Homo sapien
tcccacttgggaaaagcgaggctga

SEQ ID NO: 4522677 - DNA, 25 bp, Homo sapien
gcgaggctgacacccactgtgagca

SEQ ID NO: 4522678 - DNA, 25 bp, Homo sapien
gaagagcgtctgctggcacaggacc

SEQ ID NO: 4522679 - DNA, 25 bp, Homo sapien
cgatagtgtgtgaatttggaatgaa

SEQ ID NO: 4522680 - DNA, 25 bp, Homo sapien
ttccggtgggctttcgatagtgtgt

SEQ ID NO: 4522681 - DNA, 25 bp, Homo sapien
tgctggtacttccagctcccttcca

SEQ ID NO: 4522682 - DNA, 25 bp, Homo sapien
gagcaagtcattttccggtgggctt

SEQ ID NO: 4522683 - DNA, 25 bp, Homo sapien
actaccattgggaagacgctgagca

SEQ ID NO: 4522684 - DNA, 25 bp, Homo sapien
tactaccattgggaagacgctgagc

SEQ ID NO: 4522685 - DNA, 25 bp, Homo sapien
cacaaatacaagatgccagcgtggc

SEQ ID NO: 4522686 - DNA, 25 bp, Homo sapien
ccagcgtggccaatggggcttccat

SEQ ID NO: 4522687 - DNA, 25 bp, Homo sapien
gcttccataagagtggcaatcaggg

SEQ ID NO: 4522688 - DNA, 25 bp, Homo sapien
cctgtggtccacaaatacaagatgc

SEQ ID NO: 4522689 - DNA, 25 bp, Homo sapien
cgcaggtcacctcggccatcgccac

SEQ ID NO: 4522690 - DNA, 25 bp, Homo sapien
agcaggccgtggtcatgagcttctg

SEQ ID NO: 4522691 - DNA, 25 bp, Homo sapien
tgcagcaggccgtggtcatgagctt

SEQ ID NO: 4522692 - DNA, 25 bp, Homo sapien
ggtcacctcggccatcgccacgctg

SEQ ID NO: 4522693 - DNA, 25 bp, Homo sapien
caacttgtgaccctcgccaaccgcc

SEQ ID NO: 4522694 - DNA, 25 bp, Homo sapien
gcgctcgcgcctctcgtccaacttg

SEQ ID NO: 4522695 - DNA, 25 bp, Homo sapien
gcggggccgtcatccagaccaaagc

SEQ ID NO: 4522696 - DNA, 25 bp, Homo sapien
tgaccctcgccaaccgccctgcggg

SEQ ID NO: 4522697 - DNA, 25 bp, Homo sapien
tcataggaaagtgtccccattcaca

SEQ ID NO: 4522698 - DNA, 25 bp, Homo sapien
tctgcaccgattgagtgactgaggg

SEQ ID NO: 4522699 - DNA, 25 bp, Homo sapien
cattcacatgactccagtggtttct

SEQ ID NO: 4522700 - DNA, 25 bp, Homo sapien
agtggtttctgccacccgtctgcac

SEQ ID NO: 4522701 - DNA, 25 bp, Homo sapien
atccagaaatataccacggcaggcc

SEQ ID NO: 4522702 - DNA, 25 bp, Homo sapien
gggctcgaggacctaacttgcctga

SEQ ID NO: 4522703 - DNA, 25 bp, Homo sapien
cagctagttcttctacacttaagca

SEQ ID NO: 4522704 - DNA, 25 bp, Homo sapien
tcattaaaatggactctagaagggc

SEQ ID NO: 4522705 - DNA, 25 bp, Homo sapien
cactgtgactcaacactgatctcaa

SEQ ID NO: 4522706 - DNA, 25 bp, Homo sapien
taaacgctgagacattaaaacgtcc

SEQ ID NO: 4522707 - DNA, 25 bp, Homo sapien
taaaacgtcccactgatgtcacgaa

SEQ ID NO: 4522708 - DNA, 25 bp, Homo sapien
taagcatgccacctgaatcactgtg

SEQ ID NO: 4522709 - DNA, 25 bp, Homo sapien
tttaaactctatgccaataaataag

SEQ ID NO: 4522710 - DNA, 25 bp, Homo sapien
aaactggaaacaaatcccacgatcg

SEQ ID NO: 4522711 - DNA, 25 bp, Homo sapien
tactcacaaattgacaacataaaaa

SEQ ID NO: 4522712 - DNA, 25 bp, Homo sapien
ccacgatcgacaaagaaaaatactc

SEQ ID NO: 4522713 - DNA, 25 bp, Homo sapien
gaagctcattagtggtcccctctga

SEQ ID NO: 4522714 - DNA, 25 bp, Homo sapien
gctaagcagctactaggaggaatga

SEQ ID NO: 4522715 - DNA, 25 bp, Homo sapien
tgaagaatgcaaggtgcagcgccct

SEQ ID NO: 4522716 - DNA, 25 bp, Homo sapien
tattatgggacgacctctaagacaa

SEQ ID NO: 4522717 - DNA, 25 bp, Homo sapien
ccaactgtctcggtggtgaggagcc

SEQ ID NO: 4522718 - DNA, 25 bp, Homo sapien
tctaagggaagagctgtatcatcac

SEQ ID NO: 4522719 - DNA, 25 bp, Homo sapien
cccacctcagggattagaagcaaat

SEQ ID NO: 4522720 - DNA, 25 bp, Homo sapien
tcaggtagaccttcatgcagacatg

SEQ ID NO: 4522721 - DNA, 25 bp, Homo sapien
aagttgggagccgacatcaggatgc

SEQ ID NO: 4522722 - DNA, 25 bp, Homo sapien
tttcgtcctggcagcggaagcggtt

SEQ ID NO: 4522723 - DNA, 25 bp, Homo sapien
gcaaagtctttggacacggcctcca

SEQ ID NO: 4522724 - DNA, 25 bp, Homo sapien
cacgcgcaccagttcagaaggatga

SEQ ID NO: 4522725 - DNA, 25 bp, Homo sapien
cctgcttcaaactgatggatggaca

SEQ ID NO: 4522726 - DNA, 25 bp, Homo sapien
tgttctagagcagtagagtgctcca

SEQ ID NO: 4522727 - DNA, 25 bp, Homo sapien
gagtgctccaggtcgttaaaaatgg

SEQ ID NO: 4522728 - DNA, 25 bp, Homo sapien
cagtattgacggtagatgcagggta

SEQ ID NO: 4522729 - DNA, 25 bp, Homo sapien
tggtggtggtactgcagcacgatca

SEQ ID NO: 4522730 - DNA, 25 bp, Homo sapien
accgagaggcccacgatgatcatgg

SEQ ID NO: 4522731 - DNA, 25 bp, Homo sapien
acttgggcatcttgcccccgtcggg

SEQ ID NO: 4522732 - DNA, 25 bp, Homo sapien
tgatcatggtgctggcgaagtactg

SEQ ID NO: 4522733 - DNA, 25 bp, Homo sapien
ggatgttgcgggcatgatctcagcc

SEQ ID NO: 4522734 - DNA, 25 bp, Homo sapien
gatctcagccacgagcagcatgaag

SEQ ID NO: 4522735 - DNA, 25 bp, Homo sapien
agcagcatgaagacggtaagagaga

SEQ ID NO: 4522736 - DNA, 25 bp, Homo sapien
ctatcaatggtaccgaatcggatgt

SEQ ID NO: 4522737 - DNA, 25 bp, Homo sapien
ggatgagccagggaatccccaggaa

SEQ ID NO: 4522738 - DNA, 25 bp, Homo sapien
tgagggtcctccagtattctcagga

SEQ ID NO: 4522739 - DNA, 25 bp, Homo sapien
cctgatggagtcctgcgctgtctgc

SEQ ID NO: 4522740 - DNA, 25 bp, Homo sapien
gaaagcacaggcctctcaaggcaga

SEQ ID NO: 4522741 - DNA, 25 bp, Homo sapien
tttgcagcactcatagaacctttca

SEQ ID NO: 4522742 - DNA, 25 bp, Homo sapien
gatcagcaggttgaggccatagtag

SEQ ID NO: 4522743 - DNA, 25 bp, Homo sapien
tcttctccccggaatctgcaggaag

SEQ ID NO: 4522744 - DNA, 25 bp, Homo sapien
aggccatagtagagcgtcctgcggc

SEQ ID NO: 4522745 - DNA, 25 bp, Homo sapien
tatagccactgatatctgcctcctg

SEQ ID NO: 4522746 - DNA, 25 bp, Homo sapien
tagccactgatatctgcctcctgca

SEQ ID NO: 4522747 - DNA, 25 bp, Homo sapien
tctccattggggatatagccactga

SEQ ID NO: 4522748 - DNA, 25 bp, Homo sapien
gggatatagccactgatatctgcct

SEQ ID NO: 4522749 - DNA, 25 bp, Homo sapien
tacatcgatgtagcaggaactcttg

SEQ ID NO: 4522750 - DNA, 25 bp, Homo sapien
aaagggaaaccagcgtacatcgatg

SEQ ID NO: 4522751 - DNA, 25 bp, Homo sapien
cgtaagaccaggacccaaacttcag

SEQ ID NO: 4522752 - DNA, 25 bp, Homo sapien
gcagtgctgcacatcaaagggaaac

SEQ ID NO: 4522753 - DNA, 25 bp, Homo sapien
tgaaacggaagctgactgagatgtg

SEQ ID NO: 4522754 - DNA, 25 bp, Homo sapien
gactgaaacggaagctgactgagat

SEQ ID NO: 4522755 - DNA, 25 bp, Homo sapien
aaacagaagactgaaacggaagctg

SEQ ID NO: 4522756 - DNA, 25 bp, Homo sapien
cagaagactgaaacggaagctgact

SEQ ID NO: 4522757 - DNA, 25 bp, Homo sapien
tgtggcgtcaaagcgctcatcagca

SEQ ID NO: 4522758 - DNA, 25 bp, Homo sapien
tggcaatgcccagaagaattcacca

SEQ ID NO: 4522759 - DNA, 25 bp, Homo sapien
caggtactggcaatgcccagaagaa

SEQ ID NO: 4522760 - DNA, 25 bp, Homo sapien
gaattcaccaacacgttagtgtgga

SEQ ID NO: 4522761 - DNA, 25 bp, Homo sapien
aacaggaaaaggactgcatgagcca

SEQ ID NO: 4522762 - DNA, 25 bp, Homo sapien
caggaaaaggactgcatgagccagt

SEQ ID NO: 4522763 - DNA, 25 bp, Homo sapien
ggaaaaggactgcatgagccagtgc

SEQ ID NO: 4522764 - DNA, 25 bp, Homo sapien
gaaaaggactgcatgagccagtgcc

SEQ ID NO: 4522765 - DNA, 25 bp, Homo sapien
atatcgcagtttgcagctatccaca

SEQ ID NO: 4522766 - DNA, 25 bp, Homo sapien
tatcgcagtttgcagctatccacaa

SEQ ID NO: 4522767 - DNA, 25 bp, Homo sapien
tccacaaatgctggattagcaattg

SEQ ID NO: 4522768 - DNA, 25 bp, Homo sapien
cgcagtttgcagctatccacaaatg

SEQ ID NO: 4522769 - DNA, 25 bp, Homo sapien
ttccagtcactgatgagaagggaaa

SEQ ID NO: 4522770 - DNA, 25 bp, Homo sapien
gaaaaggtctgtcttatgatatcac

SEQ ID NO: 4522771 - DNA, 25 bp, Homo sapien
cacaacccgttccacatgggcagtt

SEQ ID NO: 4522772 - DNA, 25 bp, Homo sapien
gatgacccagtaaaggaaccaacac

SEQ ID NO: 4522773 - DNA, 25 bp, Homo sapien
cccagactcagctgagaaatgtcaa

SEQ ID NO: 4522774 - DNA, 25 bp, Homo sapien
cagacagtctacatgttcgataact

SEQ ID NO: 4522775 - DNA, 25 bp, Homo sapien
cccaagaatataaccaattgtcaag

SEQ ID NO: 4522776 - DNA, 25 bp, Homo sapien
caattcacataacactgacccaaga

SEQ ID NO: 4522777 - DNA, 25 bp, Homo sapien
gaaaatgctggtagatgcaatattt

SEQ ID NO: 4522778 - DNA, 25 bp, Homo sapien
atgctggtagatgcaatatttttgc

SEQ ID NO: 4522779 - DNA, 25 bp, Homo sapien
ctgaaaatgctggtagatgcaatat

SEQ ID NO: 4522780 - DNA, 25 bp, Homo sapien
aaatgctggtagatgcaatattttt

SEQ ID NO: 4522781 - DNA, 25 bp, Homo sapien
atttaaccgatggtggttgtttcat

SEQ ID NO: 4522782 - DNA, 25 bp, Homo sapien
taaccgatggtggttgtttcattat

SEQ ID NO: 4522783 - DNA, 25 bp, Homo sapien
ttaaccgatggtggttgtttcatta

SEQ ID NO: 4522784 - DNA, 25 bp, Homo sapien
agcagtcagggtattgcatgccatc

SEQ ID NO: 4522785 - DNA, 25 bp, Homo sapien
gagcagtcagggtattgcatgccat

SEQ ID NO: 4522786 - DNA, 25 bp, Homo sapien
cagtcagggtattgcatgccatcat

SEQ ID NO: 4522787 - DNA, 25 bp, Homo sapien
gcagtcagggtattgcatgccatca

SEQ ID NO: 4522788 - DNA, 25 bp, Homo sapien
ggtcctgctgactcaggtgtccact

SEQ ID NO: 4522789 - DNA, 25 bp, Homo sapien
tgggattccaggtcctgctgactca

SEQ ID NO: 4522790 - DNA, 25 bp, Homo sapien
tccaggtcctgctgactcaggtgtc

SEQ ID NO: 4522791 - DNA, 25 bp, Homo sapien
gggattccaggtcctgctgactcag

SEQ ID NO: 4522792 - DNA, 25 bp, Homo sapien
cttaatgttgcggtggggcgtgagc

SEQ ID NO: 4522793 - DNA, 25 bp, Homo sapien
taatgttgcggtggggcgtgagccg

SEQ ID NO: 4522794 - DNA, 25 bp, Homo sapien
ttaatgttgcggtggggcgtgagcc

SEQ ID NO: 4522795 - DNA, 25 bp, Homo sapien
ggctcccgtcaagccgcagtttaaa

SEQ ID NO: 4522796 - DNA, 25 bp, Homo sapien
gcgcggctcccgtcaagccgcagtt

SEQ ID NO: 4522797 - DNA, 25 bp, Homo sapien
gaggacttggcgggagctatgtggc

SEQ ID NO: 4522798 - DNA, 25 bp, Homo sapien
accgaggacttggcgggagctatgt

SEQ ID NO: 4522799 - DNA, 25 bp, Homo sapien
tcaaacaacagcagaacataggcaa

SEQ ID NO: 4522800 - DNA, 25 bp, Homo sapien
tgtctgaatgctgtagtgaatatac

SEQ ID NO: 4522801 - DNA, 25 bp, Homo sapien
caaagagaacagttttgggcaaaga

SEQ ID NO: 4522802 - DNA, 25 bp, Homo sapien
taataaacagtgcacacttgggggc

SEQ ID NO: 4522803 - DNA, 25 bp, Homo sapien
tgtaggagattaaccccataacttg

SEQ ID NO: 4522804 - DNA, 25 bp, Homo sapien
ttgagcagctgtttgatgatggtga

SEQ ID NO: 4522805 - DNA, 25 bp, Homo sapien
tcttgagcagctgtttgatgatggt

SEQ ID NO: 4522806 - DNA, 25 bp, Homo sapien
aaatttcttgagcagctgtttgatg

SEQ ID NO: 4522807 - DNA, 25 bp, Homo sapien
ggcagccaagcccaacaaaataatg

SEQ ID NO: 4522808 - DNA, 25 bp, Homo sapien
aagcccaacaaaataatggcacaca

SEQ ID NO: 4522809 - DNA, 25 bp, Homo sapien
tggcagccaagcccaacaaaataat

SEQ ID NO: 4522810 - DNA, 25 bp, Homo sapien
gccaagcccaacaaaataatggcac

SEQ ID NO: 4522811 - DNA, 25 bp, Homo sapien
tcaaggagaggatcctccctggcct

SEQ ID NO: 4522812 - DNA, 25 bp, Homo sapien
tgtcaaggagaggatcctccctggc

SEQ ID NO: 4522813 - DNA, 25 bp, Homo sapien
gaggtgagggtcacctcacgaagat

SEQ ID NO: 4522814 - DNA, 25 bp, Homo sapien
cttgtcaaggagaggatcctccctg

SEQ ID NO: 4522815 - DNA, 25 bp, Homo sapien
caccatgcttgtctgcagccccaag

SEQ ID NO: 4522816 - DNA, 25 bp, Homo sapien
catgcttgtctgcagccccaagctc

SEQ ID NO: 4522817 - DNA, 25 bp, Homo sapien
ccatgcttgtctgcagccccaagct

SEQ ID NO: 4522818 - DNA, 25 bp, Homo sapien
accatgcttgtctgcagccccaagc

SEQ ID NO: 4522819 - DNA, 25 bp, Homo sapien
ctggaccgggctcatcagcagagtt

SEQ ID NO: 4522820 - DNA, 25 bp, Homo sapien
ttgtagttgctgtaagccgcaatac

SEQ ID NO: 4522821 - DNA, 25 bp, Homo sapien
accgggctcatcagcagagttgtgg

SEQ ID NO: 4522822 - DNA, 25 bp, Homo sapien
tggaccgggctcatcagcagagttg

SEQ ID NO: 4522823 - DNA, 25 bp, Homo sapien
atctgctgcagctccagcagcttca

SEQ ID NO: 4522824 - DNA, 25 bp, Homo sapien
catctgctgcagctccagcagcttc

SEQ ID NO: 4522825 - DNA, 25 bp, Homo sapien
tctgctgcagctccagcagcttcac

SEQ ID NO: 4522826 - DNA, 25 bp, Homo sapien
atctttggcacggccccctggttct

SEQ ID NO: 4522827 - DNA, 25 bp, Homo sapien
tctttggcacggccccctggttctg

SEQ ID NO: 4522828 - DNA, 25 bp, Homo sapien
attgaatgaagcgaagttcttgttt

SEQ ID NO: 4522829 - DNA, 25 bp, Homo sapien
ctcttgccagtattgaatgaagcga

SEQ ID NO: 4522830 - DNA, 25 bp, Homo sapien
tctctcttgccagtattgaatgaag

SEQ ID NO: 4522831 - DNA, 25 bp, Homo sapien
catctctcttgccagtattgaatga

SEQ ID NO: 4522832 - DNA, 25 bp, Homo sapien
ccttcaggtggtccataaagctgct

SEQ ID NO: 4522833 - DNA, 25 bp, Homo sapien
gtctgccttctccttcaggtggtcc

SEQ ID NO: 4522834 - DNA, 25 bp, Homo sapien
ctgccttctccttcaggtggtccat

SEQ ID NO: 4522835 - DNA, 25 bp, Homo sapien
ctccttcaggtggtccataaagctg

SEQ ID NO: 4522836 - DNA, 25 bp, Homo sapien
ctgccctcaggtggcattttcaagt

SEQ ID NO: 4522837 - DNA, 25 bp, Homo sapien
tttcacctgctcttgtaactgtgcc

SEQ ID NO: 4522838 - DNA, 25 bp, Homo sapien
cctgctcttgtaactgtgcctgctt

SEQ ID NO: 4522839 - DNA, 25 bp, Homo sapien
gcctgcttctcctgggcactagctc

SEQ ID NO: 4522840 - DNA, 25 bp, Homo sapien
gctctttcacctgctcttgtaactg

SEQ ID NO: 4522841 - DNA, 25 bp, Homo sapien
ctgagggcaagatgtgagcattctt

SEQ ID NO: 4522842 - DNA, 25 bp, Homo sapien
cgggtcctctgggacactcggcatg

SEQ ID NO: 4522843 - DNA, 25 bp, Homo sapien
cctgctctccgggtcctctgggaca

SEQ ID NO: 4522844 - DNA, 25 bp, Homo sapien
tctccgggtcctctgggacactcgg

SEQ ID NO: 4522845 - DNA, 25 bp, Homo sapien
ctctgggacactcggcatgggctga

SEQ ID NO: 4522846 - DNA, 25 bp, Homo sapien
cttgctattccgcccaggcacactc

SEQ ID NO: 4522847 - DNA, 25 bp, Homo sapien
cactcccactactggtcgatgtggg

SEQ ID NO: 4522848 - DNA, 25 bp, Homo sapien
gtgaccgcccgctcacaggaggtca

SEQ ID NO: 4522849 - DNA, 25 bp, Homo sapien
gctattccgcccaggcacactccca

SEQ ID NO: 4522850 - DNA, 25 bp, Homo sapien
agctgggccgttagctgctggttct

SEQ ID NO: 4522851 - DNA, 25 bp, Homo sapien
gctggctggccacttccaggtgctc

SEQ ID NO: 4522852 - DNA, 25 bp, Homo sapien
gctggttctgctggctggccacttc

SEQ ID NO: 4522853 - DNA, 25 bp, Homo sapien
cagctgggccgttagctgctggttc

SEQ ID NO: 4522854 - DNA, 25 bp, Homo sapien
actgcctgtacagcgcctccttctc

SEQ ID NO: 4522855 - DNA, 25 bp, Homo sapien
tcactgcctgtacagcgcctccttc

SEQ ID NO: 4522856 - DNA, 25 bp, Homo sapien
cactgcctgtacagcgcctccttct

SEQ ID NO: 4522857 - DNA, 25 bp, Homo sapien
tgcctgtacagcgcctccttctcac

SEQ ID NO: 4522858 - DNA, 25 bp, Homo sapien
caggtgacccaggtaatggtctggc

SEQ ID NO: 4522859 - DNA, 25 bp, Homo sapien
tgacccaggtaatggtctggctgct

SEQ ID NO: 4522860 - DNA, 25 bp, Homo sapien
gtgacccaggtaatggtctggctgc

SEQ ID NO: 4522861 - DNA, 25 bp, Homo sapien
gctgctgcagactctgaacctcttg

SEQ ID NO: 4522862 - DNA, 25 bp, Homo sapien
gtgtgagggcacgtggtggctggtt

SEQ ID NO: 4522863 - DNA, 25 bp, Homo sapien
gtgagggcacgtggtggctggtttc

SEQ ID NO: 4522864 - DNA, 25 bp, Homo sapien
tgcaggaagaccctgggtgtgaggg

SEQ ID NO: 4522865 - DNA, 25 bp, Homo sapien
aagaccctgggtgtgagggcacgtg

SEQ ID NO: 4522866 - DNA, 25 bp, Homo sapien
tggatggggtggaggtttccgtctc

SEQ ID NO: 4522867 - DNA, 25 bp, Homo sapien
cctcccagcccttcttggatggggt

SEQ ID NO: 4522868 - DNA, 25 bp, Homo sapien
tcccctcccaagaggctgctgcccg

SEQ ID NO: 4522869 - DNA, 25 bp, Homo sapien
cccagcccttcttggatggggtgga

SEQ ID NO: 4522870 - DNA, 25 bp, Homo sapien
ctgctccaactgcagtgtgctcttg

SEQ ID NO: 4522871 - DNA, 25 bp, Homo sapien
ctcgccaagcttctcctgtagctcc

SEQ ID NO: 4522872 - DNA, 25 bp, Homo sapien
caactgcagtgtgctcttgttctca

SEQ ID NO: 4522873 - DNA, 25 bp, Homo sapien
actgcagtgtgctcttgttctcatt

SEQ ID NO: 4522874 - DNA, 25 bp, Homo sapien
cagctgccgaagcttctcgtgctgc

SEQ ID NO: 4522875 - DNA, 25 bp, Homo sapien
gccagctgccgaagcttctcgtgct

SEQ ID NO: 4522876 - DNA, 25 bp, Homo sapien
gctgccgaagcttctcgtgctgctc

SEQ ID NO: 4522877 - DNA, 25 bp, Homo sapien
tgccgaagcttctcgtgctgctcct

SEQ ID NO: 4522878 - DNA, 25 bp, Homo sapien
gggactggagctctcctgccactct

SEQ ID NO: 4522879 - DNA, 25 bp, Homo sapien
tctctctagttccttcctcaggtgc

SEQ ID NO: 4522880 - DNA, 25 bp, Homo sapien
ctctagttccttcctcaggtgctgc

SEQ ID NO: 4522881 - DNA, 25 bp, Homo sapien
ctgggactggagctctcctgccact

SEQ ID NO: 4522882 - DNA, 25 bp, Homo sapien
actccagctgctctacccaacgcat

SEQ ID NO: 4522883 - DNA, 25 bp, Homo sapien
tacccaacgcatatcctgcttctct

SEQ ID NO: 4522884 - DNA, 25 bp, Homo sapien
agctgctctacccaacgcatatcct

SEQ ID NO: 4522885 - DNA, 25 bp, Homo sapien
tgctctacccaacgcatatcctgct

SEQ ID NO: 4522886 - DNA, 25 bp, Homo sapien
ctctctccttctatatgttcagcac

SEQ ID NO: 4522887 - DNA, 25 bp, Homo sapien
tctccttctatatgttcagcacact

SEQ ID NO: 4522888 - DNA, 25 bp, Homo sapien
cttctatatgttcagcacactcatc

SEQ ID NO: 4522889 - DNA, 25 bp, Homo sapien
tccttctatatgttcagcacactca

SEQ ID NO: 4522890 - DNA, 25 bp, Homo sapien
cagtgcctggtcctgtagggactgc

SEQ ID NO: 4522891 - DNA, 25 bp, Homo sapien
ttctctgtggcgatgacagcagaca

SEQ ID NO: 4522892 - DNA, 25 bp, Homo sapien
tctgtggcgatgacagcagacagag

SEQ ID NO: 4522893 - DNA, 25 bp, Homo sapien
agttgagatggggcccaaaggactc

SEQ ID NO: 4522894 - DNA, 25 bp, Homo sapien
atgagagagttgagatggggcccaa

SEQ ID NO: 4522895 - DNA, 25 bp, Homo sapien
gagagagttgagatggggcccaaag

SEQ ID NO: 4522896 - DNA, 25 bp, Homo sapien
tgagatggggcccaaaggactcccc

SEQ ID NO: 4522897 - DNA, 25 bp, Homo sapien
ttcctctttctgtatgatcaatgtc

SEQ ID NO: 4522898 - DNA, 25 bp, Homo sapien
tagttcctctttctgtatgatcaat

SEQ ID NO: 4522899 - DNA, 25 bp, Homo sapien
gtatttagttcctctttctgtatga

SEQ ID NO: 4522900 - DNA, 25 bp, Homo sapien
cctctttctgtatgatcaatgtctg

SEQ ID NO: 4522901 - DNA, 25 bp, Homo sapien
tctagcaccctttcggctttctgtc

SEQ ID NO: 4522902 - DNA, 25 bp, Homo sapien
cggctttctgtctctcgttgtttgc

SEQ ID NO: 4522903 - DNA, 25 bp, Homo sapien
tcggctttctgtctctcgttgtttg

SEQ ID NO: 4522904 - DNA, 25 bp, Homo sapien
accctttcggctttctgtctctcgt

SEQ ID NO: 4522905 - DNA, 25 bp, Homo sapien
agaatgccaccaatgccccaggaca

SEQ ID NO: 4522906 - DNA, 25 bp, Homo sapien
cagaatgccaccaatgccccaggac

SEQ ID NO: 4522907 - DNA, 25 bp, Homo sapien
aatgccaccaatgccccaggacagg

SEQ ID NO: 4522908 - DNA, 25 bp, Homo sapien
gaatgccaccaatgccccaggacag

SEQ ID NO: 4522909 - DNA, 25 bp, Homo sapien
ttcttccagctgatgttccacttgt

SEQ ID NO: 4522910 - DNA, 25 bp, Homo sapien
ttccagctgatgttccacttgtttc

SEQ ID NO: 4522911 - DNA, 25 bp, Homo sapien
cttccagctgatgttccacttgttt

SEQ ID NO: 4522912 - DNA, 25 bp, Homo sapien
tcttccagctgatgttccacttgtt

SEQ ID NO: 4522913 - DNA, 25 bp, Homo sapien
cagtcgactgatttttacggacgtt

SEQ ID NO: 4522914 - DNA, 25 bp, Homo sapien
gtcgactgatttttacggacgttga

SEQ ID NO: 4522915 - DNA, 25 bp, Homo sapien
ttcagtcgactgatttttacggacg

SEQ ID NO: 4522916 - DNA, 25 bp, Homo sapien
cgactgatttttacggacgttgaat

SEQ ID NO: 4522917 - DNA, 25 bp, Homo sapien
aggtagagagaacgatcgttagggc

SEQ ID NO: 4522918 - DNA, 25 bp, Homo sapien
agaggtagagagaacgatcgttagg

SEQ ID NO: 4522919 - DNA, 25 bp, Homo sapien
agagagaacgatcgttagggctggg

SEQ ID NO: 4522920 - DNA, 25 bp, Homo sapien
agagaggtagagagaacgatcgtta

SEQ ID NO: 4522921 - DNA, 25 bp, Homo sapien
ggccttccctgtggaaacctgttgc

SEQ ID NO: 4522922 - DNA, 25 bp, Homo sapien
gatgtagggccttccctgtggaaac

SEQ ID NO: 4522923 - DNA, 25 bp, Homo sapien
atgatgtagggccttccctgtggaa

SEQ ID NO: 4522924 - DNA, 25 bp, Homo sapien
agatgatgtagggccttccctgtgg

SEQ ID NO: 4522925 - DNA, 25 bp, Homo sapien
cagcagtccatccacaatcttaaga

SEQ ID NO: 4522926 - DNA, 25 bp, Homo sapien
agaagcctggtcagccaagactcac

SEQ ID NO: 4522927 - DNA, 25 bp, Homo sapien
cacccggctaaagccagaattctta

SEQ ID NO: 4522928 - DNA, 25 bp, Homo sapien
ttcttaaccagtacccagcagtcca

SEQ ID NO: 4522929 - DNA, 25 bp, Homo sapien
caggtggctggcaaccaccggaagt

SEQ ID NO: 4522930 - DNA, 25 bp, Homo sapien
cactcctgctggaactctaggtctg

SEQ ID NO: 4522931 - DNA, 25 bp, Homo sapien
ggaactctaggtctgtttttctgcc

SEQ ID NO: 4522932 - DNA, 25 bp, Homo sapien
gttttcctgttcctgttcactcctg

SEQ ID NO: 4522933 - DNA, 25 bp, Homo sapien
ccaacaactgtacaaggtgttgtca

SEQ ID NO: 4522934 - DNA, 25 bp, Homo sapien
acacaccatctgatttaatgacacc

SEQ ID NO: 4522935 - DNA, 25 bp, Homo sapien
atgacaccaacaactgtacaaggtg

SEQ ID NO: 4522936 - DNA, 25 bp, Homo sapien
aaccgtcagcccctacagccacaac

SEQ ID NO: 4522937 - DNA, 25 bp, Homo sapien
gcccagtaatggagcgggaagcccc

SEQ ID NO: 4522938 - DNA, 25 bp, Homo sapien
gcccaaagagcccacggagatcaag

SEQ ID NO: 4522939 - DNA, 25 bp, Homo sapien
agagcccacggagatcaagcttggg

SEQ ID NO: 4522940 - DNA, 25 bp, Homo sapien
tcacccaaggatgactggcgagggt

SEQ ID NO: 4522941 - DNA, 25 bp, Homo sapien
tgcagccaatttgttgtgttgagtt

SEQ ID NO: 4522942 - DNA, 25 bp, Homo sapien
gcagccaatttgttgtgttgagttt

SEQ ID NO: 4522943 - DNA, 25 bp, Homo sapien
gaatggagtagtcatccagccatca

SEQ ID NO: 4522944 - DNA, 25 bp, Homo sapien
gaatcagcatacattccccttaaag

SEQ ID NO: 4522945 - DNA, 25 bp, Homo sapien
gattgcaacaggagataagatagag

SEQ ID NO: 4522946 - DNA, 25 bp, Homo sapien
gctatcagttgacaagtcttggcca

SEQ ID NO: 4522947 - DNA, 25 bp, Homo sapien
aaacggcatttgagtattcttcaca

SEQ ID NO: 4522948 - DNA, 25 bp, Homo sapien
gagaacatgcaagcgtgaacatact

SEQ ID NO: 4522949 - DNA, 25 bp, Homo sapien
aacatacttgttagggatataggac

SEQ ID NO: 4522950 - DNA, 25 bp, Homo sapien
gtttttcctctgacgacggcactga

SEQ ID NO: 4522951 - DNA, 25 bp, Homo sapien
tacatttgtgcaaccacataatgcc

SEQ ID NO: 4522952 - DNA, 25 bp, Homo sapien
gtggttgactttactactgtactaa

SEQ ID NO: 4522953 - DNA, 25 bp, Homo sapien
tcaaaacgaagtacatttgtgcaac

SEQ ID NO: 4522954 - DNA, 25 bp, Homo sapien
tctaaacacaagacagaagtagttc

SEQ ID NO: 4522955 - DNA, 25 bp, Homo sapien
cacgagatttgtgttttatcggtat

SEQ ID NO: 4522956 - DNA, 25 bp, Homo sapien
cacttaatcgttgactacaaagacc

SEQ ID NO: 4522957 - DNA, 25 bp, Homo sapien
aacaaagaaatagggtcatagctag

SEQ ID NO: 4522958 - DNA, 25 bp, Homo sapien
tctttacgctgactaaaatcacgag

SEQ ID NO: 4522959 - DNA, 25 bp, Homo sapien
ctgtagcggttttactgagccctgc

SEQ ID NO: 4522960 - DNA, 25 bp, Homo sapien
gagatttcctgtagcggttttactg

SEQ ID NO: 4522961 - DNA, 25 bp, Homo sapien
tttcctgtagcggttttactgagcc

SEQ ID NO: 4522962 - DNA, 25 bp, Homo sapien
acttgagatttcctgtagcggtttt

SEQ ID NO: 4522963 - DNA, 25 bp, Homo sapien
tcttattgggctccgtgtgcttgat

SEQ ID NO: 4522964 - DNA, 25 bp, Homo sapien
tgcttgatgcttaaagtgacatgga

SEQ ID NO: 4522965 - DNA, 25 bp, Homo sapien
taaagtgacatggagacatgccact

SEQ ID NO: 4522966 - DNA, 25 bp, Homo sapien
ccttgtaaccttgtaggcagacact

SEQ ID NO: 4522967 - DNA, 25 bp, Homo sapien
tttcctggcatcgatgaaggcagag

SEQ ID NO: 4522968 - DNA, 25 bp, Homo sapien
tgctttcctggcatcgatgaaggca

SEQ ID NO: 4522969 - DNA, 25 bp, Homo sapien
gctttcctggcatcgatgaaggcag

SEQ ID NO: 4522970 - DNA, 25 bp, Homo sapien
ctttcctggcatcgatgaaggcaga

SEQ ID NO: 4522971 - DNA, 25 bp, Homo sapien
catctacaggttctaggagttccag

SEQ ID NO: 4522972 - DNA, 25 bp, Homo sapien
ccaggatttaatgcccacggagaca

SEQ ID NO: 4522973 - DNA, 25 bp, Homo sapien
tgatcccagtactgtggacggccga

SEQ ID NO: 4522974 - DNA, 25 bp, Homo sapien
cgagcgcggcgatcgattgagccta

SEQ ID NO: 4522975 - DNA, 25 bp, Homo sapien
gcttcaccccggcttctaggtggca

SEQ ID NO: 4522976 - DNA, 25 bp, Homo sapien
ctgcgcccgacggaaacccagaacg

SEQ ID NO: 4522977 - DNA, 25 bp, Homo sapien
aggctggtctccgacctcgggtgat

SEQ ID NO: 4522978 - DNA, 25 bp, Homo sapien
ccgggtgtggtgggccgcgcaggta

SEQ ID NO: 4522979 - DNA, 25 bp, Homo sapien
ggcagaacggattgcagatttgcat

SEQ ID NO: 4522980 - DNA, 25 bp, Homo sapien
ctggcagaacggattgcagatttgc

SEQ ID NO: 4522981 - DNA, 25 bp, Homo sapien
tggcagaacggattgcagatttgca

SEQ ID NO: 4522982 - DNA, 25 bp, Homo sapien
tcttcactagccgatgcatctgtgc

SEQ ID NO: 4522983 - DNA, 25 bp, Homo sapien
cttcactagccgatgcatctgtgcc

SEQ ID NO: 4522984 - DNA, 25 bp, Homo sapien
ctggagtgcagtggcacaatctcag

SEQ ID NO: 4522985 - DNA, 25 bp, Homo sapien
gagacggagtcccgctctgttcccc

SEQ ID NO: 4522986 - DNA, 25 bp, Homo sapien
ctggagtgcagcggggctatctcag

SEQ ID NO: 4522987 - DNA, 25 bp, Homo sapien
ctcactgcaatctctgcctcctggg

SEQ ID NO: 4522988 - DNA, 25 bp, Homo sapien
tgcgttcccaccagcgatttatgtg

SEQ ID NO: 4522989 - DNA, 25 bp, Homo sapien
catggctgcatcgttttgcgttccc

SEQ ID NO: 4522990 - DNA, 25 bp, Homo sapien
tcccaaagtgcaactgcaaaattgt

SEQ ID NO: 4522991 - DNA, 25 bp, Homo sapien
caaaattgttcctaccatggctgca

SEQ ID NO: 4522992 - DNA, 25 bp, Homo sapien
ggtgaatgctaaccctctcatatgt

SEQ ID NO: 4522993 - DNA, 25 bp, Homo sapien
gcccttaaaagctgagaccatgtgt

SEQ ID NO: 4522994 - DNA, 25 bp, Homo sapien
aaggtggtgctactattgaacatgc

SEQ ID NO: 4522995 - DNA, 25 bp, Homo sapien
aattcccatttaggattgccacagg

SEQ ID NO: 4522996 - DNA, 25 bp, Homo sapien
tgaactggagattggtcctgcttca

SEQ ID NO: 4522997 - DNA, 25 bp, Homo sapien
gaactggagattggtcctgcttcat

SEQ ID NO: 4522998 - DNA, 25 bp, Homo sapien
ttgaactggagattggtcctgcttc

SEQ ID NO: 4522999 - DNA, 25 bp, Homo sapien
cttgaactggagattggtcctgctt

SEQ ID NO: 4523000 - DNA, 25 bp, Homo sapien
catgccattatctggcctccaaaag

SEQ ID NO: 4523001 - DNA, 25 bp, Homo sapien
taggaatgtctgaaatactgccacc

SEQ ID NO: 4523002 - DNA, 25 bp, Homo sapien
gattctgcaatgtgatgtattcttt

SEQ ID NO: 4523003 - DNA, 25 bp, Homo sapien
tcatttctgagcagtagaatttgag

SEQ ID NO: 4523004 - DNA, 25 bp, Homo sapien
ccaatatctatagggtgacagtcaa

SEQ ID NO: 4523005 - DNA, 25 bp, Homo sapien
taatggttctcatacaaatgtaaaa

SEQ ID NO: 4523006 - DNA, 25 bp, Homo sapien
taagagtaccacaggatgttctgac

SEQ ID NO: 4523007 - DNA, 25 bp, Homo sapien
cagagcataaaagcagtcgccaagt

SEQ ID NO: 4523008 - DNA, 25 bp, Homo sapien
gccaaaatgttcattagatactgtt

SEQ ID NO: 4523009 - DNA, 25 bp, Homo sapien
tcagttttaattaatattggggcca

SEQ ID NO: 4523010 - DNA, 25 bp, Homo sapien
tttaatgatcagtttttatgcaaat

SEQ ID NO: 4523011 - DNA, 25 bp, Homo sapien
tatgcaaatgatttatataagtcag

SEQ ID NO: 4523012 - DNA, 25 bp, Homo sapien
gctgggcgccggtccggcaaggcct

SEQ ID NO: 4523013 - DNA, 25 bp, Homo sapien
gcaaggcctcttcgccgatgccgag

SEQ ID NO: 4523014 - DNA, 25 bp, Homo sapien
ccgccgagtcctagggccgctgccg

SEQ ID NO: 4523015 - DNA, 25 bp, Homo sapien
gcgcccgccgagtcctagggccgct

SEQ ID NO: 4523016 - DNA, 25 bp, Homo sapien
gttagcacatagcaaaacaaagaaa

SEQ ID NO: 4523017 - DNA, 25 bp, Homo sapien
taaggaaatacagaccatattatca

SEQ ID NO: 4523018 - DNA, 25 bp, Homo sapien
catctagagatgcttagtgtttggc

SEQ ID NO: 4523019 - DNA, 25 bp, Homo sapien
aaaatgattattactccaatcccat

SEQ ID NO: 4523020 - DNA, 25 bp, Homo sapien
tgttaaacggagcagtctgtgtcaa

SEQ ID NO: 4523021 - DNA, 25 bp, Homo sapien
ctgttaaacggagcagtctgtgtca

SEQ ID NO: 4523022 - DNA, 25 bp, Homo sapien
gttaaacggagcagtctgtgtcaaa

SEQ ID NO: 4523023 - DNA, 25 bp, Homo sapien
tctgttaaacggagcagtctgtgtc

SEQ ID NO: 4523024 - DNA, 25 bp, Homo sapien
caacttaatgcaaacatcgacaaga

SEQ ID NO: 4523025 - DNA, 25 bp, Homo sapien
gagatcagaaagctccaacttaatg

SEQ ID NO: 4523026 - DNA, 25 bp, Homo sapien
gactgcattgcataaaccaaaggcc

SEQ ID NO: 4523027 - DNA, 25 bp, Homo sapien
gacaagaaatccgacagaaatgact

SEQ ID NO: 4523028 - DNA, 25 bp, Homo sapien
gagctgcttccagaggagaggttct

SEQ ID NO: 4523029 - DNA, 25 bp, Homo sapien
tgcttccagaggagaggttctaacc

SEQ ID NO: 4523030 - DNA, 25 bp, Homo sapien
agagctgcttccagaggagaggttc

SEQ ID NO: 4523031 - DNA, 25 bp, Homo sapien
gctgcttccagaggagaggttctaa

SEQ ID NO: 4523032 - DNA, 25 bp, Homo sapien
tcggttctcgcagtctggttcttat

SEQ ID NO: 4523033 - DNA, 25 bp, Homo sapien
tacccatcggttctcgcagtctggt

SEQ ID NO: 4523034 - DNA, 25 bp, Homo sapien
tgggcctctgtacccatcggttctc

SEQ ID NO: 4523035 - DNA, 25 bp, Homo sapien
ctctgtacccatcggttctcgcagt

SEQ ID NO: 4523036 - DNA, 25 bp, Homo sapien
gggccagggagagctccatctcgat

SEQ ID NO: 4523037 - DNA, 25 bp, Homo sapien
cagggagagctccatctcgatggag

SEQ ID NO: 4523038 - DNA, 25 bp, Homo sapien
gagagctccatctcgatggagatga

SEQ ID NO: 4523039 - DNA, 25 bp, Homo sapien
gccagggagagctccatctcgatgg

SEQ ID NO: 4523040 - DNA, 25 bp, Homo sapien
ctcggcagggccatgcggcagaacc

SEQ ID NO: 4523041 - DNA, 25 bp, Homo sapien
acagacctgcttggtccttgtgcag

SEQ ID NO: 4523042 - DNA, 25 bp, Homo sapien
cattcaatagccagcttacatgcgg

SEQ ID NO: 4523043 - DNA, 25 bp, Homo sapien
tagccagcttacatgcggcctcctg

SEQ ID NO: 4523044 - DNA, 25 bp, Homo sapien
ggcaccaaatggaggggtccagcta

SEQ ID NO: 4523045 - DNA, 25 bp, Homo sapien
ttcaatagccagcttacatgcggcc

SEQ ID NO: 4523046 - DNA, 25 bp, Homo sapien
agggcccagagcacggatgacccag

SEQ ID NO: 4523047 - DNA, 25 bp, Homo sapien
cagagcacggatgacccagttgagc

SEQ ID NO: 4523048 - DNA, 25 bp, Homo sapien
ccagagcacggatgacccagttgag

SEQ ID NO: 4523049 - DNA, 25 bp, Homo sapien
gcccagagcacggatgacccagttg

SEQ ID NO: 4523050 - DNA, 25 bp, Homo sapien
catgagggccccaacagcaaatctg

SEQ ID NO: 4523051 - DNA, 25 bp, Homo sapien
tgagggccccaacagcaaatctgac

SEQ ID NO: 4523052 - DNA, 25 bp, Homo sapien
atgagggccccaacagcaaatctga

SEQ ID NO: 4523053 - DNA, 25 bp, Homo sapien
ggcaggaagggcagaatctgaggga

SEQ ID NO: 4523054 - DNA, 25 bp, Homo sapien
attgcttcctcgacatccttttgct

SEQ ID NO: 4523055 - DNA, 25 bp, Homo sapien
tctgaggcttgctttcatattgctt

SEQ ID NO: 4523056 - DNA, 25 bp, Homo sapien
gaggcttgctttcatattgcttcct

SEQ ID NO: 4523057 - DNA, 25 bp, Homo sapien
tgcttcctcgacatccttttgctat

SEQ ID NO: 4523058 - DNA, 25 bp, Homo sapien
tattactttgcgagccttcttcctg

SEQ ID NO: 4523059 - DNA, 25 bp, Homo sapien
tactttgcgagccttcttcctgtct

SEQ ID NO: 4523060 - DNA, 25 bp, Homo sapien
ttatattactttgcgagccttcttc

SEQ ID NO: 4523061 - DNA, 25 bp, Homo sapien
atattttatattactttgcgagcct

SEQ ID NO: 4523062 - DNA, 25 bp, Homo sapien
gtgctgttgtcttctaaccagtcgt

SEQ ID NO: 4523063 - DNA, 25 bp, Homo sapien
gtttcacttgtttatgcatgacttt

SEQ ID NO: 4523064 - DNA, 25 bp, Homo sapien
ctaaccagtcgtggtggcgaagcct

SEQ ID NO: 4523065 - DNA, 25 bp, Homo sapien
atgccatcctgagtttcacttgttt

SEQ ID NO: 4523066 - DNA, 25 bp, Homo sapien
tgagacggcttctttacccacaggt

SEQ ID NO: 4523067 - DNA, 25 bp, Homo sapien
gccaggagttcttaaggcttagacc

SEQ ID NO: 4523068 - DNA, 25 bp, Homo sapien
ccagattgactatgggatgggcctg

SEQ ID NO: 4523069 - DNA, 25 bp, Homo sapien
ctgcagtggaatgtctgagacggct

SEQ ID NO: 4523070 - DNA, 25 bp, Homo sapien
tttcagtatcaagggtatgcagggc

SEQ ID NO: 4523071 - DNA, 25 bp, Homo sapien
cacaactggtcatggtcgggaggtc

SEQ ID NO: 4523072 - DNA, 25 bp, Homo sapien
tctcattggcattctgtgggtagag

SEQ ID NO: 4523073 - DNA, 25 bp, Homo sapien
gcctcctatgggacgtttggaaata

SEQ ID NO: 4523074 - DNA, 25 bp, Homo sapien
gagttccactgaatacattttgatt

SEQ ID NO: 4523075 - DNA, 25 bp, Homo sapien
gtgagttccactgaatacattttga

SEQ ID NO: 4523076 - DNA, 25 bp, Homo sapien
actgtgagttccactgaatacattt

SEQ ID NO: 4523077 - DNA, 25 bp, Homo sapien
aaactgtgagttccactgaatacat

SEQ ID NO: 4523078 - DNA, 25 bp, Homo sapien
gactgatgctcagcccctttgggct

SEQ ID NO: 4523079 - DNA, 25 bp, Homo sapien
ttaagactgatgctcagcccctttg

SEQ ID NO: 4523080 - DNA, 25 bp, Homo sapien
tccaacccacttgtccagggccgcc

SEQ ID NO: 4523081 - DNA, 25 bp, Homo sapien
aacccacttgtccagggccgcctct

SEQ ID NO: 4523082 - DNA, 25 bp, Homo sapien
cacacgctagcagctatgatggtac

SEQ ID NO: 4523083 - DNA, 25 bp, Homo sapien
tcacacgctagcagctatgatggta

SEQ ID NO: 4523084 - DNA, 25 bp, Homo sapien
gggccgtgggagccagccttggtac

SEQ ID NO: 4523085 - DNA, 25 bp, Homo sapien
tggggccgtgggagccagccttggt

SEQ ID NO: 4523086 - DNA, 25 bp, Homo sapien
gggctttggggccgtgggagccagc

SEQ ID NO: 4523087 - DNA, 25 bp, Homo sapien
ctttggggccgtgggagccagcctt

SEQ ID NO: 4523088 - DNA, 25 bp, Homo sapien
ctgcatccggcaaggacgctctgca

SEQ ID NO: 4523089 - DNA, 25 bp, Homo sapien
tgcatccggcaaggacgctctgcac

SEQ ID NO: 4523090 - DNA, 25 bp, Homo sapien
gcccccatgtgcgtgctgatggtgg

SEQ ID NO: 4523091 - DNA, 25 bp, Homo sapien
cccccatgtgcgtgctgatggtggt

SEQ ID NO: 4523092 - DNA, 25 bp, Homo sapien
cgactcttccatcagcgttttctgg

SEQ ID NO: 4523093 - DNA, 25 bp, Homo sapien
tcagcgttttctggtccccacgtga

SEQ ID NO: 4523094 - DNA, 25 bp, Homo sapien
gcgttttctggtccccacgtgagta

SEQ ID NO: 4523095 - DNA, 25 bp, Homo sapien
tctgccgactcttccatcagcgttt

SEQ ID NO: 4523096 - DNA, 25 bp, Homo sapien
tggtcttgggcatgacaccaaccat

SEQ ID NO: 4523097 - DNA, 25 bp, Homo sapien
atgatggtcttgggcatgacaccaa

SEQ ID NO: 4523098 - DNA, 25 bp, Homo sapien
tccacaaggttctgggtggtttcca

SEQ ID NO: 4523099 - DNA, 25 bp, Homo sapien
gccatgtaggagtccacaaggttct

SEQ ID NO: 4523100 - DNA, 25 bp, Homo sapien
cggctcgggacaggctccttttccg

SEQ ID NO: 4523101 - DNA, 25 bp, Homo sapien
tttaaactgcggcttgacgggagcc

SEQ ID NO: 4523102 - DNA, 25 bp, Homo sapien
atagctcccgccaagtcctcggtgc

SEQ ID NO: 4523103 - DNA, 25 bp, Homo sapien
ctcccacgagggtcacggcggcggg

SEQ ID NO: 4523104 - DNA, 25 bp, Homo sapien
catatgtctggcagtgtaactttat

SEQ ID NO: 4523105 - DNA, 25 bp, Homo sapien
tcttgtctcattgggaacattagtg

SEQ ID NO: 4523106 - DNA, 25 bp, Homo sapien
tagaacaatttgtgatatctttccc

SEQ ID NO: 4523107 - DNA, 25 bp, Homo sapien
gctaagtttgatgtgcattggcgca

SEQ ID NO: 4523108 - DNA, 25 bp, Homo sapien
gatagtttatgggaagccttcatca

SEQ ID NO: 4523109 - DNA, 25 bp, Homo sapien
caagcttgctttacacaatattctg

SEQ ID NO: 4523110 - DNA, 25 bp, Homo sapien
ttcaaagccgtcttgggccgcatcc

SEQ ID NO: 4523111 - DNA, 25 bp, Homo sapien
agaactcctgtatagcttttgccca

SEQ ID NO: 4523112 - DNA, 25 bp, Homo sapien
ttcctagctgcctatatttggtgta

SEQ ID NO: 4523113 - DNA, 25 bp, Homo sapien
tgactttatctttgagctctcaaac

SEQ ID NO: 4523114 - DNA, 25 bp, Homo sapien
ccgtgtcgattgttccctctttgtg

SEQ ID NO: 4523115 - DNA, 25 bp, Homo sapien
tctgattggtcctttttcctagctg

SEQ ID NO: 4523116 - DNA, 25 bp, Homo sapien
gcccttgttctactggtacttgctg

SEQ ID NO: 4523117 - DNA, 25 bp, Homo sapien
tgcccttgttctactggtacttgct

SEQ ID NO: 4523118 - DNA, 25 bp, Homo sapien
ttctcagtcactaaatgagtgtgac

SEQ ID NO: 4523119 - DNA, 25 bp, Homo sapien
gggctgacggttctcatgagtatta

SEQ ID NO: 4523120 - DNA, 25 bp, Homo sapien
tggtgtcattaaatcagatggtgtg

SEQ ID NO: 4523121 - DNA, 25 bp, Homo sapien
agagttccagcaggagcgaacagga

SEQ ID NO: 4523122 - DNA, 25 bp, Homo sapien
gtttccacagggaaggccctacatc

SEQ ID NO: 4523123 - DNA, 25 bp, Homo sapien
ggacacccaggatatggtttgattt

SEQ ID NO: 4523124 - DNA, 25 bp, Homo sapien
tacatcatctgctaccctgaaagat

SEQ ID NO: 4523125 - DNA, 25 bp, Homo sapien
tgcagtgacccttcgggtcaaccct

SEQ ID NO: 4523126 - DNA, 25 bp, Homo sapien
taccggttcgtgttcccattatgtc

SEQ ID NO: 4523127 - DNA, 25 bp, Homo sapien
gatttcgtttcctcgcaacatgact

SEQ ID NO: 4523128 - DNA, 25 bp, Homo sapien
ctaaatcacaagttgccagaaggag

SEQ ID NO: 4523129 - DNA, 25 bp, Homo sapien
ttatattgctgtcctctcaagagat

SEQ ID NO: 4523130 - DNA, 25 bp, Homo sapien
tctgggggcatgtctcttgctgtgc

SEQ ID NO: 4523131 - DNA, 25 bp, Homo sapien
ctggtaagagctctgtcttcttctt

SEQ ID NO: 4523132 - DNA, 25 bp, Homo sapien
tgcctccccctggtaagagctctgt

SEQ ID NO: 4523133 - DNA, 25 bp, Homo sapien
cctgtcctggggcattggtggcatt

SEQ ID NO: 4523134 - DNA, 25 bp, Homo sapien
catctgggtgcgaggaatcattagc

SEQ ID NO: 4523135 - DNA, 25 bp, Homo sapien
taaatgggattgttagcacggtacc

SEQ ID NO: 4523136 - DNA, 25 bp, Homo sapien
caggcccaggtcaaaaagaatcagc

SEQ ID NO: 4523137 - DNA, 25 bp, Homo sapien
ctgagttgtatattgggcctagccc

SEQ ID NO: 4523138 - DNA, 25 bp, Homo sapien
tgtgtgccattgttgtgctgggctt

SEQ ID NO: 4523139 - DNA, 25 bp, Homo sapien
ctgtgtgccattgttgtgctgggct

SEQ ID NO: 4523140 - DNA, 25 bp, Homo sapien
gcaacattggaatgttagagttcat

SEQ ID NO: 4523141 - DNA, 25 bp, Homo sapien
ccctagagtggccttattgactgct

SEQ ID NO: 4523142 - DNA, 25 bp, Homo sapien
taaatcagccctatccataatatag

SEQ ID NO: 4523143 - DNA, 25 bp, Homo sapien
ttttccctagagtggccttattgac

SEQ ID NO: 4523144 - DNA, 25 bp, Homo sapien
atccataatatagtttctctaaaac

SEQ ID NO: 4523145 - DNA, 25 bp, Homo sapien
attattattttgtttagatggagtc

SEQ ID NO: 4523146 - DNA, 25 bp, Homo sapien
cactgtgtcacccaggctgaagtgc

SEQ ID NO: 4523147 - DNA, 25 bp, Homo sapien
ttattattttgtttagatggagtct

SEQ ID NO: 4523148 - DNA, 25 bp, Homo sapien
gcagaagttgcagtgagccaagata

SEQ ID NO: 4523149 - DNA, 25 bp, Homo sapien
caggagaatcacttgaacctgggag

SEQ ID NO: 4523150 - DNA, 25 bp, Homo sapien
ccaggcgtggtggtgattgcctgtg

SEQ ID NO: 4523151 - DNA, 25 bp, Homo sapien
gtcccagctactcaggaggttgagg

SEQ ID NO: 4523152 - DNA, 25 bp, Homo sapien
acatttcccacatatcgatttagca

SEQ ID NO: 4523153 - DNA, 25 bp, Homo sapien
gaaatctatgctaaagacccactgg

SEQ ID NO: 4523154 - DNA, 25 bp, Homo sapien
catctaggagtttgacaattcattc

SEQ ID NO: 4523155 - DNA, 25 bp, Homo sapien
tatcgatttagcaaacatctaggag

SEQ ID NO: 4523156 - DNA, 25 bp, Homo sapien
agacgaaaaacaaaaagagctcagc

SEQ ID NO: 4523157 - DNA, 25 bp, Homo sapien
gacgaaaaacaaaaagagctcagct

SEQ ID NO: 4523158 - DNA, 25 bp, Homo sapien
ggagacgaaaaacaaaaagagctca

SEQ ID NO: 4523159 - DNA, 25 bp, Homo sapien
cgaaaaacaaaaagagctcagcttt

SEQ ID NO: 4523160 - DNA, 25 bp, Homo sapien
gagtgcatatggcagataaagttct

SEQ ID NO: 4523161 - DNA, 25 bp, Homo sapien
caaaatgattctatgcaaacgtttc

SEQ ID NO: 4523162 - DNA, 25 bp, Homo sapien
taaaatatccgaagatttgaactcc

SEQ ID NO: 4523163 - DNA, 25 bp, Homo sapien
gaagatttgaactccaaaagaaaca

SEQ ID NO: 4523164 - DNA, 25 bp, Homo sapien
aagttgtctcaactgggcttccgta

SEQ ID NO: 4523165 - DNA, 25 bp, Homo sapien
gttgtctcaactgggcttccgtaga

SEQ ID NO: 4523166 - DNA, 25 bp, Homo sapien
tgtctcaactgggcttccgtagaac

SEQ ID NO: 4523167 - DNA, 25 bp, Homo sapien
gtctcaactgggcttccgtagaacg

SEQ ID NO: 4523168 - DNA, 25 bp, Homo sapien
cactaagcttggtaaggaccaattg

SEQ ID NO: 4523169 - DNA, 25 bp, Homo sapien
ggcactaagcttggtaaggaccaat

SEQ ID NO: 4523170 - DNA, 25 bp, Homo sapien
ctaagcttggtaaggaccaattgtt

SEQ ID NO: 4523171 - DNA, 25 bp, Homo sapien
agcttggtaaggaccaattgttatt

SEQ ID NO: 4523172 - DNA, 25 bp, Homo sapien
cactgtaggaacgattttccacgtt

SEQ ID NO: 4523173 - DNA, 25 bp, Homo sapien
tcactgtaggaacgattttccacgt

SEQ ID NO: 4523174 - DNA, 25 bp, Homo sapien
cttttcccggtagtacttctctgag

SEQ ID NO: 4523175 - DNA, 25 bp, Homo sapien
tctctgagtctgatttgttttcccc

SEQ ID NO: 4523176 - DNA, 25 bp, Homo sapien
ctgagtctgatttgttttcccccat

SEQ ID NO: 4523177 - DNA, 25 bp, Homo sapien
cttctctgagtctgatttgttttcc

SEQ ID NO: 4523178 - DNA, 25 bp, Homo sapien
gaaaacttggctaatcatagtgcgg

SEQ ID NO: 4523179 - DNA, 25 bp, Homo sapien
tacacctgattgcaactagttacag

SEQ ID NO: 4523180 - DNA, 25 bp, Homo sapien
catagtgcggtggtgtttacacctg

SEQ ID NO: 4523181 - DNA, 25 bp, Homo sapien
tattataattggaagactatccaga

SEQ ID NO: 4523182 - DNA, 25 bp, Homo sapien
tggatggtcctttcacattggtttc

SEQ ID NO: 4523183 - DNA, 25 bp, Homo sapien
ccagagccgtgccatcagctgaata

SEQ ID NO: 4523184 - DNA, 25 bp, Homo sapien
gcctccgagatgaagtggccaaatt

SEQ ID NO: 4523185 - DNA, 25 bp, Homo sapien
atgtagcactggcaccacaagcaag

SEQ ID NO: 4523186 - DNA, 25 bp, Homo sapien
gtttccttctctcggcaaggctggc

SEQ ID NO: 4523187 - DNA, 25 bp, Homo sapien
ttggttttctctagatgggagctgt

SEQ ID NO: 4523188 - DNA, 25 bp, Homo sapien
ttttctctagatgggagctgtggca

SEQ ID NO: 4523189 - DNA, 25 bp, Homo sapien
gttttctctagatgggagctgtggc

SEQ ID NO: 4523190 - DNA, 25 bp, Homo sapien
tggttttctctagatgggagctgtg

SEQ ID NO: 4523191 - DNA, 25 bp, Homo sapien
gcggctgtaaatcctctttggtgaa

SEQ ID NO: 4523192 - DNA, 25 bp, Homo sapien
cactggagccacaagtgtatccggg

SEQ ID NO: 4523193 - DNA, 25 bp, Homo sapien
tagctgtccctatgcaggttcccag

SEQ ID NO: 4523194 - DNA, 25 bp, Homo sapien
cccacgtgtgtgcaggctggtgtcc

SEQ ID NO: 4523195 - DNA, 25 bp, Homo sapien
cctgggtccctcagctctctgcttc

SEQ ID NO: 4523196 - DNA, 25 bp, Homo sapien
tgcttctgagtctgccagtcctgct

SEQ ID NO: 4523197 - DNA, 25 bp, Homo sapien
gagtctgccagtcctgcttttccag

SEQ ID NO: 4523198 - DNA, 25 bp, Homo sapien
tgcttttccagccctgagtcttggg

SEQ ID NO: 4523199 - DNA, 25 bp, Homo sapien
tcccctggcacatcagcttctaggg

SEQ ID NO: 4523200 - DNA, 25 bp, Homo sapien
gagctcaccgccacgtctgttaagt

SEQ ID NO: 4523201 - DNA, 25 bp, Homo sapien
agagttcagtgttcgagccccgctg

SEQ ID NO: 4523202 - DNA, 25 bp, Homo sapien
agtccaccagatgagacttttccca

SEQ ID NO: 4523203 - DNA, 25 bp, Homo sapien
tgtccacttggaaacctgagctctc

SEQ ID NO: 4523204 - DNA, 25 bp, Homo sapien
cagcagcccggaagtatgtgttccc

SEQ ID NO: 4523205 - DNA, 25 bp, Homo sapien
cagtgtgggttcaacagcatcacca

SEQ ID NO: 4523206 - DNA, 25 bp, Homo sapien
ggcttgcgatccacacagagattgt

SEQ ID NO: 4523207 - DNA, 25 bp, Homo sapien
gaaagacacttcctctccggaaagc

SEQ ID NO: 4523208 - DNA, 25 bp, Homo sapien
aagacacttcctctccggaaagcca

SEQ ID NO: 4523209 - DNA, 25 bp, Homo sapien
agaaagacacttcctctccggaaag

SEQ ID NO: 4523210 - DNA, 25 bp, Homo sapien
gcttccttatctgtttgcagccggg

SEQ ID NO: 4523211 - DNA, 25 bp, Homo sapien
aggtggagcctccatggtggacaca

SEQ ID NO: 4523212 - DNA, 25 bp, Homo sapien
gattaaaagcgttgccattcagcag

SEQ ID NO: 4523213 - DNA, 25 bp, Homo sapien
ggtcttttgcctgagctactccacg

SEQ ID NO: 4523214 - DNA, 25 bp, Homo sapien
gaataggactccatcgctgtcatcg

SEQ ID NO: 4523215 - DNA, 25 bp, Homo sapien
acaggggaataggactccatcgctg

SEQ ID NO: 4523216 - DNA, 25 bp, Homo sapien
gccccaaaccgaggcgaggacactg

SEQ ID NO: 4523217 - DNA, 25 bp, Homo sapien
gaagccttgggtggtttctgtgtgg

SEQ ID NO: 4523218 - DNA, 25 bp, Homo sapien
catgagcatgcacggagctccgtga

SEQ ID NO: 4523219 - DNA, 25 bp, Homo sapien
gaactccgaccatgagcatgcacgg

SEQ ID NO: 4523220 - DNA, 25 bp, Homo sapien
tggagggatgaggagggaactccga

SEQ ID NO: 4523221 - DNA, 25 bp, Homo sapien
agctccgtgaaggagggccttgaca

SEQ ID NO: 4523222 - DNA, 25 bp, Homo sapien
gagccatgttggtgaagtgaaggaa

SEQ ID NO: 4523223 - DNA, 25 bp, Homo sapien
tcaattaaagtgatggcctagagat

SEQ ID NO: 4523224 - DNA, 25 bp, Homo sapien
aattaaagtgatggcctagagatca

SEQ ID NO: 4523225 - DNA, 25 bp, Homo sapien
agatcaattaaagtgatggcctaga

SEQ ID NO: 4523226 - DNA, 25 bp, Homo sapien
ctgtttctgtgaggcctgtagtgct

SEQ ID NO: 4523227 - DNA, 25 bp, Homo sapien
gaggcctgtagtgcttagtacatcc

SEQ ID NO: 4523228 - DNA, 25 bp, Homo sapien
gtagtgcttagtacatccttgaatg

SEQ ID NO: 4523229 - DNA, 25 bp, Homo sapien
attggtataagtttaattcctgact

SEQ ID NO: 4523230 - DNA, 25 bp, Homo sapien
tctcctgatgttgagccatcactga

SEQ ID NO: 4523231 - DNA, 25 bp, Homo sapien
aagccctcagcgtgtcccctgacgt

SEQ ID NO: 4523232 - DNA, 25 bp, Homo sapien
tgctctcctgatgttgagccatcac

SEQ ID NO: 4523233 - DNA, 25 bp, Homo sapien
tgtcccctgacgtccctctgagtga

SEQ ID NO: 4523234 - DNA, 25 bp, Homo sapien
tttgtgtaacgtgcgtgatactaaa

SEQ ID NO: 4523235 - DNA, 25 bp, Homo sapien
tctcccttaaatcatccactgaatc

SEQ ID NO: 4523236 - DNA, 25 bp, Homo sapien
cactgaatcacgtttggcattttgt

SEQ ID NO: 4523237 - DNA, 25 bp, Homo sapien
ggcattttgtgtaacgtgcgtgata

SEQ ID NO: 4523238 - DNA, 25 bp, Homo sapien
ccctggtagttcacagagtgcccaa

SEQ ID NO: 4523239 - DNA, 25 bp, Homo sapien
tattccctggcatagaggtaccaca

SEQ ID NO: 4523240 - DNA, 25 bp, Homo sapien
tatctttacgtccatgggtactcag

SEQ ID NO: 4523241 - DNA, 25 bp, Homo sapien
taaacagccttgttagccactgctg

SEQ ID NO: 4523242 - DNA, 25 bp, Homo sapien
ccctagagcaagatcaacaattttc

SEQ ID NO: 4523243 - DNA, 25 bp, Homo sapien
cttgtttggagattcaaagagttta

SEQ ID NO: 4523244 - DNA, 25 bp, Homo sapien
cacagaaaacagggccactcctttt

SEQ ID NO: 4523245 - DNA, 25 bp, Homo sapien
ttttccctagagcaagatcaacaat

SEQ ID NO: 4523246 - DNA, 25 bp, Homo sapien
cacagtttctgaccaccatgaacag

SEQ ID NO: 4523247 - DNA, 25 bp, Homo sapien
cgtgtccgtgctcgcattgacagta

SEQ ID NO: 4523248 - DNA, 25 bp, Homo sapien
tggatgggaagctgcaatcctcctg

SEQ ID NO: 4523249 - DNA, 25 bp, Homo sapien
actgcacagtttctgaccaccatga

SEQ ID NO: 4523250 - DNA, 25 bp, Homo sapien
tctttaatgtgctgggggtgctttc

SEQ ID NO: 4523251 - DNA, 25 bp, Homo sapien
agtaagcatttggaattctttaatg

SEQ ID NO: 4523252 - DNA, 25 bp, Homo sapien
gggtgctttctggaatggctggatt

SEQ ID NO: 4523253 - DNA, 25 bp, Homo sapien
ctgcaccagaaaagtaagcatttgg

SEQ ID NO: 4523254 - DNA, 25 bp, Homo sapien
cctcacaacggatataggaggtcag

SEQ ID NO: 4523255 - DNA, 25 bp, Homo sapien
tcctcacaacggatataggaggtca

SEQ ID NO: 4523256 - DNA, 25 bp, Homo sapien
gtcctcacaacggatataggaggtc

SEQ ID NO: 4523257 - DNA, 25 bp, Homo sapien
tggcgtaatcctccacagtcactcg

SEQ ID NO: 4523258 - DNA, 25 bp, Homo sapien
acagtcactcggctggagcagagga

SEQ ID NO: 4523259 - DNA, 25 bp, Homo sapien
cctcttgggcagggcaatcgtgtct

SEQ ID NO: 4523260 - DNA, 25 bp, Homo sapien
cagaggagcgacttgagtcgctttc

SEQ ID NO: 4523261 - DNA, 25 bp, Homo sapien
ctgtggcctggagagcgggtcccag

SEQ ID NO: 4523262 - DNA, 25 bp, Homo sapien
gcctggagagcgggtcccaggagcc

SEQ ID NO: 4523263 - DNA, 25 bp, Homo sapien
ctggagagcgggtcccaggagccgc

SEQ ID NO: 4523264 - DNA, 25 bp, Homo sapien
cagctccaccaggctccgcgggcat

SEQ ID NO: 4523265 - DNA, 25 bp, Homo sapien
ctcaagagctctcacgctggtatct

SEQ ID NO: 4523266 - DNA, 25 bp, Homo sapien
agagctctcacgctggtatctggtg

SEQ ID NO: 4523267 - DNA, 25 bp, Homo sapien
ttcctggaacccgacatccaactat

SEQ ID NO: 4523268 - DNA, 25 bp, Homo sapien
gccttcctggaacccgacatccaac

SEQ ID NO: 4523269 - DNA, 25 bp, Homo sapien
tatgtcaaagggtattccaaaggca

SEQ ID NO: 4523270 - DNA, 25 bp, Homo sapien
agaaatggatggagttctgagaggg

SEQ ID NO: 4523271 - DNA, 25 bp, Homo sapien
tgtccaggtggacaatactcttcat

SEQ ID NO: 4523272 - DNA, 25 bp, Homo sapien
gctggatcagaaatcagcattatgt

SEQ ID NO: 4523273 - DNA, 25 bp, Homo sapien
gagtcctgagtgaaccgctgtcctt

SEQ ID NO: 4523274 - DNA, 25 bp, Homo sapien
tgtaaatgtcaggtgggaccagcca

SEQ ID NO: 4523275 - DNA, 25 bp, Homo sapien
tattcaccaggacggaacactgact

SEQ ID NO: 4523276 - DNA, 25 bp, Homo sapien
gacgtggaaactggacactcgctgg

SEQ ID NO: 4523277 - DNA, 25 bp, Homo sapien
gaatgtatcggttggccggtttcca

SEQ ID NO: 4523278 - DNA, 25 bp, Homo sapien
tggacttgtgcacagacagcttctt

SEQ ID NO: 4523279 - DNA, 25 bp, Homo sapien
tctgcaggcacagtatgacagcttg

SEQ ID NO: 4523280 - DNA, 25 bp, Homo sapien
tgtactgactagtcctctggtgaac

SEQ ID NO: 4523281 - DNA, 25 bp, Homo sapien
gtggaagttaaaggccccaatgatc

SEQ ID NO: 4523282 - DNA, 25 bp, Homo sapien
caatgatcgtctttcacataagcag

SEQ ID NO: 4523283 - DNA, 25 bp, Homo sapien
gacaactacaacttacttgaatggc

SEQ ID NO: 4523284 - DNA, 25 bp, Homo sapien
gccaaagccttagctaaaaggtatg

SEQ ID NO: 4523285 - DNA, 25 bp, Homo sapien
tgattgggcccggatcatgaaagga

SEQ ID NO: 4523286 - DNA, 25 bp, Homo sapien
aaggtgatttatccatgcgccaggc

SEQ ID NO: 4523287 - DNA, 25 bp, Homo sapien
tgatcactacctggctttagagggc

SEQ ID NO: 4523288 - DNA, 25 bp, Homo sapien
tttagagggcaagcagaaacatccc

SEQ ID NO: 4523289 - DNA, 25 bp, Homo sapien
agctttcaccctctgttagtacaaa

SEQ ID NO: 4523290 - DNA, 25 bp, Homo sapien
gcagcaagcagattttgttgacaaa

SEQ ID NO: 4523291 - DNA, 25 bp, Homo sapien
aactcaagtcatcaattttaggcac

SEQ ID NO: 4523292 - DNA, 25 bp, Homo sapien
accacttgaggttactactgcagca

SEQ ID NO: 4523293 - DNA, 25 bp, Homo sapien
aaaataacagcaagacactgtacac

SEQ ID NO: 4523294 - DNA, 25 bp, Homo sapien
cataaaataacagcaagacactgta

SEQ ID NO: 4523295 - DNA, 25 bp, Homo sapien
tcataaaataacagcaagacactgt

SEQ ID NO: 4523296 - DNA, 25 bp, Homo sapien
taaaataacagcaagacactgtaca

SEQ ID NO: 4523297 - DNA, 25 bp, Homo sapien
tctgacggcagaggtggtataagca

SEQ ID NO: 4523298 - DNA, 25 bp, Homo sapien
ccagtgcatcagcatctgtgcggca

SEQ ID NO: 4523299 - DNA, 25 bp, Homo sapien
agctctctctagtgcgccctgtgca

SEQ ID NO: 4523300 - DNA, 25 bp, Homo sapien
cctggcccgactgaaggctgtcata

SEQ ID NO: 4523301 - DNA, 25 bp, Homo sapien
tgatcacggttacaagagccagacc

SEQ ID NO: 4523302 - DNA, 25 bp, Homo sapien
tggtgccccgtttcactgctgtaag

SEQ ID NO: 4523303 - DNA, 25 bp, Homo sapien
tagagattcaaacgcctaggttagc

SEQ ID NO: 4523304 - DNA, 25 bp, Homo sapien
catctgtgcaggtgcccaactcgta

SEQ ID NO: 4523305 - DNA, 25 bp, Homo sapien
agtagacaaccatattttggcccca

SEQ ID NO: 4523306 - DNA, 25 bp, Homo sapien
ttcctaaaatgcttcgtctgcacag

SEQ ID NO: 4523307 - DNA, 25 bp, Homo sapien
tgcttaatggtgttcctaaaatgct

SEQ ID NO: 4523308 - DNA, 25 bp, Homo sapien
catttgctaatgtctcagtagacaa

SEQ ID NO: 4523309 - DNA, 25 bp, Homo sapien
cagtacgtcgacttcatcagccagg

SEQ ID NO: 4523310 - DNA, 25 bp, Homo sapien
gccgctggcgttgaagtacatcctg

SEQ ID NO: 4523311 - DNA, 25 bp, Homo sapien
gaacccagcggaagtagcacagttt

SEQ ID NO: 4523312 - DNA, 25 bp, Homo sapien
gagacacgtggcagaataacaccgt

SEQ ID NO: 4523313 - DNA, 25 bp, Homo sapien
tcctcttagtgtggagctgtagctt

SEQ ID NO: 4523314 - DNA, 25 bp, Homo sapien
ctttaaggcagacggcattcctctt

SEQ ID NO: 4523315 - DNA, 25 bp, Homo sapien
gcagacggcattcctcttagtgtgg

SEQ ID NO: 4523316 - DNA, 25 bp, Homo sapien
gacggcattcctcttagtgtggagc

SEQ ID NO: 4523317 - DNA, 25 bp, Homo sapien
taaatcaggcttgcaggctcaaagc

SEQ ID NO: 4523318 - DNA, 25 bp, Homo sapien
caggtactgagactttgtgggcctc

SEQ ID NO: 4523319 - DNA, 25 bp, Homo sapien
ccacagtggcggcttgaatcatcaa

SEQ ID NO: 4523320 - DNA, 25 bp, Homo sapien
tcagaaacccgcattagcagtgtta

SEQ ID NO: 4523321 - DNA, 25 bp, Homo sapien
tatggaaaagggtgcgatcctttgc

SEQ ID NO: 4523322 - DNA, 25 bp, Homo sapien
caaggtgtgctctttccaatgtaga

SEQ ID NO: 4523323 - DNA, 25 bp, Homo sapien
cgtttaaaagacttcacggagccat

SEQ ID NO: 4523324 - DNA, 25 bp, Homo sapien
tcacggagccattctgtatacaagg

SEQ ID NO: 4523325 - DNA, 25 bp, Homo sapien
gagaccagtcccaaacagaggggaa

SEQ ID NO: 4523326 - DNA, 25 bp, Homo sapien
ctggagagaccagtcccaaacagag

SEQ ID NO: 4523327 - DNA, 25 bp, Homo sapien
ggagagaccagtcccaaacagaggg

SEQ ID NO: 4523328 - DNA, 25 bp, Homo sapien
agagaccagtcccaaacagagggga

SEQ ID NO: 4523329 - DNA, 25 bp, Homo sapien
catggagaccatgtacacaggagac

SEQ ID NO: 4523330 - DNA, 25 bp, Homo sapien
ggcagcccagaccatttctatgaag

SEQ ID NO: 4523331 - DNA, 25 bp, Homo sapien
tgacagccaaccaccgcattgtgag

SEQ ID NO: 4523332 - DNA, 25 bp, Homo sapien
gcatgtggctaaaaccatggagacc

SEQ ID NO: 4523333 - DNA, 25 bp, Homo sapien
caatggtctccacggcatttgtcag

SEQ ID NO: 4523334 - DNA, 25 bp, Homo sapien
aagaccccggagctcactatgaggg

SEQ ID NO: 4523335 - DNA, 25 bp, Homo sapien
gcctagcacttttcccagaccaggg

SEQ ID NO: 4523336 - DNA, 25 bp, Homo sapien
caagtttggcttgagaccctgctta

SEQ ID NO: 4523337 - DNA, 25 bp, Homo sapien
tcaaactcgtgaaggaaaataatct

SEQ ID NO: 4523338 - DNA, 25 bp, Homo sapien
tgaaggaaaataatcttgttttgta

SEQ ID NO: 4523339 - DNA, 25 bp, Homo sapien
ttgtacaactttttatcctactgac

SEQ ID NO: 4523340 - DNA, 25 bp, Homo sapien
tttgtacaactttttatcctactga

SEQ ID NO: 4523341 - DNA, 25 bp, Homo sapien
aatacaaaagcatgacatttaaggt

SEQ ID NO: 4523342 - DNA, 25 bp, Homo sapien
taaatgtcgtgtaacagggcttttg

SEQ ID NO: 4523343 - DNA, 25 bp, Homo sapien
gaaataaatgtcgtgtaacagggct

SEQ ID NO: 4523344 - DNA, 25 bp, Homo sapien
aggaaataaatgtcgtgtaacaggg

SEQ ID NO: 4523345 - DNA, 25 bp, Homo sapien
aacagggaaaacgtagccacagcca

SEQ ID NO: 4523346 - DNA, 25 bp, Homo sapien
cagggaaaacgtagccacagccaca

SEQ ID NO: 4523347 - DNA, 25 bp, Homo sapien
acagggaaaacgtagccacagccac

SEQ ID NO: 4523348 - DNA, 25 bp, Homo sapien
cactgccaggtaggtttcggagaac

SEQ ID NO: 4523349 - DNA, 25 bp, Homo sapien
caaacagtgagatccgggtgctgtc

SEQ ID NO: 4523350 - DNA, 25 bp, Homo sapien
caaaagctgcaggatattgttctaa

SEQ ID NO: 4523351 - DNA, 25 bp, Homo sapien
ggtgctgtcatacaacactgccagg

SEQ ID NO: 4523352 - DNA, 25 bp, Homo sapien
ccaagaatagcaaaaataaaggaga

SEQ ID NO: 4523353 - DNA, 25 bp, Homo sapien
ctgccaggtggcatccaagaatagc

SEQ ID NO: 4523354 - DNA, 25 bp, Homo sapien
gccaggtggcatccaagaatagcaa

SEQ ID NO: 4523355 - DNA, 25 bp, Homo sapien
caggtggcatccaagaatagcaaaa

SEQ ID NO: 4523356 - DNA, 25 bp, Homo sapien
tgtctagaaactgatatcctgccat

SEQ ID NO: 4523357 - DNA, 25 bp, Homo sapien
gatggttgcatctgtctagaaactg

SEQ ID NO: 4523358 - DNA, 25 bp, Homo sapien
ctgtctagaaactgatatcctgcca

SEQ ID NO: 4523359 - DNA, 25 bp, Homo sapien
tcagactctgaaatccagtaattgt

SEQ ID NO: 4523360 - DNA, 25 bp, Homo sapien
ccactccttctgtatcagactctga

SEQ ID NO: 4523361 - DNA, 25 bp, Homo sapien
cttctgtatcagactctgaaatcca

SEQ ID NO: 4523362 - DNA, 25 bp, Homo sapien
cagactctgaaatccagtaattgtc

SEQ ID NO: 4523363 - DNA, 25 bp, Homo sapien
agagaagctacacaacagctcaagt

SEQ ID NO: 4523364 - DNA, 25 bp, Homo sapien
aagagaagctacacaacagctcaag

SEQ ID NO: 4523365 - DNA, 25 bp, Homo sapien
caagagaagctacacaacagctcaa

SEQ ID NO: 4523366 - DNA, 25 bp, Homo sapien
gaagctgtggcaaacgattccctcc

SEQ ID NO: 4523367 - DNA, 25 bp, Homo sapien
ggtaatctttctactgacaggccac

SEQ ID NO: 4523368 - DNA, 25 bp, Homo sapien
tgggactgttcactaccaactgaag

SEQ ID NO: 4523369 - DNA, 25 bp, Homo sapien
gaattgccacgctatcaaagtcagc

SEQ ID NO: 4523370 - DNA, 25 bp, Homo sapien
agtacttctgcaagcttaagcaaca

SEQ ID NO: 4523371 - DNA, 25 bp, Homo sapien
cacaaatgcttaagtcctggatata

SEQ ID NO: 4523372 - DNA, 25 bp, Homo sapien
ttgtattcatatactatgcaacatg

SEQ ID NO: 4523373 - DNA, 25 bp, Homo sapien
tgcaacatgagtatatagtcttccc

SEQ ID NO: 4523374 - DNA, 25 bp, Homo sapien
tgctttctagcatgtatacaagttc

SEQ ID NO: 4523375 - DNA, 25 bp, Homo sapien
gtttgctttctagcatgtatacaag

SEQ ID NO: 4523376 - DNA, 25 bp, Homo sapien
tttgctttctagcatgtatacaagt

SEQ ID NO: 4523377 - DNA, 25 bp, Homo sapien
ttgctttctagcatgtatacaagtt

SEQ ID NO: 4523378 - DNA, 25 bp, Homo sapien
gattagtggtagtcaacagacacag

SEQ ID NO: 4523379 - DNA, 25 bp, Homo sapien
tgagaagagattagtggtagtcaac

SEQ ID NO: 4523380 - DNA, 25 bp, Homo sapien
aacagacacagatggcgatgagggt

SEQ ID NO: 4523381 - DNA, 25 bp, Homo sapien
gaagagattagtggtagtcaacaga

SEQ ID NO: 4523382 - DNA, 25 bp, Homo sapien
tttccagtgaagataaccatttctc

SEQ ID NO: 4523383 - DNA, 25 bp, Homo sapien
cagttttacaaatgctgcctgtact

SEQ ID NO: 4523384 - DNA, 25 bp, Homo sapien
tacttcttgaatattaggcaaggtc

SEQ ID NO: 4523385 - DNA, 25 bp, Homo sapien
taggcaaggtcttatccaaatctga

SEQ ID NO: 4523386 - DNA, 25 bp, Homo sapien
cattaacgcatagctgcttcagttt

SEQ ID NO: 4523387 - DNA, 25 bp, Homo sapien
caattttactactggtgttgcccaa

SEQ ID NO: 4523388 - DNA, 25 bp, Homo sapien
ttttactactggtgttgcccaagca

SEQ ID NO: 4523389 - DNA, 25 bp, Homo sapien
ttactactggtgttgcccaagcaag

SEQ ID NO: 4523390 - DNA, 25 bp, Homo sapien
tccaattttactactggtgttgccc

SEQ ID NO: 4523391 - DNA, 25 bp, Homo sapien
tgctgcagcacgtctttgatgaggg

SEQ ID NO: 4523392 - DNA, 25 bp, Homo sapien
gcagcacgtctttgatgagggccat

SEQ ID NO: 4523393 - DNA, 25 bp, Homo sapien
ctgcagcacgtctttgatgagggcc

SEQ ID NO: 4523394 - DNA, 25 bp, Homo sapien
ctgctgcagcacgtctttgatgagg

SEQ ID NO: 4523395 - DNA, 25 bp, Homo sapien
caagagcactgccgttagagtggct

SEQ ID NO: 4523396 - DNA, 25 bp, Homo sapien
agcactgccgttagagtggctccag

SEQ ID NO: 4523397 - DNA, 25 bp, Homo sapien
agagcactgccgttagagtggctcc

SEQ ID NO: 4523398 - DNA, 25 bp, Homo sapien
cacaagagcactgccgttagagtgg

SEQ ID NO: 4523399 - DNA, 25 bp, Homo sapien
agatcttggtctgctaaagaacttg

SEQ ID NO: 4523400 - DNA, 25 bp, Homo sapien
ttagatcttggtctgctaaagaact

SEQ ID NO: 4523401 - DNA, 25 bp, Homo sapien
tggcactacaatgtattctggaagg

SEQ ID NO: 4523402 - DNA, 25 bp, Homo sapien
aagaacttggcactacaatgtattc

SEQ ID NO: 4523403 - DNA, 25 bp, Homo sapien
ggaagcacctgtcctcttgatttct

SEQ ID NO: 4523404 - DNA, 25 bp, Homo sapien
aatccgagtaagtttcaaagagtgg

SEQ ID NO: 4523405 - DNA, 25 bp, Homo sapien
catgtaaccctcgttaatagaacaa

SEQ ID NO: 4523406 - DNA, 25 bp, Homo sapien
atttctctgtcccaatccgagtaag

SEQ ID NO: 4523407 - DNA, 25 bp, Homo sapien
cctccatctcctgagggaattccat

SEQ ID NO: 4523408 - DNA, 25 bp, Homo sapien
ctccatctcctgagggaattccatt

SEQ ID NO: 4523409 - DNA, 25 bp, Homo sapien
ctgtatctactcgattttcctttga

SEQ ID NO: 4523410 - DNA, 25 bp, Homo sapien
tactcgattttcctttgaaaagctc

SEQ ID NO: 4523411 - DNA, 25 bp, Homo sapien
attcttggtttcctgtatctactcg

SEQ ID NO: 4523412 - DNA, 25 bp, Homo sapien
ggtttcctgtatctactcgattttc

SEQ ID NO: 4523413 - DNA, 25 bp, Homo sapien
gtgtggaaatttcaggctccttttg

SEQ ID NO: 4523414 - DNA, 25 bp, Homo sapien
gtggaaatttcaggctccttttgat

SEQ ID NO: 4523415 - DNA, 25 bp, Homo sapien
gcagtgtgtggaaatttcaggctcc

SEQ ID NO: 4523416 - DNA, 25 bp, Homo sapien
caggctccttttgatcttaaagatg

SEQ ID NO: 4523417 - DNA, 25 bp, Homo sapien
tattcatagcattaaaggttcttcc

SEQ ID NO: 4523418 - DNA, 25 bp, Homo sapien
ccagagcatgctgggtgaatggatt

SEQ ID NO: 4523419 - DNA, 25 bp, Homo sapien
cacaggcttcgctcagttaactgac

SEQ ID NO: 4523420 - DNA, 25 bp, Homo sapien
tgaaatcacaccttgccagaaaaga

SEQ ID NO: 4523421 - DNA, 25 bp, Homo sapien
aatgcaaagagtagctggaggtctg

SEQ ID NO: 4523422 - DNA, 25 bp, Homo sapien
aataatgagctattgcaaggcatac

SEQ ID NO: 4523423 - DNA, 25 bp, Homo sapien
tgcaaagagtagctggaggtctgtt

SEQ ID NO: 4523424 - DNA, 25 bp, Homo sapien
gctgggaataatgagctattgcaag

SEQ ID NO: 4523425 - DNA, 25 bp, Homo sapien
taacaagcttaatgcaggctaggcc

SEQ ID NO: 4523426 - DNA, 25 bp, Homo sapien
taaccagtaagcatgtgtcaacttg

SEQ ID NO: 4523427 - DNA, 25 bp, Homo sapien
caaaccctggtagtcactagaatgt

SEQ ID NO: 4523428 - DNA, 25 bp, Homo sapien
ggtgctctaggcttacaaaccctgg

SEQ ID NO: 4523429 - DNA, 25 bp, Homo sapien
tattccctccgcaatctcaggtcag

SEQ ID NO: 4523430 - DNA, 25 bp, Homo sapien
ctcctgataatctgctgtggttccc

SEQ ID NO: 4523431 - DNA, 25 bp, Homo sapien
tgattcttcacaaaactggctctcc

SEQ ID NO: 4523432 - DNA, 25 bp, Homo sapien
aaaacaggtttgaacacattctgcc

SEQ ID NO: 4523433 - DNA, 25 bp, Homo sapien
ccccgtggctatacaaaagacagag

SEQ ID NO: 4523434 - DNA, 25 bp, Homo sapien
ccctgtttgaaatgcgtaaatccca

SEQ ID NO: 4523435 - DNA, 25 bp, Homo sapien
gccataatttcctaactgctaccga

SEQ ID NO: 4523436 - DNA, 25 bp, Homo sapien
cagtattccaagcttccaggaggta

SEQ ID NO: 4523437 - DNA, 25 bp, Homo sapien
catattaggtctaccagcttcactc

SEQ ID NO: 4523438 - DNA, 25 bp, Homo sapien
aaagtctgtgactctgcatttgctg

SEQ ID NO: 4523439 - DNA, 25 bp, Homo sapien
acgggggccatattaggtctaccag

SEQ ID NO: 4523440 - DNA, 25 bp, Homo sapien
ggaaagtctgtgactctgcatttgc

SEQ ID NO: 4523441 - DNA, 25 bp, Homo sapien
atgcccttgactcttacaagtaggg

SEQ ID NO: 4523442 - DNA, 25 bp, Homo sapien
ctggcaaagcaaaacatggaaaaca

SEQ ID NO: 4523443 - DNA, 25 bp, Homo sapien
aacatggaaaacatgcccttgactc

SEQ ID NO: 4523444 - DNA, 25 bp, Homo sapien
tacaagtagggtaataagtcattat

SEQ ID NO: 4523445 - DNA, 25 bp, Homo sapien
cgggacctgattcatcaaagcgaaa

SEQ ID NO: 4523446 - DNA, 25 bp, Homo sapien
ctttttagcactttcgggacctgat

SEQ ID NO: 4523447 - DNA, 25 bp, Homo sapien
taactctgttggattaaatttcagt

SEQ ID NO: 4523448 - DNA, 25 bp, Homo sapien
caaagcgaaatctgacaattctgaa

SEQ ID NO: 4523449 - DNA, 25 bp, Homo sapien
catgttaaagggacatcgtgttcac

SEQ ID NO: 4523450 - DNA, 25 bp, Homo sapien
taaagggacatcgtgttcaccaaga

SEQ ID NO: 4523451 - DNA, 25 bp, Homo sapien
tgtgacaatttgctcaatacatgtt

SEQ ID NO: 4523452 - DNA, 25 bp, Homo sapien
gacatcgtgttcaccaagaagaagg

SEQ ID NO: 4523453 - DNA, 25 bp, Homo sapien
ttgacttcatttacgacaatttctc

SEQ ID NO: 4523454 - DNA, 25 bp, Homo sapien
agttactgcatatcagctttcccca

SEQ ID NO: 4523455 - DNA, 25 bp, Homo sapien
tttccccacaaatcgtactggcttg

SEQ ID NO: 4523456 - DNA, 25 bp, Homo sapien
tgggtcatctgtaataaaggagatt

SEQ ID NO: 4523457 - DNA, 25 bp, Homo sapien
cagcattctcgctatccaggacaga

SEQ ID NO: 4523458 - DNA, 25 bp, Homo sapien
tgggtaccagtgatccaggtcacag

SEQ ID NO: 4523459 - DNA, 25 bp, Homo sapien
cacagtcttctaccttgtcaacagg

SEQ ID NO: 4523460 - DNA, 25 bp, Homo sapien
cctttctgcgatacaggcacatgac

SEQ ID NO: 4523461 - DNA, 25 bp, Homo sapien
tactcacatcctcaccgaaccgatc

SEQ ID NO: 4523462 - DNA, 25 bp, Homo sapien
ccgaaccgatccaccagtccagcag

SEQ ID NO: 4523463 - DNA, 25 bp, Homo sapien
tcaccgaaccgatccaccagtccag

SEQ ID NO: 4523464 - DNA, 25 bp, Homo sapien
atcctcaccgaaccgatccaccagt

SEQ ID NO: 4523465 - DNA, 25 bp, Homo sapien
aggacagagtctggcattacatgct

SEQ ID NO: 4523466 - DNA, 25 bp, Homo sapien
gctcttaacaaatatatactggaac

SEQ ID NO: 4523467 - DNA, 25 bp, Homo sapien
gctgactactttgacagagtactct

SEQ ID NO: 4523468 - DNA, 25 bp, Homo sapien
gaaattcacataatgagaggaagat

SEQ ID NO: 4523469 - DNA, 25 bp, Homo sapien
caaccccgtcatctagggatgacgc

SEQ ID NO: 4523470 - DNA, 25 bp, Homo sapien
cgggaatttcaagccccgcacgcat

SEQ ID NO: 4523471 - DNA, 25 bp, Homo sapien
catctagggatgacgccgggaattt

SEQ ID NO: 4523472 - DNA, 25 bp, Homo sapien
catgttgaacaataacttctgcatc

SEQ ID NO: 4523473 - DNA, 25 bp, Homo sapien
tagaattgataaccctcagtgagaa

SEQ ID NO: 4523474 - DNA, 25 bp, Homo sapien
aataatacggaatttagctgccatt

SEQ ID NO: 4523475 - DNA, 25 bp, Homo sapien
cacaggtcagagaattccttaatgg

SEQ ID NO: 4523476 - DNA, 25 bp, Homo sapien
aaaggttcagacttagtgttacagc

SEQ ID NO: 4523477 - DNA, 25 bp, Homo sapien
tcttcggttccgaattgatcttatc

SEQ ID NO: 4523478 - DNA, 25 bp, Homo sapien
ggttccgaattgatcttatcgtcag

SEQ ID NO: 4523479 - DNA, 25 bp, Homo sapien
tcggttccgaattgatcttatcgtc

SEQ ID NO: 4523480 - DNA, 25 bp, Homo sapien
tttaatcttcggttccgaattgatc

SEQ ID NO: 4523481 - DNA, 25 bp, Homo sapien
ggctcccgagaaggcgcatttcgcg

SEQ ID NO: 4523482 - DNA, 25 bp, Homo sapien
ttttcgccgagccagtgggggctcc

SEQ ID NO: 4523483 - DNA, 25 bp, Homo sapien
ccgagaaggcgcatttcgcggcgcc

SEQ ID NO: 4523484 - DNA, 25 bp, Homo sapien
tgggggctcccgagaaggcgcattt

SEQ ID NO: 4523485 - DNA, 25 bp, Homo sapien
cgggggtcggcctggaggctccacg

SEQ ID NO: 4523486 - DNA, 25 bp, Homo sapien
tgtgggcagggagacgcgcgcagcc

SEQ ID NO: 4523487 - DNA, 25 bp, Homo sapien
ggcagggagacgcgcgcagcctcct

SEQ ID NO: 4523488 - DNA, 25 bp, Homo sapien
gaggctccacggaagcgcagaggag

SEQ ID NO: 4523489 - DNA, 25 bp, Homo sapien
tgggtttgggcggcttgagggagaa

SEQ ID NO: 4523490 - DNA, 25 bp, Homo sapien
gccgacgcctccgggcgtaaagctc

SEQ ID NO: 4523491 - DNA, 25 bp, Homo sapien
gcgccgacgcctccgggcgtaaagc

SEQ ID NO: 4523492 - DNA, 25 bp, Homo sapien
ccgttcccgtcgcgggccagtggca

SEQ ID NO: 4523493 - DNA, 25 bp, Homo sapien
ttcccgtcgcgggccagtggcagcg

SEQ ID NO: 4523494 - DNA, 25 bp, Homo sapien
ggcggggatacggcgcagcgcccgc

SEQ ID NO: 4523495 - DNA, 25 bp, Homo sapien
tggccaagatgacacccattagtgg

SEQ ID NO: 4523496 - DNA, 25 bp, Homo sapien
cgagggcacttcctaggctatttgg

SEQ ID NO: 4523497 - DNA, 25 bp, Homo sapien
tttggtggccctcagtaataaagag

SEQ ID NO: 4523498 - DNA, 25 bp, Homo sapien
ggtgacttcagtgctcgagggcact

SEQ ID NO: 4523499 - DNA, 25 bp, Homo sapien
ctagcattcagtttctgtggaagct

SEQ ID NO: 4523500 - DNA, 25 bp, Homo sapien
gcattcagtttctgtggaagctttc

SEQ ID NO: 4523501 - DNA, 25 bp, Homo sapien
cattcagtttctgtggaagctttct

SEQ ID NO: 4523502 - DNA, 25 bp, Homo sapien
tttttcttctgctgtcattccagac

SEQ ID NO: 4523503 - DNA, 25 bp, Homo sapien
cattccgtcgtcaattgctggtccg

SEQ ID NO: 4523504 - DNA, 25 bp, Homo sapien
tccccgggaatagacgaagcttctg

SEQ ID NO: 4523505 - DNA, 25 bp, Homo sapien
gattcgaggaattgcttcagcgaca

SEQ ID NO: 4523506 - DNA, 25 bp, Homo sapien
taaactttttgacctgagagatggg

SEQ ID NO: 4523507 - DNA, 25 bp, Homo sapien
tacaagcattgatcgtttcatcggg

SEQ ID NO: 4523508 - DNA, 25 bp, Homo sapien
gccttctatatttgtcgtttccact

SEQ ID NO: 4523509 - DNA, 25 bp, Homo sapien
cactgttagctgagtgttttgaaca

SEQ ID NO: 4523510 - DNA, 25 bp, Homo sapien
tcatcggggaaatagcgtgtaattt

SEQ ID NO: 4523511 - DNA, 25 bp, Homo sapien
tcacattcagaagaagcccgggacc

SEQ ID NO: 4523512 - DNA, 25 bp, Homo sapien
gtcagacctgtcgattcccgcaaga

SEQ ID NO: 4523513 - DNA, 25 bp, Homo sapien
gagcaagtcgaaggtcaacagtctg

SEQ ID NO: 4523514 - DNA, 25 bp, Homo sapien
cattctgggactaggtgcgttttca

SEQ ID NO: 4523515 - DNA, 25 bp, Homo sapien
ctgtcttggtcttctggtaggctta

SEQ ID NO: 4523516 - DNA, 25 bp, Homo sapien
caggatactgcatgcttgtctctct

SEQ ID NO: 4523517 - DNA, 25 bp, Homo sapien
gcttagcgcgcaggctaaactctgc

SEQ ID NO: 4523518 - DNA, 25 bp, Homo sapien
gagattggggaccaggatactgcat

SEQ ID NO: 4523519 - DNA, 25 bp, Homo sapien
ctatcttgtttcttctaggtaggtc

SEQ ID NO: 4523520 - DNA, 25 bp, Homo sapien
taggtaggtctccattaccagccat

SEQ ID NO: 4523521 - DNA, 25 bp, Homo sapien
ctttctggtcacatgggaagaggat

SEQ ID NO: 4523522 - DNA, 25 bp, Homo sapien
ggaagaggatgccaaataaaaagat

SEQ ID NO: 4523523 - DNA, 25 bp, Homo sapien
ttggttgggtcacaaggtgactggg

SEQ ID NO: 4523524 - DNA, 25 bp, Homo sapien
ggatttggttgggtcacaaggtgac

SEQ ID NO: 4523525 - DNA, 25 bp, Homo sapien
atttggttgggtcacaaggtgactg

SEQ ID NO: 4523526 - DNA, 25 bp, Homo sapien
gatttggttgggtcacaaggtgact

SEQ ID NO: 4523527 - DNA, 25 bp, Homo sapien
cggatgcgctcgtcgctggacgact

SEQ ID NO: 4523528 - DNA, 25 bp, Homo sapien
ctttcagaagtgacccggatgcgct

SEQ ID NO: 4523529 - DNA, 25 bp, Homo sapien
ttagctcctcgtcgctaaggaagag

SEQ ID NO: 4523530 - DNA, 25 bp, Homo sapien
gcactgctcctcgaactcatgcagc

SEQ ID NO: 4523531 - DNA, 25 bp, Homo sapien
tgtggcttaaaatgatcatcggtgg

SEQ ID NO: 4523532 - DNA, 25 bp, Homo sapien
gctggaacttccacacctggttgga

SEQ ID NO: 4523533 - DNA, 25 bp, Homo sapien
cagcggccgctgagacgcataatga

SEQ ID NO: 4523534 - DNA, 25 bp, Homo sapien
taatcagctgatatcgctggaactt

SEQ ID NO: 4523535 - DNA, 25 bp, Homo sapien
caggttttctccaatgccctgttca

SEQ ID NO: 4523536 - DNA, 25 bp, Homo sapien
ggtcaacatactcaacacaacatgc

SEQ ID NO: 4523537 - DNA, 25 bp, Homo sapien
catctctcaagccagaagtttggac

SEQ ID NO: 4523538 - DNA, 25 bp, Homo sapien
tgtctaccaatactgggaccttagg

SEQ ID NO: 4523539 - DNA, 25 bp, Homo sapien
gttggcgaccagtagatagcacgcc

SEQ ID NO: 4523540 - DNA, 25 bp, Homo sapien
tggcgaccagtagatagcacgccat

SEQ ID NO: 4523541 - DNA, 25 bp, Homo sapien
caggatgttggcgaccagtagatag

SEQ ID NO: 4523542 - DNA, 25 bp, Homo sapien
ggatgttggcgaccagtagatagca

SEQ ID NO: 4523543 - DNA, 25 bp, Homo sapien
ttgccctcctcatcatataggttct

SEQ ID NO: 4523544 - DNA, 25 bp, Homo sapien
cttgccctcctcatcatataggttc

SEQ ID NO: 4523545 - DNA, 25 bp, Homo sapien
tacagggaggaagccgcttgccctc

SEQ ID NO: 4523546 - DNA, 25 bp, Homo sapien
tgagccaggcgccggggatacaggg

SEQ ID NO: 4523547 - DNA, 25 bp, Homo sapien
tgatcaggttaaccaatcacgcgct

SEQ ID NO: 4523548 - DNA, 25 bp, Homo sapien
tacagtttatgcctggaattcagga

SEQ ID NO: 4523549 - DNA, 25 bp, Homo sapien
tgtcataagcgagagcaaaagctca

SEQ ID NO: 4523550 - DNA, 25 bp, Homo sapien
ttatgttactgagaatagcacagcc

SEQ ID NO: 4523551 - DNA, 25 bp, Homo sapien
tgttcttccattaatttggaactga

SEQ ID NO: 4523552 - DNA, 25 bp, Homo sapien
tcttccattaatttggaactgatca

SEQ ID NO: 4523553 - DNA, 25 bp, Homo sapien
tccattaatttggaactgatcatct

SEQ ID NO: 4523554 - DNA, 25 bp, Homo sapien
ttaatttggaactgatcatctgcct

SEQ ID NO: 4523555 - DNA, 25 bp, Homo sapien
tccatagatcatccagtagggcatg

SEQ ID NO: 4523556 - DNA, 25 bp, Homo sapien
gcagaatggcttgacgggctactcc

SEQ ID NO: 4523557 - DNA, 25 bp, Homo sapien
tagaagatgtttcgggccagtttcc

SEQ ID NO: 4523558 - DNA, 25 bp, Homo sapien
tgagcacgaccagcatgatgaccac

SEQ ID NO: 4523559 - DNA, 25 bp, Homo sapien
cgagtgcttaattaggacgaagaaa

SEQ ID NO: 4523560 - DNA, 25 bp, Homo sapien
agcacttcacgagtgcttaattagg

SEQ ID NO: 4523561 - DNA, 25 bp, Homo sapien
agttcaccctggctcattatattgc

SEQ ID NO: 4523562 - DNA, 25 bp, Homo sapien
caccctggctcattatattgctgtc

SEQ ID NO: 4523563 - DNA, 25 bp, Homo sapien
caacatgtaggagaactgtgtatct

SEQ ID NO: 4523564 - DNA, 25 bp, Homo sapien
tatgtcctaactacagccaaagtct

SEQ ID NO: 4523565 - DNA, 25 bp, Homo sapien
cattctgaagtggatgtagtctcat

SEQ ID NO: 4523566 - DNA, 25 bp, Homo sapien
tagtcaccctacagttgagatatgg

SEQ ID NO: 4523567 - DNA, 25 bp, Homo sapien
tatggccccagatacttgttgacac

SEQ ID NO: 4523568 - DNA, 25 bp, Homo sapien
caggacacggatgtaccagaagatg

SEQ ID NO: 4523569 - DNA, 25 bp, Homo sapien
tgtaggcgaagaattgctccaatca

SEQ ID NO: 4523570 - DNA, 25 bp, Homo sapien
tggaaatggccacgagatctgtgat

SEQ ID NO: 4523571 - DNA, 25 bp, Homo sapien
aaagaacaataaactgagatgccgt

SEQ ID NO: 4523572 - DNA, 25 bp, Homo sapien
tcaggcagggagagatatctagaaa

SEQ ID NO: 4523573 - DNA, 25 bp, Homo sapien
cttggaacaataagactgatggaac

SEQ ID NO: 4523574 - DNA, 25 bp, Homo sapien
gaagtcttgtcttagaatcttggaa

SEQ ID NO: 4523575 - DNA, 25 bp, Homo sapien
cacacaggatgaaaactctagagca

SEQ ID NO: 4523576 - DNA, 25 bp, Homo sapien
caggacggcacagcgatggtaaagc

SEQ ID NO: 4523577 - DNA, 25 bp, Homo sapien
tctagagcatagatgagccccacgt

SEQ ID NO: 4523578 - DNA, 25 bp, Homo sapien
cagtgtctcggtgtatggtggaccc

SEQ ID NO: 4523579 - DNA, 25 bp, Homo sapien
aagtataattttggattcagtgctc

SEQ ID NO: 4523580 - DNA, 25 bp, Homo sapien
gctctaattagaccgatgccatcag

SEQ ID NO: 4523581 - DNA, 25 bp, Homo sapien
gattccctctatctggactaggtta

SEQ ID NO: 4523582 - DNA, 25 bp, Homo sapien
gtgaaagggtcaacaattactgcaa

SEQ ID NO: 4523583 - DNA, 25 bp, Homo sapien
ggctggtttcgaattactgctatct

SEQ ID NO: 4523584 - DNA, 25 bp, Homo sapien
cagtgtttcattcaccctgttggcc

SEQ ID NO: 4523585 - DNA, 25 bp, Homo sapien
caggcaactgccacacgaccggcta

SEQ ID NO: 4523586 - DNA, 25 bp, Homo sapien
gagtagccgaaattacaggcaactg

SEQ ID NO: 4523587 - DNA, 25 bp, Homo sapien
gtatcttctctaacgccaggctcac

SEQ ID NO: 4523588 - DNA, 25 bp, Homo sapien
tcgtatcttctctaacgccaggctc

SEQ ID NO: 4523589 - DNA, 25 bp, Homo sapien
tctcgtatcttctctaacgccaggc

SEQ ID NO: 4523590 - DNA, 25 bp, Homo sapien
ctctcgtatcttctctaacgccagg

SEQ ID NO: 4523591 - DNA, 25 bp, Homo sapien
tggagggacggccagccatccatcc

SEQ ID NO: 4523592 - DNA, 25 bp, Homo sapien
catccatccgcaccaggatgacgta

SEQ ID NO: 4523593 - DNA, 25 bp, Homo sapien
caccaggatgacgtagttaaacagc

SEQ ID NO: 4523594 - DNA, 25 bp, Homo sapien
gagatgacgatccactcctggaggg

SEQ ID NO: 4523595 - DNA, 25 bp, Homo sapien
tcaggttgacacatctaaaagaatc

SEQ ID NO: 4523596 - DNA, 25 bp, Homo sapien
agacaagctgttagccgtgtttggg

SEQ ID NO: 4523597 - DNA, 25 bp, Homo sapien
tctttgtttccaactggactgactc

SEQ ID NO: 4523598 - DNA, 25 bp, Homo sapien
ggactgactcattgagaggaaacct

SEQ ID NO: 4523599 - DNA, 25 bp, Homo sapien
taaccagaatcgatgggcagcagtg

SEQ ID NO: 4523600 - DNA, 25 bp, Homo sapien
taatccctgcgaagctgcacaatgt

SEQ ID NO: 4523601 - DNA, 25 bp, Homo sapien
tgcacaatgtgtgatgactccaccc

SEQ ID NO: 4523602 - DNA, 25 bp, Homo sapien
caggccctcagatggttctaaccag

SEQ ID NO: 4523603 - DNA, 25 bp, Homo sapien
gatatcgagatccaatgttagccag

SEQ ID NO: 4523604 - DNA, 25 bp, Homo sapien
gagacgccttgatttgtttccctat

SEQ ID NO: 4523605 - DNA, 25 bp, Homo sapien
cttgccagccaagcgggtcagtttg

SEQ ID NO: 4523606 - DNA, 25 bp, Homo sapien
tagccatgcccttgtaatgacccca

SEQ ID NO: 4523607 - DNA, 25 bp, Homo sapien
caatgggcgcgttatagaattcaca

SEQ ID NO: 4523608 - DNA, 25 bp, Homo sapien
cccctttcttgagccagcatctgca

SEQ ID NO: 4523609 - DNA, 25 bp, Homo sapien
cagatctttgttccgatgggaatac

SEQ ID NO: 4523610 - DNA, 25 bp, Homo sapien
tctgttttttgtgctcgttctcctc

SEQ ID NO: 4523611 - DNA, 25 bp, Homo sapien
tcaatctgtggtacaagaaatctca

SEQ ID NO: 4523612 - DNA, 25 bp, Homo sapien
gattacactgatatgcttagggtca

SEQ ID NO: 4523613 - DNA, 25 bp, Homo sapien
ctgatatgcttagggtcaagtgtgt

SEQ ID NO: 4523614 - DNA, 25 bp, Homo sapien
agaaatctcaacaattttgaaaaca

SEQ ID NO: 4523615 - DNA, 25 bp, Homo sapien
tttccttggatgtttgatacgagaa

SEQ ID NO: 4523616 - DNA, 25 bp, Homo sapien
tcatatgtgcgaaattccaaaaaca

SEQ ID NO: 4523617 - DNA, 25 bp, Homo sapien
gatacgagaaatcatcatatgtgcg

SEQ ID NO: 4523618 - DNA, 25 bp, Homo sapien
ccttggatgtttgatacgagaaatc

SEQ ID NO: 4523619 - DNA, 25 bp, Homo sapien
aatgaagtcccggtgtttggctgcc

SEQ ID NO: 4523620 - DNA, 25 bp, Homo sapien
cagtttttcagctcgtaggtcagga

SEQ ID NO: 4523621 - DNA, 25 bp, Homo sapien
caggtcgagttgctccagtttttca

SEQ ID NO: 4523622 - DNA, 25 bp, Homo sapien
tcaggagtttcatagcgatctgctc

SEQ ID NO: 4523623 - DNA, 25 bp, Homo sapien
gaattgttatccaagtcctgggaga

SEQ ID NO: 4523624 - DNA, 25 bp, Homo sapien
gactcgtgggccatggccttgtaga

SEQ ID NO: 4523625 - DNA, 25 bp, Homo sapien
cacaccatcagctcgtggaagggat

SEQ ID NO: 4523626 - DNA, 25 bp, Homo sapien
agatcactctcggaggactcgtggg

SEQ ID NO: 4523627 - DNA, 25 bp, Homo sapien
tccacatcaatgtcgatctcttcct

SEQ ID NO: 4523628 - DNA, 25 bp, Homo sapien
tggaaccgactcacggcagggtcgt

SEQ ID NO: 4523629 - DNA, 25 bp, Homo sapien
gcagggtcgtccacatcaatgtcga

SEQ ID NO: 4523630 - DNA, 25 bp, Homo sapien
cgactcacggcagggtcgtccacat

SEQ ID NO: 4523631 - DNA, 25 bp, Homo sapien
tagaagcctttaactgaggcgacgc

SEQ ID NO: 4523632 - DNA, 25 bp, Homo sapien
tgtttggataacttgcacccctggg

SEQ ID NO: 4523633 - DNA, 25 bp, Homo sapien
tacagtttatttcctcagggaggtc

SEQ ID NO: 4523634 - DNA, 25 bp, Homo sapien
tgccagacgtagctgaaccagaaat

SEQ ID NO: 4523635 - DNA, 25 bp, Homo sapien
caagagtcaatcctaatattccaca

SEQ ID NO: 4523636 - DNA, 25 bp, Homo sapien
atttttaggtctgggacattgttct

SEQ ID NO: 4523637 - DNA, 25 bp, Homo sapien
gggacattgttcttacggttgctag

SEQ ID NO: 4523638 - DNA, 25 bp, Homo sapien
tacttttgtcctattgtgagggaac

SEQ ID NO: 4523639 - DNA, 25 bp, Homo sapien
taatttgactaagacatctaggtaa

SEQ ID NO: 4523640 - DNA, 25 bp, Homo sapien
tcgcaaatacagaacttaaaagggc

SEQ ID NO: 4523641 - DNA, 25 bp, Homo sapien
ggtgagtagtatcgtatattcgcaa

SEQ ID NO: 4523642 - DNA, 25 bp, Homo sapien
ttaaaagggctatgtatatttgacc

SEQ ID NO: 4523643 - DNA, 25 bp, Homo sapien
cgcgtggcccttattccaggtagaa

SEQ ID NO: 4523644 - DNA, 25 bp, Homo sapien
tgaaaagcaagcgaggaaccacatg

SEQ ID NO: 4523645 - DNA, 25 bp, Homo sapien
tgaaccggccaagttgttgaaaagc

SEQ ID NO: 4523646 - DNA, 25 bp, Homo sapien
ggatacgattctccaggcagtgagg

SEQ ID NO: 4523647 - DNA, 25 bp, Homo sapien
cagcacgagcccgatgtctatgagg

SEQ ID NO: 4523648 - DNA, 25 bp, Homo sapien
atgtggtaatcaggcggaaggttgc

SEQ ID NO: 4523649 - DNA, 25 bp, Homo sapien
taggctcctcccatgaggtactcca

SEQ ID NO: 4523650 - DNA, 25 bp, Homo sapien
gaaagtttttccgagtgtagttgca

SEQ ID NO: 4523651 - DNA, 25 bp, Homo sapien
tccctcaccagcagatgaagtgtgt

SEQ ID NO: 4523652 - DNA, 25 bp, Homo sapien
tttttcacatccctcaccagcagat

SEQ ID NO: 4523653 - DNA, 25 bp, Homo sapien
gaagtgtgtttggtggacccagtct

SEQ ID NO: 4523654 - DNA, 25 bp, Homo sapien
atgaagtgtgtttggtggacccagt

SEQ ID NO: 4523655 - DNA, 25 bp, Homo sapien
tccagcctcggaatggtcagaaagt

SEQ ID NO: 4523656 - DNA, 25 bp, Homo sapien
tcagaaagtgttgcatgttcactcc

SEQ ID NO: 4523657 - DNA, 25 bp, Homo sapien
tcaggagcttcacaaagtcgacacg

SEQ ID NO: 4523658 - DNA, 25 bp, Homo sapien
taaagcatctagcatcgcttgctcc

SEQ ID NO: 4523659 - DNA, 25 bp, Homo sapien
tcttcctcccttggtggtggccatg

SEQ ID NO: 4523660 - DNA, 25 bp, Homo sapien
ccttctccgtggctttgctgtccgt

SEQ ID NO: 4523661 - DNA, 25 bp, Homo sapien
ctccgtggctttgctgtccgtcggg

SEQ ID NO: 4523662 - DNA, 25 bp, Homo sapien
cagcagctctatcttccgggggtca

SEQ ID NO: 4523663 - DNA, 25 bp, Homo sapien
tgacatcttctaatgagcctaatag

SEQ ID NO: 4523664 - DNA, 25 bp, Homo sapien
tgaattccatgtcacaagggagaac

SEQ ID NO: 4523665 - DNA, 25 bp, Homo sapien
ggagaacatactaataggtcacttg

SEQ ID NO: 4523666 - DNA, 25 bp, Homo sapien
tatcatatcatcagaaaccccacat

SEQ ID NO: 4523667 - DNA, 25 bp, Homo sapien
gacaaagatctggcttcgtgctatg

SEQ ID NO: 4523668 - DNA, 25 bp, Homo sapien
tgatctggagcagatacgtttgttc

SEQ ID NO: 4523669 - DNA, 25 bp, Homo sapien
gcttcgtgctatgtccacgcggttc

SEQ ID NO: 4523670 - DNA, 25 bp, Homo sapien
ggttccaagccagtgccaagctcag

SEQ ID NO: 4523671 - DNA, 25 bp, Homo sapien
gctggccctcagaacccattctgaa

SEQ ID NO: 4523672 - DNA, 25 bp, Homo sapien
agttaaaattgccatctcgatgtcc

SEQ ID NO: 4523673 - DNA, 25 bp, Homo sapien
tgctggccctcagaacccattctga

SEQ ID NO: 4523674 - DNA, 25 bp, Homo sapien
ttgccatctcgatgtcctgctggcc

SEQ ID NO: 4523675 - DNA, 25 bp, Homo sapien
tctgaatggtaactagaagctgctc

SEQ ID NO: 4523676 - DNA, 25 bp, Homo sapien
cttcatgcactccattataattgca

SEQ ID NO: 4523677 - DNA, 25 bp, Homo sapien
tgtgattgtgccttattataattaa

SEQ ID NO: 4523678 - DNA, 25 bp, Homo sapien
tgcaaacagctgatgtgattgtgcc

SEQ ID NO: 4523679 - DNA, 25 bp, Homo sapien
ttcaaagaaaatgcaagagaacaaa

SEQ ID NO: 4523680 - DNA, 25 bp, Homo sapien
ctgttcaaagaaaatgcaagagaac

SEQ ID NO: 4523681 - DNA, 25 bp, Homo sapien
tcaaagaaaatgcaagagaacaaaa

SEQ ID NO: 4523682 - DNA, 25 bp, Homo sapien
tgttcaaagaaaatgcaagagaaca

SEQ ID NO: 4523683 - DNA, 25 bp, Homo sapien
ccgcccttcctcgcgcgtcagaaat

SEQ ID NO: 4523684 - DNA, 25 bp, Homo sapien
cgcccttcctcgcgcgtcagaaatc

SEQ ID NO: 4523685 - DNA, 25 bp, Homo sapien
gaggctcttcttgcaggtattccaa

SEQ ID NO: 4523686 - DNA, 25 bp, Homo sapien
gatgtccgaggcacgtccgctgcca

SEQ ID NO: 4523687 - DNA, 25 bp, Homo sapien
ttgtgcgcaaaggacaggatgtccg

SEQ ID NO: 4523688 - DNA, 25 bp, Homo sapien
gacgatggacaccacgttagggccc

SEQ ID NO: 4523689 - DNA, 25 bp, Homo sapien
cacccagtcgttttaactcctgaag

SEQ ID NO: 4523690 - DNA, 25 bp, Homo sapien
gcaacacaaaccacattcgcccata

SEQ ID NO: 4523691 - DNA, 25 bp, Homo sapien
attcgcccataccacctgtgccctg

SEQ ID NO: 4523692 - DNA, 25 bp, Homo sapien
ctcctgaagtatggggaagagtaaa

SEQ ID NO: 4523693 - DNA, 25 bp, Homo sapien
cagcccagttatcattcttgcattc

SEQ ID NO: 4523694 - DNA, 25 bp, Homo sapien
gcccagttatcattcttgcattctg

SEQ ID NO: 4523695 - DNA, 25 bp, Homo sapien
ccagcccagttatcattcttgcatt

SEQ ID NO: 4523696 - DNA, 25 bp, Homo sapien
cagttatcattcttgcattctgtca

SEQ ID NO: 4523697 - DNA, 25 bp, Homo sapien
caagaacacagtgggtaccaactaa

SEQ ID NO: 4523698 - DNA, 25 bp, Homo sapien
tcaagaacacagtgggtaccaacta

SEQ ID NO: 4523699 - DNA, 25 bp, Homo sapien
ttcaagaacacagtgggtaccaact

SEQ ID NO: 4523700 - DNA, 25 bp, Homo sapien
cttcaagaacacagtgggtaccaac

SEQ ID NO: 4523701 - DNA, 25 bp, Homo sapien
agaacctgcaggcatggctctggga

SEQ ID NO: 4523702 - DNA, 25 bp, Homo sapien
gaagtatcgttggtctcagctctga

SEQ ID NO: 4523703 - DNA, 25 bp, Homo sapien
tctgagcctatttcaccagctgtcc

SEQ ID NO: 4523704 - DNA, 25 bp, Homo sapien
tggccatgacagatcacactctgag

SEQ ID NO: 4523705 - DNA, 25 bp, Homo sapien
agggaagcccacaagtcacatggcc

SEQ ID NO: 4523706 - DNA, 25 bp, Homo sapien
gctcagagccctaggcgaaggatga

SEQ ID NO: 4523707 - DNA, 25 bp, Homo sapien
gaagtgacaactgagcacccctttg

SEQ ID NO: 4523708 - DNA, 25 bp, Homo sapien
tgctgtgggaagtgacaactgagca

SEQ ID NO: 4523709 - DNA, 25 bp, Homo sapien
cccaggaggactgcgtgcctttgcc

SEQ ID NO: 4523710 - DNA, 25 bp, Homo sapien
gcccaggaggactgcgtgcctttgc

SEQ ID NO: 4523711 - DNA, 25 bp, Homo sapien
tgttgagcacagagagcttacttag

SEQ ID NO: 4523712 - DNA, 25 bp, Homo sapien
cagccttcgcagcttcacctcggcg

SEQ ID NO: 4523713 - DNA, 25 bp, Homo sapien
cttacttagagggttggacatggtc

SEQ ID NO: 4523714 - DNA, 25 bp, Homo sapien
tcggcgccatacttgcccagggtgc

SEQ ID NO: 4523715 - DNA, 25 bp, Homo sapien
ggcatcccctacgtggctgataaca

SEQ ID NO: 4523716 - DNA, 25 bp, Homo sapien
ctggacttggaggagtggtctttca

SEQ ID NO: 4523717 - DNA, 25 bp, Homo sapien
tccacgatgccccatggagcaattc

SEQ ID NO: 4523718 - DNA, 25 bp, Homo sapien
ctatagcacaaacccggcctctgga

SEQ ID NO: 4523719 - DNA, 25 bp, Homo sapien
ggccccggtggtcatagcagccttg

SEQ ID NO: 4523720 - DNA, 25 bp, Homo sapien
catgcacagatattaagagcttggg

SEQ ID NO: 4523721 - DNA, 25 bp, Homo sapien
ggcttggtgtcataggatacacgga

SEQ ID NO: 4523722 - DNA, 25 bp, Homo sapien
tctttcaccatgagatggagcagtg

SEQ ID NO: 4523723 - DNA, 25 bp, Homo sapien
cagagtgagctggaacggatcacag

SEQ ID NO: 4523724 - DNA, 25 bp, Homo sapien
caaaaagtctgtgactgggcatgta

SEQ ID NO: 4523725 - DNA, 25 bp, Homo sapien
caaagactctcaacacatctaaggg

SEQ ID NO: 4523726 - DNA, 25 bp, Homo sapien
gagggcactccctgtttacatgcaa

SEQ ID NO: 4523727 - DNA, 25 bp, Homo sapien
gactggccgccaatgaaagctgtga

SEQ ID NO: 4523728 - DNA, 25 bp, Homo sapien
ccatgaagaagaccaggtatctgca

SEQ ID NO: 4523729 - DNA, 25 bp, Homo sapien
tatctaggaagattgagccacagcc

SEQ ID NO: 4523730 - DNA, 25 bp, Homo sapien
tacagtggtgtccagtttccaagcc

SEQ ID NO: 4523731 - DNA, 25 bp, Homo sapien
tggcaacagaccatttctcaggctg

SEQ ID NO: 4523732 - DNA, 25 bp, Homo sapien
tatgctggttggtgaactggccaca

SEQ ID NO: 4523733 - DNA, 25 bp, Homo sapien
gtagctctgggtgtgcttggcaaca

SEQ ID NO: 4523734 - DNA, 25 bp, Homo sapien
tttattggaatatccgccaccctgg

SEQ ID NO: 4523735 - DNA, 25 bp, Homo sapien
caaagatacattcccgtttgcaaaa

SEQ ID NO: 4523736 - DNA, 25 bp, Homo sapien
attacaaagatacattcccgtttgc

SEQ ID NO: 4523737 - DNA, 25 bp, Homo sapien
agatacattcccgtttgcaaaaggt

SEQ ID NO: 4523738 - DNA, 25 bp, Homo sapien
tacaaagatacattcccgtttgcaa

SEQ ID NO: 4523739 - DNA, 25 bp, Homo sapien
actctgccctttgtggacgatgtca

SEQ ID NO: 4523740 - DNA, 25 bp, Homo sapien
tccaaggcttttgcaagtatttgcc

SEQ ID NO: 4523741 - DNA, 25 bp, Homo sapien
tatccatgttaaatggacttctggg

SEQ ID NO: 4523742 - DNA, 25 bp, Homo sapien
taacagtgctggacgtaaatcttgg

SEQ ID NO: 4523743 - DNA, 25 bp, Homo sapien
caccgtgacggtcccacagaataaa

SEQ ID NO: 4523744 - DNA, 25 bp, Homo sapien
tcatttcttaactgtggtgaccacc

SEQ ID NO: 4523745 - DNA, 25 bp, Homo sapien
ggtgcgttgtaagtctgcagagacc

SEQ ID NO: 4523746 - DNA, 25 bp, Homo sapien
gctctcctggttttacgaacgaaga

SEQ ID NO: 4523747 - DNA, 25 bp, Homo sapien
agtggaatggagagggcacagctca

SEQ ID NO: 4523748 - DNA, 25 bp, Homo sapien
tggagagggcacagctcaggctctt

SEQ ID NO: 4523749 - DNA, 25 bp, Homo sapien
ctgccacagcagtggaatggagagg

SEQ ID NO: 4523750 - DNA, 25 bp, Homo sapien
ccacagcagtggaatggagagggca

SEQ ID NO: 4523751 - DNA, 25 bp, Homo sapien
tctgttgggcggtgttgagctgcag

SEQ ID NO: 4523752 - DNA, 25 bp, Homo sapien
ttgtatttctgttgggcggtgttga

SEQ ID NO: 4523753 - DNA, 25 bp, Homo sapien
tatttctgttgggcggtgttgagct

SEQ ID NO: 4523754 - DNA, 25 bp, Homo sapien
cttgtatttctgttgggcggtgttg

SEQ ID NO: 4523755 - DNA, 25 bp, Homo sapien
cagactgtccactctccagaggcat

SEQ ID NO: 4523756 - DNA, 25 bp, Homo sapien
aggggttctcaccagactgtccact

SEQ ID NO: 4523757 - DNA, 25 bp, Homo sapien
gaaaaggggttctcaccagactgtc

SEQ ID NO: 4523758 - DNA, 25 bp, Homo sapien
ccagactgtccactctccagaggca

SEQ ID NO: 4523759 - DNA, 25 bp, Homo sapien
taaactctgcttccatttctccact

SEQ ID NO: 4523760 - DNA, 25 bp, Homo sapien
aactctgcttccatttctccactga

SEQ ID NO: 4523761 - DNA, 25 bp, Homo sapien
aaactctgcttccatttctccactg

SEQ ID NO: 4523762 - DNA, 25 bp, Homo sapien
cgtaaactctgcttccatttctcca

SEQ ID NO: 4523763 - DNA, 25 bp, Homo sapien
caaagcttatctcgtggcatctcca

SEQ ID NO: 4523764 - DNA, 25 bp, Homo sapien
atctccaaggatgcccagtcagttt

SEQ ID NO: 4523765 - DNA, 25 bp, Homo sapien
gcccagtcagtttgtgtatgtttct

SEQ ID NO: 4523766 - DNA, 25 bp, Homo sapien
agaggccattgcaaagcttatctcg

SEQ ID NO: 4523767 - DNA, 25 bp, Homo sapien
gctgagtactgaaatctcgcctggg

SEQ ID NO: 4523768 - DNA, 25 bp, Homo sapien
caatcatggtggcttcggtttacgg

SEQ ID NO: 4523769 - DNA, 25 bp, Homo sapien
cggtttacggcttctgatctgctga

SEQ ID NO: 4523770 - DNA, 25 bp, Homo sapien
aaagtgcagctggatggtaccactc

SEQ ID NO: 4523771 - DNA, 25 bp, Homo sapien
gagctcttgagcgagccccgcttga

SEQ ID NO: 4523772 - DNA, 25 bp, Homo sapien
gctcttgagcgagccccgcttgaag

SEQ ID NO: 4523773 - DNA, 25 bp, Homo sapien
accctgatgtggagctcttgagcga

SEQ ID NO: 4523774 - DNA, 25 bp, Homo sapien
gatgtggagctcttgagcgagcccc

SEQ ID NO: 4523775 - DNA, 25 bp, Homo sapien
cctgctgactccctcgggtggccag

SEQ ID NO: 4523776 - DNA, 25 bp, Homo sapien
gaggctggttcagcctaggaggagc

SEQ ID NO: 4523777 - DNA, 25 bp, Homo sapien
gccggccggaggctggttcagccta

SEQ ID NO: 4523778 - DNA, 25 bp, Homo sapien
ctggttcagcctaggaggagcatgt

SEQ ID NO: 4523779 - DNA, 25 bp, Homo sapien
ttcagcctaggaggagcatgtgctg

SEQ ID NO: 4523780 - DNA, 25 bp, Homo sapien
gcgggagaccagcacagatcagcgc

SEQ ID NO: 4523781 - DNA, 25 bp, Homo sapien
ggccaagcggacacttggaagcccc

SEQ ID NO: 4523782 - DNA, 25 bp, Homo sapien
tcagcggttgacagatgggatccat

SEQ ID NO: 4523783 - DNA, 25 bp, Homo sapien
acctgctcgccaggatccgggatga

SEQ ID NO: 4523784 - DNA, 25 bp, Homo sapien
ggcttgcttgaccagggtgcccact

SEQ ID NO: 4523785 - DNA, 25 bp, Homo sapien
tcctttcgcagtagacacatggtgg

SEQ ID NO: 4523786 - DNA, 25 bp, Homo sapien
gggacaccaaacacttgcctgtcaa

SEQ ID NO: 4523787 - DNA, 25 bp, Homo sapien
cacatggtggtctcaggagctaaca

SEQ ID NO: 4523788 - DNA, 25 bp, Homo sapien
tggctcagcccagcgttcacagagg

SEQ ID NO: 4523789 - DNA, 25 bp, Homo sapien
tggaaataccttctcaaacctggag

SEQ ID NO: 4523790 - DNA, 25 bp, Homo sapien
cattctggcgagagatttggaaagc

SEQ ID NO: 4523791 - DNA, 25 bp, Homo sapien
cacagaaggatgcagattgtgcaac

SEQ ID NO: 4523792 - DNA, 25 bp, Homo sapien
tgggcccctgaaccaccccgcgcgc

SEQ ID NO: 4523793 - DNA, 25 bp, Homo sapien
gatgggcccctgaaccaccccgcgc

SEQ ID NO: 4523794 - DNA, 25 bp, Homo sapien
gcgcgggaggcggagaggatgggcc

SEQ ID NO: 4523795 - DNA, 25 bp, Homo sapien
gcgcgcgggaggcggagaggatggg

SEQ ID NO: 4523796 - DNA, 25 bp, Homo sapien
taacttaaatatctggctacatcgc

SEQ ID NO: 4523797 - DNA, 25 bp, Homo sapien
tgctcagctcagatccataacctga

SEQ ID NO: 4523798 - DNA, 25 bp, Homo sapien
gataggagcctcttctgtacctcgg

SEQ ID NO: 4523799 - DNA, 25 bp, Homo sapien
cagagtaagagcaggcctgtgatag

SEQ ID NO: 4523800 - DNA, 25 bp, Homo sapien
gaaaagagactgacctgctctgagc

SEQ ID NO: 4523801 - DNA, 25 bp, Homo sapien
taatatcggtctccagcctaccggc

SEQ ID NO: 4523802 - DNA, 25 bp, Homo sapien
tagagcaggtgagctttaccctaac

SEQ ID NO: 4523803 - DNA, 25 bp, Homo sapien
tgtgaactccaacttgtaatatcgg

SEQ ID NO: 4523804 - DNA, 25 bp, Homo sapien
catatgaatgaaagcccgctgagac

SEQ ID NO: 4523805 - DNA, 25 bp, Homo sapien
cagccatttctaagagagggtgaag

SEQ ID NO: 4523806 - DNA, 25 bp, Homo sapien
tgcagagtagttcttgcacacaact

SEQ ID NO: 4523807 - DNA, 25 bp, Homo sapien
caggccaggacgttgcaaaggcaga

SEQ ID NO: 4523808 - DNA, 25 bp, Homo sapien
gcgtttcaccacgaatctgatctcc

SEQ ID NO: 4523809 - DNA, 25 bp, Homo sapien
gaatctgatctcctccgctttatat

SEQ ID NO: 4523810 - DNA, 25 bp, Homo sapien
tggctctattgcgtttcaccacgaa

SEQ ID NO: 4523811 - DNA, 25 bp, Homo sapien
aggccattggctctattgcgtttca

SEQ ID NO: 4523812 - DNA, 25 bp, Homo sapien
actctgattgaaaaacatccctgtg

SEQ ID NO: 4523813 - DNA, 25 bp, Homo sapien
gggacacttggtataactctgattg

SEQ ID NO: 4523814 - DNA, 25 bp, Homo sapien
gaaagtgtttagtcagcagtcctga

SEQ ID NO: 4523815 - DNA, 25 bp, Homo sapien
gaacctgcgttgttcaagggtccac

SEQ ID NO: 4523816 - DNA, 25 bp, Homo sapien
gggcaaatggtgactgatgattcac

SEQ ID NO: 4523817 - DNA, 25 bp, Homo sapien
gggagaggcgggtgtcggcaaggac

SEQ ID NO: 4523818 - DNA, 25 bp, Homo sapien
gggtgtcggcaaggaccttcctcca

SEQ ID NO: 4523819 - DNA, 25 bp, Homo sapien
cctccaagacagggttgctgcgagg

SEQ ID NO: 4523820 - DNA, 25 bp, Homo sapien
cctgtaagccaggtgggatcagtgc

SEQ ID NO: 4523821 - DNA, 25 bp, Homo sapien
tcatgtggagctcagcaaacggtgg

SEQ ID NO: 4523822 - DNA, 25 bp, Homo sapien
gatcagtgcggcctgtcgtctgctg

SEQ ID NO: 4523823 - DNA, 25 bp, Homo sapien
gctgttgtcatgtggagctcagcaa

SEQ ID NO: 4523824 - DNA, 25 bp, Homo sapien
ctaggggacaacatacacagcttag

SEQ ID NO: 4523825 - DNA, 25 bp, Homo sapien
gcccctctcttcgagcctaatttag

SEQ ID NO: 4523826 - DNA, 25 bp, Homo sapien
acatacacagcttagcagcaggtgc

SEQ ID NO: 4523827 - DNA, 25 bp, Homo sapien
gtgcccctctcttcgagcctaattt

SEQ ID NO: 4523828 - DNA, 25 bp, Homo sapien
tcctgtcgagtctgttgtggtcccc

SEQ ID NO: 4523829 - DNA, 25 bp, Homo sapien
cagagcgcctgaccaagcgtgagaa

SEQ ID NO: 4523830 - DNA, 25 bp, Homo sapien
ctgccttgggcccaaccggtggatc

SEQ ID NO: 4523831 - DNA, 25 bp, Homo sapien
ggaaaagcctggatctccgacatct

SEQ ID NO: 4523832 - DNA, 25 bp, Homo sapien
gactttgaaatacctcggagcagct

SEQ ID NO: 4523833 - DNA, 25 bp, Homo sapien
tgcggactggcacttctcgagggaa

SEQ ID NO: 4523834 - DNA, 25 bp, Homo sapien
agtcatcgcagctgccatggagcca

SEQ ID NO: 4523835 - DNA, 25 bp, Homo sapien
ttctcacgggcaaaccctctgctgg

SEQ ID NO: 4523836 - DNA, 25 bp, Homo sapien
tgtcccaaatctgatggtggagcag

SEQ ID NO: 4523837 - DNA, 25 bp, Homo sapien
gtcccaaatctgatggtggagcagc

SEQ ID NO: 4523838 - DNA, 25 bp, Homo sapien
gtgtcccaaatctgatggtggagca

SEQ ID NO: 4523839 - DNA, 25 bp, Homo sapien
ggtgtcccaaatctgatggtggagc

SEQ ID NO: 4523840 - DNA, 25 bp, Homo sapien
gtagagaccaacaggcaggctctgt

SEQ ID NO: 4523841 - DNA, 25 bp, Homo sapien
agagaccaacaggcaggctctgtgc

SEQ ID NO: 4523842 - DNA, 25 bp, Homo sapien
gggtagagaccaacaggcaggctct

SEQ ID NO: 4523843 - DNA, 25 bp, Homo sapien
tagagaccaacaggcaggctctgtg

SEQ ID NO: 4523844 - DNA, 25 bp, Homo sapien
gcatggtgaacactcccatctttat

SEQ ID NO: 4523845 - DNA, 25 bp, Homo sapien
ccatctttatcacatcagtaattct

SEQ ID NO: 4523846 - DNA, 25 bp, Homo sapien
actcccatctttatcacatcagtaa

SEQ ID NO: 4523847 - DNA, 25 bp, Homo sapien
tttatcacatcagtaattcttgcta

SEQ ID NO: 4523848 - DNA, 25 bp, Homo sapien
gacatactgggttgatccatccatg

SEQ ID NO: 4523849 - DNA, 25 bp, Homo sapien
acagaatgctctgcccattaggaag

SEQ ID NO: 4523850 - DNA, 25 bp, Homo sapien
catgaagtgaatgaccaggtgcgcc

SEQ ID NO: 4523851 - DNA, 25 bp, Homo sapien
cttgggccttggaaacatgaagtga

SEQ ID NO: 4523852 - DNA, 25 bp, Homo sapien
gtgttcatctgctccgatgaagaag

SEQ ID NO: 4523853 - DNA, 25 bp, Homo sapien
gaagctccatgtggcgcagcagctg

SEQ ID NO: 4523854 - DNA, 25 bp, Homo sapien
tatggtagtccactctcatccacca

SEQ ID NO: 4523855 - DNA, 25 bp, Homo sapien
catgggaaagtttatggtagtccac

SEQ ID NO: 4523856 - DNA, 25 bp, Homo sapien
ctgaagacctgctggaatgtgggaa

SEQ ID NO: 4523857 - DNA, 25 bp, Homo sapien
gaggacttttctattcagtgagagc

SEQ ID NO: 4523858 - DNA, 25 bp, Homo sapien
gctttgccatcagaccacatgcgtc

SEQ ID NO: 4523859 - DNA, 25 bp, Homo sapien
ggtcctgcccgatggccatggtgtt

SEQ ID NO: 4523860 - DNA, 25 bp, Homo sapien
gtgtctatctgcaaataactcacag

SEQ ID NO: 4523861 - DNA, 25 bp, Homo sapien
cagcgtgtgtctatctgcaaataac

SEQ ID NO: 4523862 - DNA, 25 bp, Homo sapien
tctcgcacagcgtgtgtctatctgc

SEQ ID NO: 4523863 - DNA, 25 bp, Homo sapien
gggttgttctctcgcacagcgtgtg

SEQ ID NO: 4523864 - DNA, 25 bp, Homo sapien
tttatagaccaaaggtgacgctgag

SEQ ID NO: 4523865 - DNA, 25 bp, Homo sapien
tgagagcctctggaagttcgcattg

SEQ ID NO: 4523866 - DNA, 25 bp, Homo sapien
aagtcatttgcgctgagagtctgca

SEQ ID NO: 4523867 - DNA, 25 bp, Homo sapien
tctgaagtggctgctcaacgagagg

SEQ ID NO: 4523868 - DNA, 25 bp, Homo sapien
ctctgcaccagcaacattggcgggt

SEQ ID NO: 4523869 - DNA, 25 bp, Homo sapien
cactggtggcagcattgtctcagga

SEQ ID NO: 4523870 - DNA, 25 bp, Homo sapien
caacattggcgggtcattgtcccac

SEQ ID NO: 4523871 - DNA, 25 bp, Homo sapien
gcgggtcattgtcccactggtggca

SEQ ID NO: 4523872 - DNA, 25 bp, Homo sapien
ggaggatcacttgggaggatcactt

SEQ ID NO: 4523873 - DNA, 25 bp, Homo sapien
tcaaggttagagtgagctatgattg

SEQ ID NO: 4523874 - DNA, 25 bp, Homo sapien
taccactgtactccagtctgggtgg

SEQ ID NO: 4523875 - DNA, 25 bp, Homo sapien
gagcccaggagttcaaggttagagt

SEQ ID NO: 4523876 - DNA, 25 bp, Homo sapien
ggccagcctcaagtgtaggatcctg

SEQ ID NO: 4523877 - DNA, 25 bp, Homo sapien
ctcaagtgtaggatcctggaatccg

SEQ ID NO: 4523878 - DNA, 25 bp, Homo sapien
gtcttcacaatgaccgcaaggccag

SEQ ID NO: 4523879 - DNA, 25 bp, Homo sapien
tccgttctgcacagaagtgtggcct

SEQ ID NO: 4523880 - DNA, 25 bp, Homo sapien
gaggcccacaatgcggctttgtgtg

SEQ ID NO: 4523881 - DNA, 25 bp, Homo sapien
cacacgcagagtgtctggggcagtc

SEQ ID NO: 4523882 - DNA, 25 bp, Homo sapien
caagaggaggcccacaatgcggctt

SEQ ID NO: 4523883 - DNA, 25 bp, Homo sapien
ccacaatgcggctttgtgtggcagc

SEQ ID NO: 4523884 - DNA, 25 bp, Homo sapien
tgcccgagtgacttggcctggatct

SEQ ID NO: 4523885 - DNA, 25 bp, Homo sapien
ctgcccagtggcgaggtcccttggg

SEQ ID NO: 4523886 - DNA, 25 bp, Homo sapien
agcagggaccatcccctgcttcgtg

SEQ ID NO: 4523887 - DNA, 25 bp, Homo sapien
gacagcccatctgccacggctgccc

SEQ ID NO: 4523888 - DNA, 25 bp, Homo sapien
cctaggctggctggatgtgccgcaa

SEQ ID NO: 4523889 - DNA, 25 bp, Homo sapien
tgccacatgccgttaggacctaggt

SEQ ID NO: 4523890 - DNA, 25 bp, Homo sapien
cactgtccagcgagagttggagctc

SEQ ID NO: 4523891 - DNA, 25 bp, Homo sapien
ttggagctcgctgagtgccacatgc

SEQ ID NO: 4523892 - DNA, 25 bp, Homo sapien
gacaggaactgtgtaggaaaagctg

SEQ ID NO: 4523893 - DNA, 25 bp, Homo sapien
ctagggccgtgccagtcacagatgc

SEQ ID NO: 4523894 - DNA, 25 bp, Homo sapien
tttcctgaggccttgacagagacag

SEQ ID NO: 4523895 - DNA, 25 bp, Homo sapien
ccgcaggcagcggcctttcctgagg

SEQ ID NO: 4523896 - DNA, 25 bp, Homo sapien
tcttcagcaccgaggagatatttat

SEQ ID NO: 4523897 - DNA, 25 bp, Homo sapien
ccgggtggtcgtctcctgtggatca

SEQ ID NO: 4523898 - DNA, 25 bp, Homo sapien
atgagaggcaggacgatgctcccca

SEQ ID NO: 4523899 - DNA, 25 bp, Homo sapien
tgcagccccgggtggtcgtctcctg

SEQ ID NO: 4523900 - DNA, 25 bp, Homo sapien
cgtgctcccctgacagactggatct

SEQ ID NO: 4523901 - DNA, 25 bp, Homo sapien
ttggctgcagctgcgtgcttctcac

SEQ ID NO: 4523902 - DNA, 25 bp, Homo sapien
gcagctgcgtgcttctcaccgtgct

SEQ ID NO: 4523903 - DNA, 25 bp, Homo sapien
cagactggatctgagatcttccccg

SEQ ID NO: 4523904 - DNA, 25 bp, Homo sapien
accagatctcccccaatgggtctgt

SEQ ID NO: 4523905 - DNA, 25 bp, Homo sapien
gcccaccagatctcccccaatgggt

SEQ ID NO: 4523906 - DNA, 25 bp, Homo sapien
aaccaatggcagagccaccagctgc

SEQ ID NO: 4523907 - DNA, 25 bp, Homo sapien
tgggagaaccaatggcagagccacc

SEQ ID NO: 4523908 - DNA, 25 bp, Homo sapien
cattgctggttttaatctttccccg

SEQ ID NO: 4523909 - DNA, 25 bp, Homo sapien
tctccagtgtttcgatggctcggat

SEQ ID NO: 4523910 - DNA, 25 bp, Homo sapien
tgtgcaccagatgtgaagttggctt

SEQ ID NO: 4523911 - DNA, 25 bp, Homo sapien
gctcggattcagaagcattgctggt

SEQ ID NO: 4523912 - DNA, 25 bp, Homo sapien
ctcaaattcctgttatcctgtctct

SEQ ID NO: 4523913 - DNA, 25 bp, Homo sapien
aattcctgttatcctgtctctgggc

SEQ ID NO: 4523914 - DNA, 25 bp, Homo sapien
cctgtctctgggctctagactcaga

SEQ ID NO: 4523915 - DNA, 25 bp, Homo sapien
caaattcctgttatcctgtctctgg

SEQ ID NO: 4523916 - DNA, 25 bp, Homo sapien
gaatagtgcagactctagacggcct

SEQ ID NO: 4523917 - DNA, 25 bp, Homo sapien
gagggtagcaactcaatcagcgaga

SEQ ID NO: 4523918 - DNA, 25 bp, Homo sapien
aatttggtgagaactcgaactcggc

SEQ ID NO: 4523919 - DNA, 25 bp, Homo sapien
gataagctggtgtaggaccactcct

SEQ ID NO: 4523920 - DNA, 25 bp, Homo sapien
cgagtctgtccctcccgcgggagct

SEQ ID NO: 4523921 - DNA, 25 bp, Homo sapien
tgacccgagctgaagggcagcgcgg

SEQ ID NO: 4523922 - DNA, 25 bp, Homo sapien
gaccccaggaacgagcccgagtctg

SEQ ID NO: 4523923 - DNA, 25 bp, Homo sapien
cagtcctgctcgggctgacccgagc

SEQ ID NO: 4523924 - DNA, 25 bp, Homo sapien
cggagggcgcggcgcgagtgcgttc

SEQ ID NO: 4523925 - DNA, 25 bp, Homo sapien
gcgagtgcgttccgcccctaggcag

SEQ ID NO: 4523926 - DNA, 25 bp, Homo sapien
gccgggcagacacgcctccccgccg

SEQ ID NO: 4523927 - DNA, 25 bp, Homo sapien
gggcagacacgcctccccgccggcg

SEQ ID NO: 4523928 - DNA, 25 bp, Homo sapien
cagaaacttggctgcactccgtggc

SEQ ID NO: 4523929 - DNA, 25 bp, Homo sapien
cactccgtggccattggccagtctg

SEQ ID NO: 4523930 - DNA, 25 bp, Homo sapien
aaacttggctgcactccgtggccat

SEQ ID NO: 4523931 - DNA, 25 bp, Homo sapien
gaaacttggctgcactccgtggcca

SEQ ID NO: 4523932 - DNA, 25 bp, Homo sapien
ccttgtgcttccatatgtgggtcca

SEQ ID NO: 4523933 - DNA, 25 bp, Homo sapien
atcctttcccggtctggcctcgttg

SEQ ID NO: 4523934 - DNA, 25 bp, Homo sapien
acaaagcagtgaccccaagacctat

SEQ ID NO: 4523935 - DNA, 25 bp, Homo sapien
cctggagtaaggagagcctgtgaac

SEQ ID NO: 4523936 - DNA, 25 bp, Homo sapien
tgccccgttgtcctcacctgcatga

SEQ ID NO: 4523937 - DNA, 25 bp, Homo sapien
ccgttgtcctcacctgcatgactgt

SEQ ID NO: 4523938 - DNA, 25 bp, Homo sapien
tgtcctcacctgcatgactgtccat

SEQ ID NO: 4523939 - DNA, 25 bp, Homo sapien
gttgtcctcacctgcatgactgtcc

SEQ ID NO: 4523940 - DNA, 25 bp, Homo sapien
ccttggacagcagcacgttaggacc

SEQ ID NO: 4523941 - DNA, 25 bp, Homo sapien
gcttgtccaccagttgttgtttttg

SEQ ID NO: 4523942 - DNA, 25 bp, Homo sapien
tcttctagcacggatggtgtggcag

SEQ ID NO: 4523943 - DNA, 25 bp, Homo sapien
ttctcctgtgcttgtccaccagttg

SEQ ID NO: 4523944 - DNA, 25 bp, Homo sapien
ctgggtgctcagttcctttcttgtc

SEQ ID NO: 4523945 - DNA, 25 bp, Homo sapien
ctagcctgagccataactcctgttg

SEQ ID NO: 4523946 - DNA, 25 bp, Homo sapien
ggccagttcattggccgtcacctct

SEQ ID NO: 4523947 - DNA, 25 bp, Homo sapien
ctgagccataactcctgttgtgggc

SEQ ID NO: 4523948 - DNA, 25 bp, Homo sapien
ttcattggccgtcacctctctgcag

SEQ ID NO: 4523949 - DNA, 25 bp, Homo sapien
ctgcatttctctgcggccccaacac

SEQ ID NO: 4523950 - DNA, 25 bp, Homo sapien
ctgtagctctgtgtacctcacatgc

SEQ ID NO: 4523951 - DNA, 25 bp, Homo sapien
ccaacaccatgtggtccacctgtag

SEQ ID NO: 4523952 - DNA, 25 bp, Homo sapien
tggcaccaacgtcccatccattgga

SEQ ID NO: 4523953 - DNA, 25 bp, Homo sapien
gctgtgctgaggccggtcgtgcgca

SEQ ID NO: 4523954 - DNA, 25 bp, Homo sapien
ctgtgctgaggccggtcgtgcgcag

SEQ ID NO: 4523955 - DNA, 25 bp, Homo sapien
aggcgctgtgctgaggccggtcgtg

SEQ ID NO: 4523956 - DNA, 25 bp, Homo sapien
gcgctgtgctgaggccggtcgtgcg

SEQ ID NO: 4523957 - DNA, 25 bp, Homo sapien
cattctgtagcaagagaccggaaca

SEQ ID NO: 4523958 - DNA, 25 bp, Homo sapien
cgcacgggcacttttgttggaaaca

SEQ ID NO: 4523959 - DNA, 25 bp, Homo sapien
acttggaccttttcaggagtggcgc

SEQ ID NO: 4523960 - DNA, 25 bp, Homo sapien
tatttcctccgcagggaatgccaga

SEQ ID NO: 4523961 - DNA, 25 bp, Homo sapien
gctgttccgtctgatagatggaagg

SEQ ID NO: 4523962 - DNA, 25 bp, Homo sapien
aaacagaaatatgcaggcgttggct

SEQ ID NO: 4523963 - DNA, 25 bp, Homo sapien
ttttggcataagagcgtgtcttcat

SEQ ID NO: 4523964 - DNA, 25 bp, Homo sapien
aatgacccagggctgttccgtctga

SEQ ID NO: 4523965 - DNA, 25 bp, Homo sapien
agatttcagacttgcagtgcggcca

SEQ ID NO: 4523966 - DNA, 25 bp, Homo sapien
ccagaacttggatgcatagtccacc

SEQ ID NO: 4523967 - DNA, 25 bp, Homo sapien
cacattccggagacctttgtaccag

SEQ ID NO: 4523968 - DNA, 25 bp, Homo sapien
tgaaatcaggattaccccaggaaga

SEQ ID NO: 4523969 - DNA, 25 bp, Homo sapien
tggccttggcttgctcggataaaac

SEQ ID NO: 4523970 - DNA, 25 bp, Homo sapien
gaaaggaggcactactgagcaacta

SEQ ID NO: 4523971 - DNA, 25 bp, Homo sapien
aaaccaggtgtgtgagccgaatgcc

SEQ ID NO: 4523972 - DNA, 25 bp, Homo sapien
ccaaggcagaatccaagggtccaag

SEQ ID NO: 4523973 - DNA, 25 bp, Homo sapien
tgcctgcacagccgttgctcagggc

SEQ ID NO: 4523974 - DNA, 25 bp, Homo sapien
ctgcctgcacagccgttgctcaggg

SEQ ID NO: 4523975 - DNA, 25 bp, Homo sapien
gctgcctgcacagccgttgctcagg

SEQ ID NO: 4523976 - DNA, 25 bp, Homo sapien
aagcaagcttggcatggtctgtgtg

SEQ ID NO: 4523977 - DNA, 25 bp, Homo sapien
ctgggaagcaagcttggcatggtct

SEQ ID NO: 4523978 - DNA, 25 bp, Homo sapien
gaagcaagcttggcatggtctgtgt

SEQ ID NO: 4523979 - DNA, 25 bp, Homo sapien
gggaagcaagcttggcatggtctgt

SEQ ID NO: 4523980 - DNA, 25 bp, Homo sapien
gggaactgtacccatgccagatact

SEQ ID NO: 4523981 - DNA, 25 bp, Homo sapien
gttcccagtggtgtgcgagatgtca

SEQ ID NO: 4523982 - DNA, 25 bp, Homo sapien
tgcgagatgtcagatgctgggaact

SEQ ID NO: 4523983 - DNA, 25 bp, Homo sapien
gatgctgggaactgtacccatgcca

SEQ ID NO: 4523984 - DNA, 25 bp, Homo sapien
agctgctccctgtctcttgtctgtc

SEQ ID NO: 4523985 - DNA, 25 bp, Homo sapien
gggttttctgagatcgactgttggc

SEQ ID NO: 4523986 - DNA, 25 bp, Homo sapien
acactccagtgggttttctgagatc

SEQ ID NO: 4523987 - DNA, 25 bp, Homo sapien
cctgctcttttaaccataaacacac

SEQ ID NO: 4523988 - DNA, 25 bp, Homo sapien
cattcactgcctccgaagcgagcgg

SEQ ID NO: 4523989 - DNA, 25 bp, Homo sapien
tggaattcgtgaactgccggcccgg

SEQ ID NO: 4523990 - DNA, 25 bp, Homo sapien
aaggcagaggattcctgcgcggact

SEQ ID NO: 4523991 - DNA, 25 bp, Homo sapien
cccaggctctagtaagttcctggaa

SEQ ID NO: 4523992 - DNA, 25 bp, Homo sapien
tctgggtccctcaagcccagcagag

SEQ ID NO: 4523993 - DNA, 25 bp, Homo sapien
tgtccagctgtcaggtggcccaata

SEQ ID NO: 4523994 - DNA, 25 bp, Homo sapien
cagcagagcttgttatgtcccctaa

SEQ ID NO: 4523995 - DNA, 25 bp, Homo sapien
tgtaacacctgttgtgccggccagc

SEQ ID NO: 4523996 - DNA, 25 bp, Homo sapien
atgatggatacacgggcggccacgc

SEQ ID NO: 4523997 - DNA, 25 bp, Homo sapien
tcatgatggatacacgggcggccac

SEQ ID NO: 4523998 - DNA, 25 bp, Homo sapien
ctttaggactcacgcccaccatctc

SEQ ID NO: 4523999 - DNA, 25 bp, Homo sapien
gctctcctcccctttaggactcacg

SEQ ID NO: 4524000 - DNA, 25 bp, Homo sapien
ggctcttccacgagtctgaggctga

SEQ ID NO: 4524001 - DNA, 25 bp, Homo sapien
gccctcactgtgactcaactgtttc

SEQ ID NO: 4524002 - DNA, 25 bp, Homo sapien
tgccctcactgtgactcaactgttt

SEQ ID NO: 4524003 - DNA, 25 bp, Homo sapien
aggccggctcttccacgagtctgag

SEQ ID NO: 4524004 - DNA, 25 bp, Homo sapien
tggggcagggtctgcctccttagct

SEQ ID NO: 4524005 - DNA, 25 bp, Homo sapien
ggtctgcctccttagctttctgctt

SEQ ID NO: 4524006 - DNA, 25 bp, Homo sapien
ttctgcttcttatgcttgatgtccc

SEQ ID NO: 4524007 - DNA, 25 bp, Homo sapien
cagggtctgcctccttagctttctg

SEQ ID NO: 4524008 - DNA, 25 bp, Homo sapien
gtcttgacaggacccggcttagcca

SEQ ID NO: 4524009 - DNA, 25 bp, Homo sapien
ggtgcctttggaggtcgcaccacag

SEQ ID NO: 4524010 - DNA, 25 bp, Homo sapien
tggtgcctttggaggtcgcaccaca

SEQ ID NO: 4524011 - DNA, 25 bp, Homo sapien
agcgtcttgacaggacccggcttag

SEQ ID NO: 4524012 - DNA, 25 bp, Homo sapien
gcccggcgccctggcagcacaagcg

SEQ ID NO: 4524013 - DNA, 25 bp, Homo sapien
gcctgggccggccgccacccgagac

SEQ ID NO: 4524014 - DNA, 25 bp, Homo sapien
agtccagcgcctgggccggccgcca

SEQ ID NO: 4524015 - DNA, 25 bp, Homo sapien
ctgcagtccagcgcctgggccggcc

SEQ ID NO: 4524016 - DNA, 25 bp, Homo sapien
agtgaaacctactcccctggtgttg

SEQ ID NO: 4524017 - DNA, 25 bp, Homo sapien
tgatggcagtggttttggcagtccc

SEQ ID NO: 4524018 - DNA, 25 bp, Homo sapien
taaccaaccgcagatagaaaatact

SEQ ID NO: 4524019 - DNA, 25 bp, Homo sapien
cagacggagtcaatcaaatacagga

SEQ ID NO: 4524020 - DNA, 25 bp, Homo sapien
ctggagctaagagtgtgactcagct

SEQ ID NO: 4524021 - DNA, 25 bp, Homo sapien
ccagactcttgtactgcacagcaca

SEQ ID NO: 4524022 - DNA, 25 bp, Homo sapien
cagacaaacccagactcttgtactg

SEQ ID NO: 4524023 - DNA, 25 bp, Homo sapien
agccttggcccaagaagccgtctgg

SEQ ID NO: 4524024 - DNA, 25 bp, Homo sapien
tgcagctgtgcgacacctggactgg

SEQ ID NO: 4524025 - DNA, 25 bp, Homo sapien
gcacaggcagctgtaagtagaggtg

SEQ ID NO: 4524026 - DNA, 25 bp, Homo sapien
ttctggttacagaaggggtccgcca

SEQ ID NO: 4524027 - DNA, 25 bp, Homo sapien
ccccttagcttttgtgggcagagat

SEQ ID NO: 4524028 - DNA, 25 bp, Homo sapien
tggcagcacagatgagtggtgtcac

SEQ ID NO: 4524029 - DNA, 25 bp, Homo sapien
aggtggcaatgacggagtcatttcc

SEQ ID NO: 4524030 - DNA, 25 bp, Homo sapien
tcaaggtggcaatgacggagtcatt

SEQ ID NO: 4524031 - DNA, 25 bp, Homo sapien
ggagttcaaagtcaaggtggcaatg

SEQ ID NO: 4524032 - DNA, 25 bp, Homo sapien
caatgacggagtcatttcctaaagg

SEQ ID NO: 4524033 - DNA, 25 bp, Homo sapien
ggcttggcacccctaaagcagtggg

SEQ ID NO: 4524034 - DNA, 25 bp, Homo sapien
gcctttggatagcgacatgagcgca

SEQ ID NO: 4524035 - DNA, 25 bp, Homo sapien
gcgcagcattccagttcacagccag

SEQ ID NO: 4524036 - DNA, 25 bp, Homo sapien
cccctaaagcagtgggtgccttggc

SEQ ID NO: 4524037 - DNA, 25 bp, Homo sapien
ggcggaccagaatagcaacatgcgt

SEQ ID NO: 4524038 - DNA, 25 bp, Homo sapien
cagaatagcaacatgcgtgccagga

SEQ ID NO: 4524039 - DNA, 25 bp, Homo sapien
ctacacggcggaccagaatagcaac

SEQ ID NO: 4524040 - DNA, 25 bp, Homo sapien
atagcaacatgcgtgccaggaataa

SEQ ID NO: 4524041 - DNA, 25 bp, Homo sapien
caccatcgactgagccttcaaaggc

SEQ ID NO: 4524042 - DNA, 25 bp, Homo sapien
ccaaaggaaagggtgctaatcacac

SEQ ID NO: 4524043 - DNA, 25 bp, Homo sapien
gaaagggtgctaatcacaccatcga

SEQ ID NO: 4524044 - DNA, 25 bp, Homo sapien
gggcaaatcaagatcctggcaccca

SEQ ID NO: 4524045 - DNA, 25 bp, Homo sapien
tgagagcagggctgttatggacctc

SEQ ID NO: 4524046 - DNA, 25 bp, Homo sapien
caggccttccgttgccattcgtggc

SEQ ID NO: 4524047 - DNA, 25 bp, Homo sapien
caacccggcttcgagattggagcag

SEQ ID NO: 4524048 - DNA, 25 bp, Homo sapien
ggccgaggctacaggctgcagagat

SEQ ID NO: 4524049 - DNA, 25 bp, Homo sapien
gagccagatggacttgggtgtcacc

SEQ ID NO: 4524050 - DNA, 25 bp, Homo sapien
gccagatggacttgggtgtcaccat

SEQ ID NO: 4524051 - DNA, 25 bp, Homo sapien
cccacctggagccagatggacttgg

SEQ ID NO: 4524052 - DNA, 25 bp, Homo sapien
tggagccagatggacttgggtgtca

SEQ ID NO: 4524053 - DNA, 25 bp, Homo sapien
cctcctgggcaggggccttgcccat

SEQ ID NO: 4524054 - DNA, 25 bp, Homo sapien
cccccagactctgagctcctcctgg

SEQ ID NO: 4524055 - DNA, 25 bp, Homo sapien
ccagactctgagctcctcctgggca

SEQ ID NO: 4524056 - DNA, 25 bp, Homo sapien
tcctcctgggcaggggccttgccca

SEQ ID NO: 4524057 - DNA, 25 bp, Homo sapien
gattgacgacctacttttgcctcag

SEQ ID NO: 4524058 - DNA, 25 bp, Homo sapien
gcattgaattggaattaacacctgc

SEQ ID NO: 4524059 - DNA, 25 bp, Homo sapien
tcttctccaagaatggaccggattg

SEQ ID NO: 4524060 - DNA, 25 bp, Homo sapien
tattgagtaggcatcaaagcttctc

SEQ ID NO: 4524061 - DNA, 25 bp, Homo sapien
gaatgcacatgtgtgggcccactca

SEQ ID NO: 4524062 - DNA, 25 bp, Homo sapien
acagctgcagagagggcatcacgat

SEQ ID NO: 4524063 - DNA, 25 bp, Homo sapien
tcccacgagggacctgaaaatatgg

SEQ ID NO: 4524064 - DNA, 25 bp, Homo sapien
ggcttccagtctgtttgggcagcaa

SEQ ID NO: 4524065 - DNA, 25 bp, Homo sapien
gaaggtcattggaggacccacgcct

SEQ ID NO: 4524066 - DNA, 25 bp, Homo sapien
aatgtttgtgacaagctcctcttcc

SEQ ID NO: 4524067 - DNA, 25 bp, Homo sapien
ttgtcaatgcagttacccagccctg

SEQ ID NO: 4524068 - DNA, 25 bp, Homo sapien
tacccagccctgagccggttaatgt

SEQ ID NO: 4524069 - DNA, 25 bp, Homo sapien
gaatgattaacatctgcagcactca

SEQ ID NO: 4524070 - DNA, 25 bp, Homo sapien
cactcagatggtgataggtgcacaa

SEQ ID NO: 4524071 - DNA, 25 bp, Homo sapien
acataattaggattagtgaggcccc

SEQ ID NO: 4524072 - DNA, 25 bp, Homo sapien
tgtgactagaaacggcaggaaggcc

SEQ ID NO: 4524073 - DNA, 25 bp, Homo sapien
aagccagggctggtaaggtctgtct

SEQ ID NO: 4524074 - DNA, 25 bp, Homo sapien
atgaagccagggctggtaaggtctg

SEQ ID NO: 4524075 - DNA, 25 bp, Homo sapien
ctctgcagcccagcgaggatgaagc

SEQ ID NO: 4524076 - DNA, 25 bp, Homo sapien
ctagagcaggggccgcctctgcagc

SEQ ID NO: 4524077 - DNA, 25 bp, Homo sapien
ttctcaaggagcatgctgtcggtgc

SEQ ID NO: 4524078 - DNA, 25 bp, Homo sapien
tatctcaggctcttatttagggcac

SEQ ID NO: 4524079 - DNA, 25 bp, Homo sapien
tggcgcctcgttaccacattgagaa

SEQ ID NO: 4524080 - DNA, 25 bp, Homo sapien
tcttttaagagtgacgagcatgagg

SEQ ID NO: 4524081 - DNA, 25 bp, Homo sapien
cagtgagtccctttacctggctgaa

SEQ ID NO: 4524082 - DNA, 25 bp, Homo sapien
tcattgtgtcacgagacggaggcag

SEQ ID NO: 4524083 - DNA, 25 bp, Homo sapien
gctccagtgaagagatggtcgacct

SEQ ID NO: 4524084 - DNA, 25 bp, Homo sapien
tcaaaacagggtagctaaggacaca

SEQ ID NO: 4524085 - DNA, 25 bp, Homo sapien
gggtcaattcctcgctgtctcccgg

SEQ ID NO: 4524086 - DNA, 25 bp, Homo sapien
tgtctcccggggcaccgatggtcac

SEQ ID NO: 4524087 - DNA, 25 bp, Homo sapien
ccagcgacagtccactgtggaagtg

SEQ ID NO: 4524088 - DNA, 25 bp, Homo sapien
acagtgaccaaagggtcaattcctc

SEQ ID NO: 4524089 - DNA, 25 bp, Homo sapien
tattgagtttccacaggtacgaggc

SEQ ID NO: 4524090 - DNA, 25 bp, Homo sapien
tacgaggcagatgctaggctagcac

SEQ ID NO: 4524091 - DNA, 25 bp, Homo sapien
ggaaagctcctgtcacctgaactgc

SEQ ID NO: 4524092 - DNA, 25 bp, Homo sapien
caagggaccgctacctggaagaggt

SEQ ID NO: 4524093 - DNA, 25 bp, Homo sapien
tgtaaaaaagacaccgacacaatgg

SEQ ID NO: 4524094 - DNA, 25 bp, Homo sapien
gcaccattaggaacgtttgaccaaa

SEQ ID NO: 4524095 - DNA, 25 bp, Homo sapien
tccggtggaccagggcatgtaaaaa

SEQ ID NO: 4524096 - DNA, 25 bp, Homo sapien
ttgaccaaacacgtacacggcactg

SEQ ID NO: 4524097 - DNA, 25 bp, Homo sapien
cgccgcccgcgccgcgccgcgccgc

SEQ ID NO: 4524098 - DNA, 25 bp, Homo sapien
tcgccgcccgcgccgcgccgcgccg

SEQ ID NO: 4524099 - DNA, 25 bp, Homo sapien
ctcgccgcccgcgccgcgccgcgcc

SEQ ID NO: 4524100 - DNA, 25 bp, Homo sapien
cagctcctcgcggtagcagtaggag

SEQ ID NO: 4524101 - DNA, 25 bp, Homo sapien
agtgctcggtctcggcgcgcccgta

SEQ ID NO: 4524102 - DNA, 25 bp, Homo sapien
aggagcagtagtgctcggtctcggc

SEQ ID NO: 4524103 - DNA, 25 bp, Homo sapien
cctcgcggtagcagtaggagcagta

SEQ ID NO: 4524104 - DNA, 25 bp, Homo sapien
ccccgggccgccacggccgcactca

SEQ ID NO: 4524105 - DNA, 25 bp, Homo sapien
cagcgccgctgcaccggccccgggc

SEQ ID NO: 4524106 - DNA, 25 bp, Homo sapien
cccgggccgccacggccgcactcac

SEQ ID NO: 4524107 - DNA, 25 bp, Homo sapien
agttctcgcgctggcagcgccgctg

SEQ ID NO: 4524108 - DNA, 25 bp, Homo sapien
tcggcgtcggcgaactccaggccgt

SEQ ID NO: 4524109 - DNA, 25 bp, Homo sapien
cgcagggcgccgaagccgttggtgt

SEQ ID NO: 4524110 - DNA, 25 bp, Homo sapien
cagggcgccgaagccgttggtgtag

SEQ ID NO: 4524111 - DNA, 25 bp, Homo sapien
ttcgagcgcgcggtcggcgcgtcgg

SEQ ID NO: 4524112 - DNA, 25 bp, Homo sapien
gcgcgccagcgactcgaccgtgttg

SEQ ID NO: 4524113 - DNA, 25 bp, Homo sapien
gactcgaccgtgttgacggtgcgca

SEQ ID NO: 4524114 - DNA, 25 bp, Homo sapien
ccgggctgtagctctgcgacgacag

SEQ ID NO: 4524115 - DNA, 25 bp, Homo sapien
cagcgagcggttctgctgcgggtac

SEQ ID NO: 4524116 - DNA, 25 bp, Homo sapien
tggcgcacggccgcagcgcccccac

SEQ ID NO: 4524117 - DNA, 25 bp, Homo sapien
gtggcgcacggccgcagcgccccca

SEQ ID NO: 4524118 - DNA, 25 bp, Homo sapien
acgcctgcacgtggatgacgctctg

SEQ ID NO: 4524119 - DNA, 25 bp, Homo sapien
gcctgcacgtggatgacgctctggc

SEQ ID NO: 4524120 - DNA, 25 bp, Homo sapien
cgacgcctgcacgtggatgacgctc

SEQ ID NO: 4524121 - DNA, 25 bp, Homo sapien
ctgcacgtggatgacgctctggcgc

SEQ ID NO: 4524122 - DNA, 25 bp, Homo sapien
ctccgtctccggtctgcgcggcggc

SEQ ID NO: 4524123 - DNA, 25 bp, Homo sapien
ggcggccgcagtagcggcgtcgcgg

SEQ ID NO: 4524124 - DNA, 25 bp, Homo sapien
tgcggccaggcactggtccgctggc

SEQ ID NO: 4524125 - DNA, 25 bp, Homo sapien
tgctcggcgctgaagcgctcctgcg

SEQ ID NO: 4524126 - DNA, 25 bp, Homo sapien
cggcgaagatgaacttgcgctcccc

SEQ ID NO: 4524127 - DNA, 25 bp, Homo sapien
tccgtgctgtacttccaggcgtcgc

SEQ ID NO: 4524128 - DNA, 25 bp, Homo sapien
gcggcgcgcaggatgttgaggctca

SEQ ID NO: 4524129 - DNA, 25 bp, Homo sapien
tcagcttcacatccgtgctgtactt

SEQ ID NO: 4524130 - DNA, 25 bp, Homo sapien
gacgtgctggccgacgcaccagact

SEQ ID NO: 4524131 - DNA, 25 bp, Homo sapien
tgcccttgcgcgacttggccttctt

SEQ ID NO: 4524132 - DNA, 25 bp, Homo sapien
ttggcgcggcccatcttgccgtgca

SEQ ID NO: 4524133 - DNA, 25 bp, Homo sapien
ggccgagtccccgttcttgccattg

SEQ ID NO: 4524134 - DNA, 25 bp, Homo sapien
gagtcggcgcgcgtcttgtccttct

SEQ ID NO: 4524135 - DNA, 25 bp, Homo sapien
cttgtccttgccgttcttgccgtta

SEQ ID NO: 4524136 - DNA, 25 bp, Homo sapien
tcttgccgttattgctgttagaatt

SEQ ID NO: 4524137 - DNA, 25 bp, Homo sapien
ttgttggccacggagtcggcgcgcg

SEQ ID NO: 4524138 - DNA, 25 bp, Homo sapien
ctgccgaggccgtgggagactccgg

SEQ ID NO: 4524139 - DNA, 25 bp, Homo sapien
gagtcggccagggactgcacgtcct

SEQ ID NO: 4524140 - DNA, 25 bp, Homo sapien
cggtccgagtccagcgagtcggcca

SEQ ID NO: 4524141 - DNA, 25 bp, Homo sapien
gaatcgcggtccgagtccagcgagt

SEQ ID NO: 4524142 - DNA, 25 bp, Homo sapien
gccagagccacttcaagccatagcc

SEQ ID NO: 4524143 - DNA, 25 bp, Homo sapien
ccagagccacttcaagccatagcca

SEQ ID NO: 4524144 - DNA, 25 bp, Homo sapien
gggatccggatccacgtcacgttca

SEQ ID NO: 4524145 - DNA, 25 bp, Homo sapien
gatccacgtcacgttcatgtagctg

SEQ ID NO: 4524146 - DNA, 25 bp, Homo sapien
tgtctcggaggggatccggatccac

SEQ ID NO: 4524147 - DNA, 25 bp, Homo sapien
cttggcttctagcgacaggataagg

SEQ ID NO: 4524148 - DNA, 25 bp, Homo sapien
gccagccgggcgttatcgttgtcgt

SEQ ID NO: 4524149 - DNA, 25 bp, Homo sapien
gccagggtccactgcaaagtgcaga

SEQ ID NO: 4524150 - DNA, 25 bp, Homo sapien
tgctcagaatccgtcagggggatca

SEQ ID NO: 4524151 - DNA, 25 bp, Homo sapien
tcagaatccgtcagggggatcacgg

SEQ ID NO: 4524152 - DNA, 25 bp, Homo sapien
agacagagccgtgcttggagccccg

SEQ ID NO: 4524153 - DNA, 25 bp, Homo sapien
ccccaggcaggatggcaaggaaatt

SEQ ID NO: 4524154 - DNA, 25 bp, Homo sapien
agccgtgcttggagccccggcagtc

SEQ ID NO: 4524155 - DNA, 25 bp, Homo sapien
caggcaggatggcaaggaaattccc

SEQ ID NO: 4524156 - DNA, 25 bp, Homo sapien
agctgctttgcctctttgctggtgc

SEQ ID NO: 4524157 - DNA, 25 bp, Homo sapien
gctttgcctctttgctggtgcccat

SEQ ID NO: 4524158 - DNA, 25 bp, Homo sapien
cttggaccagctgctttgcctcttt

SEQ ID NO: 4524159 - DNA, 25 bp, Homo sapien
tgctttgcctctttgctggtgccca

SEQ ID NO: 4524160 - DNA, 25 bp, Homo sapien
caacttggacattttgggtctggct

SEQ ID NO: 4524161 - DNA, 25 bp, Homo sapien
gaagagctgcctgacaattgagaac

SEQ ID NO: 4524162 - DNA, 25 bp, Homo sapien
cacccgcttcccagggtagaattgc

SEQ ID NO: 4524163 - DNA, 25 bp, Homo sapien
tagtggcatccatggtctgtgggca

SEQ ID NO: 4524164 - DNA, 25 bp, Homo sapien
agatgtggccctgtgggacaatgac

SEQ ID NO: 4524165 - DNA, 25 bp, Homo sapien
accaaaaactcactccccacatcca

SEQ ID NO: 4524166 - DNA, 25 bp, Homo sapien
cagatgtggccctgtgggacaatga

SEQ ID NO: 4524167 - DNA, 25 bp, Homo sapien
tcagatgtggccctgtgggacaatg

SEQ ID NO: 4524168 - DNA, 25 bp, Homo sapien
tagatccctccgaatgggatgggtg

SEQ ID NO: 4524169 - DNA, 25 bp, Homo sapien
ggcatctgttgggagggacctccaa

SEQ ID NO: 4524170 - DNA, 25 bp, Homo sapien
agaaccagaggcgagcagtggcatc

SEQ ID NO: 4524171 - DNA, 25 bp, Homo sapien
ggcagagaaatgggcttgatcatag

SEQ ID NO: 4524172 - DNA, 25 bp, Homo sapien
cccgagattggtcagagcagttgca

SEQ ID NO: 4524173 - DNA, 25 bp, Homo sapien
gctccaggaccaagatgtaagtcag

SEQ ID NO: 4524174 - DNA, 25 bp, Homo sapien
aacagagtatgtgcgcttctcaagg

SEQ ID NO: 4524175 - DNA, 25 bp, Homo sapien
cctgcacaggtgtacaggagcccca

SEQ ID NO: 4524176 - DNA, 25 bp, Homo sapien
tgagtctcttaacattgtatctgcc

SEQ ID NO: 4524177 - DNA, 25 bp, Homo sapien
tgtatctgccacaacaacgatgggc

SEQ ID NO: 4524178 - DNA, 25 bp, Homo sapien
cttcttaatatatgggctaggacaa

SEQ ID NO: 4524179 - DNA, 25 bp, Homo sapien
ggctctcgtacacggggtcctcaga

SEQ ID NO: 4524180 - DNA, 25 bp, Homo sapien
gggtgccggccgctgtgaaggcgag

SEQ ID NO: 4524181 - DNA, 25 bp, Homo sapien
tcagaagatgagttggaaagagccc

SEQ ID NO: 4524182 - DNA, 25 bp, Homo sapien
ccggccgctgtgaaggcgagtctct

SEQ ID NO: 4524183 - DNA, 25 bp, Homo sapien
cccaccgtgggagcggtctcagaag

SEQ ID NO: 4524184 - DNA, 25 bp, Homo sapien
cctgtggtagcagggctattggctt

SEQ ID NO: 4524185 - DNA, 25 bp, Homo sapien
ggcagcccaccagagcctgtggtag

SEQ ID NO: 4524186 - DNA, 25 bp, Homo sapien
gcccaccagagcctgtggtagcagg

SEQ ID NO: 4524187 - DNA, 25 bp, Homo sapien
ctgcaggcggaggcagcccaccaga

SEQ ID NO: 4524188 - DNA, 25 bp, Homo sapien
cccaatggaggagaacagtgagaag

SEQ ID NO: 4524189 - DNA, 25 bp, Homo sapien
gctggaggggatgcgatgtgaatgt

SEQ ID NO: 4524190 - DNA, 25 bp, Homo sapien
tggatttcaatccagagctggaggg

SEQ ID NO: 4524191 - DNA, 25 bp, Homo sapien
ggatgcgatgtgaatgtgcagccca

SEQ ID NO: 4524192 - DNA, 25 bp, Homo sapien
gcagggaataacataatagcttata

SEQ ID NO: 4524193 - DNA, 25 bp, Homo sapien
aaattttgaaggcagggaataacat

SEQ ID NO: 4524194 - DNA, 25 bp, Homo sapien
ctttgtaagagtggtagagataagt

SEQ ID NO: 4524195 - DNA, 25 bp, Homo sapien
atttttcgaatagggtggaggagag

SEQ ID NO: 4524196 - DNA, 25 bp, Homo sapien
ctggctccttgtccaagacttaggg

SEQ ID NO: 4524197 - DNA, 25 bp, Homo sapien
tagggagggtcctggttctatacca

SEQ ID NO: 4524198 - DNA, 25 bp, Homo sapien
accaggagcctcagtgttgaaggca

SEQ ID NO: 4524199 - DNA, 25 bp, Homo sapien
gctccttgtccaagacttagggagg

SEQ ID NO: 4524200 - DNA, 25 bp, Homo sapien
tacccacagcgcagtcaggcaagag

SEQ ID NO: 4524201 - DNA, 25 bp, Homo sapien
taataaaggtcttctatgacaaacc

SEQ ID NO: 4524202 - DNA, 25 bp, Homo sapien
gaagtacccacagcgcagtcaggca

SEQ ID NO: 4524203 - DNA, 25 bp, Homo sapien
ctggaagtacccacagcgcagtcag

SEQ ID NO: 4524204 - DNA, 25 bp, Homo sapien
gggatgaataaagccaccttagttc

SEQ ID NO: 4524205 - DNA, 25 bp, Homo sapien
aagccaccttagttcttctcgccat

SEQ ID NO: 4524206 - DNA, 25 bp, Homo sapien
tgaataaagccaccttagttcttct

SEQ ID NO: 4524207 - DNA, 25 bp, Homo sapien
gctgggatgaataaagccaccttag

SEQ ID NO: 4524208 - DNA, 25 bp, Homo sapien
tgcatcactggcacaggattctgac

SEQ ID NO: 4524209 - DNA, 25 bp, Homo sapien
gaacagttacctaatcccattgagg

SEQ ID NO: 4524210 - DNA, 25 bp, Homo sapien
tgaaaccctagaaatgcctcctgca

SEQ ID NO: 4524211 - DNA, 25 bp, Homo sapien
gaggagacttaatgatcagaccaaa

SEQ ID NO: 4524212 - DNA, 25 bp, Homo sapien
tgagaccttctctaggagcaacacc

SEQ ID NO: 4524213 - DNA, 25 bp, Homo sapien
aactgaagaataagccgcggccaag

SEQ ID NO: 4524214 - DNA, 25 bp, Homo sapien
gaagtctttttgctgggaacacata

SEQ ID NO: 4524215 - DNA, 25 bp, Homo sapien
aacttcagagccaggttcgtgcgat

SEQ ID NO: 4524216 - DNA, 25 bp, Homo sapien
gctgtgccctgaaggcgcacacccc

SEQ ID NO: 4524217 - DNA, 25 bp, Homo sapien
cgcccgtgccgccattcttgctgaa

SEQ ID NO: 4524218 - DNA, 25 bp, Homo sapien
tgctgaagtgtgtgcgcggctcgct

SEQ ID NO: 4524219 - DNA, 25 bp, Homo sapien
tcagcagctccgtccactcccgctc

SEQ ID NO: 4524220 - DNA, 25 bp, Homo sapien
tgtgtgcgcggctcgctggaggcca

SEQ ID NO: 4524221 - DNA, 25 bp, Homo sapien
cgtcctcatcatggtatagagagct

SEQ ID NO: 4524222 - DNA, 25 bp, Homo sapien
tccacctccgcttcagggcttccct

SEQ ID NO: 4524223 - DNA, 25 bp, Homo sapien
cagctcccgtcctcatcatggtata

SEQ ID NO: 4524224 - DNA, 25 bp, Homo sapien
gagagctttccgtaacaccaggtcc

SEQ ID NO: 4524225 - DNA, 25 bp, Homo sapien
gctgaataggcctcaccgcaggtcc

SEQ ID NO: 4524226 - DNA, 25 bp, Homo sapien
gaataggcctcaccgcaggtccaaa

SEQ ID NO: 4524227 - DNA, 25 bp, Homo sapien
tgaataggcctcaccgcaggtccaa

SEQ ID NO: 4524228 - DNA, 25 bp, Homo sapien
aataggcctcaccgcaggtccaaag

SEQ ID NO: 4524229 - DNA, 25 bp, Homo sapien
tagcatatgtctttccttacgcagg

SEQ ID NO: 4524230 - DNA, 25 bp, Homo sapien
tgtctttccttacgcaggcctggag

SEQ ID NO: 4524231 - DNA, 25 bp, Homo sapien
agtgacatgggtgactctatttagt

SEQ ID NO: 4524232 - DNA, 25 bp, Homo sapien
gactctatttagtgtatgcttttcc

SEQ ID NO: 4524233 - DNA, 25 bp, Homo sapien
aggaagaagccgtttacagctcgtg

SEQ ID NO: 4524234 - DNA, 25 bp, Homo sapien
tttacagctcgtgcacacagtggac

SEQ ID NO: 4524235 - DNA, 25 bp, Homo sapien
ccagtgaagcagcatgtaaaaggca

SEQ ID NO: 4524236 - DNA, 25 bp, Homo sapien
gaagccgtttacagctcgtgcacac

SEQ ID NO: 4524237 - DNA, 25 bp, Homo sapien
gtatgtctaagaagttggccctcca

SEQ ID NO: 4524238 - DNA, 25 bp, Homo sapien
tggtacagtcatccccaagtatctg

SEQ ID NO: 4524239 - DNA, 25 bp, Homo sapien
gaagtctgatagttggctctgtgga

SEQ ID NO: 4524240 - DNA, 25 bp, Homo sapien
tatgagaagtcctagccagtgaaat

SEQ ID NO: 4524241 - DNA, 25 bp, Homo sapien
ttcccaactccccatgacataacca

SEQ ID NO: 4524242 - DNA, 25 bp, Homo sapien
agaacaggaacaagacacgggcact

SEQ ID NO: 4524243 - DNA, 25 bp, Homo sapien
ggctttgacagagtggtcattccca

SEQ ID NO: 4524244 - DNA, 25 bp, Homo sapien
aggaacaagacacgggcactggcat

SEQ ID NO: 4524245 - DNA, 25 bp, Homo sapien
tgggactgcggtattgccttcatgt

SEQ ID NO: 4524246 - DNA, 25 bp, Homo sapien
gcatcactgtgctttgcacgtgctt

SEQ ID NO: 4524247 - DNA, 25 bp, Homo sapien
gccatgggactgcggtattgccttc

SEQ ID NO: 4524248 - DNA, 25 bp, Homo sapien
actgtgctttgcacgtgcttctgtg

SEQ ID NO: 4524249 - DNA, 25 bp, Homo sapien
tgtgggagaccctttagcactggcc

SEQ ID NO: 4524250 - DNA, 25 bp, Homo sapien
tttgtacccagcaatactgagcagc

SEQ ID NO: 4524251 - DNA, 25 bp, Homo sapien
gagcagctttcttggatggccactt

SEQ ID NO: 4524252 - DNA, 25 bp, Homo sapien
gccagtgctttccagtgaccaaact

SEQ ID NO: 4524253 - DNA, 25 bp, Homo sapien
tacaccgccgtagcattcaacagag

SEQ ID NO: 4524254 - DNA, 25 bp, Homo sapien
taattttattgggtcttcgccgagc

SEQ ID NO: 4524255 - DNA, 25 bp, Homo sapien
tgtacacgtgtacacagaagccagg

SEQ ID NO: 4524256 - DNA, 25 bp, Homo sapien
caatggcatgaaagcaggtgtacac

SEQ ID NO: 4524257 - DNA, 25 bp, Homo sapien
tgggatgttagggtggtgaggaaac

SEQ ID NO: 4524258 - DNA, 25 bp, Homo sapien
gaagagagtttgtcttgcttcttga

SEQ ID NO: 4524259 - DNA, 25 bp, Homo sapien
gtcttgcttcttgaacgctttcttc

SEQ ID NO: 4524260 - DNA, 25 bp, Homo sapien
ttgaacgctttcttcattgggatgt

SEQ ID NO: 4524261 - DNA, 25 bp, Homo sapien
tcattcaacacccacggaggagttg

SEQ ID NO: 4524262 - DNA, 25 bp, Homo sapien
cattcaacacccacggaggagttgt

SEQ ID NO: 4524263 - DNA, 25 bp, Homo sapien
gcattcacttgccacgtgggaccgg

SEQ ID NO: 4524264 - DNA, 25 bp, Homo sapien
agtcccgctcgatgaagctcctgaa

SEQ ID NO: 4524265 - DNA, 25 bp, Homo sapien
ttgttgcctgctcgatcaagtcccg

SEQ ID NO: 4524266 - DNA, 25 bp, Homo sapien
tacacgctcaggtctggcaactgga

SEQ ID NO: 4524267 - DNA, 25 bp, Homo sapien
aaagatagccccaagggctgagtgg

SEQ ID NO: 4524268 - DNA, 25 bp, Homo sapien
agggctgagtgggtgtaggtgtggc

SEQ ID NO: 4524269 - DNA, 25 bp, Homo sapien
ccccaagggctgagtgggtgtaggt

SEQ ID NO: 4524270 - DNA, 25 bp, Homo sapien
ggaaagatagccccaagggctgagt

SEQ ID NO: 4524271 - DNA, 25 bp, Homo sapien
tgcaatcggtgggacagacaatctc

SEQ ID NO: 4524272 - DNA, 25 bp, Homo sapien
gaaacacggtgattcctaggacaac

SEQ ID NO: 4524273 - DNA, 25 bp, Homo sapien
gaactgccccatttttcggaatctg

SEQ ID NO: 4524274 - DNA, 25 bp, Homo sapien
tagagaatcgaggtgctatgtgcac

SEQ ID NO: 4524275 - DNA, 25 bp, Homo sapien
caatctctctggtagcagagagaag

SEQ ID NO: 4524276 - DNA, 25 bp, Homo sapien
ccaatctctctggtagcagagagaa

SEQ ID NO: 4524277 - DNA, 25 bp, Homo sapien
gatggatgataactgcgtgccccag

SEQ ID NO: 4524278 - DNA, 25 bp, Homo sapien
cttccccgactctcatctggaggag

SEQ ID NO: 4524279 - DNA, 25 bp, Homo sapien
gaagatggatgataactgcgtgccc

SEQ ID NO: 4524280 - DNA, 25 bp, Homo sapien
aggagcatccaccagagcctgtgct

SEQ ID NO: 4524281 - DNA, 25 bp, Homo sapien
gagaggcatacataatgttcttgga

SEQ ID NO: 4524282 - DNA, 25 bp, Homo sapien
aaagcatagcaatagaaggtgaggg

SEQ ID NO: 4524283 - DNA, 25 bp, Homo sapien
cagaacaaggtatggaaataggtcc

SEQ ID NO: 4524284 - DNA, 25 bp, Homo sapien
gcaaagctggcatttagttcagtgg

SEQ ID NO: 4524285 - DNA, 25 bp, Homo sapien
tgaacacatgtggcagattggctgt

SEQ ID NO: 4524286 - DNA, 25 bp, Homo sapien
cagagcggctgtcaggtcccagttt

SEQ ID NO: 4524287 - DNA, 25 bp, Homo sapien
tgcaggcagggtcgctccaccttgt

SEQ ID NO: 4524288 - DNA, 25 bp, Homo sapien
ccgggctgtggctctcgctctggct

SEQ ID NO: 4524289 - DNA, 25 bp, Homo sapien
aggtttgtatctgaagaaggtcagg

SEQ ID NO: 4524290 - DNA, 25 bp, Homo sapien
gtttgtatctgaagaaggtcaggtc

SEQ ID NO: 4524291 - DNA, 25 bp, Homo sapien
aagaggtttgtatctgaagaaggtc

SEQ ID NO: 4524292 - DNA, 25 bp, Homo sapien
tttgtatctgaagaaggtcaggtcc

SEQ ID NO: 4524293 - DNA, 25 bp, Homo sapien
caaggtcagtgtcagttctgcacca

SEQ ID NO: 4524294 - DNA, 25 bp, Homo sapien
tgtccaaggtcagtgtcagttctgc

SEQ ID NO: 4524295 - DNA, 25 bp, Homo sapien
tccaaggtcagtgtcagttctgcac

SEQ ID NO: 4524296 - DNA, 25 bp, Homo sapien
aggtcagtgtcagttctgcaccacc

SEQ ID NO: 4524297 - DNA, 25 bp, Homo sapien
gctggctgtagcactgagtccctgt

SEQ ID NO: 4524298 - DNA, 25 bp, Homo sapien
catggtagaatgaatgcccagagct

SEQ ID NO: 4524299 - DNA, 25 bp, Homo sapien
aaagtcccttcgcagtggtaaccag

SEQ ID NO: 4524300 - DNA, 25 bp, Homo sapien
taaagtcacctgattagcgacctga

SEQ ID NO: 4524301 - DNA, 25 bp, Homo sapien
tgagactccgggtctaactgagcca

SEQ ID NO: 4524302 - DNA, 25 bp, Homo sapien
cctggagtccagactggctattgga

SEQ ID NO: 4524303 - DNA, 25 bp, Homo sapien
gggtctaactgagccaccagggagc

SEQ ID NO: 4524304 - DNA, 25 bp, Homo sapien
aggtcctgcatgagactccgggtct

SEQ ID NO: 4524305 - DNA, 25 bp, Homo sapien
ctggcacccaaccattcccagtctt

SEQ ID NO: 4524306 - DNA, 25 bp, Homo sapien
tggcacccaaccattcccagtctta

SEQ ID NO: 4524307 - DNA, 25 bp, Homo sapien
tctggcacccaaccattcccagtct

SEQ ID NO: 4524308 - DNA, 25 bp, Homo sapien
ctctggcacccaaccattcccagtc

SEQ ID NO: 4524309 - DNA, 25 bp, Homo sapien
ttgtgaataatgagtgagtctcacg

SEQ ID NO: 4524310 - DNA, 25 bp, Homo sapien
cttgtgaataatgagtgagtctcac

SEQ ID NO: 4524311 - DNA, 25 bp, Homo sapien
gaatggcatggaattcctggacctc

SEQ ID NO: 4524312 - DNA, 25 bp, Homo sapien
ctggggctctcagccatgtgaaagg

SEQ ID NO: 4524313 - DNA, 25 bp, Homo sapien
ccatgtgaaagggaatggcatggaa

SEQ ID NO: 4524314 - DNA, 25 bp, Homo sapien
gcatggaattcctggacctcaggga

SEQ ID NO: 4524315 - DNA, 25 bp, Homo sapien
caggaaggtggatcacagttggagg

SEQ ID NO: 4524316 - DNA, 25 bp, Homo sapien
ggtgagtgagcactcaccactgcca

SEQ ID NO: 4524317 - DNA, 25 bp, Homo sapien
tgaggtgagtgagcactcaccactg

SEQ ID NO: 4524318 - DNA, 25 bp, Homo sapien
ggtgaggtgagtgagcactcaccac

SEQ ID NO: 4524319 - DNA, 25 bp, Homo sapien
cactaggtggcgcttgtgccagaca

SEQ ID NO: 4524320 - DNA, 25 bp, Homo sapien
cccaggctggccactaggtggcgct

SEQ ID NO: 4524321 - DNA, 25 bp, Homo sapien
gaacttggaatttgtggtctgaacc

SEQ ID NO: 4524322 - DNA, 25 bp, Homo sapien
cagcaaccacaatccacacaagtct

SEQ ID NO: 4524323 - DNA, 25 bp, Homo sapien
aaaacacactggctgggctcactac

SEQ ID NO: 4524324 - DNA, 25 bp, Homo sapien
taacagacaaagcttgaaaaccttg

SEQ ID NO: 4524325 - DNA, 25 bp, Homo sapien
gggccgagcttcctatcatctgagt

SEQ ID NO: 4524326 - DNA, 25 bp, Homo sapien
gaaaaccttgaacagaaccatagag

SEQ ID NO: 4524327 - DNA, 25 bp, Homo sapien
ctcacagataacatgatcacctatg

SEQ ID NO: 4524328 - DNA, 25 bp, Homo sapien
cttcacctgataaagaccatctact

SEQ ID NO: 4524329 - DNA, 25 bp, Homo sapien
gaccatctactaaaacctatagcca

SEQ ID NO: 4524330 - DNA, 25 bp, Homo sapien
gaatagtcttcgtcagtgaaataag

SEQ ID NO: 4524331 - DNA, 25 bp, Homo sapien
taatggaggcccaagcaaatggaaa

SEQ ID NO: 4524332 - DNA, 25 bp, Homo sapien
gactgaaagacataacataggattg

SEQ ID NO: 4524333 - DNA, 25 bp, Homo sapien
tataggatctacatgccaaaaacca

SEQ ID NO: 4524334 - DNA, 25 bp, Homo sapien
gaaattatggcactccttcatggac

SEQ ID NO: 4524335 - DNA, 25 bp, Homo sapien
tatgcccagaatggtggtgtgggga

SEQ ID NO: 4524336 - DNA, 25 bp, Homo sapien
tgtggggaacaaggaggtgggctta

SEQ ID NO: 4524337 - DNA, 25 bp, Homo sapien
ttatgcccagaatggtggtgtgggg

SEQ ID NO: 4524338 - DNA, 25 bp, Homo sapien
atggtggtgtggggaacaaggaggt

SEQ ID NO: 4524339 - DNA, 25 bp, Homo sapien
caggtctctggccagaccaggttct

SEQ ID NO: 4524340 - DNA, 25 bp, Homo sapien
ggatcatgtagaagtgctgcccaac

SEQ ID NO: 4524341 - DNA, 25 bp, Homo sapien
ctgcgtccatatcaagagtcatagg

SEQ ID NO: 4524342 - DNA, 25 bp, Homo sapien
cccgtggaccgaacaaagtctgaca

SEQ ID NO: 4524343 - DNA, 25 bp, Homo sapien
gagaaagggcattttaccacgtgat

SEQ ID NO: 4524344 - DNA, 25 bp, Homo sapien
agtgacaactacatgcagagacctg

SEQ ID NO: 4524345 - DNA, 25 bp, Homo sapien
attttaccacgtgatggaaatggag

SEQ ID NO: 4524346 - DNA, 25 bp, Homo sapien
aaatggagctgcaagtgacaactac

SEQ ID NO: 4524347 - DNA, 25 bp, Homo sapien
agagtctcttctttcgtcactgcca

SEQ ID NO: 4524348 - DNA, 25 bp, Homo sapien
gagtctcttctttcgtcactgccac

SEQ ID NO: 4524349 - DNA, 25 bp, Homo sapien
cctcggccgggagagtctcttcttt

SEQ ID NO: 4524350 - DNA, 25 bp, Homo sapien
tcagccgctttgaacagcatgaggc

SEQ ID NO: 4524351 - DNA, 25 bp, Homo sapien
ctctgggtggccgtgccctggccct

SEQ ID NO: 4524352 - DNA, 25 bp, Homo sapien
ccgctttgaacagcatgaggctctg

SEQ ID NO: 4524353 - DNA, 25 bp, Homo sapien
ctttgaacagcatgaggctctgggt

SEQ ID NO: 4524354 - DNA, 25 bp, Homo sapien
cagctagagataaagatgagtctaa

SEQ ID NO: 4524355 - DNA, 25 bp, Homo sapien
ccagctagagataaagatgagtcta

SEQ ID NO: 4524356 - DNA, 25 bp, Homo sapien
ggacacccaatgggcccaatgggaa

SEQ ID NO: 4524357 - DNA, 25 bp, Homo sapien
gacacccaatgggcccaatgggaag

SEQ ID NO: 4524358 - DNA, 25 bp, Homo sapien
acacccaatgggcccaatgggaagg

SEQ ID NO: 4524359 - DNA, 25 bp, Homo sapien
tgtgtggcagtcaggcatgcaggcc

SEQ ID NO: 4524360 - DNA, 25 bp, Homo sapien
ggcatgcaggccaacactgcgccgt

SEQ ID NO: 4524361 - DNA, 25 bp, Homo sapien
agacacctgattctggaggtgtgtg

SEQ ID NO: 4524362 - DNA, 25 bp, Homo sapien
acacctgattctggaggtgtgtggc

SEQ ID NO: 4524363 - DNA, 25 bp, Homo sapien
caaatgccatgtttgtcacgaagct

SEQ ID NO: 4524364 - DNA, 25 bp, Homo sapien
gctcaaatgccatgtttgtcacgaa

SEQ ID NO: 4524365 - DNA, 25 bp, Homo sapien
cagctcaaatgccatgtttgtcacg

SEQ ID NO: 4524366 - DNA, 25 bp, Homo sapien
atgccatgtttgtcacgaagcttac

SEQ ID NO: 4524367 - DNA, 25 bp, Homo sapien
taggaaatgggctttaattcacaca

SEQ ID NO: 4524368 - DNA, 25 bp, Homo sapien
gggtgttcactccacggacgtgcag

SEQ ID NO: 4524369 - DNA, 25 bp, Homo sapien
ttatctcttggtggatggctttatc

SEQ ID NO: 4524370 - DNA, 25 bp, Homo sapien
cgtgcagtcccctggctgaaagaat

SEQ ID NO: 4524371 - DNA, 25 bp, Homo sapien
cattgggtaaaataagttcagatcc

SEQ ID NO: 4524372 - DNA, 25 bp, Homo sapien
gtaagtccaaaatatgtccgtaatg

SEQ ID NO: 4524373 - DNA, 25 bp, Homo sapien
tcgaaatgccaatacctctagaggg

SEQ ID NO: 4524374 - DNA, 25 bp, Homo sapien
gctatcagctaaactaagggtggga

SEQ ID NO: 4524375 - DNA, 25 bp, Homo sapien
agaacctccagtgcagacacgggtt

SEQ ID NO: 4524376 - DNA, 25 bp, Homo sapien
agaattctccgcagagaacctccag

SEQ ID NO: 4524377 - DNA, 25 bp, Homo sapien
gaattctccgcagagaacctccagt

SEQ ID NO: 4524378 - DNA, 25 bp, Homo sapien
gagaacctccagtgcagacacgggt

SEQ ID NO: 4524379 - DNA, 25 bp, Homo sapien
ttgtagtctatactcactgtcccat

SEQ ID NO: 4524380 - DNA, 25 bp, Homo sapien
gcttttatcttgtagtctatactca

SEQ ID NO: 4524381 - DNA, 25 bp, Homo sapien
gtcccatttccgtcagtactgactt

SEQ ID NO: 4524382 - DNA, 25 bp, Homo sapien
ccatttccgtcagtactgactttca

SEQ ID NO: 4524383 - DNA, 25 bp, Homo sapien
agaatccgagcggaatgccacagca

SEQ ID NO: 4524384 - DNA, 25 bp, Homo sapien
gacagaatccgagcggaatgccaca

SEQ ID NO: 4524385 - DNA, 25 bp, Homo sapien
tagacagaatccgagcggaatgcca

SEQ ID NO: 4524386 - DNA, 25 bp, Homo sapien
aatccgagcggaatgccacagcata

SEQ ID NO: 4524387 - DNA, 25 bp, Homo sapien
acaaaggtgccagcggggcaccaca

SEQ ID NO: 4524388 - DNA, 25 bp, Homo sapien
gagatgcagacgtccacaaaggtgc

SEQ ID NO: 4524389 - DNA, 25 bp, Homo sapien
catgagatgcagacgtccacaaagg

SEQ ID NO: 4524390 - DNA, 25 bp, Homo sapien
ctccatgagatgcagacgtccacaa

SEQ ID NO: 4524391 - DNA, 25 bp, Homo sapien
tgtgcaggtgtgtatttcggttcat

SEQ ID NO: 4524392 - DNA, 25 bp, Homo sapien
tgaaaggtccctagcacagtggtcc

SEQ ID NO: 4524393 - DNA, 25 bp, Homo sapien
ccaactggctgtcaaaaaggaaagt

SEQ ID NO: 4524394 - DNA, 25 bp, Homo sapien
tataagattacatcccagagacagc

SEQ ID NO: 4524395 - DNA, 25 bp, Homo sapien
cacttcgtggtcttacagttggcaa

SEQ ID NO: 4524396 - DNA, 25 bp, Homo sapien
ctcaatgttagaagtgacgatggca

SEQ ID NO: 4524397 - DNA, 25 bp, Homo sapien
ggaagattgttcctgcatgggtcaa

SEQ ID NO: 4524398 - DNA, 25 bp, Homo sapien
gatggcattgccacggttctttttg

SEQ ID NO: 4524399 - DNA, 25 bp, Homo sapien
tgttcaatgggaagattgttcctgc

SEQ ID NO: 4524400 - DNA, 25 bp, Homo sapien
ctccagtggggactccgctgaagat

SEQ ID NO: 4524401 - DNA, 25 bp, Homo sapien
ggactccgctgaagatgagcccagc

SEQ ID NO: 4524402 - DNA, 25 bp, Homo sapien
ccccttgcccagtcttgccccactg

SEQ ID NO: 4524403 - DNA, 25 bp, Homo sapien
gtggggactccgctgaagatgagcc

SEQ ID NO: 4524404 - DNA, 25 bp, Homo sapien
cacattgagaaacggtatgtatcaa

SEQ ID NO: 4524405 - DNA, 25 bp, Homo sapien
gaaacggtatgtatcaacagtgatc

SEQ ID NO: 4524406 - DNA, 25 bp, Homo sapien
tatgtatcaacagtgatctcgcacc

SEQ ID NO: 4524407 - DNA, 25 bp, Homo sapien
acagtgatctcgcacccattgcatc

SEQ ID NO: 4524408 - DNA, 25 bp, Homo sapien
ttcagccactggtgtattgataata

SEQ ID NO: 4524409 - DNA, 25 bp, Homo sapien
gccactggtgtattgataataacta

SEQ ID NO: 4524410 - DNA, 25 bp, Homo sapien
ccttgtccaacatttggtttcatgg

SEQ ID NO: 4524411 - DNA, 25 bp, Homo sapien
ggtttcatggtaatttcagccactg

SEQ ID NO: 4524412 - DNA, 25 bp, Homo sapien
tctgtagtctctcagtagaatctga

SEQ ID NO: 4524413 - DNA, 25 bp, Homo sapien
aacttcctcccattatgtcattagc

SEQ ID NO: 4524414 - DNA, 25 bp, Homo sapien
gaaatcctggattgcttatctgtag

SEQ ID NO: 4524415 - DNA, 25 bp, Homo sapien
gcaccttggtttgctgttagaggat

SEQ ID NO: 4524416 - DNA, 25 bp, Homo sapien
ctgtgattgttctgaatacatgtca

SEQ ID NO: 4524417 - DNA, 25 bp, Homo sapien
ccaaaatgttcacaagtaattcgta

SEQ ID NO: 4524418 - DNA, 25 bp, Homo sapien
aagtaagtagaggttcagggagatc

SEQ ID NO: 4524419 - DNA, 25 bp, Homo sapien
caagtaattcgtaatattcaaaagt

SEQ ID NO: 4524420 - DNA, 25 bp, Homo sapien
aggcacttcatggcagataataccc

SEQ ID NO: 4524421 - DNA, 25 bp, Homo sapien
ggcacttcatggcagataataccca

SEQ ID NO: 4524422 - DNA, 25 bp, Homo sapien
acttcatggcagataatacccagtg

SEQ ID NO: 4524423 - DNA, 25 bp, Homo sapien
gatttatgacttcttctagggatgg

SEQ ID NO: 4524424 - DNA, 25 bp, Homo sapien
atgacttcttctagggatggcacac

SEQ ID NO: 4524425 - DNA, 25 bp, Homo sapien
tttggatttatgacttcttctaggg

SEQ ID NO: 4524426 - DNA, 25 bp, Homo sapien
tgttttggatttatgacttcttcta

SEQ ID NO: 4524427 - DNA, 25 bp, Homo sapien
gccaacttgtatagcatagagggct

SEQ ID NO: 4524428 - DNA, 25 bp, Homo sapien
gtaggtgacactcaagacccagcag

SEQ ID NO: 4524429 - DNA, 25 bp, Homo sapien
catggcagtgtaggtgacactcaag

SEQ ID NO: 4524430 - DNA, 25 bp, Homo sapien
agtctcggcacaaccattggctctg

SEQ ID NO: 4524431 - DNA, 25 bp, Homo sapien
aatacttccagtgtgggacttccag

SEQ ID NO: 4524432 - DNA, 25 bp, Homo sapien
gacacatgtacttcctaaccactcg

SEQ ID NO: 4524433 - DNA, 25 bp, Homo sapien
ggacttccagatagcgacacatgta

SEQ ID NO: 4524434 - DNA, 25 bp, Homo sapien
taaccactcgggctttgcgggaatg

SEQ ID NO: 4524435 - DNA, 25 bp, Homo sapien
tggtgtgactggagatctgacagca

SEQ ID NO: 4524436 - DNA, 25 bp, Homo sapien
ggtgtgactggagatctgacagcac

SEQ ID NO: 4524437 - DNA, 25 bp, Homo sapien
gtgtgactggagatctgacagcaca

SEQ ID NO: 4524438 - DNA, 25 bp, Homo sapien
tgtgactggagatctgacagcacat

SEQ ID NO: 4524439 - DNA, 25 bp, Homo sapien
gactgacacccctgactacattcga

SEQ ID NO: 4524440 - DNA, 25 bp, Homo sapien
gctctaaatagcacctggatgatgt

SEQ ID NO: 4524441 - DNA, 25 bp, Homo sapien
gaagatactcagtcctaaccgagct

SEQ ID NO: 4524442 - DNA, 25 bp, Homo sapien
tgcctgaatgtgtctcctgactgac

SEQ ID NO: 4524443 - DNA, 25 bp, Homo sapien
gcaggcgctggcctcaatactggat

SEQ ID NO: 4524444 - DNA, 25 bp, Homo sapien
aggttcctctggcttggagcaccgt

SEQ ID NO: 4524445 - DNA, 25 bp, Homo sapien
cgctggcctcaatactggatgtcac

SEQ ID NO: 4524446 - DNA, 25 bp, Homo sapien
agcaccgttcgaaacaccatgctgg

SEQ ID NO: 4524447 - DNA, 25 bp, Homo sapien
tgctcgtcagcaggatggtatccat

SEQ ID NO: 4524448 - DNA, 25 bp, Homo sapien
caggacacatgctcacattcccatt

SEQ ID NO: 4524449 - DNA, 25 bp, Homo sapien
ttcttctgtttgctcgtcagcagga

SEQ ID NO: 4524450 - DNA, 25 bp, Homo sapien
catggggccaggtaagcaccttgag

SEQ ID NO: 4524451 - DNA, 25 bp, Homo sapien
gcctgtcctggcatccactcagcac

SEQ ID NO: 4524452 - DNA, 25 bp, Homo sapien
gcagcctgtcctggcatccactcag

SEQ ID NO: 4524453 - DNA, 25 bp, Homo sapien
ttgctgcagcctgtcctggcatcca

SEQ ID NO: 4524454 - DNA, 25 bp, Homo sapien
ccttgctgcagcctgtcctggcatc

SEQ ID NO: 4524455 - DNA, 25 bp, Homo sapien
agaagcacgtgtgagagccctgctc

SEQ ID NO: 4524456 - DNA, 25 bp, Homo sapien
ctcctcttctataaacttctatggc

SEQ ID NO: 4524457 - DNA, 25 bp, Homo sapien
tcctcttctataaacttctatggct

SEQ ID NO: 4524458 - DNA, 25 bp, Homo sapien
cagaagcacgtgtgagagccctgct

SEQ ID NO: 4524459 - DNA, 25 bp, Homo sapien
ttcccctggtctgactcagcagtca

SEQ ID NO: 4524460 - DNA, 25 bp, Homo sapien
gccatcaacctctaagctgcctctc

SEQ ID NO: 4524461 - DNA, 25 bp, Homo sapien
cagtcagaagtccacaaataggctc

SEQ ID NO: 4524462 - DNA, 25 bp, Homo sapien
gatcatgtgctcttccatatccaat

SEQ ID NO: 4524463 - DNA, 25 bp, Homo sapien
taatagtcttggatatccacagacc

SEQ ID NO: 4524464 - DNA, 25 bp, Homo sapien
aatagtcttggatatccacagacca

SEQ ID NO: 4524465 - DNA, 25 bp, Homo sapien
actgtgtcgtggcactgttgtcttc

SEQ ID NO: 4524466 - DNA, 25 bp, Homo sapien
cactgtgtcgtggcactgttgtctt

SEQ ID NO: 4524467 - DNA, 25 bp, Homo sapien
tcactgtgtcgtggcactgttgtct

SEQ ID NO: 4524468 - DNA, 25 bp, Homo sapien
ctgtgtcgtggcactgttgtcttcc

SEQ ID NO: 4524469 - DNA, 25 bp, Homo sapien
ggcaggtgataaggagtattgttca

SEQ ID NO: 4524470 - DNA, 25 bp, Homo sapien
gcagaaaggtgaggtcaaaaggccc

SEQ ID NO: 4524471 - DNA, 25 bp, Homo sapien
aaaggcccgagcagcccgctgagga

SEQ ID NO: 4524472 - DNA, 25 bp, Homo sapien
gcccgctgaggacctcttggagcag

SEQ ID NO: 4524473 - DNA, 25 bp, Homo sapien
cacaaagactcgtccaaggaaaaca

SEQ ID NO: 4524474 - DNA, 25 bp, Homo sapien
taagggcacaaagactcgtccaagg

SEQ ID NO: 4524475 - DNA, 25 bp, Homo sapien
caggtgtttgctctcacggatgtac

SEQ ID NO: 4524476 - DNA, 25 bp, Homo sapien
tctcacggatgtacaatgctataca

SEQ ID NO: 4524477 - DNA, 25 bp, Homo sapien
ctggcaaacagtttgatttccttct

SEQ ID NO: 4524478 - DNA, 25 bp, Homo sapien
caaacagtttgatttccttctgcat

SEQ ID NO: 4524479 - DNA, 25 bp, Homo sapien
gcaaacagtttgatttccttctgca

SEQ ID NO: 4524480 - DNA, 25 bp, Homo sapien
ggcaaacagtttgatttccttctgc

SEQ ID NO: 4524481 - DNA, 25 bp, Homo sapien
agattttgaggtttaggatttgcca

SEQ ID NO: 4524482 - DNA, 25 bp, Homo sapien
tggggagatattaagagattttgag

SEQ ID NO: 4524483 - DNA, 25 bp, Homo sapien
tttgaggtttaggatttgccaccat

SEQ ID NO: 4524484 - DNA, 25 bp, Homo sapien
gggagatattaagagattttgaggt

SEQ ID NO: 4524485 - DNA, 25 bp, Homo sapien
ggcagctgcggttcttcatttcaca

SEQ ID NO: 4524486 - DNA, 25 bp, Homo sapien
gacctagagaatatccccagagtgg

SEQ ID NO: 4524487 - DNA, 25 bp, Homo sapien
cacatgttcagttaagacctagaga

SEQ ID NO: 4524488 - DNA, 25 bp, Homo sapien
gcactttgggagaactagggaacta

SEQ ID NO: 4524489 - DNA, 25 bp, Homo sapien
gtgattcaataacctccccctgagt

SEQ ID NO: 4524490 - DNA, 25 bp, Homo sapien
tgtgattcaataacctccccctgag

SEQ ID NO: 4524491 - DNA, 25 bp, Homo sapien
catggtcttagtgtttaacgttagg

SEQ ID NO: 4524492 - DNA, 25 bp, Homo sapien
tgtttaacgttaggatccttgctac

SEQ ID NO: 4524493 - DNA, 25 bp, Homo sapien
ccatggtcttagtgtttaacgttag

SEQ ID NO: 4524494 - DNA, 25 bp, Homo sapien
tagtgtttaacgttaggatccttgc

SEQ ID NO: 4524495 - DNA, 25 bp, Homo sapien
agaggcctttgaagctggtgggaca

SEQ ID NO: 4524496 - DNA, 25 bp, Homo sapien
tgggaggaccctagtgaacctgcct

SEQ ID NO: 4524497 - DNA, 25 bp, Homo sapien
ttgaagaggcctttgaagctggtgg

SEQ ID NO: 4524498 - DNA, 25 bp, Homo sapien
ctctgttctcgtgaaccctctttgg

SEQ ID NO: 4524499 - DNA, 25 bp, Homo sapien
gccgctacccgacttccattttctc

SEQ ID NO: 4524500 - DNA, 25 bp, Homo sapien
ccgcagtcgccgctacccgacttcc

SEQ ID NO: 4524501 - DNA, 25 bp, Homo sapien
tcgccgctacccgacttccattttc

SEQ ID NO: 4524502 - DNA, 25 bp, Homo sapien
cagtcgccgctacccgacttccatt

SEQ ID NO: 4524503 - DNA, 25 bp, Homo sapien
cagctgttttgctcccgctcgggct

SEQ ID NO: 4524504 - DNA, 25 bp, Homo sapien
cagatcagctgttttgctcccgctc

SEQ ID NO: 4524505 - DNA, 25 bp, Homo sapien
gatcagctgttttgctcccgctcgg

SEQ ID NO: 4524506 - DNA, 25 bp, Homo sapien
atcagctgttttgctcccgctcggg

SEQ ID NO: 4524507 - DNA, 25 bp, Homo sapien
tcccggctccgcctgctgcctccgg

SEQ ID NO: 4524508 - DNA, 25 bp, Homo sapien
ccggctccgcctgctgcctccgggc

SEQ ID NO: 4524509 - DNA, 25 bp, Homo sapien
ggctccgcctgctgcctccgggcgc

SEQ ID NO: 4524510 - DNA, 25 bp, Homo sapien
ctccgcctgctgcctccgggcgcgc

SEQ ID NO: 4524511 - DNA, 25 bp, Homo sapien
atgtgtccaaactgtcccgccttgc

SEQ ID NO: 4524512 - DNA, 25 bp, Homo sapien
ttgattgttgatacccagaaacaac

SEQ ID NO: 4524513 - DNA, 25 bp, Homo sapien
cagttggtagtatgttgattgttga

SEQ ID NO: 4524514 - DNA, 25 bp, Homo sapien
ctctgcagttggtagtatgttgatt

SEQ ID NO: 4524515 - DNA, 25 bp, Homo sapien
acttccaaggcagccgctcacatcg

SEQ ID NO: 4524516 - DNA, 25 bp, Homo sapien
tcacatcgccggcaagctggtgttg

SEQ ID NO: 4524517 - DNA, 25 bp, Homo sapien
tagtctgcacgcatttgctgacatg

SEQ ID NO: 4524518 - DNA, 25 bp, Homo sapien
cagggtctcccatggggttgtagtt

SEQ ID NO: 4524519 - DNA, 25 bp, Homo sapien
tgttagagatatggaaccactcagc

SEQ ID NO: 4524520 - DNA, 25 bp, Homo sapien
gcacaaagacaagaatgttagagat

SEQ ID NO: 4524521 - DNA, 25 bp, Homo sapien
tcccttatgcacaaagacaagaatg

SEQ ID NO: 4524522 - DNA, 25 bp, Homo sapien
aaaatcccttatgcacaaagacaag

SEQ ID NO: 4524523 - DNA, 25 bp, Homo sapien
gaagatgccggaggctagcatgggc

SEQ ID NO: 4524524 - DNA, 25 bp, Homo sapien
ggaagatgccggaggctagcatggg

SEQ ID NO: 4524525 - DNA, 25 bp, Homo sapien
tggaagatgccggaggctagcatgg

SEQ ID NO: 4524526 - DNA, 25 bp, Homo sapien
ctggaagatgccggaggctagcatg

SEQ ID NO: 4524527 - DNA, 25 bp, Homo sapien
tgggcagaggacgatggagggggag

SEQ ID NO: 4524528 - DNA, 25 bp, Homo sapien
gggcagaggacgatggagggggaga

SEQ ID NO: 4524529 - DNA, 25 bp, Homo sapien
tgacacatggtgcatgggtctccaa

SEQ ID NO: 4524530 - DNA, 25 bp, Homo sapien
acacatggtgcatgggtctccaagc

SEQ ID NO: 4524531 - DNA, 25 bp, Homo sapien
tgggtctccaagctgctcattccca

SEQ ID NO: 4524532 - DNA, 25 bp, Homo sapien
ggtgacacatggtgcatgggtctcc

SEQ ID NO: 4524533 - DNA, 25 bp, Homo sapien
tccccatgagtacttggtgggcttc

SEQ ID NO: 4524534 - DNA, 25 bp, Homo sapien
cccagtcatccccatgagtacttgg

SEQ ID NO: 4524535 - DNA, 25 bp, Homo sapien
tcatccccatgagtacttggtgggc

SEQ ID NO: 4524536 - DNA, 25 bp, Homo sapien
attatgaggatgaggaaagctttcc

SEQ ID NO: 4524537 - DNA, 25 bp, Homo sapien
ctgccctggcttccgactccacagg

SEQ ID NO: 4524538 - DNA, 25 bp, Homo sapien
tccacaggacctctccttctgtctg

SEQ ID NO: 4524539 - DNA, 25 bp, Homo sapien
tggcttccgactccacaggacctct

SEQ ID NO: 4524540 - DNA, 25 bp, Homo sapien
cctggcttccgactccacaggacct

SEQ ID NO: 4524541 - DNA, 25 bp, Homo sapien
ttgaagatcagatggatacaggtct

SEQ ID NO: 4524542 - DNA, 25 bp, Homo sapien
catctagttgtgtaatctattggca

SEQ ID NO: 4524543 - DNA, 25 bp, Homo sapien
cattaccagtctgtgcaaaggttta

SEQ ID NO: 4524544 - DNA, 25 bp, Homo sapien
tgtgtttcgctagcaattgttcatc

SEQ ID NO: 4524545 - DNA, 25 bp, Homo sapien
tagggctggctcaaagctacagttt

SEQ ID NO: 4524546 - DNA, 25 bp, Homo sapien
ggtttgtttgatcctccagagctca

SEQ ID NO: 4524547 - DNA, 25 bp, Homo sapien
gcatcttgatgtgtacttctctgcg

SEQ ID NO: 4524548 - DNA, 25 bp, Homo sapien
ctctgcgtgtcttgtttagggctgg

SEQ ID NO: 4524549 - DNA, 25 bp, Homo sapien
gggcactgatggaagcaaacctcgt

SEQ ID NO: 4524550 - DNA, 25 bp, Homo sapien
tgggcacatgcacctaatgacgata

SEQ ID NO: 4524551 - DNA, 25 bp, Homo sapien
cactctggtgtagccctgcggagat

SEQ ID NO: 4524552 - DNA, 25 bp, Homo sapien
tacgagtcgggtttacacgtgccac

SEQ ID NO: 4524553 - DNA, 25 bp, Homo sapien
atgttgcctttcaaggctaccactg

SEQ ID NO: 4524554 - DNA, 25 bp, Homo sapien
tctctcagagcttctcgtttcatct

SEQ ID NO: 4524555 - DNA, 25 bp, Homo sapien
agagcttctcgtttcatctttgaca

SEQ ID NO: 4524556 - DNA, 25 bp, Homo sapien
actgaagatattccctgaagggttc

SEQ ID NO: 4524557 - DNA, 25 bp, Homo sapien
cagtggacgaggagtaggaaattgc

SEQ ID NO: 4524558 - DNA, 25 bp, Homo sapien
acgaggagtaggaaattgcagttgt

SEQ ID NO: 4524559 - DNA, 25 bp, Homo sapien
gtggcagtggacgaggagtaggaaa

SEQ ID NO: 4524560 - DNA, 25 bp, Homo sapien
tggacgaggagtaggaaattgcagt

SEQ ID NO: 4524561 - DNA, 25 bp, Homo sapien
acagagcacgtagccacaggatgag

SEQ ID NO: 4524562 - DNA, 25 bp, Homo sapien
catcagagtccgagaggaggacaga

SEQ ID NO: 4524563 - DNA, 25 bp, Homo sapien
cccaccaagggctgatatgcagagc

SEQ ID NO: 4524564 - DNA, 25 bp, Homo sapien
tcactgaggtgcgatggcattgttg

SEQ ID NO: 4524565 - DNA, 25 bp, Homo sapien
ctacccgaggagcattgtgggccag

SEQ ID NO: 4524566 - DNA, 25 bp, Homo sapien
tacccgaggagcattgtgggccagg

SEQ ID NO: 4524567 - DNA, 25 bp, Homo sapien
ctttggattcatcacaagagcaaga

SEQ ID NO: 4524568 - DNA, 25 bp, Homo sapien
tcatcacaagagcaagagatgcatg

SEQ ID NO: 4524569 - DNA, 25 bp, Homo sapien
ggattcatcacaagagcaagagatg

SEQ ID NO: 4524570 - DNA, 25 bp, Homo sapien
tcacaagagcaagagatgcatggca

SEQ ID NO: 4524571 - DNA, 25 bp, Homo sapien
tgtgctcttgctttacctatgctca

SEQ ID NO: 4524572 - DNA, 25 bp, Homo sapien
ctgtgctcttgctttacctatgctc

SEQ ID NO: 4524573 - DNA, 25 bp, Homo sapien
gtgctcttgctttacctatgctcat

SEQ ID NO: 4524574 - DNA, 25 bp, Homo sapien
cggtaccgtcagaaataagcatata

SEQ ID NO: 4524575 - DNA, 25 bp, Homo sapien
tctgtaaacagttcggctgtgatta

SEQ ID NO: 4524576 - DNA, 25 bp, Homo sapien
tgtcaggtttaacggtaccgtcaga

SEQ ID NO: 4524577 - DNA, 25 bp, Homo sapien
cagaaataagcatatatctgtaaac

SEQ ID NO: 4524578 - DNA, 25 bp, Homo sapien
gtgtatttcaagagcccgatgtgcc

SEQ ID NO: 4524579 - DNA, 25 bp, Homo sapien
cttcaggtgtatttcaagagcccga

SEQ ID NO: 4524580 - DNA, 25 bp, Homo sapien
gtatttcaagagcccgatgtgcctc

SEQ ID NO: 4524581 - DNA, 25 bp, Homo sapien
tcaggtgtatttcaagagcccgatg

SEQ ID NO: 4524582 - DNA, 25 bp, Homo sapien
ggtgcagcagctccacacagggcca

SEQ ID NO: 4524583 - DNA, 25 bp, Homo sapien
agggtgcagcagctccacacagggc

SEQ ID NO: 4524584 - DNA, 25 bp, Homo sapien
gtgcagcagctccacacagggccat

SEQ ID NO: 4524585 - DNA, 25 bp, Homo sapien
acagggtgcagcagctccacacagg

SEQ ID NO: 4524586 - DNA, 25 bp, Homo sapien
ctgagatgcttgcttctgagaggtc

SEQ ID NO: 4524587 - DNA, 25 bp, Homo sapien
aaagctgggtgataacatttatctg

SEQ ID NO: 4524588 - DNA, 25 bp, Homo sapien
ctggaaagcggcacctgtagatgat

SEQ ID NO: 4524589 - DNA, 25 bp, Homo sapien
gattcccttagaaggtgtgccctca

SEQ ID NO: 4524590 - DNA, 25 bp, Homo sapien
gtaacactgtctcccaactgaattt

SEQ ID NO: 4524591 - DNA, 25 bp, Homo sapien
tcttcatgttccgaggaggaagcag

SEQ ID NO: 4524592 - DNA, 25 bp, Homo sapien
ctcttcatgttccgaggaggaagca

SEQ ID NO: 4524593 - DNA, 25 bp, Homo sapien
tttgagagggttgtcagacataatc

SEQ ID NO: 4524594 - DNA, 25 bp, Homo sapien
tgagagggttgtcagacataatctg

SEQ ID NO: 4524595 - DNA, 25 bp, Homo sapien
gagggttgtcagacataatctgatt

SEQ ID NO: 4524596 - DNA, 25 bp, Homo sapien
gagagggttgtcagacataatctga

SEQ ID NO: 4524597 - DNA, 25 bp, Homo sapien
ggatgcagctcaggaaccaagtgga

SEQ ID NO: 4524598 - DNA, 25 bp, Homo sapien
cgtcgtggccgcaagggtgcgcgga

SEQ ID NO: 4524599 - DNA, 25 bp, Homo sapien
ttgtcgtaacttctcgccagtggcc

SEQ ID NO: 4524600 - DNA, 25 bp, Homo sapien
accaagtggaaggacgcagcggaca

SEQ ID NO: 4524601 - DNA, 25 bp, Homo sapien
ggcagttcgtggaatcttggggccc

SEQ ID NO: 4524602 - DNA, 25 bp, Homo sapien
tccagggcagttcgtggaatcttgg

SEQ ID NO: 4524603 - DNA, 25 bp, Homo sapien
tttccagggcagttcgtggaatctt

SEQ ID NO: 4524604 - DNA, 25 bp, Homo sapien
cagttcgtggaatcttggggccctg

SEQ ID NO: 4524605 - DNA, 25 bp, Homo sapien
ggtaataatggtgaacgtgactggc

SEQ ID NO: 4524606 - DNA, 25 bp, Homo sapien
tgtgtggtaataatggtgaacgtga

SEQ ID NO: 4524607 - DNA, 25 bp, Homo sapien
taatggtgaacgtgactggctctgt

SEQ ID NO: 4524608 - DNA, 25 bp, Homo sapien
tggtgaacgtgactggctctgtgat

SEQ ID NO: 4524609 - DNA, 25 bp, Homo sapien
ttctctgaatggcagcagttatgac

SEQ ID NO: 4524610 - DNA, 25 bp, Homo sapien
agcaggaagtgctggcctatgggat

SEQ ID NO: 4524611 - DNA, 25 bp, Homo sapien
acagtttggacccacatcctcgtct

SEQ ID NO: 4524612 - DNA, 25 bp, Homo sapien
tatgttccctgttgtgcattggaga

SEQ ID NO: 4524613 - DNA, 25 bp, Homo sapien
tccaggcccttagaaatgatcccca

SEQ ID NO: 4524614 - DNA, 25 bp, Homo sapien
cctgacccagctgccggtgcagaac

SEQ ID NO: 4524615 - DNA, 25 bp, Homo sapien
cccagctgccggtgcagaaccccat

SEQ ID NO: 4524616 - DNA, 25 bp, Homo sapien
gacaaatgttaccagggtccaggcc

SEQ ID NO: 4524617 - DNA, 25 bp, Homo sapien
ctgaaggatcctgctcgttcctctt

SEQ ID NO: 4524618 - DNA, 25 bp, Homo sapien
acatctgttgagctctactgaagga

SEQ ID NO: 4524619 - DNA, 25 bp, Homo sapien
atctgttgagctctactgaaggatc

SEQ ID NO: 4524620 - DNA, 25 bp, Homo sapien
gaaggatcctgctcgttcctctttc

SEQ ID NO: 4524621 - DNA, 25 bp, Homo sapien
tgcatcatttgtggaatgggctgct

SEQ ID NO: 4524622 - DNA, 25 bp, Homo sapien
ggtgggtaacaagtcatgctgctgc

SEQ ID NO: 4524623 - DNA, 25 bp, Homo sapien
tccttgatgggtgggtaacaagtca

SEQ ID NO: 4524624 - DNA, 25 bp, Homo sapien
tggaatgggctgctgtatttccttg

SEQ ID NO: 4524625 - DNA, 25 bp, Homo sapien
caccagagtgagtggactgtcgctg

SEQ ID NO: 4524626 - DNA, 25 bp, Homo sapien
tgtctgcctcatccggtgcttactg

SEQ ID NO: 4524627 - DNA, 25 bp, Homo sapien
cttactgaaggtcccatgcactgcg

SEQ ID NO: 4524628 - DNA, 25 bp, Homo sapien
cagtgccagcagatgatagccagga

SEQ ID NO: 4524629 - DNA, 25 bp, Homo sapien
cacaaagtgcatcttgcagagcaga

SEQ ID NO: 4524630 - DNA, 25 bp, Homo sapien
gctgtaagacaagggcacaaagtgc

SEQ ID NO: 4524631 - DNA, 25 bp, Homo sapien
aatggcttgttgacgcagttctgag

SEQ ID NO: 4524632 - DNA, 25 bp, Homo sapien
gcagagcagaagatgacgtatgtca

SEQ ID NO: 4524633 - DNA, 25 bp, Homo sapien
ctttagctgtttgaagagttgcatt

SEQ ID NO: 4524634 - DNA, 25 bp, Homo sapien
agctgtttgaagagttgcatttttc

SEQ ID NO: 4524635 - DNA, 25 bp, Homo sapien
gctgtttgaagagttgcatttttct

SEQ ID NO: 4524636 - DNA, 25 bp, Homo sapien
ttagctgtttgaagagttgcatttt

SEQ ID NO: 4524637 - DNA, 25 bp, Homo sapien
gagttcagtcaaccatcctgggtcg

SEQ ID NO: 4524638 - DNA, 25 bp, Homo sapien
tagtccttgtgtgcatagtaatccc

SEQ ID NO: 4524639 - DNA, 25 bp, Homo sapien
gaatgcccaggctacaagctataag

SEQ ID NO: 4524640 - DNA, 25 bp, Homo sapien
caaaagtcattacccaagaaggcgg

SEQ ID NO: 4524641 - DNA, 25 bp, Homo sapien
gtgagtggctatgtttacaacaccc

SEQ ID NO: 4524642 - DNA, 25 bp, Homo sapien
ccatatatacgtaaaggatgaacgc

SEQ ID NO: 4524643 - DNA, 25 bp, Homo sapien
tgggatggccagctggttaaaacac

SEQ ID NO: 4524644 - DNA, 25 bp, Homo sapien
gaaacctaaatgcaatccaaggagg

SEQ ID NO: 4524645 - DNA, 25 bp, Homo sapien
gttggctggcatctgtcgggcatcc

SEQ ID NO: 4524646 - DNA, 25 bp, Homo sapien
ttccacggttatgggtgtttgccag

SEQ ID NO: 4524647 - DNA, 25 bp, Homo sapien
aagctgcgccggtgctgtggccact

SEQ ID NO: 4524648 - DNA, 25 bp, Homo sapien
gccactcacatttccgaggttcttc

SEQ ID NO: 4524649 - DNA, 25 bp, Homo sapien
cctaaaggtgcatgcagagtgcgca

SEQ ID NO: 4524650 - DNA, 25 bp, Homo sapien
tggtggtttcaagggagagctctct

SEQ ID NO: 4524651 - DNA, 25 bp, Homo sapien
ttttcagtcgattcacagggcaagg

SEQ ID NO: 4524652 - DNA, 25 bp, Homo sapien
aaagagcacacgcaggttacaggca

SEQ ID NO: 4524653 - DNA, 25 bp, Homo sapien
tggggggatccaactattaatggag

SEQ ID NO: 4524654 - DNA, 25 bp, Homo sapien
acttcaggggacaaaatgtgtatct

SEQ ID NO: 4524655 - DNA, 25 bp, Homo sapien
tccagattcctataaacatttcatg

SEQ ID NO: 4524656 - DNA, 25 bp, Homo sapien
catttcatgtaaggacgcaaagcat

SEQ ID NO: 4524657 - DNA, 25 bp, Homo sapien
caagagttcctgctacatcgatgta

SEQ ID NO: 4524658 - DNA, 25 bp, Homo sapien
ccacacaggcatattcaagagttcc

SEQ ID NO: 4524659 - DNA, 25 bp, Homo sapien
cctggtcttacggaggctggtcctt

SEQ ID NO: 4524660 - DNA, 25 bp, Homo sapien
acatctcagtcagcttccgtttcag

SEQ ID NO: 4524661 - DNA, 25 bp, Homo sapien
cagtgagttccttcctggcgtgagg

SEQ ID NO: 4524662 - DNA, 25 bp, Homo sapien
gatgctttccgcttagagttcagcc

SEQ ID NO: 4524663 - DNA, 25 bp, Homo sapien
gttcagccccttgagtggacagcca

SEQ ID NO: 4524664 - DNA, 25 bp, Homo sapien
taattcagctcataagggtcacggt

SEQ ID NO: 4524665 - DNA, 25 bp, Homo sapien
ccagctgggcgtcctacagtgagtt

SEQ ID NO: 4524666 - DNA, 25 bp, Homo sapien
ccacatcgaccaattcttggaaacc

SEQ ID NO: 4524667 - DNA, 25 bp, Homo sapien
tttctcccacatcgaccaattcttg

SEQ ID NO: 4524668 - DNA, 25 bp, Homo sapien
ctacagtgagttcacttcagtcctg

SEQ ID NO: 4524669 - DNA, 25 bp, Homo sapien
ctgtgagcccaccacagtggtgtgt

SEQ ID NO: 4524670 - DNA, 25 bp, Homo sapien
tatggtggtgtcattgccctccagc

SEQ ID NO: 4524671 - DNA, 25 bp, Homo sapien
gctatggtggtgtcattgccctcca

SEQ ID NO: 4524672 - DNA, 25 bp, Homo sapien
gtgagctatggtggtgtcattgccc

SEQ ID NO: 4524673 - DNA, 25 bp, Homo sapien
tgtctgatttccttataacgctgac

SEQ ID NO: 4524674 - DNA, 25 bp, Homo sapien
tttgtctgatttccttataacgctg

SEQ ID NO: 4524675 - DNA, 25 bp, Homo sapien
tgtatttttgtctgatttccttata

SEQ ID NO: 4524676 - DNA, 25 bp, Homo sapien
tctgatttccttataacgctgaccc

SEQ ID NO: 4524677 - DNA, 25 bp, Homo sapien
cgtttgtaattgtgtgcatttctcc

SEQ ID NO: 4524678 - DNA, 25 bp, Homo sapien
tagcttgccatgagttttaccggtt

SEQ ID NO: 4524679 - DNA, 25 bp, Homo sapien
tttctcccgtgcctattgatttagc

SEQ ID NO: 4524680 - DNA, 25 bp, Homo sapien
cacttttcaacatagttgcgtagtt

SEQ ID NO: 4524681 - DNA, 25 bp, Homo sapien
ttagactttgcagtccgaggacctg

SEQ ID NO: 4524682 - DNA, 25 bp, Homo sapien
cagtccgaggacctgtctgcagggt

SEQ ID NO: 4524683 - DNA, 25 bp, Homo sapien
ttgggggtccctgcgttgacccagc

SEQ ID NO: 4524684 - DNA, 25 bp, Homo sapien
tgctgggcccaacacacggttcagc

SEQ ID NO: 4524685 - DNA, 25 bp, Homo sapien
tgtaatcaattccttgtacacccca

SEQ ID NO: 4524686 - DNA, 25 bp, Homo sapien
taactgcttgtaatcaattccttgt

SEQ ID NO: 4524687 - DNA, 25 bp, Homo sapien
aatcaattccttgtacaccccactg

SEQ ID NO: 4524688 - DNA, 25 bp, Homo sapien
gcttgtaatcaattccttgtacacc

SEQ ID NO: 4524689 - DNA, 25 bp, Homo sapien
tcaacctccagtcaggacagataaa

SEQ ID NO: 4524690 - DNA, 25 bp, Homo sapien
atggatttggctgttagggctggta

SEQ ID NO: 4524691 - DNA, 25 bp, Homo sapien
caacctccagtcaggacagataaaa

SEQ ID NO: 4524692 - DNA, 25 bp, Homo sapien
gcttttttgggcagcgatatctctg

SEQ ID NO: 4524693 - DNA, 25 bp, Homo sapien
tttgggcagcgatatctctgatcct

SEQ ID NO: 4524694 - DNA, 25 bp, Homo sapien
ctgcagcgctttgaagagtgtggca

SEQ ID NO: 4524695 - DNA, 25 bp, Homo sapien
ttcctccactcgcaacgcgttgata

SEQ ID NO: 4524696 - DNA, 25 bp, Homo sapien
cagactcctggaaataactgggcag

SEQ ID NO: 4524697 - DNA, 25 bp, Homo sapien
acctgagacatgtgagaccccgttg

SEQ ID NO: 4524698 - DNA, 25 bp, Homo sapien
gggctcatccgcgtgtctgtgactg

SEQ ID NO: 4524699 - DNA, 25 bp, Homo sapien
aagccaactggctgaggtcaaccca

SEQ ID NO: 4524700 - DNA, 25 bp, Homo sapien
tggaacattgacacaagccaggtgg

SEQ ID NO: 4524701 - DNA, 25 bp, Homo sapien
tgaacagtaatggaacattgacaca

SEQ ID NO: 4524702 - DNA, 25 bp, Homo sapien
ccaggtgggacgagtgtggtgggat

SEQ ID NO: 4524703 - DNA, 25 bp, Homo sapien
cgtgggcagccggtgaacagtaatg

SEQ ID NO: 4524704 - DNA, 25 bp, Homo sapien
agacccatgggtgtgcctttggggt

SEQ ID NO: 4524705 - DNA, 25 bp, Homo sapien
gtgcctttggggtgtgcattgacag

SEQ ID NO: 4524706 - DNA, 25 bp, Homo sapien
gcctttggggtgtgcattgacagtt

SEQ ID NO: 4524707 - DNA, 25 bp, Homo sapien
gacccatgggtgtgcctttggggtg

SEQ ID NO: 4524708 - DNA, 25 bp, Homo sapien
cctgccttgtctggatttgcacact

SEQ ID NO: 4524709 - DNA, 25 bp, Homo sapien
ttggaacacagagacgtgatgcact

SEQ ID NO: 4524710 - DNA, 25 bp, Homo sapien
caccaggtgcccagacatctggttg

SEQ ID NO: 4524711 - DNA, 25 bp, Homo sapien
ccttgaggttaactgctgcttggaa

SEQ ID NO: 4524712 - DNA, 25 bp, Homo sapien
ctggctctgatgtacgatgaacctg

SEQ ID NO: 4524713 - DNA, 25 bp, Homo sapien
tacgatgaacctgcttgagtggcat

SEQ ID NO: 4524714 - DNA, 25 bp, Homo sapien
tctcggaagagtcaaacatagtaag

SEQ ID NO: 4524715 - DNA, 25 bp, Homo sapien
cactggtcttgaggaaaataactta

SEQ ID NO: 4524716 - DNA, 25 bp, Homo sapien
taacttactcgtatgaatctctggg

SEQ ID NO: 4524717 - DNA, 25 bp, Homo sapien
taaccttggaggatccctaagacat

SEQ ID NO: 4524718 - DNA, 25 bp, Homo sapien
agcaaggcttgcgtcatgttcagag

SEQ ID NO: 4524719 - DNA, 25 bp, Homo sapien
tgacagcaaggcttgcgtcatgttc

SEQ ID NO: 4524720 - DNA, 25 bp, Homo sapien
ggcttgcgtcatgttcagagaatca

SEQ ID NO: 4524721 - DNA, 25 bp, Homo sapien
ttgcgtcatgttcagagaatcagac

SEQ ID NO: 4524722 - DNA, 25 bp, Homo sapien
tgatataatggcacaatggcctgag

SEQ ID NO: 4524723 - DNA, 25 bp, Homo sapien
gagaatactcagttacagcgcccat

SEQ ID NO: 4524724 - DNA, 25 bp, Homo sapien
gcctgagaatactcagttacagcgc

SEQ ID NO: 4524725 - DNA, 25 bp, Homo sapien
ctgccttgtcctgatataatggcac

SEQ ID NO: 4524726 - DNA, 25 bp, Homo sapien
tgatatgcgtggatacatgctcatg

SEQ ID NO: 4524727 - DNA, 25 bp, Homo sapien
gaaagcactgactcacgcaaaggtc

SEQ ID NO: 4524728 - DNA, 25 bp, Homo sapien
agtgagaccggagcttcagccaaaa

SEQ ID NO: 4524729 - DNA, 25 bp, Homo sapien
tgtcactatgaaggccagacgaggg

SEQ ID NO: 4524730 - DNA, 25 bp, Homo sapien
accgcatcaggactttataaagttt

SEQ ID NO: 4524731 - DNA, 25 bp, Homo sapien
caccgcatcaggactttataaagtt

SEQ ID NO: 4524732 - DNA, 25 bp, Homo sapien
ctttccacagtctctccagatatgt

SEQ ID NO: 4524733 - DNA, 25 bp, Homo sapien
tccacagtctctccagatatgtctt

SEQ ID NO: 4524734 - DNA, 25 bp, Homo sapien
cacagtctctccagatatgtcttcc

SEQ ID NO: 4524735 - DNA, 25 bp, Homo sapien
acagtctctccagatatgtcttcct

SEQ ID NO: 4524736 - DNA, 25 bp, Homo sapien
cttccagggccttggtattcagatt

SEQ ID NO: 4524737 - DNA, 25 bp, Homo sapien
tctcggaaaagtgttgaatcagtac

SEQ ID NO: 4524738 - DNA, 25 bp, Homo sapien
catttgtgtgctgagaaaggtgaca

SEQ ID NO: 4524739 - DNA, 25 bp, Homo sapien
tcagtacatttcgatggaacagccc

SEQ ID NO: 4524740 - DNA, 25 bp, Homo sapien
ctgttgtgccatcggatgctaggct

SEQ ID NO: 4524741 - DNA, 25 bp, Homo sapien
taaataacaattgcatcatggggaa

SEQ ID NO: 4524742 - DNA, 25 bp, Homo sapien
accctgttgtgccatcggatgctag

SEQ ID NO: 4524743 - DNA, 25 bp, Homo sapien
gtgccatcggatgctaggctttatt

SEQ ID NO: 4524744 - DNA, 25 bp, Homo sapien
gagtgctgaaactatcctagtgggc

SEQ ID NO: 4524745 - DNA, 25 bp, Homo sapien
gcttcgttccaaagagtacggtgtg

SEQ ID NO: 4524746 - DNA, 25 bp, Homo sapien
gaccaaggtccacatcagcagtggt

SEQ ID NO: 4524747 - DNA, 25 bp, Homo sapien
caactttacgtgaagaagcctgaca

SEQ ID NO: 4524748 - DNA, 25 bp, Homo sapien
tctgcttcttcgcatccctgcctct

SEQ ID NO: 4524749 - DNA, 25 bp, Homo sapien
gcttcttcgcatccctgcctcttcc

SEQ ID NO: 4524750 - DNA, 25 bp, Homo sapien
tcctctgcttcttcgcatccctgcc

SEQ ID NO: 4524751 - DNA, 25 bp, Homo sapien
tgcttcttcgcatccctgcctcttc

SEQ ID NO: 4524752 - DNA, 25 bp, Homo sapien
gactctgacagctctgttcacatcc

SEQ ID NO: 4524753 - DNA, 25 bp, Homo sapien
ctaatggactctgacagctctgttc

SEQ ID NO: 4524754 - DNA, 25 bp, Homo sapien
gctctgttcacatcctctcccactg

SEQ ID NO: 4524755 - DNA, 25 bp, Homo sapien
ctcccactgtcacacggcctcttac

SEQ ID NO: 4524756 - DNA, 25 bp, Homo sapien
gaatatcctgactcttccgtgacag

SEQ ID NO: 4524757 - DNA, 25 bp, Homo sapien
ggcccaggccgttcttctcaatatg

SEQ ID NO: 4524758 - DNA, 25 bp, Homo sapien
tttcaggtgcagaaaatgctgcctg

SEQ ID NO: 4524759 - DNA, 25 bp, Homo sapien
gatatctgccccgatgtgcctctgt

SEQ ID NO: 4524760 - DNA, 25 bp, Homo sapien
gggacagtcagtagccccattggct

SEQ ID NO: 4524761 - DNA, 25 bp, Homo sapien
gagaagggacagtcagtagccccat

SEQ ID NO: 4524762 - DNA, 25 bp, Homo sapien
agtcagtagccccattggctgagct

SEQ ID NO: 4524763 - DNA, 25 bp, Homo sapien
agtagccccattggctgagctagta

SEQ ID NO: 4524764 - DNA, 25 bp, Homo sapien
tgtaagcctaaaagttctgcctaac

SEQ ID NO: 4524765 - DNA, 25 bp, Homo sapien
aatgtatactgtgtccaatgtctgg

SEQ ID NO: 4524766 - DNA, 25 bp, Homo sapien
gggttgtagcgtttagatacctaga

SEQ ID NO: 4524767 - DNA, 25 bp, Homo sapien
gactacttgatgctatgtaagccta

SEQ ID NO: 4524768 - DNA, 25 bp, Homo sapien
tggtaaaccacataaactcttcagg

SEQ ID NO: 4524769 - DNA, 25 bp, Homo sapien
agtccaaggcacagacacaatggta

SEQ ID NO: 4524770 - DNA, 25 bp, Homo sapien
tcttacgtgggatagatcaaacctt

SEQ ID NO: 4524771 - DNA, 25 bp, Homo sapien
tgccagttccagacatcagtttttc

SEQ ID NO: 4524772 - DNA, 25 bp, Homo sapien
tgctgcctatgtggcgtgcctgagg

SEQ ID NO: 4524773 - DNA, 25 bp, Homo sapien
tggtgctgcctatgtggcgtgcctg

SEQ ID NO: 4524774 - DNA, 25 bp, Homo sapien
tatgtggcgtgcctgagggcagagc

SEQ ID NO: 4524775 - DNA, 25 bp, Homo sapien
tgcctatgtggcgtgcctgagggca

SEQ ID NO: 4524776 - DNA, 25 bp, Homo sapien
gtaggctttagctttcaggccaatg

SEQ ID NO: 4524777 - DNA, 25 bp, Homo sapien
tcctggctttagaacaacttggtgg

SEQ ID NO: 4524778 - DNA, 25 bp, Homo sapien
gactgtccagcaaagtatcctttgt

SEQ ID NO: 4524779 - DNA, 25 bp, Homo sapien
tcctttgtccaatttgtacccacag

SEQ ID NO: 4524780 - DNA, 25 bp, Homo sapien
taaggtagtattctattcatcacgc

SEQ ID NO: 4524781 - DNA, 25 bp, Homo sapien
ctgaagcttagtttcgccggataca

SEQ ID NO: 4524782 - DNA, 25 bp, Homo sapien
ccagcttggtagtggtagattctct

SEQ ID NO: 4524783 - DNA, 25 bp, Homo sapien
tgtgctattgatatacaggtcctgt

SEQ ID NO: 4524784 - DNA, 25 bp, Homo sapien
gagcgagcttctcaatcatagcaag

SEQ ID NO: 4524785 - DNA, 25 bp, Homo sapien
atagtactagggcaaacctcccagg

SEQ ID NO: 4524786 - DNA, 25 bp, Homo sapien
tcccgtgcccctatgaaatgtaatg

SEQ ID NO: 4524787 - DNA, 25 bp, Homo sapien
tcgaaatggaggaacgtgagtctct

SEQ ID NO: 4524788 - DNA, 25 bp, Homo sapien
tggacacctctacacgatctggcac

SEQ ID NO: 4524789 - DNA, 25 bp, Homo sapien
cttaggatggattctgagcctcctc

SEQ ID NO: 4524790 - DNA, 25 bp, Homo sapien
cacaggtgcgggaagatctggacac

SEQ ID NO: 4524791 - DNA, 25 bp, Homo sapien
gcaaaggcgctcttcgctggacctg

SEQ ID NO: 4524792 - DNA, 25 bp, Homo sapien
cttccagcagacattcctgatgctg

SEQ ID NO: 4524793 - DNA, 25 bp, Homo sapien
tgccgatgctgtcgttcattgcgcg

SEQ ID NO: 4524794 - DNA, 25 bp, Homo sapien
ttttttgccgatgctgtcgttcatt

SEQ ID NO: 4524795 - DNA, 25 bp, Homo sapien
gtcaccgcgggacgcgcgtggaccg

SEQ ID NO: 4524796 - DNA, 25 bp, Homo sapien
tttttttttgccgatgctgtcgttc

SEQ ID NO: 4524797 - DNA, 25 bp, Homo sapien
tcacaagttggacgagaggcgcgag

SEQ ID NO: 4524798 - DNA, 25 bp, Homo sapien
gcgagcgcgcggagtcctgggggtc

SEQ ID NO: 4524799 - DNA, 25 bp, Homo sapien
tgctggccgggcgtgtggaggccgc

SEQ ID NO: 4524800 - DNA, 25 bp, Homo sapien
agttggacgagaggcgcgagcgcgc

SEQ ID NO: 4524801 - DNA, 25 bp, Homo sapien
acagtgggcgcaacgcgcggctcag

SEQ ID NO: 4524802 - DNA, 25 bp, Homo sapien
cgaagtccgcggtgcccgggggctg

SEQ ID NO: 4524803 - DNA, 25 bp, Homo sapien
caagctgccgtagggcgaagtccgc

SEQ ID NO: 4524804 - DNA, 25 bp, Homo sapien
ctgcgaggcggacagtgggcgcaac

SEQ ID NO: 4524805 - DNA, 25 bp, Homo sapien
gcgagccgagcgccagcggccccac

SEQ ID NO: 4524806 - DNA, 25 bp, Homo sapien
gaggcgcagcgagccgagcgccagc

SEQ ID NO: 4524807 - DNA, 25 bp, Homo sapien
aggcgcagcgagccgagcgccagcg

SEQ ID NO: 4524808 - DNA, 25 bp, Homo sapien
gcagcgagccgagcgccagcggccc

SEQ ID NO: 4524809 - DNA, 25 bp, Homo sapien
gggcagaagctcatgaccacggcct

SEQ ID NO: 4524810 - DNA, 25 bp, Homo sapien
agctcatgaccacggcctgctgcag

SEQ ID NO: 4524811 - DNA, 25 bp, Homo sapien
gcagaagctcatgaccacggcctgc

SEQ ID NO: 4524812 - DNA, 25 bp, Homo sapien
agaagctcatgaccacggcctgctg

SEQ ID NO: 4524813 - DNA, 25 bp, Homo sapien
aaaggaggcggcaataggtgttggc

SEQ ID NO: 4524814 - DNA, 25 bp, Homo sapien
tcagcgaaaggaggcggcaataggt

SEQ ID NO: 4524815 - DNA, 25 bp, Homo sapien
cggcaataggtgttggcccgcacgc

SEQ ID NO: 4524816 - DNA, 25 bp, Homo sapien
ggtgttggcccgcacgctcgccatg

SEQ ID NO: 4524817 - DNA, 25 bp, Homo sapien
ctccccgaagtaggagccatcgaac

SEQ ID NO: 4524818 - DNA, 25 bp, Homo sapien
tggaagacctcgaacttgagcttgg

SEQ ID NO: 4524819 - DNA, 25 bp, Homo sapien
tcttcccgatggtgccttcgcggat

SEQ ID NO: 4524820 - DNA, 25 bp, Homo sapien
gggcccgttgagctcgcccaggatg

SEQ ID NO: 4524821 - DNA, 25 bp, Homo sapien
gcaggggcccgttgagctcgcccag

SEQ ID NO: 4524822 - DNA, 25 bp, Homo sapien
ctagtactggcgccgcgaggagtcc

SEQ ID NO: 4524823 - DNA, 25 bp, Homo sapien
tagtactggcgccgcgaggagtcca

SEQ ID NO: 4524824 - DNA, 25 bp, Homo sapien
tactggcgccgcgaggagtccagcg

SEQ ID NO: 4524825 - DNA, 25 bp, Homo sapien
ctggcgccgcgaggagtccagcgac

SEQ ID NO: 4524826 - DNA, 25 bp, Homo sapien
acatggcgtagcaggtggcactcac

SEQ ID NO: 4524827 - DNA, 25 bp, Homo sapien
cgtggccgatgaacatggcgtagca

SEQ ID NO: 4524828 - DNA, 25 bp, Homo sapien
agggcagtggcgtggccgatgaaca

SEQ ID NO: 4524829 - DNA, 25 bp, Homo sapien
tgaacatggcgtagcaggtggcact

SEQ ID NO: 4524830 - DNA, 25 bp, Homo sapien
gatgaggttgcagaaccgcatcacc

SEQ ID NO: 4524831 - DNA, 25 bp, Homo sapien
atccgcagggcgcacgccgtcttgt

SEQ ID NO: 4524832 - DNA, 25 bp, Homo sapien
gttgcagaaccgcatcaccgcgctg

SEQ ID NO: 4524833 - DNA, 25 bp, Homo sapien
catgaaccacgtgcgcacgtacttc

SEQ ID NO: 4524834 - DNA, 25 bp, Homo sapien
tttcaattttgccaagcttcgaggc

SEQ ID NO: 4524835 - DNA, 25 bp, Homo sapien
tgggattcgaaatgtagactgaagt

SEQ ID NO: 4524836 - DNA, 25 bp, Homo sapien
gcttcgaggcaaaaatggacacttt

SEQ ID NO: 4524837 - DNA, 25 bp, Homo sapien
ggaacttcaggatcaattttcttca

SEQ ID NO: 4524838 - DNA, 25 bp, Homo sapien
ttttcctgaccccaagctgagatgc

SEQ ID NO: 4524839 - DNA, 25 bp, Homo sapien
tgagggaacataacgagccactgct

SEQ ID NO: 4524840 - DNA, 25 bp, Homo sapien
gagtaaccagtgagcaaatccatgt

SEQ ID NO: 4524841 - DNA, 25 bp, Homo sapien
gatccgtggaacagtgggtgacacc

SEQ ID NO: 4524842 - DNA, 25 bp, Homo sapien
gaaaaaacgctcagaaaggctcacg

SEQ ID NO: 4524843 - DNA, 25 bp, Homo sapien
aacgctcagaaaggctcacgcctgt

SEQ ID NO: 4524844 - DNA, 25 bp, Homo sapien
aaaaacgctcagaaaggctcacgcc

SEQ ID NO: 4524845 - DNA, 25 bp, Homo sapien
tgaaaaaacgctcagaaaggctcac

SEQ ID NO: 4524846 - DNA, 25 bp, Homo sapien
agcaagtagatcagcaccatttttt

SEQ ID NO: 4524847 - DNA, 25 bp, Homo sapien
atgtccaaggttgttctgggcttgt

SEQ ID NO: 4524848 - DNA, 25 bp, Homo sapien
cacatcaaccttccgtctcaaaaga

SEQ ID NO: 4524849 - DNA, 25 bp, Homo sapien
tggcacctctgcattaagcaagtag

SEQ ID NO: 4524850 - DNA, 25 bp, Homo sapien
cctcttcctctgaagtcacttcttc

SEQ ID NO: 4524851 - DNA, 25 bp, Homo sapien
aagtcacttcttctgttgtcccatt

SEQ ID NO: 4524852 - DNA, 25 bp, Homo sapien
cttcctctgaagtcacttcttctgt

SEQ ID NO: 4524853 - DNA, 25 bp, Homo sapien
tctgaagtcacttcttctgttgtcc

SEQ ID NO: 4524854 - DNA, 25 bp, Homo sapien
atgggtcccgagagggctcccgcca

SEQ ID NO: 4524855 - DNA, 25 bp, Homo sapien
gccctgtcgcggtccccggagcagg

SEQ ID NO: 4524856 - DNA, 25 bp, Homo sapien
ggagcgtgagccgcagctgagcctc

SEQ ID NO: 4524857 - DNA, 25 bp, Homo sapien
tggagcgtgagccgcagctgagcct

SEQ ID NO: 4524858 - DNA, 25 bp, Homo sapien
gcaacttcagtttggccttgaatct

SEQ ID NO: 4524859 - DNA, 25 bp, Homo sapien
ttgtgagcctaaagacccgcctctt

SEQ ID NO: 4524860 - DNA, 25 bp, Homo sapien
gccgcctggccgagctcttgtgagc

SEQ ID NO: 4524861 - DNA, 25 bp, Homo sapien
ggagccgtctggagccgctgtcatg

SEQ ID NO: 4524862 - DNA, 25 bp, Homo sapien
ggccgagctcttgtgagcctaaaga

SEQ ID NO: 4524863 - DNA, 25 bp, Homo sapien
ggctccaggagtttgcatgctctgg

SEQ ID NO: 4524864 - DNA, 25 bp, Homo sapien
agagcagggatacagttcacagtcc

SEQ ID NO: 4524865 - DNA, 25 bp, Homo sapien
tgtgtcgtcctcctgctgtgcactg

SEQ ID NO: 4524866 - DNA, 25 bp, Homo sapien
aatgccccaatgtcctgtgtcgtcc

SEQ ID NO: 4524867 - DNA, 25 bp, Homo sapien
ttttcttctccgcatgttgctcctc

SEQ ID NO: 4524868 - DNA, 25 bp, Homo sapien
ttcttctccgcatgttgctcctctt

SEQ ID NO: 4524869 - DNA, 25 bp, Homo sapien
atttttcttctccgcatgttgctcc

SEQ ID NO: 4524870 - DNA, 25 bp, Homo sapien
ccatttttcttctccgcatgttgct

SEQ ID NO: 4524871 - DNA, 25 bp, Homo sapien
aattaatcatcagggccggcagtcc

SEQ ID NO: 4524872 - DNA, 25 bp, Homo sapien
gccaccaaattaatcatcagggccg

SEQ ID NO: 4524873 - DNA, 25 bp, Homo sapien
tggagaccagaaagccagagtagct

SEQ ID NO: 4524874 - DNA, 25 bp, Homo sapien
aagactaaacctagtcccacagcca

SEQ ID NO: 4524875 - DNA, 25 bp, Homo sapien
agcagccggcaggagagtgtctcaa

SEQ ID NO: 4524876 - DNA, 25 bp, Homo sapien
ggcagacggagcctgccagctccaa

SEQ ID NO: 4524877 - DNA, 25 bp, Homo sapien
caggagagtgtctcaaagctgctgc

SEQ ID NO: 4524878 - DNA, 25 bp, Homo sapien
gcagacggagcctgccagctccaag

SEQ ID NO: 4524879 - DNA, 25 bp, Homo sapien
cacttttggaggcttggactagctc

SEQ ID NO: 4524880 - DNA, 25 bp, Homo sapien
tactttctggatgccaccggtcaga

SEQ ID NO: 4524881 - DNA, 25 bp, Homo sapien
gatcacttatgggaaagcgctgggc

SEQ ID NO: 4524882 - DNA, 25 bp, Homo sapien
tcagtatttgagctagtggcttccc

SEQ ID NO: 4524883 - DNA, 25 bp, Homo sapien
tccaaggccaccaagctggtagata

SEQ ID NO: 4524884 - DNA, 25 bp, Homo sapien
ctcgactgaaaggaaagatggcata

SEQ ID NO: 4524885 - DNA, 25 bp, Homo sapien
tagaagaggaagcacatccagaaca

SEQ ID NO: 4524886 - DNA, 25 bp, Homo sapien
gagcaaaggctgtctggtcccaaat

SEQ ID NO: 4524887 - DNA, 25 bp, Homo sapien
atccggtgatggctacacagccttt

SEQ ID NO: 4524888 - DNA, 25 bp, Homo sapien
ccagagatccggtgatggctacaca

SEQ ID NO: 4524889 - DNA, 25 bp, Homo sapien
agagatccggtgatggctacacagc

SEQ ID NO: 4524890 - DNA, 25 bp, Homo sapien
agatccggtgatggctacacagcct

SEQ ID NO: 4524891 - DNA, 25 bp, Homo sapien
tatgctctctctacccatggtgtcc

SEQ ID NO: 4524892 - DNA, 25 bp, Homo sapien
cgatgggatgcacggcgctctatta

SEQ ID NO: 4524893 - DNA, 25 bp, Homo sapien
cagcagaagcgcctgtgcatcatgg

SEQ ID NO: 4524894 - DNA, 25 bp, Homo sapien
catcatgggaaagccggttggcgat

SEQ ID NO: 4524895 - DNA, 25 bp, Homo sapien
tagtttctggagaccacgagctgtc

SEQ ID NO: 4524896 - DNA, 25 bp, Homo sapien
tgggtacatctctgtccctggcgcc

SEQ ID NO: 4524897 - DNA, 25 bp, Homo sapien
gtgataatgggcatctctgtctgaa

SEQ ID NO: 4524898 - DNA, 25 bp, Homo sapien
gcttctttggagcacctaattgtgc

SEQ ID NO: 4524899 - DNA, 25 bp, Homo sapien
tctgaactagacagggtgcctcttt

SEQ ID NO: 4524900 - DNA, 25 bp, Homo sapien
gccctgggtgtcagggtctgaacta

SEQ ID NO: 4524901 - DNA, 25 bp, Homo sapien
ctatagtggagcaccgcaaggcagt

SEQ ID NO: 4524902 - DNA, 25 bp, Homo sapien
cagggtctgaactagacagggtgcc

SEQ ID NO: 4524903 - DNA, 25 bp, Homo sapien
tgggacagaggttgccagagttggg

SEQ ID NO: 4524904 - DNA, 25 bp, Homo sapien
tgatgggacagaggttgccagagtt

SEQ ID NO: 4524905 - DNA, 25 bp, Homo sapien
cttgatgggacagaggttgccagag

SEQ ID NO: 4524906 - DNA, 25 bp, Homo sapien
gcagtgcctgctgagatcccccacc

SEQ ID NO: 4524907 - DNA, 25 bp, Homo sapien
tttgacaccaggaagaagtgacgca

SEQ ID NO: 4524908 - DNA, 25 bp, Homo sapien
acaccaggaagaagtgacgcagtct

SEQ ID NO: 4524909 - DNA, 25 bp, Homo sapien
ctttgacaccaggaagaagtgacgc

SEQ ID NO: 4524910 - DNA, 25 bp, Homo sapien
tgacaccaggaagaagtgacgcagt

SEQ ID NO: 4524911 - DNA, 25 bp, Homo sapien
tgctgtcacccatttcagctgggcc

SEQ ID NO: 4524912 - DNA, 25 bp, Homo sapien
cggtgctgccggctagcagatgcca

SEQ ID NO: 4524913 - DNA, 25 bp, Homo sapien
ccggctagcagatgccacagtgctg

SEQ ID NO: 4524914 - DNA, 25 bp, Homo sapien
ctgtcacccatttcagctgggcctg

SEQ ID NO: 4524915 - DNA, 25 bp, Homo sapien
aaatgtattcagtggaactcacagt

SEQ ID NO: 4524916 - DNA, 25 bp, Homo sapien
tgtattcagtggaactcacagttta

SEQ ID NO: 4524917 - DNA, 25 bp, Homo sapien
gtattcagtggaactcacagtttaa

SEQ ID NO: 4524918 - DNA, 25 bp, Homo sapien
aatgtattcagtggaactcacagtt

SEQ ID NO: 4524919 - DNA, 25 bp, Homo sapien
ggcagccaagcccaacaaaataatg

SEQ ID NO: 4524920 - DNA, 25 bp, Homo sapien
aagcccaacaaaataatggcacaca

SEQ ID NO: 4524921 - DNA, 25 bp, Homo sapien
gccaagcccaacaaaataatggcac

SEQ ID NO: 4524922 - DNA, 25 bp, Homo sapien
ttgagcagctgtttgatgatggtga

SEQ ID NO: 4524923 - DNA, 25 bp, Homo sapien
ggcagaggaggtgaggctcacctca

SEQ ID NO: 4524924 - DNA, 25 bp, Homo sapien
cttgtcaaggagaggatcctccctg

SEQ ID NO: 4524925 - DNA, 25 bp, Homo sapien
tgtcaaggagaggatcctccctggc

SEQ ID NO: 4524926 - DNA, 25 bp, Homo sapien
tcaaggagaggatcctccctggcct

SEQ ID NO: 4524927 - DNA, 25 bp, Homo sapien
ccatgcttgtctgcagccccaagct

SEQ ID NO: 4524928 - DNA, 25 bp, Homo sapien
catgcttgtctgcagccccaagctc

SEQ ID NO: 4524929 - DNA, 25 bp, Homo sapien
accatgcttgtctgcagccccaagc

SEQ ID NO: 4524930 - DNA, 25 bp, Homo sapien
caccatgcttgtctgcagccccaag

SEQ ID NO: 4524931 - DNA, 25 bp, Homo sapien
gggttgtgggcagcggccaggaatt

SEQ ID NO: 4524932 - DNA, 25 bp, Homo sapien
ttgtagttgctgtaagccgcaatac

SEQ ID NO: 4524933 - DNA, 25 bp, Homo sapien
gcccattgttgtagttgctgtaagc

SEQ ID NO: 4524934 - DNA, 25 bp, Homo sapien
ggaattttctgtgcccattgttgta

SEQ ID NO: 4524935 - DNA, 25 bp, Homo sapien
catctgctgcagctccagcagcttc

SEQ ID NO: 4524936 - DNA, 25 bp, Homo sapien
atctgctgcagctccagcagcttca

SEQ ID NO: 4524937 - DNA, 25 bp, Homo sapien
tctgctgcagctccagcagcttcac

SEQ ID NO: 4524938 - DNA, 25 bp, Homo sapien
cagccccctggttctgataaaaggt

SEQ ID NO: 4524939 - DNA, 25 bp, Homo sapien
cctggttctgataaaaggtgatggg

SEQ ID NO: 4524940 - DNA, 25 bp, Homo sapien
atctttggcacagccccctggttct

SEQ ID NO: 4524941 - DNA, 25 bp, Homo sapien
ttctgataaaaggtgatgggttttc

SEQ ID NO: 4524942 - DNA, 25 bp, Homo sapien
gtctgtctcgccagtggtggatgaa

SEQ ID NO: 4524943 - DNA, 25 bp, Homo sapien
gtggatgaagcagagttcttttttc

SEQ ID NO: 4524944 - DNA, 25 bp, Homo sapien
tgatggcgtctgtctcgccagtggt

SEQ ID NO: 4524945 - DNA, 25 bp, Homo sapien
tggatgaagcagagttcttttttca

SEQ ID NO: 4524946 - DNA, 25 bp, Homo sapien
ccttcaggtggtccataaagctgct

SEQ ID NO: 4524947 - DNA, 25 bp, Homo sapien
gtctgccttctccttcaggtggtcc

SEQ ID NO: 4524948 - DNA, 25 bp, Homo sapien
ctgccttctccttcaggtggtccat

SEQ ID NO: 4524949 - DNA, 25 bp, Homo sapien
ctccttcaggtggtccataaagctg

SEQ ID NO: 4524950 - DNA, 25 bp, Homo sapien
ctgccctcaggtggcattttcaagt

SEQ ID NO: 4524951 - DNA, 25 bp, Homo sapien
ctgagggcaagatgtgagcattctt

SEQ ID NO: 4524952 - DNA, 25 bp, Homo sapien
aggtcctctgggacactcggcatgg

SEQ ID NO: 4524953 - DNA, 25 bp, Homo sapien
tcctctgggacactcggcatgggct

SEQ ID NO: 4524954 - DNA, 25 bp, Homo sapien
ccaggtcctctgggacactcggcat

SEQ ID NO: 4524955 - DNA, 25 bp, Homo sapien
ctctgggacactcggcatgggctga

SEQ ID NO: 4524956 - DNA, 25 bp, Homo sapien
cacactcccactactggtcgatgtg

SEQ ID NO: 4524957 - DNA, 25 bp, Homo sapien
cttgctattccgcccaggcacactc

SEQ ID NO: 4524958 - DNA, 25 bp, Homo sapien
gctattccgcccaggcacactccca

SEQ ID NO: 4524959 - DNA, 25 bp, Homo sapien
cactcccactactggtcgatgtggg

SEQ ID NO: 4524960 - DNA, 25 bp, Homo sapien
tgctggctggccgcttccaggtgct

SEQ ID NO: 4524961 - DNA, 25 bp, Homo sapien
agctgggccgttagctgctggttct

SEQ ID NO: 4524962 - DNA, 25 bp, Homo sapien
gctggctggccgcttccaggtgctc

SEQ ID NO: 4524963 - DNA, 25 bp, Homo sapien
ctcagctgggccgttagctgctggt

SEQ ID NO: 4524964 - DNA, 25 bp, Homo sapien
ggtggagtttgccaggtcatccccc

SEQ ID NO: 4524965 - DNA, 25 bp, Homo sapien
gaaggggtggagtttgccaggtcat

SEQ ID NO: 4524966 - DNA, 25 bp, Homo sapien
gtggagtttgccaggtcatccccct

SEQ ID NO: 4524967 - DNA, 25 bp, Homo sapien
agaaggggtggagtttgccaggtca

SEQ ID NO: 4524968 - DNA, 25 bp, Homo sapien
tgcctgtacagcgcctccttctcac

SEQ ID NO: 4524969 - DNA, 25 bp, Homo sapien
aggtcagctgctgataggtggccac

SEQ ID NO: 4524970 - DNA, 25 bp, Homo sapien
gtcagctgctgataggtggccacgt

SEQ ID NO: 4524971 - DNA, 25 bp, Homo sapien
tcagctgctgataggtggccacgta

SEQ ID NO: 4524972 - DNA, 25 bp, Homo sapien
cagctgctgataggtggccacgtac

SEQ ID NO: 4524973 - DNA, 25 bp, Homo sapien
tgcaggtgacccaggtaatggtctg

SEQ ID NO: 4524974 - DNA, 25 bp, Homo sapien
gtgacccaggtaatggtctggctgc

SEQ ID NO: 4524975 - DNA, 25 bp, Homo sapien
caggtgacccaggtaatggtctggc

SEQ ID NO: 4524976 - DNA, 25 bp, Homo sapien
tgacccaggtaatggtctggctgct

SEQ ID NO: 4524977 - DNA, 25 bp, Homo sapien
ctgggtgtgagggcatgtggtggct

SEQ ID NO: 4524978 - DNA, 25 bp, Homo sapien
gcatgtggtggctggtttccagatt

SEQ ID NO: 4524979 - DNA, 25 bp, Homo sapien
gtgagggcatgtggtggctggtttc

SEQ ID NO: 4524980 - DNA, 25 bp, Homo sapien
ggcatgtggtggctggtttccagat

SEQ ID NO: 4524981 - DNA, 25 bp, Homo sapien
ggctccatgcctctagctaggatga

SEQ ID NO: 4524982 - DNA, 25 bp, Homo sapien
ataaggagcctgttataccactgtc

SEQ ID NO: 4524983 - DNA, 25 bp, Homo sapien
ctgcacctggcataaggagcctgtt

SEQ ID NO: 4524984 - DNA, 25 bp, Homo sapien
gcataaggagcctgttataccactg

SEQ ID NO: 4524985 - DNA, 25 bp, Homo sapien
aagcaagaaacaggactgccctggg

SEQ ID NO: 4524986 - DNA, 25 bp, Homo sapien
aggaagcaagaaacaggactgccct

SEQ ID NO: 4524987 - DNA, 25 bp, Homo sapien
ggcaggaagcaagaaacaggactgc

SEQ ID NO: 4524988 - DNA, 25 bp, Homo sapien
gaagcaagaaacaggactgccctgg

SEQ ID NO: 4524989 - DNA, 25 bp, Homo sapien
cccagcccttcttggatggggtgga

SEQ ID NO: 4524990 - DNA, 25 bp, Homo sapien
tcccctcccaagaggctgctgcccg

SEQ ID NO: 4524991 - DNA, 25 bp, Homo sapien
tggatggggtggaggtttccgtctc

SEQ ID NO: 4524992 - DNA, 25 bp, Homo sapien
cctcccagcccttcttggatggggt

SEQ ID NO: 4524993 - DNA, 25 bp, Homo sapien
ctcgccaagcttctcctgtagctcc

SEQ ID NO: 4524994 - DNA, 25 bp, Homo sapien
tgcagtgcgttcttgttctcattgt

SEQ ID NO: 4524995 - DNA, 25 bp, Homo sapien
caactgcagtgcgttcttgttctca

SEQ ID NO: 4524996 - DNA, 25 bp, Homo sapien
actgcagtgcgttcttgttctcatt

SEQ ID NO: 4524997 - DNA, 25 bp, Homo sapien
ctgctgaaggctcttgtgctgctcc

SEQ ID NO: 4524998 - DNA, 25 bp, Homo sapien
ctgggcctggagctctcctgccact

SEQ ID NO: 4524999 - DNA, 25 bp, Homo sapien
ctctagttccttcctcaggtgctgc

SEQ ID NO: 4525000 - DNA, 25 bp, Homo sapien
tctctctagttccttcctcaggtgc

SEQ ID NO: 4525001 - DNA, 25 bp, Homo sapien
gagctctcctgccactctctctagt

SEQ ID NO: 4525002 - DNA, 25 bp, Homo sapien
ctctacccgacgcatatcttgctgc

SEQ ID NO: 4525003 - DNA, 25 bp, Homo sapien
ctacccgacgcatatcttgctgctt

SEQ ID NO: 4525004 - DNA, 25 bp, Homo sapien
tctacccgacgcatatcttgctgct

SEQ ID NO: 4525005 - DNA, 25 bp, Homo sapien
ttctaattggacttgttgaaaagac

SEQ ID NO: 4525006 - DNA, 25 bp, Homo sapien
ctcatctctttctaattggacttgt

SEQ ID NO: 4525007 - DNA, 25 bp, Homo sapien
ttttagatgttcagaatactcatct

SEQ ID NO: 4525008 - DNA, 25 bp, Homo sapien
tagatgttcagaatactcatctctt

SEQ ID NO: 4525009 - DNA, 25 bp, Homo sapien
gctgcactttcagtagtgcctcctc

SEQ ID NO: 4525010 - DNA, 25 bp, Homo sapien
agctgcactttcagtagtgcctcct

SEQ ID NO: 4525011 - DNA, 25 bp, Homo sapien
tcagctgcactttcagtagtgcctc

SEQ ID NO: 4525012 - DNA, 25 bp, Homo sapien
cagctgcactttcagtagtgcctcc

SEQ ID NO: 4525013 - DNA, 25 bp, Homo sapien
ctccatctgcaaagccaggctccca

SEQ ID NO: 4525014 - DNA, 25 bp, Homo sapien
caggggatggggcaggtggttggac
